United States Patent Application Publication US 2006/0150283 A1 - sequence listing, part 8

SEQ ID NO: 27446 - DNA, 1303 bp, Arabidopsis thaliana
  misc_feature (1)..(1303): Ceres Seq. ID no. 12338064
  misc_feature (1)..(1303): Ortholog of  Ceres SEQ ID NO 13503499 as cited in SEQ ID NO 68684
aaaagtcccacttaatcacctctctagcttctcattccatttctatctctctcttttgttttctaagttgcttcaagagttttggatagtgtagcagagagattttaaaactaatgggttaagaaaaatttgttcttttgcgtgaagaagttgtcaacttctagacagattttctttttgaagtgttttcttgtcgaaattcttcttcttttggtcaaagaacgcaagattcttctgtagttcctctaaaaaaaatcctaatggagggttattcaagaaacggtgaaatttctccgaagctgcttgacttgatgattccacaagagagaagaaattcgtttcacgatgagaaaaactctgttttcaaaacagaggagaagaagcttgagctaaagcttggaccacctggtgaagaagatgatgatgaatcgataataagacacatgaagaaagagccaaaagacaaatctatcctctctctcgctggcaaacacttctctccttcttccaccaaaaccacatcccataaaagaactgctcctggtccagtggtgggatggcctccggttcgatccttcaggaagaatttagctagtggaagttcttcaaagcttggaaatgactcaaccacctccaatggtgttaccctcaagaaccaaaagtgtgatgatgctgctaagacaacagaaccaaagagacaaggaggcatgtttgtgaagatcaacatgtatggtgttcccattggtcgtaaagttgatctcagtgctcataatagctatgagcagttatctttcacagttgacaagctcttcagaggtcttcttgcagctcaaagagactttccatcatccatagaagatgaaaaaccaatcactggattattagatgggaatggagaatatactcttacatatgaagacaatgaaggagacaagatgcttgtaggagatgttccatggcaaatgtttgtgtcttcggtgaagaggctgcgtgtgattaaaacttctgagatttcttcagcattaacatatggaaatggtaagcaagagaaaatgagaagatgaagaaaaagatcttttacagcttttaaagaagtagagagatgttattaattgcattttgcctttaaactttgatgagtttttggtcttggaaaagtttctgatataagtctgatgtacattctggtttgttacatcttcttttggcttttgagatatcatagagttttgttggaactcaaagaccaaacagtgcaatgatgattttggggtcttgagtaaatttacaaacccttttaggc

SEQ ID NO: 27447 - protein, 267 aa, Arabidopsis thaliana
  peptide (1)..(267): Ceres Seq. ID no. 12338065
MEGYSRNGEISPKLLDLMIPQERRNSFHDEKNSVFKTEEKKLELKLGPPGEEDDDESIIRHMKKEPKDKSILSLAGKHFSPSSTKTTSHKRTAPGPVVGWPPVRSFRKNLASGSSSKLGNDSTTSNGVTLKNQKCDDAAKTTEPKRQGGMFVKINMYGVPIGRKVDLSAHNSYEQLSFTVDKLFRGLLAAQRDFPSSIEDEKPITGLLDGNGEYTLTYEDNEGDKMLVGDVPWQMFVSSVKRLRVIKTSEISSALTYGNGKQEKMRR

SEQ ID NO: 27448 - protein, 250 aa, Arabidopsis thaliana
  peptide (1)..(250): Ceres Seq. ID no. 12338066
MIPQERRNSFHDEKNSVFKTEEKKLELKLGPPGEEDDDESIIRHMKKEPKDKSILSLAGKHFSPSSTKTTSHKRTAPGPVVGWPPVRSFRKNLASGSSSKLGNDSTTSNGVTLKNQKCDDAAKTTEPKRQGGMFVKINMYGVPIGRKVDLSAHNSYEQLSFTVDKLFRGLLAAQRDFPSSIEDEKPITGLLDGNGEYTLTYEDNEGDKMLVGDVPWQMFVSSVKRLRVIKTSEISSALTYGNGKQEKMRR

SEQ ID NO: 27449 - protein, 206 aa, Arabidopsis thaliana
  peptide (1)..(206): Ceres Seq. ID no. 12338067
MKKEPKDKSILSLAGKHFSPSSTKTTSHKRTAPGPVVGWPPVRSFRKNLASGSSSKLGNDSTTSNGVTLKNQKCDDAAKTTEPKRQGGMFVKINMYGVPIGRKVDLSAHNSYEQLSFTVDKLFRGLLAAQRDFPSSIEDEKPITGLLDGNGEYTLTYEDNEGDKMLVGDVPWQMFVSSVKRLRVIKTSEISSALTYGNGKQEKMRR

SEQ ID NO: 27450 - DNA, 1120 bp, Arabidopsis thaliana
  misc_feature (1)..(1120): Ceres Seq. ID no. 12332925
  misc_feature (1)..(1120): Ortholog of  Ceres SEQ ID NO 15224924 as cited in SEQ ID NO 64061
aacgttacgagttcttcagtttctcagttctccaaacgacaacttcgagccaaaacaatggcggctactacattgtacaattcctgtcttcttcaaccgaagtatggcttcaccactcgccgcctaaaccagtctctcgttaaccctcttacgaatccaacaagagtttcggttttgtggaagagtcgtagagatgttattgcgaaagcttcgattgaaatggcggaatcgaattcgatatcttccgttgttgtcaattcctctggtcctatcatcgtgattgataattacgacagcttcacttacaatctctgccagtatatgggagagctagggtgccattttgaagtttaccgcaatgatgaacttacagttgaggagctgaaaagaaaaaagccaagaggattgttgatttctcctggacctggtacccctcaagactctgggatttccttgcaaactgttttggaactcggaccacttgttcctttatttggagtatgtatgggtttgcagtgtataggagaagcatttggaggaaagattgtgcggtcaccatttggtgttatgcatgggaaaagctcaatggttcactatgatgagaaaggagaagaaggcttgttctctggattatccaaccctttccttgtaggtagatatcacagtctcgtgatcgaaaaagattcatttcctagtgatgaactcgaggttacagcatggacagaagatggtctggttatggctgcccgtcacagaaagtacaagcatatacagggagttcaatttcatccggagagtattataacaaccgaaggcaagacaattgttcgcaatttcatcaaactcgtagagaaaaaggaatctgagaagctggcataggcttagcctgaatgagaaaatcagctgtgttcgattagtgcttccctgtaataatgtctgccaatgcaaaatgttccttggcatcttaccattgtttctacccggaatgtgtctagttctttcagttcaggacgaatctggaaaggctcgatagtattcagtgctgttggaacataacagtacatgagataagatctaatcagatctcactttcttattgtcatactggctttccttggtc

SEQ ID NO: 27451 - protein, 292 aa, Arabidopsis thaliana
  peptide (1)..(292): Ceres Seq. ID no. 12332926
NVTSSSVSQFSKRQLRAKTMAATTLYNSCLLQPKYGFTTRRLNQSLVNPLTNPTRVSVLWKSRRDVIAKASIEMAESNSISSVVVNSSGPIIVIDNYDSFTYNLCQYMGELGCHFEVYRNDELTVEELKRKKPRGLLISPGPGTPQDSGISLQTVLELGPLVPLFGVCMGLQCIGEAFGGKIVRSPFGVMHGKSSMVHYDEKGEEGLFSGLSNPFLVGRYHSLVIEKDSFPSDELEVTAWTEDGLVMAARHRKYKHIQGVQFHPESIITTEGKTIVRNFIKLVEKKESEKLA

SEQ ID NO: 27452 - protein, 273 aa, Arabidopsis thaliana
  peptide (1)..(273): Ceres Seq. ID no. 12332927
MAATTLYNSCLLQPKYGFTTRRLNQSLVNPLTNPTRVSVLWKSRRDVIAKASIEMAESNSISSVVVNSSGPIIVIDNYDSFTYNLCQYMGELGCHFEVYRNDELTVEELKRKKPRGLLISPGPGTPQDSGISLQTVLELGPLVPLFGVCMGLQCIGEAFGGKIVRSPFGVMHGKSSMVHYDEKGEEGLFSGLSNPFLVGRYHSLVIEKDSFPSDELEVTAWTEDGLVMAARHRKYKHIQGVQFHPESIITTEGKTIVRNFIKLVEKKESEKLA

SEQ ID NO: 27453 - protein, 219 aa, Arabidopsis thaliana
  peptide (1)..(219): Ceres Seq. ID no. 12332928
MAESNSISSVVVNSSGPIIVIDNYDSFTYNLCQYMGELGCHFEVYRNDELTVEELKRKKPRGLLISPGPGTPQDSGISLQTVLELGPLVPLFGVCMGLQCIGEAFGGKIVRSPFGVMHGKSSMVHYDEKGEEGLFSGLSNPFLVGRYHSLVIEKDSFPSDELEVTAWTEDGLVMAARHRKYKHIQGVQFHPESIITTEGKTIVRNFIKLVEKKESEKLA

SEQ ID NO: 27454 - DNA, 914 bp, Arabidopsis thaliana
  misc_feature (1)..(914): Ceres Seq. ID no. 12483437
  misc_feature (1)..(914): Ortholog of  Ceres SEQ ID NO 13646254 as cited in SEQ ID NO 20314
  misc_feature (1)..(914): Ortholog of  Ceres SEQ ID NO 13639196 as cited in SEQ ID NO 56195
  misc_feature (1)..(914): Ortholog of  Ceres SEQ ID NO 15179459 as cited in SEQ ID NO 0
atttttggttcctttaataatcatttctttcttttatataaacctaagatacgttccccatatttcactcactcaagaagacatcaagccatcaaaaatatatccatagaagcttcatcgaaatggcgaatcaagcagctgctgcagcattcttccttttcgctttagccgtcttctccaacttggagctctcagcttcttcacttgtcagtggcaagatctcttgccttgactgccaccacgatttcgacttctcaggcattaaggtcctccttaaatgcgacggagagaagaaacaaataaccgcgatggcagctgcagacggatctttccggtcagtgcttccaacggctgacaaaaaaggctccataaattgtcttgcaaagctcttgggaggccctgagcaactctatgctcacaaacacaacttggtctctgaattggtcaagtctaaacacgattccaaagttttaactacctcaaacccacttgccttctctctctcctgccccaaaccatcccgagatgatatcggaagtatgatcggagattccaagactattaattttccgggggcaggaggttttggattcccacctgccagcttctttcccttcttaccaatcattggtatcccatgatttaaataagtgttacttttaagtccttaaagacatatgtatacatatgttttgttgtttacgtgaatgaagccagccaagacaagacacaaatatttagcaaattacattactttgtttagtgagatataaggtttgtttatgtgctaagaaaatgttatttattggctttatgtagtttaaatcagttgcttttgtatcaagtttgtaataagaaggttgggttaatccaacaacatacgctttattgtgaacattcatgcttctatgatc

SEQ ID NO: 27455 - protein, 172 aa, Arabidopsis thaliana
  peptide (1)..(172): Ceres Seq. ID no. 12483438
MANQAAAAAFFLFALAVFSNLELSASSLVSGKISCLDCHHDFDFSGIKVLLKCDGEKKQITAMAAADGSFRSVLPTADKKGSINCLAKLLGGPEQLYAHKHNLVSELVKSKHDSKVLTTSNPLAFSLSCPKPSRDDIGSMIGDSKTINFPGAGGFGFPPASFFPFLPIIGIP

SEQ ID NO: 27456 - protein, 110 aa, Arabidopsis thaliana
  peptide (1)..(110): Ceres Seq. ID no. 12483439
MAAADGSFRSVLPTADKKGSINCLAKLLGGPEQLYAHKHNLVSELVKSKHDSKVLTTSNPLAFSLSCPKPSRDDIGSMIGDSKTINFPGAGGFGFPPASFFPFLPIIGIP

SEQ ID NO: 27457 - DNA, 1115 bp, Arabidopsis thaliana
  misc_feature (1)..(1115): Ceres Seq. ID no. 12421232
  misc_feature (1)..(1115): Ortholog of  Ceres SEQ ID NO 12472913 as cited in SEQ ID NO 115
  misc_feature (1)..(1115): Ortholog of  Ceres SEQ ID NO 15225086 as cited in SEQ ID NO 69009
aaacccatttgctcacttcgtcgtcgtctctctctctcactggtaaaaagcaaacaatgttgctccgtcgtgcaaaaacactacccaaaaccctacaaaacctccggttattctctccggcggcgaacgcagctctatccctagatcatatccaagaaacccaattaacttacctccctggattccctcgacccgatccaaaacacgcagagacgatcttagccgttccaaggtctgtctccggcaagagcatatcagcgaaagagcgtaaagcgggtcgggttccttcgatcatattcgaacaagaggatggacaacacggaggaaacaagaggcttatttcagttcagacgaatcagatcaggaagcttgtgaatcatttgggttactcttttttcctctctaggctctttgatgttgaggttcgagctgagattggttctgatgaggttattgagaaagtcagagccttgcctagagcgattcatttgcactctgggactgatgctccactgaatgtgacattcataagagcgcctccaggtgctttgttgaaagttgatatccctcttgtgttcattggagatgatgtttctcctggattgaagaaaggagcatctctgaatacgattaaaagaacagtaaagttcctatgcccagcagagattatcccaccatatatagaagtagatctaagccaattggatatcggacaaaagctagtaatgggagacctcaaggttcatccggctttaaagcttataaagtccaaagacgaacccattgttaaggtcgccggaggacgtgtcactgacacgcaaaagaaatcgtctgacacgcaaaagaaataacaccggtgagtcatattaactgcgattatccggtgcaatctccaaatgttgaccaaaaatgaatggatcgatcttcttagaactctaaaggtcctttcggatggaggtttctttatgtgttattattagtgttgccagaagatgaaatatttcctatcttttgattctacaatgcatttattttctattcacaatcaactacttttatttacagacctctaataagcgtagaaagggaaacaaaatttaatctcttttagattt

SEQ ID NO: 27458 - protein, 282 aa, Arabidopsis thaliana
  peptide (1)..(282): Ceres Seq. ID no. 12421233
THLLTSSSSLSLTGKKQTMLLRRAKTLPKTLQNLRLFSPAANAALSLDHIQETQLTYLPGFPRPDPKHAETILAVPRSVSGKSISAKERKAGRVPSIIFEQEDGQHGGNKRLISVQTNQIRKLVNHLGYSFFLSRLFDVEVRAEIGSDEVIEKVRALPRAIHLHSGTDAPLNVTFIRAPPGALLKVDIPLVFIGDDVSPGLKKGASLNTIKRTVKFLCPAEIIPPYIEVDLSQLDIGQKLVMGDLKVHPALKLIKSKDEPIVKVAGGRVTDTQKKSSDTQKK

SEQ ID NO: 27459 - protein, 264 aa, Arabidopsis thaliana
  peptide (1)..(264): Ceres Seq. ID no. 12421234
MLLRRAKTLPKTLQNLRLFSPAANAALSLDHIQETQLTYLPGFPRPDPKHAETILAVPRSVSGKSISAKERKAGRVPSIIFEQEDGQHGGNKRLISVQTNQIRKLVNHLGYSFFLSRLFDVEVRAEIGSDEVIEKVRALPRAIHLHSGTDAPLNVTFIRAPPGALLKVDIPLVFIGDDVSPGLKKGASLNTIKRTVKFLCPAEIIPPYIEVDLSQLDIGQKLVMGDLKVHPALKLIKSKDEPIVKVAGGRVTDTQKKSSDTQKK

SEQ ID NO: 27460 - DNA, 917 bp, Arabidopsis thaliana
  misc_feature (1)..(917): Ceres Seq. ID no. 12734710
  misc_feature (1)..(917): Ortholog of  Ceres SEQ ID NO 15172729 as cited in SEQ ID NO 56037
  misc_feature (1)..(917): Ortholog of  Ceres SEQ ID NO 13584899 as cited in SEQ ID NO 64830
  misc_feature (1)..(917): Ortholog of  Ceres SEQ ID NO 13654441 as cited in SEQ ID NO 67814
  misc_feature (1)..(917): Ortholog of  Ceres SEQ ID NO 13596128 as cited in SEQ ID NO 67831
  misc_feature (1)..(917): Ortholog of  Ceres SEQ ID NO 12585194 as cited in SEQ ID NO 68878
  misc_feature (1)..(917): Ortholog of  Ceres SEQ ID NO 12589186 as cited in SEQ ID NO 0
cacaaaaccagaaaaaactacatttctaacatatagaagaaacagagaaaaagagagagagacccctaatggctgagaaagaagaagtgaagcttttggggatatgggcgagcccttttagccgtcgggtcgagatggctctcaaactcaaaggcataccgtacgagtacgtggaagagatactggagaacaaaagccctttgcttcttgctcttaaccctattcacaagaaagtccctgttcttgtccacaatggtaaaaccattctcgagtctcatgtgattcttgaatacatcgatgagacttggccacaaaatccaattctccctcaagatccttatgaaagatccaaagctcgtttctttgctaaactcgtcgatgaacagattatgaacgtggggtttatatcaatggcaagagcagacgagaaaggaagagaagttttagccgagcaggtaagagaactgattatgtatctcgagaaagaacttgtcggaaaagattacttcggaggcaagactgtcggattcttggactttgtcgccggaagtttaattccgttttgtttggagagaggttgggaaggaataggattggaagtgattacagaggagaagtttccagagttcaagagatgggttaggaatttggagaaggttgagattgttaaagattgtgttccaccaagagaggaacatgtagaacacatgaactatatggcagagagagtgagatcttcttaagaaaacaaatcatgtttagttcttgatcatgcaatgtttgtatggttatgttgttgtttattttattgaatatctttgtatgttgtgtggttgagaagtgaggttttatcatcatctctcacgttatcttatttggtcccagccactatttagaattaatggtaaagctttggc

SEQ ID NO: 27461 - protein, 224 aa, Arabidopsis thaliana
  peptide (1)..(224): Ceres Seq. ID no. 12734711
MAEKEEVKLLGIWASPFSRRVEMALKLKGIPYEYVEEILENKSPLLLALNPIHKKVPVLVHNGKTILESHVILEYIDETWPQNPILPQDPYERSKARFFAKLVDEQIMNVGFISMARADEKGREVLAEQVRELIMYLEKELVGKDYFGGKTVGFLDFVAGSLIPFCLERGWEGIGLEVITEEKFPEFKRWVRNLEKVEIVKDCVPPREEHVEHMNYMAERVRSS

SEQ ID NO: 27462 - protein, 202 aa, Arabidopsis thaliana
  peptide (1)..(202): Ceres Seq. ID no. 12734712
MALKLKGIPYEYVEEILENKSPLLLALNPIHKKVPVLVHNGKTILESHVILEYIDETWPQNPILPQDPYERSKARFFAKLVDEQIMNVGFISMARADEKGREVLAEQVRELIMYLEKELVGKDYFGGKTVGFLDFVAGSLIPFCLERGWEGIGLEVITEEKFPEFKRWVRNLEKVEIVKDCVPPREEHVEHMNYMAERVRSS

SEQ ID NO: 27463 - protein, 117 aa, Arabidopsis thaliana
  peptide (1)..(117): Ceres Seq. ID no. 12734713
MNVGFISMARADEKGREVLAEQVRELIMYLEKELVGKDYFGGKTVGFLDFVAGSLIPFCLERGWEGIGLEVITEEKFPEFKRWVRNLEKVEIVKDCVPPREEHVEHMNYMAERVRSS

SEQ ID NO: 27464 - DNA, 1169 bp, Arabidopsis thaliana
  misc_feature (1)..(1169): Ceres Seq. ID no. 13490688
  misc_feature (1)..(1169): Ortholog of  Ceres SEQ ID NO 12616162 as cited in SEQ ID NO 63260
aaaccaaggaaagaaaacgagagaggtacgtagaagaaaatggctgccttatcagagaaagaggctgaagcttatctcgacgcaaggcctagatatccgatcgattggtttaagaaaattgccgcacggacacaggaccacaaatttgcttgggatgttggaactggtaatgggcaggctgctattgggcttgtggagcattacgagaatgtagtggctaccgatataaacgaagcacaacttcaacgagcaatcaaacactcaagaatcagttaccatcacactccaacaacgatatcagaagatgagatggtggatctactcgggggagaaaactccgtggatctcatagttgctgctcaagctgtccatttcttcgacctcaacgtattttacaatgttgcaaaacgtgttcttcgtaaagaaggaggcctaatcgccgtttgggtatacaacgatatcattatctcgcatgagatcgatcccataatgaagcgccttgtcgactctactctaccttttagaactcctattatgaatttagcatttgacggttacaagacattgacatttccttttgagaccatagggatgggttccgaaggaaagcctattactctagacattccgcataaactttcgcttaaagggtttatagggttcttgagatcgtggcagcccgcgatgaaggctaaggaaaaaggagtagagcttataaatgaagatctaataaccaaatttgaggaggcttggggtgatgaaacccaagtgaaagatgttttctacaaggctcacatgattgttggaaaaattccggaagaaaaattcgaatctgatcaagtactgtctaacaaaggtcgtctcttgcttgaaacggaggttgggagaaaccagaaaagaccacaaccatccgatgaaggagacagacaaagtaagaaacaaaatacaagtgaagatgacgcatgcaaagataaaccatcgtcagtttttagtactcattacaggttttaaccaaaaatagatattaaaccatttgagaaagcaataactcttatttggatatcagttcattattccgtattaaagccgttggtttttgtacaactgagtaataaagttcatgttgagtatgtcaattattggatttgggagttccaaagaaaattttg

SEQ ID NO: 27465 - protein, 323 aa, Arabidopsis thaliana
  peptide (1)..(323): Ceres Seq. ID no. 13490689
MAALSEKEAEAYLDARPRYPIDWFKKIAARTQDHKFAWDVGTGNGQAAIGLVEHYENVVATDINEAQLQRAIKHSRISYHHTPTTISEDEMVDLLGGENSVDLIVAAQAVHFFDLNVFYNVAKRVLRKEGGLIAVWVYNDIIISHEIDPIMKRLVDSTLPFRTPIMNLAFDGYKTLTFPFETIGMGSEGKPITLDIPHKLSLKGFIGFLRSWQPAMKAKEKGVELINEDLITKFEEAWGDETQVKDVFYKAHMIVGKIPEEKFESDQVLSNKGRLLLETEVGRNQKRPQPSDEGDRQSKKQNTSEDDACKDKPSSVFSTHYRF

SEQ ID NO: 27466 - protein, 233 aa, Arabidopsis thaliana
  peptide (1)..(233): Ceres Seq. ID no. 13490690
MVDLLGGENSVDLIVAAQAVHFFDLNVFYNVAKRVLRKEGGLIAVWVYNDIIISHEIDPIMKRLVDSTLPFRTPIMNLAFDGYKTLTFPFETIGMGSEGKPITLDIPHKLSLKGFIGFLRSWQPAMKAKEKGVELINEDLITKFEEAWGDETQVKDVFYKAHMIVGKIPEEKFESDQVLSNKGRLLLETEVGRNQKRPQPSDEGDRQSKKQNTSEDDACKDKPSSVFSTHYRF

SEQ ID NO: 27467 - protein, 173 aa, Arabidopsis thaliana
  peptide (1)..(173): Ceres Seq. ID no. 13490691
MKRLVDSTLPFRTPIMNLAFDGYKTLTFPFETIGMGSEGKPITLDIPHKLSLKGFIGFLRSWQPAMKAKEKGVELINEDLITKFEEAWGDETQVKDVFYKAHMIVGKIPEEKFESDQVLSNKGRLLLETEVGRNQKRPQPSDEGDRQSKKQNTSEDDACKDKPSSVFSTHYRF

SEQ ID NO: 27468 - DNA, 1399 bp, Arabidopsis thaliana
  misc_feature (1)..(1399): Ceres Seq. ID no. 12335133
  misc_feature (1)..(1399): Ortholog of  Ceres SEQ ID NO 14313666 as cited in SEQ ID NO 54618
  misc_feature (1)..(1399): Ortholog of  Ceres SEQ ID NO 13595351 as cited in SEQ ID NO 55934
aacatttcctgaaaatctaactttcacccactcaccatcttttcttctctctttccccataaaaaaaaacaaaaacaaaacacaactctgtttctctcatcttaaaattcatgtaaaaaaaatctacaaatcaaagagagaaacagagtaaagagaaagagaagaagatggcgcggaaatactttcagagagaagttttgccggtaacggctttggtaataatggaatgtgcaaacgttggtttaaacactctgtttaaagcagcaactttgaaaggcatgagctttcatgtcttcatcgtttactcttatggtctcgctgctctgcttcttcttccttctctgttttgctctttcagatcaagaactcttccaccgatgaatttctctattctctacaaaatcgtgctcttagggattattggatgctgttcaaacataatgggatacacagggataaattatagttctccaacacttgcttctgcaatcagcaacctcactcctgctttcaccttcttgcttgcagtcgttttcaggatggatagtgtgtcttttaagagaacaagtagtgtggctaaaatgttaggaaccgttgtttctattggaggtgcatttatagtgactctttataatggtcctgttgtgattgctaaatcgccaccgtctgtttctttgcgatcgcaatcgactaaccctaattggatacttggtgcgggtttccttgcggtcgagtatttctgtgttccattgtggtacattgttcagactcaaatcatgagagagtatccggccgagtttaccgttatttgcttttatagcattggtgttatcttttggaccgcgctagtcacattgttcactgaagggaatgacttgggtgcatggaagataaaaccgaatatagctttagtgtcgatcgtttgctcgggattgtttggatcttgcataaacaatactatccacacgtgggcattgcggatcaaggggcctttatttgttgcaatgttcaagccattgtctattgcaattgctgttgcaatgggagttatcttcctgcgagattctctctacatcggcagcttgatcggggcaacggtaataacaatcgggttttacacggtaatgtggggaaaagccaaggaagtggccttggtcgaagatgataacaaggctaaccacgaggaggccaatgaagctgaccttgattctccatcgggttcacaggaggctcctctcttggaaagttacaagaacgatgaacatgtatgagtatcatcaactagtgaagatcacgctatatatatatgtgtgaaaaaattcttatgtgaattgtctttgtaatttatttgatgagacaaatgtgatctttaattttaggatccaagtgtttgctaatc

SEQ ID NO: 27469 - protein, 367 aa, Arabidopsis thaliana
  peptide (1)..(367): Ceres Seq. ID no. 12335134
MARKYFQREVLPVTALVIMECANVGLNTLFKAATLKGMSFHVFIVYSYGLAALLLLPSLFCSFRSRTLPPMNFSILYKIVLLGIIGCCSNIMGYTGINYSSPTLASAISNLTPAFTFLLAVVFRMDSVSFKRTSSVAKMLGTVVSIGGAFIVTLYNGPVVIAKSPPSVSLRSQSTNPNWILGAGFLAVEYFCVPLWYIVQTQIMREYPAEFTVICFYSIGVIFWTALVTLFTEGNDLGAWKIKPNIALVSIVCSGLFGSCINNTIHTWALRIKGPLFVAMFKPLSIAIAVAMGVIFLRDSLYIGSLIGATVITIGFYTVMWGKAKEVALVEDDNKANHEEANEADLDSPSGSQEAPLLESYKNDEHV

SEQ ID NO: 27470 - protein, 349 aa, Arabidopsis thaliana
  peptide (1)..(349): Ceres Seq. ID no. 12335135
MECANVGLNTLFKAATLKGMSFHVFIVYSYGLAALLLLPSLFCSFRSRTLPPMNFSILYKIVLLGIIGCCSNIMGYTGINYSSPTLASAISNLTPAFTFLLAVVFRMDSVSFKRTSSVAKMLGTVVSIGGAFIVTLYNGPVVIAKSPPSVSLRSQSTNPNWILGAGFLAVEYFCVPLWYIVQTQIMREYPAEFTVICFYSIGVIFWTALVTLFTEGNDLGAWKIKPNIALVSIVCSGLFGSCINNTIHTWALRIKGPLFVAMFKPLSIAIAVAMGVIFLRDSLYIGSLIGATVITIGFYTVMWGKAKEVALVEDDNKANHEEANEADLDSPSGSQEAPLLESYKNDEHV

SEQ ID NO: 27471 - protein, 330 aa, Arabidopsis thaliana
  peptide (1)..(330): Ceres Seq. ID no. 12335136
MSFHVFIVYSYGLAALLLLPSLFCSFRSRTLPPMNFSILYKIVLLGIIGCCSNIMGYTGINYSSPTLASAISNLTPAFTFLLAVVFRMDSVSFKRTSSVAKMLGTVVSIGGAFIVTLYNGPVVIAKSPPSVSLRSQSTNPNWILGAGFLAVEYFCVPLWYIVQTQIMREYPAEFTVICFYSIGVIFWTALVTLFTEGNDLGAWKIKPNIALVSIVCSGLFGSCINNTIHTWALRIKGPLFVAMFKPLSIAIAVAMGVIFLRDSLYIGSLIGATVITIGFYTVMWGKAKEVALVEDDNKANHEEANEADLDSPSGSQEAPLLESYKNDEHV

SEQ ID NO: 27472 - DNA, 1653 bp, Arabidopsis thaliana
  misc_feature (1)..(1653): Ceres Seq. ID no. 12738253
  misc_feature (1)..(1653): Ortholog of  Ceres SEQ ID NO 15176095 as cited in SEQ ID NO 59699
tctgctggtaatagtggtcctactagagcttctgttgctaatgttgctccttgggttatgactgttggtgctggtactttagatagagattttccggcttttgcgaatctcggtaacgggaaacgacttaccggtgtttcgctgtatagcggtgtgggaatggggacgaagccgcttgaattggtttataataaagggaatagtagttcgagtaatctttgtttacctggttcgcttgattcgagtattgttcgtgggaagattgttgtttgtgatagaggtgttaatgctagagttgagaaaggagctgtggttagagatgctggtggtttagggatgataatggcgaatactgctgcgagtggagaggagcttgtggcggatagtcatttgcttcccgcgatcgctgtagggaagaagactggtgatttacttagggagtatgttaagtcagattctaatccaactgctcttcttgtttttaaaggaacggttcttgacgttaagccgtctcctgtggttgctgcttttagctcgagaggtcctaatactgttactcctgaaatcttgaagcctgatgttattggtcctggagtgaacattttggctggttggtctgacgctattggtcctactggtcttgacaaggactctaggaggactcagttcaacatcatgtcaggtacgtcaatgtcatgcccacacatcagtggtttagcgggtcttttgaaagcagctcaccctgagtggagtccgagtgctatcaaatcagctctcatgactacagcttacgttcttgacaacaccaacgctcctctccatgatgctgcagacaacagcctatctaacccatatgctcatggctcgggccatgtagatccccaaaaggctctctcaccaggtcttgtctacgacatctcaaccgaggaatacatcaggtttttgtgctctctagactacacagtcgatcacattgttgcgattgtgaagcgacctagcgttaactgctcgaagaagttctcagatcctggtcagctcaactacccaagtttctcggttttgtttgggggtaaaagagttgtgcggtacactcgggaagtaacaaatgttggtgcagcaagctcggtttacaaagtgacggttaatggagctcctagtgtcggaatctctgttaaaccatcgaaactttcgtttaaaagcgtgggagagaagaagaggtacacagtcacgtttgttagcaagaaaggagtgagtatgacgaacaaggctgagtttggttccatcacttggagcaatccgcagcacgaagtgagaagtcccgttgcattctcttggaaccggttttgataaaaaatctaacatccctagtgatgatgttttctatttaagttatcttgattgggtttaggctaaaccaaagcccatcatgagccataagtagtgggaagtgttcttgtgtggttaggtttgagtcattgagtgtgtaggtgaaagcatcccaaaaaaagttagggatgataaaagaaaatgttgtcaggaaaagaacgttgatgtcgtcatatgtagtgcttcaagtttcttcattttaaccatcatactgatgtaatagtatctttcaaataagcaacaaaagtaatgtgacataatgtcatc

SEQ ID NO: 27473 - protein, 448 aa, Arabidopsis thaliana
  peptide (1)..(448): Ceres Seq. ID no. 12738254
SAGNSGPTRASVANVAPWVMTVGAGTLDRDFPAFANLGNGKRLTGVSLYSGVGMGTKPLELVYNKGNSSSSNLCLPGSLDSSIVRGKIVVCDRGVNARVEKGAVVRDAGGLGMIMANTAASGEELVADSHLLPAIAVGKKTGDLLREYVKSDSNPTALLVFKGTVLDVKPSPVVAAFSSRGPNTVTPEILKPDVIGPGVNILAGWSDAIGPTGLDKDSRRTQFNIMSGTSMSCPHISGLAGLLKAAHPEWSPSAIKSALMTTAYVLDNTNAPLHDAADNSLSNPYAHGSGHVDPQKALSPGLVYDISTEEYIRFLCSLDYTVDHIVAIVKRPSVNCSKKFSDPGQLNYPSFSVLFGGKRVVRYTREVTNVGAASSVYKVTVNGAPSVGISVKPSKLSFKSVGEKKRYTVTFVSKKGVSMTNKAEFGSITWSNPQHEVRSPVAFSWNRF

SEQ ID NO: 27474 - protein, 429 aa, Arabidopsis thaliana
  peptide (1)..(429): Ceres Seq. ID no. 12738255
MTVGAGTLDRDFPAFANLGNGKRLTGVSLYSGVGMGTKPLELVYNKGNSSSSNLCLPGSLDSSIVRGKIVVCDRGVNARVEKGAVVRDAGGLGMIMANTAASGEELVADSHLLPAIAVGKKTGDLLREYVKSDSNPTALLVFKGTVLDVKPSPVVAAFSSRGPNTVTPEILKPDVIGPGVNILAGWSDAIGPTGLDKDSRRTQFNIMSGTSMSCPHISGLAGLLKAAHPEWSPSAIKSALMTTAYVLDNTNAPLHDAADNSLSNPYAHGSGHVDPQKALSPGLVYDISTEEYIRFLCSLDYTVDHIVAIVKRPSVNCSKKFSDPGQLNYPSFSVLFGGKRVVRYTREVTNVGAASSVYKVTVNGAPSVGISVKPSKLSFKSVGEKKRYTVTFVSKKGVSMTNKAEFGSITWSNPQHEVRSPVAFSWNRF

SEQ ID NO: 27475 - protein, 395 aa, Arabidopsis thaliana
  peptide (1)..(395): Ceres Seq. ID no. 12738256
MGTKPLELVYNKGNSSSSNLCLPGSLDSSIVRGKIVVCDRGVNARVEKGAVVRDAGGLGMIMANTAASGEELVADSHLLPAIAVGKKTGDLLREYVKSDSNPTALLVFKGTVLDVKPSPVVAAFSSRGPNTVTPEILKPDVIGPGVNILAGWSDAIGPTGLDKDSRRTQFNIMSGTSMSCPHISGLAGLLKAAHPEWSPSAIKSALMTTAYVLDNTNAPLHDAADNSLSNPYAHGSGHVDPQKALSPGLVYDISTEEYIRFLCSLDYTVDHIVAIVKRPSVNCSKKFSDPGQLNYPSFSVLFGGKRVVRYTREVTNVGAASSVYKVTVNGAPSVGISVKPSKLSFKSVGEKKRYTVTFVSKKGVSMTNKAEFGSITWSNPQHEVRSPVAFSWNRF

SEQ ID NO: 27476 - DNA, 584 bp, Arabidopsis thaliana
  misc_feature (1)..(584): Ceres Seq. ID no. 13493868
  misc_feature (1)..(584): Ortholog of  Ceres SEQ ID NO 12635789 as cited in SEQ ID NO 0
aagtgattaagcttatgcagagtttcaaatccaaggagtatgttagggagacaattgcctggatgcattactattggtttttgaccaatgaagggatcgagttcttgagaacttatcttaatcttccatctgatgttgttcctgctactttgaagaagtcagctaagcctggtggtcgtccatttggtggcccacctggtgatcgctcaagaggacctcgccatgaaggaggagaccgtcccaggtttggtgaccgtgatgggtaccgtgcaggtcctcgagctggtggtgagtttggaggtgaaaagggtggagctcctgcagattaccagccatctttccaaggaagtgggcgtggttttggccgtggtgctggtggctacagcgcagctgcaccatctggttcaggtttgccttgaaaaagaaatgtctttaggtgacagtaagaccatggaggagttttcagctttaaattttgcttttgtaattcagattccggaatccttcataatctctatctgagtttagttttgttgttgaatcaaacatccgatttaaagttatgttcattccatcttctcttc

SEQ ID NO: 27477 - protein, 138 aa, Arabidopsis thaliana
  peptide (1)..(138): Ceres Seq. ID no. 15222907
VIKLMQSFKSKEYVRETIAWMHYYWFLTNEGIEFLRTYLNLPSDVVPATLKKSAKPGGRPFGGPPGDRSRGPRHEGGDRPRFGDRDGYRAGPRAGGEFGGEKGGAPADYQPSFQGSGRGFGRGAGGYSAAAPSGSGLP

SEQ ID NO: 27478 - protein, 134 aa, Arabidopsis thaliana
  peptide (1)..(134): Ceres Seq. ID no. 15222908
MQSFKSKEYVRETIAWMHYYWFLTNEGIEFLRTYLNLPSDVVPATLKKSAKPGGRPFGGPPGDRSRGPRHEGGDRPRFGDRDGYRAGPRAGGEFGGEKGGAPADYQPSFQGSGRGFGRGAGGYSAAAPSGSGLP

SEQ ID NO: 27479 - protein, 118 aa, Arabidopsis thaliana
  peptide (1)..(118): Ceres Seq. ID no. 15222909
MHYYWFLTNEGIEFLRTYLNLPSDVVPATLKKSAKPGGRPFGGPPGDRSRGPRHEGGDRPRFGDRDGYRAGPRAGGEFGGEKGGAPADYQPSFQGSGRGFGRGAGGYSAAAPSGSGLP

SEQ ID NO: 27480 - DNA, 1376 bp, Arabidopsis thaliana
  misc_feature (1)..(1376): Ceres Seq. ID no. 13575406
  misc_feature (1)..(1376): Ortholog of  Ceres SEQ ID NO 14301568 as cited in SEQ ID NO 66744
aaaacgaatttttttaaagaaaataaaaatcaagtctttctcttcgtctatctctctctctgctcagactctctggtgttgaagactaatcactgaagcagatctattatacggaggacgaagaagatgtatgagcagcagcaacatttcatggatttgcaaagcgattctgggtttggggacgatagctcctggctcgccggcgatgacgatcttcgtctctctcctcaccaatctgccgccggtacgaactccggcaatgagaatctagatcgtcgtctcttaaaagatctcgtcgagatggttccccttatcgagcattacatggaacataaagaaaggagttcgtttaagcggcgtggttccatgatctacactaagatgccttcaaaagaatccttgtcccgaaggggaagaaatgcttctcaaacagtcccaggaagaaagaagagagaccaagagggaaatgacgatgttatgaacaattctagggaagatgatgaaaacgcaaaggctttggctggtgcagaaaaggaagaaatgagtagactaagagagcaagtgaatgacttgcagacaaaattatcggagaaagaagaggttttaaagtcaatggagatgtcaaagaatcaggtaaacgagatacaagaaaagcttgaagcaacaaatcgattggttgctgagaaggatatgttgatcaagtctatgcagttacaattatcggacacaaagatcaaacttgctgacaagcaagcagcccttgagaagactcaatgggaagcaaagacaacaggaacaagagcaatcaagcttcaagaacagctagatgctgttgaaggagacatctctacattcacacgggtgttcgaaactttggcaaaaactgattccaagaaacccgatagggattatgatgcagtcccatatgaatttgatcatcttccatatttagacgatgtagatgaaactgacctgaggaaaatggaagaagcaagattagcttatgtagcagcagtgaataccgcaaaggaacgagaagatgaagaatctctggtcatggctgctcaagctcgagcttacctgcaatcactagcctttacatattaatcatcttcaggtacttacttctttataggatatttctctccttgggttgttttaggagtatgtagatttgtaccatgaagaaattggagaagaaaagcttatgtgagaaacataaagttatggttttcccctaaaccaatgaacgcaactctgagtttttgtttcttcatttgagcatgtatgtatctatatgatcttctacattattgggaacataaaatcagattgtataatgcatctgttcaatagtttactttagatatactctt

SEQ ID NO: 27481 - protein, 326 aa, Arabidopsis thaliana
  peptide (1)..(326): Ceres Seq. ID no. 13575407
MYEQQQHFMDLQSDSGFGDDSSWLAGDDDLRLSPHQSAAGTNSGNENLDRRLLKDLVEMVPLIEHYMEHKERSSFKRRGSMIYTKMPSKESLSRRGRNASQTVPGRKKRDQEGNDDVMNNSREDDENAKALAGAEKEEMSRLREQVNDLQTKLSEKEEVLKSMEMSKNQVNEIQEKLEATNRLVAEKDMLIKSMQLQLSDTKIKLADKQAALEKTQWEAKTTGTRAIKLQEQLDAVEGDISTFTRVFETLAKTDSKKPDRDYDAVPYEFDHLPYLDDVDETDLRKMEEARLAYVAAVNTAKEREDEESLVMAAQARAYLQSLAFTY

SEQ ID NO: 27482 - protein, 318 aa, Arabidopsis thaliana
  peptide (1)..(318): Ceres Seq. ID no. 13575408
MDLQSDSGFGDDSSWLAGDDDLRLSPHQSAAGTNSGNENLDRRLLKDLVEMVPLIEHYMEHKERSSFKRRGSMIYTKMPSKESLSRRGRNASQTVPGRKKRDQEGNDDVMNNSREDDENAKALAGAEKEEMSRLREQVNDLQTKLSEKEEVLKSMEMSKNQVNEIQEKLEATNRLVAEKDMLIKSMQLQLSDTKIKLADKQAALEKTQWEAKTTGTRAIKLQEQLDAVEGDISTFTRVFETLAKTDSKKPDRDYDAVPYEFDHLPYLDDVDETDLRKMEEARLAYVAAVNTAKEREDEESLVMAAQARAYLQSLAFTY

SEQ ID NO: 27483 - protein, 268 aa, Arabidopsis thaliana
  peptide (1)..(268): Ceres Seq. ID no. 13575409
MVPLIEHYMEHKERSSFKRRGSMIYTKMPSKESLSRRGRNASQTVPGRKKRDQEGNDDVMNNSREDDENAKALAGAEKEEMSRLREQVNDLQTKLSEKEEVLKSMEMSKNQVNEIQEKLEATNRLVAEKDMLIKSMQLQLSDTKIKLADKQAALEKTQWEAKTTGTRAIKLQEQLDAVEGDISTFTRVFETLAKTDSKKPDRDYDAVPYEFDHLPYLDDVDETDLRKMEEARLAYVAAVNTAKEREDEESLVMAAQARAYLQSLAFTY

SEQ ID NO: 27484 - DNA, 1433 bp, Arabidopsis thaliana
  misc_feature (1)..(1433): Ceres Seq. ID no. 12324155
  misc_feature (1)..(1433): Ortholog of  Ceres SEQ ID NO 14310350 as cited in SEQ ID NO 20670
  misc_feature (1)..(1433): Ortholog of  Ceres SEQ ID NO 15177648 as cited in SEQ ID NO 58917
gaaaaagagagcgagcgatgaacagtatcttctccattgacgatttctccgatcctttctgggaaactcctccgattcctctcaatcccgactcttctaagcctgttacggcggatgaagttagccagagtcaaccggaatggactttcgagatgtttctcgaagagatttcttcgtcggcggtgagctctgagccacttggtaacaacaacaacgcgatcgtcggtgtttcttcggcgcaatctcttccttctgtttccggacagaatgatttcgaggatgatagtcgatttcgtgatcgcgattcgggaaatttggattgtgctgctcccatgacgacgaagacggtgattgttgattccgatgattatcgtcgtgttcttaagaacaagcttgagactgagtgcgctactgttgtttctcttcgggttgggtctgtgaagcctgaagattcgactagttctccagaaactcaacttcaaccagttcaatccagtcctcttactcaaggagaacttggtgttacttcttccttaccagctgaggtgaaaaaaactggtgtatcaatgaagcaggttactagtggatcgtcgagagaatattctgatgacgaggaccttgatgaagagaatgaaaccaccggttccttgaagccagaggacgttaaaaaatctagaaggatgctgtcaaatcgtgagtcagctaggcgatctagaaggagaaagcaggagcaaacaagtgacctcgaaacacaggttaatgatctaaaaggtgagcattcatcacttcttaaacaactgagcaacatgaatcacaagtatgacgaggctgctgttggcaatagaatactaaaggctgacattgagacattaagagctaaggtgaaaatggcggaagaaaccgtgaagagagtaacaggaatgaatccgatgcttctcggaagatcaagtggacataacaacaacaacagaatgccaataactggtaacaacaggatggattcttctagcattattccagcttatcaaccacactcaaacctaaaccatatgtcaaaccaaaacatcgggatcccaaccattctacctccaagactcggaaacaatttcgctgctcctccatcccaaaccagctctcccttgcagagaattagaaatgggcaaaatcaccatgttactccaagcgccaacccgtatggctggaataccgaacctcagaacgattcagcatggccgaaaaaatgcgtggactgatcaaacaagaagcgggtttcgcactatattaatgtctatgcatctgtaatttgtaagtgttattaagttacgaatcatgagaaaacatcttgtgaaaatacagtctcatggcttatatatatatataagctctgtcttataacattacaagattcttatttgagaatcgtctttctattt

SEQ ID NO: 27485 - protein, 416 aa, Arabidopsis thaliana
  peptide (1)..(416): Ceres Seq. ID no. 12324156
KRERAMNSIFSIDDFSDPFWETPPIPLNPDSSKPVTADEVSQSQPEWTFEMFLEEISSSAVSSEPLGNNNNAIVGVSSAQSLPSVSGQNDFEDDSRFRDRDSGNLDCAAPMTTKTVIVDSDDYRRVLKNKLETECATVVSLRVGSVKPEDSTSSPETQLQPVQSSPLTQGELGVTSSLPAEVKKTGVSMKQVTSGSSREYSDDEDLDEENETTGSLKPEDVKKSRRMLSNRESARRSRRRKQEQTSDLETQVNDLKGEHSSLLKQLSNMNHKYDEAAVGNRILKADIETLRAKVKMAEETVKRVTGMNPMLLGRSSGHNNNNRMPITGNNRMDSSSIIPAYQPHSNLNHMSNQNIGIPTILPPRLGNNFAAPPSQTSSPLQRIRNGQNHHVTPSANPYGWNTEPQNDSAWPKKCVD

SEQ ID NO: 27486 - protein, 411 aa, Arabidopsis thaliana
  peptide (1)..(411): Ceres Seq. ID no. 12324157
MNSIFSIDDFSDPFWETPPIPLNPDSSKPVTADEVSQSQPEWTFEMFLEEISSSAVSSEPLGNNNNAIVGVSSAQSLPSVSGQNDFEDDSRFRDRDSGNLDCAAPMTTKTVIVDSDDYRRVLKNKLETECATVVSLRVGSVKPEDSTSSPETQLQPVQSSPLTQGELGVTSSLPAEVKKTGVSMKQVTSGSSREYSDDEDLDEENETTGSLKPEDVKKSRRMLSNRESARRSRRRKQEQTSDLETQVNDLKGEHSSLLKQLSNMNHKYDEAAVGNRILKADIETLRAKVKMAEETVKRVTGMNPMLLGRSSGHNNNNRMPITGNNRMDSSSIIPAYQPHSNLNHMSNQNIGIPTILPPRLGNNFAAPPSQTSSPLQRIRNGQNHHVTPSANPYGWNTEPQNDSAWPKKCVD

SEQ ID NO: 27487 - protein, 366 aa, Arabidopsis thaliana
  peptide (1)..(366): Ceres Seq. ID no. 12324158
MFLEEISSSAVSSEPLGNNNNAIVGVSSAQSLPSVSGQNDFEDDSRFRDRDSGNLDCAAPMTTKTVIVDSDDYRRVLKNKLETECATVVSLRVGSVKPEDSTSSPETQLQPVQSSPLTQGELGVTSSLPAEVKKTGVSMKQVTSGSSREYSDDEDLDEENETTGSLKPEDVKKSRRMLSNRESARRSRRRKQEQTSDLETQVNDLKGEHSSLLKQLSNMNHKYDEAAVGNRILKADIETLRAKVKMAEETVKRVTGMNPMLLGRSSGHNNNNRMPITGNNRMDSSSIIPAYQPHSNLNHMSNQNIGIPTILPPRLGNNFAAPPSQTSSPLQRIRNGQNHHVTPSANPYGWNTEPQNDSAWPKKCVD

SEQ ID NO: 27488 - DNA, 1411 bp, Arabidopsis thaliana
  misc_feature (1)..(1411): Ceres Seq. ID no. 12338291
  misc_feature (1)..(1411): Ortholog of  Ceres SEQ ID NO 15176895 as cited in SEQ ID NO 54714
aaaaagctaagtaaactactcaagtccctcccttttccggcgtcgctattctcggtctcattctgtctcccccatggaagctcggattttgcagtcttcttcttcctgttattcgtctctttacactgtcaatcgatcccggttctcttctgtgtcatctccgaaacttttctccgtcactttgctcagacgacgagaacaaggactcgtgtattatccatgtcgaagaaagatggtcgcactgataaagatgatgacactgatagtctcaattacaaagattctggtgttgatatcgatgctggtgctgagcttgttaaacgaatcgcaaagatggctcctggaattggtggatttggtggtctctttccattaggtgatagttatcttgtagctggtacggatggtgtagggactaaattgaaattggcatttgaaactggaattcatgacaccattggaatcgacttggttgctatgagtgtgaatgatattattacttctggtgcaaagcctctgtttttccttgattactttgctactagtcgtcttgatgtagaccttgctgaaaaggtcattaaagggattgttgaaggttgtcggcaatcggaatgtgctctcttagggggagagactgcagagatgcctgacttttatgcagagggcgaatacgatctcagtgggtttgcagtaggcatagtaaagaaaacttcagttatcaacggcaaaaacattgtggccggtgatgttcttattggcctcccgtctagtggtgttcattccaatggtttttctctagtaagaagggtattggctcgaagcaatctttcgctgaatgatgcgcttccaggtggatcaagtacccttggtgatgctctaatggcacccactgtcatttacgtgaaacaggtacttgatatgatagaaaaaggaggagtgaaaggtttagctcatatcacaggcggaggtttcacagacaacattccccgagtcttcccggatggtttgggtgctgttattcacaccgatacttgggaacttccaccgttgttcaagtggattcaacagactgggagaatagaagacagtgagatgagaaggacgtttaacctggggatagggatggttatggtggttagtccagaggcagcttcacgaatactagaagaagtcaagaatggagactatgttgcgtatcgcgtaggagaggttgtcaacggtgaaggcgtaagctatcagtagagtgttgtgtgttcttttttcttctgtgtttggtttcccaccgtttttaagaattaatccatttgtctacggttttatgaggttacaaacgagatgaggcagtttttaaaacatcgtgttattatttgatctaattttataaaaacaaccaatttatttggcctggtct

SEQ ID NO: 27489 - protein, 413 aa, Arabidopsis thaliana
  peptide (1)..(413): Ceres Seq. ID no. 12338292
KKLSKLLKSLPFPASLFSVSFCLPHGSSDFAVFFFLLFVSLHCQSIPVLFCVISETFLRHFAQTTRTRTRVLSMSKKDGRTDKDDDTDSLNYKDSGVDIDAGAELVKRIAKMAPGIGGFGGLFPLGDSYLVAGTDGVGTKLKLAFETGIHDTIGIDLVAMSVNDIITSGAKPLFFLDYFATSRLDVDLAEKVIKGIVEGCRQSECALLGGETAEMPDFYAEGEYDLSGFAVGIVKKTSVINGKNIVAGDVLIGLPSSGVHSNGFSLVRRVLARSNLSLNDALPGGSSTLGDALMAPTVIYVKQVLDMIEKGGVKGLAHITGGGFTDNIPRVFPDGLGAVIHTDTWELPPLFKWIQQTGRIEDSEMRRTFNLGIGMVMVVSPEAASRILEEVKNGDYVAYRVGEVVNGEGVSYQ

SEQ ID NO: 27490 - protein, 340 aa, Arabidopsis thaliana
  peptide (1)..(340): Ceres Seq. ID no. 12338293
MSKKDGRTDKDDDTDSLNYKDSGVDIDAGAELVKRIAKMAPGIGGFGGLFPLGDSYLVAGTDGVGTKLKLAFETGIHDTIGIDLVAMSVNDIITSGAKPLFFLDYFATSRLDVDLAEKVIKGIVEGCRQSECALLGGETAEMPDFYAEGEYDLSGFAVGIVKKTSVINGKNIVAGDVLIGLPSSGVHSNGFSLVRRVLARSNLSLNDALPGGSSTLGDALMAPTVIYVKQVLDMIEKGGVKGLAHITGGGFTDNIPRVFPDGLGAVIHTDTWELPPLFKWIQQTGRIEDSEMRRTFNLGIGMVMVVSPEAASRILEEVKNGDYVAYRVGEVVNGEGVSYQ

SEQ ID NO: 27491 - protein, 302 aa, Arabidopsis thaliana
  peptide (1)..(302): Ceres Seq. ID no. 12338294
MAPGIGGFGGLFPLGDSYLVAGTDGVGTKLKLAFETGIHDTIGIDLVAMSVNDIITSGAKPLFFLDYFATSRLDVDLAEKVIKGIVEGCRQSECALLGGETAEMPDFYAEGEYDLSGFAVGIVKKTSVINGKNIVAGDVLIGLPSSGVHSNGFSLVRRVLARSNLSLNDALPGGSSTLGDALMAPTVIYVKQVLDMIEKGGVKGLAHITGGGFTDNIPRVFPDGLGAVIHTDTWELPPLFKWIQQTGRIEDSEMRRTFNLGIGMVMVVSPEAASRILEEVKNGDYVAYRVGEVVNGEGVSYQ

SEQ ID NO: 27492 - DNA, 1157 bp, Arabidopsis thaliana
  misc_feature (1)..(1157): Ceres Seq. ID no. 12715883
  misc_feature (1)..(1157): Ortholog of  Ceres SEQ ID NO 13595414 as cited in SEQ ID NO 56539
cttcttgttttttcagatgaacactcttcagatgccttgtgccttattgatccagattcgaagtacccaactttactctctagacctttttcatggcagccactcccacacacttctctgtctcccatgatcctttttcttccacgtctctccttaatctccaaactcaagcgatctttggtcccaatcacagtttaaagacaacccagttgagaattccagcttctttcagaagaaaagctacaaacttgcaagtgatggcttcaggaaagacacctggactgactcaggaagctaatggggttgcaattgatagacaaaacaacactgatgtatttgacgacatgaaacagcggttcctggccttcaagaagcttaagtacatggatgactttgaacactacaaaaatctggcagatgctcaagctccaaagtttctggtgattgcttgtgcagactctagagtttgtccttctgctgtcctgggattccaaccgggtgacgcattcactgttcgtaacattgcaaatttagtacctccatatgagtctggacctactgaaaccaaagctgctctagagttctctgtgaatactcttaatgtggaaaacatcttagtcattggtcatagccggtgtggaggaattcaagctttaatgaaaatggaagacgaaggagattccagaagtttcatacacaactgggtagttgtgggaaagaaggcaaaggaaagcacaaaagctgttgcttcaaacctccattttgatcatcagtgccaacattgtgaaaaggcatcgataaatcattcattagaaaggctgcttgggtacccgtggatagaagagaaagtgcggcaaggttcactgtctctccatggtggatactataattttgttgattgtacgttcgagaaatggacagtggattatgcagcaagcagaggtaagaagaaggaaggcagtggaatcgctgttaaagaccggtcagtttggtcttgacttacgactatctcaatcttcatagagttttttttcataatttatagagaaacatcaaaccccttttggttgggattatcatgtgtttgttccacttgtgtgttgaagtcattttccttcttctgtcttattgaggcagggactaatgtttgttttatc

SEQ ID NO: 27493 - protein, 301 aa, Arabidopsis thaliana
  peptide (1)..(301): Ceres Seq. ID no. 12715884
MAATPTHFSVSHDPFSSTSLLNLQTQAIFGPNHSLKTTQLRIPASFRRKATNLQVMASGKTPGLTQEANGVAIDRQNNTDVFDDMKQRFLAFKKLKYMDDFEHYKNLADAQAPKFLVIACADSRVCPSAVLGFQPGDAFTVRNIANLVPPYESGPTETKAALEFSVNTLNVENILVIGHSRCGGIQALMKMEDEGDSRSFIHNWVVVGKKAKESTKAVASNLHFDHQCQHCEKASINHSLERLLGYPWIEEKVRQGSLSLHGGYYNFVDCTFEKWTVDYAASRGKKKEGSGIAVKDRSVWS

SEQ ID NO: 27494 - protein, 246 aa, Arabidopsis thaliana
  peptide (1)..(246): Ceres Seq. ID no. 12715885
MASGKTPGLTQEANGVAIDRQNNTDVFDDMKQRFLAFKKLKYMDDFEHYKNLADAQAPKFLVIACADSRVCPSAVLGFQPGDAFTVRNIANLVPPYESGPTETKAALEFSVNTLNVENILVIGHSRCGGIQALMKMEDEGDSRSFIHNWVVVGKKAKESTKAVASNLHFDHQCQHCEKASINHSLERLLGYPWIEEKVRQGSLSLHGGYYNFVDCTFEKWTVDYAASRGKKKEGSGIAVKDRSVWS

SEQ ID NO: 27495 - protein, 217 aa, Arabidopsis thaliana
  peptide (1)..(217): Ceres Seq. ID no. 12715886
MKQRFLAFKKLKYMDDFEHYKNLADAQAPKFLVIACADSRVCPSAVLGFQPGDAFTVRNIANLVPPYESGPTETKAALEFSVNTLNVENILVIGHSRCGGIQALMKMEDEGDSRSFIHNWVVVGKKAKESTKAVASNLHFDHQCQHCEKASINHSLERLLGYPWIEEKVRQGSLSLHGGYYNFVDCTFEKWTVDYAASRGKKKEGSGIAVKDRSVWS

SEQ ID NO: 27496 - DNA, 1454 bp, Arabidopsis thaliana
  misc_feature (1)..(1454): Ceres Seq. ID no. 13489675
  misc_feature (1)..(1454): Ortholog of  Ceres SEQ ID NO 13596392 as cited in SEQ ID NO 62136
  misc_feature (1)..(1454): Ortholog of  Ceres SEQ ID NO 13654360 as cited in SEQ ID NO 67980
  misc_feature (1)..(1454): Ortholog of  Ceres SEQ ID NO 13596394 as cited in SEQ ID NO 68561
aaaaaaaaaaaaaataaatttttagggaaaaactttttagggaaaaactttttaggtccaaagatcgagagagaagagaagattttgaattttttttgttttataaagtttcgtcttaagcgatcgattttttgtgcgaaagattgaaactttttggtaagataattgtgttgtgtggttggatcgtggaggtgggtcttctttcgaatggcgcaacaagggcagggaagcatggaccctgccgctctcgatgatatcattcgtcgtttgttggattacagaaaccctaagcctggtaccaaacaggctatgctcaacgagtctgagatccgtcagctttgcatcgtctctagagagatttttcttcaacagcctaaccttcttgagctcgaagctcctatcaagatctgcggtgatattcatggacaatactcagatctattgaggctgtttgagtatggaggcttcccacctacagctaactatttattcttaggagattacgtagacaggggcaagcagagtttggagactatttgtcttctgcttgcttacaaaatcaaataccctgagaacttttttcttctaagaggaaaccacgaatgtgcttctattaacagaatctatggattctatgatgaatgtaaacgtcgattcagtgtgagactctggaaagtgtttacagattcttttaactgtctccctgttgctgctgttatagacgataagatattatgtatgcacggtggcctttctcccgatttgaccaacgtggaacagattaagaacattaagcgacctactgatgttcctgactctggtttgctctgtgatctgctttggtctgatccaagcaaagatgtcaaaggttgggggatgaatgaccgtggagtctcttacacgtttggccctgacaaagtcgcggagtttctaataaagaatgatatggatctcatctgccgtgcccaccaggttgtagaggatggatatgagtttttcgccgatagacagcttgttacgatattttctgctcccaactactgtggtgaatttgacaatgctggtgctatgatgagtgttgatgaaagtttaatgtgctctttccaaattcttaagcctgctgatcgaaagccccggttcttatgaagtaaagagttgaaacctcgcgggaaagaagaggaaaaaggcgatacgaaagcgggagagacatttgaagctccctgagactttgtccggaggccttgcaaaggcaaaaaaacataatttacatgttatattatcttatttgaactcttgccatttcttttctcaaaacactttatgttcttatgatcttctcctctgactctatatagacagtaaaaaaagtctgcaaattttcattctttttcaacaaccaatttcctcagtgtacatactaaattgttctgtatccatacacacatatacttggg

SEQ ID NO: 27497 - protein, 312 aa, Arabidopsis thaliana
  peptide (1)..(312): Ceres Seq. ID no. 13489676
MAQQGQGSMDPAALDDIIRRLLDYRNPKPGTKQAMLNESEIRQLCIVSREIFLQQPNLLELEAPIKICGDIHGQYSDLLRLFEYGGFPPTANYLFLGDYVDRGKQSLETICLLLAYKIKYPENFFLLRGNHECASINRIYGFYDECKRRFSVRLWKVFTDSFNCLPVAAVIDDKILCMHGGLSPDLTNVEQIKNIKRPTDVPDSGLLCDLLWSDPSKDVKGWGMNDRGVSYTFGPDKVAEFLIKNDMDLICRAHQVVEDGYEFFADRQLVTIFSAPNYCGEFDNAGAMMSVDESLMCSFQILKPADRKPRFL

SEQ ID NO: 27498 - protein, 304 aa, Arabidopsis thaliana
  peptide (1)..(304): Ceres Seq. ID no. 13489677
MDPAALDDIIRRLLDYRNPKPGTKQAMLNESEIRQLCIVSREIFLQQPNLLELEAPIKICGDIHGQYSDLLRLFEYGGFPPTANYLFLGDYVDRGKQSLETICLLLAYKIKYPENFFLLRGNHECASINRIYGFYDECKRRFSVRLWKVFTDSFNCLPVAAVIDDKILCMHGGLSPDLTNVEQIKNIKRPTDVPDSGLLCDLLWSDPSKDVKGWGMNDRGVSYTFGPDKVAEFLIKNDMDLICRAHQVVEDGYEFFADRQLVTIFSAPNYCGEFDNAGAMMSVDESLMCSFQILKPADRKPRFL

SEQ ID NO: 27499 - protein, 278 aa, Arabidopsis thaliana
  peptide (1)..(278): Ceres Seq. ID no. 13489678
MLNESEIRQLCIVSREIFLQQPNLLELEAPIKICGDIHGQYSDLLRLFEYGGFPPTANYLFLGDYVDRGKQSLETICLLLAYKIKYPENFFLLRGNHECASINRIYGFYDECKRRFSVRLWKVFTDSFNCLPVAAVIDDKILCMHGGLSPDLTNVEQIKNIKRPTDVPDSGLLCDLLWSDPSKDVKGWGMNDRGVSYTFGPDKVAEFLIKNDMDLICRAHQVVEDGYEFFADRQLVTIFSAPNYCGEFDNAGAMMSVDESLMCSFQILKPADRKPRFL

SEQ ID NO: 27500 - DNA, 639 bp, Arabidopsis thaliana; identical to SEQ ID NO: 22252
  misc_feature (1)..(639): Ceres Seq. ID no. 13580410
  misc_feature (1)..(639): Ortholog of  Ceres SEQ ID NO 13581889 as cited in SEQ ID NO 50900
  misc_feature (1)..(639): Ortholog of  Ceres SEQ ID NO 13581902 as cited in SEQ ID NO 52223
  misc_feature (1)..(639): Ortholog of  Ceres SEQ ID NO 12585528 as cited in SEQ ID NO 62991

SEQ ID NO: 27501 - protein, 136 aa, Arabidopsis thaliana; identical to SEQ ID NO: 8709
  peptide (1)..(136): Ceres Seq. ID no. 13580411

SEQ ID NO: 27502 - protein, 83 aa, Arabidopsis thaliana; identical to SEQ ID NO: 22254
  peptide (1)..(83): Ceres Seq. ID no. 13580412

SEQ ID NO: 27503 - DNA, 1383 bp, Arabidopsis thaliana
  misc_feature (1)..(1383): Ceres Seq. ID no. 12324185
  misc_feature (1)..(1383): Ortholog of  Ceres SEQ ID NO 15176051 as cited in SEQ ID NO 53434
cgatttgcttctaccatatgtgaacaaagtgagagagttggacaataccacattatatgcttctcgaacactattcttcctcagcgatgatagcacattgaggcctgttgccattgagttaacttgtccaccaaatatcaacaagccccaatggaaacaagtcttcacgccaggctatgatgctacttcatgctggctatggaatctggctaagactcatgctatctctcatgacgccggttatcatcaacttatctcccattggttgaggactcatgcatgtacggagccatacataatagcggcaaatagacaactaagtgccatgcatcccatttataggcttttgcatcctcatttccgctacaccatggaaatcaacgctcgtgcacgccaaagtcttgtcaacggaggcggaatcattgagacttgtttctggcccgggaagtatgcattagagctaagttcagccgtctatggtaaactatggaggtttgaccaggaaggcttacccgcggatctcatcaaaagggggttggctgaggaagataagaccgcagaacatggagtacgtctgacgataccagactatccatttgcaaatgatggtctaatattgtgggatgcaattaaagaatgggtgacagactatgtgaaacattactatcctgatgaagaactgatcacatcggacgaggaactccaaggatggtggagtgaagtgcggaacataggccacggagacaagaaagacgaaccttggtggcctgtcctcaaaacacaagatgacttgattggtgtggtaactacgattgcatgggtcacctcaggtcaccatgcagctgtaaactttggacaacggataatggaggatactttcccaaccgaccaacgacaacaaggataagaatgccaaacggaagatccgacagatgaagccttaaaagagttctatgagtcgccagaaaaagtgttgctaagacatacccatcgcagaaacaggcgaccctagtgatggtcacgttggatcttttatcaacacattcacctgacgaagagtacattggagaacaacaagaagcatcttgggccaatgagcctgttatcaatgctgcatttgaaagattcaaaggcaagctccaatatctagaaggagtgatagatgagagaaacgtgaacattactctaaagaatagagctggagctggtgttgttaagtatgagcttttgaagcctacctctgagcatggtgttaccggaatgggtgttccttatagtatttctatttgatctatgcattttctttctcaaaaatgctttcattaattttctgtatctctgtcttcttgataaaatgaataaaacaaatgctcctttgtctcc

SEQ ID NO: 27504 - protein, 301 aa, Arabidopsis thaliana
  peptide (1)..(301): Ceres Seq. ID no. 12324186
DLLLPYVNKVRELDNTTLYASRTLFFLSDDSTLRPVAIELTCPPNINKPQWKQVFTPGYDATSCWLWNLAKTHAISHDAGYHQLISHWLRTHACTEPYIIAANRQLSAMHPIYRLLHPHFRYTMEINARARQSLVNGGGIIETCFWPGKYALELSSAVYGKLWRFDQEGLPADLIKRGLAEEDKTAEHGVRLTIPDYPFANDGLILWDAIKEWVTDYVKHYYPDEELITSDEELQGWWSEVRNIGHGDKKDEPWWPVLKTQDDLIGVVTTIAWVTSGHHAAVNFGQRIMEDTFPTDQRQQG

SEQ ID NO: 27505 - protein, 193 aa, Arabidopsis thaliana
  peptide (1)..(193): Ceres Seq. ID no. 12324187
MHPIYRLLHPHFRYTMEINARARQSLVNGGGIIETCFWPGKYALELSSAVYGKLWRFDQEGLPADLIKRGLAEEDKTAEHGVRLTIPDYPFANDGLILWDAIKEWVTDYVKHYYPDEELITSDEELQGWWSEVRNIGHGDKKDEPWWPVLKTQDDLIGVVTTIAWVTSGHHAAVNFGQRIMEDTFPTDQRQQG

SEQ ID NO: 27506 - protein, 178 aa, Arabidopsis thaliana
  peptide (1)..(178): Ceres Seq. ID no. 12324188
MEINARARQSLVNGGGIIETCFWPGKYALELSSAVYGKLWRFDQEGLPADLIKRGLAEEDKTAEHGVRLTIPDYPFANDGLILWDAIKEWVTDYVKHYYPDEELITSDEELQGWWSEVRNIGHGDKKDEPWWPVLKTQDDLIGVVTTIAWVTSGHHAAVNFGQRIMEDTFPTDQRQQG

SEQ ID NO: 27507 - DNA, 973 bp, Arabidopsis thaliana
  misc_feature (1)..(973): Ceres Seq. ID no. 12333166
  misc_feature (1)..(973): Ortholog of  Ceres SEQ ID NO 13594289 as cited in SEQ ID NO 59987
aatttatcttccagaaatagttgcattaattatctctgtgactctgtccccagtctccttcctcacagactgatccctctctctcccaaagttgcattaagttttaaactagtacaaagtctaagcttggagcttccactttgtgttctccttgaaaagtttttaccttttttcaatctctgttgttgatacacctgtaaagctcatattgcacacaaagtgttcgataaaatgcctagccgaaacaaaaattgcatataactgcttctgagaaaacaagtgaaagtatgttacggaacatgatgatgccttggaacagtagcgatcacaatgtagttggaatgttaacaaggcatttcgccacaaaaccaaaacccaagatgaaaccgattgagctgaacacaccaccggagcaaactcagacgataacccgagtgatctttgatattttgaaggatcatggacctctaaccattgctgaaacttgggatcgtgtcaaggaagtgggattaagagggctgacgagcaagcgtcacatgaagataatactaaggtggatgagagagagacagaagctgaagctgatatgtaaccatgttggtcctcacaagcaattcttgtacactacttggttcactaaacacaacccttcttctaaattccccaagttaccaccggaaaatctcacaggaaaatcctctggccaccctcctaaacttccctgagccgactctgttaagttttaaggctttgtttcttgaatcttcctcttacagttattaatgatcaccttagtaaaatcaatagcacatatatgtagcctgcatctgaagattccttgtctagattctcgtgacaattgaatatgaaaagacatgagatgaaagttgatgttgttacagttgaagaatgtgtaaatgatacaactgcataccagttggttaactttatgtatataatcgaaatttcacct

SEQ ID NO: 27508 - protein, 145 aa, Arabidopsis thaliana
  peptide (1)..(145): Ceres Seq. ID no. 12333167
MLRNMMMPWNSSDHNVVGMLTRHFATKPKPKMKPIELNTPPEQTQTITRVIFDILKDHGPLTIAETWDRVKEVGLRGLTSKRHMKIILRWMRERQKLKLICNHVGPHKQFLYTTWFTKHNPSSKFPKLPPENLTGKSSGHPPKLP

SEQ ID NO: 27509 - protein, 141 aa, Arabidopsis thaliana
  peptide (1)..(141): Ceres Seq. ID no. 12333168
MMMPWNSSDHNVVGMLTRHFATKPKPKMKPIELNTPPEQTQTITRVIFDILKDHGPLTIAETWDRVKEVGLRGLTSKRHMKIILRWMRERQKLKLICNHVGPHKQFLYTTWFTKHNPSSKFPKLPPENLTGKSSGHPPKLP

SEQ ID NO: 27510 - protein, 140 aa, Arabidopsis thaliana
  peptide (1)..(140): Ceres Seq. ID no. 12333169
MMPWNSSDHNVVGMLTRHFATKPKPKMKPIELNTPPEQTQTITRVIFDILKDHGPLTIAETWDRVKEVGLRGLTSKRHMKIILRWMRERQKLKLICNHVGPHKQFLYTTWFTKHNPSSKFPKLPPENLTGKSSGHPPKLP

SEQ ID NO: 27511 - DNA, 1468 bp, Arabidopsis thaliana
  misc_feature (1)..(1468): Ceres Seq. ID no. 12385002
  misc_feature (1)..(1468): Ortholog of  Ceres SEQ ID NO 15171755 as cited in SEQ ID NO 57047
  misc_feature (1)..(1468): Ortholog of  Ceres SEQ ID NO 13597613 as cited in SEQ ID NO 65334
  misc_feature (1)..(1468): Ortholog of  Ceres SEQ ID NO 13655958 as cited in SEQ ID NO 65456
  misc_feature (1)..(1468): Ortholog of  Ceres SEQ ID NO 14303664 as cited in SEQ ID NO 65892
  misc_feature (1)..(1468): Ortholog of  Ceres SEQ ID NO 14309641 as cited in SEQ ID NO 0
gtgcgttcgtagagactgtaataaagacggagagattcttctagagtcagttcttcttcttcatcctcttcttccccccaaatcctctctcgctagggtttctcattccgatccataattctagatgtcgaggtttttaactgagacctgtcaaataagctaaagcttcttctaagagcttcaaggaaagcattgcattgttgtggtcttgtttgtgtccacagaaggaaagaagagtgagaagctcaggatgtcaagcagtcgaaatacccactggtgtcacagatgtcagcgtgctgtccgccttcacggccaagagcctgtatgcttttattgcggaggtggatttgttgaagaacttgatatggctcaagccagcccctttgatatgtttagatcccacaggggtgttgtagaacgtgatcagacttttgatctcatggatgctttctctgtgtttatgaggaaccgcttagctgaaaggagccacgacagagaaatcagaggaagaaccatcagttcaggtcctgaaaactttcctggtctggcccctttgttgatctttggtggtcaagtcccttatagactaactggcgacaatgcagtcgaagccctcttcaatggcggctcccctggcattggcatcacacgtggtaacaccggcgactacttcttcggtcccggccttgaagaattgttcgagcagctttcagctggcactactcgccgaggcccaccacccgcaccgagatcagcaatagacgcattgccaactatcaagatcgcgcagaggcatcttaggtcatcggactcgaattgtcccgtgtgcaaagacgaattcgaactgggatcagaagcgaaacagatgccgtgtaaccacatctatcattctgactgcattgtcccgtggctggttcagcacaactcttgcccggtctgtcgccaagagctaccatcagctagcggaccttcaagcagtcaaaacagaaccacccctaccagaaactacagaagcagtagtagtagtagtagtagtaacagtcgtgagaacgggaatgaaagaaggaatcctttctcttccttctggccattccgttcgtcaggttcaagctcaagctccactcaaaaccgtggaggcacaagaaactcggatacaagcgatgagaaccataactaccatcaacagcaacatcaacaatcatatatgggttacagtggctggccttttgattactaaaagtctaaaagtgagctaaaacaaatctttggtctcactttggtctctttacttaaatatgcttgtgattctgcatatgccttgtgcttcactctctatctctctcactctcttttatcaacataaataatggagaactgtatttgttactgtagattttctttctctgttaaaaacgagttcatcattttctatatgctttgttaaatatgtcattttagttgggttttt

SEQ ID NO: 27512 - protein, 328 aa, Arabidopsis thaliana
  peptide (1)..(328): Ceres Seq. ID no. 12385003
MSSSRNTHWCHRCQRAVRLHGQEPVCFYCGGGFVEELDMAQASPFDMFRSHRGVVERDQTFDLMDAFSVFMRNRLAERSHDREIRGRTISSGPENFPGLAPLLIFGGQVPYRLTGDNAVEALFNGGSPGIGITRGNTGDYFFGPGLEELFEQLSAGTTRRGPPPAPRSAIDALPTIKIAQRHLRSSDSNCPVCKDEFELGSEAKQMPCNHIYHSDCIVPWLVQHNSCPVCRQELPSASGPSSSQNRTTPTRNYRSSSSSSSSNSRENGNERRNPFSSFWPFRSSGSSSSSTQNRGGTRNSDTSDENHNYHQQQHQQSYMGYSGWPFDY

SEQ ID NO: 27513 - protein, 290 aa, Arabidopsis thaliana
  peptide (1)..(290): Ceres Seq. ID no. 12385004
MAQASPFDMFRSHRGVVERDQTFDLMDAFSVFMRNRLAERSHDREIRGRTISSGPENFPGLAPLLIFGGQVPYRLTGDNAVEALFNGGSPGIGITRGNTGDYFFGPGLEELFEQLSAGTTRRGPPPAPRSAIDALPTIKIAQRHLRSSDSNCPVCKDEFELGSEAKQMPCNHIYHSDCIVPWLVQHNSCPVCRQELPSASGPSSSQNRTTPTRNYRSSSSSSSSNSRENGNERRNPFSSFWPFRSSGSSSSSTQNRGGTRNSDTSDENHNYHQQQHQQSYMGYSGWPFDY

SEQ ID NO: 27514 - protein, 282 aa, Arabidopsis thaliana
  peptide (1)..(282): Ceres Seq. ID no. 12385005
MFRSHRGVVERDQTFDLMDAFSVFMRNRLAERSHDREIRGRTISSGPENFPGLAPLLIFGGQVPYRLTGDNAVEALFNGGSPGIGITRGNTGDYFFGPGLEELFEQLSAGTTRRGPPPAPRSAIDALPTIKIAQRHLRSSDSNCPVCKDEFELGSEAKQMPCNHIYHSDCIVPWLVQHNSCPVCRQELPSASGPSSSQNRTTPTRNYRSSSSSSSSNSRENGNERRNPFSSFWPFRSSGSSSSSTQNRGGTRNSDTSDENHNYHQQQHQQSYMGYSGWPFDY

SEQ ID NO: 27515 - DNA, 901 bp, Arabidopsis thaliana
  misc_feature (1)..(901): Ceres Seq. ID no. 13490131
  misc_feature (1)..(901): Ortholog of  Ceres SEQ ID NO 13505291 as cited in SEQ ID NO 56614
  misc_feature (1)..(901): Ortholog of  Ceres SEQ ID NO 13597394 as cited in SEQ ID NO 63457
agtcgtcgtcctcatcaacaattcgaatctgaaatctgcaattcacgagaagaagctttttttttttgtaacaatggcaaatccaattcaagagattattgagaaacaagttctgacggtagcgagagctatggaggataagatagacgacgagatagcgtctttggaaaagcttgacgaagatgatttggaagttttgagagagaggagattgaagcagatgacgaaaatggcggagaagaagaaacggtggatgagtattggacatggtgaatactctgagattcattctgagaaagatttcttctccgttgttaaatctagtgaacgcgtcgtttgtcacttctaccgtgagaattggccctgtaaagtgatggataaacacatgagcatattggcaaagcaacacattgagacacgtttcgtgaagatccaagctgagaaaagtccattcttggctgagaggcttaagattgttgttcttcccactcttgccctcattaagaacactaaagtcgatgattatgtggttgggttcaatgaactgggagggaaagatgattttagcacagaagatcttgaagagagaatagccagagcgcaagtggtccattacgagggagaatcatctcttaaacaaaagtctacaacacaagtcagaaggaacgtgaggcagagtgctcgttcagattctgactccgaataaatcccttttcttatcaaaggtttgttcgtttgtatcctcttgttagttgtaatactatgttgcaattcatcgttttgatgatcaaaatcaatgttgatcgttagattgatgaacatgcaatatctagaatactacattgatgttttatatgttacctagtgagagtgttggaatgaccaaagtctttttgagttt

SEQ ID NO: 27516 - protein, 234 aa, Arabidopsis thaliana
  peptide (1)..(234): Ceres Seq. ID no. 13490132
VVVLINNSNLKSAIHEKKLFFFVTMANPIQEIIEKQVLTVARAMEDKIDDEIASLEKLDEDDLEVLRERRLKQMTKMAEKKKRWMSIGHGEYSEIHSEKDFFSVVKSSERVVCHFYRENWPCKVMDKHMSILAKQHIETRFVKIQAEKSPFLAERLKIVVLPTLALIKNTKVDDYVVGFNELGGKDDFSTEDLEERIARAQVVHYEGESSLKQKSTTQVRRNVRQSARSDSDSE

SEQ ID NO: 27517 - protein, 210 aa, Arabidopsis thaliana
  peptide (1)..(210): Ceres Seq. ID no. 13490133
MANPIQEIIEKQVLTVARAMEDKIDDEIASLEKLDEDDLEVLRERRLKQMTKMAEKKKRWMSIGHGEYSEIHSEKDFFSVVKSSERVVCHFYRENWPCKVMDKHMSILAKQHIETRFVKIQAEKSPFLAERLKIVVLPTLALIKNTKVDDYVVGFNELGGKDDFSTEDLEERIARAQVVHYEGESSLKQKSTTQVRRNVRQSARSDSDSE

SEQ ID NO: 27518 - protein, 191 aa, Arabidopsis thaliana
  peptide (1)..(191): Ceres Seq. ID no. 13490134
MEDKIDDEIASLEKLDEDDLEVLRERRLKQMTKMAEKKKRWMSIGHGEYSEIHSEKDFFSVVKSSERVVCHFYRENWPCKVMDKHMSILAKQHIETRFVKIQAEKSPFLAERLKIVVLPTLALIKNTKVDDYVVGFNELGGKDDFSTEDLEERIARAQVVHYEGESSLKQKSTTQVRRNVRQSARSDSDSE

SEQ ID NO: 27519 - DNA, 1100 bp, Arabidopsis thaliana
  misc_feature (1)..(1100): Ceres Seq. ID no. 12333158
  misc_feature (1)..(1100): Ortholog of  Ceres SEQ ID NO 14311981 as cited in SEQ ID NO 55703
  misc_feature (1)..(1100): Ortholog of  Ceres SEQ ID NO 15226227 as cited in SEQ ID NO 63433
  misc_feature (1)..(1100): Ortholog of  Ceres SEQ ID NO 13599003 as cited in SEQ ID NO 0
actttcccgggaaaatcggcgaccaaaattggaaaatgtactcagcgattcgctcgcttccactcgatggtggacacgttggtggtgactaccatggacctcttgacggaaccaatcttcccggtgacgcttgtttggttttaacgactgaccctaaacctcgtctccggtggacaactgagcttcatgagagattcgttgacgccgttactcagctcggtggtcctgacaaagcgactcccaaaactattatgagaacaatgggagtgaagggtctcactctctaccacctcaaatcacatcttcagaaattccgcctagggaggcaagctggcaaagaatcaactgagaactctaaagatgcttcttgtgtaggggagagtcaggacacaggttcatcttcgacatcatcaatgagaatggcgcagcaggagcagaacgagggttaccaagtcaccgaagctctacgtgctcagatggaagtccaaagaagactacacgatcaattggaggtgcaacggaggctccagctgaggatagaggcacaaggaaaatacctgcaatcgattcttgaaaaagcttgcaaggcctttgacgagcaagctgctacttttgctggacttgaggctgctagggaagagctatcagagctagccatcaaagtctccaatagctctcaaggaacatcagtcccgtacttcgatgcaacaaagatgatgatgatgccatcgttgtcagagcttgcagtagcaatagacaacaaaaacaacatcacaaccaactgttcagtagaaagctctctgacttccatcacacatgggagctctatatctgctgcatcaatgaagaagcgtcaacgtggagacaatttgggcgtagggtatgaatcaggctggattatgcctagtagcaccattggataaagtttaggagagggaaaaagttcattatgggaaaggtagagataagatttaactcttctttacttgctttgaggggcctgtattattattcgatacaaacttgtcatcacattttcatcttagcctactcatgtatatatatttcaatgttgaagctgaagctttagtgtttccttt

SEQ ID NO: 27520 - protein, 306 aa, Arabidopsis thaliana
  peptide (1)..(306): Ceres Seq. ID no. 12333159
FPGKIGDQNWKMYSAIRSLPLDGGHVGGDYHGPLDGTNLPGDACLVLTTDPKPRLRWTTELHERFVDAVTQLGGPDKATPKTIMRTMGVKGLTLYHLKSHLQKFRLGRQAGKESTENSKDASCVGESQDTGSSSTSSMRMAQQEQNEGYQVTEALRAQMEVQRRLHDQLEVQRRLQLRIEAQGKYLQSILEKACKAFDEQAATFAGLEAAREELSELAIKVSNSSQGTSVPYFDATKMMMMPSLSELAVAIDNKNNITTNCSVESSLTSITHGSSISAASMKKRQRGDNLGVGYESGWIMPSSTIG

SEQ ID NO: 27521 - protein, 295 aa, Arabidopsis thaliana
  peptide (1)..(295): Ceres Seq. ID no. 12333160
MYSAIRSLPLDGGHVGGDYHGPLDGTNLPGDACLVLTTDPKPRLRWTTELHERFVDAVTQLGGPDKATPKTIMRTMGVKGLTLYHLKSHLQKFRLGRQAGKESTENSKDASCVGESQDTGSSSTSSMRMAQQEQNEGYQVTEALRAQMEVQRRLHDQLEVQRRLQLRIEAQGKYLQSILEKACKAFDEQAATFAGLEAAREELSELAIKVSNSSQGTSVPYFDATKMMMMPSLSELAVAIDNKNNITTNCSVESSLTSITHGSSISAASMKKRQRGDNLGVGYESGWIMPSSTIG

SEQ ID NO: 27522 - protein, 223 aa, Arabidopsis thaliana
  peptide (1)..(223): Ceres Seq. ID no. 12333161
MRTMGVKGLTLYHLKSHLQKFRLGRQAGKESTENSKDASCVGESQDTGSSSTSSMRMAQQEQNEGYQVTEALRAQMEVQRRLHDQLEVQRRLQLRIEAQGKYLQSILEKACKAFDEQAATFAGLEAAREELSELAIKVSNSSQGTSVPYFDATKMMMMPSLSELAVAIDNKNNITTNCSVESSLTSITHGSSISAASMKKRQRGDNLGVGYESGWIMPSSTIG

SEQ ID NO: 27523 - DNA, 1228 bp, Arabidopsis thaliana
  misc_feature (1)..(1228): Ceres Seq. ID no. 12421727
  misc_feature (1)..(1228): Ortholog of  Ceres SEQ ID NO 12474685 as cited in SEQ ID NO 88
  misc_feature (1)..(1228): Ortholog of  Ceres SEQ ID NO 13638574 as cited in SEQ ID NO 51223
  misc_feature (1)..(1228): Ortholog of  Ceres SEQ ID NO 14311531 as cited in SEQ ID NO 51466
  misc_feature (1)..(1228): Ortholog of  Ceres SEQ ID NO 15170465 as cited in SEQ ID NO 52798
  misc_feature (1)..(1228): Ortholog of  Ceres SEQ ID NO 15177112 as cited in SEQ ID NO 55956
  misc_feature (1)..(1228): Ortholog of  Ceres SEQ ID NO 12610790 as cited in SEQ ID NO 56123
  misc_feature (1)..(1228): Ortholog of  Ceres SEQ ID NO 14315399 as cited in SEQ ID NO 57112
  misc_feature (1)..(1228): Ortholog of  Ceres SEQ ID NO 13655636 as cited in SEQ ID NO 63519
  misc_feature (1)..(1228): Ortholog of  Ceres SEQ ID NO 13655896 as cited in SEQ ID NO 64970
gctatttctccgagttacgtatgtttcttttcttctgcatctagttttttttttgcatattcatcaccttctctcagttttcttctttcaatagaattatccagaaaacttttaagagatggcagctccgattcgattctttgaactgaacactggtgccaagttaccttgcgtcggtctaggaacctacgcaatggtcgcgacagcgatcgaacaggcgattaagattggttacaggcatatcgactgtgcttcgatttacggaaacgagaaagagattggtggtgtgttgaagaagctgataggtgatggttttgtgaagcgtgaggagttatttatcacttccaaactctggagcaatgatcatttacctgaagatgtgcctaaggcactggaaaaaacgttacaggacttacagattgactatgttgatttatatctgatacattggcctgcgagcttgaagaaggaatcactaatgccaacacctgagatgctcacaaaacctgatataactagcacatggaaagcaatggaagctctctatgactctggaaaagctcgagcaatcggtgtaagcaatttctcgtcgaagaagcttacagatcttcttaacgtggcacgtgtaaccccggctgttaaccaagttgaatgtcacccagtttggcagcaacaaggtcttcatgagttatgcaaatccaaaggagttcacttatctggttactctcctttgggttcccaaagtaagggagaagtcaggctaaaggttcttcaaaacccgattgttaccgaggttgctgagaaacttggaaagaccaccgcccaagtggctctccgttggggactccaaactggtcatagtgttctaccaaagagctcgagcggggctcggctcaaggagaatcttgatgtttttgactggtccataccggaagatctgtttaccaagttctctaacattccccaggagaagttttgccgagctactgagtttgcgcatgagacacacggcttctataagaccattgaggaattgtgggacggtgaaatttgagataatgtccctcctttctacttgtttaaccataaaccattaaggacattgaaataaatatgttatctttttatatttaatctttctatgagaaaacactaaacacatgcttgggatttcatgatgtttggcaaatgttgttattctgcattcttcaaacaataaaatgttttc

SEQ ID NO: 27524 - protein, 311 aa, Arabidopsis thaliana
  peptide (1)..(311): Ceres Seq. ID no. 12421728
MAAPIRFFELNTGAKLPCVGLGTYAMVATAIEQAIKIGYRHIDCASIYGNEKEIGGVLKKLIGDGFVKREELFITSKLWSNDHLPEDVPKALEKTLQDLQIDYVDLYLIHWPASLKKESLMPTPEMLTKPDITSTWKAMEALYDSGKARAIGVSNFSSKKLTDLLNVARVTPAVNQVECHPVWQQQGLHELCKSKGVHLSGYSPLGSQSKGEVRLKVLQNPIVTEVAEKLGKTTAQVALRWGLQTGHSVLPKSSSGARLKENLDVFDWSIPEDLFTKFSNIPQEKFCRATEFAHETHGFYKTIEELWDGEI

SEQ ID NO: 27525 - protein, 286 aa, Arabidopsis thaliana
  peptide (1)..(286): Ceres Seq. ID no. 12421729
MVATAIEQAIKIGYRHIDCASIYGNEKEIGGVLKKLIGDGFVKREELFITSKLWSNDHLPEDVPKALEKTLQDLQIDYVDLYLIHWPASLKKESLMPTPEMLTKPDITSTWKAMEALYDSGKARAIGVSNFSSKKLTDLLNVARVTPAVNQVECHPVWQQQGLHELCKSKGVHLSGYSPLGSQSKGEVRLKVLQNPIVTEVAEKLGKTTAQVALRWGLQTGHSVLPKSSSGARLKENLDVFDWSIPEDLFTKFSNIPQEKFCRATEFAHETHGFYKTIEELWDGEI

SEQ ID NO: 27526 - protein, 191 aa, Arabidopsis thaliana
  peptide (1)..(191): Ceres Seq. ID no. 12421730
MPTPEMLTKPDITSTWKAMEALYDSGKARAIGVSNFSSKKLTDLLNVARVTPAVNQVECHPVWQQQGLHELCKSKGVHLSGYSPLGSQSKGEVRLKVLQNPIVTEVAEKLGKTTAQVALRWGLQTGHSVLPKSSSGARLKENLDVFDWSIPEDLFTKFSNIPQEKFCRATEFAHETHGFYKTIEELWDGEI

SEQ ID NO: 27527 - DNA, 1342 bp, Arabidopsis thaliana
  misc_feature (1)..(1342): Ceres Seq. ID no. 13489686
  misc_feature (1)..(1342): Ortholog of  Ceres SEQ ID NO 15178317 as cited in SEQ ID NO 52489
  misc_feature (1)..(1342): Ortholog of  Ceres SEQ ID NO 14314415 as cited in SEQ ID NO 57442
acacggcggatcaacgagagagagaaaaagagagaggctttattcttctcttccccgtttcgatctcctctttaatgcatctgcgtatctgattttgaaagatttaacggttctttaaaatgatgggtattggtcaaagaagctcttttcaatctgggaaggttactgggtaaatgttggtacattggctcaggttttataaagtttggtgatcattctcagtttcaagtttgatcaaaatgtggggctttgcgtcgaatgtcattggaagtatggggttaaagaagtcccctaaagattcagctcaagcatcctctcaatgctcagatgatgaggtttcaaatattagcagggatgaagagggattagaatgtcccatatgttgggaatctttcaacattgttgagaatgttccttatgtgttatggtgtggtcatactctttgccagaattgtgtctttggtctccaatctgctgtcttgagactctcaagccaagatattcggattccgtttttcgtctcgtgcccgtggtgtcagttgctttcgttcaggattgtttacaagggtaatctaaagttccctcggaagaatttcttccttctctggatggttgagagtctgaatggtgacaggacaagtcatggtgacaggacaagtcatggttccttggtcactgataaccagcaatcggctccgactccgaggtgtagcatgtctctgggaaaccacagcagcaacaacaatctggttgcgaggcctttattgcgtaaccagtctacagaccttttgccacatcatgaccacagtaaccaaccaagcagacaactcttctcctttcacaaatctcttgattttttcatctctttcacctccaagtttccgtttgtgatcatcttccttctgatcgtattctttgctatacctggtagcctcataattcttgccctttacttcctcctcacaatacttttcgcagttccagctggtcttgtactatattttgcttatcctattctagaaaggttggtaaatgaaataacatcatcatgagactggtgctgaactcataactcctattattggttgctcggcccattctgggtgattgtagttcactatggaacccttttttagcactttggagcctttgatggtcagaactcagaagaagtttttatgatttttggtagttctgcacatttcttataatattgtttattgcaagattgagcattgtatttgtgattttgaactcttggttttagtattgttgtgcaactgtctaaagttttggttttcagatttgtgccataatggatcacatgtgtgttatctctctt

SEQ ID NO: 27528 - protein, 270 aa, Arabidopsis thaliana
  peptide (1)..(270): Ceres Seq. ID no. 13489687
MWGFASNVIGSMGLKKSPKDSAQASSQCSDDEVSNISRDEEGLECPICWESFNIVENVPYVLWCGHTLCQNCVFGLQSAVLRLSSQDIRIPFFVSCPWCQLLSFRIVYKGNLKFPRKNFFLLWMVESLNGDRTSHGDRTSHGSLVTDNQQSAPTPRCSMSLGNHSSNNNLVARPLLRNQSTDLLPHHDHSNQPSRQLFSFHKSLDFFISFTSKFPFVIIFLLIVFFAIPGSLIILALYFLLTILFAVPAGLVLYFAYPILERLVNEITSS

SEQ ID NO: 27529 - protein, 259 aa, Arabidopsis thaliana
  peptide (1)..(259): Ceres Seq. ID no. 13489688
MGLKKSPKDSAQASSQCSDDEVSNISRDEEGLECPICWESFNIVENVPYVLWCGHTLCQNCVFGLQSAVLRLSSQDIRIPFFVSCPWCQLLSFRIVYKGNLKFPRKNFFLLWMVESLNGDRTSHGDRTSHGSLVTDNQQSAPTPRCSMSLGNHSSNNNLVARPLLRNQSTDLLPHHDHSNQPSRQLFSFHKSLDFFISFTSKFPFVIIFLLIVFFAIPGSLIILALYFLLTILFAVPAGLVLYFAYPILERLVNEITSS

SEQ ID NO: 27530 - protein, 147 aa, Arabidopsis thaliana
  peptide (1)..(147): Ceres Seq. ID no. 13489689
MVESLNGDRTSHGDRTSHGSLVTDNQQSAPTPRCSMSLGNHSSNNNLVARPLLRNQSTDLLPHHDHSNQPSRQLFSFHKSLDFFISFTSKFPFVIIFLLIVFFAIPGSLIILALYFLLTILFAVPAGLVLYFAYPILERLVNEITSS

SEQ ID NO: 27531 - DNA, 1646 bp, Arabidopsis thaliana
  misc_feature (1)..(1646): Ceres Seq. ID no. 13488223
  misc_feature (1)..(1646): Ortholog of  Ceres SEQ ID NO 15174599 as cited in SEQ ID NO 53646
  misc_feature (1)..(1646): Ortholog of  Ceres SEQ ID NO 15174646 as cited in SEQ ID NO 54499
tggtactctgttgcattatttctctcactcaaacgtatatacaaacataaattatgtcgacagaaatggaggtcgttagtgttcttaagtaccttgacaacaaatccatattggtcgttggagctgctgggttcttagcaaatatctttgtggagaagatattaagggtggcaccaaacgtgaagaaactctatctccttctaagagcatcaaaaggaaaatctgctacccagaggtttaacgacgagattttgaagaaagatttgttcaaggtgctgaaggagaagtatggtcccaatctaaatcaacttacatcagagaaaatcactattgtcgacggagacatttgccttgaggatttaggtcttcaagacttcgacttggctcatgagatgatccaccaagttgatgccattgttaatttagctgcaactactaagtttgatgaaagatacgatgtagctcttgggatcaacacattgggtgctctcaatgtcttgaactttgccaagagatgtgcaaaggttaagatccttgttcatgtatcaacagcttacgtgtgcggagaaaaatctggcttgataatggaaacaccgtaccgtatgggtgagacgttgaatggaaccaccggtttagacatcaactacgagaaaaaattggttcaggagaaacttgaccagctccgagtaatcggagccgctcctgaaaccatcacggaaaccatgaaggatctcggactcagacgggcaaagatgtacggatggccaaacacatatgtgttcaccaaagcaatgggggagatgatggtagggacaaaaagagaaaatctgtcacttgtgttgcttcgtccttcaattattaccagcacattcaaagaaccatttcctggttggactgagggcatcaggactattgatagtttagctgttggatatggcaaaggcaaactcacgtgcttcctctgtgatcttgatgctgtttctgatgtgatgccggcagatatggtagtaaattcgattcttgtatcaatggccgctcaagccggtaaacaagaagagattatttaccatgtgggttcttcacttagaaatccgatgaaaaattcaaagtttcctgaattagcgtatcggtatttctcaatcaaaccgtggaccaacaaagaagggaaggtcgttaaggtcggggccattgagatcctgagttctatgcgtagtttccatagatacatgaccatacgctacttgattgcattgaagggacttgaattggtaaacataatactttgcaagttgtttgagaaggaatttcagtatttcaataagaaaataaattttatattccggcttgttgatctctatcagccttacctctttttctatggaatatttgatgattcaaacacagaaaaattgcgaaaaatggtatcgaagacgggagtcgaaaacgagatgttttatttcgatccaaaggttctcgattgggacgactattttttgaacacacatgttattgggctgcttaagtatgtcttctaataattttagttgtataatctttatcttattttactacaacgagtataaattatgtggacactatcgttctccttaatccgttttcatacggctatgtttcgaaatttggtt

SEQ ID NO: 27532 - protein, 493 aa, Arabidopsis thaliana
  peptide (1)..(493): Ceres Seq. ID no. 13488224
MSTEMEVVSVLKYLDNKSILVVGAAGFLANIFVEKILRVAPNVKKLYLLLRASKGKSATQRFNDEILKKDLFKVLKEKYGPNLNQLTSEKITIVDGDICLEDLGLQDFDLAHEMIHQVDAIVNLAATTKFDERYDVALGINTLGALNVLNFAKRCAKVKILVHVSTAYVCGEKSGLIMETPYRMGETLNGTTGLDINYEKKLVQEKLDQLRVIGAAPETITETMKDLGLRRAKMYGWPNTYVFTKAMGEMMVGTKRENLSLVLLRPSIITSTFKEPFPGWTEGIRTIDSLAVGYGKGKLTCFLCDLDAVSDVMPADMVVNSILVSMAAQAGKQEEIIYHVGSSLRNPMKNSKFPELAYRYFSIKPWTNKEGKVVKVGAIEILSSMRSFHRYMTIRYLIALKGLELVNIILCKLFEKEFQYFNKKINFIFRLVDLYQPYLFFYGIFDDSNTEKLRKMVSKTGVENEMFYFDPKVLDWDDYFLNTHVIGLLKYVF

SEQ ID NO: 27533 - protein, 489 aa, Arabidopsis thaliana
  peptide (1)..(489): Ceres Seq. ID no. 13488225
MEVVSVLKYLDNKSILVVGAAGFLANIFVEKILRVAPNVKKLYLLLRASKGKSATQRFNDEILKKDLFKVLKEKYGPNLNQLTSEKITIVDGDICLEDLGLQDFDLAHEMIHQVDAIVNLAATTKFDERYDVALGINTLGALNVLNFAKRCAKVKILVHVSTAYVCGEKSGLIMETPYRMGETLNGTTGLDINYEKKLVQEKLDQLRVIGAAPETITETMKDLGLRRAKMYGWPNTYVFTKAMGEMMVGTKRENLSLVLLRPSIITSTFKEPFPGWTEGIRTIDSLAVGYGKGKLTCFLCDLDAVSDVMPADMVVNSILVSMAAQAGKQEEIIYHVGSSLRNPMKNSKFPELAYRYFSIKPWTNKEGKVVKVGAIEILSSMRSFHRYMTIRYLIALKGLELVNIILCKLFEKEFQYFNKKINFIFRLVDLYQPYLFFYGIFDDSNTEKLRKMVSKTGVENEMFYFDPKVLDWDDYFLNTHVIGLLKYVF

SEQ ID NO: 27534 - protein, 380 aa, Arabidopsis thaliana
  peptide (1)..(380): Ceres Seq. ID no. 13488226
MIHQVDAIVNLAATTKFDERYDVALGINTLGALNVLNFAKRCAKVKILVHVSTAYVCGEKSGLIMETPYRMGETLNGTTGLDINYEKKLVQEKLDQLRVIGAAPETITETMKDLGLRRAKMYGWPNTYVFTKAMGEMMVGTKRENLSLVLLRPSIITSTFKEPFPGWTEGIRTIDSLAVGYGKGKLTCFLCDLDAVSDVMPADMVVNSILVSMAAQAGKQEEIIYHVGSSLRNPMKNSKFPELAYRYFSIKPWTNKEGKVVKVGAIEILSSMRSFHRYMTIRYLIALKGLELVNIILCKLFEKEFQYFNKKINFIFRLVDLYQPYLFFYGIFDDSNTEKLRKMVSKTGVENEMFYFDPKVLDWDDYFLNTHVIGLLKYVF

SEQ ID NO: 27535 - DNA, 1263 bp, Arabidopsis thaliana
  misc_feature (1)..(1263): Ceres Seq. ID no. 13491651
  misc_feature (1)..(1263): Ortholog of  Ceres SEQ ID NO 15176333 as cited in SEQ ID NO 52787
  misc_feature (1)..(1263): Ortholog of  Ceres SEQ ID NO 15170403 as cited in SEQ ID NO 53457
  misc_feature (1)..(1263): Ortholog of  Ceres SEQ ID NO 14303479 as cited in SEQ ID NO 54254
  misc_feature (1)..(1263): Ortholog of  Ceres SEQ ID NO 14312047 as cited in SEQ ID NO 55656
  misc_feature (1)..(1263): Ortholog of  Ceres SEQ ID NO 13660872 as cited in SEQ ID NO 60830
  misc_feature (1)..(1263): Ortholog of  Ceres SEQ ID NO 12616221 as cited in SEQ ID NO 63291
  misc_feature (1)..(1263): Ortholog of  Ceres SEQ ID NO 14302355 as cited in SEQ ID NO 65830
atggactttgctctcttctcctcgatttcaatctttgagataaaccacaaagatcctccgattcgaaggtttataaaaactcaaaatcgaatcttatccacaagaaaacaacaaggtacttttccaaaaatgaaggcggagttgaatttgccggcgggattccgatttcatccgacggacgaagagcttgtcaagttctatctttgccggagatgtgcgtcagaaccgattaacgttccggttatcgcagagattgacttgtacaaattcaatccatgggagcttccagaaatggcgttgtacggtgagaaagaatggtacttcttctcgcatagagaccggaaatacccaaacgggtcgagaccaaaccgggcagctggaaccggttattggaaagcgactggagctgataaaccgatcggaaaaccgaagacgttagggattaagaaagcactcgtcttctacgcaggaaaagctccgaaagggattaaaacgaattggattatgcacgagtatcgtctcgctaatgtcgatcgatctgcttctaccaacaagaagaacaacttaagacttgatgattgggttttgtgtcggatatacaataagaaaggaacaatggagaagtatttaccggcggcggctgagaaaccgacggaaaagatgagtacgtcggactcaagatgctcaagtcacgtgatttcaccggacgtcacgtgttctgataactgggaggttgagagtgagcccaaatggattaatctggaagacgcgttagaggcatttaatgatgacacgtccatgtttagttccattggtttgttgcaaaatgacgcctttgttcctcagtttcagtaccagtcctccgatttcgtcgattcgtttcaggacccgttcgagcagaaaccgttcttgaattggaattttgctcctcaagggtaaaaataatcggcaaaaagttgaagcttttcagagtcttcgatcaccggcattgtgtcggatcctgacccggagaccaagtcgggtcatacgattacataatcgggttattgagatttccacatttggatttccgagactaaccaacttaacggattctggggtaattggggggttttgcacaggtgaatcacactgagtcagcaagtttcgattttttggttttgttttgtaatgattgattaaatgtctaaagatatcacgaagtagatacagaagaactgtaaaagcaattgtgaccaaccattatgaatcatatatatattc

SEQ ID NO: 27536 - protein, 312 aa, Arabidopsis thaliana
  peptide (1)..(312): Ceres Seq. ID no. 13491652
MDFALFSSISIFEINHKDPPIRRFIKTQNRILSTRKQQGTFPKMKAELNLPAGFRFHPTDEELVKFYLCRRCASEPINVPVIAEIDLYKFNPWELPEMALYGEKEWYFFSHRDRKYPNGSRPNRAAGTGYWKATGADKPIGKPKTLGIKKALVFYAGKAPKGIKTNWIMHEYRLANVDRSASTNKKNNLRLDDWVLCRIYNKKGTMEKYLPAAAEKPTEKMSTSDSRCSSHVISPDVTCSDNWEVESEPKWINLEDALEAFNDDTSMFSSIGLLQNDAFVPQFQYQSSDFVDSFQDPFEQKPFLNWNFAPQG

SEQ ID NO: 27537 - protein, 269 aa, Arabidopsis thaliana
  peptide (1)..(269): Ceres Seq. ID no. 13491653
MKAELNLPAGFRFHPTDEELVKFYLCRRCASEPINVPVIAEIDLYKFNPWELPEMALYGEKEWYFFSHRDRKYPNGSRPNRAAGTGYWKATGADKPIGKPKTLGIKKALVFYAGKAPKGIKTNWIMHEYRLANVDRSASTNKKNNLRLDDWVLCRIYNKKGTMEKYLPAAAEKPTEKMSTSDSRCSSHVISPDVTCSDNWEVESEPKWINLEDALEAFNDDTSMFSSIGLLQNDAFVPQFQYQSSDFVDSFQDPFEQKPFLNWNFAPQG

SEQ ID NO: 27538 - protein, 215 aa, Arabidopsis thaliana
  peptide (1)..(215): Ceres Seq. ID no. 13491654
MALYGEKEWYFFSHRDRKYPNGSRPNRAAGTGYWKATGADKPIGKPKTLGIKKALVFYAGKAPKGIKTNWIMHEYRLANVDRSASTNKKNNLRLDDWVLCRIYNKKGTMEKYLPAAAEKPTEKMSTSDSRCSSHVISPDVTCSDNWEVESEPKWINLEDALEAFNDDTSMFSSIGLLQNDAFVPQFQYQSSDFVDSFQDPFEQKPFLNWNFAPQG

SEQ ID NO: 27539 - DNA, 1379 bp, Arabidopsis thaliana
  misc_feature (1)..(1379): Ceres Seq. ID no. 13489931
  misc_feature (1)..(1379): Ortholog of  Ceres SEQ ID NO 13598488 as cited in SEQ ID NO 63862
  misc_feature (1)..(1379): Ortholog of  Ceres SEQ ID NO 13659640 as cited in SEQ ID NO 67101
aaaaaaaaaacttcaaagagagagagagagagagttttgtgaactcaagaaaataaaaaaagttatagttaatgggattcggcttagagagtatcaaatcaatctccggcggatggggcgcggcggcgcgttcctgtgacgcttgtaaatcagttaccgccgccgtgttctgtcgagttgactcagctttcttatgcatagcatgtgacacaagaatccattccttcactcgccacgagcgcgtgtgggtttgtgaagtttgtgaacaagctcccgccgccgtcacttgcaaagccgacgccgccgctctttgcgtcagttgtgatgccgatattcactctgctaatcctctcgctagccgtcacgaacgtgtccccgtcgaaactttcttcgactcagccgaaaccgccgtcgccaaaatctcagcttcttcgacttttggtatccttggctcatccaccaccgttgatttaaccgctgttccggttatggctgatgatctcggtttatgtccgtggttacttcctaatgatttcaacgaaccggctaaaatcgaaatcggaactgaaaacatgaaaggttcttctgactttatgttttctgatttcgatcggcttattgatttcgagtttccgaattcgttcaatcatcatcaaaacaacgccggaggagatagtcttgttccggttcagacgaaaacagagcctctcccgttaactaacaatgatcattgcttcgatattgatttctgcagatcaaagctctctgctttcacttacccttctcaatcagtcagccacagtgtttcgacttcttctattgaatacggtgtagttcctgacggaaacacaaacaactctgttaaccggagcacgatcactagctcgacgactggtggtgatcatcaagcgagctctatggatagagaagctagggttttgaggtacagagagaagagaaagaacaggaaatttgagaagacgattcgttacgcttcgaggaaagcttatgcagagtcacggccaaggatcaaaggccggtttgcgaaaagaacagagacagaaaacgacgacattttccttagtcatgtttatgcttcagcagcacacgcacagtacggtgtcgtaccaacgttctgattcgaatctacggtggataaacaatcaacctgaagacttcatatcttccaccgttgatttacagtcggtgtataataagtatagtgagtcttaccgtagacaaacatcttatcctctttaccgttttaattactttttttttacgcgctctcactgccactgtaactcttttttttttttcttcctatatatgtatgcttatttttatttagaaaatgttatgaaatcatataatttggt

SEQ ID NO: 27540 - protein, 355 aa, Arabidopsis thaliana
  peptide (1)..(355): Ceres Seq. ID no. 13489932
MGFGLESIKSISGGWGAAARSCDACKSVTAAVFCRVDSAFLCIACDTRIHSFTRHERVWVCEVCEQAPAAVTCKADAAALCVSCDADIHSANPLASRHERVPVETFFDSAETAVAKISASSTFGILGSSTTVDLTAVPVMADDLGLCPWLLPNDFNEPAKIEIGTENMKGSSDFMFSDFDRLIDFEFPNSFNHHQNNAGGDSLVPVQTKTEPLPLTNNDHCFDIDFCRSKLSAFTYPSQSVSHSVSTSSIEYGVVPDGNTNNSVNRSTITSSTTGGDHQASSMDREARVLRYREKRKNRKFEKTIRYASRKAYAESRPRIKGRFAKRTETENDDIFLSHVYASAAHAQYGVVPTF

SEQ ID NO: 27541 - protein, 216 aa, Arabidopsis thaliana
  peptide (1)..(216): Ceres Seq. ID no. 13489933
MADDLGLCPWLLPNDFNEPAKIEIGTENMKGSSDFMFSDFDRLIDFEFPNSFNHHQNNAGGDSLVPVQTKTEPLPLTNNDHCFDIDFCRSKLSAFTYPSQSVSHSVSTSSIEYGVVPDGNTNNSVNRSTITSSTTGGDHQASSMDREARVLRYREKRKNRKFEKTIRYASRKAYAESRPRIKGRFAKRTETENDDIFLSHVYASAAHAQYGVVPTF

SEQ ID NO: 27542 - protein, 188 aa, Arabidopsis thaliana
  peptide (1)..(188): Ceres Seq. ID no. 13489934
MKGSSDFMFSDFDRLIDFEFPNSFNHHQNNAGGDSLVPVQTKTEPLPLTNNDHCFDIDFCRSKLSAFTYPSQSVSHSVSTSSIEYGVVPDGNTNNSVNRSTITSSTTGGDHQASSMDREARVLRYREKRKNRKFEKTIRYASRKAYAESRPRIKGRFAKRTETENDDIFLSHVYASAAHAQYGVVPTF

SEQ ID NO: 27543 - DNA, 1145 bp, Arabidopsis thaliana
  misc_feature (1)..(1145): Ceres Seq. ID no. 12340318
  misc_feature (1)..(1145): Ortholog of  Ceres SEQ ID NO 12598859 as cited in SEQ ID NO 62872
  misc_feature (1)..(1145): Ortholog of  Ceres SEQ ID NO 12617350 as cited in SEQ ID NO 63777
  misc_feature (1)..(1145): Ortholog of  Ceres SEQ ID NO 13598749 as cited in SEQ ID NO 64341
  misc_feature (1)..(1145): Ortholog of  Ceres SEQ ID NO 15176153 as cited in SEQ ID NO 0
  misc_feature (1)..(1145): Ortholog of  Ceres SEQ ID NO 15179157 as cited in SEQ ID NO 0
aaaccaatctaaacatcaaaagacaaaaaccaaagctctttcactattacacaaccttctatttcacttttcctcaaaaaaaaaagaaaaatgtattcgttagtgtttaaactctttctatttttgtcacttctccaaatctctgtctctgctagaaacctagcttcacaagaaccaaaccagtttcaactactcaagtaccacaaaggagctcttctctccggcaaaatctccgttaacctaatctggtacggcaaattcaaaccatctcaaagagcaatcatctccgacttcattacctcactcacacacacttctcctacgtccaaaactctccaccaaccatctgttgccacgtggtggaaaaccacagaaaaatactacaaactcgcaacacccagcaaaaactcatcacctctgtctctaactctcgggaaacaaatcatcgacgagtcttgctctctaggaaaatctttaaccgataaaaagattcaaaccctagcttcgaaaggagaccaacgcaacgccatcaacgtcgttttgacttcagctgacgttacggttacaggatttggtatgagtcgttgcgggactcacggacacgctcgtggtttaggtaaacgtggctccaagtttgcttacatttgggttggaaactctgagacacaatgtcctggtcaatgcgcgtggcctttccacgcgccggtgtacggtccacagagtccaccactagtggcaccaaacaatgacgtgggactcgatgggatggttattaacttagctagtcttttagctggaaccgcaacgaacccttttggtaatggttactatcaaggtccacaaaacgcaccgcttgaagctgcgtctgcttgtcctggcgtttatggtaaaggagcttatcctggttacgctggagatttgcttgtggatactacaacgggaggtagttttaatgcgtatggtgcaaacggcaggaagtttttgcttcctgctttgtatgatcctacgacgtcggcttgctctactatggtctgaatactaaaaaaaagtccaatgtttggtctttggtagtagaaaataatattctagcgtaattcttttgttatgtttggttacaaattctagtataattcaatttattcagt

SEQ ID NO: 27544 - protein, 314 aa, Arabidopsis thaliana
  peptide (1)..(314): Ceres Seq. ID no. 12340319
MYSLVFKLFLFLSLLQISVSARNLASQEPNQFQLLKYHKGALLSGKISVNLIWYGKFKPSQRAIISDFITSLTHTSPTSKTLHQPSVATWWKTTEKYYKLATPSKNSSPLSLTLGKQIIDESCSLGKSLTDKKIQTLASKGDQRNAINVVLTSADVTVTGFGMSRCGTHGHARGLGKRGSKFAYIWVGNSETQCPGQCAWPFHAPVYGPQSPPLVAPNNDVGLDGMVINLASLLAGTATNPFGNGYYQGPQNAPLEAASACPGVYGKGAYPGYAGDLLVDTTTGGSFNAYGANGRKFLLPALYDPTTSACSTMV

SEQ ID NO: 27545 - DNA, 1353 bp, Arabidopsis thaliana
  misc_feature (1)..(1353): Ceres Seq. ID no. 13622031
  misc_feature (1)..(1353): Ortholog of  Ceres SEQ ID NO 13596338 as cited in SEQ ID NO 68005
cagacaattatttgttcatcttgaatttgtgtcccaagaacatatctctctctctctctctcctcaccttggattctctgtttgatgattgctagttctttagaagagcaatgagttattctggagccggactcggaaagcctggctcaggtaaaaggagaataagggatcttttaactcaatctgataaccgagtctgcgctgattgtggcgctccagatcctaagtgggcgtcagctaatattggagtgtttatatgcttaaaatgttgtggtgtccacagaagccttggcagtcatatctcaaaggtcttatccgtgacattggatgaatggtcagatgaagaagtcgattcgatgattgaaattggaggaaatgcctctgcaaattcaatttacgaggcgtttattcctgaaggtagctctaagcctggacctgatgctagtcatgaccagcgtatgaggttcattaggtcgaaatatgagcaccaagagtttctgaaaccaagcttgcggatcacatccgtgaggggctctagtacaaagactccagcatttctttcatcgagtctatctaaaaagattgttgatagctttcgcactaattcatcatcgcaacagccgcaacttgaaggcatggttgagtttattggattgttgaaggtgactattaaaaagggtaccaatatggccatccgagatatgatgtcaagtgatccctatgttgtgttgactctaggacaacagaaggctcaatctactgtagtgaagagcaacttaaaccctgtctggaatgaggaactcatgctctctgttcctcataactatggctcagtgaaattgcaagtgtttgactatgacacattttctgctgatgacataatgggagaagctgagattgatatccagcctctgattacatctgcaatggcttttggagaccctgaaatgtttggagatatgcagattggaaaatggctgaaatcgcacgacaatgctcttatagaagatagcatcatcaacattgcagatggtaaagtgaagcaagaggttcaaatcaagcttcagaatgttgaatctggtgaactagaactagaaatggagtggctacctcttgagcaataaataatcaactatataatagggtcattatatataccaaacaaattttattactgtattcattattttaacattcccccttggttcttgtttgacaaatttttgaaactttgatctcattgaaaactttctttcgtactttgttgttgtaatgttcttttggcagattagatatttgtataactcaaatgattatatgttttgactcatgttcttcaaaagatttcatttg

SEQ ID NO: 27546 - protein, 337 aa, Arabidopsis thaliana
  peptide (1)..(337): Ceres Seq. ID no. 13622032
MSYSGAGLGKPGSGKRRIRDLLTQSDNRVCADCGAPDPKWASANIGVFICLKCCGVHRSLGSHISKVLSVTLDEWSDEEVDSMIEIGGNASANSIYEAFIPEGSSKPGPDASHDQRMRFIRSKYEHQEFLKPSLRITSVRGSSTKTPAFLSSSLSKKIVDSFRTNSSSQQPQLEGMVEFIGLLKVTIKKGTNMAIRDMMSSDPYVVLTLGQQKAQSTVVKSNLNPVWNEELMLSVPHNYGSVKLQVFDYDTFSADDIMGEAEIDIQPLITSAMAFGDPEMFGDMQIGKWLKSHDNALIEDSIINIADGKVKQEVQIKLQNVESGELELEMEWLPLEQ

SEQ ID NO: 27547 - protein, 255 aa, Arabidopsis thaliana
  peptide (1)..(255): Ceres Seq. ID no. 13622033
MIEIGGNASANSIYEAFIPEGSSKPGPDASHDQRMRFIRSKYEHQEFLKPSLRITSVRGSSTKTPAFLSSSLSKKIVDSFRTNSSSQQPQLEGMVEFIGLLKVTIKKGTNMAIRDMMSSDPYVVLTLGQQKAQSTVVKSNLNPVWNEELMLSVPHNYGSVKLQVFDYDTFSADDIMGEAEIDIQPLITSAMAFGDPEMFGDMQIGKWLKSHDNALIEDSIINIADGKVKQEVQIKLQNVESGELELEMEWLPLEQ

SEQ ID NO: 27548 - protein, 221 aa, Arabidopsis thaliana
  peptide (1)..(221): Ceres Seq. ID no. 13622034
MRFIRSKYEHQEFLKPSLRITSVRGSSTKTPAFLSSSLSKKIVDSFRTNSSSQQPQLEGMVEFIGLLKVTIKKGTNMAIRDMMSSDPYVVLTLGQQKAQSTVVKSNLNPVWNEELMLSVPHNYGSVKLQVFDYDTFSADDIMGEAEIDIQPLITSAMAFGDPEMFGDMQIGKWLKSHDNALIEDSIINIADGKVKQEVQIKLQNVESGELELEMEWLPLEQ

SEQ ID NO: 27549 - DNA, 1573 bp, Arabidopsis thaliana
  misc_feature (1)..(1573): Ceres Seq. ID no. 13489743
  misc_feature (1)..(1573): Ortholog of  Ceres SEQ ID NO 15172426 as cited in SEQ ID NO 59156
gtcaaatcattttcgacgactgttattaataattaattcgttaatgacgcaccgttagtcaactccgcttcgtattaattactcctccgatctctttcttattcttctccggcgacacttcccttgcttctccctcttaggactctctctacgaatctgtaagcttcaaattcttacgccacactccgagattcgcttctgattattgtatgaatttttgagctccaaggatccactgccatgtatttatgctgctaaagcttgaaggcagtagtggaatcaccattaagttctttgctttgtaatttagcttgatttgagaataaacaaatgggaaaagcatcaggcttgcttctgtttctcttgggttttgggttctttgttgtcacatataatcttctgacacttatagttcacaatagatctggtgtgagtaattcagatggaagtccacttctggatcctgttgttcagatgcctctaaatattaggaaagccaagagttctccagcaccttttcatgttgccttaacagctacagatgcaccttataataagtggcagtgtcgtattatgtattattggtataagcagaagaaagctcttcctggttctgatatgggtggcttcacccgtattttgcattccggtaattctgataacttgatggatgaaatacccacatttgtggttgatcctcttcctccaggtcttgatcgggggtatgttgtcttgaatagaccatgggcattcgtgcaatggcttgaaagagctaccatcaaggaagactatgtgctcatggcagagcctgatcatgtatttgttaatccccttcccaatttggctgttggaggattcccagccgcttttccgtttttctatattactcctgaaaagtatgaaaacatagtcagaaagtattatccagcggagatggggccagtaacaaatatcgaccccattggcaactctcctgttatcataagcaaggaatcacttgaaaagattgctcctacatggatgaatgtctcgctgacaatgaaaaacgatccagaaactgataaggcatttggatgggtgctggaaatgtacggttacgcaattgcatctgctatacatggggtgcgtcacatacttcggaaggatttcatgcttcagcctccgtgggatttgtctaccaaggggaagtttatcattcattacacttatggatgcgactacaacatgaagggggagctgacatatggcaaaataggagagtggcgattcgataagagatcacatttgcggggtcctcctccaaggaacatgtccttgccgcctcccggtgttcccgaaagtgtggtgacacttgtgaagatggtgaatgaagctactgcgactatccctaattgggacactctctaactcacatccacacacaaaacacaaaccatagggacaaatccatacagcaacaatattttgcctaatttttttttccttctccctttacttcccttcttgtctgttttttcttgtaatggttaaattatgaacttgagtagtaaattacaaaattatttgtttgact

SEQ ID NO: 27550 - protein, 358 aa, Arabidopsis thaliana
  peptide (1)..(358): Ceres Seq. ID no. 13489744
MGKASGLLLFLLGFGFFVVTYNLLTLIVHNRSGVSNSDGSPLLDPVVQMPLNIRKAKSSPAPFHVALTATDAPYNKWQCRIMYYWYKQKKALPGSDMGGFTRILHSGNSDNLMDEIPTFVVDPLPPGLDRGYVVLNRPWAFVQWLERATIKEDYVLMAEPDHVFVNPLPNLAVGGFPAAFPFFYITPEKYENIVRKYYPAEMGPVTNIDPIGNSPVIISKESLEKIAPTWMNVSLTMKNDPETDKAFGWVLEMYGYAIASAIHGVRHILRKDFMLQPPWDLSTKGKFIIHYTYGCDYNMKGELTYGKIGEWRFDKRSHLRGPPPRNMSLPPPGVPESVVTLVKMVNEATATIPNWDTL

SEQ ID NO: 27551 - protein, 310 aa, Arabidopsis thaliana
  peptide (1)..(310): Ceres Seq. ID no. 13489745
MPLNIRKAKSSPAPFHVALTATDAPYNKWQCRIMYYWYKQKKALPGSDMGGFTRILHSGNSDNLMDEIPTFVVDPLPPGLDRGYVVLNRPWAFVQWLERATIKEDYVLMAEPDHVFVNPLPNLAVGGFPAAFPFFYITPEKYENIVRKYYPAEMGPVTNIDPIGNSPVIISKESLEKIAPTWMNVSLTMKNDPETDKAFGWVLEMYGYAIASAIHGVRHILRKDFMLQPPWDLSTKGKFIIHYTYGCDYNMKGELTYGKIGEWRFDKRSHLRGPPPRNMSLPPPGVPESVVTLVKMVNEATATIPNWDTL

SEQ ID NO: 27552 - protein, 277 aa, Arabidopsis thaliana
  peptide (1)..(277): Ceres Seq. ID no. 13489746
MYYWYKQKKALPGSDMGGFTRILHSGNSDNLMDEIPTFVVDPLPPGLDRGYVVLNRPWAFVQWLERATIKEDYVLMAEPDHVFVNPLPNLAVGGFPAAFPFFYITPEKYENIVRKYYPAEMGPVTNIDPIGNSPVIISKESLEKIAPTWMNVSLTMKNDPETDKAFGWVLEMYGYAIASAIHGVRHILRKDFMLQPPWDLSTKGKFIIHYTYGCDYNMKGELTYGKIGEWRFDKRSHLRGPPPRNMSLPPPGVPESVVTLVKMVNEATATIPNWDTL

SEQ ID NO: 27553 - DNA, 1347 bp, Arabidopsis thaliana
  misc_feature (1)..(1347): Ceres Seq. ID no. 12357669
  misc_feature (1)..(1347): Ortholog of  Ceres SEQ ID NO 12364737 as cited in SEQ ID NO 51089
  misc_feature (1)..(1347): Ortholog of  Ceres SEQ ID NO 14311515 as cited in SEQ ID NO 51680
  misc_feature (1)..(1347): Ortholog of  Ceres SEQ ID NO 14306553 as cited in SEQ ID NO 53121
  misc_feature (1)..(1347): Ortholog of  Ceres SEQ ID NO 14315035 as cited in SEQ ID NO 56880
  misc_feature (1)..(1347): Ortholog of  Ceres SEQ ID NO 13594276 as cited in SEQ ID NO 57728
  misc_feature (1)..(1347): Ortholog of  Ceres SEQ ID NO 13594147 as cited in SEQ ID NO 58975
  misc_feature (1)..(1347): Ortholog of  Ceres SEQ ID NO 13655302 as cited in SEQ ID NO 63307
  misc_feature (1)..(1347): Ortholog of  Ceres SEQ ID NO 13597380 as cited in SEQ ID NO 64054
  misc_feature (1)..(1347): Ortholog of  Ceres SEQ ID NO 12625474 as cited in SEQ ID NO 64169
  misc_feature (1)..(1347): Ortholog of  Ceres SEQ ID NO 13597502 as cited in SEQ ID NO 64681
aacacatttcaccacaacgaccaccactcctacactaacacttatatcaccaacacattgtgttctactatacataaaattcagttcctaagtatttttgttttgttttgtgagatcgatggagagttacttgaggaaatggtgtttagtttctgtgtgggttttgcttttaggtttagggtttaaggtaaaagcagagcctcaagttccatgttacttcatctttggtgattctttggttgacaatggaaacaacaatcgtcttagatctattgcaagagccgattatttcccttacggcatcgatttcggcggccccaccggccgtttttccaacggcagaaccaccgtcgacgttctcactgagctacttggatttgataactacattcctgcgtatagtactgtgagtggccaagagatacttcaaggagtcaactacgcatctgcagctgctggaatcagagaagaaaccggtgcacaattgggacaaaggataacatttagtgggcaagtagagaattataagaacacagtggcacaagtggtggagattcttggagacgagtacactgcagcagattaccttaagagatgcatttactctgttggtatgggaagcaatgactatcttaataactacttcatgcctcagttctactccactagcagacagtacactcccgaacagtatgctgacgatcttatcagtcgttacagggaccagcttaatgcactgtacaactatggagctagaaagtttgcattggtaggaattggagccattggatgtagtccgaatgcgctcgcacagggcagccaagacggaacaacttgtgtggagcgtatcaactcggccaaccgaatcttcaacaacaggctcatatctatggtccaacaactaaacaacgctcattccgatgctagtttcacttacatcaatgcttatggcgcttttcaggatataatcgccaatccctctgcttatgggtttacgaatacgaacactgcgtgttgcggaattggaaggaacggaggtcagctaacatgtttaccgggagaacccccgtgcttgaaccgagatgagtacgtgttttgggatgcatttcatccttcggctgctgcaaacacggccattgcaaaaagatcttacaatgcacaaagatcttccgacgtttatccgattgatatctcgcaattagcacagctttgaaaggacagagaataggagagttttacaacaattgtatgcttttcaggttataaattgaattattggaaatgattctgatgttatgtgtgtacccaaagtgttcaactttatataaaaaaaatagggattgcatt

SEQ ID NO: 27554 - protein, 364 aa, Arabidopsis thaliana
  peptide (1)..(364): Ceres Seq. ID no. 12357670
MESYLRKWCLVSVWVLLLGLGFKVKAEPQVPCYFIFGDSLVDNGNNNRLRSIARADYFPYGIDFGGPTGRFSNGRTTVDVLTELLGFDNYIPAYSTVSGQEILQGVNYASAAAGIREETGAQLGQRITFSGQVENYKNTVAQVVEILGDEYTAADYLKRCIYSVGMGSNDYLNNYFMPQFYSTSRQYTPEQYADDLISRYRDQLNALYNYGARKFALVGIGAIGCSPNALAQGSQDGTTCVERINSANRIFNNRLISMVQQLNNAHSDASFTYINAYGAFQDIIANPSAYGFTNTNTACCGIGRNGGQLTCLPGEPPCLNRDEYVFWDAFHPSAAANTAIAKRSYNAQRSSDVYPIDISQLAQL

SEQ ID NO: 27555 - protein, 199 aa, Arabidopsis thaliana
  peptide (1)..(199): Ceres Seq. ID no. 12357671
MGSNDYLNNYFMPQFYSTSRQYTPEQYADDLISRYRDQLNALYNYGARKFALVGIGAIGCSPNALAQGSQDGTTCVERINSANRIFNNRLISMVQQLNNAHSDASFTYINAYGAFQDIIANPSAYGFTNTNTACCGIGRNGGQLTCLPGEPPCLNRDEYVFWDAFHPSAAANTAIAKRSYNAQRSSDVYPIDISQLAQL

SEQ ID NO: 27556 - protein, 188 aa, Arabidopsis thaliana
  peptide (1)..(188): Ceres Seq. ID no. 12357672
MPQFYSTSRQYTPEQYADDLISRYRDQLNALYNYGARKFALVGIGAIGCSPNALAQGSQDGTTCVERINSANRIFNNRLISMVQQLNNAHSDASFTYINAYGAFQDIIANPSAYGFTNTNTACCGIGRNGGQLTCLPGEPPCLNRDEYVFWDAFHPSAAANTAIAKRSYNAQRSSDVYPIDISQLAQL

SEQ ID NO: 27557 - DNA, 1208 bp, Arabidopsis thaliana
  misc_feature (1)..(1208): Ceres Seq. ID no. 12348436
  misc_feature (1)..(1208): Ortholog of  Ceres SEQ ID NO 13659643 as cited in SEQ ID NO 67106
ataacgaagcggttggaagaagatgaaactgttcgacgcgcactgtcaccttcaagacccgaggattatcaccaaagctcctcagataatcacctccgccgttgcttccggcgtctctgctttcgccgtcaatggagtctccgagaaagattggagtttggtcaaagagatgggagctaaatacccttctgttgttccttgctttgggatccatccatggtatgtagcagagaggagtcctcaatggtttgagacataagagtttctttgagaccactcctactgctgctgttggagaaattggtttggacaaagggtctaagggaagggagattgatttctcagaacaggttaccgtctttcgtcaacagcttgaacttgcaaaggaattgaagaaacctgcgtcagttcattgtgttcgtgcatttggggatctactcgagatattaaaatctgtagggccttttccttctggggtcatgcttcactcgtatttgggttctgctgagatggttcctgaatttgctaagctcggtgcatatttctccttctccggtttccttatgtccatgagtgagaaaaaagccaagaagatgttgaaagcagttccatctgataggatcttattggagacggattcaccagatgcactaccaaaggcagagtcaggttgtctctactttgtagacggagatccttctctacccgaagaaggaaattcagctcaggatcttgattctgcttcatatgataagcctaatgtgtctagtgactcgatgaagttaacaaaggaaacacttaatcacccggctaatattcatatcgtactcggatatgtagcgcagttgttggatatgaagaatgaagaactcgcggaactaagttatcaaaatgctgttcggttattctcttacgaaggttcaaagatacttcttgacagaggtactggtgatgtctctggtcacactcaaaaccagtcaacaacacatgtatcatgagttcttacttcttaagaaatcgtagtgtttctcatcactctattacgagtctttgaatttggactctctcttttttttttctttttttttgaatgtttgaatttggaattattgtactagtgttatagacaatcacacttttctttgtacaaactacaaaggttctgattttgtgtgaaaattaattcagttaatgatgtgattagagcc

SEQ ID NO: 27558 - protein, 172 aa, Arabidopsis thaliana
  peptide (1)..(172): Ceres Seq. ID no. 12348437
MLHSYLGSAEMVPEFAKLGAYFSFSGFLMSMSEKKAKKMLKAVPSDRILLETDSPDALPKAESGCLYFVDGDPSLPEEGNSAQDLDSASYDKPNVSSDSMKLTKETLNHPANIHIVLGYVAQLLDMKNEELAELSYQNAVRLFSYEGSKILLDRGTGDVSGHTQNQSTTHVS

SEQ ID NO: 27559 - protein, 162 aa, Arabidopsis thaliana
  peptide (1)..(162): Ceres Seq. ID no. 12348438
MVPEFAKLGAYFSFSGFLMSMSEKKAKKMLKAVPSDRILLETDSPDALPKAESGCLYFVDGDPSLPEEGNSAQDLDSASYDKPNVSSDSMKLTKETLNHPANIHIVLGYVAQLLDMKNEELAELSYQNAVRLFSYEGSKILLDRGTGDVSGHTQNQSTTHVS

SEQ ID NO: 27560 - protein, 144 aa, Arabidopsis thaliana
  peptide (1)..(144): Ceres Seq. ID no. 12348439
MSMSEKKAKKMLKAVPSDRILLETDSPDALPKAESGCLYFVDGDPSLPEEGNSAQDLDSASYDKPNVSSDSMKLTKETLNHPANIHIVLGYVAQLLDMKNEELAELSYQNAVRLFSYEGSKILLDRGTGDVSGHTQNQSTTHVS

SEQ ID NO: 27561 - DNA, 1518 bp, Arabidopsis thaliana
  misc_feature (1)..(1518): Ceres Seq. ID no. 12466440
  misc_feature (1)..(1518): Ortholog of  Ceres SEQ ID NO 15179609 as cited in SEQ ID NO 0
aaacctaatctcatcaccttctcttccctccactcaaatctctcctctcttctttcttcttcttcaatacaatacaatcaaaagaacagagagataaggttagagcaaaacactgtctgaaacaaacaacaaaaaaatggcttgctctaatctaacaacaatgtgggtttcatcaaaaccatctctttctgctgattcatcttccttatcattccgatctgttctcaagtgcccaactaacacttcctcacctccttcacgagcttcctctgtttcaccactccaagcgtctcttcgtgagctcagagaccgtatcgattcagtcaaaaacactcaaaagatcaccgaagctatgaagcttgtcgctgcagctaaagtcaggagagctcaagaagctgttgtcaatggacgaccattctcagaaaccctagttgaagttctttacaacatcaacgaacagcttcaaaccgatgatgtcgatgttcccttaaccaaagtcagaccggttaagaaagtagctctcgttgtcgtcaccggtgatcgtggattatgtggtggattcaacaatttcatcattaagaaagcagaggcaagaatcaaagagcttaaaggtctaggtcttgaatacacagtcattagcgtgggcaagaagggaaattcttatttcctccgtcgcccgtacatccccgtcgacaaatacctagaagccggaactttacctacggctaaagaagctcaagctgtggctgatgatgtcttctctctgtttataagtgaagaagtcgacaaagtcgagctcttgtacacaaagtttgtctctttggtcaaatcagaacccgtgatccacacgctactgcctttatcacctaaaggagagatctgtgacattaatggaacctgtgtggatgctgcggaagatgagtttttcaggttaacgacaaaagaagggaaattgacagttgaaagagagacttttaggacaccaacagctgatttctcgccgatcttgcaattcgagcaagaccctgttcagattcttgatgctttgttgcctctgtatcttaacagtcagattcttagggcattacaggagtcattggctagtgagcttgcagctagaatgagtgcaatgagtagtgcttcggataatgcatcggatctcaagaaatcgctttcgatggtgtataatagaaagcgtcaagctaagattactggagagattcttgagattgttgctggagctaatgcacaggtttgatttgttttgaaccctctttgaatcttctatatgagtccaaaactctcttcttcttctttttttttcgttatcgtttgtataatgtataattgataatctctagaactctttataatcatgcaattacaaacaaaaacgcggttgtatctattttggcttttcattggataaaatgatggagatcttcgttgaatatttgtggatgatgaagagtttttgtaggatcctttggaggaataagattttggtttctttggttg

SEQ ID NO: 27562 - protein, 373 aa, Arabidopsis thaliana
  peptide (1)..(373): Ceres Seq. ID no. 12466441
MACSNLTTMWVSSKPSLSADSSSLSFRSVLKCPTNTSSPPSRASSVSPLQASLRELRDRIDSVKNTQKITEAMKLVAAAKVRRAQEAVVNGRPFSETLVEVLYNINEQLQTDDVDVPLTKVRPVKKVALVVVTGDRGLCGGFNNFIIKKAEARIKELKGLGLEYTVISVGKKGNSYFLRRPYIPVDKYLEAGTLPTAKEAQAVADDVFSLFISEEVDKVELLYTKFVSLVKSEPVIHTLLPLSPKGEICDINGTCVDAAEDEFFRLTTKEGKLTVERETFRTPTADFSPILQFEQDPVQILDALLPLYLNSQILRALQESLASELAARMSAMSSASDNASDLKKSLSMVYNRKRQAKITGEILEIVAGANAQV

SEQ ID NO: 27563 - protein, 365 aa, Arabidopsis thaliana
  peptide (1)..(365): Ceres Seq. ID no. 12466442
MWVSSKPSLSADSSSLSFRSVLKCPTNTSSPPSRASSVSPLQASLRELRDRIDSVKNTQKITEAMKLVAAAKVRRAQEAVVNGRPFSETLVEVLYNINEQLQTDDVDVPLTKVRPVKKVALVVVTGDRGLCGGFNNFIIKKAEARIKELKGLGLEYTVISVGKKGNSYFLRRPYIPVDKYLEAGTLPTAKEAQAVADDVFSLFISEEVDKVELLYTKFVSLVKSEPVIHTLLPLSPKGEICDINGTCVDAAEDEFFRLTTKEGKLTVERETFRTPTADFSPILQFEQDPVQILDALLPLYLNSQILRALQESLASELAARMSAMSSASDNASDLKKSLSMVYNRKRQAKITGEILEIVAGANAQV

SEQ ID NO: 27564 - protein, 301 aa, Arabidopsis thaliana
  peptide (1)..(301): Ceres Seq. ID no. 12466443
MKLVAAAKVRRAQEAVVNGRPFSETLVEVLYNINEQLQTDDVDVPLTKVRPVKKVALVVVTGDRGLCGGFNNFIIKKAEARIKELKGLGLEYTVISVGKKGNSYFLRRPYIPVDKYLEAGTLPTAKEAQAVADDVFSLFISEEVDKVELLYTKFVSLVKSEPVIHTLLPLSPKGEICDINGTCVDAAEDEFFRLTTKEGKLTVERETFRTPTADFSPILQFEQDPVQILDALLPLYLNSQILRALQESLASELAARMSAMSSASDNASDLKKSLSMVYNRKRQAKITGEILEIVAGANAQV

SEQ ID NO: 27565 - DNA, 1234 bp, Arabidopsis thaliana
  misc_feature (1)..(1234): Ceres Seq. ID no. 12581463
  misc_feature (1)..(1234): Ortholog of  Ceres SEQ ID NO 13593831 as cited in SEQ ID NO 53828
aacaaaattttatgttattgtcaatttgtcatcatcgtctttattttttatttctcaactttctttgcattacatcttccaactatataattaaccactctactttctcaaatcccacactcagagaagaagaagaagaaaaaaaacagagctttacaatttctctctacagagatcgaagatatggaaggcaaggaagaagacgttagagttggagctaacaagctcccggagagacaaccaatcggaacatcagctcagagtgacaaggactacaaggaaccaccaccagctccgtttttcgaacctggtgagctttcttcatggtctttttggagagctgggatcgctgagttcatcgctacttttctctttctctacatcactgtcttgactgttatgggagtgaaaaggtcaccgaacatgtgtgcttccgtcggaatccaaggaatcgcttgggctttcggtggtatgatatttgccttagtctactgtaccgctggtatctccggtggacacatcaacccagcggttacttttggtctgttcttagcccggaagctgtcgcttactagagctctgtactacatagtgatgcagtgcttgggagctatctgtggtgctggagtggttaaagggttccagcctaagcaataccaggctctaggaggaggagctaacactgtggctcatggttacaccaagggaagtggtcttggagctgagatcattggcacattcgttcttgtatacacagtcttctcagcaactgacgccaagagaaatgctcgtgactctcatgtccctattcttgcaccactcccaatcgggtttgcggttttcttggttcacttggcaaccatcccaatcactggcacaggcatcaacccagctagaagccttggagctgcaatcatctacaacaaagaccattcctgggatgaccactgggtgttttgggttggccccttcattggagctgcacttgctgctctttaccatgtggttgtcatcagagccatccccttcaagtccagaagctaagtaaaaacaagacatcaagtcctctggtttctggccttgtccttagttgcttctatagttctattgttgatctactacatgtatgtgtgcaatgtgtttatctatgtgccctcttaatgcaatatttgtaaacaaggaagaagttccaaaggagaattatttgcaaattatgatgtttaacatgtttatt

SEQ ID NO: 27566 - protein, 286 aa, Arabidopsis thaliana
  peptide (1)..(286): Ceres Seq. ID no. 12581464
MEGKEEDVRVGANKLPERQPIGTSAQSDKDYKEPPPAPFFEPGELSSWSFWRAGIAEFIATFLFLYITVLTVMGVKRSPNMCASVGIQGIAWAFGGMIFALVYCTAGISGGHINPAVTFGLFLARKLSLTRALYYIVMQCLGAICGAGVVKGFQPKQYQALGGGANTVAHGYTKGSGLGAEIIGTFVLVYTVFSATDAKRNARDSHVPILAPLPIGFAVFLVHLATIPITGTGINPARSLGAAIIYNKDHSWDDHWVFWVGPFIGAALAALYHVVVIRAIPFKSRS

SEQ ID NO: 27567 - protein, 214 aa, Arabidopsis thaliana
  peptide (1)..(214): Ceres Seq. ID no. 12581465
MGVKRSPNMCASVGIQGIAWAFGGMIFALVYCTAGISGGHINPAVTFGLFLARKLSLTRALYYIVMQCLGAICGAGVVKGFQPKQYQALGGGANTVAHGYTKGSGLGAEIIGTFVLVYTVFSATDAKRNARDSHVPILAPLPIGFAVFLVHLATIPITGTGINPARSLGAAIIYNKDHSWDDHWVFWVGPFIGAALAALYHVVVIRAIPFKSRS

SEQ ID NO: 27568 - protein, 206 aa, Arabidopsis thaliana
  peptide (1)..(206): Ceres Seq. ID no. 12581466
MCASVGIQGIAWAFGGMIFALVYCTAGISGGHINPAVTFGLFLARKLSLTRALYYIVMQCLGAICGAGVVKGFQPKQYQALGGGANTVAHGYTKGSGLGAEIIGTFVLVYTVFSATDAKRNARDSHVPILAPLPIGFAVFLVHLATIPITGTGINPARSLGAAIIYNKDHSWDDHWVFWVGPFIGAALAALYHVVVIRAIPFKSRS

SEQ ID NO: 27569 - DNA, 1061 bp, Arabidopsis thaliana
  misc_feature (1)..(1061): Ceres Seq. ID no. 13489980
  misc_feature (1)..(1061): Ortholog of  Ceres SEQ ID NO 14305022 as cited in SEQ ID NO 53586
  misc_feature (1)..(1061): Ortholog of  Ceres SEQ ID NO 12506279 as cited in SEQ ID NO 55440
  misc_feature (1)..(1061): Ortholog of  Ceres SEQ ID NO 13654847 as cited in SEQ ID NO 62459
  misc_feature (1)..(1061): Ortholog of  Ceres SEQ ID NO 15174357 as cited in SEQ ID NO 0
atggaactttaaaaaagttatgatgttatccaaggaagatggaaaaccctacacactaagcaaaaaataagatctttctctctctgacgacgcaatccctaatttctggttctccgttcgtcggcggagaagatgggattcctttccaataaaatctccagagacgatgtgaaaccaggcgatcacatctattcatggcgtcaagcctacatttacgctcatcacggaatctatgtaggtaatggacaagtcaaccattttactcgtggtgatggtcaagagactggaactgggactttcttggacaacatcattgttagttcatctcataatcatggagacaacccatgtcctgattgtggagatcgatccaatcttggcggtgttatatcttcctgccttgaatgtttccttgccggaggtgatctctatgtctttgagtacagtgtttcccctgctatctttcttgccaaacctcgaggcggcgtatgcactatagcatcttcagatcctccagaagaagtcatctatcgagcaaattttctcttgcaaaatggttttggtgtgtacaatgtcttcaagaacaactgtgaagattttgccatctattgcaaaacgggtttgctagtggcaaacaccgacgtgggaaggagtggtcaagctgcttcaattgttgcagctgccagtgttcttctttcttcaccactcaggtttgtagcaggttttggtggtttggctgtggctggctatggcatgtactgcaccagtcgcttagtttcagatataggcatgcgatgggatgtgagcaaggtgcctgttgagagactagttgctgatgtggcttgtatgtcggacatggaagctaaaccagaagatgagaagactacttaatccaaaactgctcacacctgtattaccatactggttgatctctgattgtaaatgttgtggcggaagtaagagaatctgcttctgctgtatcgtgttgtgcaacatttgtttatgtaattacgaaacttggcttttgattaacactgaactatgatgcttcattttattat

SEQ ID NO: 27570 - protein, 252 aa, Arabidopsis thaliana
  peptide (1)..(252): Ceres Seq. ID no. 13489981
MGFLSNKISRDDVKPGDHIYSWRQAYIYAHHGIYVGNGQVNHFTRGDGQETGTGTFLDNIIVSSSHNHGDNPCPDCGDRSNLGGVISSCLECFLAGGDLYVFEYSVSPAIFLAKPRGGVCTIASSDPPEEVIYRANFLLQNGFGVYNVFKNNCEDFAIYCKTGLLVANTDVGRSGQAASIVAAASVLLSSPLRFVAGFGGLAVAGYGMYCTSRLVSDIGMRWDVSKVPVERLVADVACMSDMEAKPEDEKTT

SEQ ID NO: 27571 - DNA, 1952 bp, Arabidopsis thaliana
  misc_feature (1)..(1952): Ceres Seq. ID no. 12370661
  misc_feature (1)..(1952): Ortholog of  Ceres SEQ ID NO 13594037 as cited in SEQ ID NO 55666
  misc_feature (1)..(1952): Ortholog of  Ceres SEQ ID NO 13657707 as cited in SEQ ID NO 66407
attatattttgttaagtccactcttctctctcatatcttctaaccaaaacagagtcacaaggggctcttaagcccttccaactaaattcttttcttttgttctcttgaaactgaatccaccagacaaaaaaatgggggttgatggtgaactgaaaaagaagaaatgcatcattgctggggttatcacagccttgctcgttctcatggttgtcgctgttggcatcacaacatcaagaaacaccagtcattcagaaaaaatcgtccctgtgcagattaaaacagccaccacggcagttgaagcagtttgtgcacctactgattacaaagagacttgtgtcaatagtctcatgaaagcttctcctgactctactcagcctcttgatctcattaagcttggcttcaacgtcaccattcgatccatagaagatagcatcaagaaagcttccgtggagctgacagccaaggcagctaatgacaaggataccaaaggggctttggagttgtgtgagaagcttatgaatgatgctacagatgatctgaagaagtgtcttgataactttgatgggttctcaattcctcagattgaggactttgtcgaagatcttcgtgtttggcttagtggctccattgcttatcaacaaacatgtatggatacgtttgaagaaactaactcgaaactttcacaagacatgcagaaaatctttaaaacatctagagaactcactagtaatggccttgccatgattactaacatctctaaccttctcggagagttcaacgtcacaggagtaaccggggatctcggtaaatacgcaagaaaacttttgtcggcggaagacggtataccaagttgggttggaccaaacactagacggctcatggcaacgaaaggaggtgtgaaagctaacgtggtggttgcacacgacggaagtggtcagtacaagactatcaatgaagccttgaatgcagtgcctaaagccaaccaaaagccatttgttatctacattaagcaaggtgtctataacgagaaagttgacgtcaccaagaaaatgactcatgtcactttcatcggtgatggaccaaccaaaactaagatcactggtagtctcaactattacattggcaaggtcaagacataccttactgccactgttgcgatcaatggtgataacttcacggcgaagaacatcgggtttgaaaacactgcaggtcccgaaggacatcaagctgtggccctaagagtctcggcggatttggccgtcttctacaactgccaaatcgatggttaccaagacacactctacgtccattctcatcgtcaattcttccgtgactgcacagtctcgggcaccgttgacttcattttcggcgatggtatagtagtcttacaaaactgtaacattgttgtgagaaaacccatgaaaagtcagtcttgcatgatcacagcccaaggccgctccgataaacgtgaatccaccggactcgtgctacaaaactgccatattaccggagaaccagcgtatattcccgtaaaatctataaacaaagcatatcttggaaggccatggaaagagttttcaagaaccattataatgggaacaaccatagacgacgttattgatccagcgggatggcttccttggaatggtgattttgcacttaatacgctttactatgctgagtatgagaataatgggcctgggtcaaaccaagcccaacgtgttaagtggcctggaattaagaaactatcgcccaagcaagctcttcgatttactcctgctaggtttttacgtggtaacttgtggattccaccaaatcgtgtgccttacatggggaattttcagtagattccaattggtgaattttccactttctgtgtgctctttaaaaaaaaaaatgaaggtgaataatttatatgcgtgtcttgtcttaaagtcctgacttgccgaaac

SEQ ID NO: 27572 - protein, 571 aa, Arabidopsis thaliana
  peptide (1)..(571): Ceres Seq. ID no. 12370662
MGVDGELKKKKCIIAGVITALLVLMVVAVGITTSRNTSHSEKIVPVQIKTATTAVEAVCAPTDYKETCVNSLMKASPDSTQPLDLIKLGFNVTIRSIEDSIKKASVELTAKAANDKDTKGALELCEKLMNDATDDLKKCLDNFDGFSIPQIEDFVEDLRVWLSGSIAYQQTCMDTFEETNSKLSQDMQKIFKTSRELTSNGLAMITNISNLLGEFNVTGVTGDLGKYARKLLSAEDGIPSWVGPNTRRLMATKGGVKANVVVAHDGSGQYKTINEALNAVPKANQKPFVIYIKQGVYNEKVDVTKKMTHVTFIGDGPTKTKITGSLNYYIGKVKTYLTATVAINGDNFTAKNIGFENTAGPEGHQAVALRVSADLAVFYNCQIDGYQDTLYVHSHRQFFRDCTVSGTVDFIFGDGIVVLQNCNIVVRKPMKSQSCMITAQGRSDKRESTGLVLQNCHITGEPAYIPVKSINKAYLGRPWKEFSRTIIMGTTIDDVIDPAGWLPWNGDFALNTLYYAEYENNGPGSNQAQRVKWPGIKKLSPKQALRFTPARFLRGNLWIPPNRVPYMGNFQ

SEQ ID NO: 27573 - protein, 547 aa, Arabidopsis thaliana
  peptide (1)..(547): Ceres Seq. ID no. 12370663
MVVAVGITTSRNTSHSEKIVPVQIKTATTAVEAVCAPTDYKETCVNSLMKASPDSTQPLDLIKLGFNVTIRSIEDSIKKASVELTAKAANDKDTKGALELCEKLMNDATDDLKKCLDNFDGFSIPQIEDFVEDLRVWLSGSIAYQQTCMDTFEETNSKLSQDMQKIFKTSRELTSNGLAMITNISNLLGEFNVTGVTGDLGKYARKLLSAEDGIPSWVGPNTRRLMATKGGVKANVVVAHDGSGQYKTINEALNAVPKANQKPFVIYIKQGVYNEKVDVTKKMTHVTFIGDGPTKTKITGSLNYYIGKVKTYLTATVAINGDNFTAKNIGFENTAGPEGHQAVALRVSADLAVFYNCQIDGYQDTLYVHSHRQFFRDCTVSGTVDFIFGDGIVVLQNCNIVVRKPMKSQSCMITAQGRSDKRESTGLVLQNCHITGEPAYIPVKSINKAYLGRPWKEFSRTIIMGTTIDDVIDPAGWLPWNGDFALNTLYYAEYENNGPGSNQAQRVKWPGIKKLSPKQALRFTPARFLRGNLWIPPNRVPYMGNFQ

SEQ ID NO: 27574 - protein, 499 aa, Arabidopsis thaliana
  peptide (1)..(499): Ceres Seq. ID no. 12370664
MKASPDSTQPLDLIKLGFNVTIRSIEDSIKKASVELTAKAANDKDTKGALELCEKLMNDATDDLKKCLDNFDGFSIPQIEDFVEDLRVWLSGSIAYQQTCMDTFEETNSKLSQDMQKIFKTSRELTSNGLAMITNISNLLGEFNVTGVTGDLGKYARKLLSAEDGIPSWVGPNTRRLMATKGGVKANVVVAHDGSGQYKTINEALNAVPKANQKPFVIYIKQGVYNEKVDVTKKMTHVTFIGDGPTKTKITGSLNYYIGKVKTYLTATVAINGDNFTAKNIGFENTAGPEGHQAVALRVSADLAVFYNCQIDGYQDTLYVHSHRQFFRDCTVSGTVDFIFGDGIVVLQNCNIVVRKPMKSQSCMITAQGRSDKRESTGLVLQNCHITGEPAYIPVKSINKAYLGRPWKEFSRTIIMGTTIDDVIDPAGWLPWNGDFALNTLYYAEYENNGPGSNQAQRVKWPGIKKLSPKQALRFTPARFLRGNLWIPPNRVPYMGNFQ

SEQ ID NO: 27575 - DNA, 1420 bp, Arabidopsis thaliana
  misc_feature (1)..(1420): Ceres Seq. ID no. 12331583
  misc_feature (1)..(1420): Ortholog of  Ceres SEQ ID NO 13596433 as cited in SEQ ID NO 68721
  misc_feature (1)..(1420): Ortholog of  Ceres SEQ ID NO 13599169 as cited in SEQ ID NO 0
gaagttcagacacctaggactataagtagacgatctcttattgtcttgtcttctcatcagacagacatcagatcagaagattttggtttcaagctcttcttctacgattccccgaagcttctggattgagatctctctctcaagcaatggcagctacaagtgagaaacagaacaccacaaagcctcctccttctccttctcctctccgcaattccaagttttgtcagcccaatatgaggatcttgatctctggaggagctggcttcattggttctcacttggatgataagcttatggaaaatgagaagaatgaggtggttgttgctgataactatttcactggctcaaaagaaaacctcaagaagtggatcggtcaccccaggtttgaacttattcgtcacgatgttaccgagcctttgttgatcgaggttgatcggatttaccatcttgcttgtcctgcctctcctatcttctacaaatacaaccctgttaagacaatcaagaccaatgtgattggtacactcaacatgctcggtcttgccaagcgtgttggagcaagaattttactaacctcaacctctgaagtgtatggagatcctctcatccaccctcaaccagagagctactggggaaatgtcaaccctattggggttcggagttgctatgacgaaggcaagcgggtagccgaaaccttgatgtttgactaccacagacaacatggcattgaaatccgcattgctagaatcttcaacacatatggtcctcgaatgaacatcgatgatgggcgtgttgtgagcaacttcattgctcaagcactccggggtgaggcattgacagttcagaaaccggggacacagacccgcagtttctgttatgtctccgacatggtggatggacttatccgtcttatggaaggcaatgatactggccctatcaacatcggtaacccaggtgagttcacaatggtggaactggctgagacggttaaggagcttattaacccaagcatagagataaagatggtggagaacacaccagatgatccaagacagaggaaaccagacattagtaaagccaaagaagtgttgggttgggagccaaaggtgaagctcagagaaggacttcctctcatggaagaagatttccgactaaggcttaacgtcccaagaaactaaaaccacaagaaaacacagacggttttgagttcacgagagttgtcagctgttgagttatatgatgatgctattatactacaaagtggtgggtttttgtttggtctcatgtgttattcatattgcttttgttcgtagaaaaataagttgggaatgggtctccttgtgaggaatggctcttctttgtttttcagtatattgtggtatggttattatttgtgtggttttaatgaaatttgttcacttag

SEQ ID NO: 27576 - protein, 342 aa, Arabidopsis thaliana
  peptide (1)..(342): Ceres Seq. ID no. 12331584
MAATSEKQNTTKPPPSPSPLRNSKFCQPNMRILISGGAGFIGSHLDDKLMENEKNEVVVADNYFTGSKENLKKWIGHPRFELIRHDVTEPLLIEVDRIYHLACPASPIFYKYNPVKTIKTNVIGTLNMLGLAKRVGARILLTSTSEVYGDPLIHPQPESYWGNVNPIGVRSCYDEGKRVAETLMFDYHRQHGIEIRIARIFNTYGPRMNIDDGRVVSNFIAQALRGEALTVQKPGTQTRSFCYVSDMVDGLIRLMEGNDTGPINIGNPGEFTMVELAETVKELINPSIEIKMVENTPDDPRQRKPDISKAKEVLGWEPKVKLREGLPLMEEDFRLRLNVPRN

SEQ ID NO: 27577 - protein, 313 aa, Arabidopsis thaliana
  peptide (1)..(313): Ceres Seq. ID no. 12331585
MRILISGGAGFIGSHLDDKLMENEKNEVVVADNYFTGSKENLKKWIGHPRFELIRHDVTEPLLIEVDRIYHLACPASPIFYKYNPVKTIKTNVIGTLNMLGLAKRVGARILLTSTSEVYGDPLIHPQPESYWGNVNPIGVRSCYDEGKRVAETLMFDYHRQHGIEIRIARIFNTYGPRMNIDDGRVVSNFIAQALRGEALTVQKPGTQTRSFCYVSDMVDGLIRLMEGNDTGPINIGNPGEFTMVELAETVKELINPSIEIKMVENTPDDPRQRKPDISKAKEVLGWEPKVKLREGLPLMEEDFRLRLNVPRN

SEQ ID NO: 27578 - protein, 293 aa, Arabidopsis thaliana
  peptide (1)..(293): Ceres Seq. ID no. 12331586
MENEKNEVVVADNYFTGSKENLKKWIGHPRFELIRHDVTEPLLIEVDRIYHLACPASPIFYKYNPVKTIKTNVIGTLNMLGLAKRVGARILLTSTSEVYGDPLIHPQPESYWGNVNPIGVRSCYDEGKRVAETLMFDYHRQHGIEIRIARIFNTYGPRMNIDDGRVVSNFIAQALRGEALTVQKPGTQTRSFCYVSDMVDGLIRLMEGNDTGPINIGNPGEFTMVELAETVKELINPSIEIKMVENTPDDPRQRKPDISKAKEVLGWEPKVKLREGLPLMEEDFRLRLNVPRN

SEQ ID NO: 27579 - DNA, 1089 bp, Arabidopsis thaliana
  misc_feature (1)..(1089): Ceres Seq. ID no. 13488415
  misc_feature (1)..(1089): Ortholog of  Ceres SEQ ID NO 15173851 as cited in SEQ ID NO 57413
aaaaacttgtctatgtatattaattaggaagcttgcagaaccacaaaaaaagacttttttgtcaattgattcgattcaagagttctttcaacgtttggagtagagagagtttaacctatttgaaagtctctgagaccggtgtggcatgacggtcgcggcgggtatcggctacgcgctggtggctttaggaccgtctctttcacttttcgtctccgtcatctccagaaagccctttctcatcctcactgttctctccagtacgttgctttggcttgtgagtctgatcatcttgtcgggattatggagaccatttcttcctctcaaagccaatgtgtggtggccttatgctgtacttgttatcacctctgtctgtttccaggaaggccttcgctttctcttctggaaggtctacaagaggcttgaggatgtcttggattcctttgcggatcgtatctcaaggccccgcctgtttctcactgataagctgcagattgctctagctggtggtttaggtcatggtgtggcgcatgctgtattcttttgtttgagcctcttaactccagcgtttggtccagccacattctatgtcgaaagatgttcgaaggtgccattttttctcatctctgcaatcattgctcttgcatttgttacgatccacacattctcgatggtcatcgctttcgaagggtatgcaaaagggaacaaagtagatcaaataatagttccagtcatacaccttactgctggaatgttgacattggtgaattttgcatcggaaggttgtgtgatcggcgttcctcttctttaccttgtggcatctttgactcttgtgcattgtggaaaaatggtttggcaaaggttgttggaaagccggaaccaaagcagcgcctcacggtaatctggcctcggtctcagaacaacaatagaacagtcgttaatatcattttatctcatgtcttggtttcttgcttgcaaatctcgtacgtctttatctcctaattgcttcgaaacttaaacccttatgttttcaaacgcacttatgatcctaaattatcaaaaaaaaaaacgaggaaattttatcattgaatc

SEQ ID NO: 27580 - protein, 250 aa, Arabidopsis thaliana
  peptide (1)..(250): Ceres Seq. ID no. 13488416
MTVAAGIGYALVALGPSLSLFVSVISRKPFLILTVLSSTLLWLVSLIILSGLWRPFLPLKANVWWPYAVLVITSVCFQEGLRFLFWKVYKRLEDVLDSFADRISRPRLFLTDKLQIALAGGLGHGVAHAVFFCLSLLTPAFGPATFYVERCSKVPFFLISAIIALAFVTIHTFSMVIAFEGYAKGNKVDQIIVPVIHLTAGMLTLVNFASEGCVIGVPLLYLVASLTLVHCGKMVWQRLLESRNQSSASR

SEQ ID NO: 27581 - protein, 134 aa, Arabidopsis thaliana
  peptide (1)..(134): Ceres Seq. ID no. 13488417
MFEGAIFSHLCNHCSCICYDPHILDGHRFRRVCKREQSRSNNSSSHTPYCWNVDIGEFCIGRLCDRRSSSLPCGIFDSCALWKNGLAKVVGKPEPKQRLTVIWPRSQNNNRTVVNIILSHVLVSCLQISYVFIS

SEQ ID NO: 27582 - DNA, 825 bp, Arabidopsis thaliana
  misc_feature (1)..(825): Ceres Seq. ID no. 12384990
  misc_feature (1)..(825): Ortholog of  Ceres SEQ ID NO 14306062 as cited in SEQ ID NO 57524
acaccaaacctctctctctatctctgtccaaataagaacaaaaaaagacaagattcagaaaaaaatggaggtttcgatgagaaagccttatttcatagaagaagaagacgatggttttgtttctttatctgagatggaagctggagtttcaagtccttcttgttacaactatcctcagagttattattataaccatcatcatcatcagtactctgtttcatctcccagatctggaaaatttcatgattttagattcgacaatagctattacggttatggacagcctcatttcttggactcttgcttcctctgcaagaaacgtcttggtgataacagagacatcttcatgtacagaggagacacaccgttctgtagtgaagagtgtagagaagaacagatagaaagagacgaagcaaaagagaagaaacagagtctgtctacatctgtgaaagctatgagaagaaatgaaaagcgaagctcttcttcttctccaactagatctcgtaactatgctttccgcactggaactgttgctgctgcctaatttaaagttataaaggaaaaaaagggagatagagaatccattaacgctcatattgctgtaaaagctagttaatggatttatgggttttttcttcatctaaagatctttctttagtttgaatttgaatactaaaccaaaaaaaaaatggttagggaaaaagaaaaaaaaaaaagcgaagaaacctctctttttttaaagggtttgtcctttctttgttttattttcatgtttattagttttgtttttcttgaagaaaaatatatatatgcaattttgggtgc

SEQ ID NO: 27583 - protein, 180 aa, Arabidopsis thaliana
  peptide (1)..(180): Ceres Seq. ID no. 12384991
HQTSLSISVQIRTKKDKIQKKMEVSMRKPYFIEEEDDGFVSLSEMEAGVSSPSCYNYPQSYYYNHHHHQYSVSSPRSGKFHDFRFDNSYYGYGQPHFLDSCFLCKKRLGDNRDIFMYRGDTPFCSEECREEQIERDEAKEKKQSLSTSVKAMRRNEKRSSSSSPTRSRNYAFRTGTVAAA

SEQ ID NO: 27584 - protein, 159 aa, Arabidopsis thaliana
  peptide (1)..(159): Ceres Seq. ID no. 12384992
MEVSMRKPYFIEEEDDGFVSLSEMEAGVSSPSCYNYPQSYYYNHHHHQYSVSSPRSGKFHDFRFDNSYYGYGQPHFLDSCFLCKKRLGDNRDIFMYRGDTPFCSEECREEQIERDEAKEKKQSLSTSVKAMRRNEKRSSSSSPTRSRNYAFRTGTVAAA

SEQ ID NO: 27585 - protein, 155 aa, Arabidopsis thaliana
  peptide (1)..(155): Ceres Seq. ID no. 12384993
MRKPYFIEEEDDGFVSLSEMEAGVSSPSCYNYPQSYYYNHHHHQYSVSSPRSGKFHDFRFDNSYYGYGQPHFLDSCFLCKKRLGDNRDIFMYRGDTPFCSEECREEQIERDEAKEKKQSLSTSVKAMRRNEKRSSSSSPTRSRNYAFRTGTVAAA

SEQ ID NO: 27586 - DNA, 1145 bp, Arabidopsis thaliana
  misc_feature (1)..(1145): Ceres Seq. ID no. 12394991
  misc_feature (1)..(1145): Ortholog of  Ceres SEQ ID NO 14315662 as cited in SEQ ID NO 53109
  misc_feature (1)..(1145): Ortholog of  Ceres SEQ ID NO 12620168 as cited in SEQ ID NO 66161
attcttttatctcttgagcacacacacacatacaagactctcctcacagaacgatttagatttaatcgggaaaaagttcagtcagtgacactaatgttcgaatcgaacatggttcttcaaacactatcttcttcttctcctccaattcaccgtctctatcttcaccattctcagattctcccttcttctgggtcacccagcaagatttctcttcaggcagatacatggaaggactttggccattcgatcttttcatgaaatttctgctagaggtttaccggctttgaacaaagcttccttgaagaagctaccaatcaaaggatctacctttctgctggggcagagcttgttgatggtttctgctcacccacagttggcagcagcagcagaaatcataaagcctgaaccgatttacgaagttggagagttatttgaacttagtattcagctttcttacttgctgttactactggggttgcttggagttggtactttctatgtgatccgtcaagtacttgtacgcagagaactagacctctccgctaaagaattgcaggagcaagtaaggagcggagatgcaagtgcaacagagctctttgagcttggtgcagtgatgttgagaaggaagttttatcctgcagccaacaagtttttgcaacaagctatccagaaatgggacggtgatgatcaagatcttgctcaggtctataacgctcttggagtgagttatgtacgagaggataaacttgacaaaggaattgctcagtttgaaatggcggtgaagctgcaacccggttatgtaacagcttggaacaaccttggggatgcttatgagaagaagaaggagttgcctttggcattgaatgcgtttgaagaagttttgttgtttgatccaaacaataaggtggctcggcctcggcgagatgcgttgaaggatcgcgtgaagctttataaaggtgttgtggctgttaagtctaagaaacggtgacggctcaaacaagatgcaaactctgaaccaagaaccgttggtctctctcccccttgtgtatttttttggtttggtaatatgtatggagattttgtgttaatatgaaaatgaaactttgttgttttttgtaaccaataaaatcagatgtttaaaactt

SEQ ID NO: 27587 - protein, 211 aa, Arabidopsis thaliana
  peptide (1)..(211): Ceres Seq. ID no. 12394992
MVSAHPQLAAAAEIIKPEPIYEVGELFELSIQLSYLLLLLGLLGVGTFYVIRQVLVRRELDLSAKELQEQVRSGDASATELFELGAVMLRRKFYPAANKFLQQAIQKWDGDDQDLAQVYNALGVSYVREDKLDKGIAQFEMAVKLQPGYVTAWNNLGDAYEKKKELPLALNAFEEVLLFDPNNKVARPRRDALKDRVKLYKGVVAVKSKKR

SEQ ID NO: 27588 - protein, 124 aa, Arabidopsis thaliana
  peptide (1)..(124): Ceres Seq. ID no. 12394993
MLRRKFYPAANKFLQQAIQKWDGDDQDLAQVYNALGVSYVREDKLDKGIAQFEMAVKLQPGYVTAWNNLGDAYEKKKELPLALNAFEEVLLFDPNNKVARPRRDALKDRVKLYKGVVAVKSKKR

SEQ ID NO: 27589 - DNA, 1518 bp, Arabidopsis thaliana
  misc_feature (1)..(1518): Ceres Seq. ID no. 12333361
  misc_feature (1)..(1518): Ortholog of  Ceres SEQ ID NO 15177368 as cited in SEQ ID NO 57336
acagaggaggaaaagaagcacattgtcgccgtctctttaacttccttcatcaatctccgtctcgtgaatctctgtttctttgatctgtaattgcgaattcgtcgtttcccaattttgaaattgttgtaatgtcggcggtctcgtgctccacggcgagttctagcggaggatgtgcatttaggtttcgatcaaagacatcaatccattctcctaatttcatcagaattgggacaaattctcagagtgacagattctgtaatcatcgtttggaattggtacatggaactcgtaaagtgaaaggagcatctgtacgtatggcattagttgaggagagacaatcaacgagcaaagatgttgctgagcctcctcgggtcctggcgtatgatcttgttcaaggagcacttgtgaaatggagatggaaggatgacaaatctgttccagatacacctactgctgttctcctacacggaattttagggagcgggaaaaactggggcacttttgctcgtagattggctcatgaattcccaacgtggcagtttctattggtagacctgcgttgccatggggattcaacatctctcaagaagagaggtccacactcggttgctactactgcttctgatgttctaaaacttgttggtcagttgaggttaacacctcgggtccttgttggtcatagctttggggggaaagttgtattaagcatggtagagcaagcagctaagcctcttccacgaccagtccgagcttgggtattggatgctactcctggtaaagttcgtgcaggaggagatggagaagatcatccacgagagcttatatcatttctacgtaaattgccaaaagtggtcttgtcaaagcgcgaggttcttaaagctcttataaatgaagggttttccaatgatgtcgcacagtgggtcattaccaatctcagacctactggaccatcagcttctagcttctcgtggacatttgacctagacgggatcgctgaactttaccagtcctacgaagagacaaatctatggaactttgttgagaatcttccaagaggagtacatgtgaattttctgaaagcggaaagaagcttgcaccgttgggccctagaagaccttcagcgaatccacgccgctgaagagctagcctctgaagaaggcggtggtgtagaaatgcatgtcttggaagatgccggtcattgggttcacacggataacccggatggtctcttcaggatcttgtcatcttctttccaggttctcagagcctagaggtgctgaacggtcttggttcggctctttttctgtgtaatacttgtggagaagttaggtctaaaaacagttgacagatacaatatcatatacatcaacactgtgtccgtgtaatgttctgtgtgacataagtaattcagaagtaacatcatatggctgtatcatccggtattattcttgactcgatgtcctttacattgcttttctttttttgtggttcacttagtcagagaaagttctaaagctc

SEQ ID NO: 27590 - protein, 380 aa, Arabidopsis thaliana
  peptide (1)..(380): Ceres Seq. ID no. 12333362
MSAVSCSTASSSGGCAFRFRSKTSIHSPNFIRIGTNSQSDRFCNHRLELVHGTRKVKGASVRMALVEERQSTSKDVAEPPRVLAYDLVQGALVKWRWKDDKSVPDTPTAVLLHGILGSGKNWGTFARRLAHEFPTWQFLLVDLRCHGDSTSLKKRGPHSVATTASDVLKLVGQLRLTPRVLVGHSFGGKVVLSMVEQAAKPLPRPVRAWVLDATPGKVRAGGDGEDHPRELISFLRKLPKVVLSKREVLKALINEGFSNDVAQWVITNLRPTGPSASSFSWTFDLDGIAELYQSYEETNLWNFVENLPRGVHVNFLKAERSLHRWALEDLQRIHAAEELASEEGGGVEMHVLEDAGHWVHTDNPDGLFRILSSSFQVLRA

SEQ ID NO: 27591 - protein, 318 aa, Arabidopsis thaliana
  peptide (1)..(318): Ceres Seq. ID no. 12333363
MALVEERQSTSKDVAEPPRVLAYDLVQGALVKWRWKDDKSVPDTPTAVLLHGILGSGKNWGTFARRLAHEFPTWQFLLVDLRCHGDSTSLKKRGPHSVATTASDVLKLVGQLRLTPRVLVGHSFGGKVVLSMVEQAAKPLPRPVRAWVLDATPGKVRAGGDGEDHPRELISFLRKLPKVVLSKREVLKALINEGFSNDVAQWVITNLRPTGPSASSFSWTFDLDGIAELYQSYEETNLWNFVENLPRGVHVNFLKAERSLHRWALEDLQRIHAAEELASEEGGGVEMHVLEDAGHWVHTDNPDGLFRILSSSFQVLRA

SEQ ID NO: 27592 - DNA, 1506 bp, Arabidopsis thaliana
  misc_feature (1)..(1506): Ceres Seq. ID no. 12331587
  misc_feature (1)..(1506): Ortholog of  Ceres SEQ ID NO 13655434 as cited in SEQ ID NO 64337
gattagcaaatattcgtgatattttagctgtatggttttggttccgatcacaaagagcatcgaatcgagctacttcctccgccggctttgctgtgtgtgtgatcgttcgtttactaaatctgaaacaagtatctaacgccttgccggagatgtcgagctcaggccaaactcagttccgttatacacagacgccgtcgaaggtggttcatctgcggaatcttccatgggaatgcgtcgaagaggagctcatcgacctttgcaaacgattcggcaagatcgtcaataccaagagcaatgtcggcgccaatcgcaatcaagctttcgtcgaatttgctgacttgaatcaagctatatcaatggtttcgtattatgcttcatcttcagagcccgcacagattcgtgggaaaactgtctatattcagtactctaatcgccatgagattgttaacaatcagagtcctggagatgtccctggaaatgtcctcttggttacctttgaaggagtggaatctcacgaagtcagcatcgatgttatccatctggtattttctgcttttggatttgtgcataaaattgccacatttgagaaagctgctggtttccaggcactagttcaatttactgatgtggagactgcatccgcggcaaggagtgcgttggatggcagaagtatacccaggtatctgctttccgcacatgttggttcgtgcagtttgcgaatgtcttattcagctcatactgatctcaacatcaagtttcagtcccaccggagcagagattacacaaatccataccttccagtgaatcagaccgcaatggatgggtctatgcagcctgctttaggtgctgacggcaagaaagttgaatctcagagcaacgtccttctcggtttgattgagaatatgcagtatgctgtcactgtggatgttcttcacacggtgttttctgcatatggaactgtccagaagattgctatatttgagaagaatggttcaacgcaagcattaattcaatactctgatataccaacagcagcaatggccaaagaagcactggaaggacactgcatttatgacggtggctactgtaagcttcgactatcatactctcgtcatactgatctgaatgttaaggcttttagcgacaaaagcagagactatacacttcctgatctaagcctacttgtggcacaaaaaggtcccgcggtgtcgggttctgcaccaccagcaggttggcagaacccgcaagcgcaaagtcaatactcaggttatggcggaagcccatatatgtacccatcatctgatcccaacggggcttcaccctcaggtcaacctccttactatggatgagatattgtttactaaaaatttcggattttgctgccactggggagtatttccatgtttaggtttgtttgaggttaaaagtgtgattgttctttcttttttgttgttgacataatttaagtgggaagaccaataataaatcgaatatgttgcgcttgct

SEQ ID NO: 27593 - protein, 448 aa, Arabidopsis thaliana
  peptide (1)..(448): Ceres Seq. ID no. 12331588
LANIRDILAVWFWFRSQRASNRATSSAGFAVCVIVRLLNLKQVSNALPEMSSSGQTQFRYTQTPSKVVHLRNLPWECVEEELIDLCKRFGKIVNTKSNVGANRNQAFVEFADLNQAISMVSYYASSSEPAQIRGKTVYIQYSNRHEIVNNQSPGDVPGNVLLVTFEGVESHEVSIDVIHLVFSAFGFVHKIATFEKAAGFQALVQFTDVETASAARSALDGRSIPRYLLSAHVGSCSLRMSYSAHTDLNIKFQSHRSRDYTNPYLPVNQTAMDGSMQPALGADGKKVESQSNVLLGLIENMQYAVTVDVLHTVFSAYGTVQKIAIFEKNGSTQALIQYSDIPTAAMAKEALEGHCIYDGGYCKLRLSYSRHTDLNVKAFSDKSRDYTLPDLSLLVAQKGPAVSGSAPPAGWQNPQAQSQYSGYGGSPYMYPSSDPNGASPSGQPPYYG

SEQ ID NO: 27594 - protein, 399 aa, Arabidopsis thaliana
  peptide (1)..(399): Ceres Seq. ID no. 12331589
MSSSGQTQFRYTQTPSKVVHLRNLPWECVEEELIDLCKRFGKIVNTKSNVGANRNQAFVEFADLNQAISMVSYYASSSEPAQIRGKTVYIQYSNRHEIVNNQSPGDVPGNVLLVTFEGVESHEVSIDVIHLVFSAFGFVHKIATFEKAAGFQALVQFTDVETASAARSALDGRSIPRYLLSAHVGSCSLRMSYSAHTDLNIKFQSHRSRDYTNPYLPVNQTAMDGSMQPALGADGKKVESQSNVLLGLIENMQYAVTVDVLHTVFSAYGTVQKIAIFEKNGSTQALIQYSDIPTAAMAKEALEGHCIYDGGYCKLRLSYSRHTDLNVKAFSDKSRDYTLPDLSLLVAQKGPAVSGSAPPAGWQNPQAQSQYSGYGGSPYMYPSSDPNGASPSGQPPYYG

SEQ ID NO: 27595 - protein, 330 aa, Arabidopsis thaliana
  peptide (1)..(330): Ceres Seq. ID no. 12331590
MVSYYASSSEPAQIRGKTVYIQYSNRHEIVNNQSPGDVPGNVLLVTFEGVESHEVSIDVIHLVFSAFGFVHKIATFEKAAGFQALVQFTDVETASAARSALDGRSIPRYLLSAHVGSCSLRMSYSAHTDLNIKFQSHRSRDYTNPYLPVNQTAMDGSMQPALGADGKKVESQSNVLLGLIENMQYAVTVDVLHTVFSAYGTVQKIAIFEKNGSTQALIQYSDIPTAAMAKEALEGHCIYDGGYCKLRLSYSRHTDLNVKAFSDKSRDYTLPDLSLLVAQKGPAVSGSAPPAGWQNPQAQSQYSGYGGSPYMYPSSDPNGASPSGQPPYYG

SEQ ID NO: 27596 - DNA, 1179 bp, Arabidopsis thaliana
  misc_feature (1)..(1179): Ceres Seq. ID no. 12394969
  misc_feature (1)..(1179): Ortholog of  Ceres SEQ ID NO 13596474 as cited in SEQ ID NO 62169
  misc_feature (1)..(1179): Ortholog of  Ceres SEQ ID NO 13598714 as cited in SEQ ID NO 62656
  misc_feature (1)..(1179): Ortholog of  Ceres SEQ ID NO 13596969 as cited in SEQ ID NO 63375
  misc_feature (1)..(1179): Ortholog of  Ceres SEQ ID NO 13597519 as cited in SEQ ID NO 64759
  misc_feature (1)..(1179): Ortholog of  Ceres SEQ ID NO 15170183 as cited in SEQ ID NO 65667
  misc_feature (1)..(1179): Ortholog of  Ceres SEQ ID NO 13596362 as cited in SEQ ID NO 67877
  misc_feature (1)..(1179): Ortholog of  Ceres SEQ ID NO 13587054 as cited in SEQ ID NO 0
aatatagtaccaactccattgaatgttaaaactcagaagaaagtggagtgatcatataacgacaatgaagaatctctttaacttgttccttatgtttttctttgcaatgccaattctttcactctccgagaatccaaccaatttcagcgagagttgcgaagacgggagtggagaaaccggttcaagctttggcatagggttcgatttggttcttgattttggtttataccggaatagctgccccgaagcagagtctatcgtctactcgtgggtggaaaccacggtgttagaggatccaagaatggctgcttctcttctccgtcttcatttccacgactgttttgtcaatggatgtgatgcttcggtgttgttagatgacacagaaggactggttggtgaaaaaacggcgcctcctaatctaaattctctacgagggttcgaagtgattgattcgataaagtctgatattgaatctgtatgtccagagaccgtctcatgcgcagacattcttgccatggctgctagagattcagtcgttgtgtcgggtggaccaaggtgggaggtggaagtaggaagaaaagacagtagaacagcaagcaaacaggcagcaacaaatggcttaccctcaccaaactcaaccgtatcaactctcatctctactttccagaatcttggcctttcacaaaccgacatggtcgctctttccggtggacatacattgggaaaggcacggtgcacttcgtttacagctcggttgcagccactgcaaactggacaaccagctaaccacggagacaaccttgagttcctcgagtcactgcaacagttatgctcgactgttggccccagtgtaggtatcactcagcttgacttggtgactccatcaacatttgacaaccagtactatgtaaacctcctctcgggtgagggattgcttccatcagaccaggctttagcggttcaagacccagggacaagggcgattgttgagacctacgcaacagatcagtcggttttctttgaggattttaagaacgctatggttaaaatgggagggatatccggtggtagtaatagcgagattaggaagaattgtagaatgattaactaaaaataaaagcccgacttattgaatgatatctaattatctatataaaaattaaagaagtccacctacgt

SEQ ID NO: 27597 - protein, 362 aa, Arabidopsis thaliana
  peptide (1)..(362): Ceres Seq. ID no. 12394970
MLKLRRKWSDHITTMKNLFNLFLMFFFAMPILSLSENPTNFSESCEDGSGETGSSFGIGFDLVLDFGLYRNSCPEAESIVYSWVETTVLEDPRMAASLLRLHFHDCFVNGCDASVLLDDTEGLVGEKTAPPNLNSLRGFEVIDSIKSDIESVCPETVSCADILAMAARDSVVVSGGPRWEVEVGRKDSRTASKQAATNGLPSPNSTVSTLISTFQNLGLSQTDMVALSGGHTLGKARCTSFTARLQPLQTGQPANHGDNLEFLESLQQLCSTVGPSVGITQLDLVTPSTFDNQYYVNLLSGEGLLPSDQALAVQDPGTRAIVETYATDQSVFFEDFKNAMVKMGGISGGSNSEIRKNCRMIN

SEQ ID NO: 27598 - protein, 348 aa, Arabidopsis thaliana
  peptide (1)..(348): Ceres Seq. ID no. 12394971
MKNLFNLFLMFFFAMPILSLSENPTNFSESCEDGSGETGSSFGIGFDLVLDFGLYRNSCPEAESIVYSWVETTVLEDPRMAASLLRLHFHDCFVNGCDASVLLDDTEGLVGEKTAPPNLNSLRGFEVIDSIKSDIESVCPETVSCADILAMAARDSVVVSGGPRWEVEVGRKDSRTASKQAATNGLPSPNSTVSTLISTFQNLGLSQTDMVALSGGHTLGKARCTSFTARLQPLQTGQPANHGDNLEFLESLQQLCSTVGPSVGITQLDLVTPSTFDNQYYVNLLSGEGLLPSDQALAVQDPGTRAIVETYATDQSVFFEDFKNAMVKMGGISGGSNSEIRKNCRMIN

SEQ ID NO: 27599 - protein, 339 aa, Arabidopsis thaliana
  peptide (1)..(339): Ceres Seq. ID no. 12394972
MFFFAMPILSLSENPTNFSESCEDGSGETGSSFGIGFDLVLDFGLYRNSCPEAESIVYSWVETTVLEDPRMAASLLRLHFHDCFVNGCDASVLLDDTEGLVGEKTAPPNLNSLRGFEVIDSIKSDIESVCPETVSCADILAMAARDSVVVSGGPRWEVEVGRKDSRTASKQAATNGLPSPNSTVSTLISTFQNLGLSQTDMVALSGGHTLGKARCTSFTARLQPLQTGQPANHGDNLEFLESLQQLCSTVGPSVGITQLDLVTPSTFDNQYYVNLLSGEGLLPSDQALAVQDPGTRAIVETYATDQSVFFEDFKNAMVKMGGISGGSNSEIRKNCRMIN

SEQ ID NO: 27600 - DNA, 1167 bp, Arabidopsis thaliana
  misc_feature (1)..(1167): Ceres Seq. ID no. 12327065
  misc_feature (1)..(1167): Ortholog of  Ceres SEQ ID NO 15170881 as cited in SEQ ID NO 54654
aatttcagttctagggttttaatttgatacgaggtcagcgaatccggcgacgaatatccgccactagtaactctagctcaggtaaggatttgtgtccatggcagctttgcaaacgcttcgtgaatggatcggtatccagcagttcccacctgctactcaatctaaattgctcgagatccttgggaagtataaagaagaggatgtgagctcgctaacggtccttgtaattgggaaaagtggtgttggaaagtcatcaactgtgaattcagttataggcgagaaagctgctgcagttagtactttccagtctgaaggactgaggcctaccttggtctctcgcacaagatcgggatttacattgaatatcatcgacactcctggtcttattgagggaggatatgtgaatgatcaagccatcaacattataaaacgatttctcctcaacatgactatagatgtgctactatacgtagaccgtttggatgtgtaccgggtggatgaccttgataggcaagttgtcggtgctataactgatgcatttggtaaagagatatggaagaagtctgctcttgttctcacccatgctcagttctctccaccagacgggttaaattataaccactttgtctccaaaagatctaatgctcttctaaaagttatccagacaggcgctcaactgaagaaacaggatttgcagggtttttctattcctgtcattcttgttgagaacagcggaagatgccataagaacgaaagcgatgaaaagattcttccatgcgggactagttggattcccaatctgttcaacaaaatcacagagatctcttttaatggcaacaaggcgattcatgttgacaagaaactggtcgaagggccaaacccaaacgaaagaggaaaaaaactgattcctttaatgtttgcattccaatacttgctggtgatgaagccattggttcgagcaatcaagtccgatgtttcgagagagagtaaaccggcgtgggagctgcgagactccggtttagcaagtcgaaggtcttgagttgtggacacgagttttgtttggtttgtttgtctatctgagagattgttctgtagttgaaattgtgatacaactcgagaaatgtggttcacagataattactgtcgcaaagttctctcatcttaatt

SEQ ID NO: 27601 - protein, 313 aa, Arabidopsis thaliana
  peptide (1)..(313): Ceres Seq. ID no. 12327066
MAALQTLREWIGIQQFPPATQSKLLEILGKYKEEDVSSLTVLVIGKSGVGKSSTVNSVIGEKAAAVSTFQSEGLRPTLVSRTRSGFTLNIIDTPGLIEGGYVNDQAINIIKRFLLNMTIDVLLYVDRLDVYRVDDLDRQVVGAITDAFGKEIWKKSALVLTHAQFSPPDGLNYNHFVSKRSNALLKVIQTGAQLKKQDLQGFSIPVILVENSGRCHKNESDEKILPCGTSWIPNLFNKITEISFNGNKAIHVDKKLVEGPNPNERGKKLIPLMFAFQYLLVMKPLVRAIKSDVSRESKPAWELRDSGLASRRS

SEQ ID NO: 27602 - protein, 197 aa, Arabidopsis thaliana
  peptide (1)..(197): Ceres Seq. ID no. 12327067
MTIDVLLYVDRLDVYRVDDLDRQVVGAITDAFGKEIWKKSALVLTHAQFSPPDGLNYNHFVSKRSNALLKVIQTGAQLKKQDLQGFSIPVILVENSGRCHKNESDEKILPCGTSWIPNLFNKITEISFNGNKAIHVDKKLVEGPNPNERGKKLIPLMFAFQYLLVMKPLVRAIKSDVSRESKPAWELRDSGLASRRS

SEQ ID NO: 27603 - DNA, 1584 bp, Arabidopsis thaliana
  misc_feature (1)..(1584): Ceres Seq. ID no. 12704699
  misc_feature (1)..(1584): Ortholog of  Ceres SEQ ID NO 15171430 as cited in SEQ ID NO 51500
  misc_feature (1)..(1584): Ortholog of  Ceres SEQ ID NO 15172476 as cited in SEQ ID NO 54945
  misc_feature (1)..(1584): Ortholog of  Ceres SEQ ID NO 15176106 as cited in SEQ ID NO 60324
  misc_feature (1)..(1584): Ortholog of  Ceres SEQ ID NO 13654989 as cited in SEQ ID NO 63117
  misc_feature (1)..(1584): Ortholog of  Ceres SEQ ID NO 13584744 as cited in SEQ ID NO 69137
aaatttagttcctttctcatttatccactgctcttaatccaacttcaatatctctctatcctcacaatatttgttctgtttctccttcaactttcaactgataaagtttaaacctttatgctctttactctctgatctcaaaagggttttgtttagttctcctcaaaaccatggggatttgcttaagtgctcagattaaagctgtgagtccaggtaagccaggtgcaagtccgaagtatatgagctcagaggctaatgattcactgggaagtaaaagctcttctgtgtcaatcagaacaaacccaagaactgaaggagagatcttgcaatctcctaatctcaaaagtttcacttttgctgagcttaaagcagcaactaggaattttagaccagatagtgttcttggtgaaggtggttttggttctgttttcaaaggttggattgatgaacagactcttactgcttctaaaccgggaaccggtgtggttattgctgtcaaaaaacttaaccaagatggttggcaaggtcaccaggaatggctggcggaagtgaattacttggggcagttttcgcatcctaatcttgtgaaactgattggttattgcttagaggatgagcatcgtcttcttgtttatgagttcatgcctcgtggaagcttagagaatcatttgttcagaagaggttcttattttcaacctttatcttggactctccggttgaaagttgctcttggtgcagcgaaaggtcttgcgtttcttcataacgccgagactagtgtcatataccgcgatttcaaaacgtcgaatatactgcttgattcggagtacaatgctaagctttctgatttcgggctagctaaagacggtccaacgggtgataaaagccatgtctctacgcggatcatgggtacttacggatacgcagctcctgaatatcttgcaactggtcatttaacaaccaaaagtgatgtctatagctacggtgttgtgcttttggaggtgttgtctggacggagagctgtagacaagaaccgtccaccaggagagcaaaagctagtggaatgggcaagaccgttacttgctaacaaaaggaagttattccgagttatcgataaccgtctacaagatcaatactcaatggaagaagcttgtaaagtagctactcttgcgctgagatgcctcacattcgagataaagctgagaccaaacatgaacgaggttgtttctcacctcgaacacatccaaactttgaatgaagcaggaggaagaaatattgatatggtccagaggagaatgcgtaggagaagcgatagtgttgctatcaaccaaaaaccaaatgcaggttttgctcgacaaactgctgtaggcgtcatagctactgcttatccacgcccgtctgattcgcctctgtttgtttgagtacgaaacgatgaatgttctctttagttcggatgtacagttttgtttctgcttgtgtaccgaaaggattctcagttcatggctcgtttacacgactcagagatttgacaattgatctttgtagtgcgagaattgactaacataagtataaatgatctcattgtct

SEQ ID NO: 27604 - protein, 415 aa, Arabidopsis thaliana
  peptide (1)..(415): Ceres Seq. ID no. 12704700
MGICLSAQIKAVSPGKPGASPKYMSSEANDSLGSKSSSVSIRTNPRTEGEILQSPNLKSFTFAELKAATRNFRPDSVLGEGGFGSVFKGWIDEQTLTASKPGTGVVIAVKKLNQDGWQGHQEWLAEVNYLGQFSHPNLVKLIGYCLEDEHRLLVYEFMPRGSLENHLFRRGSYFQPLSWTLRLKVALGAAKGLAFLHNAETSVIYRDFKTSNILLDSEYNAKLSDFGLAKDGPTGDKSHVSTRIMGTYGYAAPEYLATGHLTTKSDVYSYGVVLLEVLSGRRAVDKNRPPGEQKLVEWARPLLANKRKLFRVIDNRLQDQYSMEEACKVATLALRCLTFEIKLRPNMNEVVSHLEHIQTLNEAGGRNIDMVQRRMRRRSDSVAINQKPNAGFARQTAVGVIATAYPRPSDSPLFV

SEQ ID NO: 27605 - protein, 392 aa, Arabidopsis thaliana
  peptide (1)..(392): Ceres Seq. ID no. 12704701
MSSEANDSLGSKSSSVSIRTNPRTEGEILQSPNLKSFTFAELKAATRNFRPDSVLGEGGFGSVFKGWIDEQTLTASKPGTGVVIAVKKLNQDGWQGHQEWLAEVNYLGQFSHPNLVKLIGYCLEDEHRLLVYEFMPRGSLENHLFRRGSYFQPLSWTLRLKVALGAAKGLAFLHNAETSVIYRDFKTSNILLDSEYNAKLSDFGLAKDGPTGDKSHVSTRIMGTYGYAAPEYLATGHLTTKSDVYSYGVVLLEVLSGRRAVDKNRPPGEQKLVEWARPLLANKRKLFRVIDNRLQDQYSMEEACKVATLALRCLTFEIKLRPNMNEVVSHLEHIQTLNEAGGRNIDMVQRRMRRRSDSVAINQKPNAGFARQTAVGVIATAYPRPSDSPLFV

SEQ ID NO: 27606 - protein, 258 aa, Arabidopsis thaliana
  peptide (1)..(258): Ceres Seq. ID no. 12704702
MPRGSLENHLFRRGSYFQPLSWTLRLKVALGAAKGLAFLHNAETSVIYRDFKTSNILLDSEYNAKLSDFGLAKDGPTGDKSHVSTRIMGTYGYAAPEYLATGHLTTKSDVYSYGVVLLEVLSGRRAVDKNRPPGEQKLVEWARPLLANKRKLFRVIDNRLQDQYSMEEACKVATLALRCLTFEIKLRPNMNEVVSHLEHIQTLNEAGGRNIDMVQRRMRRRSDSVAINQKPNAGFARQTAVGVIATAYPRPSDSPLFV

SEQ ID NO: 27607 - DNA, 1205 bp, Arabidopsis thaliana
  misc_feature (1)..(1205): Ceres Seq. ID no. 12332476
  misc_feature (1)..(1205): Ortholog of  Ceres SEQ ID NO 14311596 as cited in SEQ ID NO 51728
  misc_feature (1)..(1205): Ortholog of  Ceres SEQ ID NO 15177031 as cited in SEQ ID NO 60171
  misc_feature (1)..(1205): Ortholog of  Ceres SEQ ID NO 12617197 as cited in SEQ ID NO 63406
  misc_feature (1)..(1205): Ortholog of  Ceres SEQ ID NO 13597804 as cited in SEQ ID NO 64182
  misc_feature (1)..(1205): Ortholog of  Ceres SEQ ID NO 15179788 as cited in SEQ ID NO 64818
  misc_feature (1)..(1205): Ortholog of  Ceres SEQ ID NO 14302768 as cited in SEQ ID NO 64889
  misc_feature (1)..(1205): Ortholog of  Ceres SEQ ID NO 13598565 as cited in SEQ ID NO 65250
  misc_feature (1)..(1205): Ortholog of  Ceres SEQ ID NO 13598597 as cited in SEQ ID NO 65496
  misc_feature (1)..(1205): Ortholog of  Ceres SEQ ID NO 13596284 as cited in SEQ ID NO 68273
  misc_feature (1)..(1205): Ortholog of  Ceres SEQ ID NO 15178902 as cited in SEQ ID NO 0
acgcattcgtcatttggtccctccacttagagagaagcagacagaacataactaaaatcgagaaaaatggcaaacagtggtgaaggtaaagtggtgtgtgtaacaggagcctccggttacatcgcctcatggctcgtcaagttcctacttagccgtggctacactgttaaggcctccgtccgtgatcccagtgatccgaaaaagacacaacacttagtttcactagaaggtgcaaaggaaagacttcacttgttcaaagcagaccttttggaacaaggttctttcgactctgctattgatggttgccatggagttttccacactgcttctccattttttaatgatgccaaagacccacaggctgaacttattgatcctgcggtcaaggggacgcttaacgttttgaattcgtgcgccaaagcctcttcggttaagagggttgttgtaacctcctccatggctgccgttggttacaatggaaaaccacgcacacctgatgttaccgtcgatgaaacttggttctctgatcctgagctttgcgaggcctccaagatgtggtatgttctatccaagactttggcggaagatgcagcttggaaactcgctaaagagaaaggcttagacattgttactattaacccggctatggtgatcggtcctctcctacagccaactctgaacacgagtgctgctgctatattaaacttaatcaatggtgcaaagactttcccaaacttgagtttcggatgggttaatgtaaaagacgtagccaatgcgcacatccaaacatttgaggtcccttcagctaatgggcgttattgtttggtcgagcgtgtcgttcaccactccgagattgttaacattctacgtgagctttacccaaatctcccactacctgaaaggtgtgtggacgagaatccctacgtgccaacgtatcaagtgtccaaggataaaacgaggagccttggcatagactacatacccttgaaggttagcatcaaggagaccgtcgagtccttgaaggaaaaaggtttcgcacagttctgagaaagcatttgagccaatggatttaatccagattagataaagtatttggaagactatttcaaaaataatatttggaacatgtcaatgttctcaaggagatattagtatgttcttgtgtactttattgntgttccatcaaatgagttacttttcctttt

SEQ ID NO: 27608 - protein, 326 aa, Arabidopsis thaliana
  peptide (1)..(326): Ceres Seq. ID no. 12332477
MANSGEGKVVCVTGASGYIASWLVKFLLSRGYTVKASVRDPSDPKKTQHLVSLEGAKERLHLFKADLLEQGSFDSAIDGCHGVFHTASPFFNDAKDPQAELIDPAVKGTLNVLNSCAKASSVKRVVVTSSMAAVGYNGKPRTPDVTVDETWFSDPELCEASKMWYVLSKTLAEDAAWKLAKEKGLDIVTINPAMVIGPLLQPTLNTSAAAILNLINGAKTFPNLSFGWVNVKDVANAHIQTFEVPSANGRYCLVERVVHHSEIVNILRELYPNLPLPERCVDENPYVPTYQVSKDKTRSLGIDYIPLKVSIKETVESLKEKGFAQF

SEQ ID NO: 27609 - protein, 196 aa, Arabidopsis thaliana
  peptide (1)..(196): Ceres Seq. ID no. 12332478
MAAVGYNGKPRTPDVTVDETWFSDPELCEASKMWYVLSKTLAEDAAWKLAKEKGLDIVTINPAMVIGPLLQPTLNTSAAAILNLINGAKTFPNLSFGWVNVKDVANAHIQTFEVPSANGRYCLVERVVHHSEIVNILRELYPNLPLPERCVDENPYVPTYQVSKDKTRSLGIDYIPLKVSIKETVESLKEKGFAQF

SEQ ID NO: 27610 - protein, 164 aa, Arabidopsis thaliana
  peptide (1)..(164): Ceres Seq. ID no. 12332479
MWYVLSKTLAEDAAWKLAKEKGLDIVTINPAMVIGPLLQPTLNTSAAAILNLINGAKTFPNLSFGWVNVKDVANAHIQTFEVPSANGRYCLVERVVHHSEIVNILRELYPNLPLPERCVDENPYVPTYQVSKDKTRSLGIDYIPLKVSIKETVESLKEKGFAQF

SEQ ID NO: 27611 - DNA, 1391 bp, Arabidopsis thaliana
  misc_feature (1)..(1391): Ceres Seq. ID no. 12335464
  misc_feature (1)..(1391): Ortholog of  Ceres SEQ ID NO 15171355 as cited in SEQ ID NO 51485
actctctcttttccaccggcgaccattcattctctctcctcctcctcctcctcctcagcttcctccattgctccttaaccctcattcctcgatttgttcttctcttcaccatttcccctttttaccctttttctactcagacgtgacggcgactttttattactgtgtctcccacctttgactcgccctggggggatttttttttgctccagaggcgaaagaaacaaaaaaaagcaatggggtttctccgttgtctccagctgctgctgcttctgtttctatctcttcgtctacaaaagctctctgctcaatcttcttcacccaatgcttcttcttcttcttcactcgatgctcttcttcaagattactcttttagagccttgcttcgtcctcgtaccggcattctctacgaggctactactgttccttccaatttgactgggatcaaactcgctgctatgagactcagaagcggaagctttagaaaacgtggagtcactccttttaatgagttctcaattcccagcggcgttatcgtcaagccgtatgtgacaaggcttgttttggtttatcaaaacctagctaatttctctcacttgtattaccctttgtctggttatgattatgtcgctcctgtcttgggtcttctcgcttacgatgctaagaatctctctgcgcttaatttgcctcagcttgatttaagggtgtctaatgatcctatcagaatcgatttctctgatctggaacgaatcccgcaagggtctagtgctaagtgtgttagattcgattctaaaggtgaagcgagtttcagcgattcgattcagcctggaaacacatgcgagactgagcatcagggacatttctctgtggtggtgaaatctgtggcttctgctccgagtctagctcctcctgggattgagagtaagaagaagaagaagagctctgattccaattccaagacttggatcattgttgggtcggtggttggtggattgatactgttggggcttttactgtttctggttttgagatgtcgaaattacaagaagcaagagaaaatgagggagatggagagagctggagagacaggggaagctctgaggatgactcaggttggtgaaacaagagcaccaactgctactacgactcgtacacaaccaatgcttgaaaccgaatacgcagcttaggatacttttgtgtacatcatcatcatcatcacatcttcttgatcatctgttactgtctttttctttttttcttctacaattattcttcttttggtaaagtgtttctttttctgattattttttctttgtggtaagcaagttgatacttccacattcatcttgtttctctgctggtgataaggaaataagtaatattgttttctt

SEQ ID NO: 27612 - protein, 316 aa, Arabidopsis thaliana
  peptide (1)..(316): Ceres Seq. ID no. 12335465
MGFLRCLQLLLLLFLSLRLQKLSAQSSSPNASSSSSLDALLQDYSFRALLRPRTGILYEATTVPSNLTGIKLAAMRLRSGSFRKRGVTPFNEFSIPSGVIVKPYVTRLVLVYQNLANFSHLYYPLSGYDYVAPVLGLLAYDAKNLSALNLPQLDLRVSNDPIRIDFSDLERIPQGSSAKCVRFDSKGEASFSDSIQPGNTCETEHQGHFSVVVKSVASAPSLAPPGIESKKKKKSSDSNSKTWIIVGSVVGGLILLGLLLFLVLRCRNYKKQEKMREMERAGETGEALRMTQVGETRAPTATTTRTQPMLETEYAA

SEQ ID NO: 27613 - protein, 242 aa, Arabidopsis thaliana
  peptide (1)..(242): Ceres Seq. ID no. 12335466
MRLRSGSFRKRGVTPFNEFSIPSGVIVKPYVTRLVLVYQNLANFSHLYYPLSGYDYVAPVLGLLAYDAKNLSALNLPQLDLRVSNDPIRIDFSDLERIPQGSSAKCVRFDSKGEASFSDSIQPGNTCETEHQGHFSVVVKSVASAPSLAPPGIESKKKKKSSDSNSKTWIIVGSVVGGLILLGLLLFLVLRCRNYKKQEKMREMERAGETGEALRMTQVGETRAPTATTTRTQPMLETEYAA

SEQ ID NO: 27614 - DNA, 1310 bp, Arabidopsis thaliana
  misc_feature (1)..(1310): Ceres Seq. ID no. 12335884
  misc_feature (1)..(1310): Ortholog of  Ceres SEQ ID NO 14302021 as cited in SEQ ID NO 68979
  misc_feature (1)..(1310): Ortholog of  Ceres SEQ ID NO 14309296 as cited in SEQ ID NO 0
actcccaactacatcctcttcaatgctcaatctcgtcttcttcttcctctctatttaatttcccttgtctctctatctctctcaatttcctcatctgggtcttcctcgtttgctccgcttaagcaccatgaaggtcaccgtcgtctcccgcagcggcagagaagtcctcaaagctccccttgacctccccgattcggcgactgttgctgatctgcaagaagcgtttcataagagagctaagaagttttacccatcgaggcaaagactgactcttcccgtgactcctggatcgaaggacaaacctgttgtcctcaatagcaagaaatcactgaaggagtactgtgatggaaacaacaactccttaactgtagtcttcaaagacctgggggcacaagtttcctaccgcacactcttcttcttcgagtatcttggccctctccttatctaccctgtcttttactacttccctgtttacaagtttcttggttatggagaggactgtgtgatccatccggtccagacgtacgctatgtactactggtgctttcactacttcaaacggatcttagaaacgtttttcgtacatcggttcagccacgcaacctccccaatcgggaatgtgttcaggaactgtgcttattactggagctttggtgcttacattgcttattacgtcaaccatcccttgtacactccagttagtgaccttcagatgaagattggtttcgggtttggtttggtttgccaagtcgcaaacttttactgtcacatattgctgaagaatctgagggaccccagtggggctggaggctaccagattccacgcggtttcctcttcaacattgttacatgtgccaattacactaccgagatttaccaatggctaggattcaacatcgctactcagaccattgcaggatatgttttcctcgctgttgctgctctaatcatgactaattgggctcttggaaagcacagccgtctgagaaagatatttgatggaaaagatggaaagccaaagtatccaagaagatgggtgatacttcctccattcctttagaagccattgttgcttatcagtaaaagctcttaataaagctgaaaatgagactttctttgggttctctgtatcgtttccttttttgttcggtctatgtattggttataacatgtttattccttttgtttcaatatgttttgatttttgaagttagagagatttagaaatgtacttgtgtagttgtttctcacgcaaaccaattcctctttatgtatcgcatacatgagtcaataataaatatgattactag

SEQ ID NO: 27615 - protein, 310 aa, Arabidopsis thaliana
  peptide (1)..(310): Ceres Seq. ID no. 12335885
MKVTVVSRSGREVLKAPLDLPDSATVADLQEAFHKRAKKFYPSRQRLTLPVTPGSKDKPVVLNSKKSLKEYCDGNNNSLTVVFKDLGAQVSYRTLFFFEYLGPLLIYPVFYYFPVYKFLGYGEDCVIHPVQTYAMYYWCFHYFKRILETFFVHRFSHATSPIGNVFRNCAYYWSFGAYIAYYVNHPLYTPVSDLQMKIGFGFGLVCQVANFYCHILLKNLRDPSGAGGYQIPRGFLFNIVTCANYTTEIYQWLGFNIATQTIAGYVFLAVAALIMTNWALGKHSRLRKIFDGKDGKPKYPRRWVILPPFL

SEQ ID NO: 27616 - protein, 176 aa, Arabidopsis thaliana
  peptide (1)..(176): Ceres Seq. ID no. 12335886
MYYWCFHYFKRILETFFVHRFSHATSPIGNVFRNCAYYWSFGAYIAYYVNHPLYTPVSDLQMKIGFGFGLVCQVANFYCHILLKNLRDPSGAGGYQIPRGFLFNIVTCANYTTEIYQWLGFNIATQTIAGYVFLAVAALIMTNWALGKHSRLRKIFDGKDGKPKYPRRWVILPPFL

SEQ ID NO: 27617 - DNA, 1070 bp, Arabidopsis thaliana
  misc_feature (1)..(1070): Ceres Seq. ID no. 4905418
  misc_feature (1)..(1070): Ortholog of  Ceres SEQ ID NO 13599448 as cited in SEQ ID NO 521
  misc_feature (1)..(1070): Ortholog of  Ceres SEQ ID NO 14311918 as cited in SEQ ID NO 51684
  misc_feature (1)..(1070): Ortholog of  Ceres SEQ ID NO 13596408 as cited in SEQ ID NO 62028
attacatgtaaatatctctcattaatacaacctcacgaagaaaaccatttgttttcttagagagagccaagaatattaaaagagatatagagaaaagatttgctttaataatgccaacgtcgatacagtttcagagatcctccaccgccgcagaagcagccaacgccaccgtaagaaactatccccaccaccatcagaaacaggttcaaaaagtgagcctcacgcgcgggatggctgatgtgccggagcacgtggagctttcccacacgcacgtggttggtccttctcagtgcttctccgtcgtggtacaagacgtggaggctccggtttccacagtctggtcgatcctaagccgcttcgaacaccctcaagcgtacaaacacttcgtgaaaagctgccacgtggttatcggagacggtcgagaggttgggtcggtgagagaggtcagagtcgtctctggtctccccgcggcgtttagcttagagcggcttgagatcatggacgatgatcgccacgtcatcagtttcagcgtcgttggtggggaccacagactcatgaactacaagtcggtgacgacggtgcatgagtcggaggaggactccgacggcaagaagaggacacgtgtcgttgagtcatacgtcgttgacgtaccggcgggtaacgataaggaagagacttgtagctttgctgatactatagtacggtgcaacttgcaatcgctggctaaactcgccgagaacacttctaaattctcgtaattacattttttcaatctttttatttttattttattttctatatttctctctttcaaaatttatcttttatttttgggattctcgaggtggttttggattttaagatttaagtatttaactatcgtcggggatttttcgaaactaaaacaaaaaacaagaattatatcaaacaagatggttttggtttttcgaagttagggtttttagggtctgttaaatgtatgtctcaacgatactttggttttacccttaaaaccatttcttcttgtacagctctcgtagctttattatataaacattgattgtttagtt

SEQ ID NO: 27618 - protein, 215 aa, Arabidopsis thaliana
  peptide (1)..(215): Ceres Seq. ID no. 4905419
MPTSIQFQRSSTAAEAANATVRNYPHHHQKQVQKVSLTRGMADVPEHVELSHTHVVGPSQCFSVVVQDVEAPVSTVWSILSRFEHPQAYKHFVKSCHVVIGDGREVGSVREVRVVSGLPAAFSLERLEIMDDDRHVISFSVVGGDHRLMNYKSVTTVHESEEDSDGKKRTRVVESYVVDVPAGNDKEETCSFADTIVRCNLQSLAKLAENTSKFS

SEQ ID NO: 27619 - protein, 175 aa, Arabidopsis thaliana
  peptide (1)..(175): Ceres Seq. ID no. 4905420
MADVPEHVELSHTHVVGPSQCFSVVVQDVEAPVSTVWSILSRFEHPQAYKHFVKSCHVVIGDGREVGSVREVRVVSGLPAAFSLERLEIMDDDRHVISFSVVGGDHRLMNYKSVTTVHESEEDSDGKKRTRVVESYVVDVPAGNDKEETCSFADTIVRCNLQSLAKLAENTSKFS

SEQ ID NO: 27620 - DNA, 1167 bp, Arabidopsis thaliana
  misc_feature (1)..(1167): Ceres Seq. ID no. 13497461
  misc_feature (1)..(1167): Ortholog of  Ceres SEQ ID NO 14302761 as cited in SEQ ID NO 65542
atacttgtaaaagctagagtcaacgccgttcagtctcagaccagacgaaacaacgatgcttaactctatcactttaacccgggaaccaccactcccgttcaactctgttgggttttcaggtaatcgctcttcgtcttttggtcgaagaactataacggaaggtagttcgagcaaggctctttcgtttgggtacaaaaatgttggttcactgaagtgtggtcggagcaattggccggggcgttctgggactgcgtttgggcatctagtccgggtctctgcggtcccaggtgggaattcaggtggctctggcgggttaggtggttcaggcggtggtggtggtggttccggcggcggtggtggtgatggaagcgacggaaaaggaaagaagtggtcacttctctcatggtaccaggctcttctctcaaactctcctgttttgaccaaagctgtgaccgcagcacttttgaacctcgttggagatttgatctgtcagcttactatcaacaagacctcatcgctggacaagaagaggacactcacctttaccttcttgggcttagggctagtcggtccaacattgcatttctggtatttgtatttgagcaaagtggtgacagcttctggattatcaggcgcagttatacgacttctactggatcagtttgtttttgctcctatttttgttggagttttcttatcagcagttgtgacacttgaaggaaaaccatcaaatgtcataccgaagctacaacaggagtggactggtgcaatgatagcaaattggcagctatggataccatttcagtttcttaacttcagatttgttccacagaactaccaggtacttgcttcaaacgtagtggctttggcttggaatgtgattttatcattcaaagctcacaaagaagttgttgcaaagtagacatgtttcttacctggagcctagaggtggttgctggattgttatcggcagagttttggggaaacggtcttgtctgctgatgcaaatgtttggtgtttcgaaacaattatttgggaaccctgcacttgacattttcttagagttgaaacaagcttttcttcaagcacttcaaatatttccccatcatcaatgtttcatatatttattgtttcctcattcagagaatttttttagttcgtatgaag

SEQ ID NO: 27621 - protein, 288 aa, Arabidopsis thaliana
  peptide (1)..(288): Ceres Seq. ID no. 13497462
MLNSITLTREPPLPFNSVGFSGNRSSSFGRRTITEGSSSKALSFGYKNVGSLKCGRSNWPGRSGTAFGHLVRVSAVPGGNSGGSGGLGGSGGGGGGSGGGGGDGSDGKGKKWSLLSWYQALLSNSPVLTKAVTAALLNLVGDLICQLTINKTSSLDKKRTLTFTFLGLGLVGPTLHFWYLYLSKVVTASGLSGAVIRLLLDQFVFAPIFVGVFLSAVVTLEGKPSNVIPKLQQEWTGAMIANWQLWIPFQFLNFRFVPQNYQVLASNVVALAWNVILSFKAHKEVVAK

SEQ ID NO: 27622 - DNA, 1588 bp, Arabidopsis thaliana
  misc_feature (1)..(1588): Ceres Seq. ID no. 12335467
  misc_feature (1)..(1588): Ortholog of  Ceres SEQ ID NO 14314536 as cited in SEQ ID NO 52436
attactagatttatagatttgattctttctctctcagaatttttgtcgaccgaatttcatattcatatatagttttattaaataatctggttagatgaagatgcaagattcggcagctcaagaaccggaaattgctataatcgtgggagattcttcttcttcttctcttcattcttcttctcaggtaacagaaaaatctactgaagatgtgccgagctgctctcacttggatctttcaatacaaataccttccagatcacttccattcggtaacggccgtaacccaaagggttcattgaagtccactccttcattcaaaagtggcactacatcctcaccaagaggaatcttgcggaatttaagcttgaaaaagaaagttatttctcaacccgaaagcgagagaagctccttactatctcctggtctcatggaaaccgctaaaaagcctaatgctactggttccacaacttctccatattggaaaagatgcttatcgcttcctagtagacaagctgcaaaactgtctcctgtggtttctacacaactttcagctggggtgcctggtgacccgcctaataaagattattcaaggtccttgtccatgcccggaagaaacaaagttattgtgcgatccatatcttttgacaaccacaaagcccgtgtttccagtgaaacaagtgcagatcaagtctcttccgttcctcctgaagaaactgatgaagaaattcccgaagaagaagccgtgtgcaggatctgtctggacgtgtgcgaagaaggaaatactttgaaaatggaatgcagctgcaaaggtgatctcagacttgttcatgaagcttgtgcaatgaaatggtttagtacaaagggaacaagaacctgtgacgtctgtagacaagtagtacagaacttaccagttacattggttcgtgtgcccacacctaatcaacaaaacaacagacgtggtagcagtcaacagaatatgccgtcacaaaccgttagtgcttggcaagagtttgtggtgctagttctaatcagcacagtctgctacttcttcttcctcgagcaattactgattcgtgacttgaacaaacaagctatttacatcgcagcaccattttcacttacgttaggcctcttagcatccatttttgccattgttctcgctatcagagaatacatatggacatacgcagcactcgagtttgcgcttgtgggcatgttggttcatatattctatgctacagttagactatcggcgacctattctatactctttgcagggattcttggttttgggatagccgtgtgcctaaactcgttgtaccttcattatttcgcttggcgtgtacgcgttgcacaaaattcaagtcctgtatgaaatctgttttcctttgtttctcgttcttcctttgtgtatgtattatgaaagaagaagttgttagtgaagagattcatcagcttcagcagtttcctgtaaaatgtaaatatgtacactcttcctcgaaaatgttgctgaagttttgttttgtacccacccctacgtgtttttccggagcacgatgatgatttgtgaaagagaagacatttgtgt

SEQ ID NO: 27623 - protein, 426 aa, Arabidopsis thaliana
  peptide (1)..(426): Ceres Seq. ID no. 12335468
MKMQDSAAQEPEIAIIVGDSSSSSLHSSSQVTEKSTEDVPSCSHLDLSIQIPSRSLPFGNGRNPKGSLKSTPSFKSGTTSSPRGILRNLSLKKKVISQPESERSSLLSPGLMETAKKPNATGSTTSPYWKRCLSLPSRQAAKLSPVVSTQLSAGVPGDPPNKDYSRSLSMPGRNKVIVRSISFDNHKARVSSETSADQVSSVPPEETDEEIPEEEAVCRICLDVCEEGNTLKMECSCKGDLRLVHEACAMKWFSTKGTRTCDVCRQVVQNLPVTLVRVPTPNQQNNRRGSSQQNMPSQTVSAWQEFVVLVLISTVCYFFFLEQLLIRDLNKQAIYIAAPFSLTLGLLASIFAIVLAIREYIWTYAALEFALVGMLVHIFYATVRLSATYSILFAGILGFGIAVCLNSLYLHYFAWRVRVAQNSSPV

SEQ ID NO: 27624 - protein, 424 aa, Arabidopsis thaliana
  peptide (1)..(424): Ceres Seq. ID no. 12335469
MQDSAAQEPEIAIIVGDSSSSSLHSSSQVTEKSTEDVPSCSHLDLSIQIPSRSLPFGNGRNPKGSLKSTPSFKSGTTSSPRGILRNLSLKKKVISQPESERSSLLSPGLMETAKKPNATGSTTSPYWKRCLSLPSRQAAKLSPVVSTQLSAGVPGDPPNKDYSRSLSMPGRNKVIVRSISFDNHKARVSSETSADQVSSVPPEETDEEIPEEEAVCRICLDVCEEGNTLKMECSCKGDLRLVHEACAMKWFSTKGTRTCDVCRQVVQNLPVTLVRVPTPNQQNNRRGSSQQNMPSQTVSAWQEFVVLVLISTVCYFFFLEQLLIRDLNKQAIYIAAPFSLTLGLLASIFAIVLAIREYIWTYAALEFALVGMLVHIFYATVRLSATYSILFAGILGFGIAVCLNSLYLHYFAWRVRVAQNSSPV

SEQ ID NO: 27625 - protein, 315 aa, Arabidopsis thaliana
  peptide (1)..(315): Ceres Seq. ID no. 12335470
METAKKPNATGSTTSPYWKRCLSLPSRQAAKLSPVVSTQLSAGVPGDPPNKDYSRSLSMPGRNKVIVRSISFDNHKARVSSETSADQVSSVPPEETDEEIPEEEAVCRICLDVCEEGNTLKMECSCKGDLRLVHEACAMKWFSTKGTRTCDVCRQVVQNLPVTLVRVPTPNQQNNRRGSSQQNMPSQTVSAWQEFVVLVLISTVCYFFFLEQLLIRDLNKQAIYIAAPFSLTLGLLASIFAIVLAIREYIWTYAALEFALVGMLVHIFYATVRLSATYSILFAGILGFGIAVCLNSLYLHYFAWRVRVAQNSSPV

SEQ ID NO: 27626 - DNA, 1086 bp, Arabidopsis thaliana
  misc_feature (1)..(1086): Ceres Seq. ID no. 12335862
  misc_feature (1)..(1086): Ortholog of  Ceres SEQ ID NO 13582073 as cited in SEQ ID NO 56218
atttctcatttcggcaaccaaaccaaacattcagagagacacaacacaaccacatcatcacacgtttctctctctctctttcctctccgtcgtctctctctctctagccaccaccaaaatccttaaaacctagacttttctcttccatcgatggcggctaataacagatccgatcatgggtcagacgaaaacacaagactttacaatccttaccaaaactacgaagtcccaatcaacaaatctcagtacctttacaagcttcctacctcccctgagtttctcttcacggaggaggctttaaggcaacgtagatcttggggtgagaatctcactttctacaccggaacagcttacctcggtggctccgttgccggagcttctgttggagtcatcactggagtcaaaagcttcgaatctggcgacactactaagctcaaaatcaacaggatcttgaactcttctggtcaaactggtcgaacttggggtaatcggattggtatcattggattggtttacgcagggatcgagagtggtattgtggctgccacggatagagatgatgtttggaccagtgtggtggctggtcttggaaccggagctgtttgtagagcggcgagaggagtgagatctgcagctgtagctggtgctcttggtggacttgcggctggagctgttgtagctgggaagcaaattgtgaagcggtatgtgcccatttgaagactgcaagagtctaattggcagactctttttcgggtcgttgttgaaatttttgataggggaaatggtgagaatttgataggtttggtatgtcttggaatcataaaaatgaaaactttatttggtttctagaggtacaacaagtctgtatgtcaagtcataatgcagtttcactttgaagaataacctgcaaacctttttcttatattcatactgattaaatgttttgccgattggtaatttaatttgtcatgagtgtgtttgttctagttagtgttttatgtttctgtttttgatcaatgttaactctttcttgattcgttgagaaactgatgtgttgtattacatttgaaaatgaagctcttctcg

SEQ ID NO: 27627 - protein, 188 aa, Arabidopsis thaliana
  peptide (1)..(188): Ceres Seq. ID no. 12335863
MAANNRSDHGSDENTRLYNPYQNYEVPINKSQYLYKLPTSPEFLFTEEALRQRRSWGENLTFYTGTAYLGGSVAGASVGVITGVKSFESGDTTKLKINRILNSSGQTGRTWGNRIGIIGLVYAGIESGIVAATDRDDVWTSVVAGLGTGAVCRAARGVRSAAVAGALGGLAAGAVVAGKQIVKRYVPI

SEQ ID NO: 27628 - DNA, 1579 bp, Arabidopsis thaliana
  misc_feature (1)..(1579): Ceres Seq. ID no. 12335129
  misc_feature (1)..(1579): Ortholog of  Ceres SEQ ID NO 13597574 as cited in SEQ ID NO 64677
  misc_feature (1)..(1579): Ortholog of  Ceres SEQ ID NO 13597843 as cited in SEQ ID NO 64850
  misc_feature (1)..(1579): Ortholog of  Ceres SEQ ID NO 13597678 as cited in SEQ ID NO 65375
  misc_feature (1)..(1579): Ortholog of  Ceres SEQ ID NO 13596180 as cited in SEQ ID NO 67941
  misc_feature (1)..(1579): Ortholog of  Ceres SEQ ID NO 13591190 as cited in SEQ ID NO 68044
  misc_feature (1)..(1579): Ortholog of  Ceres SEQ ID NO 13595961 as cited in SEQ ID NO 68223
aaagaaaaaaaagtaaagagatgaagacagcagagctcatattcgttcctctgccggagaccggccatctcttgtcaacgatcgagtttggaaagcgtctactcaatctagaccgtcggatttctatgattacaatcctctccatgaatcttccttacgctcctcacgccgacgcttctcttgcttcgctaacagcctccgagcctggtatccgaatcatcagtctcccggagatccacgatccacctccgatcaagcttcttgacacttcctccgagacttacatcctcgatttcatccataaaaacataccttgtctcagaaaaaccatccaagatttagtctcatcatcatcatcttccggaggtggtagtagtcatgtcgccggcttgattcttgatttcttctgcgttggtttgatcgacatcggccgtgaggtaaaccttccttcctatatcttcatgacttccaactttggtttcttaggggttctacagtatctcccggaacgacaacgtttgactccgtcggagttcgatgagagctccggcgaggaagagttacatattccggcgtttgtgaaccgtgttcccgccaaggttctgccgccaggtgtgttcgataaactctcttacgggtctctggtcaaaatcggcgagcgattacatgaagccaagggtattttggttaattcatttacccaagtggagccttatgctgctgaacatttttctcaaggacgagattaccctcacgtgtatcctgttgggccggttctcaacttaacgggccgtacaaatccgggtctagcttcggcccaatataaagagatgatgaagtggcttgacgagcaaccagactcgtcggttttgttcctgtgtttcgggagcatgggagtcttccctgcacctcagatcacagagattgctcacgcgctcgagcttatcgggtgcaggttcatctgggcgatccgtacgaacatggcgggagatggcgatcctcaggagccgcttccagaaggatttgtcgatcgaacaatgggccgtggaattgtgtgtagttgggctccacaagtggatatcttggcccacaaggcaacaggtggattcgtttctcactgcgggtggaattccgtccaagagagtctatggtacggtgtacctattgcaacgtggccaatgtatgcggagcaacaactgaacgcatttgagatggtgaaggagttgggcttagcagtggagataaggcttgactacgtggcggatggtgatagggttactttggagatcgtgtcagccgatgaaatagccacagccgtccgatcattgatggatagtgataaccccgtgagaaagaaggttatagaaaaatcttcagtggcgaggaaagctgttggtgatggtgggtcttctacggtggccacatgtaattttatcaaagatattcttggggatcacttttgagttttgaccatttcactttcagagcaagataattttgtaatttgtaataaaaataaacaaatgttatcaatttattatggactaaatgttaatcaacgccatttgtgcttgaagac

SEQ ID NO: 27629 - protein, 486 aa, Arabidopsis thaliana
  peptide (1)..(486): Ceres Seq. ID no. 12335130
RKKSKEMKTAELIFVPLPETGHLLSTIEFGKRLLNLDRRISMITILSMNLPYAPHADASLASLTASEPGIRIISLPEIHDPPPIKLLDTSSETYILDFIHKNIPCLRKTIQDLVSSSSSSGGGSSHVAGLILDFFCVGLIDIGREVNLPSYIFMTSNFGFLGVLQYLPERQRLTPSEFDESSGEEELHIPAFVNRVPAKVLPPGVFDKLSYGSLVKIGERLHEAKGILVNSFTQVEPYAAEHFSQGRDYPHVYPVGPVLNLTGRTNPGLASAQYKEMMKWLDEQPDSSVLFLCFGSMGVFPAPQITEIAHALELIGCRFIWAIRTNMAGDGDPQEPLPEGFVDRTMGRGIVCSWAPQVDILAHKATGGFVSHCGWNSVQESLWYGVPIATWPMYAEQQLNAFEMVKELGLAVEIRLDYVADGDRVTLEIVSADEIATAVRSLMDSDNPVRKKVIEKSSVARKAVGDGGSSTVATCNFIKDILGDHF

SEQ ID NO: 27630 - protein, 480 aa, Arabidopsis thaliana
  peptide (1)..(480): Ceres Seq. ID no. 12335131
MKTAELIFVPLPETGHLLSTIEFGKRLLNLDRRISMITILSMNLPYAPHADASLASLTASEPGIRIISLPEIHDPPPIKLLDTSSETYILDFIHKNIPCLRKTIQDLVSSSSSSGGGSSHVAGLILDFFCVGLIDIGREVNLPSYIFMTSNFGFLGVLQYLPERQRLTPSEFDESSGEEELHIPAFVNRVPAKVLPPGVFDKLSYGSLVKIGERLHEAKGILVNSFTQVEPYAAEHFSQGRDYPHVYPVGPVLNLTGRTNPGLASAQYKEMMKWLDEQPDSSVLFLCFGSMGVFPAPQITEIAHALELIGCRFIWAIRTNMAGDGDPQEPLPEGFVDRTMGRGIVCSWAPQVDILAHKATGGFVSHCGWNSVQESLWYGVPIATWPMYAEQQLNAFEMVKELGLAVEIRLDYVADGDRVTLEIVSADEIATAVRSLMDSDNPVRKKVIEKSSVARKAVGDGGSSTVATCNFIKDILGDHF

SEQ ID NO: 27631 - protein, 445 aa, Arabidopsis thaliana
  peptide (1)..(445): Ceres Seq. ID no. 12335132
MITILSMNLPYAPHADASLASLTASEPGIRIISLPEIHDPPPIKLLDTSSETYILDFIHKNIPCLRKTIQDLVSSSSSSGGGSSHVAGLILDFFCVGLIDIGREVNLPSYIFMTSNFGFLGVLQYLPERQRLTPSEFDESSGEEELHIPAFVNRVPAKVLPPGVFDKLSYGSLVKIGERLHEAKGILVNSFTQVEPYAAEHFSQGRDYPHVYPVGPVLNLTGRTNPGLASAQYKEMMKWLDEQPDSSVLFLCFGSMGVFPAPQITEIAHALELIGCRFIWAIRTNMAGDGDPQEPLPEGFVDRTMGRGIVCSWAPQVDILAHKATGGFVSHCGWNSVQESLWYGVPIATWPMYAEQQLNAFEMVKELGLAVEIRLDYVADGDRVTLEIVSADEIATAVRSLMDSDNPVRKKVIEKSSVARKAVGDGGSSTVATCNFIKDILGDHF

SEQ ID NO: 27632 - DNA, 1310 bp, Arabidopsis thaliana
  misc_feature (1)..(1310): Ceres Seq. ID no. 12332629
  misc_feature (1)..(1310): Ortholog of  Ceres SEQ ID NO 13638292 as cited in SEQ ID NO 57738
gtagaagaagaagaagaagagtgatactgagaagatctgtgagattattatattcgattttgatcagtttctaaaaagctttcaacaatggattcgtcttcaaatttgaatcctcttcgtgaagatacctcagaggaacatttagaacccatagaagctccggcgtctgtcttcgccgctcgtcctcttcgtcctccttctacgaattcgtcggagaagtattcgcctgtagaatggaaaagctattttgataaagaagatgatatatcaatcactggctctgatgatgtgtttcatgtgtatatggcaggaaatgaaggacctgttgtcttttgtctccatggtggtggctactctgggctctcgttttctatagtagcaagtaaaattaaggagaaagcacgtgtggttgcgatggacttgagagggcacggtaaatcggtttcggagaacgaattggagttatcgcttgagacaatgagcaatgatgttttggctgtcattaaggaattgtatggagactctcctccagctattgtgctagttggtcacagcatgggaggttcggtcgctgtgcaagttgctgcaaacaaaacattgcctagcttggctgggcttgtcgttgtggatgttgttgagggtactgctatttcctcattgattcacatgcagaaaattctttcaaacagaatgcaacattttcccagcatcgaaaaagcaattgaatacagcgttagaggagggtcattaagaaacattgattcagcccgtgtctctatccccacaactctcaaatatgatgattcaaagcattgctacgtttaccgaacacgtctagaggaaacagagcaatattggaaaggctggtacgatggtctctcagagaagtttttgtcatccccagttccgaaactcttgctattagctggaactgataggttggacaggaccctcacaattggtcaaatgcaaggaaagtttcagatgattgtggtcaaacacaccggacatgccatacaggaagatgtaccggaggagtttgcgaatctagttctgaatttcatatcacgtaacagaattggtcctcatggtgttgagataccaggaatgtggaaaccttcacaacagactaagacttgaagcagccatcactggacaatgccaaagtcgtcgtgtggctctactcacttgtttcgctttgtccgtttatgaataaacagaattaacaaactctagctcgtgttaaggagttggcaatacaagaagaaaacagagtaaaaagattaaaatcactttctatatttttccat

SEQ ID NO: 27633 - protein, 350 aa, Arabidopsis thaliana
  peptide (1)..(350): Ceres Seq. ID no. 12332630
MDSSSNLNPLREDTSEEHLEPIEAPASVFAARPLRPPSTNSSEKYSPVEWKSYFDKEDDISITGSDDVFHVYMAGNEGPVVFCLHGGGYSGLSFSIVASKIKEKARVVAMDLRGHGKSVSENELELSLETMSNDVLAVIKELYGDSPPAIVLVGHSMGGSVAVQVAANKTLPSLAGLVVVDVVEGTAISSLIHMQKILSNRMQHFPSIEKAIEYSVRGGSLRNIDSARVSIPTTLKYDDSKHCYVYRTRLEETEQYWKGWYDGLSEKFLSSPVPKLLLLAGTDRLDRTLTIGQMQGKFQMIVVKHTGHAIQEDVPEEFANLVLNFISRNRIGPHGVEIPGMWKPSQQTKT

SEQ ID NO: 27634 - protein, 278 aa, Arabidopsis thaliana
  peptide (1)..(278): Ceres Seq. ID no. 12332631
MAGNEGPVVFCLHGGGYSGLSFSIVASKIKEKARVVAMDLRGHGKSVSENELELSLETMSNDVLAVIKELYGDSPPAIVLVGHSMGGSVAVQVAANKTLPSLAGLVVVDVVEGTAISSLIHMQKILSNRMQHFPSIEKAIEYSVRGGSLRNIDSARVSIPTTLKYDDSKHCYVYRTRLEETEQYWKGWYDGLSEKFLSSPVPKLLLLAGTDRLDRTLTIGQMQGKFQMIVVKHTGHAIQEDVPEEFANLVLNFISRNRIGPHGVEIPGMWKPSQQTKT

SEQ ID NO: 27635 - protein, 241 aa, Arabidopsis thaliana
  peptide (1)..(241): Ceres Seq. ID no. 12332632
MDLRGHGKSVSENELELSLETMSNDVLAVIKELYGDSPPAIVLVGHSMGGSVAVQVAANKTLPSLAGLVVVDVVEGTAISSLIHMQKILSNRMQHFPSIEKAIEYSVRGGSLRNIDSARVSIPTTLKYDDSKHCYVYRTRLEETEQYWKGWYDGLSEKFLSSPVPKLLLLAGTDRLDRTLTIGQMQGKFQMIVVKHTGHAIQEDVPEEFANLVLNFISRNRIGPHGVEIPGMWKPSQQTKT

SEQ ID NO: 27636 - DNA, 1210 bp, Arabidopsis thaliana
  misc_feature (1)..(1210): Ceres Seq. ID no. 12482774
  misc_feature (1)..(1210): Ortholog of  Ceres SEQ ID NO 12619999 as cited in SEQ ID NO 66123
  misc_feature (1)..(1210): Ortholog of  Ceres SEQ ID NO 13656436 as cited in SEQ ID NO 69154
agaaggcgttgaatcctttcgttttccgattccatttttgggatctcttgtttcgttttcttctctttggatccattccattcccatgttccccaatttctttaatcggtgttgcttccacaaggcttcatgagcttgtataacaagtttctctaggaggtgttaaagagccagatcaagctttcagaagagattttcttagggtggttgagagctgaaagttttgatatttagtcaactttgttccactgaaccttctaggaagctacctcaagtagacagctttgttgacgggcttcaagccagtggtaaagatatgcttctgtagaagggttaatcttgagcattaaaggacatggctttctactctgaagacgacaagagcgaagactacctctttaagattgttctaatcggtgattctgctgtcgggaaatcaaatttacttgccagatttgcgagggatgagttctatcccaattcaaagtcgacgattggagtggagtttcagacacagaagatggatataaacgggaaggagatcaaagcacagatatgggacacagcaggtcaagaacgttttagagcagtcacttctgcatattaccgaggtgcagttggagctcttctggtttacgatatcagcagacggcagacttttcacagcattggtagatggctcaacgagctacacacacactctgatatgaatgttgtgacgatcctggtgggcaacaagtcggatctgaaggacttgagagaagtgtcaacagcggaagggaaggcattggctgaagcacaaggtcttttcttcatggagacatcggctttggactcatcaaacgtggcagctgcatttgagacggttgtgaaggagatatacaacatactgagcaggaaagtgatgagctcacaggagctaaacaagcaagaccctgcttcactgagcaatggcaagaaagttgtgataccatcagacgggcagggcgagtccaagaaaggtggatgttgttcttcttgatagaaaactgaaattgtagagagcttaaaaaggaagactattgatcatctgtttgattgtttatgttgtccacgttgccatgaatgttgaaatttgagatgggcttgtgttgtggtgtggaagtgtttaggtgtagtagcaatctgtaaattttctattgcagaagcttttatgagactcacactaccc

SEQ ID NO: 27637 - protein, 221 aa, Arabidopsis thaliana
  peptide (1)..(221): Ceres Seq. ID no. 12482775
MAFYSEDDKSEDYLFKIVLIGDSAVGKSNLLARFARDEFYPNSKSTIGVEFQTQKMDINGKEIKAQIWDTAGQERFRAVTSAYYRGAVGALLVYDISRRQTFHSIGRWLNELHTHSDMNVVTILVGNKSDLKDLREVSTAEGKALAEAQGLFFMETSALDSSNVAAAFETVVKEIYNILSRKVMSSQELNKQDPASLSNGKKVVIPSDGQGESKKGGCCSS

SEQ ID NO: 27638 - protein, 166 aa, Arabidopsis thaliana
  peptide (1)..(166): Ceres Seq. ID no. 12482776
MDINGKEIKAQIWDTAGQERFRAVTSAYYRGAVGALLVYDISRRQTFHSIGRWLNELHTHSDMNVVTILVGNKSDLKDLREVSTAEGKALAEAQGLFFMETSALDSSNVAAAFETVVKEIYNILSRKVMSSQELNKQDPASLSNGKKVVIPSDGQGESKKGGCCSS

SEQ ID NO: 27639 - DNA, 1264 bp, Arabidopsis thaliana
  misc_feature (1)..(1264): Ceres Seq. ID no. 13487494
  misc_feature (1)..(1264): Ortholog of  Ceres SEQ ID NO 15178228 as cited in SEQ ID NO 58330
  misc_feature (1)..(1264): Ortholog of  Ceres SEQ ID NO 13596635 as cited in SEQ ID NO 62488
aaatccacagagattttctctctttgatcacaattcaatcatacactctattctcatctcttactcaggtcaaaactctctaaagttggaatcttgatttggtttttaaggtaagattagctcaaaatgagtttaggtgctttgatggaagagaagagaagagcaacaacttcatcttcttcttctcaggtacatatgtcaaatgatatagattggcaaatgcttgataaatcgaggtttttcttcctcggtgctgctcttttctccggtgtatccactgctctttaccctattgtagttctcaaaacaaggcaacaagtctctccgactcgtgtctcatgtgccaacatttctctggctattgctagacttgaaggtcttaaagggttttacaagggttttggaacatctttgcttggaaccatcccggctcgtgctctctatatgactgctctagagattacaaagagtagtgtaggtcaagcaactgttaggttaggattgtctgatactacgtctttggctgttgctaatggtgcagctggtttgacctcggctgtggctgcccagactgtctggactccgattgatattgtgagtcaagggcttatggttcaaggcgatgtctccttgagtaagcatcttcctggagtgatgaactcttgcagatacagaaatgggtttgatgcttttagaaagattctttacacagatggaccaagagggttctacagaggatttgggatctcgatcttgacttacgcaccttccaacgcggtttggtgggcgtcttattctttggctcaaaaatcaatttggtctcgatacaagcactcctacaaccacaaggaagatgctggtggctcagtggtggttcaagcgttgagtgcagctacagcaagcggttgctcggctttagtaactatgccagtagacacaatcaagacgcggttgcaagtcttagacgcagaagagaacgggaggagacgagcaatgacagtgatgcagtcagtgaagagcttgatgaaggaaggaggagttggtgcttgttacagaggattaggaccaagatgggtctcaatgtcgatgtccgcaacaacgatgatcacaacctacgagttcttgaagcgcctagcaacaaagaagcagaaatgatatattgataaaaccttgttgtgttaagactaaccaaaatacttttgattgagtttgaagaatgttaataaacaaacataaaacagagcaaaagatcattacccctaat

SEQ ID NO: 27640 - protein, 342 aa, Arabidopsis thaliana
  peptide (1)..(342): Ceres Seq. ID no. 13487495
MSLGALMEEKRRATTSSSSSQVHMSNDIDWQMLDKSRFFFLGAALFSGVSTALYPIVVLKTRQQVSPTRVSCANISLAIARLEGLKGFYKGFGTSLLGTIPARALYMTALEITKSSVGQATVRLGLSDTTSLAVANGAAGLTSAVAAQTVWTPIDIVSQGLMVQGDVSLSKHLPGVMNSCRYRNGFDAFRKILYTDGPRGFYRGFGISILTYAPSNAVWWASYSLAQKSIWSRYKHSYNHKEDAGGSVVVQALSAATASGCSALVTMPVDTIKTRLQVLDAEENGRRRAMTVMQSVKSLMKEGGVGACYRGLGPRWVSMSMSATTMITTYEFLKRLATKKQK

SEQ ID NO: 27641 - protein, 336 aa, Arabidopsis thaliana
  peptide (1)..(336): Ceres Seq. ID no. 13487496
MEEKRRATTSSSSSQVHMSNDIDWQMLDKSRFFFLGAALFSGVSTALYPIVVLKTRQQVSPTRVSCANISLAIARLEGLKGFYKGFGTSLLGTIPARALYMTALEITKSSVGQATVRLGLSDTTSLAVANGAAGLTSAVAAQTVWTPIDIVSQGLMVQGDVSLSKHLPGVMNSCRYRNGFDAFRKILYTDGPRGFYRGFGISILTYAPSNAVWWASYSLAQKSIWSRYKHSYNHKEDAGGSVVVQALSAATASGCSALVTMPVDTIKTRLQVLDAEENGRRRAMTVMQSVKSLMKEGGVGACYRGLGPRWVSMSMSATTMITTYEFLKRLATKKQK

SEQ ID NO: 27642 - protein, 319 aa, Arabidopsis thaliana
  peptide (1)..(319): Ceres Seq. ID no. 13487497
MSNDIDWQMLDKSRFFFLGAALFSGVSTALYPIVVLKTRQQVSPTRVSCANISLAIARLEGLKGFYKGFGTSLLGTIPARALYMTALEITKSSVGQATVRLGLSDTTSLAVANGAAGLTSAVAAQTVWTPIDIVSQGLMVQGDVSLSKHLPGVMNSCRYRNGFDAFRKILYTDGPRGFYRGFGISILTYAPSNAVWWASYSLAQKSIWSRYKHSYNHKEDAGGSVVVQALSAATASGCSALVTMPVDTIKTRLQVLDAEENGRRRAMTVMQSVKSLMKEGGVGACYRGLGPRWVSMSMSATTMITTYEFLKRLATKKQK

SEQ ID NO: 27643 - DNA, 926 bp, Arabidopsis thaliana
  misc_feature (1)..(926): Ceres Seq. ID no. 12338033
  misc_feature (1)..(926): Ortholog of  Ceres SEQ ID NO 14311392 as cited in SEQ ID NO 58307
  misc_feature (1)..(926): Ortholog of  Ceres SEQ ID NO 13599348 as cited in SEQ ID NO 0
aaaattccgaaattgtttcgaaaaatcctgaagaagaagaggtctttgaatcaacaacagttccatgttgtgcccaacgtatacaccaagtgtttaccattttcaaacgcaaaagccagttttccggaaacagaggtttcgggtttgttcatctacttctggtggtgagaatgatagattcaaagtagagtacactccttggcttatcgttgggttgggcaatccaggaaacaagtatcatggaacaagacacaatgttggtttcgagatgatcgatgtgttggctagaaaagaaggggtgttgatgaacactatacagtccaaagctctaatcggaatagtacaggtgctattgaagatgtacctatcttgttggctaaacctcagacttatatgaacttcagcggcgaatcggttggatctctagcttcacactatcgagtaccattgcgccacattttaatgatttacgatgagatggctttaccaaatggggttttgagacttcaaccgaaaggaggtcaaggctatcacaacggagtgaagagtgtaatggggcatttggatggtcgtcgaaactttcctcgtttaagcataggcattggtaaaccacctggaaacatggatatgaaagcttttcttcttcagaagtttagtccattggaacagaaacagatcgaggaagcactcgagcaaggaagtgaagcagtgaagactcttgtgcttaatggcttcaatcaaggaatttcgagatttaatcttgtgcagaaatataaattccataaagtatagactccgatttgcaacaaaagcaatcatgtagagattggtttagcactatcattttatcgtctcaagagacactctttcgttacgaagtgtatgaagtttcttagattaatataattcagtctcgagaaactatc

SEQ ID NO: 27644 - protein, 132 aa, Arabidopsis thaliana
  peptide (1)..(132): Ceres Seq. ID no. 12338034
MNFSGESVGSLASHYRVPLRHILMIYDEMALPNGVLRLQPKGGQGYHNGVKSVMGHLDGRRNFPRLSIGIGKPPGNMDMKAFLLQKFSPLEQKQIEEALEQGSEAVKTLVLNGFNQGISRFNLVQKYKFHKV

SEQ ID NO: 27645 - protein, 110 aa, Arabidopsis thaliana
  peptide (1)..(110): Ceres Seq. ID no. 12338035
MLCPTYTPSVYHFQTQKPVFRKQRFRVCSSTSGGENDRFKVEYTPWLIVGLGNPGNKYHGTRHNVGFEMIDVLARKEGVLMNTIQSKALIGIVQVLLKMYLSCWLNLRLI

SEQ ID NO: 27646 - protein, 109 aa, Arabidopsis thaliana
  peptide (1)..(109): Ceres Seq. ID no. 12338036
MIYDEMALPNGVLRLQPKGGQGYHNGVKSVMGHLDGRRNFPRLSIGIGKPPGNMDMKAFLLQKFSPLEQKQIEEALEQGSEAVKTLVLNGFNQGISRFNLVQKYKFHKV

SEQ ID NO: 27647 - DNA, 1318 bp, Arabidopsis thaliana
  misc_feature (1)..(1318): Ceres Seq. ID no. 13490280
  misc_feature (1)..(1318): Ortholog of  Ceres SEQ ID NO 13658911 as cited in SEQ ID NO 66294
  misc_feature (1)..(1318): Ortholog of  Ceres SEQ ID NO 13660693 as cited in SEQ ID NO 67411
tactcatgtcccacttacgacgacgtcgttttaaactctctctctgtgctcttccagtctctatcgatcgccttctgaattttccggcggaaaagcaaatgtccgttaacgacagtatcgatcctcggttcgtattccacgttgaagatgaatctttgcgtttccgtgtgggagattcaggtactaagatccgggagctcgaaaccgtcggcgatcgccatttcagaacccagcaaggtttctgcggaaatagaattgagaaagatgaaaccatgtattccgatggagatgatgaagagtacgacgtttctatccgaagacgaactgctctgattcagcctggtattgattccggtaacaattatgattctgctgcagctgaagaaaccaacagagaaagtaaaaatccagttggttgggaactggttgtgagagaagatggggaaggtaattcaacgattgatcgacatgaaatggagtttaaggtgaggatcactaaaccagatggtaacgtatctaattcccaccgtaacacgcaacaaaagcgagattttgcttctgtggagaaggagagagtcactactactagtgtcagctcttgggagtctctcaaggccatcctctctgatcctgtcaccggagccttgatgaatgatgctaccatactgccttgtggacattcttttggcgccgggggattaaaagaagttaaaaaaatgaaagcatgtttcacatgttcccaacctactttagaaggatcagaaaagccaaatctctctctcagaattgtagttcatgctttccgccaagaagaagattcagatcatattcacacgctgaaaagaaggaaagaaaggtcggatcagaagagaagtttctgtatcccaaacatcactgaaactcctaagagtagccgaggcatacagtttcctttctccattggagatcatattatcatagagggaaacaaaaggacgcctccaaggtttgtcggacgcatagctgttataatgacacaatgcttaaatggatggtacgttgtgaagacagtggacaattcagagtctatcaagttacaacattgctcacttgccaagatttcagacaattcatctacgaaggtaacagtagctgaaatgccaccgtcttggctctaactcgtagaaagcaaatatctgtggctgcagaaatcagcatctgtaattttttcattcagagaaagtagttactacgtttcattatgtaatataggaacgagacaacaattttctgtactaaatccagtgttttcattcatacaaggaaactttgctcatcg

SEQ ID NO: 27648 - protein, 384 aa, Arabidopsis thaliana
  peptide (1)..(384): Ceres Seq. ID no. 13490281
LMSHLRRRRFKLSLCALPVSIDRLLNFPAEKQMSVNDSIDPRFVFHVEDESLRFRVGDSGTKIRELETVGDRHFRTQQGFCGNRIEKDETMYSDGDDEEYDVSIRRRTALIQPGIDSGNNYDSAAAEETNRESKNPVGWELVVREDGEGNSTIDRHEMEFKVRITKPDGNVSNSHRNTQQKRDFASVEKERVTTTSVSSWESLKAILSDPVTGALMNDATILPCGHSFGAGGLKEVKKMKACFTCSQPTLEGSEKPNLSLRIVVHAFRQEEDSDHIHTLKRRKERSDQKRSFCIPNITETPKSSRGIQFPFSIGDHIIIEGNKRTPPRFVGRIAVIMTQCLNGWYVVKTVDNSESIKLQHCSLAKISDNSSTKVTVAEMPPSWL

SEQ ID NO: 27649 - protein, 383 aa, Arabidopsis thaliana
  peptide (1)..(383): Ceres Seq. ID no. 13490282
MSHLRRRRFKLSLCALPVSIDRLLNFPAEKQMSVNDSIDPRFVFHVEDESLRFRVGDSGTKIRELETVGDRHFRTQQGFCGNRIEKDETMYSDGDDEEYDVSIRRRTALIQPGIDSGNNYDSAAAEETNRESKNPVGWELVVREDGEGNSTIDRHEMEFKVRITKPDGNVSNSHRNTQQKRDFASVEKERVTTTSVSSWESLKAILSDPVTGALMNDATILPCGHSFGAGGLKEVKKMKACFTCSQPTLEGSEKPNLSLRIVVHAFRQEEDSDHIHTLKRRKERSDQKRSFCIPNITETPKSSRGIQFPFSIGDHIIIEGNKRTPPRFVGRIAVIMTQCLNGWYVVKTVDNSESIKLQHCSLAKISDNSSTKVTVAEMPPSWL

SEQ ID NO: 27650 - protein, 352 aa, Arabidopsis thaliana
  peptide (1)..(352): Ceres Seq. ID no. 13490283
MSVNDSIDPRFVFHVEDESLRFRVGDSGTKIRELETVGDRHFRTQQGFCGNRIEKDETMYSDGDDEEYDVSIRRRTALIQPGIDSGNNYDSAAAEETNRESKNPVGWELVVREDGEGNSTIDRHEMEFKVRITKPDGNVSNSHRNTQQKRDFASVEKERVTTTSVSSWESLKAILSDPVTGALMNDATILPCGHSFGAGGLKEVKKMKACFTCSQPTLEGSEKPNLSLRIVVHAFRQEEDSDHIHTLKRRKERSDQKRSFCIPNITETPKSSRGIQFPFSIGDHIIIEGNKRTPPRFVGRIAVIMTQCLNGWYVVKTVDNSESIKLQHCSLAKISDNSSTKVTVAEMPPSWL

SEQ ID NO: 27651 - DNA, 835 bp, Arabidopsis thaliana
  misc_feature (1)..(835): Ceres Seq. ID no. 12421619
  misc_feature (1)..(835): Ortholog of  Ceres SEQ ID NO 12578315 as cited in SEQ ID NO 62451
  misc_feature (1)..(835): Ortholog of  Ceres SEQ ID NO 13584577 as cited in SEQ ID NO 65298
attttcagctaaaagcaatggagtcatcacttccccaagttgctgcacttgatcgttcaactctactcaaagctttcgacgagactaaaaccggcgtgaaaggccttatcgacgccggaatcacagagattccttcgatatttcgtgcacctccggctactttaacaagtccaaaaccaccttcctcctctgatttctccatccccacaatcgatctcaaaggaggtggcacggactcgatcacgcggcggagcttggtggagaagatcggagacgcggcagagaaatggggatttttccaggtgatcaaccacgggatcccgatggatgtgttggagaagatgatagatgggattcgtgagtttcacgagcaagacactgaagtgaagaaagggttttactctcgagtccagctagtaagatggtatacagcagcaacttcgatctgtttagctcaccggcggcgaattggagagatacacttggttgttatacagcaccagatcccccgagaccggaggacttacccgccacttgtggggagatgatgattgagtactcaaaggaagtgatgaaattgggtaaattactcttcgagcttctctcggaagctctagggttaaacactaatcacctcaaggacatggattgcactaactccttgctgttgctcggccattattacccgccatgtccccaacccgaccttactctaggcttaacgaaacactccgacaactcttttctcactattcttcttcaagaccatatcggagggcttcaagttcttcatgaccaatattgggttgatgttcctcctgtccctggagctctt

SEQ ID NO: 27652 - protein, 181 aa, Arabidopsis thaliana
  peptide (1)..(181): Ceres Seq. ID no. 12421620
FQLKAMESSLPQVAALDRSTLLKAFDETKTGVKGLIDAGITEIPSIFRAPPATLTSPKPPSSSDFSIPTIDLKGGGTDSITRRSLVEKIGDAAEKWGFFQVINHGIPMDVLEKMIDGIREFHEQDTEVKKGFYSRVQLVRWYTAATSICLAHRRRIGEIHLVVIQHQIPRDRRTYPPLVGR

SEQ ID NO: 27653 - protein, 176 aa, Arabidopsis thaliana
  peptide (1)..(176): Ceres Seq. ID no. 12421621
MESSLPQVAALDRSTLLKAFDETKTGVKGLIDAGITEIPSIFRAPPATLTSPKPPSSSDFSIPTIDLKGGGTDSITRRSLVEKIGDAAEKWGFFQVINHGIPMDVLEKMIDGIREFHEQDTEVKKGFYSRVQLVRWYTAATSICLAHRRRIGEIHLVVIQHQIPRDRRTYPPLVGR

SEQ ID NO: 27654 - protein, 138 aa, Arabidopsis thaliana
  peptide (1)..(138): Ceres Seq. ID no. 12421622
MVYSSNFDLFSSPAANWRDTLGCYTAPDPPRPEDLPATCGEMMIEYSKEVMKLGKLLFELLSEALGLNTNHLKDMDCTNSLLLLGHYYPPCPQPDLTLGLTKHSDNSFLTILLQDHIGGLQVLHDQYWVDVPPVPGAL

SEQ ID NO: 27655 - DNA, 1510 bp, Arabidopsis thaliana
  misc_feature (1)..(1510): Ceres Seq. ID no. 12370594
  misc_feature (1)..(1510): Ortholog of  Ceres SEQ ID NO 13581327 as cited in SEQ ID NO 51165
  misc_feature (1)..(1510): Ortholog of  Ceres SEQ ID NO 12610002 as cited in SEQ ID NO 55823
  misc_feature (1)..(1510): Ortholog of  Ceres SEQ ID NO 14308310 as cited in SEQ ID NO 58573
  misc_feature (1)..(1510): Ortholog of  Ceres SEQ ID NO 14308795 as cited in SEQ ID NO 59140
  misc_feature (1)..(1510): Ortholog of  Ceres SEQ ID NO 14313354 as cited in SEQ ID NO 61520
  misc_feature (1)..(1510): Ortholog of  Ceres SEQ ID NO 13596744 as cited in SEQ ID NO 62765
aatatttctcacccatttttcaccaatttctctccacttaaaaccaaccccaattctcaccaaaaatcgcaaaaaagatttcaactttcgataaacccagatcgaaaaatcagatttttccagatcaatcagagagttagagatggagtataataacaacaatcagcaatctttttggcagttcagcgaccagctgagagttcagacaccgaatctagcgaatctgtctctcaacgactcgatctggagcacaaactctgtcttcaaagagcgtcgaaacttagacatagccgccaccaccgacaagaacaacaaccagatcgactattatcagaagaagacaacttccgacaacatcaattccaactggaactggaagtcttctggttcaaacaacgacatgggtttaggattcggacctgtgggttcaaaatccaccgtcgatttaaacccaatcgacaaattcaactcaccgttcaacgacacgtggaaattcaactcagtcaacgttaacgttaacggttactcaccgtcaagcgccgttaacggagatttcaacaaaggggtttacacgtcgatgaagaagtatgggtacaacgtcaatctaaagaacaacaacaagaacaaaggaatcgatgaagatcatcagattcagaaaggtgggaagaagaacagaaagaatcagcagaacaataataaccagaggaacgaagacgacaagaacaatggtttggacaagaggtttaagactcttcctccagcagaagctttgccaagaaacgaaaccattggtggttacatctttgtctgcaacaacgataccatggaagagaatctcaaacgccagcttttcggattgccaccaagatacagggactcggttagagcgataactccaggacttcctctgtttctttacaactactccactcaccaacttcatggaatctacgaggcagctagcttcggaggaacaaacattgagttgaatgcttttgaagacaagaaatgtcctggcgaatctcgtttccctgctcaggtgagggccataacgaggaaagtatgtttgccactggaagaagattctttccgacccattttgcaccactacgacggtcctaagttccgactcgaactcagtgtccctgaggtgctttctctattggacatttttgctgaccaaaacccttgaattgggtaataccaatgaagaacacaaaacagtggtttgttacttcaaatccagaaagagagagataccccattatacatatatgattataaggaggagtattaataataattgtctgaagaaatggtattttactagtttatacagtttctttcttaagtatattcccaggagatatgggataaatagaagatgtgctatttttgtgtgggtggatgaagaatagatctcatctccgcgcttttttctttttgtaaattatataaaataacatatgtacaaccccaaaaatagggagaaatgagatgatgaactctt

SEQ ID NO: 27656 - protein, 349 aa, Arabidopsis thaliana
  peptide (1)..(349): Ceres Seq. ID no. 12370595
MEYNNNNQQSFWQFSDQLRVQTPNLANLSLNDSIWSTNSVFKERRNLDIAATTDKNNNQIDYYQKKTTSDNINSNWNWKSSGSNNDMGLGFGPVGSKSTVDLNPIDKFNSPFNDTWKFNSVNVNVNGYSPSSAVNGDFNKGVYTSMKKYGYNVNLKNNNKNKGIDEDHQIQKGGKKNRKNQQNNNNQRNEDDKNNGLDKRFKTLPPAEALPRNETIGGYIFVCNNDTMEENLKRQLFGLPPRYRDSVRAITPGLPLFLYNYSTHQLHGIYEAASFGGTNIELNAFEDKKCPGESRFPAQVRAITRKVCLPLEEDSFRPILHHYDGPKFRLELSVPEVLSLLDIFADQNP

SEQ ID NO: 27657 - protein, 263 aa, Arabidopsis thaliana
  peptide (1)..(263): Ceres Seq. ID no. 12370596
MGLGFGPVGSKSTVDLNPIDKFNSPFNDTWKFNSVNVNVNGYSPSSAVNGDFNKGVYTSMKKYGYNVNLKNNNKNKGIDEDHQIQKGGKKNRKNQQNNNNQRNEDDKNNGLDKRFKTLPPAEALPRNETIGGYIFVCNNDTMEENLKRQLFGLPPRYRDSVRAITPGLPLFLYNYSTHQLHGIYEAASFGGTNIELNAFEDKKCPGESRFPAQVRAITRKVCLPLEEDSFRPILHHYDGPKFRLELSVPEVLSLLDIFADQNP

SEQ ID NO: 27658 - protein, 204 aa, Arabidopsis thaliana
  peptide (1)..(204): Ceres Seq. ID no. 12370597
MKKYGYNVNLKNNNKNKGIDEDHQIQKGGKKNRKNQQNNNNQRNEDDKNNGLDKRFKTLPPAEALPRNETIGGYIFVCNNDTMEENLKRQLFGLPPRYRDSVRAITPGLPLFLYNYSTHQLHGIYEAASFGGTNIELNAFEDKKCPGESRFPAQVRAITRKVCLPLEEDSFRPILHHYDGPKFRLELSVPEVLSLLDIFADQNP

SEQ ID NO: 27659 - DNA, 1219 bp, Arabidopsis thaliana
  misc_feature (1)..(1219): Ceres Seq. ID no. 12562073
  misc_feature (1)..(1219): Ortholog of  Ceres SEQ ID NO 13656155 as cited in SEQ ID NO 64609
aaaaaaacttgcaaaactctcgtccgagatatatcgactccgcgaccctccactactcttctgctgatctacacacacacacacaaaaaaaaaaaaactcaatcgccagcaacaatggcgaagctcacacttctcttcttcctttcctttctcatcttctcctcatccatcgctttccaatcagacgagctcctcgttgacgacgacgaatttggtctagaaggagcaaagccccgctccaccgatctttacacatcttcttcttcttcgccacagcagcagcaacagactccaactatccggagaagatactcagatcctaccgatttggattcaaaagtccaatttactctcgaacatgccttcggtgactctgatttctcccccgccggtactttctccgctcgtctcaaaacctggagtcatggcggaaagacattaacgaagctgcgattctctaggaatgatttttctgctaaagagaaagatgcattcaagaatctgctgaaaggagatgacttttatcggattcggcttccatctaatgtggttagtccaccagggagagagtttgtgattgcatcagtgagagctagatgtctaccacgggatggcttggatgagcatttcattatacacatggaaggtgctaacatcttggcagttagttatggttctcctggggcgtgtcaatatcctcgccaattgaaacttccagcaaaatggtcgtttaactctcacacaattctgaaaagcagtgagcaggcgccaagaactccaatattcactgaggagattctaggcagtgagaatgtagagggagaagttgaaccaccaccagagagatcattttgggcgaaatattggatgtatttgataccgctgggactcgtagtgatgaatgccgttacacaagcatcaaacatggctgaagaacccgcgggtggacaggcaggaggggcacaagtgcaaccagctgccaggagaagatgattccacttttacttctcccaaagcaatgaaagctgcagctggttagagatgatgattcaacagatcttcatgtaaaccatcttgccatcatttggttttatgtaacctttaattttaatcctcgatcggtgtgtttttgtactcaccaatcgggaaatcaaaaatcttgtcttcatgacatatcaagaacaaagacatttagcagcttccatatcttgttttgatc

SEQ ID NO: 27660 - protein, 330 aa, Arabidopsis thaliana
  peptide (1)..(330): Ceres Seq. ID no. 12562074
KKTCKTLVRDISTPRPSTTLLLIYTHTHKKKKTQSPATMAKLTLLFFLSFLIFSSSIAFQSDELLVDDDEFGLEGAKPRSTDLYTSSSSSPQQQQQTPTIRRRYSDPTDLDSKVQFTLEHAFGDSDFSPAGTFSARLKTWSHGGKTLTKLRFSRNDFSAKEKDAFKNLLKGDDFYRIRLPSNVVSPPGREFVIASVRARCLPRDGLDEHFIIHMEGANILAVSYGSPGACQYPRQLKLPAKWSFNSHTILKSSEQAPRTPIFTEEILGSENVEGEVEPPPERSFWAKYWMYLIPLGLVVMNAVTQASNMAEEPAGGQAGGAQVQPAARRR

SEQ ID NO: 27661 - protein, 292 aa, Arabidopsis thaliana
  peptide (1)..(292): Ceres Seq. ID no. 12562075
MAKLTLLFFLSFLIFSSSIAFQSDELLVDDDEFGLEGAKPRSTDLYTSSSSSPQQQQQTPTIRRRYSDPTDLDSKVQFTLEHAFGDSDFSPAGTFSARLKTWSHGGKTLTKLRFSRNDFSAKEKDAFKNLLKGDDFYRIRLPSNVVSPPGREFVIASVRARCLPRDGLDEHFIIHMEGANILAVSYGSPGACQYPRQLKLPAKWSFNSHTILKSSEQAPRTPIFTEEILGSENVEGEVEPPPERSFWAKYWMYLIPLGLVVMNAVTQASNMAEEPAGGQAGGAQVQPAARRR

SEQ ID NO: 27662 - DNA, 1302 bp, Arabidopsis thaliana
  misc_feature (1)..(1302): Ceres Seq. ID no. 12333724
  misc_feature (1)..(1302): Ortholog of  Ceres SEQ ID NO 15170595 as cited in SEQ ID NO 57510
  misc_feature (1)..(1302): Ortholog of  Ceres SEQ ID NO 13655218 as cited in SEQ ID NO 68872
gttgtatttttgatagggaagaaacaaaaacacaaaagcggcgttgatttttttagattttccgacaagatttctcgtgagaagatttgtctgaatctttctttcgaagaggttttgagttaatttcaaaatggttttggagaaaaaatctgcattgttggaagatttgataaagaaatgcggcggttgtgcggtggtcgacggtggtttcgctacccagcttgagattcacggcgccgccattaacgaccctttgtggagtgctgtttctctcatcaaaaatcctgagctcatcaaaagggttcacatggaatatttggaagctggtgcagacattgtggttacttcatcttatcaggctacgatcccggggtttctttctagaggtttatcaatagaagagagcgagtctttgcttcaaaagagtgtagaattagctgttgaagctcgtgatagattctgggagaaagtgagcaaggtttcaggacatagctataacagagctcttgtagctgcatctattggaagctatggtgcttatcttgctgatggctctgagtacagtggtcactatggtgagaatgtaagtttggataaactaaaggactttcacaggagaagacttcaagtcttagtggaagctggtcctgatcttcttgcttttgaaaccataccgaataaactcgaagctcaggcttgcgttgagcttttggaggaagagaaagtgcaaatcccagcatggatctgcttcacatctgtagatggtgagaaagctccatcaggagagagctttgaggaatgtcttgaacctcttaacaaaagcaacaatatttacgcagttggtattaactgcgcacctcctcaattcatcgaaaatctgattcgcaaattcgccaagctgacgaagaaagcaatcgttgtttacccgaatagcggagaggtttgggatggaaaagctaaacaatggctgccatcacaatgctttggtgatgatgaatttgagatgtttgcaacgaaatggcgtgaccttggagctaaactcatcggaggatgttgcaggactacaccttccaccattaacgctatctccagagatttgaaacgaagatgatttttcttcagggagaaaagactgaagattctttttcaactttttaactagcttgaccattgttagggctatctatctgttttctgttgttttcttgttgttcacgttttctttgtggtttgatgatatgtattcgtaaactaggccttgggcgttttcaatgtaatggcccataaaatattttctttatc

SEQ ID NO: 27663 - protein, 326 aa, Arabidopsis thaliana
  peptide (1)..(326): Ceres Seq. ID no. 12333725
MVLEKKSALLEDLIKKCGGCAVVDGGFATQLEIHGAAINDPLWSAVSLIKNPELIKRVHMEYLEAGADIVVTSSYQATIPGFLSRGLSIEESESLLQKSVELAVEARDRFWEKVSKVSGHSYNRALVAASIGSYGAYLADGSEYSGHYGENVSLDKLKDFHRRRLQVLVEAGPDLLAFETIPNKLEAQACVELLEEEKVQIPAWICFTSVDGEKAPSGESFEECLEPLNKSNNIYAVGINCAPPQFIENLIRKFAKLTKKAIVVYPNSGEVWDGKAKQWLPSQCFGDDEFEMFATKWRDLGAKLIGGCCRTTPSTINAISRDLKRR

SEQ ID NO: 27664 - protein, 267 aa, Arabidopsis thaliana
  peptide (1)..(267): Ceres Seq. ID no. 12333726
MEYLEAGADIVVTSSYQATIPGFLSRGLSIEESESLLQKSVELAVEARDRFWEKVSKVSGHSYNRALVAASIGSYGAYLADGSEYSGHYGENVSLDKLKDFHRRRLQVLVEAGPDLLAFETIPNKLEAQACVELLEEEKVQIPAWICFTSVDGEKAPSGESFEECLEPLNKSNNIYAVGINCAPPQFIENLIRKFAKLTKKAIVVYPNSGEVWDGKAKQWLPSQCFGDDEFEMFATKWRDLGAKLIGGCCRTTPSTINAISRDLKRR

SEQ ID NO: 27665 - DNA, 827 bp, Arabidopsis thaliana
  misc_feature (1)..(827): Ceres Seq. ID no. 12370590
  misc_feature (1)..(827): Ortholog of  Ceres SEQ ID NO 13657610 as cited in SEQ ID NO 66165
  misc_feature (1)..(827): Ortholog of  Ceres SEQ ID NO 13598312 as cited in SEQ ID NO 68448
  misc_feature (1)..(827): Ortholog of  Ceres SEQ ID NO 13596100 as cited in SEQ ID NO 68573
tgattccgaattgtttgtttcgtgttggtggttcggcgattttgttgtcgaacaaggggaaagatcgtagacggtctaagtataagcttgttcataccgttaggactcataaaggagctgttgagaaggctttcaactgtgtttaccaagagcaagatgataatgggaagaccggggtttcgttgtcgaaagatcttatggctatagctggtgaagctcttaaggcgaatatcactactttaggtcctttggttcttcctataagtgagcagattctgtttttcatgactttggttacgaagaaactgtttaactcgaagctgaagccgtatattccggatttcaagcttgcgtttgatcatttctgtatccatgctggtggtagagctgtgattgatgagcttgagaagaatctgcagctttcgcagactcatgtcgaggcatcgagaatgacactgcatagatttggaaacacttcttcgagctcgatttggtatgaactggcttacatagaggctaaaggtaggatgaagaaaggaaaccgggtttggcagattgcttttggaagtgggtttaagtgtaacagtgcagtttggatggctctaaacaatgtcaagccttcggttagtagtccgtgggaacactgcatcgaccgatatccggttaagctcgacttctgatttaatgaaaaaccatttgtttggttagtcctagtcttactagactctgccttgtttatttttcttcttttctggttaagctcttgtactcttaatgtgacgcttcttgattattactctcgcgttttatgctatggcatctttatc

SEQ ID NO: 27666 - protein, 225 aa, Arabidopsis thaliana
  peptide (1)..(225): Ceres Seq. ID no. 12370591
IPNCLFRVGGSAILLSNKGKDRRRSKYKLVHTVRTHKGAVEKAFNCVYQEQDDNGKTGVSLSKDLMAIAGEALKANITTLGPLVLPISEQILFFMTLVTKKLFNSKLKPYIPDFKLAFDHFCIHAGGRAVIDELEKNLQLSQTHVEASRMTLHRFGNTSSSSIWYELAYIEAKGRMKKGNRVWQIAFGSGFKCNSAVWMALNNVKPSVSSPWEHCIDRYPVKLDF

SEQ ID NO: 27667 - protein, 160 aa, Arabidopsis thaliana
  peptide (1)..(160): Ceres Seq. ID no. 12370592
MAIAGEALKANITTLGPLVLPISEQILFFMTLVTKKLFNSKLKPYIPDFKLAFDHFCIHAGGRAVIDELEKNLQLSQTHVEASRMTLHRFGNTSSSSIWYELAYIEAKGRMKKGNRVWQIAFGSGFKCNSAVWMALNNVKPSVSSPWEHCIDRYPVKLDF

SEQ ID NO: 27668 - protein, 131 aa, Arabidopsis thaliana
  peptide (1)..(131): Ceres Seq. ID no. 12370593
MTLVTKKLFNSKLKPYIPDFKLAFDHFCIHAGGRAVIDELEKNLQLSQTHVEASRMTLHRFGNTSSSSIWYELAYIEAKGRMKKGNRVWQIAFGSGFKCNSAVWMALNNVKPSVSSPWEHCIDRYPVKLDF

SEQ ID NO: 27669 - DNA, 1117 bp, Arabidopsis thaliana
  misc_feature (1)..(1117): Ceres Seq. ID no. 12357628
  misc_feature (1)..(1117): Ortholog of  Ceres SEQ ID NO 12608889 as cited in SEQ ID NO 50891
agttcttcagtggggcggcttgtggcttctttttcatttttccagaaaaccccataaacctctcgctctcgggaatttgattgattcccacgaggaaaaatcaatcttcccggaaaatggcagctaggttattgttccgtcgaagttctcaaatcctccgatcaattcaacgaaatcctcaaatctcatcgtcattcgaatcaccaccttgcccgatttttcactcattgaccaccgcctcaccagatccatcgcgattatcatccttaaccttcctccgatctctctccatcgctcgtcgcggtccaacacgtcctaagaaaatcgacatcggagccaaagcgcgtcagatgcagaatcgccgtttatggacctacgcgctaaccttcagctgcatcgccggattcgtagttatcgtccttaaccaatttcaggatcagcttgtcttctacctaacgccatcagacgctatggagaaattcgcagagaatccaacaaagaacaaattcagactcggtggtttggttctagaaggtagcgttgcgcagccggcggcgtcacaggagatggagtttgtgatcactgatctgatcactgatattttggttaggtataaaggatctttgccggatctgtttagggaaggtcattcagttgtggttgaaggattcattaagccgtatacagatgaagtaaggaaggaagtttctacaaaacctatttcgaagaaagctaggaacctcgattgtttcttctcggcgactgaagttttggctaagcatgatgagaagtatatgccacaggaagttgcggcggcgattgagaagaataagaagattattgaagcggcggcgactgaacatgctgctgaacaagctgctgaagttgcggcttcttagattggtataaacttcattctttttaagttaatcaaaattttccccaagttcgagcttttggtgagtattgttcatcttataaggttatatttgattatagtttctggaaaagagtaggaagattggaatgttatattcctggaaaacagagatttgatttttgagtctatttgagaattaagtggagaaatgtgatacactatacaatagctttgttc

SEQ ID NO: 27670 - protein, 260 aa, Arabidopsis thaliana
  peptide (1)..(260): Ceres Seq. ID no. 12357629
MAARLLFRRSSQILRSIQRNPQISSSFESPPCPIFHSLTTASPDPSRLSSLTFLRSLSIARRGPTRPKKIDIGAKARQMQNRRLWTYALTFSCIAGFVVIVLNQFQDQLVFYLTPSDAMEKFAENPTKNKFRLGGLVLEGSVAQPAASQEMEFVITDLITDILVRYKGSLPDLFREGHSVVVEGFIKPYTDEVRKEVSTKPISKKARNLDCFFSATEVLAKHDEKYMPQEVAAAIEKNKKIIEAAATEHAAEQAAEVAAS

SEQ ID NO: 27671 - protein, 182 aa, Arabidopsis thaliana
  peptide (1)..(182): Ceres Seq. ID no. 12357630
MQNRRLWTYALTFSCIAGFVVIVLNQFQDQLVFYLTPSDAMEKFAENPTKNKFRLGGLVLEGSVAQPAASQEMEFVITDLITDILVRYKGSLPDLFREGHSVVVEGFIKPYTDEVRKEVSTKPISKKARNLDCFFSATEVLAKHDEKYMPQEVAAAIEKNKKIIEAAATEHAAEQAAEVAAS

SEQ ID NO: 27672 - protein, 142 aa, Arabidopsis thaliana
  peptide (1)..(142): Ceres Seq. ID no. 12357631
MEKFAENPTKNKFRLGGLVLEGSVAQPAASQEMEFVITDLITDILVRYKGSLPDLFREGHSVVVEGFIKPYTDEVRKEVSTKPISKKARNLDCFFSATEVLAKHDEKYMPQEVAAAIEKNKKIIEAAATEHAAEQAAEVAAS

SEQ ID NO: 27673 - DNA, 1272 bp, Arabidopsis thaliana
  misc_feature (1)..(1272): Ceres Seq. ID no. 12324965
  misc_feature (1)..(1272): Ortholog of  Ceres SEQ ID NO 13597416 as cited in SEQ ID NO 60674
agataagagcgaaacaaattacaaaattgaattacacaataatgtcctctaagcgacgactactggtgaaatattttataagaaaacaaaaacaataattaacaaacaaaggcgacacctttagattcgacaagacgaccattttagaaaaagcttctcaaattctctccttatccccaaaaattcaaacttttttctctttggaaaattctgaggcaaaaatgcggcgtaattgctgccatgtttcatttgcttcaaccctcaagatccttaattttgtccaagctttcattggtgtttcgatcattatctactccatatggatgctccatgaatacagccgtcaccttcccgtggacccgcctccgtcagcttcatcaagctccggaaccgagatcgctactagtgtatctgagcccttgaagaatcctattgattttgtggcgagtatcattctcgggtctaatggtggtgatcatgggtttaacctacgctcgttggaccttcctgctccatggttcatctactctttcatggcggttggtatattggtctgcattgttaccttcattggtttcatagcagctgaagcaatcaatggctgttgcttgtgtttttactctattctcaaaactctgctcattctacttgaagctgcacttgttgcatacatcgctattgaccgtcactgggaaaaggatcttccgtatgatccaactggagaacttagtagtcttagggctttcattgaagaaaacatcgatatatgcaaatgggtggggattgctgtggtagcagtccagctactgtcattgctactagccatggttctcagagcgatggtttcaaccccgaaacccgaacttgacgaagaggaagatgatgagaacccaaggagtagaacttgggacccacttcttggtccgcaaggaaaccaagcgcctgctggctcaagcaagattgaaaactggagctcccgaatcagagaaaagtatggtttgaaccagagtccaccggtgaacccgaaaggttgatgaagccaaataatcatgtttctaaaactgcatgtgtccatatggtctctgtgaagctctctttctctatgttttgctctttgcaacttctcgagtgtgcataaacatttactcaaaacagtgctgtattgtgtttacacaaacggcataagcatcttcgtttgtgtgtttgcttgtacaaacaatcctgtgaacagtttgaagttagcatttccactataacgtttcgattcaattt

SEQ ID NO: 27674 - protein, 270 aa, Arabidopsis thaliana
  peptide (1)..(270): Ceres Seq. ID no. 12324966
MRRNCCHVSFASTLKILNFVQAFIGVSIIIYSIWMLHEYSRHLPVDPPPSASSSSGTEIATSVSEPLKNPIDFVASIILGSNGGDHGFNLRSLDLPAPWFIYSFMAVGILVCIVTFIGFIAAEAINGCCLCFYSILKTLLILLEAALVAYIAIDRHWEKDLPYDPTGELSSLRAFIEENIDICKWVGIAVVAVQLLSLLLAMVLRAMVSTPKPELDEEEDDENPRSRTWDPLLGPQGNQAPAGSSKIENWSSRIREKYGLNQSPPVNPKG

SEQ ID NO: 27675 - protein, 236 aa, Arabidopsis thaliana
  peptide (1)..(236): Ceres Seq. ID no. 12324967
MLHEYSRHLPVDPPPSASSSSGTEIATSVSEPLKNPIDFVASIILGSNGGDHGFNLRSLDLPAPWFIYSFMAVGILVCIVTFIGFIAAEAINGCCLCFYSILKTLLILLEAALVAYIAIDRHWEKDLPYDPTGELSSLRAFIEENIDICKWVGIAVVAVQLLSLLLAMVLRAMVSTPKPELDEEEDDENPRSRTWDPLLGPQGNQAPAGSSKIENWSSRIREKYGLNQSPPVNPKG

SEQ ID NO: 27676 - protein, 166 aa, Arabidopsis thaliana
  peptide (1)..(166): Ceres Seq. ID no. 12324968
MAVGILVCIVTFIGFIAAEAINGCCLCFYSILKTLLILLEAALVAYIAIDRHWEKDLPYDPTGELSSLRAFIEENIDICKWVGIAVVAVQLLSLLLAMVLRAMVSTPKPELDEEEDDENPRSRTWDPLLGPQGNQAPAGSSKIENWSSRIREKYGLNQSPPVNPKG

SEQ ID NO: 27677 - DNA, 742 bp, Arabidopsis thaliana
  misc_feature (1)..(742): Ceres Seq. ID no. 13621920
  misc_feature (1)..(742): Ortholog of  Ceres SEQ ID NO 15174297 as cited in SEQ ID NO 0
ggacttcctgaaaaaaaaaaaatcatttcttctctgaaacgaaaaaccaaagaaacgagaagaagaagctatggcggatcagctaactgatgaacagatctctgagtttaaggaagcttttagcctcttcgacaaagatggagatggttgcatcaccacaaaggagctgggaacagtgatgcggtcactagggcagaacccaacagaagctgagctacaagacatgatcaacgaggttgacgctgatggaaacggaaccattgacttccctgagttcttaaacctaatggctaaaaagatgaaggacacagactcggaggaagagctgaaagaagctttcagggtgttcgacaaagaccagaacggtttcatatccgctgcagagcttcgccatgtgatgacgaatctaggtgagaaactgactgatgaagaggtcgaggagatgattcgtgaagcagatgttgatggagatggtcagataaactacgaggagtttgtcaagattatgatggctaagtgatgatgataagaaaaaaatgaagaataaaagtggtgatgtgatgaccttttaggcttttactatctacaaaagaatgattcgacctttaatgtcttgggtttgatttgagcctagtagtttcttaaggttttaacagactgaatttgtgacttatctttttttattttgttggtttctttctcgttggcataatggcatgtttagatttcggtaaaaaaaacc

SEQ ID NO: 27678 - protein, 149 aa, Arabidopsis thaliana
  peptide (1)..(149): Ceres Seq. ID no. 13621921
MADQLTDEQISEFKEAFSLFDKDGDGCITTKELGTVMRSLGQNPTEAELQDMINEVDADGNGTIDFPEFLNLMAKKMKDTDSEEELKEAFRVFDKDQNGFISAAELRHVMTNLGEKLTDEEVEEMIREADVDGDGQINYEEFVKIMMAK

SEQ ID NO: 27679 - protein, 113 aa, Arabidopsis thaliana
  peptide (1)..(113): Ceres Seq. ID no. 13621922
MRSLGQNPTEAELQDMINEVDADGNGTIDFPEFLNLMAKKMKDTDSEEELKEAFRVFDKDQNGFISAAELRHVMTNLGEKLTDEEVEEMIREADVDGDGQINYEEFVKIMMAK

SEQ ID NO: 27680 - protein, 98 aa, Arabidopsis thaliana
  peptide (1)..(98): Ceres Seq. ID no. 13621923
MINEVDADGNGTIDFPEFLNLMAKKMKDTDSEEELKEAFRVFDKDQNGFISAAELRHVMTNLGEKLTDEEVEEMIREADVDGDGQINYEEFVKIMMAK

SEQ ID NO: 27681 - DNA, 514 bp, Arabidopsis thaliana
  misc_feature (1)..(514): Ceres Seq. ID no. 12335955
  misc_feature (1)..(514): Ortholog of  Ceres SEQ ID NO 12476115 as cited in SEQ ID NO 107
gccattttcctcactagcagcaacacacttgaacactactttcgaactctctctttatctctcttgcaatgaagctctctatgcgtttgatctcagctgttctcatcatgttcatgatattcgtcgccactgggatgggaccagtcactgtggaggcacgcacttgtgagtcgcagagccataggttcaagggtacatgcgtgagtgcatcaaactgcgccaacgtgtgccacaacgaaggctttgtcggaggtaactgccgtggattccgtcgtcgttgcttctgcaccagacattgctgatctacccattctcatgcataattcaagctttgatccatcgtcgtgtgtcacttctttcttatctaatcttccgtacagtaccatgaagtaccgtacattagtgtgttctcaaataagtctttggatttgtgtgtttccggtttaaatgtaatgttaaatcaactaatggctttgagcctttgactagtaataatcaaaatctatgttctgat

SEQ ID NO: 27682 - protein, 77 aa, Arabidopsis thaliana
  peptide (1)..(77): Ceres Seq. ID no. 12335956
MKLSMRLISAVLIMFMIFVATGMGPVTVEARTCESQSHRFKGTCVSASNCANVCHNEGFVGGNCRGFRRRCFCTRHC

SEQ ID NO: 27683 - protein, 73 aa, Arabidopsis thaliana
  peptide (1)..(73): Ceres Seq. ID no. 12335957
MRLISAVLIMFMIFVATGMGPVTVEARTCESQSHRFKGTCVSASNCANVCHNEGFVGGNCRGFRRRCFCTRHC

SEQ ID NO: 27684 - protein, 64 aa, Arabidopsis thaliana
  peptide (1)..(64): Ceres Seq. ID no. 12335958
MFMIFVATGMGPVTVEARTCESQSHRFKGTCVSASNCANVCHNEGFVGGNCRGFRRRCFCTRHC

SEQ ID NO: 27685 - protein, 55 aa, Arabidopsis thaliana
  peptide (1)..(55): Ceres Seq. ID no. 12335959
PFSSLAATHLNTTFELSLYLSCNEALYAFDLSCSHHVHDIRRHWDGTSHCGGTHL

SEQ ID NO: 27686 - DNA, 795 bp, Arabidopsis thaliana
  misc_feature (1)..(795): Ceres Seq. ID no. 12321153
  misc_feature (1)..(795): Ortholog of  Ceres SEQ ID NO 14309614 as cited in SEQ ID NO 52633
  misc_feature (1)..(795): Ortholog of  Ceres SEQ ID NO 15172691 as cited in SEQ ID NO 56148
  misc_feature (1)..(795): Ortholog of  Ceres SEQ ID NO 15174297 as cited in SEQ ID NO 0
aaaggagaaggaacattcactctcacgcgcttcaactttctccagaaacaagaaaatttcacagcaaaatttttctcgagaaaatccgaagaagacaaaatggcggatcagctaaccgatgaccagatctccgagttcaaggaagcttttagcctattcgacaaagacggagatggttgtatcaccacaaaggagcttgggactgtgatgagatcacttgggcagaacccgacagaagccgagctccaggatatgatcaatgaagtggatgcagacgggaacgggacaatagatttccctgagttcctgaacctaatggcacgtaagatgaaagacactgattcagaggaagagcttaaggaagccttcagggtttttgacaaggaccagaacggtttcatctcggcggctgagcttcgtcacgtgatgacaaatcttggggagaagttgacggatgaggaagtcgatgagatgatccgagaggctgatgtcgatggtgatggtcagatcaactatgaagagttcgtcaaagtcatgatggcaaagtgagattcttcttatccctcgaaatcctaagcatgtttttcttttacatctttaaaactgagaaaagtaatttattgaaccaaaagaaacagagagatttgcttccttgtttgttttgttggtcgtgattttttggtaacgttgcttcttctttgccttttggttttgttattgtccgtgacgtttgcactcatcatttgctttagtctcgagtcttgaccatttgataatattattttctcttttctc

SEQ ID NO: 27687 - protein, 182 aa, Arabidopsis thaliana
  peptide (1)..(182): Ceres Seq. ID no. 12321154
KGEGTFTLTRFNFLQKQENFTAKFFSRKSEEDKMADQLTDDQISEFKEAFSLFDKDGDGCITTKELGTVMRSLGQNPTEAELQDMINEVDADGNGTIDFPEFLNLMARKMKDTDSEEELKEAFRVFDKDQNGFISAAELRHVMTNLGEKLTDEEVDEMIREADVDGDGQINYEEFVKVMMAK

SEQ ID NO: 27688 - protein, 149 aa, Arabidopsis thaliana
  peptide (1)..(149): Ceres Seq. ID no. 12321155
MADQLTDDQISEFKEAFSLFDKDGDGCITTKELGTVMRSLGQNPTEAELQDMINEVDADGNGTIDFPEFLNLMARKMKDTDSEEELKEAFRVFDKDQNGFISAAELRHVMTNLGEKLTDEEVDEMIREADVDGDGQINYEEFVKVMMAK

SEQ ID NO: 27689 - protein, 113 aa, Arabidopsis thaliana
  peptide (1)..(113): Ceres Seq. ID no. 12321156
MRSLGQNPTEAELQDMINEVDADGNGTIDFPEFLNLMARKMKDTDSEEELKEAFRVFDKDQNGFISAAELRHVMTNLGEKLTDEEVDEMIREADVDGDGQINYEEFVKVMMAK

SEQ ID NO: 27690 - DNA, 1298 bp, Arabidopsis thaliana
  misc_feature (1)..(1298): Ceres Seq. ID no. 12600704
  misc_feature (1)..(1298): Ortholog of  Ceres SEQ ID NO 12613953 as cited in SEQ ID NO 68388
aatccatttttagtttctatcatataaatagcttcttgtgtttttcacgcccttcttctttgtatttccgcctcccccgagaaaacgaaaaccctagtttcagaggcatctccagacaccgaaaatggcggaaggactcgttttgaagggcaccatgcgtgcacacactgacatggtgacggcaatcgccaccccaatcgataacgcagacatcatcgtctcagcttcccgcgacaaatccatcattttgtggaaactcaccaaggacgacaaagcctacggtgtagctcagaggcgtctcactggtcactctcacttcgttgaggatgttgttctctcctccgatggacaattcgcgctttccggcagctgggacggcgagctccgtctttgggatcttgctgctggtgtctccactcgtagattcgttggacacaccaaggacgtgctctccgtcgccttctcactcgacaaccgtcagatcgtctctgcatctcgtgaccgtacgatcaagctgtggaacactcttggtgagtgcaagtacaccatttcagaaggtggtgagggacaccgtgattgggttagctgcgtcagattcagccctaacacgcttcagccgacgattgtatctgcttcgtgggacaagaccgtgaaagtgtggaacctttcgaactgcaagctcagatcgactcttgctggtcacaccggttacgtgagcactgtggctgtatcacctgatggttctctttgtgcaagtggaggcaaagacggtgttgttttgctgtgggatttggctgaggggaagaagctttactctcttgaagctaactctgtgatccatgctctttgcttcagtcccaacaggtactggctctgtgctgcaactgaacatggtattaagatttgggaccttgagagcaagagcattgttgaggatttgaaggttgatctcaaggctgaggctgaaaaggctgacaacagtggtcctgctgccaccaagaggaaggttatttactgcacaagccttaactggagcgctgatggaagcaccctcttcagtggttacaccgatggagtcattagagtttggggtattggtcgttactagtaatctcatcacttgtgctgtcgttgctctctgctatctgcttgttggttttatctatcacttatgtttttatcgacaactcatgaagtaccttgaggtttttggaaggatgtttgttttcttgtcaatctaggtttttgcttctttatcttatcgttcgagatcttggtttttagagttacttctcccg

SEQ ID NO: 27691 - protein, 327 aa, Arabidopsis thaliana
  peptide (1)..(327): Ceres Seq. ID no. 12600705
MAEGLVLKGTMRAHTDMVTAIATPIDNADIIVSASRDKSIILWKLTKDDKAYGVAQRRLTGHSHFVEDVVLSSDGQFALSGSWDGELRLWDLAAGVSTRRFVGHTKDVLSVAFSLDNRQIVSASRDRTIKLWNTLGECKYTISEGGEGHRDWVSCVRFSPNTLQPTIVSASWDKTVKVWNLSNCKLRSTLAGHTGYVSTVAVSPDGSLCASGGKDGVVLLWDLAEGKKLYSLEANSVIHALCFSPNRYWLCAATEHGIKIWDLESKSIVEDLKVDLKAEAEKADNSGPAATKRKVIYCTSLNWSADGSTLFSGYTDGVIRVWGIGRY

SEQ ID NO: 27692 - protein, 317 aa, Arabidopsis thaliana
  peptide (1)..(317): Ceres Seq. ID no. 12600706
MRAHTDMVTAIATPIDNADIIVSASRDKSIILWKLTKDDKAYGVAQRRLTGHSHFVEDVVLSSDGQFALSGSWDGELRLWDLAAGVSTRRFVGHTKDVLSVAFSLDNRQIVSASRDRTIKLWNTLGECKYTISEGGEGHRDWVSCVRFSPNTLQPTIVSASWDKTVKVWNLSNCKLRSTLAGHTGYVSTVAVSPDGSLCASGGKDGVVLLWDLAEGKKLYSLEANSVIHALCFSPNRYWLCAATEHGIKIWDLESKSIVEDLKVDLKAEAEKADNSGPAATKRKVIYCTSLNWSADGSTLFSGYTDGVIRVWGIGRY

SEQ ID NO: 27693 - protein, 311 aa, Arabidopsis thaliana
  peptide (1)..(311): Ceres Seq. ID no. 12600707
MVTAIATPIDNADIIVSASRDKSIILWKLTKDDKAYGVAQRRLTGHSHFVEDVVLSSDGQFALSGSWDGELRLWDLAAGVSTRRFVGHTKDVLSVAFSLDNRQIVSASRDRTIKLWNTLGECKYTISEGGEGHRDWVSCVRFSPNTLQPTIVSASWDKTVKVWNLSNCKLRSTLAGHTGYVSTVAVSPDGSLCASGGKDGVVLLWDLAEGKKLYSLEANSVIHALCFSPNRYWLCAATEHGIKIWDLESKSIVEDLKVDLKAEAEKADNSGPAATKRKVIYCTSLNWSADGSTLFSGYTDGVIRVWGIGRY

SEQ ID NO: 27694 - DNA, 982 bp, Arabidopsis thaliana
  misc_feature (1)..(982): Ceres Seq. ID no. 12738229
  misc_feature (1)..(982): Ortholog of  Ceres SEQ ID NO 13598488 as cited in SEQ ID NO 63862
  misc_feature (1)..(982): Ortholog of  Ceres SEQ ID NO 13659640 as cited in SEQ ID NO 67101
atagagagaagaaaaagaagaggtttagagagagaaaaatggcgtcaaagctctgcgattcgtgcaaatcagcgacggcggcgttatactgccgaccagacgcagcgtttctatgcttaagctgcgattcaaaagtccacgcggcgaacaaactcgcgtcacgacacgcgcgcgtgtggatgtgtgaagtgtgcgagcaagcaccggcacacgtcacgtgcaaagcagacgcggccgcgttatgcgtcacgtgcgaccgtgatatccactcggctaatccgttagctcgccgtcacgaacgcgttcccgttactccgttttacgattccgtctctagtgacggttccgttaaacacaccgccgttaatttccttgacgactgttacttctccgatatagatggtaacggaagccgtgaagaagaggaggaagaagctgcttcgtggctgttacttcccaatccaaagactacaacgacggcgacggcggggatcgttgctgttacttcagctgaggaagttccgggagatagtccggagatgaacactggtcaacagtatttgttctcggatccggatccgtatctggatctggattatggaaatgttgatccgaaggtggaatcgttagagcagaatagctccggtactgatggtgttgttccggtggagaatcggacggttagaatcccgacggtgaacgagaattgctttgaaatggattttaccggaggatctaaaggctttgcttatggaggtggttacaattgcatcagtcacagcgtgtcatcatcgtcgatggaagtgggagtggtgccagatggtggttcggtggctgatgtatcgtatccttacggtggtcctgcaaccagtggagctgatccggggacacagcgggctgttccgctgacttcagctgagagagaagcgagggtaatgaggtacagagagaagaggaagaacaggaagtttgagaagactat

SEQ ID NO: 27695 - protein, 326 aa, Arabidopsis thaliana
  peptide (1)..(326): Ceres Seq. ID no. 12738230
REKKKKRFRERKMASKLCDSCKSATAALYCRPDAAFLCLSCDSKVHAANKLASRHARVWMCEVCEQAPAHVTCKADAAALCVTCDRDIHSANPLARRHERVPVTPFYDSVSSDGSVKHTAVNFLDDCYFSDIDGNGSREEEEEEAASWLLLPNPKTTTTATAGIVAVTSAEEVPGDSPEMNTGQQYLFSDPDPYLDLDYGNVDPKVESLEQNSSGTDGVVPVENRTVRIPTVNENCFEMDFTGGSKGFAYGGGYNCISHSVSSSSMEVGVVPDGGSVADVSYPYGGPATSGADPGTQRAVPLTSAEREARVMRYREKRKNRKFEKT

SEQ ID NO: 27696 - protein, 314 aa, Arabidopsis thaliana
  peptide (1)..(314): Ceres Seq. ID no. 12738231
MASKLCDSCKSATAALYCRPDAAFLCLSCDSKVHAANKLASRHARVWMCEVCEQAPAHVTCKADAAALCVTCDRDIHSANPLARRHERVPVTPFYDSVSSDGSVKHTAVNFLDDCYFSDIDGNGSREEEEEEAASWLLLPNPKTTTTATAGIVAVTSAEEVPGDSPEMNTGQQYLFSDPDPYLDLDYGNVDPKVESLEQNSSGTDGVVPVENRTVRIPTVNENCFEMDFTGGSKGFAYGGGYNCISHSVSSSSMEVGVVPDGGSVADVSYPYGGPATSGADPGTQRAVPLTSAEREARVMRYREKRKNRKFEKT

SEQ ID NO: 27697 - protein, 267 aa, Arabidopsis thaliana
  peptide (1)..(267): Ceres Seq. ID no. 12738232
MCEVCEQAPAHVTCKADAAALCVTCDRDIHSANPLARRHERVPVTPFYDSVSSDGSVKHTAVNFLDDCYFSDIDGNGSREEEEEEAASWLLLPNPKTTTTATAGIVAVTSAEEVPGDSPEMNTGQQYLFSDPDPYLDLDYGNVDPKVESLEQNSSGTDGVVPVENRTVRIPTVNENCFEMDFTGGSKGFAYGGGYNCISHSVSSSSMEVGVVPDGGSVADVSYPYGGPATSGADPGTQRAVPLTSAEREARVMRYREKRKNRKFEKT

SEQ ID NO: 27698 - DNA, 2020 bp, Arabidopsis thaliana
  misc_feature (1)..(2020): Ceres Seq. ID no. 12370951
  misc_feature (1)..(2020): Ortholog of  Ceres SEQ ID NO 15175681 as cited in SEQ ID NO 55458
  misc_feature (1)..(2020): Ortholog of  Ceres SEQ ID NO 15180188 as cited in SEQ ID NO 0
aacaaacactctctacaaaaacactactctttccttcttcttctctctactctattctaattctaaagagagagagaaaagctatggatggatatgaagctactaggattgtgctctctagaatccaaagcttagaccctgaaaacgcatcaaagatcatgggtcttctccttcttcaagatcacggtgagaaagagatgataaggctagcttttggtccagagactcttgttcactctgttatagtaaaagccaagaaagagttaggtctcatgaactgttcaaggtctccgtggagtcatcaagatgagttgattagccctaagaacaaccgtggctcttcactcaatccagcttctttgcccttttacgctaatggaggaagatcttctagggatttaaccaacgatttcgagctcatggatgatatgaactccagaagtactgattttttgggctctgtgcatgcgagaagcggtagctgcgttttggacggtttagggtatggtggtgattctgatttagggtttggaggtgtgccctgttcttacttcgctagaggcttctgcaaaaacggagctagctgcagattcgtccacagtgatggaggagctgatttggttggctccccaagcagaatcgaccttcttaggtctaactcggtacccccaagacttgctcaccacttcatgactcgctcttctctcccttctttttcacctaaaggtgttaacttgcagcaaaacgatgttcaaagagctgctgctgctttgatgataggagatgaattgcagaagcttggaagatggagacctgaaaggattgatctttctgctatggcttgtccagcttcaagacagatctatctgacattccctgccgacagtaggttcagggaggaagatgtgtccaattacttcagtacttttggaccagttcaagatgtgaggataccatatcagcaaaagagaatgtttggttttgtgacatttgtgtaccctgagactgttaagagcattctcgccaaagggaatcctcactttgtgtgtgattccagagttcttgtcaagccttacaaggagaaaggcaaagtccctgacaaatacagaactaaccaaacaacagagcgagaactgtccccaacaggccttgattctagccctagggacgttctaggagggagagggttttataacaacactcaagatgtgttgtggaggagtaagtttgaagaagagattcttgaacttcagagcagaaggctgatgaatctgcagcttcttgacgtcaagaagcatttccaactcaattcccctaccaacattcactctccgaatcctttcagccaatcacttatatctccacgcccattgtccgtgatcaagagagagtatgatggaggagagaaagggaaaggaagttctaaagaaggatctgatgatgatacaatgaatctaccagagaggttggaggatagcttgccagatagtccgtttgcatcgccccgctcatcatttgcttctgtttgctgattctgctgacaataacggatcggatctgtggtcgccttcttctgataatgatgataattctactccttctacactctccgactccttcaactctttcaactaccaaatgccaaggttaccggcgattggaatgttacccggtaggggtggaccaacctgtcgtgttgggatataaacaggaagtgaagtaagaaaagaaaaaaaactgataaaatagagagacccttaataaccaaaaagatgcagaggtgtaaaaaataaaaagcaggaaatttgatgtaagagatagagaagagaaagaggaagattgttgtaccatttctctagttttaatgtgttatgtgatgatggaccacacaagatgatgtaatatgatatgatatgatatatataatataggacaagaagtgtaatctctctaaagatatacaaaagaaaagagagattatcatttgagtttgaaaagtcaatatgttcttgtccgtgcc

SEQ ID NO: 27699 - protein, 509 aa, Arabidopsis thaliana
  peptide (1)..(509): Ceres Seq. ID no. 12370952
QTLSTKTLLFPSSSLYSILILKRERKAMDGYEATRIVLSRIQSLDPENASKIMGLLLLQDHGEKEMIRLAFGPETLVHSVIVKAKKELGLMNCSRSPWSHQDELISPKNNRGSSLNPASLPFYANGGRSSRDLTNDFELMDDMNSRSTDFLGSVHARSGSCVLDGLGYGGDSDLGFGGVPCSYFARGFCKNGASCRFVHSDGGADLVGSPSRIDLLRSNSVPPRLAHHFMTRSSLPSFSPKGVNLQQNDVQRAAAALMIGDELQKLGRWRPERIDLSAMACPASRQIYLTFPADSRFREEDVSNYFSTFGPVQDVRIPYQQKRMFGFVTFVYPETVKSILAKGNPHFVCDSRVLVKPYKEKGKVPDKYRTNQTTERELSPTGLDSSPRDVLGGRGFYNNTQDVLWRSKFEEEILELQSRRLMNLQLLDVKKHFQLNSPTNIHSPNPFSQSLISPRPLSVIKREYDGGEKGKGSSKEGSDDDTMNLPERLEDSLPDSPFASPRSSFASVC

SEQ ID NO: 27700 - protein, 482 aa, Arabidopsis thaliana
  peptide (1)..(482): Ceres Seq. ID no. 12370953
MDGYEATRIVLSRIQSLDPENASKIMGLLLLQDHGEKEMIRLAFGPETLVHSVIVKAKKELGLMNCSRSPWSHQDELISPKNNRGSSLNPASLPFYANGGRSSRDLTNDFELMDDMNSRSTDFLGSVHARSGSCVLDGLGYGGDSDLGFGGVPCSYFARGFCKNGASCRFVHSDGGADLVGSPSRIDLLRSNSVPPRLAHHFMTRSSLPSFSPKGVNLQQNDVQRAAAALMIGDELQKLGRWRPERIDLSAMACPASRQIYLTFPADSRFREEDVSNYFSTFGPVQDVRIPYQQKRMFGFVTFVYPETVKSILAKGNPHFVCDSRVLVKPYKEKGKVPDKYRTNQTTERELSPTGLDSSPRDVLGGRGFYNNTQDVLWRSKFEEEILELQSRRLMNLQLLDVKKHFQLNSPTNIHSPNPFSQSLISPRPLSVIKREYDGGEKGKGSSKEGSDDDTMNLPERLEDSLPDSPFASPRSSFASVC

SEQ ID NO: 27701 - protein, 457 aa, Arabidopsis thaliana
  peptide (1)..(457): Ceres Seq. ID no. 12370954
MGLLLLQDHGEKEMIRLAFGPETLVHSVIVKAKKELGLMNCSRSPWSHQDELISPKNNRGSSLNPASLPFYANGGRSSRDLTNDFELMDDMNSRSTDFLGSVHARSGSCVLDGLGYGGDSDLGFGGVPCSYFARGFCKNGASCRFVHSDGGADLVGSPSRIDLLRSNSVPPRLAHHFMTRSSLPSFSPKGVNLQQNDVQRAAAALMIGDELQKLGRWRPERIDLSAMACPASRQIYLTFPADSRFREEDVSNYFSTFGPVQDVRIPYQQKRMFGFVTFVYPETVKSILAKGNPHFVCDSRVLVKPYKEKGKVPDKYRTNQTTERELSPTGLDSSPRDVLGGRGFYNNTQDVLWRSKFEEEILELQSRRLMNLQLLDVKKHFQLNSPTNIHSPNPFSQSLISPRPLSVIKREYDGGEKGKGSSKEGSDDDTMNLPERLEDSLPDSPFASPRSSFASVC

SEQ ID NO: 27702 - DNA, 1033 bp, Arabidopsis thaliana
  misc_feature (1)..(1033): Ceres Seq. ID no. 12340116
  misc_feature (1)..(1033): Ortholog of  Ceres SEQ ID NO 15168549 as cited in SEQ ID NO 56976
acacagcaccacaaactccatagctagctagagagtaaaaagaacaaagatgtcgaaagaagtgagcgaagaaggcaaaacccaccatggaaaagactacgtggatcctccaccagctcctcttctcgacatgggtgagctcaaatcctggtctttctacagagctctcatcgctgagttcatcgctacactcctcttcctctacgtcaccgtcgctactgtcatcggccacaagaagcaaaccggtccttgtgacggcgttggtttacttggtatcgcttgggctttcggtggtatgatcttcgtcctcgtctactgcaccgccggtatctctggtggtcacattaacccagctgtgactttcggtctgttcttggcccgtaaggtctctttggtgcgagctcttggttacatgatagctcagtgtcttggagccatttgtggtgtgggtttcgtgaaagctttcatgaaaactccttacaacactcttggtggaggagctaacaccgtagctgacggttacagcaaaggaactgctctcggagctgagattattggaactttcgttcttgtttacaccgttttctctgcaactgaccctaagagaagcgctcgtgactctcacatccccgttttggctccacttccaattggatttgctgtgttcatggtgcatttggctactatccccattactggaactggtatcaacccagctagaagctttggtgctgctgttatctacaacaacgagaaggcgtgggatgaccaatggatcttttgggttggtccgttcttgggagcactagctgcagcagcttaccaccaatacatattgagagcttcagcaattaaggccttgggctcgttccgaagcaacgcaaccaattaatgaaggctttttttaagataatgtcaagaaacaactttaagatttatatgctttaattattatttgttgttcttttgtgtgtaatgagagagatggtggattgatgttaattatgaaatggctcagtgacttctatttcct

SEQ ID NO: 27703 - protein, 280 aa, Arabidopsis thaliana; identical to SEQ ID NO: 24848
  peptide (1)..(280): Ceres Seq. ID no. 12340117

SEQ ID NO: 27704 - protein, 253 aa, Arabidopsis thaliana; identical to SEQ ID NO: 24849
  peptide (1)..(253): Ceres Seq. ID no. 12340118

SEQ ID NO: 27705 - protein, 198 aa, Arabidopsis thaliana; identical to SEQ ID NO: 24850
  peptide (1)..(198): Ceres Seq. ID no. 12340119

SEQ ID NO: 27706 - DNA, 1789 bp, Arabidopsis thaliana
  misc_feature (1)..(1789): Ceres Seq. ID no. 13592258
  misc_feature (1)..(1789): Ortholog of  Ceres SEQ ID NO 13664178 as cited in SEQ ID NO 61247
  misc_feature (1)..(1789): Ortholog of  Ceres SEQ ID NO 15179290 as cited in SEQ ID NO 0
aacttggccaatccgcatcgtgtggcgatcagagagttaagccttgaagacgaagagataacgaattggttgttgatcactcgctttataaatctctcagtttcttgctcacaccaacatctctctaagcttcttcttctaccaatctaattcctctcttcagcttcttgtgttgtgacgcatactcgtcgcagtcttgagatatggccgccgcagtttccaccgtcggtgccatcaacagagctccgttgagcttgaacgggtcaggatcaggagctgtatcagccccagcttcaaccttcttgggaaagaaagttgtaactgtgtcgagattcgcacagagcaacaagaagagcaacggatcattcaaggtgttggctgtgaaagaagacaaacaaaccgatggagacagatggagaggtcttgcctacgacacttctgatgatcaacaagacatcaccagaggcaagggtatggttgactctgtcttccaagctcctatgggaaccggaactcaccacgctgtccttagctcatacgaatacgttagccaaggccttaggcagtacaacttggacaacatgatggatgggttttacattgctcctgctttcatggacaagcttgttgttcacatcaccaagaacttcttgactctgcctaacatcaaggttccacttattttgggtatatggggaggcaaaggtcaaggtaaatccttccagtgtgagcttgtcatggccaagatgggtatcaacccaatcatgatgagtgctggagagcttgagagtggaaacgcaggagaacccgcaaagcttatccgtcagaggtaccgtgaggcagctgacttgatcaagaagggaaagatgtgttgtctcttcatcaacgatcttgacgctggtgcgggtcgtatgggtggtactactcagtacactgtcaacaaccagatggttaacgcaacactcatgaacattgctgataacccaaccaacgtccagctcccaggaatgtacaacaaggaagagaacgcacgtgtccccatcatttgcactggtaacgatttctccaccctatacgctcctctcatccgtgatggacgtatggagaagttctactgggccccgacccgtgaagaccgtatcggtgtctgcaagggtatcttcagaactgacaagatcaaggacgaagacattgtcacacttgttgatcagttccctggtcaatctatcgatttcttcggtgctttgagggcgagagtgtacgatgatgaagtgaggaagttcgttgagagccttggagttgagaagatcggaaagaggctggttaactcaagggaaggacctcccgtgttcgagcaacccgagatgacttatgagaagcttatggaatacggaaacatgcttgtgatggaacaagagaatgtcaagagagtccaacttgccgagacctacctcagccaggctgctttgggagacgcaaacgctgacgccatcggccgcggaactttctacggaaaaggagcccagcaagtaaacctgccagttcctgaagggtgtactgatcctgtggctgaaaactttgatccaacggctagaagtgacgatggaacctgtgtctacaacttttgagcaatattatcctgcttattaatttgctgttttactcctattgtctcttttggtttatttttctcctttgtgtaattgtggattggatcttgtcctcttttgttccctttttttttttttatgatgtacaacacattggtaatttaaaattgccttgtcat

SEQ ID NO: 27707 - protein, 474 aa, Arabidopsis thaliana
  peptide (1)..(474): Ceres Seq. ID no. 13592259
MAAAVSTVGAINRAPLSLNGSGSGAVSAPASTFLGKKVVTVSRFAQSNKKSNGSFKVLAVKEDKQTDGDRWRGLAYDTSDDQQDITRGKGMVDSVFQAPMGTGTHHAVLSSYEYVSQGLRQYNLDNMMDGFYIAPAFMDKLVVHITKNFLTLPNIKVPLILGIWGGKGQGKSFQCELVMAKMGINPIMMSAGELESGNAGEPAKLIRQRYREAADLIKKGKMCCLFINDLDAGAGRMGGTTQYTVNNQMVNATLMNIADNPTNVQLPGMYNKEENARVPIICTGNDFSTLYAPLIRDGRMEKFYWAPTREDRIGVCKGIFRTDKIKDEDIVTLVDQFPGQSIDFFGALRARVYDDEVRKFVESLGVEKIGKRLVNSREGPPVFEQPEMTYEKLMEYGNMLVMEQENVKRVQLAETYLSQAALGDANADAIGRGTFYGKGAQQVNLPVPEGCTDPVAENFDPTARSDDGTCVYNF

SEQ ID NO: 27708 - protein, 384 aa, Arabidopsis thaliana
  peptide (1)..(384): Ceres Seq. ID no. 13592260
MVDSVFQAPMGTGTHHAVLSSYEYVSQGLRQYNLDNMMDGFYIAPAFMDKLVVHITKNFLTLPNIKVPLILGIWGGKGQGKSFQCELVMAKMGINPIMMSAGELESGNAGEPAKLIRQRYREAADLIKKGKMCCLFINDLDAGAGRMGGTTQYTVNNQMVNATLMNIADNPTNVQLPGMYNKEENARVPIICTGNDFSTLYAPLIRDGRMEKFYWAPTREDRIGVCKGIFRTDKIKDEDIVTLVDQFPGQSIDFFGALRARVYDDEVRKFVESLGVEKIGKRLVNSREGPPVFEQPEMTYEKLMEYGNMLVMEQENVKRVQLAETYLSQAALGDANADAIGRGTFYGKGAQQVNLPVPEGCTDPVAENFDPTARSDDGTCVYNF

SEQ ID NO: 27709 - protein, 375 aa, Arabidopsis thaliana
  peptide (1)..(375): Ceres Seq. ID no. 13592261
MGTGTHHAVLSSYEYVSQGLRQYNLDNMMDGFYIAPAFMDKLVVHITKNFLTLPNIKVPLILGIWGGKGQGKSFQCELVMAKMGINPIMMSAGELESGNAGEPAKLIRQRYREAADLIKKGKMCCLFINDLDAGAGRMGGTTQYTVNNQMVNATLMNIADNPTNVQLPGMYNKEENARVPIICTGNDFSTLYAPLIRDGRMEKFYWAPTREDRIGVCKGIFRTDKIKDEDIVTLVDQFPGQSIDFFGALRARVYDDEVRKFVESLGVEKIGKRLVNSREGPPVFEQPEMTYEKLMEYGNMLVMEQENVKRVQLAETYLSQAALGDANADAIGRGTFYGKGAQQVNLPVPEGCTDPVAENFDPTARSDDGTCVYNF

SEQ ID NO: 27710 - DNA, 1591 bp, Arabidopsis thaliana
  misc_feature (1)..(1591): Ceres Seq. ID no. 12339561
  misc_feature (1)..(1591): Ortholog of  Ceres SEQ ID NO 13596816 as cited in SEQ ID NO 62287
gaatacaaaaactgaaacctttctctatttatctctctatacacaacaatggcggtcttcgttttatctctactcatactctcttccttctcagccattccattcacttatgcagattctggaatgatcggagttaactacggccgtatagcagacaatcttccggcaccggagaaagtagttgagctactgaaaacacaaggaatcaaccgcatcaagctttacgacaccgagacaactgtactaacctcactcgcgaactccggaatcaaagtcgttgtctctctccccaacgaaaacctcgcttccgccgccgcagatcagagctacaccgacacttgggttcaggacaacataaagaagtacattccagcgacggatatcgaagcaatcgccgttgggaacgaagtgttcgtcgatccgaggaacacgacgacgtatctcgttccagctatgaagaatgttcaaagctctctcgtcaagttcaatctcgacaaatccattaagatctcgtcgccgattgctttaagcgcgttggcgagttcgtatccaccgtcggctggttcgtttaaaccggagttaatcgaaccggttattaaaccgatgcttgatctcctccgcaaaacgtcgtcgcatcttatggtgaatgcttatcctttctttgcttacgcagctaacgccgataagatctcgttggattacgcgttgtttaaggagaacgccgggaatgttgattccggtaacggtttgaagtataacagtctcttagacgctcagatcgacgccgttttcgccgcaatgtccgccgttggatttaacgacgttaagcttgtggtgacagagacaggctggccttctgccggagacgagaacgagattggtgctggttcggctaacgcggcggcgtataacggcgggttagttaaaagagtgttgacgggaaacggaacgccgttaaaaccgaaggagccactaaacgtttatctgttcgctctgtttaacgagaatcagaaaacgggtccgacttctgagagaaactacgggttgttttacccaaacgagaacaaagtgtatgacgtttcgctcaacggtaagtcaacgccggtcaacgataacaaagagaaggttgttccggtgaaaccgtcgctcgtgggacagacgtggtgtgtggcgaatggtaaaacgacgaaggagaagcttcaggaaggtctcgactacgcttgtggcgaaggaggtgctgattgccgtccgattcaaccgggtgccacgtgttataatcctgaatcgttagaagctcacgcttcctacgcgttcaacagttactatcagaagaacgcacgtggagttggcacgtgtaattttggtggtgcagcgtacgtggtctcgcaacctcctaagtatgggaaatgcgagtttccaacagggcattgaaatggatatagagaagaagaggatcgtgcggatttatttacgttatttattttgatacattgttcttttgtcattcgagtatatgatttgcgtatatttatttttattattgtatatttggttggtttcatcggataaatagtcagattttctttccccc

SEQ ID NO: 27711 - protein, 460 aa, Arabidopsis thaliana
  peptide (1)..(460): Ceres Seq. ID no. 12339562
MAVFVLSLLILSSFSAIPFTYADSGMIGVNYGRIADNLPAPEKVVELLKTQGINRIKLYDTETTVLTSLANSGIKVVVSLPNENLASAAADQSYTDTWVQDNIKKYIPATDIEAIAVGNEVFVDPRNTTTYLVPAMKNVQSSLVKFNLDKSIKISSPIALSALASSYPPSAGSFKPELIEPVIKPMLDLLRKTSSHLMVNAYPFFAYAANADKISLDYALFKENAGNVDSGNGLKYNSLLDAQIDAVFAAMSAVGFNDVKLVVTETGWPSAGDENEIGAGSANAAAYNGGLVKRVLTGNGTPLKPKEPLNVYLFALFNENQKTGPTSERNYGLFYPNENKVYDVSLNGKSTPVNDNKEKVVPVKPSLVGQTWCVANGKTTKEKLQEGLDYACGEGGADCRPIQPGATCYNPESLEAHASYAFNSYYQKNARGVGTCNFGGAAYVVSQPPKYGKCEFPTGH

SEQ ID NO: 27712 - protein, 435 aa, Arabidopsis thaliana
  peptide (1)..(435): Ceres Seq. ID no. 12339564
MIGVNYGRIADNLPAPEKVVELLKTQGINRIKLYDTETTVLTSLANSGIKVVVSLPNENLASAAADQSYTDTWVQDNIKKYIPATDIEAIAVGNEVFVDPRNTTTYLVPAMKNVQSSLVKFNLDKSIKISSPIALSALASSYPPSAGSFKPELIEPVIKPMLDLLRKTSSHLMVNAYPFFAYAANADKISLDYALFKENAGNVDSGNGLKYNSLLDAQIDAVFAAMSAVGFNDVKLVVTETGWPSAGDENEIGAGSANAAAYNGGLVKRVLTGNGTPLKPKEPLNVYLFALFNENQKTGPTSERNYGLFYPNENKVYDVSLNGKSTPVNDNKEKVVPVKPSLVGQTWCVANGKTTKEKLQEGLDYACGEGGADCRPIQPGATCYNPESLEAHASYAFNSYYQKNARGVGTCNFGGAAYVVSQPPKYGKCEFPTGH

SEQ ID NO: 27713 - protein, 325 aa, Arabidopsis thaliana
  peptide (1)..(325): Ceres Seq. ID no. 12339566
MKNVQSSLVKFNLDKSIKISSPIALSALASSYPPSAGSFKPELIEPVIKPMLDLLRKTSSHLMVNAYPFFAYAANADKISLDYALFKENAGNVDSGNGLKYNSLLDAQIDAVFAAMSAVGFNDVKLVVTETGWPSAGDENEIGAGSANAAAYNGGLVKRVLTGNGTPLKPKEPLNVYLFALFNENQKTGPTSERNYGLFYPNENKVYDVSLNGKSTPVNDNKEKVVPVKPSLVGQTWCVANGKTTKEKLQEGLDYACGEGGADCRPIQPGATCYNPESLEAHASYAFNSYYQKNARGVGTCNFGGAAYVVSQPPKYGKCEFPTGH

SEQ ID NO: 27714 - DNA, 1073 bp, Arabidopsis thaliana
  misc_feature (1)..(1073): Ceres Seq. ID no. 13499467
  misc_feature (1)..(1073): Ortholog of  Ceres SEQ ID NO 15176807 as cited in SEQ ID NO 0
ctctctctgttgctaaaaacatttagatcgcttacctggttcgtgcacctgattagctgctgttatttctttttcttcccagagttcaggtcgttaaaaatctaatcttttttggtgggtgaagactcttctttatcaaatcaacctaatttctcagattctcagatctcaagagttttgtttttttagcaacaatgaataaaaatccacggctcgatttttcctcaccgtcgtcgttagccactatctccgactctgcagacggtgagctgaatgaagacgacatctttgcaatcgacatatctcacgcgccgcctcaagctcgtcattctcctgtatcatctccggcgaagcaacaaactcctgctcgtcagcttcagaggagcaaaagcggtttgaagaatgtggaagcgtctggtatcctcgcggctcttcctgaatcatctgggagtagtagttacttaagtcatgtctttcaccacaaacctgcggctgctctctctacttctgtctcctccacagcttcttcatcgtcttcttcaggtggtggtgcatcagctggttcttcgtcttcagctcgagctatcccgaccgcgcctaaaccgcctcaagagaggcttccgttttcagcttcttttgtaggtggtgggaagtatcctcaatcagctccggttcaagtgccgttagtgtcgtctgcgatgatgaatcgtcataataaggaattcaagctgactgatgtggtggatgatgatgaggaagaagaggaaggcgaaatgcttccgcctcacgagattgtagctcggtctttggctcagtcgtcgttgttatcttgctctgtgcttgaaggagcaggaaggacacttaaagggagagatctccggcaggtaaggaatgctgttttcagaagaaccggtttcatagattgagtgtttttttttttactctcttcttcagaaagacgattctttaatttgttatcccaattgatgaactactttatcccttatttggccacagaaacttgtcaatgtgtatgttcatatgttgtctacgttagacgatttgtttacttc

SEQ ID NO: 27715 - protein, 243 aa, Arabidopsis thaliana
  peptide (1)..(243): Ceres Seq. ID no. 13499468
MNKNPRLDFSSPSSLATISDSADGELNEDDIFAIDISHAPPQARHSPVSSPAKQQTPARQLQRSKSGLKNVEASGILAALPESSGSSSYLSHVFHHKPAAALSTSVSSTASSSSSSGGGASAGSSSSARAIPTAPKPPQERLPFSASFVGGGKYPQSAPVQVPLVSSAMMNRHNKEFKLTDVVDDDEEEEEGEMLPPHEIVARSLAQSSLLSCSVLEGAGRTLKGRDLRQVRNAVFRRTGFID

SEQ ID NO: 27716 - DNA, 1102 bp, Arabidopsis thaliana
  misc_feature (1)..(1102): Ceres Seq. ID no. 13621924
  misc_feature (1)..(1102): Ortholog of  Ceres SEQ ID NO 12582036 as cited in SEQ ID NO 50981
  misc_feature (1)..(1102): Ortholog of  Ceres SEQ ID NO 15173523 as cited in SEQ ID NO 61797
tccatttctcattgtatcttcatcagtctcttcttattccattttttcaaaccacttgcaaaattcgaatcagatcttctcttcaatcgaaaaaaaagaaaggatttgctctagattgttgaatcgaagatgtcgacaagggaagagaatgtttacatggcgaaattagccgaacaagctgaacgttacgaagaaatggttgaattcatggagaaagttgcgaaaactgttgatgttgaggaactttcagttgaagagaggaatcttctctctgttgcttacaagaacgtgattggagcgagaagagcttcgtggagaatcatttcttcgattgagcagaaagaagagagcaaagggaacgaagatcatgttgctattatcaaggattacagaggaaagattgaatccgagcttagcaaaatctgtgatgggattttgaatgttcttgaagctcatcttattccttctgcttcaccagctgaatctaaagtgttttatcttaagatgaagggtgattatcataggtatcttgctgagtttaaggctggtgctgaaaggaaagaagctgctgaaagcactttggttgcttacaagtctgcttccgacattgccactgctgagttagctcctactcacccgataaggcttggtcttgcactcaacttctctgtgttttactatgaaatcctcaactcgcctgatcgtgcttgcagcctcgcaaagcaggcgtttgatgatgcaatcgctgagttagatacattgggtgaggaatcatacaaggacagtacactgattatgcagcttcttagagacaatctcactctctggacttcagatatgactgacgaagcaggagatgagattaaggaggcatcaaagcccgatggtgccgagtaaacccgaagaagaggaagagtcattttataatggtagaaaactttcatgtgataatctgagtgagggatagctcaggattcttataagagacacagttttattgttgtttgtttgttttgaaactacttgcgatttatcattcctcctttagcttcctcaatatttcctattctcctttctaatgaaatcaaaacttggttatttc

SEQ ID NO: 27717 - protein, 255 aa, Arabidopsis thaliana
  peptide (1)..(255): Ceres Seq. ID no. 13621925
MSTREENVYMAKLAEQAERYEEMVEFMEKVAKTVDVEELSVEERNLLSVAYKNVIGARRASWRIISSIEQKEESKGNEDHVAIIKDYRGKIESELSKICDGILNVLEAHLIPSASPAESKVFYLKMKGDYHRYLAEFKAGAERKEAAESTLVAYKSASDIATAELAPTHPIRLGLALNFSVFYYEILNSPDRACSLAKQAFDDAIAELDTLGEESYKDSTLIMQLLRDNLTLWTSDMTDEAGDEIKEASKPDGAE

SEQ ID NO: 27718 - protein, 246 aa, Arabidopsis thaliana
  peptide (1)..(246): Ceres Seq. ID no. 13621926
MAKLAEQAERYEEMVEFMEKVAKTVDVEELSVEERNLLSVAYKNVIGARRASWRIISSIEQKEESKGNEDHVAIIKDYRGKIESELSKICDGILNVLEAHLIPSASPAESKVFYLKMKGDYHRYLAEFKAGAERKEAAESTLVAYKSASDIATAELAPTHPIRLGLALNFSVFYYEILNSPDRACSLAKQAFDDAIAELDTLGEESYKDSTLIMQLLRDNLTLWTSDMTDEAGDEIKEASKPDGAE

SEQ ID NO: 27719 - protein, 233 aa, Arabidopsis thaliana
  peptide (1)..(233): Ceres Seq. ID no. 13621927
MVEFMEKVAKTVDVEELSVEERNLLSVAYKNVIGARRASWRIISSIEQKEESKGNEDHVAIIKDYRGKIESELSKICDGILNVLEAHLIPSASPAESKVFYLKMKGDYHRYLAEFKAGAERKEAAESTLVAYKSASDIATAELAPTHPIRLGLALNFSVFYYEILNSPDRACSLAKQAFDDAIAELDTLGEESYKDSTLIMQLLRDNLTLWTSDMTDEAGDEIKEASKPDGAE

SEQ ID NO: 27720 - DNA, 764 bp, Arabidopsis thaliana
  misc_feature (1)..(764): Ceres Seq. ID no. 12481981
  misc_feature (1)..(764): Ortholog of  Ceres SEQ ID NO 14309599 as cited in SEQ ID NO 52625
  misc_feature (1)..(764): Ortholog of  Ceres SEQ ID NO 13661426 as cited in SEQ ID NO 61254
agagagagtatcgaagagaagaatccaaaaaaatgggatcttcaccaccgaagaagacgactctgcaacggtacttgtcacagcttcaacaacatcctttaagaacaaaggcaataactgctggagttttgtctggtgttagcgatgttgtatcacagaagctctctggcatacagaagattcagctgagaagggttcttctcaaagtgatatttgctggtgggtttcttggaccagcagggcatttctttcatacatatttagataagttttttaaagggaagaaggatacacagactgttgcaaagaaggtaattctggagcaattgacattgtcaccattgaaccatttgcttttcatgatctattatggagtagtcatagaaagaactccctggacccttgttagagaaaggatcaagaagacttatccaacggtccagcttactgcatggacgtttttcccggtggtgggatggattaactacaagtatgtgccactgcacttccgggtcatcttgcacagcctggtcgcattcttttggggaattttcctaaccctgcgagcgaggtcaatgacactagctttggcaaaggctaagtgattaggaaacacattgatcgtgacagagaactcaagccttgggactcattatgatcacttagtactctgtaagttaaagcaaatcaaacagctctgaaaccaaataaaaatctgtattaagatgataccattctaggatagcaatatgttttaagttatt

SEQ ID NO: 27721 - protein, 200 aa, Arabidopsis thaliana
  peptide (1)..(200): Ceres Seq. ID no. 12481982
REYRREESKKMGSSPPKKTTLQRYLSQLQQHPLRTKAITAGVLSGVSDVVSQKLSGIQKIQLRRVLLKVIFAGGFLGPAGHFFHTYLDKFFKGKKDTQTVAKKVILEQLTLSPLNHLLFMIYYGVVIERTPWTLVRERIKKTYPTVQLTAWTFFPVVGWINYKYVPLHFRVILHSLVAFFWGIFLTLRARSMTLALAKAK

SEQ ID NO: 27722 - protein, 190 aa, Arabidopsis thaliana
  peptide (1)..(190): Ceres Seq. ID no. 12481983
MGSSPPKKTTLQRYLSQLQQHPLRTKAITAGVLSGVSDVVSQKLSGIQKIQLRRVLLKVIFAGGFLGPAGHFFHTYLDKFFKGKKDTQTVAKKVILEQLTLSPLNHLLFMIYYGVVIERTPWTLVRERIKKTYPTVQLTAWTFFPVVGWINYKYVPLHFRVILHSLVAFFWGIFLTLRARSMTLALAKAK

SEQ ID NO: 27723 - DNA, 680 bp, Arabidopsis thaliana
  misc_feature (1)..(680): Ceres Seq. ID no. 12338681
  misc_feature (1)..(680): Ortholog of  Ceres SEQ ID NO 13594809 as cited in SEQ ID NO 51847
  misc_feature (1)..(680): Ortholog of  Ceres SEQ ID NO 15226273 as cited in SEQ ID NO 64934
  misc_feature (1)..(680): Ortholog of  Ceres SEQ ID NO 12617639 as cited in SEQ ID NO 65219
  misc_feature (1)..(680): Ortholog of  Ceres SEQ ID NO 15173998 as cited in SEQ ID NO 0
  misc_feature (1)..(680): Ortholog of  Ceres SEQ ID NO 15178333 as cited in SEQ ID NO 0
attcattcttcatttcctctgcctctttctcagatcacaaaaccctaatttcgaatctttattcttcagaatggctttctgtaacaaactcggtggtctattgagacaaaacatttcttctaacggaaatgttccggttacgtctatgctcggatctctccggttgatgtctaccaagcttttcatcggaggtctctcatggggaaccgatgacgcatccttaagggatgcttttgctcacttcggtgacgttgttgatgctaaagttatcgttgatagagagacaggaagatcaagggggtttggatttgtcaacttcaatgatgagggcgctgcaactgctgccatatcagagatggacggaaaggaactgaatggtcgtcacatccgagtgaatcctgctaatgatagaccaagtgctccacgggcttatggaggcggtggtggatacagcggaggaggtggtggtggctatggaggaggaggtggcagctacggtggtggtgatggtggtggttactaaacagaggatgtggttgtgaagaagagttaatggttctgtttagttggtttcttctattgaatcttatgttagtacaaaacctgaatgggatttgctgaaaactcattactcttttttttttggttaccaatcaatttggttgaaatattttattgcc

SEQ ID NO: 27724 - protein, 173 aa, Arabidopsis thaliana
  peptide (1)..(173): Ceres Seq. ID no. 12338682
FILHFLCLFLRSQNPNFESLFFRMAFCNKLGGLLRQNISSNGNVPVTSMLGSLRLMSTKLFIGGLSWGTDDASLRDAFAHFGDVVDAKVIVDRETGRSRGFGFVNFNDEGAATAAISEMDGKELNGRHIRVNPANDRPSAPRAYGGGGGYSGGGGGGYGGGGGSYGGGDGGGY

SEQ ID NO: 27725 - protein, 150 aa, Arabidopsis thaliana
  peptide (1)..(150): Ceres Seq. ID no. 12338683
MAFCNKLGGLLRQNISSNGNVPVTSMLGSLRLMSTKLFIGGLSWGTDDASLRDAFAHFGDVVDAKVIVDRETGRSRGFGFVNFNDEGAATAAISEMDGKELNGRHIRVNPANDRPSAPRAYGGGGGYSGGGGGGYGGGGGSYGGGDGGGY

SEQ ID NO: 27726 - protein, 125 aa, Arabidopsis thaliana
  peptide (1)..(125): Ceres Seq. ID no. 12338685
MLGSLRLMSTKLFIGGLSWGTDDASLRDAFAHFGDVVDAKVIVDRETGRSRGFGFVNFNDEGAATAAISEMDGKELNGRHIRVNPANDRPSAPRAYGGGGGYSGGGGGGYGGGGGSYGGGDGGGY

SEQ ID NO: 27727 - DNA, 1219 bp, Arabidopsis thaliana
  misc_feature (1)..(1219): Ceres Seq. ID no. 13487573
  misc_feature (1)..(1219): Ortholog of  Ceres SEQ ID NO 15227026 as cited in SEQ ID NO 52193
  misc_feature (1)..(1219): Ortholog of  Ceres SEQ ID NO 15177903 as cited in SEQ ID NO 54993
  misc_feature (1)..(1219): Ortholog of  Ceres SEQ ID NO 13595454 as cited in SEQ ID NO 56502
ctttttgaaacgtcagggaaagagaatcccgcaatactctctcctctctcttttttttttttttctgggtcgaagtttggttctttgttggataatgatggtttttgacagtgaatctaacctagaccgattcttacgctgcactacaccgattgtgcctgcctattccctcccaaagacacagatcaagaaccttaatcctctatggtatccgttggagagccagagcgtcgagtatttcaggttgggagatttttgggattgtttcgacgagtggagtgcttacggtgcaggtgtccccattgtatcggaaacgggcgaaacattggtccaatactatgttccttacctctctgcaatccagattttcacctctcattctgttatcaatactcttagggaggagacagaatcaggggattcagggagcgagtcgtgtagcgaggagtggagatgggaaggatgttcttcgtctgaagaagggtttgatcatcaagaacctctcgatcgcctcggttactcttacttgcagtatttcgagagatgtacaccttactctagagtccctctcatggataagatcaaagagttgggagaaagatacgtagggttgaggtcattgaggagtgttgatctgtctcctgcgagttggatggctgttgcttggtatccaatctatcacattcccatgaatagaagcataaaagacttgtctacttgcttcctcacttaccacacgctttcttcatctttccaagatgtaaaaagggaagaggagaaggagaggataagtgtgagtgcatttgggatggccacttacaagatgcaagggaggctatgggataatgatagattgctttgctttttgagcgtagcagattcttggctaaagcagctaagggtccaccaccatgacttcacctacttcaccactactactcattatctttgatatatgtagtgttttagatcattacttggttaacagtctatttagctttgttgtttaagagtagcacatatcaataatgttggattgttgttacttgggactctttgggaaggataggtactgactttttcttcacaagacttttatatcataaatttagtttggggtcagattgatgatgatgggctcaatacatttattcttttctaatgttttgtggctttctgtttgtacaaacgcacgttctcttgattttggtatccttcc

SEQ ID NO: 27728 - protein, 316 aa, Arabidopsis thaliana
  peptide (1)..(316): Ceres Seq. ID no. 13487574
FLKRQGKRIPQYSLLSLFFFFLGRSLVLCWIMMVFDSESNLDRFLRCTTPIVPAYSLPKTQIKNLNPLWYPLESQSVEYFRLGDFWDCFDEWSAYGAGVPIVSETGETLVQYYVPYLSAIQIFTSHSVINTLREETESGDSGSESCSEEWRWEGCSSSEEGFDHQEPLDRLGYSYLQYFERCTPYSRVPLMDKIKELGERYVGLRSLRSVDLSPASWMAVAWYPIYHIPMNRSIKDLSTCFLTYHTLSSSFQDVKREEEKERISVSAFGMATYKMQGRLWDNDRLLCFLSVADSWLKQLRVHHHDFTYFTTTTHYL

SEQ ID NO: 27729 - protein, 285 aa, Arabidopsis thaliana
  peptide (1)..(285): Ceres Seq. ID no. 13487575
MMVFDSESNLDRFLRCTTPIVPAYSLPKTQIKNLNPLWYPLESQSVEYFRLGDFWDCFDEWSAYGAGVPIVSETGETLVQYYVPYLSAIQIFTSHSVINTLREETESGDSGSESCSEEWRWEGCSSSEEGFDHQEPLDRLGYSYLQYFERCTPYSRVPLMDKIKELGERYVGLRSLRSVDLSPASWMAVAWYPIYHIPMNRSIKDLSTCFLTYHTLSSSFQDVKREEEKERISVSAFGMATYKMQGRLWDNDRLLCFLSVADSWLKQLRVHHHDFTYFTTTTHYL

SEQ ID NO: 27730 - protein, 284 aa, Arabidopsis thaliana
  peptide (1)..(284): Ceres Seq. ID no. 13487576
MVFDSESNLDRFLRCTTPIVPAYSLPKTQIKNLNPLWYPLESQSVEYFRLGDFWDCFDEWSAYGAGVPIVSETGETLVQYYVPYLSAIQIFTSHSVINTLREETESGDSGSESCSEEWRWEGCSSSEEGFDHQEPLDRLGYSYLQYFERCTPYSRVPLMDKIKELGERYVGLRSLRSVDLSPASWMAVAWYPIYHIPMNRSIKDLSTCFLTYHTLSSSFQDVKREEEKERISVSAFGMATYKMQGRLWDNDRLLCFLSVADSWLKQLRVHHHDFTYFTTTTHYL

SEQ ID NO: 27731 - DNA, 930 bp, Arabidopsis thaliana
  misc_feature (1)..(930): Ceres Seq. ID no. 13493755
  misc_feature (1)..(930): Ortholog of  Ceres SEQ ID NO 14309527 as cited in SEQ ID NO 52599
  misc_feature (1)..(930): Ortholog of  Ceres SEQ ID NO 13589024 as cited in SEQ ID NO 68078
attcctctgagaaaccctaagaaaaaccctgcctgaaaatctctgttttttttgacgattctttctttgtgatcggaaaaaatggtggctggtctaagagatttcacgctcagaaccgaagatggctccgggaaaccggtactggatgaatctaacggcgaggaacttatgcacgttcagacttccgtcgccgtcgctctcggaaaccgtcccattgagtctcccggaactctctacatcacttccaggaaattaatttggctgagcgatgtagacatggctaaaggatacgcagttgatttcttatcaatatcgcttcacgctgtttctagagatcctgaggcttattcatctccttgtatatatactcagattgaagttgaagaagatgaggatgatgagtctgattcagaatccactgaagttttggacttatcaaagatcagagagatgaggcttgttccttctgactctacccagttggagacgctgtttgatgtattctgcgagtgtgctgagctgaatcctgaaccagttcaagaagaagaagaagaaagcggacataattgggtgtttagtgctgatcagatggatgttcgtggaggagatgatgatgcagagtggcaaatatctcagagtccgactagtgtaattggtcattccaatggagatgaaggtcttaatcagcctatgcttgagctccaaatcaatgatcagaggtttgaggatgctgaagagatggttcatgaaagtgagaccaaagatcactagactcttcacaattgtactcgaaaacatagtagttgtgttattttaacgatgaaagagttgtattatgttcaacgataaagtattatgttcgtgatacttagcttttcaatttatggctgattaaactttaatctttctcgtaatagatctctcaatttg

SEQ ID NO: 27732 - protein, 229 aa, Arabidopsis thaliana
  peptide (1)..(229): Ceres Seq. ID no. 13493756
MVAGLRDFTLRTEDGSGKPVLDESNGEELMHVQTSVAVALGNRPIESPGTLYITSRKLIWLSDVDMAKGYAVDFLSISLHAVSRDPEAYSSPCIYTQIEVEEDEDDESDSESTEVLDLSKIREMRLVPSDSTQLETLFDVFCECAELNPEPVQEEEEESGHNWVFSADQMDVRGGDDDAEWQISQSPTSVIGHSNGDEGLNQPMLELQINDQRFEDAEEMVHESETKDH

SEQ ID NO: 27733 - protein, 200 aa, Arabidopsis thaliana
  peptide (1)..(200): Ceres Seq. ID no. 13493757
MHVQTSVAVALGNRPIESPGTLYITSRKLIWLSDVDMAKGYAVDFLSISLHAVSRDPEAYSSPCIYTQIEVEEDEDDESDSESTEVLDLSKIREMRLVPSDSTQLETLFDVFCECAELNPEPVQEEEEESGHNWVFSADQMDVRGGDDDAEWQISQSPTSVIGHSNGDEGLNQPMLELQINDQRFEDAEEMVHESETKDH

SEQ ID NO: 27734 - protein, 164 aa, Arabidopsis thaliana
  peptide (1)..(164): Ceres Seq. ID no. 13493758
MAKGYAVDFLSISLHAVSRDPEAYSSPCIYTQIEVEEDEDDESDSESTEVLDLSKIREMRLVPSDSTQLETLFDVFCECAELNPEPVQEEEEESGHNWVFSADQMDVRGGDDDAEWQISQSPTSVIGHSNGDEGLNQPMLELQINDQRFEDAEEMVHESETKDH

SEQ ID NO: 27735 - DNA, 825 bp, Arabidopsis thaliana
  misc_feature (1)..(825): Ceres Seq. ID no. 13489945
  misc_feature (1)..(825): Ortholog of  Ceres SEQ ID NO 12608429 as cited in SEQ ID NO 60231
agactctctcttctcatctctctctctctctctctcttcaaaccctaaaaattcacgcattttggcacagttaagttcgctgaatcccgttcctcttcctctgtctctctccccaagaaaatcactcagatcaaagctcaaatttcggatctcacagctgtcgcttcggtagaggaaaggatgaccagagaacatcctcccgagcctcttgatttcttcatctggactgttgaggatgttgggtcttggctcgaggagataaaccttgggggctaccgccagattttcaaagaaaatggtgtcaatggagaatatctagaaagcatgtctgtgtttactaccgagcagatccttcacttcataaggaggcatcacatgaagtggggagacttcatcaccctctgtaaagaactcagaaggattaaagtggcttgcttgaaaggtgagcagagagttagacggccatggtgggcaccgtcttgtctatccgtagtctttgttaaggcagccaaacgcaaccgacagtctcgtgttgtatctctcaagcttgaatcttgacattacactttggctgtttatgtacgtacttgtctctcttctcttctcttgttttcttttccttttttttttttttttggtttgggtttgtttgtggcacatgcactaggaagaaacaaactcaagtcaaaaaagctgtttggcttggtgaaatcttgcaagcgggaaaaaaattatgcgttttgtactttggtggtgtatacaaagcttgctctcagatgtttaatatatggcttgtgcaatctttatgtgacagataatagtgtg

SEQ ID NO: 27736 - protein, 125 aa, Arabidopsis thaliana
  peptide (1)..(125): Ceres Seq. ID no. 13489946
MTREHPPEPLDFFIWTVEDVGSWLEEINLGGYRQIFKENGVNGEYLESMSVFTTEQILHFIRRHHMKWGDFITLCKELRRIKVACLKGEQRVRRPWWAPSCLSVVFVKAAKRNRQSRVVSLKLES

SEQ ID NO: 27737 - protein, 77 aa, Arabidopsis thaliana
  peptide (1)..(77): Ceres Seq. ID no. 13489947
MSVFTTEQILHFIRRHHMKWGDFITLCKELRRIKVACLKGEQRVRRPWWAPSCLSVVFVKAAKRNRQSRVVSLKLES

SEQ ID NO: 27738 - DNA, 1104 bp, Arabidopsis thaliana
  misc_feature (1)..(1104): Ceres Seq. ID no. 12331667
  misc_feature (1)..(1104): Ortholog of  Ceres SEQ ID NO 15172430 as cited in SEQ ID NO 59207
cttctttcctctttcttctttctgttttctggtcgctcgttacccccaagacctcgtcgaggtttctctctctctgaaaaagtgcttttgctgcgtttccatgctctcggaaggaacttggctgaatcgttggagaattatcgatctggcgtcgttggtgcatctctagctgcgccaattcatcggatccggtttgatttctccctttcgcgaatctagccttccgtgatcttagcagccatgttctatggcacagctgtatgggacccttggcttatcgttggccagattatttgcctccaatgctcttactatctcactcttggactcttcaccatggtctttcttggccttcgtgttcctcgccttagtcttgtctacttcttcgattacgctactctcactacttccaccttcaccggttggtctgttattgcctcattcctcttctcttcactcgctggggctgtgtacatgatatttttggtggagcgagcacggaaatgcttagatttctctgcaactctctacatcatacatctcttcttttgcatcatgtatggaggatggccttcctctatggcgtggtgggttgttaatggaaccggactcgctgttatggctttgctagctgagtacttgtgcattaaacgcgaacagcgagagatccctatggatcgcttccactcaagggtttgaagattggtgaaagaacaagtgatgaagattcttgtgggttagcagcgcgactcgtagagcctagtagagcctagtactcttaacaattgtgatgtacagagatgaaatcagaggagtagaatgggcgaaaggaagttcagctagccaagcaacaatgttggacactggtgcaccaactctgactgcaatttttagtgacttcaaatactaagactttggaatacgtttcaatttgttcttttgtatgaaaaaaacattagactcgaataggttattgatttcatgttgcttcttttttttgtttatactggattttctcttctatcctctacttggtgcagctttgtgtgttttaaaaccagtgtctcattcatcatactcttttaccaccaattgaatccttcc

SEQ ID NO: 27739 - protein, 152 aa, Arabidopsis thaliana
  peptide (1)..(152): Ceres Seq. ID no. 12331668
MFYGTAVWDPWLIVGQIICLQCSYYLTLGLFTMVFLGLRVPRLSLVYFFDYATLTTSTFTGWSVIASFLFSSLAGAVYMIFLVERARKCLDFSATLYIIHLFFCIMYGGWPSSMAWWVVNGTGLAVMALLAEYLCIKREQREIPMDRFHSRV

SEQ ID NO: 27740 - protein, 120 aa, Arabidopsis thaliana
  peptide (1)..(120): Ceres Seq. ID no. 12331669
MVFLGLRVPRLSLVYFFDYATLTTSTFTGWSVIASFLFSSLAGAVYMIFLVERARKCLDFSATLYIIHLFFCIMYGGWPSSMAWWVVNGTGLAVMALLAEYLCIKREQREIPMDRFHSRV

SEQ ID NO: 27741 - protein, 76 aa, Arabidopsis thaliana
  peptide (1)..(76): Ceres Seq. ID no. 12331670
MAQLYGTLGLSLARLFASNALTISLLDSSPWSFLAFVFLALVLSTSSITLLSLLPPSPVGLLLPHSSSLHSLGLCT

SEQ ID NO: 27742 - DNA, 680 bp, Arabidopsis thaliana
  misc_feature (1)..(680): Ceres Seq. ID no. 12331621
  misc_feature (1)..(680): Ortholog of  Ceres SEQ ID NO 13504026 as cited in SEQ ID NO 58279
  misc_feature (1)..(680): Ortholog of  Ceres SEQ ID NO 15226827 as cited in SEQ ID NO 69141
gttgttgaaccagtggcccgaaatctcgaatcgactcatctctcagctcaccggtgctgcattatcaaaactgcaggaaggatttggttgtgaagatggcatcgaagttgatacaagttcaatcaaaggcatgtgaggcttcaaagtttgtggctaagcatggaacttcctactacagacagctgttggagaagaacaagcagtatatccaggaacctgccactgttgagaagtgccaagagttgtctaagcagttgctctacacccgtcttgctagcattcccggacgctatgaaaccttctggaaggaagtagactacgcaaagaacctatggaagaacagatccggtctgaaggtagaagatgcaggaatcgctgcattgtttggtctcgaatgctttgcatggtattgcgcaggtgaaatcgccggcagaggattcaccttcacaggctattacccatgaaggagagtaacaataacttgaagattgtgtaatcccctccgtttttagttttcatgattctctcttgaatcaattttttttccagtttatccctgaaacggaggctttgaagctgagaaaaatccattttgctataactctttgataaaggttgctctcaataagaacaaaatttcccaggaaattgctttcactataatgtttttgtccttgttt

SEQ ID NO: 27743 - protein, 122 aa, Arabidopsis thaliana
  peptide (1)..(122): Ceres Seq. ID no. 12331622
MASKLIQVQSKACEASKFVAKHGTSYYRQLLEKNKQYIQEPATVEKCQELSKQLLYTRLASIPGRYETFWKEVDYAKNLWKNRSGLKVEDAGIAALFGLECFAWYCAGEIAGRGFTFTGYYP

SEQ ID NO: 27744 - DNA, 1090 bp, Arabidopsis thaliana
  misc_feature (1)..(1090): Ceres Seq. ID no. 13489767
  misc_feature (1)..(1090): Ortholog of  Ceres SEQ ID NO 12558659 as cited in SEQ ID NO 20727
  misc_feature (1)..(1090): Ortholog of  Ceres SEQ ID NO 13656436 as cited in SEQ ID NO 69154
agacaccagtcttaccctaacttttttcaaagtctctgtctttctgtggaaatctggggaataaacatatgaatctaaagagaaaaagaagaaagtaaaaaagcaaaatcgaagtttttgttcaattttctgggatcaaagagcaattttcgtttctttattcgttgaaagtgtgaagcttttttgatttagtgagaagtgttaatggcgggttacagagcagatgatgattacgattacctattcaaggtggttctgatcggtgattcaggtgttggaaagtccaatttgctttctcgattcaccaggaacgagtttagtctcgagtctaaatcaacgatcggggtcgagttcgcgactcgtagcttgaatgttaatgaaaaagtcatcaaagcccagatttgggacactgctggtcaagaaagataccgagcaatcactagtgcttactatcgaggagctgttggggcgcttcttgtttacgacgtaacccgacactcaacattcgaaaacgttgagagatggctaagggaactccgtgaccacactgacccaaacatagttgtgatgcttgtgggaaacaaatccgatcttcgccatcttgtagcagtccaaaccgaagatgcaaaatcttttgcagagaatgaatcactctacttcatggaaacctcagctcttgaatctaccaatgttgagaacgcgttttctgaagtactcactcagatttaccatgttgtgagcaagaaagcaatggaggctggtgaagattccggtaatgttccttcgaaaggagagaagatcgatgttgatgtttccgcagtgaagaaaactggttgctgctccaactaaatggtcttatgtcctaaagctgaaatcggtttttaaattttacattcaaattttgtttttgaagatgtttgcttttttttaggaaaacaatctatgttattatgccttttgatttgcttgtttgaaaattgcttagctttggtctgattctgtaccggttgagggattttgtaatttaaccggttctggtctatggtttgttcagtttgtttttaattcaatccgcaaatatctctaaatc

SEQ ID NO: 27745 - protein, 214 aa, Arabidopsis thaliana
  peptide (1)..(214): Ceres Seq. ID no. 13489768
MAGYRADDDYDYLFKVVLIGDSGVGKSNLLSRFTRNEFSLESKSTIGVEFATRSLNVNEKVIKAQIWDTAGQERYRAITSAYYRGAVGALLVYDVTRHSTFENVERWLRELRDHTDPNIVVMLVGNKSDLRHLVAVQTEDAKSFAENESLYFMETSALESTNVENAFSEVLTQIYHVVSKKAMEAGEDSGNVPSKGEKIDVDVSAVKKTGCCSN

SEQ ID NO: 27746 - DNA, 842 bp, Arabidopsis thaliana
  misc_feature (1)..(842): Ceres Seq. ID no. 12738275
  misc_feature (1)..(842): Ortholog of  Ceres SEQ ID NO 13599602 as cited in SEQ ID NO 0
cacaaacgcgctgcagctgcaatcgcgtctggtaaactcaaggatgaaatcattcctgttgctactaagattgtggaccctgagactaaagcagagaaggcaatcgtcgtatctgttgatgacggtgtacgtccaaactcaaacatggcagatttggcaaagctgaagactgtctttaaacagaacggttccaccacagctggcaatgctagtcagatcagtgatggtgctggagcagtactgctaatgaagagaagtttggctatgaagaagggacttcccattcttggagtattcaggagttttgctgttactggtgtggaaccatctgtaatgggtattggtccagctgttgccattcccgctgcaactaagctcgcagggctcaccgtcagcgatattgatctattcgagatcaatgaggcatttgcatctcagtatgtgtactcttgcaagaagttagagctggatatggaaaaggtcaatgttaatggaggagccattgctattggccatcccctgggtgctacaggagctcgatgtgttgcgacattgttgcacgagatgaagcggagaggaaaagattgccgctttggagtaatctcaatgtgcataggcactggaatgggagctgcagctgtttttgagaggggagactctgttgataacttgtccaacgctcgtgtggctaacggggatagtcattagaacatcgaagagagcttgaataagtagaagtaatgatgcattgagtctaataaatatgatgctttagctctttcacattgctgaacaatgaaaacttttgtcattctgagtttaaaatcaactacttttctccg

SEQ ID NO: 27747 - protein, 235 aa, Arabidopsis thaliana
  peptide (1)..(235): Ceres Seq. ID no. 12738276
HKRAAAAIASGKLKDEIIPVATKIVDPETKAEKAIVVSVDDGVRPNSNMADLAKLKTVFKQNGSTTAGNASQISDGAGAVLLMKRSLAMKKGLPILGVFRSFAVTGVEPSVMGIGPAVAIPAATKLAGLTVSDIDLFEINEAFASQYVYSCKKLELDMEKVNVNGGAIAIGHPLGATGARCVATLLHEMKRRGKDCRFGVISMCIGTGMGAAAVFERGDSVDNLSNARVANGDSH

SEQ ID NO: 27748 - protein, 187 aa, Arabidopsis thaliana
  peptide (1)..(187): Ceres Seq. ID no. 12738277
MADLAKLKTVFKQNGSTTAGNASQISDGAGAVLLMKRSLAMKKGLPILGVFRSFAVTGVEPSVMGIGPAVAIPAATKLAGLTVSDIDLFEINEAFASQYVYSCKKLELDMEKVNVNGGAIAIGHPLGATGARCVATLLHEMKRRGKDCRFGVISMCIGTGMGAAAVFERGDSVDNLSNARVANGDSH

SEQ ID NO: 27749 - protein, 153 aa, Arabidopsis thaliana
  peptide (1)..(153): Ceres Seq. ID no. 12738278
MKRSLAMKKGLPILGVFRSFAVTGVEPSVMGIGPAVAIPAATKLAGLTVSDIDLFEINEAFASQYVYSCKKLELDMEKVNVNGGAIAIGHPLGATGARCVATLLHEMKRRGKDCRFGVISMCIGTGMGAAAVFERGDSVDNLSNARVANGDSH

SEQ ID NO: 27750 - DNA, 1392 bp, Arabidopsis thaliana
  misc_feature (1)..(1392): Ceres Seq. ID no. 13492415
  misc_feature (1)..(1392): Ortholog of  Ceres SEQ ID NO 13638746 as cited in SEQ ID NO 59296
  misc_feature (1)..(1392): Ortholog of  Ceres SEQ ID NO 14314050 as cited in SEQ ID NO 59952
  misc_feature (1)..(1392): Ortholog of  Ceres SEQ ID NO 13596474 as cited in SEQ ID NO 62169
  misc_feature (1)..(1392): Ortholog of  Ceres SEQ ID NO 13598714 as cited in SEQ ID NO 62656
  misc_feature (1)..(1392): Ortholog of  Ceres SEQ ID NO 13596969 as cited in SEQ ID NO 63375
  misc_feature (1)..(1392): Ortholog of  Ceres SEQ ID NO 15225685 as cited in SEQ ID NO 63616
  misc_feature (1)..(1392): Ortholog of  Ceres SEQ ID NO 13597519 as cited in SEQ ID NO 64759
  misc_feature (1)..(1392): Ortholog of  Ceres SEQ ID NO 13587054 as cited in SEQ ID NO 0
agaatcaatcagtaaaacgaaaagctaatccaaaactctttaattatttgcaacaactgatcaatggctgtaacaagctcttcttctacttgtgatggtttcttcatcatcagccttattgttatcgtttcttcattgtttgggacatcatctgcgcagttaaacgcaacgttttactcaggcacatgccctaacgcctctgccatcgttcgcagcactattcagcaagctcttcaatccgatgcaagaatcggaggcagcctaatccgccttcattttcacgactgttttgttaatggttgcgatgggtcgctcttgcttgacgacacttcaagcatccagagcgagaagaacgctcctgccaatgcaaactcaactagaggattcaatgttgtcgatagtatcaagacagccctcgagaatgcttgtccgggcattgtttcttgctctgacattttagctcttgcctcagaggcctctgtgtctttggcaggaggaccttcatggactgtgttattaggaagaagagatggtctcaccgcaaacttgtctggagccaattcgtctcttccctctcccttcgaaggccttaacaacatcacatcaaaatttgtagctgtcgggctaaagacaaccgatgtagtatccttgtctggagcgcatacgtttgggcgtggtcaatgcgtaacgttcaacaatagactattcaacttcaacgggacaggaaaccccgacccgactctgaactcaacacttctcagcagtcttcaacagctatgtcctcaaaacggcagcaatacagggatcaccaatctcgatctgagcacacctgatgcgttcgataacaattacttcacgaaccttcagagtaacaatgggcttctccagtcagaccaggaactgttctcaaacaccggttcagccaccgtcccgattgttaattcctttgcaagtaaccagaccctgttttttgaggcgtttgttcagtctatgatcaagatggggaacattagtcccttgactgggagtagtggagagattagacaagactgtaaggtggttaatggacagtcatcagccactgaagcaggggacattcagttacaatctgacggaccagtgagtgtagcagatatgtgaacaacgatgagatcagtttcaccgtttgtttatcatatatgaataataactcctaggccgaatcatttttgtgaaaaaaataagtttggttgaggagaaaataagtgagtggtagggttgtgttttacacttttgaaaattttaatattctaaaacattattatgcctaaatacatgcatgcatgtataacgtctatcgttttgatacattttgtggatttgaatctaaattgtgtcacaacgacaaaattt

SEQ ID NO: 27751 - protein, 358 aa, Arabidopsis thaliana
  peptide (1)..(358): Ceres Seq. ID no. 13492416
MAVTSSSSTCDGFFIISLIVIVSSLFGTSSAQLNATFYSGTCPNASAIVRSTIQQALQSDARIGGSLIRLHFHDCFVNGCDGSLLLDDTSSIQSEKNAPANANSTRGFNVVDSIKTALENACPGIVSCSDILALASEASVSLAGGPSWTVLLGRRDGLTANLSGANSSLPSPFEGLNNITSKFVAVGLKTTDVVSLSGAHTFGRGQCVTFNNRLFNFNGTGNPDPTLNSTLLSSLQQLCPQNGSNTGITNLDLSTPDAFDNNYFTNLQSNNGLLQSDQELFSNTGSATVPIVNSFASNQTLFFEAFVQSMIKMGNISPLTGSSGEIRQDCKVVNGQSSATEAGDIQLQSDGPVSVADM

SEQ ID NO: 27752 - DNA, 1547 bp, Arabidopsis thaliana
  misc_feature (1)..(1547): Ceres Seq. ID no. 12327682
  misc_feature (1)..(1547): Ortholog of  Ceres SEQ ID NO 14303313 as cited in SEQ ID NO 64389
attaaaaagtcttaacgcccacaacgaaaaggaacttctctttttgtttggtgactgaatcggtggaaaacaacacaagtttgttcctttttgtctctccagatcccttggcttccttcttcttcttcatcctcctcgtgagactctgtgttgaaatttctctagggttttaattatcggcgttggtttttcgtttttgagaatttgatttcgtttttagaaataatgggtgattgggctcaacttgctcagtctgtgatcctaggtttgattttctcttaccttctcgctaagctgatctcgatcgtcgtcacgtttaaagaagacaatctctctcttactcgtcacccagaggagtctcaattggaaattaaaccggaaggagttgactcgcgacgtctcgattcctcttgcggtggtttcggtggtgaggcggattcgcttgtggcggagcagggtagctcccgaagtgatagcgttgccggtgacgacagtgaggaagatgatgattgggaaggcgtcgagagcacggaactcgatgaggcttttagcgccgccactctttttgtgactaccgccgccgcagatcggctttcgcagaaggtaccgagtgatgtgcagcagcagctttacggattgtataagattgctacggaagggccgtgtactgctcctcagccatcagctctcaaaatgactgctcgtgccaagtggcaagcatggcagaaactgggagctatgccacctgaagaggcgatggagaagtatattgagattgtcactcagctttacccaacttggttagacggtggcgtgaaagccggaagtcggggtggggatgatgcagcctccaactcaagaggaaccatgggaccagtttttagctctttggtttatgatgaggagtccgaaaatgagttgaagattgatgccatacacggatttgctagagaaggagaagtcgagaatttactgaaaagcattgaaagcggcattcctgtaaatgcaagggacagtgaaggtcgcacaccattgcactgggctatagaccgtggccacctcaacatcgccaaagttctggtcgataagaacgccgatgtgaatgctaaggacaacgaaggccaaacccctttgcattatgctgttgtatgcgacagagaagctatcgccgagtttctggttaaacagaacgcaaacacagccgctaaagatgaggatggaaactctccccttgatctctgtgaatcagactggccctggatccgagattctgcaaagcaggcagactaaacaaatactaaccacgtcttctctaaatccgcaatgtatatgatcaaatgacttagtaagaagcttttctttactttaaactttctttccatccctaccacatcactgggatgttccaacactatatcacttggatgttaccaagtcttgttctttgatttctttcttcttacattttaacaatcttttgttcctttaggctttatgatatgtcgtaaccggttttgttggtttgctataaatacacacatatagac

SEQ ID NO: 27753 - protein, 354 aa, Arabidopsis thaliana
  peptide (1)..(354): Ceres Seq. ID no. 12327683
MGDWAQLAQSVILGLIFSYLLAKLISIVVTFKEDNLSLTRHPEESQLEIKPEGVDSRRLDSSCGGFGGEADSLVAEQGSSRSDSVAGDDSEEDDDWEGVESTELDEAFSAATLFVTTAAADRLSQKVPSDVQQQLYGLYKIATEGPCTAPQPSALKMTARAKWQAWQKLGAMPPEEAMEKYIEIVTQLYPTWLDGGVKAGSRGGDDAASNSRGTMGPVFSSLVYDEESENELKIDAIHGFAREGEVENLLKSIESGIPVNARDSEGRTPLHWAIDRGHLNIAKVLVDKNADVNAKDNEGQTPLHYAVVCDREAIAEFLVKQNANTAAKDEDGNSPLDLCESDWPWIRDSAKQAD

SEQ ID NO: 27754 - protein, 198 aa, Arabidopsis thaliana
  peptide (1)..(198): Ceres Seq. ID no. 12327684
MTARAKWQAWQKLGAMPPEEAMEKYIEIVTQLYPTWLDGGVKAGSRGGDDAASNSRGTMGPVFSSLVYDEESENELKIDAIHGFAREGEVENLLKSIESGIPVNARDSEGRTPLHWAIDRGHLNIAKVLVDKNADVNAKDNEGQTPLHYAVVCDREAIAEFLVKQNANTAAKDEDGNSPLDLCESDWPWIRDSAKQAD

SEQ ID NO: 27755 - protein, 183 aa, Arabidopsis thaliana
  peptide (1)..(183): Ceres Seq. ID no. 12327685
MPPEEAMEKYIEIVTQLYPTWLDGGVKAGSRGGDDAASNSRGTMGPVFSSLVYDEESENELKIDAIHGFAREGEVENLLKSIESGIPVNARDSEGRTPLHWAIDRGHLNIAKVLVDKNADVNAKDNEGQTPLHYAVVCDREAIAEFLVKQNANTAAKDEDGNSPLDLCESDWPWIRDSAKQAD

SEQ ID NO: 27756 - DNA, 1519 bp, Arabidopsis thaliana
  misc_feature (1)..(1519): Ceres Seq. ID no. 12558479
  misc_feature (1)..(1519): Ortholog of  Ceres SEQ ID NO 15176709 as cited in SEQ ID NO 1148
  misc_feature (1)..(1519): Ortholog of  Ceres SEQ ID NO 13658922 as cited in SEQ ID NO 66316
gctcttttcaaagctcgcctcttcaccacagagaaaacttcgtctctcttctctgcttcgccctctcatttcctgtgagataaaggcggagtctctctccagttattttgctcatccatcgattcttagagttcaaaatggttgatcaagttcagcaccccactattgcgcagaaagctgccgggcagttcatgcgttcaagtgtttccaaggacgttcaagtgggttaccagaggccttctatgtatcaaagacatgcaacctacggaaactactccaatgctgcatttcaatttcctccgacatcccggatgttggcaacaactgcttctcccgtgtttgtccaaaccccaggagagaaggggttcactaactttgcccttgactttctgatgggtggtgtttctgctgccgtctccaagactgctgctgctcctattgaacgtgttaagcttttgatccagaaccaggatgagatgattaaagctggcaggctttctgaaccctacaagggtattggtgactgtttcggcaggacgattaaggatgaaggttttggttctctatggagaggaaacactgccaatgttatccgttatttccccactcaggccttgaactttgccttcaaagattacttcaaaagacttttcaactttaagaaggacagagatggttactggaagtggtttgctggtaacttggcatctggaggagcagctggtgcctcttcccttctgtttgtgtactcccttgactatgcccgtacccgtctagctaatgatgccaaggctgcaaagaaaggaggtggtggaagacagtttgatggtcttgttgatgtctacagaaagacacttaagactgatggtattgctggtctgtaccgtggattcaacatctcatgtgttggtatcattgtctaccgtggtctgtactttggactctatgactctgtgaagcctgttctcctcactggtgacttacaggacagtttcttcgctagtttcgctcttggatgggttattaccaatggtgcgggtcttgcatcctaccccattgacactgtccgcagaagaatgatgatgacgtctggtgaagctgtcaagtacaagagttctttggacgccttcaagcagatcctcaagaatgaaggagccaagtcactcttcaagggagctggtgccaacattctgcgtgctgttgcaggtgctggtgtgctttccggttacgacaaattgcagctgattgtcttcggtaagaagtacggatcaggaggtgcctaagcattgcttcttcctccttttttcgattttaattgcggttttaaggcccgcaataaactgagatgttgatgaaattttttttgcttaagacttagggaggcatgtgccctaaaccaaattttatatcgttctgacgccaactttttttacttatggaataattcatgtttgagagagtttgttagactcttcgattttaaagaattttggatttatgaaataaattcttctttttt

SEQ ID NO: 27757 - protein, 381 aa, Arabidopsis thaliana
  peptide (1)..(381): Ceres Seq. ID no. 12558480
MVDQVQHPTIAQKAAGQFMRSSVSKDVQVGYQRPSMYQRHATYGNYSNAAFQFPPTSRMLATTASPVFVQTPGEKGFTNFALDFLMGGVSAAVSKTAAAPIERVKLLIQNQDEMIKAGRLSEPYKGIGDCFGRTIKDEGFGSLWRGNTANVIRYFPTQALNFAFKDYFKRLFNFKKDRDGYWKWFAGNLASGGAAGASSLLFVYSLDYARTRLANDAKAAKKGGGGRQFDGLVDVYRKTLKTDGIAGLYRGFNISCVGIIVYRGLYFGLYDSVKPVLLTGDLQDSFFASFALGWVITNGAGLASYPIDTVRRRMMMTSGEAVKYKSSLDAFKQILKNEGAKSLFKGAGANILRAVAGAGVLSGYDKLQLIVFGKKYGSGGA

SEQ ID NO: 27758 - protein, 363 aa, Arabidopsis thaliana
  peptide (1)..(363): Ceres Seq. ID no. 12558481
MRSSVSKDVQVGYQRPSMYQRHATYGNYSNAAFQFPPTSRMLATTASPVFVQTPGEKGFTNFALDFLMGGVSAAVSKTAAAPIERVKLLIQNQDEMIKAGRLSEPYKGIGDCFGRTIKDEGFGSLWRGNTANVIRYFPTQALNFAFKDYFKRLFNFKKDRDGYWKWFAGNLASGGAAGASSLLFVYSLDYARTRLANDAKAAKKGGGGRQFDGLVDVYRKTLKTDGIAGLYRGFNISCVGIIVYRGLYFGLYDSVKPVLLTGDLQDSFFASFALGWVITNGAGLASYPIDTVRRRMMMTSGEAVKYKSSLDAFKQILKNEGAKSLFKGAGANILRAVAGAGVLSGYDKLQLIVFGKKYGSGGA

SEQ ID NO: 27759 - protein, 346 aa, Arabidopsis thaliana
  peptide (1)..(346): Ceres Seq. ID no. 12558482
MYQRHATYGNYSNAAFQFPPTSRMLATTASPVFVQTPGEKGFTNFALDFLMGGVSAAVSKTAAAPIERVKLLIQNQDEMIKAGRLSEPYKGIGDCFGRTIKDEGFGSLWRGNTANVIRYFPTQALNFAFKDYFKRLFNFKKDRDGYWKWFAGNLASGGAAGASSLLFVYSLDYARTRLANDAKAAKKGGGGRQFDGLVDVYRKTLKTDGIAGLYRGFNISCVGIIVYRGLYFGLYDSVKPVLLTGDLQDSFFASFALGWVITNGAGLASYPIDTVRRRMMMTSGEAVKYKSSLDAFKQILKNEGAKSLFKGAGANILRAVAGAGVLSGYDKLQLIVFGKKYGSGGA

SEQ ID NO: 27760 - DNA, 1314 bp, Arabidopsis thaliana
  misc_feature (1)..(1314): Ceres Seq. ID no. 12371735
  misc_feature (1)..(1314): Ortholog of  Ceres SEQ ID NO 13655992 as cited in SEQ ID NO 65504
  misc_feature (1)..(1314): Ortholog of  Ceres SEQ ID NO 13587581 as cited in SEQ ID NO 0
ctacttcttcccaagtttgatcactcagcgaaacaaagcaaactaagtaacaaagttaaaaaaacaaagaatttgattgtttttttttcttatagatggcggtaggaatctttggattgatcccaagctcatcaccagacgagctaaggaagattcttcaagcgctttcgacgaaatggggagacgtagttgaggattttgagagtcttgaagtgaagccaatgaaaggagcgatgactaacgaagtgttcatggttagttggcctagaaaagaaacgaatcttcaatgtaggaatcttcttgttcgtgtttatggtgaaggtgttgagcttttcttcaatagagacgatgagattcgtacttttgagtatgttgctcgtcatggtcacggtcctacacttcttggtcgcttcgccggcggtagagtcgaagagtttatccatgcccggacactatcggcaaccgatcttcgtgatccgaacatatcagctcttgttgcatctaagctaagaagatttcacagcatacacattcctggagatagaattatgctcatctgggacaggatgaggacttgggtaggacaagccaagaatctatgttcaaatgaacattcaacagagtttggtctagacgacattgaagatgaaatcaacctgctggaacaagaagtgaacaatgaacaagagattggcttctgtcacaatgacttgcagtatggtaacatcatgattgatgaagaaaccaatacaattactatcattgattatgagtatgcaagttataatccgatcgcttacgacatagcaaatcatttctgtgaaatggcggcagattatcattcaaacactcctcatatcttggactacactctatatccaggggaagaagaaaggaggagattcatatgtaactacttaacctcttcaggtgaagaagcaagagaagaagacatagaacaacttttggatgatattgagaagtatacattggcaagccatctcttctggggtttatggggaatcatatctggttatgtgaacaagattgagtttgattatatcgagtattcgaggcagagattcaaacagtattggcttcgcaagccaaagcttttatctttcttcccatcctaataagtaaattctctgtttacttatgtttactctttgcgaataacgcggtaaaaacccgatgatggatccatgatatagctatgccaaagctaaaactatgtgtaattcttctgttctgaacttctgatactatgtaataagtaaaagatataaatattccatactataatatttccac

SEQ ID NO: 27761 - protein, 346 aa, Arabidopsis thaliana
  peptide (1)..(346): Ceres Seq. ID no. 12371736
MAVGIFGLIPSSSPDELRKILQALSTKWGDVVEDFESLEVKPMKGAMTNEVFMVSWPRKETNLQCRNLLVRVYGEGVELFFNRDDEIRTFEYVARHGHGPTLLGRFAGGRVEEFIHARTLSATDLRDPNISALVASKLRRFHSIHIPGDRIMLIWDRMRTWVGQAKNLCSNEHSTEFGLDDIEDEINLLEQEVNNEQEIGFCHNDLQYGNIMIDEETNTITIIDYEYASYNPIAYDIANHFCEMAADYHSNTPHILDYTLYPGEEERRRFICNYLTSSGEEAREEDIEQLLDDIEKYTLASHLFWGLWGIISGYVNKIEFDYIEYSRQRFKQYWLRKPKLLSFFPS

SEQ ID NO: 27762 - protein, 304 aa, Arabidopsis thaliana
  peptide (1)..(304): Ceres Seq. ID no. 12371737
MKGAMTNEVFMVSWPRKETNLQCRNLLVRVYGEGVELFFNRDDEIRTFEYVARHGHGPTLLGRFAGGRVEEFIHARTLSATDLRDPNISALVASKLRRFHSIHIPGDRIMLIWDRMRTWVGQAKNLCSNEHSTEFGLDDIEDEINLLEQEVNNEQEIGFCHNDLQYGNIMIDEETNTITIIDYEYASYNPIAYDIANHFCEMAADYHSNTPHILDYTLYPGEEERRRFICNYLTSSGEEAREEDIEQLLDDIEKYTLASHLFWGLWGIISGYVNKIEFDYIEYSRQRFKQYWLRKPKLLSFFPS

SEQ ID NO: 27763 - protein, 300 aa, Arabidopsis thaliana
  peptide (1)..(300): Ceres Seq. ID no. 12371738
MTNEVFMVSWPRKETNLQCRNLLVRVYGEGVELFFNRDDEIRTFEYVARHGHGPTLLGRFAGGRVEEFIHARTLSATDLRDPNISALVASKLRRFHSIHIPGDRIMLIWDRMRTWVGQAKNLCSNEHSTEFGLDDIEDEINLLEQEVNNEQEIGFCHNDLQYGNIMIDEETNTITIIDYEYASYNPIAYDIANHFCEMAADYHSNTPHILDYTLYPGEEERRRFICNYLTSSGEEAREEDIEQLLDDIEKYTLASHLFWGLWGIISGYVNKIEFDYIEYSRQRFKQYWLRKPKLLSFFPS

SEQ ID NO: 27764 - DNA, 1014 bp, Arabidopsis thaliana
  misc_feature (1)..(1014): Ceres Seq. ID no. 13489272
  misc_feature (1)..(1014): Ortholog of  Ceres SEQ ID NO 12608127 as cited in SEQ ID NO 57579
  misc_feature (1)..(1014): Ortholog of  Ceres SEQ ID NO 12634558 as cited in SEQ ID NO 0
  misc_feature (1)..(1014): Ortholog of  Ceres SEQ ID NO 15180294 as cited in SEQ ID NO 0
aactaattaaagtttttggtttggtaagagttgcgaaacgataaccaataataaatgggagacatcattatctctttttctaaatctctccaatggcgtctcttcgtagcctttcgatttggttcttcttcttcttcgtcttcgtcttcttaatcaatccctccatttctattcgaacttccttcatcaagcttcccggaagcgacggatctcgctactgcgacagctggagattagccgccgagaccaataacgtcggaacttgggatctgattccgtcaatctgcgtggattccgtcgccgagtatcttaacggagaccagtttttatccgattacagtgtcatcgtcgattatgctctcgcgtttgcgaaatcggttgaaatttccggcgacggcaaggacgtgtggatcttcgatatcgacgagacgcttctcacgaatattgactactacaaggctcatggttacgggtctgaaccgtatgacgataataaatttagtgagtgggtggaacaaggaacagctccagcttttgatgcgagcttgagactgtacaatgctctcaagaaacttggtttcactatcattttgctaaccggtcgggacgagcatcaaaggacttccaccgagacaaatctccgggatgccggttattccggttgggaacgtctcctcttgagaggtccaaatgatcaagggaagtcagctacaaattacaaatccgagcagcgatcgaaactgattgaggaaggtttcaaaatccgtggcaatagcggtgatcaatggagtgacttgcaaggttttgccgtggctgatcgttctttcaaagtcccaaatcccatgtactacattccttgatcactattcatttctgattttatgtattgagtaacaaccacttatgtgttttagacgttaatattacctttgctcctatattacattgatctttagtataaacattaactaatactttcatataaagtataattataattgctttgtatcttcc

SEQ ID NO: 27765 - protein, 255 aa, Arabidopsis thaliana
  peptide (1)..(255): Ceres Seq. ID no. 13489273
MASLRSLSIWFFFFFVFVFLINPSISIRTSFIKLPGSDGSRYCDSWRLAAETNNVGTWDLIPSICVDSVAEYLNGDQFLSDYSVIVDYALAFAKSVEISGDGKDVWIFDIDETLLTNIDYYKAHGYGSEPYDDNKFSEWVEQGTAPAFDASLRLYNALKKLGFTIILLTGRDEHQRTSTETNLRDAGYSGWERLLLRGPNDQGKSATNYKSEQRSKLIEEGFKIRGNSGDQWSDLQGFAVADRSFKVPNPMYYIP

SEQ ID NO: 27766 - DNA, 1610 bp, Arabidopsis thaliana
  misc_feature (1)..(1610): Ceres Seq. ID no. 12325174
  misc_feature (1)..(1610): Ortholog of  Ceres SEQ ID NO 14315919 as cited in SEQ ID NO 60074
gaaaaaaaaagtcacagtctgtctgtctctctcctctaatcttttttatccgctagggttttgaagcaaggtttctcgcgattttctcgatatctctcgcccatggcgaaaccaagtcgtggccgtcgttccccctccgtgtctggctcgtcatctcgttccagttccagatctcgttcgggttcgagcccctccaggtctatttcccgctcacgctcccgttctagatcgctctcttcatcttcatctccttcgcgaagcgtcagttctgggagtcgcagtcctccacgtcgtggaaaaagtcctgctggacctgctaggcgaggtcgctctcctcctcctccaccatctaaaggagcatcttcaccttccaagaaagctgttcaagaatctcttgttctccatgttgattctcttagcaggaatgtgaatgaagcccatctcaaagaaatctttggcaactttggtgaagttatacatgtcgaaattgcgatggatcgagctgttaatcttccaagaggacatggttatgttgagttcaaggcaagagctgatgctgagaaagctcagctctacatggatggtgcccaaattgatggaaaggttgttaaagcaacgttcacactaccacctcgtcagaaagtatcttcaccccctaaacctgtctcagctgcaccaaaaagagatgctccaaaatctgataatgctgctgctgacgctgagaaagatggtggtcccaggcgcccaagagagacatctcctcaacggaaaacagggctttctccgagaaggcgatcacctctacctaggagaggcttatcacctagaaggcgatcacctgattctccccatcgccggaggccgggctctcctatccgccgtcgcggtgatacacctcctagacgtaggccagcatcaccatctagaggccgttctccatcttctccccctccaagacgatatagatctcctccaaggggctcccctagaagaattcgtggcagtcctgttcgaagaaggtctcctcttcctctaagacgaaggtctccacctccaaggagactacgcagtcctcccagaagatctccaatccgtaggcgtagccgatccccaattcgtaggcctggtcgctctcgttcaagttccatctcaccccgcaagggacgaggtccagctgggagacgtgggaggtcatcttcttactctagttcaccaagtcccagaaggattcctaggaagatttcaaggagccgcagtcctaagaggccactgagaggaaaaagaagcagcagtaacagcagcagcagcagttcaccgccaccaccacctccacctcgtaaaacttaaaggtgataaaaatgttataaaaagaaaagaaaagaaaacttgagtcttgatgtagctctctttctccacatctttatcgttatcatctgtctcagcctcttttcttagaacagataaaatgttaaccagtgaccaaatgagggttgtggtttttgtagtgtttggatgtttaatcttcttttgtggatctcctcattagatgcaacgataatgacttggttcttttagctggttgtaattccctaatatattcagtcttgttg

SEQ ID NO: 27767 - protein, 414 aa, Arabidopsis thaliana
  peptide (1)..(414): Ceres Seq. ID no. 12325175
MAKPSRGRRSPSVSGSSSRSSSRSRSGSSPSRSISRSRSRSRSLSSSSSPSRSVSSGSRSPPRRGKSPAGPARRGRSPPPPPSKGASSPSKKAVQESLVLHVDSLSRNVNEAHLKEIFGNFGEVIHVEIAMDRAVNLPRGHGYVEFKARADAEKAQLYMDGAQIDGKVVKATFTLPPRQKVSSPPKPVSAAPKRDAPKSDNAAADAEKDGGPRRPRETSPQRKTGLSPRRRSPLPRRGLSPRRRSPDSPHRRRPGSPIRRRGDTPPRRRPASPSRGRSPSSPPPRRYRSPPRGSPRRIRGSPVRRRSPLPLRRRSPPPRRLRSPPRRSPIRRRSRSPIRRPGRSRSSSISPRKGRGPAGRRGRSSSYSSSPSPRRIPRKISRSRSPKRPLRGKRSSSNSSSSSSPPPPPPPRKT

SEQ ID NO: 27768 - protein, 284 aa, Arabidopsis thaliana
  peptide (1)..(284): Ceres Seq. ID no. 12325176
MDRAVNLPRGHGYVEFKARADAEKAQLYMDGAQIDGKVVKATFTLPPRQKVSSPPKPVSAAPKRDAPKSDNAAADAEKDGGPRRPRETSPQRKTGLSPRRRSPLPRRGLSPRRRSPDSPHRRRPGSPIRRRGDTPPRRRPASPSRGRSPSSPPPRRYRSPPRGSPRRIRGSPVRRRSPLPLRRRSPPPRRLRSPPRRSPIRRRSRSPIRRPGRSRSSSISPRKGRGPAGRRGRSSSYSSSPSPRRIPRKISRSRSPKRPLRGKRSSSNSSSSSSPPPPPPPRKT

SEQ ID NO: 27769 - protein, 256 aa, Arabidopsis thaliana
  peptide (1)..(256): Ceres Seq. ID no. 12325177
MDGAQIDGKVVKATFTLPPRQKVSSPPKPVSAAPKRDAPKSDNAAADAEKDGGPRRPRETSPQRKTGLSPRRRSPLPRRGLSPRRRSPDSPHRRRPGSPIRRRGDTPPRRRPASPSRGRSPSSPPPRRYRSPPRGSPRRIRGSPVRRRSPLPLRRRSPPPRRLRSPPRRSPIRRRSRSPIRRPGRSRSSSISPRKGRGPAGRRGRSSSYSSSPSPRRIPRKISRSRSPKRPLRGKRSSSNSSSSSSPPPPPPPRKT

SEQ ID NO: 27770 - DNA, 1098 bp, Arabidopsis thaliana
  misc_feature (1)..(1098): Ceres Seq. ID no. 12331633
  misc_feature (1)..(1098): Ortholog of  Ceres SEQ ID NO 13594193 as cited in SEQ ID NO 58558
acatcacataaaaacaatcatagcaaaaacatatatcctcaaattaattagatctcatctatctctaccctcgacatggatcatgaggaaattccatccacgccctcaacgccggcgacaaccccggggactccaggagcgccgctctttggaggattcgaagggaagaggaatggacacaatggtagatacacaccaaagtcacttctcaaaagctgcaaatgtttcagtgttgacaatgaatgggctcttgaagatggaagactccctccggtcacttgctctctccctccccctaacgtttccctctaccgcaagttgggagcagagtttgttgggacattgatcctgatattcgccggaacagcgacggcgatcgtgaatcagaagacagatggagctgagacgcttattggttgcgccgcctcggctggtctggcggttatgatcgttatattatcgaccggtcacatctccggggcacatctcaatccggctgtaaccattgcctttgctgctctcaaacacttcccttggaaacacgtgccggtgtatatcggagctcaggtgatggcctccgtgagtgcggcgtttgcactgaaagcagtgtttgaaccaacgatgagcggtgacgtgacggtgccaacggtgggtctcagccaagctttcgccttggaattcattatcagcttcaacctcatgttcgttgtcacagccgtagccaccgacacgagagctgtgggagagttggcgggaattgccgtaggagcaacggtcatgcttaacatactcatagctggacctgcaacttctgcttcgatgaatcctgtaagaacactaggtccagccattgcagcaaacaattacagagctatttggatttaccttactgccccaatacttggagcgttaattggagcaggaacctacacgattgtgaagttgccagaggaagatgaagcacccaaagaaaggagaagcttcagaagatgaatgaaaaacttgaaaaccatgttactctgtttttgcatcacttatgtgtataatataatatctggggtcaatgatggtaataaaaatgcgaatgtcccttttatc

SEQ ID NO: 27771 - protein, 305 aa, Arabidopsis thaliana
  peptide (1)..(305): Ceres Seq. ID no. 12331634
MDHEEIPSTPSTPATTPGTPGAPLFGGFEGKRNGHNGRYTPKSLLKSCKCFSVDNEWALEDGRLPPVTCSLPPPNVSLYRKLGAEFVGTLILIFAGTATAIVNQKTDGAETLIGCAASAGLAVMIVILSTGHISGAHLNPAVTIAFAALKHFPWKHVPVYIGAQVMASVSAAFALKAVFEPTMSGDVTVPTVGLSQAFALEFIISFNLMFVVTAVATDTRAVGELAGIAVGATVMLNILIAGPATSASMNPVRTLGPAIAANNYRAIWIYLTAPILGALIGAGTYTIVKLPEEDEAPKERRSFRR

SEQ ID NO: 27772 - protein, 182 aa, Arabidopsis thaliana
  peptide (1)..(182): Ceres Seq. ID no. 12331635
MIVILSTGHISGAHLNPAVTIAFAALKHFPWKHVPVYIGAQVMASVSAAFALKAVFEPTMSGDVTVPTVGLSQAFALEFIISFNLMFVVTAVATDTRAVGELAGIAVGATVMLNILIAGPATSASMNPVRTLGPAIAANNYRAIWIYLTAPILGALIGAGTYTIVKLPEEDEAPKERRSFRR

SEQ ID NO: 27773 - DNA, 2351 bp, Arabidopsis thaliana
  misc_feature (1)..(2351): Ceres Seq. ID no. 13491443
  misc_feature (1)..(2351): Ortholog of  Ceres SEQ ID NO 13656177 as cited in SEQ ID NO 64997
gtcctcttttgtcgtctctccctgctttcgcacttcatagcctcaatctctcaacaagcagaagagattcgattctccattatcttccttctaaatgccttccctaatgttatctgataagaaagaggagaagaagatgaagaagaagatggctttggataccccagagcttgattctaagaaggggaagaaggagcagaagctgaaactatctgattcggatgaagaagagtcggagaagaagaagagtaagaagaaggataagaagcgtaaggcttccgaggaggaggatgaagtgaagagcgattcaagctcggagaagaagaagagcagcaagaaggttaagttgggcgttgaggatgttgaagttgataaccctaatgctgtttctaagtttcggatttctgcgcctttgagggagaagcttaaggcgaatggtattgaagctcttttcccgattcaggcttccacgtttgatatggttctcgatggtgctgatttagttggacgggctcgtactggtcagggtaaaacattggcttttgtgttgcctatattggaatctttggttaatggacctgccaaaagcaaaaggaagatgggatatggcaggtcaccaagtgttttggtccttttaccgaccagagaattggccaagcaggtggctgctgactttgatgcatatggaggatcacttgggttaagttcatgttgtctctatggaggtgatagctatccagttcaggagggtaaattaaagagaggtgttgacattgtagttggaacccctggtcgtattaaggatcatattgaaagacaaaaccttgatttcagctatttacaattccgtgttcttgatgaagctgatgaaatgttgaggatgggatttgttgaggatgttgaacttattttagggaaagtggaggattctactaaagtccagactcttctcttcagtgctactttgccatcatgggtgaaaaatatctctaacaggtttcttaaaagagaccagaagactattgatcttgttggtaatgataaaatgaaggccagtaatagtgttcgacacattgctattccttgtaataaggcagccatggctcggttgattcctgatattatcagttgctatagcagtggaggccaaactattattttcgctgaaactaaagttcaagtttctgagctttctggtttgttggatggatcaagagccttgcatggtgaaatacctcaatcacaacgtgaggttactcttgctggatttaggaatggcaagtttgcaacattggtggctacaaatgttgctgctcgtggtctagatatcaatgatgtgcagttaattatccagtgtgagcctccacgtgaagttgaagcatatattcatcgttcaggccgaacaggaagagctggcaacacaggagttgcggttacactctacgattctagaaagtcgagtgtatccaggatcgaaaaagaagctggtatcaaatttgagcaccttgctgcacctcaacctgatgaaattgccagatctggtggtatggaagctgctgagaaagttaaacaagtgtgtgacagtgtggttcctgcattccttgaagctgccaaggaattattagaaacttctggtttatcagctgaagtactcctcgcaaaagctcttgcaaaaactgcgggcttcactgagataaagaaaaggtcacttcttacatcaatggagaactatgtgacactacatcttgaagcagggaaaccaatatactcgccatcatttgtttatggactgctaaggagagttttaccggatgacaaggtggaaatgattgaagggttatctctaacagcagataaaacaggagctgtgttcgatgttaagcaatcagatctagacttgttcattgcaggagcacaaaagagtgctggaagtatgagtttggaagtggttaaggtgatgcctaaactccaggagagagaaccattgccacaaaaaagattcggtggtggtggcagaggaaatcggtttggtggtggtggaggaaatcggtttggcggtggtggtggcagaggaagaggaggcagtggtggtagaggccagagatattgaaaactggaacccaacttctcctttctatataaaaagaaactaaactccgtcttataatttcattactatcttcttccgctgatgttttctacactataataggtggcttttctgtgttttccattttctttccttgaacaaacttatggaggctctcttgtaccctcttatcaattttgtgtaatgttggatgataatgatgattaaattataacttcgtcactcattggaattgttttgc

SEQ ID NO: 27774 - protein, 671 aa, Arabidopsis thaliana
  peptide (1)..(671): Ceres Seq. ID no. 13491444
MPSLMLSDKKEEKKMKKKMALDTPELDSKKGKKEQKLKLSDSDEEESEKKKSKKKDKKRKASEEEDEVKSDSSSEKKKSSKKVKLGVEDVEVDNPNAVSKFRISAPLREKLKANGIEALFPIQASTFDMVLDGADLVGRARTGQGKTLAFVLPILESLVNGPAKSKRKMGYGRSPSVLVLLPTRELAKQVAADFDAYGGSLGLSSCCLYGGDSYPVQEGKLKRGVDIVVGTPGRIKDHIERQNLDFSYLQFRVLDEADEMLRMGFVEDVELILGKVEDSTKVQTLLFSATLPSWVKNISNRFLKRDQKTIDLVGNDKMKASNSVRHIAIPCNKAAMARLIPDIISCYSSGGQTIIFAETKVQVSELSGLLDGSRALHGEIPQSQREVTLAGFRNGKFATLVATNVAARGLDINDVQLIIQCEPPREVEAYIHRSGRTGRAGNTGVAVTLYDSRKSSVSRIEKEAGIKFEHLAAPQPDEIARSGGMEAAEKVKQVCDSVVPAFLEAAKELLETSGLSAEVLLAKALAKTAGFTEIKKRSLLTSMENYVTLHLEAGKPIYSPSFVYGLLRRVLPDDKVEMIEGLSLTADKTGAVFDVKQSDLDLFIAGAQKSAGSMSLEVVKVMPKLQEREPLPQKRFGGGGRGNRFGGGGGNRFGGGGGRGRGGSGGRGQRY

SEQ ID NO: 27775 - protein, 667 aa, Arabidopsis thaliana
  peptide (1)..(667): Ceres Seq. ID no. 13491445
MLSDKKEEKKMKKKMALDTPELDSKKGKKEQKLKLSDSDEEESEKKKSKKKDKKRKASEEEDEVKSDSSSEKKKSSKKVKLGVEDVEVDNPNAVSKFRISAPLREKLKANGIEALFPIQASTFDMVLDGADLVGRARTGQGKTLAFVLPILESLVNGPAKSKRKMGYGRSPSVLVLLPTRELAKQVAADFDAYGGSLGLSSCCLYGGDSYPVQEGKLKRGVDIVVGTPGRIKDHIERQNLDFSYLQFRVLDEADEMLRMGFVEDVELILGKVEDSTKVQTLLFSATLPSWVKNISNRFLKRDQKTIDLVGNDKMKASNSVRHIAIPCNKAAMARLIPDIISCYSSGGQTIIFAETKVQVSELSGLLDGSRALHGEIPQSQREVTLAGFRNGKFATLVATNVAARGLDINDVQLIIQCEPPREVEAYIHRSGRTGRAGNTGVAVTLYDSRKSSVSRIEKEAGIKFEHLAAPQPDEIARSGGMEAAEKVKQVCDSVVPAFLEAAKELLETSGLSAEVLLAKALAKTAGFTEIKKRSLLTSMENYVTLHLEAGKPIYSPSFVYGLLRRVLPDDKVEMIEGLSLTADKTGAVFDVKQSDLDLFIAGAQKSAGSMSLEVVKVMPKLQEREPLPQKRFGGGGRGNRFGGGGGNRFGGGGGRGRGGSGGRGQRY

SEQ ID NO: 27776 - protein, 657 aa, Arabidopsis thaliana
  peptide (1)..(657): Ceres Seq. ID no. 13491446
MKKKMALDTPELDSKKGKKEQKLKLSDSDEEESEKKKSKKKDKKRKASEEEDEVKSDSSSEKKKSSKKVKLGVEDVEVDNPNAVSKFRISAPLREKLKANGIEALFPIQASTFDMVLDGADLVGRARTGQGKTLAFVLPILESLVNGPAKSKRKMGYGRSPSVLVLLPTRELAKQVAADFDAYGGSLGLSSCCLYGGDSYPVQEGKLKRGVDIVVGTPGRIKDHIERQNLDFSYLQFRVLDEADEMLRMGFVEDVELILGKVEDSTKVQTLLFSATLPSWVKNISNRFLKRDQKTIDLVGNDKMKASNSVRHIAIPCNKAAMARLIPDIISCYSSGGQTIIFAETKVQVSELSGLLDGSRALHGEIPQSQREVTLAGFRNGKFATLVATNVAARGLDINDVQLIIQCEPPREVEAYIHRSGRTGRAGNTGVAVTLYDSRKSSVSRIEKEAGIKFEHLAAPQPDEIARSGGMEAAEKVKQVCDSVVPAFLEAAKELLETSGLSAEVLLAKALAKTAGFTEIKKRSLLTSMENYVTLHLEAGKPIYSPSFVYGLLRRVLPDDKVEMIEGLSLTADKTGAVFDVKQSDLDLFIAGAQKSAGSMSLEVVKVMPKLQEREPLPQKRFGGGGRGNRFGGGGGNRFGGGGGRGRGGSGGRGQRY

SEQ ID NO: 27777 - DNA, 705 bp, Arabidopsis thaliana
  misc_feature (1)..(705): Ceres Seq. ID no. 12580042
  misc_feature (1)..(705): Ortholog of  Ceres SEQ ID NO 15176321 as cited in SEQ ID NO 52814
  misc_feature (1)..(705): Ortholog of  Ceres SEQ ID NO 12563124 as cited in SEQ ID NO 57104
  misc_feature (1)..(705): Ortholog of  Ceres SEQ ID NO 13598373 as cited in SEQ ID NO 62185
  misc_feature (1)..(705): Ortholog of  Ceres SEQ ID NO 12584664 as cited in SEQ ID NO 62232
  misc_feature (1)..(705): Ortholog of  Ceres SEQ ID NO 15226273 as cited in SEQ ID NO 64934
  misc_feature (1)..(705): Ortholog of  Ceres SEQ ID NO 12617639 as cited in SEQ ID NO 65219
acatctcactgctcactactctcactgtaatcccttagatcttcttttcaaatttcaatggcgtccggtgatgttgagtatcggtgcttcgttggaggtctagcatgggccactgatgacagagctcttgagactgccttcgctcaatacggcgacgttattgattccaagatcattaacgatcgtgagactggaagatcaaggggattcggattcgtcaccttcaaggatgagaaagccatgaaggatgcgattgagggaatgaacggacaagatctcgatggccgtagcatcactgttaacgaggctcagtcacgaggaagcggtggcggcggaggccaccgtggaggtggtggcggtggataccgcagcggcggtggtggaggttactccggtggaggtggtagctacggaggtggcggcggtagacgcgagggtggaggaggatacagcggcggcggcggttactcctcaagaggtggtggtggcggaagctacggtggtggaagacgtgagggaggaggaggatacggtggtggtgaaggaggaggttacggaggaagcggtggtggtggaggatggtaattcctttaattaggtttgggattaccaatgaatgttctctctctcgcttgttatgcttctacttggttttgtgtgttctctattttgttattcttccgttaatgtaatgaaagagttgtt

SEQ ID NO: 27778 - protein, 175 aa, Arabidopsis thaliana
  peptide (1)..(175): Ceres Seq. ID no. 12580043
MASGDVEYRCFVGGLAWATDDRALETAFAQYGDVIDSKIINDRETGRSRGFGFVTFKDEKAMKDAIEGMNGQDLDGRSITVNEAQSRGSGGGGGHRGGGGGGYRSGGGGGYSGGGGSYGGGGGRREGGGGYSGGGGYSSRGGGGGSYGGGRREGGGGYGGGEGGGYGGSGGGGGW

SEQ ID NO: 27779 - protein, 114 aa, Arabidopsis thaliana
  peptide (1)..(114): Ceres Seq. ID no. 12580044
MKDAIEGMNGQDLDGRSITVNEAQSRGSGGGGGHRGGGGGGYRSGGGGGYSGGGGSYGGGGGRREGGGGYSGGGGYSSRGGGGGSYGGGRREGGGGYGGGEGGGYGGSGGGGGW

SEQ ID NO: 27780 - protein, 107 aa, Arabidopsis thaliana
  peptide (1)..(107): Ceres Seq. ID no. 12580045
MNGQDLDGRSITVNEAQSRGSGGGGGHRGGGGGGYRSGGGGGYSGGGGSYGGGGGRREGGGGYSGGGGYSSRGGGGGSYGGGRREGGGGYGGGEGGGYGGSGGGGGW

SEQ ID NO: 27781 - DNA, 1374 bp, Arabidopsis thaliana
  misc_feature (1)..(1374): Ceres Seq. ID no. 12348627
  misc_feature (1)..(1374): Ortholog of  Ceres SEQ ID NO 14302008 as cited in SEQ ID NO 56021
aacacaaagacaataaaattaatcaaaaataaacaaaggagagagacagaagaaacagagagagtagttaattccggtggttttctgctcatctacttctatccaccttcatcccttccgccccaaaattcaattctctcttcctttctctctctttctccttaaaaactctaactttactcatctcatctccaaagtctcaacctttcttctctaatggagatctgcacttacttcaaatcacaacccacttggctcctcattctcttcgttctggggtcaatctcaatcttcaaattcatcttcaccctcctcagatctttctacatctacttcctccgaccatccaaaaacctccgccgatacggttcatgggcaatcatcaccggaccaacagacggaatcggtaaagctttcgcctttcagttagcccagaaaggtcttaaccttatactcgttgctcgtaacccagacaagctcaaagatgtctctgattccatcagatctaagtatagtcaaactcagatcttgaccgttgtgatggatttctctggagatattgatgaaggtgtgaaacggactaaggagagtattgaaggattagatgttgggattttgattaataatgctggcatgtcttatccttatgctaagtattttcatgaggttgatgaagagttgatcaataacttgattaagatcaatgttgaaggaactactaaagttactcaagctgtgttgcctaatatgcttaagagtaagaaaggtgctattattaatatgggttctggtgctgctgctcttattccttcttatcctttttactctgtttatgctggtgctaaaacgtacgtggatcagttcacaaagtgtctacatgttgagtataagaagagtgggattgatgttcaatgccaggttcccttgtatgttgcaacaaagatgacaaaaataagaagagcatccttcttagttgcatcaccagagggttacgcaaaggcagcactgcgttttgtaggctatgaagcacaatgcacaccgtactggcctcacgctctcatgggtgcagttgtctctgcattgcccgaaagcgtttttgaatcatttaacatcaagagatgcctccagatccggaagaagggtctccaaaaagactccatgaagaaagaatgaatcttccaggtttaagttactaccaagaatttccttcttctgaagttgttggtttcttgaaaagcttctgttctgaatcttttgtaagacttgtactctttagttttctaagttttttatattttaagattaaaaaccctaacgtacacgaataatttacttcctctgtttctatttattaatttaagcagtgttgtattg

SEQ ID NO: 27782 - protein, 318 aa, Arabidopsis thaliana
  peptide (1)..(318): Ceres Seq. ID no. 12348628
MEICTYFKSQPTWLLILFVLGSISIFKFIFTLLRSFYIYFLRPSKNLRRYGSWAIITGPTDGIGKAFAFQLAQKGLNLILVARNPDKLKDVSDSIRSKYSQTQILTVVMDFSGDIDEGVKRTKESIEGLDVGILINNAGMSYPYAKYFHEVDEELINNLIKINVEGTTKVTQAVLPNMLKSKKGAIINMGSGAAALIPSYPFYSVYAGAKTYVDQFTKCLHVEYKKSGIDVQCQVPLYVATKMTKIRRASFLVASPEGYAKAALRFVGYEAQCTPYWPHALMGAVVSALPESVFESFNIKRCLQIRKKGLQKDSMKKE

SEQ ID NO: 27783 - protein, 210 aa, Arabidopsis thaliana
  peptide (1)..(210): Ceres Seq. ID no. 12348629
MDFSGDIDEGVKRTKESIEGLDVGILINNAGMSYPYAKYFHEVDEELINNLIKINVEGTTKVTQAVLPNMLKSKKGAIINMGSGAAALIPSYPFYSVYAGAKTYVDQFTKCLHVEYKKSGIDVQCQVPLYVATKMTKIRRASFLVASPEGYAKAALRFVGYEAQCTPYWPHALMGAVVSALPESVFESFNIKRCLQIRKKGLQKDSMKKE

SEQ ID NO: 27784 - protein, 179 aa, Arabidopsis thaliana
  peptide (1)..(179): Ceres Seq. ID no. 12348630
MSYPYAKYFHEVDEELINNLIKINVEGTTKVTQAVLPNMLKSKKGAIINMGSGAAALIPSYPFYSVYAGAKTYVDQFTKCLHVEYKKSGIDVQCQVPLYVATKMTKIRRASFLVASPEGYAKAALRFVGYEAQCTPYWPHALMGAVVSALPESVFESFNIKRCLQIRKKGLQKDSMKKE

SEQ ID NO: 27785 - DNA, 1264 bp, Arabidopsis thaliana
  misc_feature (1)..(1264): Ceres Seq. ID no. 12330000
  misc_feature (1)..(1264): Ortholog of  Ceres SEQ ID NO 12616332 as cited in SEQ ID NO 63449
  misc_feature (1)..(1264): Ortholog of  Ceres SEQ ID NO 13597498 as cited in SEQ ID NO 64648
gaccggatccgaataattggatccaccggatcggagggaaaaaaaacaaacccgtgacgccattaacgaaggtcgagcttgcttgacaccacacaatgcattctcctcgtaagctatttcacgcgcggtcatcactcgccacgcgccgatcaacggctcttgtcgtattaacttccctagctattggaatcgccggtttcacatttggactcgccgtaattcttataccgggtctccgattaaccggtcgtaattgcttgacgaacactcctccgaagacggtgcgagtcgtttgggacgtcgccggaaatagtaatggcgttgttagtggcgaaaagaagaggcataaggttatgggattcgttggtattcaaaccggatttggatctgctggccggagacgatcacttagaaagacatggatgccgtcagatccagaaggtcttcgacgtttggaagaatctacggggttagccatcaggtttatgataggaaaaacgaaaagtgaggagaaaatggctcagctcagaagagaaatcgcagagtatgatgacttcgtactgctagatatcgaagaggagtacagtaagcttccttacaaaactttggctttcttcaaagctgcgtacgcgctttatgattctgagttctatgtcaaagctgatgatgatatatacttgaggccagatcgactctctctgctattggcgaaagagcggagtcactctcagacgtacctaggatgcttgaaaaagggtccggttttcacagatcctaagctcaaatggtatgaaccattgtctcatctgctgggaaaagagtactttcttcatgcttatggcccgatttatgctctctctgctgatgtggtagccagtttggttgccctcaagaataacagtttcaggatgtttaacaacgaggacgtaacaataggtgcgtggatgctggcaatgaatgtcaaccacgagaaccatcacatcctttgcgaaccagaatgctcaccttcttctgttgctgtttgggacatccctaaatgctcaggtctttgtaacccagagaaaaggatgttggaacttcacaagcaagaaagctgctcgaaaagcccaactttgccatcagatgatgaatgatattatttctcttatcaaatgtctttataaacctcttctcagtggtcgaagctctatcacttgcagattcatttcttcgagcgaacctgcaacgagattatttcacatagattcaagtttagagttcactt

SEQ ID NO: 27786 - protein, 345 aa, Arabidopsis thaliana
  peptide (1)..(345): Ceres Seq. ID no. 12330001
MHSPRKLFHARSSLATRRSTALVVLTSLAIGIAGFTFGLAVILIPGLRLTGRNCLTNTPPKTVRVVWDVAGNSNGVVSGEKKRHKVMGFVGIQTGFGSAGRRRSLRKTWMPSDPEGLRRLEESTGLAIRFMIGKTKSEEKMAQLRREIAEYDDFVLLDIEEEYSKLPYKTLAFFKAAYALYDSEFYVKADDDIYLRPDRLSLLLAKERSHSQTYLGCLKKGPVFTDPKLKWYEPLSHLLGKEYFLHAYGPIYALSADVVASLVALKNNSFRMFNNEDVTIGAWMLAMNVNHENHHILCEPECSPSSVAVWDIPKCSGLCNPEKRMLELHKQESCSKSPTLPSDDE

SEQ ID NO: 27787 - protein, 259 aa, Arabidopsis thaliana
  peptide (1)..(259): Ceres Seq. ID no. 12330002
MGFVGIQTGFGSAGRRRSLRKTWMPSDPEGLRRLEESTGLAIRFMIGKTKSEEKMAQLRREIAEYDDFVLLDIEEEYSKLPYKTLAFFKAAYALYDSEFYVKADDDIYLRPDRLSLLLAKERSHSQTYLGCLKKGPVFTDPKLKWYEPLSHLLGKEYFLHAYGPIYALSADVVASLVALKNNSFRMFNNEDVTIGAWMLAMNVNHENHHILCEPECSPSSVAVWDIPKCSGLCNPEKRMLELHKQESCSKSPTLPSDDE

SEQ ID NO: 27788 - protein, 236 aa, Arabidopsis thaliana
  peptide (1)..(236): Ceres Seq. ID no. 12330003
MPSDPEGLRRLEESTGLAIRFMIGKTKSEEKMAQLRREIAEYDDFVLLDIEEEYSKLPYKTLAFFKAAYALYDSEFYVKADDDIYLRPDRLSLLLAKERSHSQTYLGCLKKGPVFTDPKLKWYEPLSHLLGKEYFLHAYGPIYALSADVVASLVALKNNSFRMFNNEDVTIGAWMLAMNVNHENHHILCEPECSPSSVAVWDIPKCSGLCNPEKRMLELHKQESCSKSPTLPSDDE

SEQ ID NO: 27789 - DNA, 958 bp, Arabidopsis thaliana
  misc_feature (1)..(958): Ceres Seq. ID no. 12738824
  misc_feature (1)..(958): Ortholog of  Ceres SEQ ID NO 14314174 as cited in SEQ ID NO 54350
  misc_feature (1)..(958): Ortholog of  Ceres SEQ ID NO 15224566 as cited in SEQ ID NO 55626
  misc_feature (1)..(958): Ortholog of  Ceres SEQ ID NO 13502979 as cited in SEQ ID NO 69150
aaatacaattgatcttcccccatctccaattcagatttggacagagtaacctgtgatcgtgtcggttggggtagaagagatcgaagtgggagcaaaatcatgatgaatcggctattcgggaaacccaagcaggaggctaatgctctccaaactttagacaagcttaacgagacgcttgagatgctagagaaaaaggagaaagtactcttgaagaaagctggtcagaggttgagaaggcaaaagaatactcccgggctaagaacaaacgagcggctatacagtgtttgaaaaggaagaggttatatgagggacaagtcgaacagcttgggaatttccagctccgtattcatgatcaaatgattatgttagaaggtgcaaaagcaacaaccgaaactgttgatgcattgaggagtggagcttctgcaatgaaggcaatgcagaaagcaacaaatattgatgatgtggataagaccatggacgagatcaatgagcaaaccgagaacatgaaacagatccaagaagcattggcgactccaatgggggcagcggctgacttcgacgaggatgagcttgcagcagagcttgatgaactagaaagtgaagagcttgaatcgcaacttctacagccggcaacaacagctcctccattgccttcagttccagtgcctgcagggcgtcaaccggctcgtcctgttccccagaagcggactgctgaggaagaagaactcgctgcattacaggctgagatggccctctaaggttattcacctctccgagcagagacatgtatgcattgatagacacgaacagacgatgtatataaggatctgaatcagattaattcggagcgaaaaacttttataatccccgtcgttaatgttatctgcaatttgagtgttcttcacataatttatcttttgtaatttttgtatctttttatgacactttttcctttggc

SEQ ID NO: 27790 - protein, 133 aa, Arabidopsis thaliana
  peptide (1)..(133): Ceres Seq. ID no. 12738825
MIMLEGAKATTETVDALRSGASAMKAMQKATNIDDVDKTMDEINEQTENMKQIQEALATPMGAAADFDEDELAAELDELESEELESQLLQPATTAPPLPSVPVPAGRQPARPVPQKRTAEEEELAALQAEMAL

SEQ ID NO: 27791 - protein, 131 aa, Arabidopsis thaliana
  peptide (1)..(131): Ceres Seq. ID no. 12738826
MLEGAKATTETVDALRSGASAMKAMQKATNIDDVDKTMDEINEQTENMKQIQEALATPMGAAADFDEDELAAELDELESEELESQLLQPATTAPPLPSVPVPAGRQPARPVPQKRTAEEEELAALQAEMAL

SEQ ID NO: 27792 - protein, 110 aa, Arabidopsis thaliana
  peptide (1)..(110): Ceres Seq. ID no. 12738827
MKAMQKATNIDDVDKTMDEINEQTENMKQIQEALATPMGAAADFDEDELAAELDELESEELESQLLQPATTAPPLPSVPVPAGRQPARPVPQKRTAEEEELAALQAEMAL

SEQ ID NO: 27793 - DNA, 797 bp, Arabidopsis thaliana
  misc_feature (1)..(797): Ceres Seq. ID no. 12331684
  misc_feature (1)..(797): Ortholog of  Ceres SEQ ID NO 12613614 as cited in SEQ ID NO 68243
  misc_feature (1)..(797): Ortholog of  Ceres SEQ ID NO 12556636 as cited in SEQ ID NO 0
  misc_feature (1)..(797): Ortholog of  Ceres SEQ ID NO 13600066 as cited in SEQ ID NO 0
  misc_feature (1)..(797): Ortholog of  Ceres SEQ ID NO 15179946 as cited in SEQ ID NO 0
agaccgccgcgtctttgtgtatatcgcctccacagatctaatcgctaaagtcatcgtcgtcgtctcttctctcaaaatcaaaaaggttgttataaaaatggctgaggcaacgtctgctttgaggaagcctgtgttcacaaaggttaatgagttgagaccaggaaccaatggccactctctgaatgtgaaagttgtcaacacgaagatggtgatgcagagaggaggaggtcgtcccatgggtcctcagtcacgtcagatgcggattgccgaatgcttagttggtgatgagactggaatcataatctttactgcaagaaatgaccaagtggatatgatgaaagaaggcagtgtagtgactctgcgtaatgcgaagatcgacatgtacaagggttctatgaggcttgcagttgatagatggggacgtgttgaagttgcagaggagcccacagacatcaccgtgaaggatgataacaatctttcgctgatcgagtatgagcttgtgagcgtcgaaacttgatatggttcctccacaaacgaaaacagagcgactcaaaaaaagacttacgttctagttggagaaagcctctttggtttgggtttgagtcttttttatgtactatccggcttgcctctgatctactgttcttgttttgaaaatcaggttgccgtctttttgtagattgattctctatttaaatatcatgggatgatctttctcttgttttagtttttgttctcgtcttttttccttggaaacaaattattataaagacatactactttgtactttcacatcc

SEQ ID NO: 27794 - protein, 171 aa, Arabidopsis thaliana
  peptide (1)..(171): Ceres Seq. ID no. 12331685
DRRVFVYIASTDLIAKVIVVVSSLKIKKVVIKMAEATSALRKPVFTKVNELRPGTNGHSLNVKVVNTKMVMQRGGGRPMGPQSRQMRIAECLVGDETGIIIFTARNDQVDMMKEGSVVTLRNAKIDMYKGSMRLAVDRWGRVEVAEEPTDITVKDDNNLSLIEYELVSVET

SEQ ID NO: 27795 - protein, 139 aa, Arabidopsis thaliana
  peptide (1)..(139): Ceres Seq. ID no. 12331686
MAEATSALRKPVFTKVNELRPGTNGHSLNVKVVNTKMVMQRGGGRPMGPQSRQMRIAECLVGDETGIIIFTARNDQVDMMKEGSVVTLRNAKIDMYKGSMRLAVDRWGRVEVAEEPTDITVKDDNNLSLIEYELVSVET

SEQ ID NO: 27796 - protein, 103 aa, Arabidopsis thaliana
  peptide (1)..(103): Ceres Seq. ID no. 12331687
MVMQRGGGRPMGPQSRQMRIAECLVGDETGIIIFTARNDQVDMMKEGSVVTLRNAKIDMYKGSMRLAVDRWGRVEVAEEPTDITVKDDNNLSLIEYELVSVET

SEQ ID NO: 27797 - DNA, 1169 bp, Arabidopsis thaliana
  misc_feature (1)..(1169): Ceres Seq. ID no. 12579866
  misc_feature (1)..(1169): Ortholog of  Ceres SEQ ID NO 14311044 as cited in SEQ ID NO 53643
acgcggcacatagattattctctccaagagaaaaaaatgggtcaagctttgggttgtattcaagttgatcagtcgaatgtagcaatcaaagagacttttgggaagtttgacgaagttcttgagccgggttgtcactgtttgccatggtgtttgggaagtcaagtcgctggtcacctttctttacgtgttcaacagctcgatgttcgctgcgagacaaagactaaggataatgtgtttgtcacggttgttgcttccattcaataccgtgccttagcggagagtgctcaagatgctttttacaagctcagcaacacaaggaatcagattcaagcttatgtctttgatgtgatccgagcaagtgtacctaagctggatctagactctacctttgagcaaaagaatgacattgcaaaaaccgttgagactgagctcgaaaaggctatgtcgcattacggatatgagattgttcagacactgattgtggatatcgagcctgatgtgcatgtcaagagggcaatgaatgagatcaatgctgcttctagaatgagagaggcagcgagtgagaaagctgaggcagagaaaattctgcagatcaagcgtgctgagggagaagctgaatcgaaatacctttcaggtatgggtatagcccgtcagagacaagccattgtggatggtctgaggaacagcgtactcgccttctctgagtctgttccaggaacatcttccaaagacgtgatggatatggttcttgtgactcagtactttgacacattgaaggaaattggtgcttcttcgaagtcaaactcggtgttcataccgcacggtccaggcgctgttagggacattgcttcacagatcagggatggtcttcttcagggtaactctgctgctgagtagagaaatgtctcaaagtacaaaaaggctttttcagggttttagagttgtgttgctacttgcttactcagtttatcttttagcggtttgctctatatgatgggttcttaaatttcttatcgtttctctcttctaggcttgtggacttgatccattgtcttgttttctggtggtttgtggatagagtttgggcttgaaaaacatccgagttattttgggttttaatgtcattattaatgtttaatacgacagtggttaaagaatttgctaacggc

SEQ ID NO: 27798 - protein, 298 aa, Arabidopsis thaliana
  peptide (1)..(298): Ceres Seq. ID no. 12579867
TRHIDYSLQEKKMGQALGCIQVDQSNVAIKETFGKFDEVLEPGCHCLPWCLGSQVAGHLSLRVQQLDVRCETKTKDNVFVTVVASIQYRALAESAQDAFYKLSNTRNQIQAYVFDVIRASVPKLDLDSTFEQKNDIAKTVETELEKAMSHYGYEIVQTLIVDIEPDVHVKRAMNEINAASRMREAASEKAEAEKILQIKRAEGEAESKYLSGMGIARQRQAIVDGLRNSVLAFSESVPGTSSKDVMDMVLVTQYFDTLKEIGASSKSNSVFIPHGPGAVRDIASQIRDGLLQGNSAAE

SEQ ID NO: 27799 - protein, 286 aa, Arabidopsis thaliana; identical to SEQ ID NO: 23094
  peptide (1)..(286): Ceres Seq. ID no. 12579868

SEQ ID NO: 27800 - protein, 151 aa, Arabidopsis thaliana; identical to SEQ ID NO: 23095
  peptide (1)..(151): Ceres Seq. ID no. 12579869

SEQ ID NO: 27801 - DNA, 802 bp, Arabidopsis thaliana
  misc_feature (1)..(802): Ceres Seq. ID no. 12675009
  misc_feature (1)..(802): Ortholog of  Ceres SEQ ID NO 12610341 as cited in SEQ ID NO 56073
atgattaatgtctgaaaaatttgatatttgaagcgaatcaacaacaacagtcgggttcgtgaaaaaaaaagatttgatcggctaaacttggtcgctttcaggtttatcgtggaaggacttgtcaatggcagacgtacctggatacctgcgcacttgtttggatatggggaagatagctttcttagcaatccttgtatctacagggattgtgttgcagattctggcttgtgctctgttcaataactggtggccaatgctaagtgttataatgtatgtgctcctcccaatgcctttgctcttctttggtggatcagacagtacatctctattcaacgagtcagataatagttggatcaatgcagccaagttcttgactggtgcatcagcagttggaagcgtcgcgataccatcgattctaaaacacgccggactcatcggttggggcgcattagcccttgatctctcatcctacgttgtcttcctcgtggctattttgggttacatttgcataggagatgccagtgacaactattacagctacatttaaaaagacacacacaaattcatcatcatttgtttaaacctcaacaaagtctcagccttttatcacttccccgttcgattgatgcttcgaaacgaaaacatcttgtttctatggaatgactcactgattggattttcacaagtttaagagtttgtgtgtcaagtgtatgtatgaatgattttttttttgggtggttttgttacgttttgatgtatagaacatatttattatttggtggaatatatataaattttcttt

SEQ ID NO: 27802 - protein, 140 aa, Arabidopsis thaliana
  peptide (1)..(140): Ceres Seq. ID no. 12675010
MADVPGYLRTCLDMGKIAFLAILVSTGIVLQILACALFNNWWPMLSVIMYVLLPMPLLFFGGSDSTSLFNESDNSWINAAKFLTGASAVGSVAIPSILKHAGLIGWGALALDLSSYVVFLVAILGYICIGDASDNYYSYI

SEQ ID NO: 27803 - protein, 127 aa, Arabidopsis thaliana
  peptide (1)..(127): Ceres Seq. ID no. 12675011
MGKIAFLAILVSTGIVLQILACALFNNWWPMLSVIMYVLLPMPLLFFGGSDSTSLFNESDNSWINAAKFLTGASAVGSVAIPSILKHAGLIGWGALALDLSSYVVFLVAILGYICIGDASDNYYSYI

SEQ ID NO: 27804 - protein, 97 aa, Arabidopsis thaliana
  peptide (1)..(97): Ceres Seq. ID no. 12675012
MLSVIMYVLLPMPLLFFGGSDSTSLFNESDNSWINAAKFLTGASAVGSVAIPSILKHAGLIGWGALALDLSSYVVFLVAILGYICIGDASDNYYSYI

SEQ ID NO: 27805 - DNA, 1514 bp, Arabidopsis thaliana
  misc_feature (1)..(1514): Ceres Seq. ID no. 12580052
  misc_feature (1)..(1514): Ortholog of  Ceres SEQ ID NO 13597559 as cited in SEQ ID NO 65274
aaaaacaaaacaaaaatcgaccaaagagtaaccaaattgatatttatctcttctcaaccatggcgatgagacaagccgctaaggcaacgatcagggcctgttcttcctcttcttcttcgggttacttcgctcgacgtcagtttaatgcatcttctggtgatagcaaaaagattgtaggagttttctacaaggccaacgaatacgctaccaagaaccctaacttccctggctgcgtcgagaatgccttaggaatccgtgactggcttgaatcccaaggacatcagtacatcgtcactgatgacaaggaaggccctgattgcgaacttgagaaacatatcccggatcttcacgtcctaatctccactcccttccacccggcgtatgtaactgctgaaagaaccaagaaagccaaaaacttgaagcttctcctcacagctggtattggctcggatcatattgatctccaggcagctgcagctgctggcctgacggttgctgaagtcacgggaagcaacgtggtctcagtggcagaagatgagctcatgagaatcttaatcctcatgcgcaacttcgtaccagggtacaaccaggtcgtcaaaggcgagtggaacgtcgcgggcattgcgtacagagcttatgatcttgaagggaagacgataggaaccgtgggagctggaagaatcggaaagcttttgctgcagcggttgaaaccattcgggtgtaacttgttgtaccatgacaggcttcagatggcaccagagctggagaaagagactggagctaagttcgttgaggatctgaatgaaatgctccctaaatgtgacgttatagtcatcaacatgcctctcacggagaagacaagaggaatgttcaacaaagagttgatagggaaattgaagaaagtcgttttgatagaacaacgcaagaggagccatcatggagaggcaagcagtggtggatgcggtggagagtggacacattggagggtacagcggagacgtttgggacccacagccagctcctaaggaccatccatggcgttacatgcctaaccaggctatgacccctcatacctccggcaccaccattgacgctcagctacggtatgcggcggggacgaaagacatgttggagagatacttcaagggagaagacttccctactgagaattacatcgtcaaggacggtgaacttgctcctcagtaccggtaagcttttgaggaggtgacattgggaagatgatgagaaacgaccccaacgttcaagaaaacaaataaagaagtatttggactttgctaagtcgaatgacttgagtcatcttttggtttagtttttgttattatataagcacaataataataggagggcacttcccctgttctgagagtttgtgaacatattactcagtggtttaaatcacacatatgtatttgtttccccaatcgtaggaactcaatggtttcaaatctcattatataaacataaaaatgaataaaggcatattaaatttgtcc

SEQ ID NO: 27806 - protein, 340 aa, Arabidopsis thaliana
  peptide (1)..(340): Ceres Seq. ID no. 12580053
KQNKNRPKSNQIDIYLFSTMAMRQAAKATIRACSSSSSSGYFARRQFNASSGDSKKIVGVFYKANEYATKNPNFPGCVENALGIRDWLESQGHQYIVTDDKEGPDCELEKHIPDLHVLISTPFHPAYVTAERTKKAKNLKLLLTAGIGSDHIDLQAAAAAGLTVAEVTGSNVVSVAEDELMRILILMRNFVPGYNQVVKGEWNVAGIAYRAYDLEGKTIGTVGAGRIGKLLLQRLKPFGCNLLYHDRLQMAPELEKETGAKFVEDLNEMLPKCDVIVINMPLTEKTRGMFNKELIGKLKKVVLIEQRKRSHHGEASSGGCGGEWTHWRVQRRRLGPTASS

SEQ ID NO: 27807 - protein, 321 aa, Arabidopsis thaliana
  peptide (1)..(321): Ceres Seq. ID no. 12580054
MAMRQAAKATIRACSSSSSSGYFARRQFNASSGDSKKIVGVFYKANEYATKNPNFPGCVENALGIRDWLESQGHQYIVTDDKEGPDCELEKHIPDLHVLISTPFHPAYVTAERTKKAKNLKLLLTAGIGSDHIDLQAAAAAGLTVAEVTGSNVVSVAEDELMRILILMRNFVPGYNQVVKGEWNVAGIAYRAYDLEGKTIGTVGAGRIGKLLLQRLKPFGCNLLYHDRLQMAPELEKETGAKFVEDLNEMLPKCDVIVINMPLTEKTRGMFNKELIGKLKKVVLIEQRKRSHHGEASSGGCGGEWTHWRVQRRRLGPTASS

SEQ ID NO: 27808 - protein, 319 aa, Arabidopsis thaliana
  peptide (1)..(319): Ceres Seq. ID no. 12580055
MRQAAKATIRACSSSSSSGYFARRQFNASSGDSKKIVGVFYKANEYATKNPNFPGCVENALGIRDWLESQGHQYIVTDDKEGPDCELEKHIPDLHVLISTPFHPAYVTAERTKKAKNLKLLLTAGIGSDHIDLQAAAAAGLTVAEVTGSNVVSVAEDELMRILILMRNFVPGYNQVVKGEWNVAGIAYRAYDLEGKTIGTVGAGRIGKLLLQRLKPFGCNLLYHDRLQMAPELEKETGAKFVEDLNEMLPKCDVIVINMPLTEKTRGMFNKELIGKLKKVVLIEQRKRSHHGEASSGGCGGEWTHWRVQRRRLGPTASS

SEQ ID NO: 27809 - DNA, 1159 bp, Arabidopsis thaliana
  misc_feature (1)..(1159): Ceres Seq. ID no. 13490301
  misc_feature (1)..(1159): Ortholog of  Ceres SEQ ID NO 13594671 as cited in SEQ ID NO 51800
  misc_feature (1)..(1159): Ortholog of  Ceres SEQ ID NO 12784099 as cited in SEQ ID NO 66784
actttgatcacttttcaacttcctaaatctcttcacagttactttcgattttccgatttcgtagcttcgaaaatgttctccagcagccaattcgagcctaattccggcttctccggcggcggattcatgtcttctcaaccttctcaagcctacgaatcctcctcctccaccgctaagaatcgtgattttcaaggtcttgttccagtgacggtgaagcaaatcaccgaatgtttccaatccagtggtgaaaaatctggtctcgtcatcaatggaatctcactaacaaacgtttcacttgttggattagtgtgtgacaaagatgaatctaaagtcacagaagttagattcactcttgatgatggaacaggacgaattgactgtaaaagatgggtgagtgaaactttcgacgctagagaaatggagtctgtgcgagatggaacttatgtgcgcctcagtggtcatttgaagacttttcagggcaaaactcagcttcttgttttctctgtgaggcctattatggacttcaatgaggttacttttcactacattgagtgtatacacttctactcccagaactctgaatcacagagacaacaagtcggtgatgtcactcagtcagttaacaccacatttcaaggtggatcaaacacaaaccaggcaacactattgaaccctgtggtttcttctcaaaacaatgatggcaatgggcgcaagaacttggatgatatgattctagactatctaaagcaacctgcttgcactgcaagacaacaggggatacatatcgatgaaattgctcagcagttgaagatcccaaaaaacaagctagagggcgttgttcaatcactggaaggagatggtctaatatactcgacaatcgatgagtatcacttcaagcacgtggagctttgatctatctaatagtcatctagagtttggttaatccgtagatagagtcattagtattgtctggtgatttaaaagatgtttcaatatccagaactattaggatcacgtctagttcacttctgaaactttggtagtgtcatgcttaattctggtgttggattgtttccttgtttctttcaatttggtaagccaacttcaaaagttcaaagttgattttttgtttaatctgaaactatatttggtttaagac

SEQ ID NO: 27810 - protein, 303 aa, Arabidopsis thaliana
  peptide (1)..(303): Ceres Seq. ID no. 13490302
TLITFQLPKSLHSYFRFSDFVASKMFSSSQFEPNSGFSGGGFMSSQPSQAYESSSSTAKNRDFQGLVPVTVKQITECFQSSGEKSGLVINGISLTNVSLVGLVCDKDESKVTEVRFTLDDGTGRIDCKRWVSETFDAREMESVRDGTYVRLSGHLKTFQGKTQLLVFSVRPIMDFNEVTFHYIECIHFYSQNSESQRQQVGDVTQSVNTTFQGGSNTNQATLLNPVVSSQNNDGNGRKNLDDMILDYLKQPACTARQQGIHIDEIAQQLKIPKNKLEGVVQSLEGDGLIYSTIDEYHFKHVEL

SEQ ID NO: 27811 - protein, 279 aa, Arabidopsis thaliana
  peptide (1)..(279): Ceres Seq. ID no. 13490303
MFSSSQFEPNSGFSGGGFMSSQPSQAYESSSSTAKNRDFQGLVPVTVKQITECFQSSGEKSGLVINGISLTNVSLVGLVCDKDESKVTEVRFTLDDGTGRIDCKRWVSETFDAREMESVRDGTYVRLSGHLKTFQGKTQLLVFSVRPIMDFNEVTFHYIECIHFYSQNSESQRQQVGDVTQSVNTTFQGGSNTNQATLLNPVVSSQNNDGNGRKNLDDMILDYLKQPACTARQQGIHIDEIAQQLKIPKNKLEGVVQSLEGDGLIYSTIDEYHFKHVEL

SEQ ID NO: 27812 - protein, 261 aa, Arabidopsis thaliana
  peptide (1)..(261): Ceres Seq. ID no. 13490304
MSSQPSQAYESSSSTAKNRDFQGLVPVTVKQITECFQSSGEKSGLVINGISLTNVSLVGLVCDKDESKVTEVRFTLDDGTGRIDCKRWVSETFDAREMESVRDGTYVRLSGHLKTFQGKTQLLVFSVRPIMDFNEVTFHYIECIHFYSQNSESQRQQVGDVTQSVNTTFQGGSNTNQATLLNPVVSSQNNDGNGRKNLDDMILDYLKQPACTARQQGIHIDEIAQQLKIPKNKLEGVVQSLEGDGLIYSTIDEYHFKHVEL

SEQ ID NO: 27813 - DNA, 604 bp, Arabidopsis thaliana
  misc_feature (1)..(604): Ceres Seq. ID no. 12395010
  misc_feature (1)..(604): Ortholog of  Ceres SEQ ID NO 12329459 as cited in SEQ ID NO 20533
gaagtaacatactttttacaatcacatttttgaagaactttcattccataaatctacagatctttgtgtatcaagtaaagagatgtcaggaagaggaaagggaggaaaaggattgggaaagggaggagcgaagaggcacaggaaggttctgagggataacattcaaggaatcaccaagcctgctattcgtcgtcttgctcgtagaggtggtgtcaagcgtatcagtggtctcatctactaagagaccagaggtgtcctcaagatcttcctcgagaatgttatccgtgacgccgttacctacactgagcacgccaggaggaagacggtgaccgccatggatgttatctacgctttgaagaggcaaggtcgtactctctacggtttcggaggttaatccgatttgggggattagggtttatgcaagtttggggatttcttcttgtttctgagatccgtgttaaatggtttgaattagtcaaaagtaaattcaggagttagtttttgtttctcgtttttcgttgttgttagccaatgtgatgtagtagttaattatcttttgcaagctttgtgctaagaaaatctaatgagaatgatccatttgctt

SEQ ID NO: 27814 - protein, 52 aa, Arabidopsis thaliana
  peptide (1)..(52): Ceres Seq. ID no. 12395011
MSGRGKGGKGLGKGGAKRHRKVLRDNIQGITKPAIRRLARRGGVKRISGLIY

SEQ ID NO: 27815 - protein, 49 aa, Arabidopsis thaliana
  peptide (1)..(49): Ceres Seq. ID no. 12395012
SNILFTITFLKNFHSINLQIFVYQVKRCQEEEREEKDWEREERRGTGRF

SEQ ID NO: 27816 - DNA, 1204 bp, Arabidopsis thaliana
  misc_feature (1)..(1204): Ceres Seq. ID no. 12384946
  misc_feature (1)..(1204): Ortholog of  Ceres SEQ ID NO 15177091 as cited in SEQ ID NO 52140
  misc_feature (1)..(1204): Ortholog of  Ceres SEQ ID NO 13597324 as cited in SEQ ID NO 64842
  misc_feature (1)..(1204): Ortholog of  Ceres SEQ ID NO 13658672 as cited in SEQ ID NO 66627
gtctcctttccagaacaatctaacgctttctcgaacatcttcttcttcttctttctcgaaattatttttccagtgatcaatttcttctcttctagatttttacaggaactaattttctgctctgaggtatcagatgagtagccgatggaatcgtacgatctacgttgggaatttgcctggagatattcgcaagtgtgaggttgaagatctcttctacaagtatggaccaattgtggacattgatttgaagattccaccgagacctcctggttatgcctttgtcgagtttgaagatcctcgtgatgcagacgatgcaatttatggacgtgatggttatgattttgatgggtgtcgacttcgggttgagattgcacatggtggtcgtagattttcaccatcagttgataggtacagcagcagctacagtgcgagccgtgcaccttcaagacgctctgactatcgcgtgcttgtgaccggattaccgccttctgcttcgtggcaggaccttaaggatcacatgcgcaaagctggagatgtctgcttctctgaagttttccctgaccgtaaaggcatgtctggggttgtggattatagcaactatgatgatatgaagtacgcaataaggaaacttgatgccactgaatttcgaaatgctttctctagtgcttatatacgggtgagggaatatgagtcgaggagtgtgagtcgaagcccagatgattctaaaagctatagaagcaggagtcggagccgtggtccaagctgtagctatagtagcaagagcaggagtgtgtcacctgctagatccatttccccgcgttcacggccccttagtcgttctcgctcgccatacagctctgtctcaaggtcccaatcaagatcaaaatcaagatcaagatcaagatcgaattctccagtttcacctgtgatatctggatgaaaatgaaaactggccactggctgtacccgaatcgtctcaagcttctcaggctccactgctaatagaatttgattccgatttgggattattatactggtcttcttgtatgggacgaccaatatgtctttctagttttagttgtgaacctggaattggtctgttattgtgtcattaaaaagccggaaactctgtctcggctgcataataaagttcatcagacgttgtgttgggtgtggtgaggtttttccatacatatacatttac

SEQ ID NO: 27817 - protein, 268 aa, Arabidopsis thaliana
  peptide (1)..(268): Ceres Seq. ID no. 12384947
MSSRWNRTIYVGNLPGDIRKCEVEDLFYKYGPIVDIDLKIPPRPPGYAFVEFEDPRDADDAIYGRDGYDFDGCRLRVEIAHGGRRFSPSVDRYSSSYSASRAPSRRSDYRVLVTGLPPSASWQDLKDHMRKAGDVCFSEVFPDRKGMSGVVDYSNYDDMKYAIRKLDATEFRNAFSSAYIRVREYESRSVSRSPDDSKSYRSRSRSRGPSCSYSSKSRSVSPARSISPRSRPLSRSRSPYSSVSRSQSRSKSRSRSRSNSPVSPVISG

SEQ ID NO: 27818 - protein, 140 aa, Arabidopsis thaliana
  peptide (1)..(140): Ceres Seq. ID no. 12384948
MRKAGDVCFSEVFPDRKGMSGVVDYSNYDDMKYAIRKLDATEFRNAFSSAYIRVREYESRSVSRSPDDSKSYRSRSRSRGPSCSYSSKSRSVSPARSISPRSRPLSRSRSPYSSVSRSQSRSKSRSRSRSNSPVSPVISG

SEQ ID NO: 27819 - DNA, 1164 bp, Arabidopsis thaliana
  misc_feature (1)..(1164): Ceres Seq. ID no. 12421667
  misc_feature (1)..(1164): Ortholog of  Ceres SEQ ID NO 13595668 as cited in SEQ ID NO 56792
gaagaagatcgatcaatcaatcatcaaactctctgtgtgccacatgcattactactgttgacttgttcaataaaggtaaagtaagatcaatccggcgaatcttctttcgttttccggcaccgatctcggtggatctccgattcacatggcggcggataatgcttatctgatgcagtttgttgacgaaacctctttttacaaccgaatcgttctgagtcatcttttgccggcgaatctatgggaacccttacctcattttctccagacatggctccgaaattacctcgccggaaccctactatacttcatctccggtttcctctggtgcttctacatctattaccttaaaatcaacgtttaccttcccaaagatgcaattcctacaataaaggctatgcgtttgcaaatgtttgtggcaatgaaggctatgcatggtacactctttcttccaactgtctccgagagtatgattgaacgtggttggaccaaatgttttgctagcataggcgaatttcggttggattctgtattttgtttacatcgccatctatcttgttttcgttgagtttggtatttattggatgcacagagagcttcatgacattaagcctctctataagtatctccatgccacccatcatatctacaacaagcagaatacactctctccatttgccgggcttgcatttcacccagtagacgggatacttcaggctgtaccgcatgtgatagcgctgtttatagtgccaattcatttcacaactcatataggtcttttgttcatggaagcgatatggacggcgaacatccatgactgcatccatggcaacatctggccagtaatgggtgcaggataccatacgatacaccacacgacatacaagcataactatggtcattataccatatggatggattggatgtttggctctcttagggatcctctcttagaagaagatgacaacaaagacagcttcaagaaagcagagtgagaatgcccacttgggttttgttcttctgttttgtcttgtgttgttgttgttcaaagtttcagcctttcttgttctttttcttcttcttcttattcatgtgtctctctcaacctttccaattatattgttacaaacatttgctgtctagtttaaaacatgtaaatgtttgatg

SEQ ID NO: 27820 - protein, 139 aa, Arabidopsis thaliana
  peptide (1)..(139): Ceres Seq. ID no. 12421668
MAADNAYLMQFVDETSFYNRIVLSHLLPANLWEPLPHFLQTWLRNYLAGTLLYFISGFLWCFYIYYLKINVYLPKDAIPTIKAMRLQMFVAMKAMHGTLFLPTVSESMIERGWTKCFASIGEFRLDSVFCLHRHLSCFR

SEQ ID NO: 27821 - protein, 136 aa, Arabidopsis thaliana
  peptide (1)..(136): Ceres Seq. ID no. 12421669
MHRELHDIKPLYKYLHATHHIYNKQNTLSPFAGLAFHPVDGILQAVPHVIALFIVPIHFTTHIGLLFMEAIWTANIHDCIHGNIWPVMGAGYHTIHHTTYKHNYGHYTIWMDWMFGSLRDPLLEEDDNKDSFKKAE

SEQ ID NO: 27822 - protein, 131 aa, Arabidopsis thaliana
  peptide (1)..(131): Ceres Seq. ID no. 12421670
MQFVDETSFYNRIVLSHLLPANLWEPLPHFLQTWLRNYLAGTLLYFISGFLWCFYIYYLKINVYLPKDAIPTIKAMRLQMFVAMKAMHGTLFLPTVSESMIERGWTKCFASIGEFRLDSVFCLHRHLSCFR

SEQ ID NO: 27823 - DNA, 1598 bp, Arabidopsis thaliana
  misc_feature (1)..(1598): Ceres Seq. ID no. 12738448
  misc_feature (1)..(1598): Ortholog of  Ceres SEQ ID NO 15177320 as cited in SEQ ID NO 52645
  misc_feature (1)..(1598): Ortholog of  Ceres SEQ ID NO 15171359 as cited in SEQ ID NO 57279
  misc_feature (1)..(1598): Ortholog of  Ceres SEQ ID NO 14313840 as cited in SEQ ID NO 59568
  misc_feature (1)..(1598): Ortholog of  Ceres SEQ ID NO 13662245 as cited in SEQ ID NO 62708
  misc_feature (1)..(1598): Ortholog of  Ceres SEQ ID NO 14314084 as cited in SEQ ID NO 63256
  misc_feature (1)..(1598): Ortholog of  Ceres SEQ ID NO 15169466 as cited in SEQ ID NO 66135
  misc_feature (1)..(1598): Ortholog of  Ceres SEQ ID NO 14303091 as cited in SEQ ID NO 66369
actcgccactttcctcgagaaaacgaaaaaaaaagatggtaggaagaagaaaagctttactcttttctctctgtttcttcttcctctctcttccttccttctcttcccttccatccttccaaaccctattccccaattctcattcccttccttgtgcttctcccgtctccttccaacccgactccgactccgagtcactgctagaatccgaatttgaatccggatccgactccgagtcttcttcttccattactctaaacctcgaccacatcgatgctctctcctccaacaaaacacctcaagagctattcagctcccgtctccaacgtgactcccggcgcgtgagatcaatcgccacactcgccgctcaaatccccggaagaaacgtgactcacgcgccacgacccggtggattcagcagctcagtcgtctctggtctctctcaaggaagcggtgaatacttcacgcgcctcggtgtcggtactccggcgagatatgtttacatggtgctcgacaccggcagcgacatcgtctggctacaatgcgctccttgtcggagatgttactctcaatccgacccgatattcgacccgagaaaatccaagacctatgccacaatcccctgttcttcacctcactgccgccgattagactccgccggatgcaacacccgtcgtaagacttgtctctaccaagtctcttacggagatggttctttcaccgtcggcgatttctccaccgaaacgctaactttccggcgaaatcgcgttaaaggcgttgctctcggatgtggccacgacaacgaaggtctcttcgtcggagccgccggtttattaggactcggtaaaggtaaattatcgttccccggtcaaaccggtcaccggtttaatcagaaattctcttactgtttagtcgacagatccgcttcttcgaaaccttcctcggtcgtcttcggaaacgccgccgtttcacgaatcgcgagattcacgccacttttgtcaaacccaaaactcgacactttctactacgtcgggcttctgggaattagcgtcggagggacacgtgtccccggcgtaacggcttctctttttaaacttgaccagatcggtaacggtggagttattatcgattcgggtacgtctgtgacccggttgatccgaccagcttatattgctatgagagacgcgttccgggtcggagctaagacattgaaaagagctccgaatttctcactcttcgacacgtgtttcgatctctccaatatgaacgaggttaaagtaccgacggtggttttacatttccgtagagctgacgtatcacttccggcgacgaattacctgatccctgtggataccaacggcaagttctgttttgcgtttgccggtacgatgggcggactatccataattggaaatatccagcaacagggtttccgggttgtatacgacttagcgagttcccgggtcgggtttgctccaggaggatgcgcttaataattagatctgaccggagccggtacggataatgtacttttgttttctcaatttaatgcttagacttgtttttttttcttttataaatcggacaagtgaatcttt

SEQ ID NO: 27824 - protein, 496 aa, Arabidopsis thaliana
  peptide (1)..(496): Ceres Seq. ID no. 12738449
SPLSSRKRKKKMVGRRKALLFSLCFFFLSLPSFSSLPSFQTLFPNSHSLPCASPVSFQPDSDSESLLESEFESGSDSESSSSITLNLDHIDALSSNKTPQELFSSRLQRDSRRVRSIATLAAQIPGRNVTHAPRPGGFSSSVVSGLSQGSGEYFTRLGVGTPARYVYMVLDTGSDIVWLQCAPCRRCYSQSDPIFDPRKSKTYATIPCSSPHCRRLDSAGCNTRRKTCLYQVSYGDGSFTVGDFSTETLTFRRNRVKGVALGCGHDNEGLFVGAAGLLGLGKGKLSFPGQTGHRFNQKFSYCLVDRSASSKPSSVVFGNAAVSRIARFTPLLSNPKLDTFYYVGLLGISVGGTRVPGVTASLFKLDQIGNGGVIIDSGTSVTRLIRPAYIAMRDAFRVGAKTLKRAPNFSLFDTCFDLSNMNEVKVPTVVLHFRRADVSLPATNYLIPVDTNGKFCFAFAGTMGGLSIIGNIQQQGFRVVYDLASSRVGFAPGGCA

SEQ ID NO: 27825 - protein, 485 aa, Arabidopsis thaliana
  peptide (1)..(485): Ceres Seq. ID no. 12738450
MVGRRKALLFSLCFFFLSLPSFSSLPSFQTLFPNSHSLPCASPVSFQPDSDSESLLESEFESGSDSESSSSITLNLDHIDALSSNKTPQELFSSRLQRDSRRVRSIATLAAQIPGRNVTHAPRPGGFSSSVVSGLSQGSGEYFTRLGVGTPARYVYMVLDTGSDIVWLQCAPCRRCYSQSDPIFDPRKSKTYATIPCSSPHCRRLDSAGCNTRRKTCLYQVSYGDGSFTVGDFSTETLTFRRNRVKGVALGCGHDNEGLFVGAAGLLGLGKGKLSFPGQTGHRFNQKFSYCLVDRSASSKPSSVVFGNAAVSRIARFTPLLSNPKLDTFYYVGLLGISVGGTRVPGVTASLFKLDQIGNGGVIIDSGTSVTRLIRPAYIAMRDAFRVGAKTLKRAPNFSLFDTCFDLSNMNEVKVPTVVLHFRRADVSLPATNYLIPVDTNGKFCFAFAGTMGGLSIIGNIQQQGFRVVYDLASSRVGFAPGGCA

SEQ ID NO: 27826 - protein, 329 aa, Arabidopsis thaliana
  peptide (1)..(329): Ceres Seq. ID no. 12738451
MVLDTGSDIVWLQCAPCRRCYSQSDPIFDPRKSKTYATIPCSSPHCRRLDSAGCNTRRKTCLYQVSYGDGSFTVGDFSTETLTFRRNRVKGVALGCGHDNEGLFVGAAGLLGLGKGKLSFPGQTGHRFNQKFSYCLVDRSASSKPSSVVFGNAAVSRIARFTPLLSNPKLDTFYYVGLLGISVGGTRVPGVTASLFKLDQIGNGGVIIDSGTSVTRLIRPAYIAMRDAFRVGAKTLKRAPNFSLFDTCFDLSNMNEVKVPTVVLHFRRADVSLPATNYLIPVDTNGKFCFAFAGTMGGLSIIGNIQQQGFRVVYDLASSRVGFAPGGCA

SEQ ID NO: 27827 - DNA, 1496 bp, Arabidopsis thaliana
  misc_feature (1)..(1496): Ceres Seq. ID no. 12421656
  misc_feature (1)..(1496): Ortholog of  Ceres SEQ ID NO 14308061 as cited in SEQ ID NO 55155
  misc_feature (1)..(1496): Ortholog of  Ceres SEQ ID NO 13654238 as cited in SEQ ID NO 67874
acaaacaaaaaagctttaatttttggggacaaagtttttatcttttcgttgtttggaatttgggggaggaagaaggaaaggtttaaggatagggtcgtgcgtgtcaacgagaggtgctgctggacgtgaagcctcctcctccgcatcggcgaggaggcttccgtcccagcaccacctcagcggtagccttagctcttctggctacggcggagaaccgtcggatcaatctgatatcggcggtgcgaagatgaaagggcttttcaagtctaagccacgcactcctgctgaccttgttcgacaaacccgcgagctccttctcttctccgatcgatctacctctttgcctgacctccgagattccaaacgcgacgaaaagatggcggaattaagccggaatatccgtgacatgaagtcgattctctacgggaacagcgaagcagagcctgtggcagaagcttgtgcacagttgactcaagaattctttaaagaggatactctacgtctcttgattacttgtctccctaaacttaacttggagacgaggaaggatgctacacaagttgttgcaaatctacagaggcaacaggttaattcacggttgattgcttctgattatttagaagccaacattgatctcatggatgttttgattgaaggcttcgagaacacagacatggctttacactatggtgctatgtttagggagtgtatccgtcatcagattgtggctaaatatgttttggagtctgaccatgtgaagaaattctttgattacatacagcttccaaatttcgacattgctgccgatgctgctgctacttttaaggaactgctgacaaggcataagtctactgttgccgagtttctcaccaagaatgaagactggtttttcgcagactacaactcaaagcttcttgaatcaagtaattatataaccagacggcaagctattaagttgttgggtgatatattattggatcgatcaaattcagctgtgatgacgaaatatgtgagctcgagggataacttgaggattctcatgaatcttctaagagagtcaagcaagagtatccaaatagaagcattccatgtctttaagctgtttgcagcgaaccaaaacaagcctgcggatatagtcaacattctggtggccaacagaagcaagcttctgagattgttggctgatttgaaaccagacaaagaggatgagaggtttgaagcagacaaaagtcaggttttgagagaaatcgcagcccttgaacctcgagatcttgcttgaaccaactaatgcaattcatccttccttcccttttaaaacactcgaaaagacatttttgaagcatcttgttgtttttttacattaggtaaccaatcttcctctcactttctcaccacacacacacacacacacacacacatacacatacgagatatctattcgatatatgtattcatatgtacactacttcactgtcgatgaaataaaatggtttgcc

SEQ ID NO: 27828 - protein, 343 aa, Arabidopsis thaliana
  peptide (1)..(343): Ceres Seq. ID no. 12421657
MKGLFKSKPRTPADLVRQTRELLLFSDRSTSLPDLRDSKRDEKMAELSRNIRDMKSILYGNSEAEPVAEACAQLTQEFFKEDTLRLLITCLPKLNLETRKDATQVVANLQRQQVNSRLIASDYLEANIDLMDVLIEGFENTDMALHYGAMFRECIRHQIVAKYVLESDHVKKFFDYIQLPNFDIAADAAATFKELLTRHKSTVAEFLTKNEDWFFADYNSKLLESSNYITRRQAIKLLGDILLDRSNSAVMTKYVSSRDNLRILMNLLRESSKSIQIEAFHVFKLFAANQNKPADIVNILVANRSKLLRLLADLKPDKEDERFEADKSQVLREIAALEPRDLA

SEQ ID NO: 27829 - protein, 300 aa, Arabidopsis thaliana
  peptide (1)..(300): Ceres Seq. ID no. 12421658
MAELSRNIRDMKSILYGNSEAEPVAEACAQLTQEFFKEDTLRLLITCLPKLNLETRKDATQVVANLQRQQVNSRLIASDYLEANIDLMDVLIEGFENTDMALHYGAMFRECIRHQIVAKYVLESDHVKKFFDYIQLPNFDIAADAAATFKELLTRHKSTVAEFLTKNEDWFFADYNSKLLESSNYITRRQAIKLLGDILLDRSNSAVMTKYVSSRDNLRILMNLLRESSKSIQIEAFHVFKLFAANQNKPADIVNILVANRSKLLRLLADLKPDKEDERFEADKSQVLREIAALEPRDLA

SEQ ID NO: 27830 - protein, 290 aa, Arabidopsis thaliana
  peptide (1)..(290): Ceres Seq. ID no. 12421659
MKSILYGNSEAEPVAEACAQLTQEFFKEDTLRLLITCLPKLNLETRKDATQVVANLQRQQVNSRLIASDYLEANIDLMDVLIEGFENTDMALHYGAMFRECIRHQIVAKYVLESDHVKKFFDYIQLPNFDIAADAAATFKELLTRHKSTVAEFLTKNEDWFFADYNSKLLESSNYITRRQAIKLLGDILLDRSNSAVMTKYVSSRDNLRILMNLLRESSKSIQIEAFHVFKLFAANQNKPADIVNILVANRSKLLRLLADLKPDKEDERFEADKSQVLREIAALEPRDLA

SEQ ID NO: 27831 - DNA, 1367 bp, Arabidopsis thaliana
  misc_feature (1)..(1367): Ceres Seq. ID no. 12333764
  misc_feature (1)..(1367): Ortholog of  Ceres SEQ ID NO 14306667 as cited in SEQ ID NO 52925
  misc_feature (1)..(1367): Ortholog of  Ceres SEQ ID NO 15177522 as cited in SEQ ID NO 0
aaaatcgaagacactgtgacactctagcaccttcagttccgtacaacaatggctctccaagctgcctattctcttcttccttctaccatttcaatccaaaaagagggcaaattcaatgcttctctaaaggagacgacttttactggttcttcattttcaaaccatcttagagctgaaaagatatccaccctgttgaccatcaaggaacagagaagacagaaaccgcgattttccaccggtattcgtgcacagacagttacagccacgccgccggcaaacgaagcatcgccggagcaaaagaagactgagagaaaaggcactgcagtgatcactggagcttcgtctggtttaggtttagctacggccaaagctttagcagacacagggaaatggcatgtgatcatggcttgcaggaactttctcaaggccgagaaggcagcgagatctgttggaatgtccaaggaagattacacagtgatgcatcttgatcttgcttcgcttgaaagcgtgaagcaattcgttgaaaatttccggagaacagaacaaccactcgatgttcttgtctgcaatgccgcggtttaccaaccaactgctaaagagccttcttttacagctgaaggctttgagataagcgttggaaccaaccatctcggtcactttcttctctcaagattgcttcttgatgacctgaaaaaatctgattatccatcaaaacgtatgatcatcgtaggatctataacaggaaacacaaatactttggctgggaatgtaccgccaaaggcaaaccttggagacctaagaggcttagcgtcaggattgaatgggcaaaacagttcaatgatagatggaggagagtttgatggagcaaaggcttacaaagacagcaaagtatgcaatatgctgacaatgcaggagcttcacagacgttaccacgaggaaacaggagtcacgtttgcttctctttaccctggttgcatcgctacaacagggttgttcagagaacacataccgctgtttcggcttctttttccgccttttcaaaagtatatcaccaaaggttacgtatctgaagaggaagctggcaaaagactagcacaggttgtgagtgaccctagtcttgggaagtcaggagtgtattggagttggaacaataactcgtcttcgtttgagaatcagctttctaaagaagcaagtgatgcggagaaggcaaagaaactgtgggaggttagcgagaagcttgttggtttggcatgaactcaagatttttgatatgcaaattcatatagattactatgttttgtgacatgtacaataagtatgatcaatcagactaatcattcgaatgcatttcaatagagttaatcatc

SEQ ID NO: 27832 - protein, 401 aa, Arabidopsis thaliana
  peptide (1)..(401): Ceres Seq. ID no. 12333765
MALQAAYSLLPSTISIQKEGKFNASLKETTFTGSSFSNHLRAEKISTLLTIKEQRRQKPRFSTGIRAQTVTATPPANEASPEQKKTERKGTAVITGASSGLGLATAKALADTGKWHVIMACRNFLKAEKAARSVGMSKEDYTVMHLDLASLESVKQFVENFRRTEQPLDVLVCNAAVYQPTAKEPSFTAEGFEISVGTNHLGHFLLSRLLLDDLKKSDYPSKRMIIVGSITGNTNTLAGNVPPKANLGDLRGLASGLNGQNSSMIDGGEFDGAKAYKDSKVCNMLTMQELHRRYHEETGVTFASLYPGCIATTGLFREHIPLFRLLFPPFQKYITKGYVSEEEAGKRLAQVVSDPSLGKSGVYWSWNNNSSSFENQLSKEASDAEKAKKLWEVSEKLVGLA

SEQ ID NO: 27833 - protein, 283 aa, Arabidopsis thaliana
  peptide (1)..(283): Ceres Seq. ID no. 12333766
MACRNFLKAEKAARSVGMSKEDYTVMHLDLASLESVKQFVENFRRTEQPLDVLVCNAAVYQPTAKEPSFTAEGFEISVGTNHLGHFLLSRLLLDDLKKSDYPSKRMIIVGSITGNTNTLAGNVPPKANLGDLRGLASGLNGQNSSMIDGGEFDGAKAYKDSKVCNMLTMQELHRRYHEETGVTFASLYPGCIATTGLFREHIPLFRLLFPPFQKYITKGYVSEEEAGKRLAQVVSDPSLGKSGVYWSWNNNSSSFENQLSKEASDAEKAKKLWEVSEKLVGLA

SEQ ID NO: 27834 - protein, 266 aa, Arabidopsis thaliana
  peptide (1)..(266): Ceres Seq. ID no. 12333767
MSKEDYTVMHLDLASLESVKQFVENFRRTEQPLDVLVCNAAVYQPTAKEPSFTAEGFEISVGTNHLGHFLLSRLLLDDLKKSDYPSKRMIIVGSITGNTNTLAGNVPPKANLGDLRGLASGLNGQNSSMIDGGEFDGAKAYKDSKVCNMLTMQELHRRYHEETGVTFASLYPGCIATTGLFREHIPLFRLLFPPFQKYITKGYVSEEEAGKRLAQVVSDPSLGKSGVYWSWNNNSSSFENQLSKEASDAEKAKKLWEVSEKLVGLA

SEQ ID NO: 27835 - DNA, 1148 bp, Arabidopsis thaliana
  misc_feature (1)..(1148): Ceres Seq. ID no. 13497523
  misc_feature (1)..(1148): Ortholog of  Ceres SEQ ID NO 14316532 as cited in SEQ ID NO 57093
  misc_feature (1)..(1148): Ortholog of  Ceres SEQ ID NO 14301482 as cited in SEQ ID NO 63355
actatctatttcttctttcatcatcatcatcatcatcatcatcactctctcttcttcttctctctattccatggctttagtacgtgaacgtcgtcagctaaatctccgtcttcctcttcctccaatctccgaccgccgcttctccacctcttcctcctcagccaccaccaccaccgtcgctggctgtaacggaatctccgcttgtgatctcgagaaactcaacgttctcggatgcggaaacggcgggattgtttacaaagtccgtcataaaaccacatcggagatctacgctttgaaaacagttaacggcgacatggatccgattttcacaagacagttgatgcgagagatggagattctccgacgtacagattcaccgtacgtcgttaaatgtcacggaatcttcgagaaacctgtcgtcggtgaagtatcgattctaatggagtatatggacggcggaaccctagaatcactacgcggcggtgtaacggagcaaaaactcgccggattcgctaaacagatcttaaaaggattaagctatttacacgctcttaagatcgttcatcgtgatataaaacccgcgaatcttcttctcaattcgaaaaacgaagttaaaatcgccgatttcggagttagtaagatattagtccgatcattagattcgtgtaattcgtatgttggtacttgtgcttatatgagtccggagaggtttgattcggaatcttccggtggaagctctgatatctacgccggagatatctggagttttggattgatgatgcttgagcttctcgttggtcattttccgttgcttccgccgggacagagacctgattgggcaacgttgatgtgcgcggtgtgttttggagaaccgccgcgagcgccggagggttgttctgaagagtttaggagcttcgttgagtgttgtctccgtaaagattcgagtaagcgatggacggcgccgcagcttcttgctcatccttttctccgggaagatctttgattcgattccttttgtaacagaatctggaatcttaaaagttggaatattagatttgaaattattttaatttttgtagagttttctggagatatttatgatcgtgatttttgtacatactgtataatatactccagaatgttagggc

SEQ ID NO: 27836 - protein, 333 aa, Arabidopsis thaliana
  peptide (1)..(333): Ceres Seq. ID no. 13497524
LSISSFIIIIIIIITLSSSSLYSMALVRERRQLNLRLPLPPISDRRFSTSSSSATTTTVAGCNGISACDLEKLNVLGCGNGGIVYKVRHKTTSEIYALKTVNGDMDPIFTRQLMREMEILRRTDSPYVVKCHGIFEKPVVGEVSILMEYMDGGTLESLRGGVTEQKLAGFAKQILKGLSYLHALKIVHRDIKPANLLLNSKNEVKIADFGVSKILVRSLDSCNSYVGTCAYMSPERFDSESSGGSSDIYAGDIWSFGLMMLELLVGHFPLLPPGQRPDWATLMCAVCFGEPPRAPEGCSEEFRSFVECCLRKDSSKRWTAPQLLAHPFLREDL

SEQ ID NO: 27837 - protein, 310 aa, Arabidopsis thaliana
  peptide (1)..(310): Ceres Seq. ID no. 13497525
MALVRERRQLNLRLPLPPISDRRFSTSSSSATTTTVAGCNGISACDLEKLNVLGCGNGGIVYKVRHKTTSEIYALKTVNGDMDPIFTRQLMREMEILRRTDSPYVVKCHGIFEKPVVGEVSILMEYMDGGTLESLRGGVTEQKLAGFAKQILKGLSYLHALKIVHRDIKPANLLLNSKNEVKIADFGVSKILVRSLDSCNSYVGTCAYMSPERFDSESSGGSSDIYAGDIWSFGLMMLELLVGHFPLLPPGQRPDWATLMCAVCFGEPPRAPEGCSEEFRSFVECCLRKDSSKRWTAPQLLAHPFLREDL

SEQ ID NO: 27838 - protein, 229 aa, Arabidopsis thaliana
  peptide (1)..(229): Ceres Seq. ID no. 13497526
MDPIFTRQLMREMEILRRTDSPYVVKCHGIFEKPVVGEVSILMEYMDGGTLESLRGGVTEQKLAGFAKQILKGLSYLHALKIVHRDIKPANLLLNSKNEVKIADFGVSKILVRSLDSCNSYVGTCAYMSPERFDSESSGGSSDIYAGDIWSFGLMMLELLVGHFPLLPPGQRPDWATLMCAVCFGEPPRAPEGCSEEFRSFVECCLRKDSSKRWTAPQLLAHPFLREDL

SEQ ID NO: 27839 - DNA, 1266 bp, Arabidopsis thaliana
  misc_feature (1)..(1266): Ceres Seq. ID no. 12327432
  misc_feature (1)..(1266): Ortholog of  Ceres SEQ ID NO 15170595 as cited in SEQ ID NO 57510
  misc_feature (1)..(1266): Ortholog of  Ceres SEQ ID NO 13655218 as cited in SEQ ID NO 68872
gtttctctctacagttttttgtgtttatcgtatgtttcacacagtacacgcttcagtgggagttgttgggtgatcggtccgaggcgacatacaagatgaccggaaactcttttaactcgatgaaagatttcctgaagcagacaggcggctatgcggtaatagacggagggcttgcaacggagttcgagagacatggagcagatctcaacgatcctctctggagcgccaaatgccttgtcacctctcctcacctcattcacaccgtgcatctcgattaccttgaagctggtgctgatatcatctccagcgcttcttatcaggccacgattcaggggtttgaagcaaagggattttctagagaagagagcgaatctttgcttaaaaagagcgtagaaatagcgactgaagctcggaactcgtattatgacaaatgcggaactagctcttccatggatgataagattctcaaaaagcgccctatattagttgcagcatcagttggtagctacggtgcatacttggctgatgggtctgaatacagtggaatctatggtgattcgatcacgctggaaaagctgaaggattttcaccgcagacgactccaagttctggcggaatctggtgctgatttaatagcatttgagaccattccaaacaagatagaggctcaggcatttgctgatctattagaagagggagatgtgaagattcctgggtggttttcattcaactcaaaggatggcgtaaacgtggttagcggggattccatcaaggagtgtatctccatagctgaaaattgtgagaaagtagtggcggttggaatcaactgtacccctccaagattcatagaggggctagttttggagatagaaaaggtgacaagcaagcccatactagtgtacccaaacagcggagaaagctatgatgctgatcggaaggagtgggtggaaaacaccggagttggggatgaagactttgtatcatacgtagagaaatggatggatgcaggagtgtctctcctgggaggttgctgccgcacaacaccaaccaccatcagagccatccacaagagactcgtcaaccgcagatctctttagcattcaacttcactctcttctatgaatctctagaaccttggcaatagatttctaccaaaaacatgaatgtttgtcttccctttgccaattacaaatctaatttcaaggataggcgtgactgcatttaagcttggatgttaatttgaaagttttcatcttgcatgggaag

SEQ ID NO: 27840 - protein, 364 aa, Arabidopsis thaliana
  peptide (1)..(364): Ceres Seq. ID no. 12327433
FSLQFFVFIVCFTQYTLQWELLGDRSEATYKMTGNSFNSMKDFLKQTGGYAVIDGGLATEFERHGADLNDPLWSAKCLVTSPHLIHTVHLDYLEAGADIISSASYQATIQGFEAKGFSREESESLLKKSVEIATEARNSYYDKCGTSSSMDDKILKKRPILVAASVGSYGAYLADGSEYSGIYGDSITLEKLKDFHRRRLQVLAESGADLIAFETIPNKIEAQAFADLLEEGDVKIPGWFSFNSKDGVNVVSGDSIKECISIAENCEKVVAVGINCTPPRFIEGLVLEIEKVTSKPILVYPNSGESYDADRKEWVENTGVGDEDFVSYVEKWMDAGVSLLGGCCRTTPTTIRAIHKRLVNRRSL

SEQ ID NO: 27841 - protein, 333 aa, Arabidopsis thaliana
  peptide (1)..(333): Ceres Seq. ID no. 12327434
MTGNSFNSMKDFLKQTGGYAVIDGGLATEFERHGADLNDPLWSAKCLVTSPHLIHTVHLDYLEAGADIISSASYQATIQGFEAKGFSREESESLLKKSVEIATEARNSYYDKCGTSSSMDDKILKKRPILVAASVGSYGAYLADGSEYSGIYGDSITLEKLKDFHRRRLQVLAESGADLIAFETIPNKIEAQAFADLLEEGDVKIPGWFSFNSKDGVNVVSGDSIKECISIAENCEKVVAVGINCTPPRFIEGLVLEIEKVTSKPILVYPNSGESYDADRKEWVENTGVGDEDFVSYVEKWMDAGVSLLGGCCRTTPTTIRAIHKRLVNRRSL

SEQ ID NO: 27842 - protein, 325 aa, Arabidopsis thaliana
  peptide (1)..(325): Ceres Seq. ID no. 12327435
MKDFLKQTGGYAVIDGGLATEFERHGADLNDPLWSAKCLVTSPHLIHTVHLDYLEAGADIISSASYQATIQGFEAKGFSREESESLLKKSVEIATEARNSYYDKCGTSSSMDDKILKKRPILVAASVGSYGAYLADGSEYSGIYGDSITLEKLKDFHRRRLQVLAESGADLIAFETIPNKIEAQAFADLLEEGDVKIPGWFSFNSKDGVNVVSGDSIKECISIAENCEKVVAVGINCTPPRFIEGLVLEIEKVTSKPILVYPNSGESYDADRKEWVENTGVGDEDFVSYVEKWMDAGVSLLGGCCRTTPTTIRAIHKRLVNRRSL

SEQ ID NO: 27843 - DNA, 771 bp, Arabidopsis thaliana
  misc_feature (1)..(771): Ceres Seq. ID no. 12333364
  misc_feature (1)..(771): Ortholog of  Ceres SEQ ID NO 15225940 as cited in SEQ ID NO 205
actcgctcaaaaatttagagaaaggaagaagaagacagatcaatggctccgacgatcaaaagaatcggaagtttccgtactcaccaaaaacactttgtcgattttttcggagacgacttgatcgtcaccgttacgccgactgcttccgttatccgccgctggattcgtagcgtccgctcctacaaccgtaatcactcggtacatcctctcgtcgttggaatcggtgttcagtggagaccggatagttccgatccagatccaccaccaaaaactctccagttgtgcgtcggtagtcgctgtctcatcatccaactaggttacaattacggtctcccaaaagtcctccgcactttccttgccgatcccaaaacgactttcgtcggcgtttggaacggccaagaccagaaaaaactcgagaaatgtaggcatcgagtggagatcgggaagcttctggacataaggatgttcgtgagagattcgagaggggctaggatgtgtttttgttcgtttgaacagatcgtgaaggagcgtttgggtcgcgtaggagtgaggttagatccggcgatttgtatgagcgattggggcgtttataaccttaaccattatcaggtacttcaggcgtcgattgagtcgtatgtttgctttaagctcgctgttgaggaacgtctctggaacttaaaagttgctgctaatcttgtgatttgaatttgttgttgttcttctctctttatcaatcaacgtcttcttctaattcatgaaagttttcatgtt

SEQ ID NO: 27844 - protein, 220 aa, Arabidopsis thaliana
  peptide (1)..(220): Ceres Seq. ID no. 12333365
MAPTIKRIGSFRTHQKHFVDFFGDDLIVTVTPTASVIRRWIRSVRSYNRNHSVHPLVVGIGVQWRPDSSDPDPPPKTLQLCVGSRCLIIQLGYNYGLPKVLRTFLADPKTTFVGVWNGQDQKKLEKCRHRVEIGKLLDIRMFVRDSRGARMCFCSFEQIVKERLGRVGVRLDPAICMSDWGVYNLNHYQVLQASIESYVCFKLAVEERLWNLKVAANLVI

SEQ ID NO: 27845 - DNA, 698 bp, Arabidopsis thaliana
  misc_feature (1)..(698): Ceres Seq. ID no. 12340193
  misc_feature (1)..(698): Ortholog of  Ceres SEQ ID NO 13596816 as cited in SEQ ID NO 62287
attgattggaaactctttccctccttcctccggagagtttcgtggtgacgttagatggtatatcgatcccgtcatcgggtttcttacgagtacgaactcagcgttactagccaacatctatccttacttcagctacgttgacaatccacgtgacatatctctctcttacgctctcttcacttctccttccgtcgtcgtatgggacggctctcgtggctaccaaaacctctttgacgctttacttgacgttgtttactctgccgttgaacgctcaggcggtggatctctcccagtggttgtttccgagagcggatggccttctaacggtggaaacgccgcgagtttcgataacgcgcgagctttttacacgaatcttgcgtcgcgtgtgagagagaacagaggaacaccgaagagacctggaagaggagtggaaacgtatttgttcgctatgtttgatgagaatcaaaagagtcctgagatcgagaagaattttggtttgttttttcctaataaacaaccaaaatttccgatcacattctctgccgcgagagacggtacggcggttgagtgatgattttatatgctgagatttatgtgaataattgggagattatcccataaaaggttccaaataaagacaaatttcaaataaaacctgttagtccaagttaaattaaatactcggctttgttttgggc

SEQ ID NO: 27846 - protein, 189 aa, Arabidopsis thaliana
  peptide (1)..(189): Ceres Seq. ID no. 12340194
LIGNSFPPSSGEFRGDVRWYIDPVIGFLTSTNSALLANIYPYFSYVDNPRDISLSYALFTSPSVVVWDGSRGYQNLFDALLDVVYSAVERSGGGSLPVVVSESGWPSNGGNAASFDNARAFYTNLASRVRENRGTPKRPGRGVETYLFAMFDENQKSPEIEKNFGLFFPNKQPKFPITFSAARDGTAVE

SEQ ID NO: 27847 - DNA, 707 bp, Arabidopsis thaliana
  misc_feature (1)..(707): Ceres Seq. ID no. 12370068
  misc_feature (1)..(707): Ortholog of  Ceres SEQ ID NO 13657008 as cited in SEQ ID NO 69164
caaaggagccagaaagcatagtcttccatgtcgtgactgattcacttaattacccagcaatctcaatgtggtttctgctaaacattcaaaattcatttctacactcaatcacgcacgcttctatctcccggatatattccccggtttgaacaagatggtactcttggaccatgatgtagttgttcaaagagatttaagtagactgtggagcattgatatgaaaggaaaggtggttggagctgtagagacttgtcttgaaggtgaatcttcatttcgatcaatgagcacatttattaatttctcagacacatgggtcgctgggaaatttagtcctagagcttgcacatgggctttcgggatgaatctaattgatctcgaagaatggagaatacggaagttgacttctacatacataaaatacttcaacctgggaacaaagagaccattgtggaaagctgggagcttaccaataggttggttgactttctataggcaaacattagcattggacaagagatggcatgtgatggggttaggtcgcgaatcaggagtcaaagcggttgacatcgaacaagcggcagttatacactacgatggggtcatgaagccgtggttggacattggaaaagagaattacaaacgttactggaacatacacgtcccttaccatcacacctacttgcaacagtgcaatcttcaagcttgat

SEQ ID NO: 27848 - protein, 183 aa, Arabidopsis thaliana
  peptide (1)..(183): Ceres Seq. ID no. 12370069
MVLLDHDVVVQRDLSRLWSIDMKGKVVGAVETCLEGESSFRSMSTFINFSDTWVAGKFSPRACTWAFGMNLIDLEEWRIRKLTSTYIKYFNLGTKRPLWKAGSLPIGWLTFYRQTLALDKRWHVMGLGRESGVKAVDIEQAAVIHYDGVMKPWLDIGKENYKRYWNIHVPYHHTYLQQCNLQA

SEQ ID NO: 27849 - protein, 162 aa, Arabidopsis thaliana
  peptide (1)..(162): Ceres Seq. ID no. 12370070
MKGKVVGAVETCLEGESSFRSMSTFINFSDTWVAGKFSPRACTWAFGMNLIDLEEWRIRKLTSTYIKYFNLGTKRPLWKAGSLPIGWLTFYRQTLALDKRWHVMGLGRESGVKAVDIEQAAVIHYDGVMKPWLDIGKENYKRYWNIHVPYHHTYLQQCNLQA

SEQ ID NO: 27850 - protein, 141 aa, Arabidopsis thaliana
  peptide (1)..(141): Ceres Seq. ID no. 12370071
MSTFINFSDTWVAGKFSPRACTWAFGMNLIDLEEWRIRKLTSTYIKYFNLGTKRPLWKAGSLPIGWLTFYRQTLALDKRWHVMGLGRESGVKAVDIEQAAVIHYDGVMKPWLDIGKENYKRYWNIHVPYHHTYLQQCNLQA

SEQ ID NO: 27851 - DNA, 763 bp, Arabidopsis thaliana
  misc_feature (1)..(763): Ceres Seq. ID no. 13491922
  misc_feature (1)..(763): Ortholog of  Ceres SEQ ID NO 13595021 as cited in SEQ ID NO 55815
ataccaataagcaatttgctcattagagaacagagaaaaaaaaaacaatggcaactcaagccgccgggatcttcaactccgccataacaaccgccgcaacctccggcgtcaagaaactccactttttctcaacaacccaccgtcccaaatccctctccttcaccaaaaccgcaatccgcgccgagaaaacagattcctccgccgccgctgctgcatcccccgccacgaaagaagctcccgtgggattcacgccaccgcagctagacccaaacacaccgtctccgatcttcgctggaagcaccggtggtcttctacgtaaagcgcaagtggaagagttctacgttatcacgtggaactcaccgaaagaacagatctttgagatgccgacaggaggagcagcgatcatgagagaaggtccgaatcttctgaagctagcgaggaaagagcagtgtttagctttggggacaaggcttagatccaagtacaagatcacttaccagttttacagagtgtttcctaacggtgaggttcaatatcttcatcctaaagatggtgtttatccagagaaggcgaatccaggaagagaaggtgttggtctcaacatgagatctattgggaaaaatgttagtcccattgaagttaagtttactggcaaacaaagttatgatttgtaagatctgtaaactaaaaaaaccaaaaactatgtgcatgtggtgatgattatgactatgtttcatgttaatttttaatggattttgttttg

SEQ ID NO: 27852 - protein, 208 aa, Arabidopsis thaliana
  peptide (1)..(208): Ceres Seq. ID no. 13491923
MATQAAGIFNSAITTAATSGVKKLHFFSTTHRPKSLSFTKTAIRAEKTDSSAAAAASPATKEAPVGFTPPQLDPNTPSPIFAGSTGGLLRKAQVEEFYVITWNSPKEQIFEMPTGGAAIMREGPNLLKLARKEQCLALGTRLRSKYKITYQFYRVFPNGEVQYLHPKDGVYPEKANPGREGVGLNMRSIGKNVSPIEVKFTGKQSYDL

SEQ ID NO: 27853 - DNA, 1267 bp, Arabidopsis thaliana
  misc_feature (1)..(1267): Ceres Seq. ID no. 12338433
  misc_feature (1)..(1267): Ortholog of  Ceres SEQ ID NO 13594308 as cited in SEQ ID NO 57706
ctttaaaaaaaaaaaataccaaaagaagcggaaacagagaaaaagagagaaaaatgctgagtagatcagttgcttctgctgttacaccggtctcatcttcttctctcttaccaaactcaaagcctatcttctgtctgaaaaccctctccggttatcgttcttcttctttctgtggcggctgtattcgtaaaatcaaccataagcctcttcgaatgacgagttccaatattacaccaagagctatggccacacaacagcttgagaacgctgatcagctcattgattctgtcgaaacttttatcttcgattgtgatggtgtgatttggaagggagataaattgatagagggagttcctgaaactcttgatatgcttcgtgccaagggaaagagattggtttttgtgacaaacaactcaacaaaatctaggaaacagtatggaaaaaagttcgagactcttggcctgaatgttaacgaggaggagatatttgcttcatcttttgctgctgctgcatacttgcagtctattaatttcccaaaagataagaaggtctatgtgattggtgaggaaggtatcttgaaagagctagagcttgctggttttcaataccttggaggtccggatgatggtaaaagacagattgaattgaagccaggttttctaatggagcatgatcatgatgttggagctgttgtggttggatttgatcgctatttcaactactacaaaattcagtatggaacactctgtatccgtgaaaacccggggtgtcttttcatcgctacaaaccgagatgctgtcactcaccttactgatgctcaagaatgggcaggtggtggctctatggttggtgctcttgttggatccactcaacgtgagcctcttgttgttggaaaaccctcaacttttatgatggactatttagcagacaaatttggaatccaaaagtcacagatatgcatggttggtgatagattggacactgacattttattcgggcagaatggcggttgtaagactctactcgtcctctcgggtgttacttcaatctctatgttggaaagccctgagaacaagatacaaccagatttctacaccagcaagatctccgattttctgtctccgaaagccgcaactgtataatctagtaagccccgcgtcaatcactctgtagaactcagggtactgaatctatttatgggtatacaactacagtctattcatttttctttgtgactatgtgtataataataagaactttcttgctg

SEQ ID NO: 27854 - protein, 379 aa, Arabidopsis thaliana; identical to SEQ ID NO: 26380
  peptide (1)..(379): Ceres Seq. ID no. 12338434

SEQ ID NO: 27855 - protein, 362 aa, Arabidopsis thaliana; identical to SEQ ID NO: 26381
  peptide (1)..(362): Ceres Seq. ID no. 12338436

SEQ ID NO: 27856 - protein, 309 aa, Arabidopsis thaliana; identical to SEQ ID NO: 26382
  peptide (1)..(309): Ceres Seq. ID no. 12338437

SEQ ID NO: 27857 - DNA, 1400 bp, Arabidopsis thaliana
  misc_feature (1)..(1400): Ceres Seq. ID no. 12335141
  misc_feature (1)..(1400): Ortholog of  Ceres SEQ ID NO 13655375 as cited in SEQ ID NO 63347
  misc_feature (1)..(1400): Ortholog of  Ceres SEQ ID NO 12626166 as cited in SEQ ID NO 64505
  misc_feature (1)..(1400): Ortholog of  Ceres SEQ ID NO 13654415 as cited in SEQ ID NO 68820
acgcttcccaaccgcctgcctttttcagattacctccggtttctaccactctcgccgtcgccgtcaccggtactccgatcacctccgcacgattcatttcctatttgcatttttcacctctctagcggaaagtgagtcttctggagaatgggagattgaagaagtaagagattcactgattgaggaagagagaaagttagttcagaaaaatggctccagtgagtaaagctgataagaaggcagccgtagatgctgctgcgtggatgttcaatgtcgtcacttctgttggtatcatcattgttaataaagctttaatggcgacttatggttatagctttgctacaacgttaaccggtttacatttcgctacaacgactctgatgacgcttgttttaagatgtcttggttacattcagccttctcatcttccgtttacggagcttttgagatttattctgtttgctaatttctccattgttggaatgaatgtcagtcttatgtggaactctgttggtttttatcagattgctaagctcagcatgattcctgtatcttgtttgttggaaatggttttcgataagattcgttattccagagatacaaagcttagcataggactggttcttgtgggtgttggtgtttgcactgtcactgatgttagtgtaaacactaaaagatttgtagccgctttcgttgctgtgtggagtactgctctgcaacaatactatgtacattaccttcagcgcaagtactcgcttaactcattcaacctattgggacataccgctccagcccaagccgcaacattactggtaattggcccgtttcttgattattggctgacagaaaaaagagtagacatgtacgattacaacttggtttcagtgctgtttataaccctgtcgtgcacaatagcgattggaaccaacctaagccagttcatctgcatcggaagattcacagctgtatcgttccaagtgctgggacacatgaagacgatcctggtgctgataatgggcttcttcttctttggtagagaaggtcttaacttgcacgtggttgttggaatgataattgcagtactgggtatgatctggtacggtaatgcctcttcgaagccaggaggcaaagagcgacgaaactattctcttccaactacccgtcaacagaaactcggagctgcttcggattctgacgacaacgaagacaaagcctagtagtaagtagtatattatcaggaacatcacatagttacgtctctgttttgagttgtttttttattagcttaatttatgattctcgtgctaaattttggtttggtacgaaagaaagcgaattttttcatacagacgtttgagatttttgtaatgcatttttgcggaatcaagttacatcaacgc

SEQ ID NO: 27858 - protein, 335 aa, Arabidopsis thaliana
  peptide (1)..(335): Ceres Seq. ID no. 12335142
MAPVSKADKKAAVDAAAWMFNVVTSVGIIIVNKALMATYGYSFATTLTGLHFATTTLMTLVLRCLGYIQPSHLPFTELLRFILFANFSIVGMNVSLMWNSVGFYQIAKLSMIPVSCLLEMVFDKIRYSRDTKLSIGLVLVGVGVCTVTDVSVNTKRFVAAFVAVWSTALQQYYVHYLQRKYSLNSFNLLGHTAPAQAATLLVIGPFLDYWLTEKRVDMYDYNLVSVLFITLSCTIAIGTNLSQFICIGRFTAVSFQVLGHMKTILVLIMGFFFFGREGLNLHVVVGMIIAVLGMIWYGNASSKPGGKERRNYSLPTTRQQKLGAASDSDDNEDKA

SEQ ID NO: 27859 - protein, 317 aa, Arabidopsis thaliana
  peptide (1)..(317): Ceres Seq. ID no. 12335143
MFNVVTSVGIIIVNKALMATYGYSFATTLTGLHFATTTLMTLVLRCLGYIQPSHLPFTELLRFILFANFSIVGMNVSLMWNSVGFYQIAKLSMIPVSCLLEMVFDKIRYSRDTKLSIGLVLVGVGVCTVTDVSVNTKRFVAAFVAVWSTALQQYYVHYLQRKYSLNSFNLLGHTAPAQAATLLVIGPFLDYWLTEKRVDMYDYNLVSVLFITLSCTIAIGTNLSQFICIGRFTAVSFQVLGHMKTILVLIMGFFFFGREGLNLHVVVGMIIAVLGMIWYGNASSKPGGKERRNYSLPTTRQQKLGAASDSDDNEDKA

SEQ ID NO: 27860 - protein, 300 aa, Arabidopsis thaliana
  peptide (1)..(300): Ceres Seq. ID no. 12335144
MATYGYSFATTLTGLHFATTTLMTLVLRCLGYIQPSHLPFTELLRFILFANFSIVGMNVSLMWNSVGFYQIAKLSMIPVSCLLEMVFDKIRYSRDTKLSIGLVLVGVGVCTVTDVSVNTKRFVAAFVAVWSTALQQYYVHYLQRKYSLNSFNLLGHTAPAQAATLLVIGPFLDYWLTEKRVDMYDYNLVSVLFITLSCTIAIGTNLSQFICIGRFTAVSFQVLGHMKTILVLIMGFFFFGREGLNLHVVVGMIIAVLGMIWYGNASSKPGGKERRNYSLPTTRQQKLGAASDSDDNEDKA

SEQ ID NO: 27861 - DNA, 1681 bp, Arabidopsis thaliana
  misc_feature (1)..(1681): Ceres Seq. ID no. 12332449
  misc_feature (1)..(1681): Ortholog of  Ceres SEQ ID NO 15177320 as cited in SEQ ID NO 52645
  misc_feature (1)..(1681): Ortholog of  Ceres SEQ ID NO 15171359 as cited in SEQ ID NO 57279
  misc_feature (1)..(1681): Ortholog of  Ceres SEQ ID NO 14313840 as cited in SEQ ID NO 59568
  misc_feature (1)..(1681): Ortholog of  Ceres SEQ ID NO 15169466 as cited in SEQ ID NO 66135
  misc_feature (1)..(1681): Ortholog of  Ceres SEQ ID NO 14303091 as cited in SEQ ID NO 66369
actacctccaaacttcccaagaatctctctttctctcctctcttctctctcgcctcttctttaatttcctctgaagagaatcctccttacgaaaatgttcaagaaagcaacattgaatctttcacttgctcctttgctacttgtttttcttttccttctctcgtgtgttgttcatggcgtcgatgagaagaagattctcagtgtacataacaacatctggtctcccaagaaatcatacgaagcttcaacttcatgtttttctcgcagtcttggaaaaggaagagaatccactacattggagatgaaacatagagaactttgctcaggaaagactatagatttgggtaagaagatgagaagagccttagttttggataacattcgagttcagtcacttcaactcaaaatcaaagcaatgacctcaagcaccactgaacaatctgtttccgaaactcagattccgttaacctcagggataaaacttgagtctttgaactacatcgttacagttgaattaggagggaaaaacatgagtttgatcgttgacactggaagtgacctgacttgggtccaatgccagccttgcagatcctgttacaaccaacaaggtcctttgtatgacccatcagtctcatcttcttacaagacggtgttctgtaactcatccacttgtcaggaccttgtggcagctaccagcaattccggcccttgtggaggtaacaatggtgttgtaaagacaccttgtgagtacgttgtcagctatggagatggatcatacactcgaggagacttggcaagtgaaagcatcctattgggcgacacaaaacttgaaaactttgtctttggttgtggccgaaacaacaaaggtctgtttgggggatcctctggtttaatgggtttgggaagaagttcagtctctttagtctcccaaactttgaaaactttcaacggagttttctcatactgtttaccttctcttgaggatggagcttctggctcattgtcctttggtaacgattcctctgtttacacgaattcaacttcagtttcctacacgccgttagtacaaaaccctcagcttcgttccttttacattctgaatctcactggtgctagcattggtggcgtggaactgaaatcttcaagctttggcagagggattctaatcgattcaggaacggttatcacaagattgccaccttccatttacaaagctgtgaagatagagtttctgaaacagttttccgggtttcctactgctcctggttattcaatcttagacacttgctttaacctcacaagttatgaagacataagcattcccattatcaaaatgatcttccaaggtaacgctgagctcgaagtggatgtcactggtgtgttctactttgtcaagcctgacgcatctctagtctgcttggccttagcaagtctgtcatatgaaaatgaagtcgggatcatcggaaattatcagcagaaaaaccagagagtaatatatgataccacacaagagaggctaggaattgtcggagaaaactgcagagtctgatgcctacaccataacttaatatccatttgtgtgctcccttcatatcatgaaagccaatcatctcttttggcaaagccaatttgaattctcccactaatcttataaataaatatatttctgtatcggtatagc

SEQ ID NO: 27862 - protein, 484 aa, Arabidopsis thaliana
  peptide (1)..(484): Ceres Seq. ID no. 12332450
MFKKATLNLSLAPLLLVFLFLLSCVVHGVDEKKILSVHNNIWSPKKSYEASTSCFSRSLGKGRESTTLEMKHRELCSGKTIDLGKKMRRALVLDNIRVQSLQLKIKAMTSSTTEQSVSETQIPLTSGIKLESLNYIVTVELGGKNMSLIVDTGSDLTWVQCQPCRSCYNQQGPLYDPSVSSSYKTVFCNSSTCQDLVAATSNSGPCGGNNGVVKTPCEYVVSYGDGSYTRGDLASESILLGDTKLENFVFGCGRNNKGLFGGSSGLMGLGRSSVSLVSQTLKTFNGVFSYCLPSLEDGASGSLSFGNDSSVYTNSTSVSYTPLVQNPQLRSFYILNLTGASIGGVELKSSSFGRGILIDSGTVITRLPPSIYKAVKIEFLKQFSGFPTAPGYSILDTCFNLTSYEDISIPIIKMIFQGNAELEVDVTGVFYFVKPDASLVCLALASLSYENEVGIIGNYQQKNQRVIYDTTQERLGIVGENCRV

SEQ ID NO: 27863 - protein, 415 aa, Arabidopsis thaliana
  peptide (1)..(415): Ceres Seq. ID no. 12332451
MKHRELCSGKTIDLGKKMRRALVLDNIRVQSLQLKIKAMTSSTTEQSVSETQIPLTSGIKLESLNYIVTVELGGKNMSLIVDTGSDLTWVQCQPCRSCYNQQGPLYDPSVSSSYKTVFCNSSTCQDLVAATSNSGPCGGNNGVVKTPCEYVVSYGDGSYTRGDLASESILLGDTKLENFVFGCGRNNKGLFGGSSGLMGLGRSSVSLVSQTLKTFNGVFSYCLPSLEDGASGSLSFGNDSSVYTNSTSVSYTPLVQNPQLRSFYILNLTGASIGGVELKSSSFGRGILIDSGTVITRLPPSIYKAVKIEFLKQFSGFPTAPGYSILDTCFNLTSYEDISIPIIKMIFQGNAELEVDVTGVFYFVKPDASLVCLALASLSYENEVGIIGNYQQKNQRVIYDTTQERLGIVGENCRV

SEQ ID NO: 27864 - protein, 398 aa, Arabidopsis thaliana
  peptide (1)..(398): Ceres Seq. ID no. 12332452
MRRALVLDNIRVQSLQLKIKAMTSSTTEQSVSETQIPLTSGIKLESLNYIVTVELGGKNMSLIVDTGSDLTWVQCQPCRSCYNQQGPLYDPSVSSSYKTVFCNSSTCQDLVAATSNSGPCGGNNGVVKTPCEYVVSYGDGSYTRGDLASESILLGDTKLENFVFGCGRNNKGLFGGSSGLMGLGRSSVSLVSQTLKTFNGVFSYCLPSLEDGASGSLSFGNDSSVYTNSTSVSYTPLVQNPQLRSFYILNLTGASIGGVELKSSSFGRGILIDSGTVITRLPPSIYKAVKIEFLKQFSGFPTAPGYSILDTCFNLTSYEDISIPIIKMIFQGNAELEVDVTGVFYFVKPDASLVCLALASLSYENEVGIIGNYQQKNQRVIYDTTQERLGIVGENCRV

SEQ ID NO: 27865 - DNA, 1451 bp, Arabidopsis thaliana
  misc_feature (1)..(1451): Ceres Seq. ID no. 12333516
  misc_feature (1)..(1451): Ortholog of  Ceres SEQ ID NO 13532807 as cited in SEQ ID NO 53012
  misc_feature (1)..(1451): Ortholog of  Ceres SEQ ID NO 13663060 as cited in SEQ ID NO 60964
  misc_feature (1)..(1451): Ortholog of  Ceres SEQ ID NO 13656849 as cited in SEQ ID NO 65764
  misc_feature (1)..(1451): Ortholog of  Ceres SEQ ID NO 13500573 as cited in SEQ ID NO 67431
  misc_feature (1)..(1451): Ortholog of  Ceres SEQ ID NO 13656501 as cited in SEQ ID NO 69206
accgttcaataaaaaaaaaagggtaaaggtagagactttataacgaaatgtcaacacccatcttctcgattcctcaatttctctagggttcttcgttttcgttgttgtgaggaattttgctccgatgtcggcggagagttgtttcggaagctcgggtgatcaaagcagcagcaaaggagtggctactcatggtggtagctatgttcagtataatgtctatggcaatctcttcgaagtttctagaaagtatgttcctcctcttcgtcctatcggtagaggcgcttatggaattgtctgtgctgctacaaactcagagactggagaggaggtagctatcaagaagattggtaatgcttttgacaatattatcgatgctaaaaggactttgagagagattaagcttctcaagcatatggatcatgaaaatgtgattgctgtaaaggatataataaaaccaccgcagagagagaacttcaatgatgtttacattgtttatgagcttatggacactgatctccaccaaattattcgctctaaccaacccttaactgatgatcattgtcggttttttctgtatcagttgttgcgtgggctcaaatatgttcattcagctaatgtattgcatcgagatttgaaacctagcaatttgctcctgaatgcaaattgtgatctaaagcttggggatttcgggcttgcgaggaccaaatccgagactgactttatgactgaatatgttgttacacgttggtatcgagctccagagctgctacttaattgctctgaatacacagcagcaattgatatttggtctgtcggttgtatactcggtgaaacaatgacacgagagcccttgtttcccggtaaagattatgttcatcagcttagactcatcactgagcttataggatctcctgatgactcaagcttgggattcttaagaagtgacaatgcaagaagatacgttagacagcttccacagtaccctagacagaactttgctgctagattcccaaacatgtcggctggtgcagtcgatttgctggagaaaatgcttgtttttgatccaagcagacgcatcacagttgatgaggcgttgtgccacccatatttggcgccgctgcatgatatcaacgaagaaccggtatgtgtgaggccgttcaattttgatttcgagcaacctactttgacagaagagaacattaaggagcttatataccgtgaaacagtcaagttcaatcctcaagactcagtgtgagagaaagagagagagatatatatccttaaaaggaaactcatcaaaatgctatgttttgttttgctctgcttttgttatcaaatctctgataagtttgataatatgtctgtaatttgaataacatcctaaaaaattggaaaaaaagaaaagaacaacctttgagctgtgttttgcaatagagtgtatttaaatttcc

SEQ ID NO: 27866 - protein, 376 aa, Arabidopsis thaliana
  peptide (1)..(376): Ceres Seq. ID no. 12333517
MSAESCFGSSGDQSSSKGVATHGGSYVQYNVYGNLFEVSRKYVPPLRPIGRGAYGIVCAATNSETGEEVAIKKIGNAFDNIIDAKRTLREIKLLKHMDHENVIAVKDIIKPPQRENFNDVYIVYELMDTDLHQIIRSNQPLTDDHCRFFLYQLLRGLKYVHSANVLHRDLKPSNLLLNANCDLKLGDFGLARTKSETDFMTEYVVTRWYRAPELLLNCSEYTAAIDIWSVGCILGETMTREPLFPGKDYVHQLRLITELIGSPDDSSLGFLRSDNARRYVRQLPQYPRQNFAARFPNMSAGAVDLLEKMLVFDPSRRITVDEALCHPYLAPLHDINEEPVCVRPFNFDFEQPTLTEENIKELIYRETVKFNPQDSV

SEQ ID NO: 27867 - protein, 280 aa, Arabidopsis thaliana
  peptide (1)..(280): Ceres Seq. ID no. 12333518
MDHENVIAVKDIIKPPQRENFNDVYIVYELMDTDLHQIIRSNQPLTDDHCRFFLYQLLRGLKYVHSANVLHRDLKPSNLLLNANCDLKLGDFGLARTKSETDFMTEYVVTRWYRAPELLLNCSEYTAAIDIWSVGCILGETMTREPLFPGKDYVHQLRLITELIGSPDDSSLGFLRSDNARRYVRQLPQYPRQNFAARFPNMSAGAVDLLEKMLVFDPSRRITVDEALCHPYLAPLHDINEEPVCVRPFNFDFEQPTLTEENIKELIYRETVKFNPQDSV

SEQ ID NO: 27868 - protein, 250 aa, Arabidopsis thaliana
  peptide (1)..(250): Ceres Seq. ID no. 12333519
MDTDLHQIIRSNQPLTDDHCRFFLYQLLRGLKYVHSANVLHRDLKPSNLLLNANCDLKLGDFGLARTKSETDFMTEYVVTRWYRAPELLLNCSEYTAAIDIWSVGCILGETMTREPLFPGKDYVHQLRLITELIGSPDDSSLGFLRSDNARRYVRQLPQYPRQNFAARFPNMSAGAVDLLEKMLVFDPSRRITVDEALCHPYLAPLHDINEEPVCVRPFNFDFEQPTLTEENIKELIYRETVKFNPQDSV

SEQ ID NO: 27869 - DNA, 1119 bp, Arabidopsis thaliana
  misc_feature (1)..(1119): Ceres Seq. ID no. 12678920
  misc_feature (1)..(1119): Ortholog of  Ceres SEQ ID NO 12474685 as cited in SEQ ID NO 88
  misc_feature (1)..(1119): Ortholog of  Ceres SEQ ID NO 13638574 as cited in SEQ ID NO 51223
  misc_feature (1)..(1119): Ortholog of  Ceres SEQ ID NO 14311531 as cited in SEQ ID NO 51466
  misc_feature (1)..(1119): Ortholog of  Ceres SEQ ID NO 15170465 as cited in SEQ ID NO 52798
  misc_feature (1)..(1119): Ortholog of  Ceres SEQ ID NO 15177112 as cited in SEQ ID NO 55956
  misc_feature (1)..(1119): Ortholog of  Ceres SEQ ID NO 12610790 as cited in SEQ ID NO 56123
  misc_feature (1)..(1119): Ortholog of  Ceres SEQ ID NO 13655636 as cited in SEQ ID NO 63519
  misc_feature (1)..(1119): Ortholog of  Ceres SEQ ID NO 13655896 as cited in SEQ ID NO 64970
attttatgcggaagaaacaaagtgctatttctccgagttacaattatccagaaaacttttaagagatggcagctccgattcgattctttgaactgaacactggtgccaagttaccttgcgtcggtctaggaacctacgcaatggtcgcgacagcgatcgaacaggcgattaagattggttacaggcatatcgactgtgcttcgatttacggaaacgagaaagagattggtggtgtgttgaagaagctgataggtgatggttttgtgaagcgtgaggagttatttatcacttccaaactctggagcaatgatcatttacctgaagatgtgcctaaggcactggaaaaaacgttacaggacttacagattgactatgttgatttatatctgatacattggcctgcgagcttgaagaaggaatcactaatgccaacacctgagatgctcacaaaacctgatataactagcacatggaaagcaatggaagctctctatgactctggaaaagctcgagcaatcggtgtaagcaatttctcgtcgaagaagcttacagatcttcttaacgtggcacgtgtaaccccggctgttaaccaagttgaatgtcacccagtttggcagcaacaaggtcttcatgagttatgcaaatccaaaggagttcacttatctggttactctcctttgggttcccaaagtaagggagaagtcaggctaaaggttcttcaaaacccgattgttaccgaggttgctgagaaacttggaaagaccaccgcccaagtggctctccgttggggactccaaactggtcatagtgttctaccaaagagctcgagcggggctcggctcaaggagaatcttgatgtttttgactggtccataccggaagatctgtttaccaagttctctaacattccccaggagaagttttgccgagctactgagtttgcgcatgagacacacggcttctataagaccattgaggaattgtgggacggtgaaatttgagataatgtccctcctttctacttgtttaaccataaaccattaaggacattgaaataaatatgttatctttttatatttaatctttctatgagaaaacactaaacacatgcttgggatt

SEQ ID NO: 27870 - protein, 311 aa, Arabidopsis thaliana; identical to SEQ ID NO: 27524
  peptide (1)..(311): Ceres Seq. ID no. 12678921

SEQ ID NO: 27871 - protein, 286 aa, Arabidopsis thaliana; identical to SEQ ID NO: 27525
  peptide (1)..(286): Ceres Seq. ID no. 12678922

SEQ ID NO: 27872 - protein, 191 aa, Arabidopsis thaliana; identical to SEQ ID NO: 27526
  peptide (1)..(191): Ceres Seq. ID no. 12678923

SEQ ID NO: 27873 - DNA, 918 bp, Arabidopsis thaliana
  misc_feature (1)..(918): Ceres Seq. ID no. 13653925
  misc_feature (1)..(918): Ortholog of  Ceres SEQ ID NO 13591776 as cited in SEQ ID NO 20695
  misc_feature (1)..(918): Ortholog of  Ceres SEQ ID NO 13595072 as cited in SEQ ID NO 55971
attctcacttacttcttttctttttttgtgttcttgtttagaagaagcaatggccacttcagcaatccaacactcttcttttgccggccaaacggctctaaagccatccaacgacctccttcgcaaggtcggagcctctaatggtggcggccgcgttatcatgcgccgtaccgtcaagtctacccctcagagcatctggtatggaccagaccgtcccaaatacctaggaccattctcggaaaacacaccatcatacctaactggagaataccctggagactacggctgggacacccgctggtctctcagccgatccagaaacattcgcaaagaatcgtgagctcgaagtgatccacagtagatgggcaatgttgggagctttaggctgcaccttccctgaaattctctcaaaaaacggagtcaaattcggtgaagccgtgtggttcaaggcaggatctcaaatcttctcagaaggaggacttgactacctcggaaaccctaacttgatccacgcgcaaagcatattagctatatgggcgtgtcaagttgtgctaatgggattcattgaagggtacagaatcggaggtggtcctcttggggaagggcttgacccgctttacccgggcggggccttcgacccgttgaacttagcgtaggatccagaagcgttttcggagttgaaagtgaaggagcttaaaaacggtcgtcttgctatgttctcaatgtttggattctttgtccaagccatagttaccggtaaaggtccgatcgaaaatctgttcgatcacattgcagaccctgtggctaacaatgcttgggcttacgccaccaacttcgtccccggaaaatagagtttgatcggataatttatgtaaattatatcttttaaacatttatcaatgcattaaagttatcccc

SEQ ID NO: 27874 - protein, 112 aa, Arabidopsis thaliana
  peptide (1)..(112): Ceres Seq. ID no. 13653926
FSLTSFLFLCSCLEEAMATSAIQHSSFAGQTALKPSNDLLRKVGASNGGGRVIMRRTVKSTPQSIWYGPDRPKYLGPFSENTPSYLTGEYPGDYGWDTRWSLSRSRNIRKES

SEQ ID NO: 27875 - protein, 96 aa, Arabidopsis thaliana
  peptide (1)..(96): Ceres Seq. ID no. 13653927
MATSAIQHSSFAGQTALKPSNDLLRKVGASNGGGRVIMRRTVKSTPQSIWYGPDRPKYLGPFSENTPSYLTGEYPGDYGWDTRWSLSRSRNIRKES

SEQ ID NO: 27876 - protein, 95 aa, Arabidopsis thaliana
  peptide (1)..(95): Ceres Seq. ID no. 13653928
MLGALGCTFPEILSKNGVKFGEAVWFKAGSQIFSEGGLDYLGNPNLIHAQSILAIWACQVVLMGFIEGYRIGGGPLGEGLDPLYPGGAFDPLNLA

SEQ ID NO: 27877 - DNA, 887 bp, Arabidopsis thaliana
  misc_feature (1)..(887): Ceres Seq. ID no. 12421446
  misc_feature (1)..(887): Ortholog of  Ceres SEQ ID NO 13637842 as cited in SEQ ID NO 54650
  misc_feature (1)..(887): Ortholog of  Ceres SEQ ID NO 12608127 as cited in SEQ ID NO 57579
  misc_feature (1)..(887): Ortholog of  Ceres SEQ ID NO 12634558 as cited in SEQ ID NO 0
  misc_feature (1)..(887): Ortholog of  Ceres SEQ ID NO 15180294 as cited in SEQ ID NO 0
acgagaccattacctagaacatcctaatcgaaaaaaatctctccaatggcgtctcttcgtagcctttcgatttggttcttcttcttcttcgtcttcgtcttcttaatcaatccctccatttctattcgaacttccttcatcaagcttcccggaagcgacggatctcgctactgcgacagctggagattagccgccgagaccaataacgtcggaacttgggatctgattccgtcaatctgcgtggattccgtcgccgagtatcttaacggagaccagtttttatccgattacagtgtcatcgtcgattatgctctcgcgtttgcgaaatcggttgaaatttccggcgacggcaaggacgtgtggatcttcgatatcgacgagacgcttctcacgaatattgactactacaaggctcatggttacgggtctgaaccgtatgacgataataaatttagtgagtgggtggaacaaggaacagctccagcttttgatgcgagcttgagactgtacaatgctctcaagaaacttggtttcactatcattttgctaaccggtcgggacgagcatcaaaggacttccaccgagacaaatctccgggatgccggttattccggttgggaacgtctcctcttgagaggtccaaatgatcaagggaagtcagctacaaattacaaatccgagcagcgatcgaaactgattgaggaaggtttcaaaatccgtggcaatagcggtgatcaatggagtgacttgcaaggttttgccgtggctgatcgttctttcaaagtcccaaatcccatgtactacattccttgatcactattcatttctgattttatgtattgagtaacaaccacttatgtgtagacgttaatattacctttgctcct

SEQ ID NO: 27878 - protein, 255 aa, Arabidopsis thaliana; identical to SEQ ID NO: 27765
  peptide (1)..(255): Ceres Seq. ID no. 12421447

SEQ ID NO: 27879 - DNA, 791 bp, Arabidopsis thaliana
  misc_feature (1)..(791): Ceres Seq. ID no. 13490901
  misc_feature (1)..(791): Ortholog of  Ceres SEQ ID NO 14315067 as cited in SEQ ID NO 57249
  misc_feature (1)..(791): Ortholog of  Ceres SEQ ID NO 15173278 as cited in SEQ ID NO 58144
ataaatctgataatcaatatatatcaaatactcaaaacaaaagagaaagaaattaaagagagagatgggaaacagcctaaggtgttgtctggcttgtgttcttccatgtggagcactagatttgatcaggatcgttcatctaaacggctacgttgaggagatcacacggtcaataaccgccggagagatcctccaagcaaaccctaaccatgtcctaagcaaaccatgttctcaaggagttgtccgcaaaatcttgatcttgtctcctgaatccgagctcaaacgaggaagcatctattttctcatccccgattcttccttgccggagaagaaaaggcggagaaaggacactcctcgccggaagaagaatctccaaaaccctagtgccgacgccgccggccgagaaattaaaggtgatgaggaatgtgtgaagttgtgtgagaagtacttagaagaagtagtgtcgtcggcgtcgacaggtaaagagcaccgtcatcgccggcggcacagcagatcggcgtcagtatccacgtggcgacctctccttgacagtatctctgaggatcttaattaattcctctttcctttaaatctcttttttttttgttgcttctagctaatggtgttttttgtccggaagccggatttttatcattctctttttcattttttctctctttttttttggttttggggaaattttcacgaaaagagttatataatgtggataagatctgtgttaaaattcggttgtgatttcgagtcacctgagaatgatgatattcaatcag

SEQ ID NO: 27880 - protein, 169 aa, Arabidopsis thaliana
  peptide (1)..(169): Ceres Seq. ID no. 13490902
MGNSLRCCLACVLPCGALDLIRIVHLNGYVEEITRSITAGEILQANPNHVLSKPCSQGVVRKILILSPESELKRGSIYFLIPDSSLPEKKRRRKDTPRRKKNLQNPSADAAGREIKGDEECVKLCEKYLEEVVSSASTGKEHRHRRRHSRSASVSTWRPLLDSISEDLN

SEQ ID NO: 27881 - DNA, 1109 bp, Arabidopsis thaliana
  misc_feature (1)..(1109): Ceres Seq. ID no. 12422858
  misc_feature (1)..(1109): Ortholog of  Ceres SEQ ID NO 13594298 as cited in SEQ ID NO 57803
  misc_feature (1)..(1109): Ortholog of  Ceres SEQ ID NO 13503476 as cited in SEQ ID NO 61978
  misc_feature (1)..(1109): Ortholog of  Ceres SEQ ID NO 12578438 as cited in SEQ ID NO 62201
  misc_feature (1)..(1109): Ortholog of  Ceres SEQ ID NO 12617675 as cited in SEQ ID NO 64656
agcattacctctctctctctctctcttcgaaatattcgaagtagagtcaaccaatggagacggaaaggaggatcataacgagctgttctgccatgacggctctgttcttgttcatgacggctttaatggcgtcgtcctctatcgcagcaacaccgacacaatcgtttgaagataatttcaacattatgtggtctgaaaatcacttcacgacttccgatgatggagagatctggaatctttccttagataacgacaccggatgtggatttcagacaaagcacatgtatagattcggatggtttagtatgaagctaaagctcgtcggaggcgactccgccggcgtcgtcaccgcttactacatgtgttcggagaatggggcaggaccggagagagacgagatagatttcgaatttctagggaaccgaaccggacagccttacattattcagaccaatgtgtataagaacggaaccgggaatcgggagatgcgacattccctctggttcgacccgaccaaggattatcacacctactcaattctttggaataaccaccagcttgtgttcttcgtggatagggtaccaattcgagtatacaagaacagtgataaggtaccaaacaacgacttcttcccgaaccagaagccgatgtacttgttctccagcatttggaacgctgacgattgggctacacgtggtggtctggagaagactgactggaaaaaagctccattcgtctcttcttacaaggacttcgccgtcgaaggctgccgttggaaggatccattccctgcatgcgtctctaccacaacagagaattggtgggatcagtacgacgcgtggcatttgtccaagacacagaagatggattatgcgtgggtgcagcgtaatctcgtcgtatacgattattgcaaagacagtgagaggttccctactcttccttgggagtgttccattagcccttgggcttaaaatcaattttgttttgagtgtattaaagtggaaatggtttatgtaataattttactctcttttttttggcatttcttattttgttatggactatatcctctgtttatttatttaattaattatttatttagtcggctg

SEQ ID NO: 27882 - protein, 305 aa, Arabidopsis thaliana
  peptide (1)..(305): Ceres Seq. ID no. 12422859
METERRIITSCSAMTALFLFMTALMASSSIAATPTQSFEDNFNIMWSENHFTTSDDGEIWNLSLDNDTGCGFQTKHMYRFGWFSMKLKLVGGDSAGVVTAYYMCSENGAGPERDEIDFEFLGNRTGQPYIIQTNVYKNGTGNREMRHSLWFDPTKDYHTYSILWNNHQLVFFVDRVPIRVYKNSDKVPNNDFFPNQKPMYLFSSIWNADDWATRGGLEKTDWKKAPFVSSYKDFAVEGCRWKDPFPACVSTTTENWWDQYDAWHLSKTQKMDYAWVQRNLVVYDYCKDSERFPTLPWECSISPWA

SEQ ID NO: 27883 - protein, 292 aa, Arabidopsis thaliana
  peptide (1)..(292): Ceres Seq. ID no. 12422860
MTALFLFMTALMASSSIAATPTQSFEDNFNIMWSENHFTTSDDGEIWNLSLDNDTGCGFQTKHMYRFGWFSMKLKLVGGDSAGVVTAYYMCSENGAGPERDEIDFEFLGNRTGQPYIIQTNVYKNGTGNREMRHSLWFDPTKDYHTYSILWNNHQLVFFVDRVPIRVYKNSDKVPNNDFFPNQKPMYLFSSIWNADDWATRGGLEKTDWKKAPFVSSYKDFAVEGCRWKDPFPACVSTTTENWWDQYDAWHLSKTQKMDYAWVQRNLVVYDYCKDSERFPTLPWECSISPWA

SEQ ID NO: 27884 - protein, 285 aa, Arabidopsis thaliana
  peptide (1)..(285): Ceres Seq. ID no. 12422861
MTALMASSSIAATPTQSFEDNFNIMWSENHFTTSDDGEIWNLSLDNDTGCGFQTKHMYRFGWFSMKLKLVGGDSAGVVTAYYMCSENGAGPERDEIDFEFLGNRTGQPYIIQTNVYKNGTGNREMRHSLWFDPTKDYHTYSILWNNHQLVFFVDRVPIRVYKNSDKVPNNDFFPNQKPMYLFSSIWNADDWATRGGLEKTDWKKAPFVSSYKDFAVEGCRWKDPFPACVSTTTENWWDQYDAWHLSKTQKMDYAWVQRNLVVYDYCKDSERFPTLPWECSISPWA

SEQ ID NO: 27885 - DNA, 673 bp, Arabidopsis thaliana
  misc_feature (1)..(673): Ceres Seq. ID no. 12331700
  misc_feature (1)..(673): Ortholog of  Ceres SEQ ID NO 13595067 as cited in SEQ ID NO 55857
  misc_feature (1)..(673): Ortholog of  Ceres SEQ ID NO 12635516 as cited in SEQ ID NO 0
  misc_feature (1)..(673): Ortholog of  Ceres SEQ ID NO 15179376 as cited in SEQ ID NO 0
aaatttccacttagagatcatcgagagggcaagagagaaaaatgggaaaggcacgtacggtgggagtgggaatggactattctccgacgagcaaattagctctccggtgggcggcggagaatctccttgaagacggcgacaccgtcatcttgattcacgtccaaccacaaaacgccgatcatacccgcaaaatcctcttcgaggaaaccggttcaccgctaattcctttggaggaatttagagaggttaatttgtctaaacagtatggacttgcttacgatcctgaggttcttgatgttcttgatactctctctagggctaaaaaggtgaaggttgtagcaaaggtgtattggggagatccaagggagaaactttgtgatgctgtcgaaaatctaaaactcgattccattgttcttggcagtcgaggtttgggttctctcaaaaggatcttgctgggtagtgtgagcaatcatgtggtgacaaatgcaacatgtcctgtcacagttgttaaggctaattaaagtgtctcttgttctttaattggacccagttaataacattagtagttacgtgtgtcactcatgcattgttttgacatttatacgtttgttgccttctacaaatttgtgtgaaactgattggtactgtttcattaataaatttcagttaaatg

SEQ ID NO: 27886 - protein, 159 aa, Arabidopsis thaliana
  peptide (1)..(159): Ceres Seq. ID no. 12331701
MGKARTVGVGMDYSPTSKLALRWAAENLLEDGDTVILIHVQPQNADHTRKILFEETGSPLIPLEEFREVNLSKQYGLAYDPEVLDVLDTLSRAKKVKVVAKVYWGDPREKLCDAVENLKLDSIVLGSRGLGSLKRILLGSVSNHVVTNATCPVTVVKAN

SEQ ID NO: 27887 - protein, 149 aa, Arabidopsis thaliana
  peptide (1)..(149): Ceres Seq. ID no. 12331702
MDYSPTSKLALRWAAENLLEDGDTVILIHVQPQNADHTRKILFEETGSPLIPLEEFREVNLSKQYGLAYDPEVLDVLDTLSRAKKVKVVAKVYWGDPREKLCDAVENLKLDSIVLGSRGLGSLKRILLGSVSNHVVTNATCPVTVVKAN

SEQ ID NO: 27888 - DNA, 847 bp, Arabidopsis thaliana
  misc_feature (1)..(847): Ceres Seq. ID no. 12331364
  misc_feature (1)..(847): Ortholog of  Ceres SEQ ID NO 14316118 as cited in SEQ ID NO 52391
  misc_feature (1)..(847): Ortholog of  Ceres SEQ ID NO 14316060 as cited in SEQ ID NO 52465
  misc_feature (1)..(847): Ortholog of  Ceres SEQ ID NO 13664032 as cited in SEQ ID NO 67527
aataaacaccagtcgcagcgtttcgtagaaaaattcgatttctctaaagccctaaaactaaaacgactatccccaattccaagttctagggtttccatcttccccaatctagtataaatggcggatacgccttcgagcccagctggagatggcggagaaagcggcggttccgttagggagcaggatcgataccttcctatagctaatatcagcaggatcatgaagaaagcgttgcctcctaatggtaagattggaaaagatgctaaggatacagttcaggaatgcgtctctgagttcatcagcttcatcactagcgaggccagtgataagtgtcaaaaagagaaaaggaaaactgtgaatggtgatgatttgttgtgggcaatggcaacattaggatttgaggattacctggaacctctaaagatatacctagcgaggtacagggagttggagggtgataataagggatcaggaaagagtggagatggatcaaatagagatgctggtggcggtgtttctggtgaagaaatgccgagctggtaaaagaagttgcaagtagtgattaagaacaatcgccaaatgatcaagggaaattagagatcagtgagttgtttatagttgagctgatcgacaactatttcgggtttactctcaatttcggttatgttagtttgaacgtttggtttattgtttccggtttagttggttgtatttaaagatttctctgttagatgttgagaacacttgaatgaaggaaaaatttgtccacatcctgttgttattttcgattcactttcggaatttcatagctaatttattctcatttaataccaaatccttaaattaa

SEQ ID NO: 27889 - protein, 141 aa, Arabidopsis thaliana
  peptide (1)..(141): Ceres Seq. ID no. 12331365
MADTPSSPAGDGGESGGSVREQDRYLPIANISRIMKKALPPNGKIGKDAKDTVQECVSEFISFITSEASDKCQKEKRKTVNGDDLLWAMATLGFEDYLEPLKIYLARYRELEGDNKGSGKSGDGSNRDAGGGVSGEEMPSW

SEQ ID NO: 27890 - protein, 107 aa, Arabidopsis thaliana
  peptide (1)..(107): Ceres Seq. ID no. 12331366
MKKALPPNGKIGKDAKDTVQECVSEFISFITSEASDKCQKEKRKTVNGDDLLWAMATLGFEDYLEPLKIYLARYRELEGDNKGSGKSGDGSNRDAGGGVSGEEMPSW

SEQ ID NO: 27891 - DNA, 1149 bp, Arabidopsis thaliana
  misc_feature (1)..(1149): Ceres Seq. ID no. 13487530
  misc_feature (1)..(1149): Ortholog of  Ceres SEQ ID NO 13594298 as cited in SEQ ID NO 57803
  misc_feature (1)..(1149): Ortholog of  Ceres SEQ ID NO 13503476 as cited in SEQ ID NO 61978
  misc_feature (1)..(1149): Ortholog of  Ceres SEQ ID NO 12578438 as cited in SEQ ID NO 62201
  misc_feature (1)..(1149): Ortholog of  Ceres SEQ ID NO 12617675 as cited in SEQ ID NO 64656
cacacaaaagaagaaaaagagagaaatgggtaactctttgatctctcttctctcaatcttccacttgctggtgttatggggatcctcagtgaatgcctattggccaccatcacctggttattggccaagctccaaggttggttccctcaacttctacaaaggttttaggaatctttggggtcctcagcatcagagaatggaccaaaatgccctcaccatctggcttgatagaacctcaggaagtggattcaagtcagtgaagccattcagatcaggctactttggagcaaacatcaaactccaacctggctacactgctggagtcatcacatctctctatctatcaaataatgaggcacatccagggttccatgatgaggtagacatagaatttttggggacaacatttgggaagccttacacacttcagacaaatgtgtatattagaggaagtggtgatgggaaaatcattggccgtgagatgaagtttcgcttgtggtttgatccaactaaagattttcaccattatgctattctttggagccctagagaaatcatatttttggtggatgatattcccataagaagatacccaaagaagagtgcgtctacatttcctttaagaccaatgtggctttatggttccatatgggatgcttcttcttgggcaacggaagacggtaaatacaaagccgactataaatatcaacctttcactgctaaatacaccaattttaaagcgctcggctgcaccgcctactcgtcagctcggtgctatccgttgtcggcttcgccataccgttctggcggattaacccgacaacaacaccaagccatgagatgggttcaaacacatagtatggtatacaattattgcaaagattataagcgagaccattctttaacgccggaatgttggcgttaggaaatattcgatgaaagtcccaaagtttgagagttttaatcacatcaaagttaataccagaaagagcttggtacaattttgggatttttttcattactattattatgtggttggttgtttcacgaaaataaattttcttttttttttgacttatcatcttgtcttatgtaaatgtatccagtacggtaccatattgttttgtcaatcgtctgtgactgtgtctc

SEQ ID NO: 27892 - protein, 307 aa, Arabidopsis thaliana
  peptide (1)..(307): Ceres Seq. ID no. 13487531
TQKKKKREMGNSLISLLSIFHLLVLWGSSVNAYWPPSPGYWPSSKVGSLNFYKGFRNLWGPQHQRMDQNALTIWLDRTSGSGFKSVKPFRSGYFGANIKLQPGYTAGVITSLYLSNNEAHPGFHDEVDIEFLGTTFGKPYTLQTNVYIRGSGDGKIIGREMKFRLWFDPTKDFHHYAILWSPREIIFLVDDIPIRRYPKKSASTFPLRPMWLYGSIWDASSWATEDGKYKADYKYQPFTAKYTNFKALGCTAYSSARCYPLSASPYRSGGLTRQQHQAMRWVQTHSMVYNYCKDYKRDHSLTPECWR

SEQ ID NO: 27893 - protein, 299 aa, Arabidopsis thaliana
  peptide (1)..(299): Ceres Seq. ID no. 13487532
MGNSLISLLSIFHLLVLWGSSVNAYWPPSPGYWPSSKVGSLNFYKGFRNLWGPQHQRMDQNALTIWLDRTSGSGFKSVKPFRSGYFGANIKLQPGYTAGVITSLYLSNNEAHPGFHDEVDIEFLGTTFGKPYTLQTNVYIRGSGDGKIIGREMKFRLWFDPTKDFHHYAILWSPREIIFLVDDIPIRRYPKKSASTFPLRPMWLYGSIWDASSWATEDGKYKADYKYQPFTAKYTNFKALGCTAYSSARCYPLSASPYRSGGLTRQQHQAMRWVQTHSMVYNYCKDYKRDHSLTPECWR

SEQ ID NO: 27894 - protein, 242 aa, Arabidopsis thaliana
  peptide (1)..(242): Ceres Seq. ID no. 13487533
MDQNALTIWLDRTSGSGFKSVKPFRSGYFGANIKLQPGYTAGVITSLYLSNNEAHPGFHDEVDIEFLGTTFGKPYTLQTNVYIRGSGDGKIIGREMKFRLWFDPTKDFHHYAILWSPREIIFLVDDIPIRRYPKKSASTFPLRPMWLYGSIWDASSWATEDGKYKADYKYQPFTAKYTNFKALGCTAYSSARCYPLSASPYRSGGLTRQQHQAMRWVQTHSMVYNYCKDYKRDHSLTPECWR

SEQ ID NO: 27895 - DNA, 2320 bp, Arabidopsis thaliana
  misc_feature (1)..(2320): Ceres Seq. ID no. 13509885
  misc_feature (1)..(2320): Ortholog of  Ceres SEQ ID NO 15226533 as cited in SEQ ID NO 59723
atctgtcgtgttctgtttgttctcacttctcacttctcagatttttataaacatgaatgaaacctgaattgttccactaactctcagcaaaaatgcgatcactttacttaatcgtcttcatcgttattagtcttgttaaagcttcgaaaagcgatgatgggttttgttcagcgccttcgattgttgaatcggatgagaagacgaaccccatttattggaaagccacgaatccaacactctctccttcacacctccaagacttgcctggtttcacacgaagtgtatacaaacgagatcatgcgttaataacaccggaaagtcatgtatacagccctttacctgactggacaaacacattaggggcgtatttgatcacaccggcaacgggttcccattttgtcatgtacttggcgaaaatgaaagaaatgtcaagttcaggtttgcctccacaagacatagagcgtcttatattcgtggtcgagggtgctgtgacactcactaacacatccagttcttcaaaaaaattgacggttgattcatatgcgtacctacctccaaactttcaccattccttggactgtgttgagtctgcaacacttgttgtcttcgagcggaggtatgaatatctaggaagtcacaccacagagcttattgttggctccacagacaagcaaccactactcgagactcctggtgaggtttttgaactgcggaaacttcttccgatgtccgttgcttatgacttcaacatccatactatggattttcagcctggagagtttctgaatgttaaggaagttcattataaccagcatggtttgttgcttctggaggggcaaggcatttatcgcttgggtgataactggtatccagttcaggctggtgatgtcatatggatggctccttttgtccctcaatggtatgctgcactcggaaagactaggtctcggtatttgttgtacaaagatgtgaatcgaaatccattgtgatcaaagattgatatgactttgcagtaaaagtcagaatcttgttgttcagcttcttgtcttataaacgccatgtccactctaagcactagctacgtgagacttagttgtatgaatcttataacaattgtgaaaagaaacacattgataaatgatgaaaaaaaaaaaaaaaaaaaaaaaaaaaaaaagaaaaaaaaaaaaaaaaaacggcacgagaagctttttttttttttttttttagtcatcgtcccaattgggcagttgattgtatagctaagcgaacgtttgatgttaacctaaaatggttatgtttctgtttttagtcatgttatcctttgtcaaattgtgaaatccctaaaagccactactacacaaacatcggattgcttgagaaacaaggaactggaactatacagactgcatcgcgctcttttctggatcaataatgatgtgatcaacatttaacaacaatcaaaaacctgaaaactagagtcgagcagagatctcatgtgccattagtagcattatcagtgtgacctccattgctgtctttgccattcacttgagccctcggtctccgatctgcaggatcaacaccgttcccattcaagagtttgtgactctcttctttggttctgtcttttgagatcacagggagcaatgccgttgttcgatcaggcaattctggtaatttcttgtcgaggaagaagacaaccaagttcacagtataccacgcaacaaccacatcaacagtgtaatgtttacgggacgcaataatcaagaggctttgcaagatggcaatgacccaacctaacagctttatgaaccttttagaaccgtatttctggtaagtgcggacaaagactagtgtgaatatcatgtgcgatgagaaaatcaggtctccacatccgtatatcacaccacgaggcaagtctcttgcgtctttccctcaaggctgttattactcgacggcattaggtgggcttaggagcttcgagaaccctaagaacaagatcactgcagttcctgctaatgagggagaaatttggggagctaccttcaaggtggaaggagcaacagttcttgcagattgaaaatgaaagagaaacacaaaagaagtttcatgtctcttaaagctctcgaactgtaacagcacaaacaaaaaaaaatatgtaggaaaaacaaaaagctgttctatgagtacttgaagctatcaatggttggtgataatgtgtgtagtgttgtatctctcttatgtcttatgcttctttgtacagcacgtgtgtgtcttctggtgttattagtgtcttcttcctaataagttaatgtctccg

SEQ ID NO: 27896 - protein, 298 aa, Arabidopsis thaliana
  peptide (1)..(298): Ceres Seq. ID no. 13509886
MRSLYLIVFIVISLVKASKSDDGFCSAPSIVESDEKTNPIYWKATNPTLSPSHLQDLPGFTRSVYKRDHALITPESHVYSPLPDWTNTLGAYLITPATGSHFVMYLAKMKEMSSSGLPPQDIERLIFVVEGAVTLTNTSSSSKKLTVDSYAYLPPNFHHSLDCVESATLVVFERRYEYLGSHTTELIVGSTDKQPLLETPGEVFELRKLLPMSVAYDFNIHTMDFQPGEFLNVKEVHYNQHGLLLLEGQGIYRLGDNWYPVQAGDVIWMAPFVPQWYAALGKTRSRYLLYKDVNRNPL

SEQ ID NO: 27897 - protein, 195 aa, Arabidopsis thaliana
  peptide (1)..(195): Ceres Seq. ID no. 13509887
MYLAKMKEMSSSGLPPQDIERLIFVVEGAVTLTNTSSSSKKLTVDSYAYLPPNFHHSLDCVESATLVVFERRYEYLGSHTTELIVGSTDKQPLLETPGEVFELRKLLPMSVAYDFNIHTMDFQPGEFLNVKEVHYNQHGLLLLEGQGIYRLGDNWYPVQAGDVIWMAPFVPQWYAALGKTRSRYLLYKDVNRNPL

SEQ ID NO: 27898 - protein, 190 aa, Arabidopsis thaliana
  peptide (1)..(190): Ceres Seq. ID no. 13509888
MKEMSSSGLPPQDIERLIFVVEGAVTLTNTSSSSKKLTVDSYAYLPPNFHHSLDCVESATLVVFERRYEYLGSHTTELIVGSTDKQPLLETPGEVFELRKLLPMSVAYDFNIHTMDFQPGEFLNVKEVHYNQHGLLLLEGQGIYRLGDNWYPVQAGDVIWMAPFVPQWYAALGKTRSRYLLYKDVNRNPL

SEQ ID NO: 27899 - DNA, 1178 bp, Arabidopsis thaliana
  misc_feature (1)..(1178): Ceres Seq. ID no. 13490414
  misc_feature (1)..(1178): Ortholog of  Ceres SEQ ID NO 14314468 as cited in SEQ ID NO 52388
  misc_feature (1)..(1178): Ortholog of  Ceres SEQ ID NO 14307446 as cited in SEQ ID NO 59409
acttcaattgatttgccaaaggcttgcctcatggcttattcttcagtaccaagctgtttccatggctatcttctccatcgttgttcgttctccaccacacaatttttctcgggttctctctcttgtggcttctctgcttctaccaattcaagactaagaacatgtgtcaaattcgagaagtttcagggtgactctcctcttgaacagaacacttcagtttcttcttcctcttctgtttcacaggaactaccattagaagaagctcaagaccaactagaagaagaagaagatgatgatgactgtttgcctaatgatttggaaggagctgttaggcaatcaggtgaagcaggtgctgcgtttgtgaactcaggaggaaatagagctattgtggagcttttgattcctcagctgcagtttttagacgatgaaggtgcacaagctgaactttgggacctttcgcgtgttttcttggagactctcattaaagaaacaggttgtgagagagttaaagctgtatttccagacgctggagctgctgcattgctaaaataccggtggaaagatgcaacgttcggatttgctagcttaagtgaccggaaacctgtggagaaagaagatgagatcattgtcatggttgttcctgattaccaaatgctggaatatgttgagaaaattgctaatgggcttgctgatgacccgccaaggcctctcattatgtggaaccctcgtcttataagcgaggaagtcggggttgggtttaacgtgagaaaactaaggcgttacttcctaagttcattcactacggtttactctatgagacctctggctgctggtgctgttttcaggtgttatcctggtaagtggaaagtcttctatgataacaaagacagaccaggccgatacctactcgctaaagaactcattggtcgacctgatgcagaggatcttgagataatatatgggggagtagaagagaaatcagaagaagggccatctttaatgagtcaagctgctggaattttctcatccattaacaggttcatgaaatcaatgtgaagatgatttcttctctgcagtgtaatactattcacatgtcctggtattagaaatgtaaccaaagggtattactgtatatctttctatgctattacatcatgaagagtataatacgtactggt

SEQ ID NO: 27900 - protein, 351 aa, Arabidopsis thaliana
  peptide (1)..(351): Ceres Seq. ID no. 13490415
TSIDLPKACLMAYSSVPSCFHGYLLHRCSFSTTQFFSGSLSCGFSASTNSRLRTCVKFEKFQGDSPLEQNTSVSSSSSVSQELPLEEAQDQLEEEEDDDDCLPNDLEGAVRQSGEAGAAFVNSGGNRAIVELLIPQLQFLDDEGAQAELWDLSRVFLETLIKETGCERVKAVFPDAGAAALLKYRWKDATFGFASLSDRKPVEKEDEIIVMVVPDYQMLEYVEKIANGLADDPPRPLIMWNPRLISEEVGVGFNVRKLRRYFLSSFTTVYSMRPLAAGAVFRCYPGKWKVFYDNKDRPGRYLLAKELIGRPDAEDLEIIYGGVEEKSEEGPSLMSQAAGIFSSINRFMKSM

SEQ ID NO: 27901 - protein, 341 aa, Arabidopsis thaliana
  peptide (1)..(341): Ceres Seq. ID no. 13490416
MAYSSVPSCFHGYLLHRCSFSTTQFFSGSLSCGFSASTNSRLRTCVKFEKFQGDSPLEQNTSVSSSSSVSQELPLEEAQDQLEEEEDDDDCLPNDLEGAVRQSGEAGAAFVNSGGNRAIVELLIPQLQFLDDEGAQAELWDLSRVFLETLIKETGCERVKAVFPDAGAAALLKYRWKDATFGFASLSDRKPVEKEDEIIVMVVPDYQMLEYVEKIANGLADDPPRPLIMWNPRLISEEVGVGFNVRKLRRYFLSSFTTVYSMRPLAAGAVFRCYPGKWKVFYDNKDRPGRYLLAKELIGRPDAEDLEIIYGGVEEKSEEGPSLMSQAAGIFSSINRFMKSM

SEQ ID NO: 27902 - DNA, 1343 bp, Arabidopsis thaliana
  misc_feature (1)..(1343): Ceres Seq. ID no. 13487498
  misc_feature (1)..(1343): Ortholog of  Ceres SEQ ID NO 13654155 as cited in SEQ ID NO 68352
agcaaaattccaaacaaatattttcccatccttggatttttcatccccttcctctcggcgacaagaacaacaacaacacaaaaaaactcaaaaccatcgcgaacatcgaagaatcatctctcaacaattctccgataattctttggactgatgaattaaagggaaacgctgagtgtaaatcatacaacagttctaagtcgtgaaaacaaaaaaaagatggcttgtagaggttgtttggagtgtttgttgaagttactcaactttctcctggctgttgctggacttggcatgattggttatggtatctatttattcgttgagtacaagagagttaccgataattctgttacattcgatttgactaatggagatcaaagttacgtttcgtttgggaggcctattcttatggctgtgtcactgtcttctaatatctttgacaatcttcccaaagcgtggttcatatacttgttcattggtattggtgtggctctctttgttatttcttgctgtggctgtgttggtacttgttcgaggagtgtctgctgcttatcttgctactctcttcttctgatcttgttgatcttggtggagcttggattcgcagcatttattttcttcgataacagctggagagatgaacttccttctgacaggactggaaacttcgatacgatatataatttccttagagagaactggaagattgtaagatgggtagctctaggagcagttgttttcgaggctttactcttcttgcttgcccttatggtcagggcagctaatacaccagcagagtatgacagtgatgatgaatatcttgctccaaggcaacaaatcaggcagccattcatcaaccgccaagccgcccctgtcactggtgtcccagttgctcctactttggaccaacgcccaagccgcagtgacccttggagtgcacgtatgagggaaaagtatgggcttgacacatctgagttcacatacaatccctcagagtcacaccggttccagcaaatgccagcgcaaccaaacgaagaaaagggccgatgcaccatcatgtgagtccattttaaaagtcttgaagagttcagttaattctcttttcctgtgtctttattatttctgcgtgtaacaatcaagagtgtcagtaaaagtaggattcttgtttctgggttgatgatgactctagcatttgagatctctaatcaacctagtcacggtctcaaaactcatttgttgtgtctgtgtagtcttttgtaaggattcaccattatgaatattcatcttggttcccagtctgatccagtcctatgtttcttattatatataaaaaattcactttcttc

SEQ ID NO: 27903 - protein, 280 aa, Arabidopsis thaliana
  peptide (1)..(280): Ceres Seq. ID no. 13487499
MACRGCLECLLKLLNFLLAVAGLGMIGYGIYLFVEYKRVTDNSVTFDLTNGDQSYVSFGRPILMAVSLSSNIFDNLPKAWFIYLFIGIGVALFVISCCGCVGTCSRSVCCLSCYSLLLILLILVELGFAAFIFFDNSWRDELPSDRTGNFDTIYNFLRENWKIVRWVALGAVVFEALLFLLALMVRAANTPAEYDSDDEYLAPRQQIRQPFINRQAAPVTGVPVAPTLDQRPSRSDPWSARMREKYGLDTSEFTYNPSESHRFQQMPAQPNEEKGRCTIM

SEQ ID NO: 27904 - protein, 256 aa, Arabidopsis thaliana
  peptide (1)..(256): Ceres Seq. ID no. 13487500
MIGYGIYLFVEYKRVTDNSVTFDLTNGDQSYVSFGRPILMAVSLSSNIFDNLPKAWFIYLFIGIGVALFVISCCGCVGTCSRSVCCLSCYSLLLILLILVELGFAAFIFFDNSWRDELPSDRTGNFDTIYNFLRENWKIVRWVALGAVVFEALLFLLALMVRAANTPAEYDSDDEYLAPRQQIRQPFINRQAAPVTGVPVAPTLDQRPSRSDPWSARMREKYGLDTSEFTYNPSESHRFQQMPAQPNEEKGRCTIM

SEQ ID NO: 27905 - protein, 217 aa, Arabidopsis thaliana
  peptide (1)..(217): Ceres Seq. ID no. 13487501
MAVSLSSNIFDNLPKAWFIYLFIGIGVALFVISCCGCVGTCSRSVCCLSCYSLLLILLILVELGFAAFIFFDNSWRDELPSDRTGNFDTIYNFLRENWKIVRWVALGAVVFEALLFLLALMVRAANTPAEYDSDDEYLAPRQQIRQPFINRQAAPVTGVPVAPTLDQRPSRSDPWSARMREKYGLDTSEFTYNPSESHRFQQMPAQPNEEKGRCTIM

SEQ ID NO: 27906 - DNA, 1672 bp, Arabidopsis thaliana
  misc_feature (1)..(1672): Ceres Seq. ID no. 12395760
  misc_feature (1)..(1672): Ortholog of  Ceres SEQ ID NO 14311183 as cited in SEQ ID NO 58495
  misc_feature (1)..(1672): Ortholog of  Ceres SEQ ID NO 13502874 as cited in SEQ ID NO 66298
  misc_feature (1)..(1672): Ortholog of  Ceres SEQ ID NO 12614124 as cited in SEQ ID NO 68392
aatcttcgtcttcttcttctctgcttgagtcaacaagaaataaacagagctaagatgtctcctctaatctcctttactccaacttctcttgatttcaccttcttcgccattatcatctcaggtttcgttttcatcatcactcgatggaattccaattcaaagaaacgtttaaaccttcctccaggtccgccaggttggccggtggtcggaaacttattccagttcgcgcgctcaggtaaaccgtttttcgaatacgcagaggatctcaagaaaacgtatggcccgatttttacactgagaatggggactcgaacaatgatcatcctctccgacgcaactctagtccacgaagctttgatccaacgcggagctctcttcgcttcacgacccgccgagaatccgacccgaacaatcttcagctgcaacaaattcactgtcaacgccgctaaatacggtccagtgtggcgatctctgagaagaaacatggtgcagaacatgcttagctcgacacgtctcaaggaattcgggaaactgagacaatccgccatggataaactcatcgagaggatcaaatcggaagctagagacaacgacgggctaatctgggttcttaaaaacgcaagattcgctgcgttttgtattctcttggaaatgtgtttcggaatcgagatggatgaagagacaatcgagaagatggatgacattttgaagacggtgttaatgactgttgatccacgaatcgacgattatcttccgattcttgctccgttcttctctaaagagaggaaacgagctctcgaagttcgccgtgaacaagtcgattacgtcgtcggagttatcgagagacgacggagagcgattcagaatccaggatctgataaaacggcgtcgtctttttcatacttagatacactctttgatttaaaaatcgaaggtcgtaaaacgacgccgtctaacgaagagctcgtgacgctctgctctgagtttcttaacggtggtacggatacgacggggacggcgatcgagtgggggatagcgcagctgattgcgaatcctgagattcaatctcggctctacgatgagattaaatcaacggtgggagatgatcgtagggtcgatgagaaagatgtggacaaaatggtctttttacaagcttttgttaaggagcttctccggaaacatccgccgacttatttttctctgacgcatgccgttatggagacgacgacgcttgctggttacgatattcccgccggcgttaacgtcgaggtttatcttccgggtattagtgaggatccgagaatttggaataacccgaaaaagtttgatccggaccggtttatgttgggtaaggaagatgctgacataaccgggattagtggagtaaaaatgattccgtttggtgtgggccgtaggatctgtccaggacttgcaatggcaaccgtacacgtccatttgatgcttgcgcggatggttcaggagttcgagtggtgtgctcatccaccaggaagtgagattgatttcgccggaaaattggagtttacggtggtgatgaagaatccgttgagagctatggtcaaaccaaggatttagtcttttattgtttttttgttaagaatattgagattattgtaaggtgtgtttacttataaacattaaagtacccaaatcc

SEQ ID NO: 27907 - protein, 530 aa, Arabidopsis thaliana
  peptide (1)..(530): Ceres Seq. ID no. 12395761
NLRLLLLCLSQQEINRAKMSPLISFTPTSLDFTFFAIIISGFVFIITRWNSNSKKRLNLPPGPPGWPVVGNLFQFARSGKPFFEYAEDLKKTYGPIFTLRMGTRTMIILSDATLVHEALIQRGALFASRPAENPTRTIFSCNKFTVNAAKYGPVWRSLRRNMVQNMLSSTRLKEFGKLRQSAMDKLIERIKSEARDNDGLIWVLKNARFAAFCILLEMCFGIEMDEETIEKMDDILKTVLMTVDPRIDDYLPILAPFFSKERKRALEVRREQVDYVVGVIERRRRAIQNPGSDKTASSFSYLDTLFDLKIEGRKTTPSNEELVTLCSEFLNGGTDTTGTAIEWGIAQLIANPEIQSRLYDEIKSTVGDDRRVDEKDVDKMVFLQAFVKELLRKHPPTYFSLTHAVMETTTLAGYDIPAGVNVEVYLPGISEDPRIWNNPKKFDPDRFMLGKEDADITGISGVKMIPFGVGRRICPGLAMATVHVHLMLARMVQEFEWCAHPPGSEIDFAGKLEFTVVMKNPLRAMVKPRI

SEQ ID NO: 27908 - protein, 512 aa, Arabidopsis thaliana
  peptide (1)..(512): Ceres Seq. ID no. 12395762
MSPLISFTPTSLDFTFFAIIISGFVFIITRWNSNSKKRLNLPPGPPGWPVVGNLFQFARSGKPFFEYAEDLKKTYGPIFTLRMGTRTMIILSDATLVHEALIQRGALFASRPAENPTRTIFSCNKFTVNAAKYGPVWRSLRRNMVQNMLSSTRLKEFGKLRQSAMDKLIERIKSEARDNDGLIWVLKNARFAAFCILLEMCFGIEMDEETIEKMDDILKTVLMTVDPRIDDYLPILAPFFSKERKRALEVRREQVDYVVGVIERRRRAIQNPGSDKTASSFSYLDTLFDLKIEGRKTTPSNEELVTLCSEFLNGGTDTTGTAIEWGIAQLIANPEIQSRLYDEIKSTVGDDRRVDEKDVDKMVFLQAFVKELLRKHPPTYFSLTHAVMETTTLAGYDIPAGVNVEVYLPGISEDPRIWNNPKKFDPDRFMLGKEDADITGISGVKMIPFGVGRRICPGLAMATVHVHLMLARMVQEFEWCAHPPGSEIDFAGKLEFTVVMKNPLRAMVKPRI

SEQ ID NO: 27909 - protein, 430 aa, Arabidopsis thaliana
  peptide (1)..(430): Ceres Seq. ID no. 12395763
MGTRTMIILSDATLVHEALIQRGALFASRPAENPTRTIFSCNKFTVNAAKYGPVWRSLRRNMVQNMLSSTRLKEFGKLRQSAMDKLIERIKSEARDNDGLIWVLKNARFAAFCILLEMCFGIEMDEETIEKMDDILKTVLMTVDPRIDDYLPILAPFFSKERKRALEVRREQVDYVVGVIERRRRAIQNPGSDKTASSFSYLDTLFDLKIEGRKTTPSNEELVTLCSEFLNGGTDTTGTAIEWGIAQLIANPEIQSRLYDEIKSTVGDDRRVDEKDVDKMVFLQAFVKELLRKHPPTYFSLTHAVMETTTLAGYDIPAGVNVEVYLPGISEDPRIWNNPKKFDPDRFMLGKEDADITGISGVKMIPFGVGRRICPGLAMATVHVHLMLARMVQEFEWCAHPPGSEIDFAGKLEFTVVMKNPLRAMVKPRI

SEQ ID NO: 27910 - DNA, 1324 bp, Arabidopsis thaliana
  misc_feature (1)..(1324): Ceres Seq. ID no. 12422635
  misc_feature (1)..(1324): Ortholog of  Ceres SEQ ID NO 13596585 as cited in SEQ ID NO 62424
  misc_feature (1)..(1324): Ortholog of  Ceres SEQ ID NO 15225240 as cited in SEQ ID NO 66495
accgtttgttcttcatctcctcgccgccgcctcctactctctctttctctctaaattgctcaattctctcggccacagacctagacaaggatggtgactaaagcagaaaaacaattcgccaaaaatttcaacatagacgatctccctgacgtccctgccggacttcctccacatctcaaagcccagcaaactcgtgtcgtctctaaaaacaacgctcctgctcatactgcgagtgccatttactcgggtacctatgtttcttctacggaagaggacgacaatgtgaagctaggaaacttctatgataacttcaaagttgatgtggttagtctcacaaagacagatatggaatttgatatgattggtattgatgcagcgtttgccaatgcattccgaaggatccttatagctgaggttccttcaatggctattgaaaaagtgttgatagcgtacaacacatcggttattatagacgaagttcttgctcacaggatgggtcttattccaattgccacagatccaagactttttgaatatttatccgaacatgatcaggcgaatgaaaagaacaccattgtattcaaactccatgtgaaatgtccgaaaaatagaccacgtcttaaagttttaacgagtgatttaaaatggttaccaaatggaagtgagcttctgagagaatcggaaaataaaacctcaaagccaaaacttacacttcattcagttgcagccaagattcattacctgaatttgctaataatcctatcactccatgcgacctcgatatcttgatagcaaaactcgcccctggtcaggaaatcgagctcgaagctcatgcggttaagggcattggtaaaacacatgcaaagtggtctccagtagggactgcttggtatagaatgcatcctgaggtggttctacgtggggaagttgaggatgaacttgctgaacgacttgtaaacgtctgcccacagaatgttttcgacattgaagacatgggaaaaggtaagaaaagggcaacagtagcgcagccacgtaagtgcacattgtgtaaggaatgcgtaagagacgatgatttggtagaccatgtggatcttggcagtgttaagaaccattttatatttaacattgagtccaccggatcactgcctccagaggttctcttcactgaagctgtgaagatattggaagctaaatgtgaagctataaccgacttttgagttctggtttagttcaattttgaattgtctgtctatcaatgtttctcctcctattgataaattaccaacaaacaacattgacatatttatttatacggttgttgttc

SEQ ID NO: 27911 - protein, 232 aa, Arabidopsis thaliana
  peptide (1)..(232): Ceres Seq. ID no. 12422636
MVTKAEKQFAKNFNIDDLPDVPAGLPPHLKAQQTRVVSKNNAPAHTASAIYSGTYVSSTEEDDNVKLGNFYDNFKVDVVSLTKTDMEFDMIGIDAAFANAFRRILIAEVPSMAIEKVLIAYNTSVIIDEVLAHRMGLIPIATDPRLFEYLSEHDQANEKNTIVFKLHVKCPKNRPRLKVLTSDLKWLPNGSELLRESENKTSKPKLTLHSVAAKIHYLNLLIILSLHATSIS

SEQ ID NO: 27912 - protein, 147 aa, Arabidopsis thaliana
  peptide (1)..(147): Ceres Seq. ID no. 12422637
MEFDMIGIDAAFANAFRRILIAEVPSMAIEKVLIAYNTSVIIDEVLAHRMGLIPIATDPRLFEYLSEHDQANEKNTIVFKLHVKCPKNRPRLKVLTSDLKWLPNGSELLRESENKTSKPKLTLHSVAAKIHYLNLLIILSLHATSIS

SEQ ID NO: 27913 - protein, 143 aa, Arabidopsis thaliana
  peptide (1)..(143): Ceres Seq. ID no. 12422638
MIGIDAAFANAFRRILIAEVPSMAIEKVLIAYNTSVIIDEVLAHRMGLIPIATDPRLFEYLSEHDQANEKNTIVFKLHVKCPKNRPRLKVLTSDLKWLPNGSELLRESENKTSKPKLTLHSVAAKIHYLNLLIILSLHATSIS

SEQ ID NO: 27914 - DNA, 429 bp, Arabidopsis thaliana
  misc_feature (1)..(429): Ceres Seq. ID no. 12334228
  misc_feature (1)..(429): Ortholog of  Ceres SEQ ID NO 13593557 as cited in SEQ ID NO 175
aagcaaaacgcaaaaaccaaagatgggtgagatgatcaaagccagacgcatactcctcttctccatcgtattcctcttcttcttctctcaggcctttcttttgtgttcagctgagggtgagcatggctcaagaaatctcgcagtggtgatgaagaaaagggtgaaatacagaggacctcgcaacacaacaacatcctctgcagcctcaactattatgttcccaggctccttccatattggtgctgcttcctctttactccttgctcttcttttataagctcccttgtagtgatcattattgtactgtttgacaatgattcatgtaatttgcttttctcgattgattttgtagaaatttctcaaatggtctaaaactctgtttgtaaattatttgctctgtttcaaaagtatatggtcacttgtcccact

SEQ ID NO: 27915 - protein, 91 aa, Arabidopsis thaliana
  peptide (1)..(91): Ceres Seq. ID no. 12334229
SKTQKPKMGEMIKARRILLFSIVFLFFFSQAFLLCSAEGEHGSRNLAVVMKKRVKYRGPRNTTTSSAASTIMFPGSFHIGAASSLLLALLL

SEQ ID NO: 27916 - protein, 84 aa, Arabidopsis thaliana
  peptide (1)..(84): Ceres Seq. ID no. 12334230
MGEMIKARRILLFSIVFLFFFSQAFLLCSAEGEHGSRNLAVVMKKRVKYRGPRNTTTSSAASTIMFPGSFHIGAASSLLLALLL

SEQ ID NO: 27917 - protein, 81 aa, Arabidopsis thaliana
  peptide (1)..(81): Ceres Seq. ID no. 12334231
MIKARRILLFSIVFLFFFSQAFLLCSAEGEHGSRNLAVVMKKRVKYRGPRNTTTSSAASTIMFPGSFHIGAASSLLLALLL

SEQ ID NO: 27918 - DNA, 1403 bp, Arabidopsis thaliana
  misc_feature (1)..(1403): Ceres Seq. ID no. 12335483
  misc_feature (1)..(1403): Ortholog of  Ceres SEQ ID NO 14309287 as cited in SEQ ID NO 0
aacaaagatatttttctttattctctcgcagttcaattagggtttcaatctctctgctctgcttgtcatcaccaccaccaccaccaccgtcgtcgtctctctgtatctctccggcgggttctctctctacttcccccggaggattaaaagatggaccagtcttttattttgatattccgttagcttgttcagttattgtagaagctgtgtcgtcaagacttttaatatctcaaatggatgatggtgggcatcgtgagaatggtcggcataaagcagcagttcagggccagtggttgatgcagcatcagccgtcgatgaaacaagtgatgtcgataatagcagagcgcgatgcagcgattcaggagagaaatctggcgatatcagagaaaaaagcagcagtagctgaaagggacatggcgtttcttcagagggacaccgccattgctgagcgcaacaatgcgataatggagagagacagtgctcttacagctctccaataccgtgagaactctatggttactgctcctgctgccaatatgtcagcatgtccaccgggttgtcaaatatcacgtggtgtaaaacacttgcaccatccgcacatgcatcatcatcatcaacaacatcacatacctcagttgactgaaaatgcatatgaaaccagagaaatggagccaaacgatggtctcccgacatcaccacctgctggatccaccttggaatctgccaaaccaaagcgcggtaaaagagtgaacccaaaggcgacaacacaaaccgctgctaataagagagggccaaaaaatcagaggaaggttaagaaagagagcgaggacgacttaaacaagataatgtttgtaaagacgacccatgactacacagacgaagattcaagtaagcatatcttaataggatcaaaatctgactggaaaagtcaagaaatggtggggctgaaccaagtggtttacgacgagacaacgatgccaccacctgtatgttcatgtacaggagttctcagacagtgctacaaatggggaaatggaggttggcaatcatcgtgttgcacaactacactatcaatgtatcctttacctgcactgcccaacaaaaggcatgctcgagttggtggacggaaaatgagcggaagcgcgttcaacaagcttctaagccggcttgctgcagaagggcatcatgatctttcaaacccggtcgatctgaaggaccattgggcaaagcacggtacaaaccgctacattacgattaaatgatatgtgcatttaggtgtgagttgttcttacgacattatctgattttaaatcatgtgtactaaattcaaataaactcgagaggaaaagaattgtatgtggagccaatgttatgttgtattatataattcgaaaaattttagt

SEQ ID NO: 27919 - protein, 419 aa, Arabidopsis thaliana
  peptide (1)..(419): Ceres Seq. ID no. 12335484
QRYFSLFSRSSIRVSISLLCLSSPPPPPPSSSLCISPAGSLSTSPGGLKDGPVFYFDIPLACSVIVEAVSSRLLISQMDDGGHRENGRHKAAVQGQWLMQHQPSMKQVMSIIAERDAAIQERNLAISEKKAAVAERDMAFLQRDTAIAERNNAIMERDSALTALQYRENSMVTAPAANMSACPPGCQISRGVKHLHHPHMHHHHQQHHIPQLTENAYETREMEPNDGLPTSPPAGSTLESAKPKRGKRVNPKATTQTAANKRGPKNQRKVKKESEDDLNKIMFVKTTHDYTDEDSSKHILIGSKSDWKSQEMVGLNQVVYDETTMPPPVCSCTGVLRQCYKWGNGGWQSSCCTTTLSMYPLPALPNKRHARVGGRKMSGSAFNKLLSRLAAEGHHDLSNPVDLKDHWAKHGTNRYITIK

SEQ ID NO: 27920 - protein, 342 aa, Arabidopsis thaliana
  peptide (1)..(342): Ceres Seq. ID no. 12335485
MDDGGHRENGRHKAAVQGQWLMQHQPSMKQVMSIIAERDAAIQERNLAISEKKAAVAERDMAFLQRDTAIAERNNAIMERDSALTALQYRENSMVTAPAANMSACPPGCQISRGVKHLHHPHMHHHHQQHHIPQLTENAYETREMEPNDGLPTSPPAGSTLESAKPKRGKRVNPKATTQTAANKRGPKNQRKVKKESEDDLNKIMFVKTTHDYTDEDSSKHILIGSKSDWKSQEMVGLNQVVYDETTMPPPVCSCTGVLRQCYKWGNGGWQSSCCTTTLSMYPLPALPNKRHARVGGRKMSGSAFNKLLSRLAAEGHHDLSNPVDLKDHWAKHGTNRYITIK

SEQ ID NO: 27921 - protein, 321 aa, Arabidopsis thaliana
  peptide (1)..(321): Ceres Seq. ID no. 12335486
MQHQPSMKQVMSIIAERDAAIQERNLAISEKKAAVAERDMAFLQRDTAIAERNNAIMERDSALTALQYRENSMVTAPAANMSACPPGCQISRGVKHLHHPHMHHHHQQHHIPQLTENAYETREMEPNDGLPTSPPAGSTLESAKPKRGKRVNPKATTQTAANKRGPKNQRKVKKESEDDLNKIMFVKTTHDYTDEDSSKHILIGSKSDWKSQEMVGLNQVVYDETTMPPPVCSCTGVLRQCYKWGNGGWQSSCCTTTLSMYPLPALPNKRHARVGGRKMSGSAFNKLLSRLAAEGHHDLSNPVDLKDHWAKHGTNRYITIK

SEQ ID NO: 27922 - DNA, 1757 bp, Arabidopsis thaliana
  misc_feature (1)..(1757): Ceres Seq. ID no. 12327245
  misc_feature (1)..(1757): Ortholog of  Ceres SEQ ID NO 13599900 as cited in SEQ ID NO 531
  misc_feature (1)..(1757): Ortholog of  Ceres SEQ ID NO 13659971 as cited in SEQ ID NO 67565
  misc_feature (1)..(1757): Ortholog of  Ceres SEQ ID NO 13500385 as cited in SEQ ID NO 67583
gagaatttcgaaatcggaacccaccaccaccaccctccatcgtcgccaacagatccaacggttctctgattatttttatttgaactaaatgggtcgcatcgagatttagaagaaaagggaaatgttggcaatggagaaagaatttgattcaaagcttgttcttcaagggaactcatccaacggtgctaatgtttctagaagcaaaagcttctcctttaaagctcctcaagaaaatttcaccagccatgatttcgaatttggcaagatctatggtgttggttcttactctaaggttgttagggcaaagaagaaggaaactggaactgtgtatgctttaaagattatggacaaaaagtttatcaccaaggagaataaaactgcttatgtgaaattggaaaggattgttcttgatcaacttgaacatcctgggatcattaaactttacttcacgtttcaagacacatcctcactatatatggcacttgaatcttgtgagggtggcgagcttttcgaccaaataaccagaaaaggtcggctatcggaggatgaagctcggttctacactgcagaagttgtggatgctcttgagtatatacatagtatgggactgattcatcgagatattaagccggagaatctgttgctgacttcagatggacacattaagattgcggattttggaagtgtaaagccgatgcaggatagccagatcacagttctacctaatgcagcttctgacgataaggcgtgcacttttgtcgggactgctgcatatgttcctccagaagttctcaactcctctcccgcaactttcgggaatgatctttgggctctcggctgcactctctatcagatgctttcggggacttccccatttaaagatgcaagtgaatggctgattttccaaagaattatagccagagatataaagttcccaaatcatttttcagaagcagcaagagacctcatcgaccggttgctggataccgagccaagcagaaggccaggtgctggctcagaaggttatgttgctcttaagagacatcctttctttaatggagttgactggaagaatctaaggtcccagactcctccaaaactagctccagatcctgcgtctcagacagcatctcccgagagggatgacacacatggttctccatggaacctgacacatattggagattctttagccacacagaacgaggggcacagtgctcctcctacatcttctgaatcatcgggttccataactcgacttgcttcaatagactcttttgattcaagatggcaacagtttttagagccaggagaatcggttctgatgatatcagcggtgaagaagcttcagaaaataacgagcaagaaggtgcagctaatactcaccaacaaacccaagctgatctatgtcgacccgtcaaaactagttgtgaaaggaaacattatatggtctgataactcgaatgacctcaacgttgtagtcactagcccttcacatttcaagatttgcacgccaaagaaggttttatcatttgaagacgcaaaacagagagcttcagtgtggaaaaaggcaatcgagactcttcagaaccgctgagacaaactccactgaagaatggttctgttaatttcctcgttggtgttttgtctttccttcaagattttaaactgaccaaactccattcttcatatgttttttctatttcacgcatccttgaaaagaccagttggacacaaaactgaaaaactgctttttg

SEQ ID NO: 27923 - protein, 491 aa, Arabidopsis thaliana
  peptide (1)..(491): Ceres Seq. ID no. 12327246
MLAMEKEFDSKLVLQGNSSNGANVSRSKSFSFKAPQENFTSHDFEFGKIYGVGSYSKVVRAKKKETGTVYALKIMDKKFITKENKTAYVKLERIVLDQLEHPGIIKLYFTFQDTSSLYMALESCEGGELFDQITRKGRLSEDEARFYTAEVVDALEYIHSMGLIHRDIKPENLLLTSDGHIKIADFGSVKPMQDSQITVLPNAASDDKACTFVGTAAYVPPEVLNSSPATFGNDLWALGCTLYQMLSGTSPFKDASEWLIFQRIIARDIKFPNHFSEAARDLIDRLLDTEPSRRPGAGSEGYVALKRHPFFNGVDWKNLRSQTPPKLAPDPASQTASPERDDTHGSPWNLTHIGDSLATQNEGHSAPPTSSESSGSITRLASIDSFDSRWQQFLEPGESVLMISAVKKLQKITSKKVQLILTNKPKLIYVDPSKLVVKGNIIWSDNSNDLNVVVTSPSHFKICTPKKVLSFEDAKQRASVWKKAIETLQNR

SEQ ID NO: 27924 - protein, 488 aa, Arabidopsis thaliana
  peptide (1)..(488): Ceres Seq. ID no. 12327247
MEKEFDSKLVLQGNSSNGANVSRSKSFSFKAPQENFTSHDFEFGKIYGVGSYSKVVRAKKKETGTVYALKIMDKKFITKENKTAYVKLERIVLDQLEHPGIIKLYFTFQDTSSLYMALESCEGGELFDQITRKGRLSEDEARFYTAEVVDALEYIHSMGLIHRDIKPENLLLTSDGHIKIADFGSVKPMQDSQITVLPNAASDDKACTFVGTAAYVPPEVLNSSPATFGNDLWALGCTLYQMLSGTSPFKDASEWLIFQRIIARDIKFPNHFSEAARDLIDRLLDTEPSRRPGAGSEGYVALKRHPFFNGVDWKNLRSQTPPKLAPDPASQTASPERDDTHGSPWNLTHIGDSLATQNEGHSAPPTSSESSGSITRLASIDSFDSRWQQFLEPGESVLMISAVKKLQKITSKKVQLILTNKPKLIYVDPSKLVVKGNIIWSDNSNDLNVVVTSPSHFKICTPKKVLSFEDAKQRASVWKKAIETLQNR

SEQ ID NO: 27925 - protein, 417 aa, Arabidopsis thaliana
  peptide (1)..(417): Ceres Seq. ID no. 12327248
MDKKFITKENKTAYVKLERIVLDQLEHPGIIKLYFTFQDTSSLYMALESCEGGELFDQITRKGRLSEDEARFYTAEVVDALEYIHSMGLIHRDIKPENLLLTSDGHIKIADFGSVKPMQDSQITVLPNAASDDKACTFVGTAAYVPPEVLNSSPATFGNDLWALGCTLYQMLSGTSPFKDASEWLIFQRIIARDIKFPNHFSEAARDLIDRLLDTEPSRRPGAGSEGYVALKRHPFFNGVDWKNLRSQTPPKLAPDPASQTASPERDDTHGSPWNLTHIGDSLATQNEGHSAPPTSSESSGSITRLASIDSFDSRWQQFLEPGESVLMISAVKKLQKITSKKVQLILTNKPKLIYVDPSKLVVKGNIIWSDNSNDLNVVVTSPSHFKICTPKKVLSFEDAKQRASVWKKAIETLQNR

SEQ ID NO: 27926 - DNA, 1495 bp, Arabidopsis thaliana
  misc_feature (1)..(1495): Ceres Seq. ID no. 12335145
  misc_feature (1)..(1495): Ortholog of  Ceres SEQ ID NO 15171669 as cited in SEQ ID NO 51370
taaaaaatccctaaaagttttgggggaaagaagaaagaaggaagacgatgatgatgctcagaatccgaagcagagatggactggagagagtcacagcggagggagctcatatcactgtttcccagctcaaaaccttgatcgcggatcagcttcagatccctctccataagcagaccttatccaccaatcgtgatctcctcctcgccaaaactcccgctgatctactcgccttcaccgacctcacggacccaaacctccccctctcctctctcaacctcggccatggctctatgctctacctcgcctacgatggcgagcgctccattcctggagctcctcccgttactcctgccggatccttcgggaggaagatgaccgtcgatgacttgatcgcccgccagatgcgcgtcactcgtcaggagacgtctcactgcgactccgtctccttcgatcgcgatgccgccaacgctttccagcactacgtcaatgagtctctagcttttgccgtcaagcgcggcggctttatgtacggcaccgtcaccgaggaaggacagtggaagttgatttcatttacgagccgccccagcaaggcacggaggctaatcttattctgatgagagatgctgatgaagagaagcgcgtggacgcaatcgccatgggcttggggatgaggagggtcggtttcatttttaaccagaccgtggtgcaggacaagactgaatacactctgtccaacgccgaggtgctacaggcggcggagcttcacgccgagagcgagctgaaggagtgggtcacggcggtggtgaagcttgaggtgaatgaggatggtggcgccgatgtccatttcgaggcgtttcaaatgagtgatatgtgcatcaggctgttcaaggaagagtggttcgagacggagattatgccggacgatgatccaaagctctctaagatgaagaaggaggtggttgttggtgtgaaggatcttaaggaggtagataacgatttcttcctcgttctcgtcaggatcttggatcaccaggggcctctgtcatcaacattcccaatagagaaccggagcagtcgagcaacgatgcgggctctaaaaacacatctggaccgggcaaagagcttgccgttggtgaagaagatgtcagattttcatctgcttctctttgtggctcagtttctggacgtgtcatcggacgtccctgctttagccgagtgtgtgcgtctgcagtcgcctgtcccagagggctatgcgttgctcatcgaatcaatggccaacacttgttaatttttgtgtcattgttttttggttcttgatacagtatatcatgttcgttttatggtccagaaaatcttttttactagttgacaaatgaaaaatctctagtgtactcgtgatgtatttgattcaagtttgggggttaatttaagttatcaacaacttgtagaaacaaagttaattcacagagtaataaatcattctaataggtatgct

SEQ ID NO: 27927 - protein, 224 aa, Arabidopsis thaliana
  peptide (1)..(224): Ceres Seq. ID no. 12335146
MRDADEEKRVDAIAMGLGMRRVGFIFNQTVVQDKTEYTLSNAEVLQAAELHAESELKEWVTAVVKLEVNEDGGADVHFEAFQMSDMCIRLFKEEWFETEIMPDDDPKLSKMKKEVVVGVKDLKEVDNDFFLVLVRILDHQGPLSSTFPIENRSSRATMRALKTHLDRAKSLPLVKKMSDFHLLLFVAQFLDVSSDVPALAECVRLQSPVPEGYALLIESMANTC

SEQ ID NO: 27928 - protein, 210 aa, Arabidopsis thaliana
  peptide (1)..(210): Ceres Seq. ID no. 12335147
MGLGMRRVGFIFNQTVVQDKTEYTLSNAEVLQAAELHAESELKEWVTAVVKLEVNEDGGADVHFEAFQMSDMCIRLFKEEWFETEIMPDDDPKLSKMKKEVVVGVKDLKEVDNDFFLVLVRILDHQGPLSSTFPIENRSSRATMRALKTHLDRAKSLPLVKKMSDFHLLLFVAQFLDVSSDVPALAECVRLQSPVPEGYALLIESMANTC

SEQ ID NO: 27929 - protein, 206 aa, Arabidopsis thaliana
  peptide (1)..(206): Ceres Seq. ID no. 12335148
MRRVGFIFNQTVVQDKTEYTLSNAEVLQAAELHAESELKEWVTAVVKLEVNEDGGADVHFEAFQMSDMCIRLFKEEWFETEIMPDDDPKLSKMKKEVVVGVKDLKEVDNDFFLVLVRILDHQGPLSSTFPIENRSSRATMRALKTHLDRAKSLPLVKKMSDFHLLLFVAQFLDVSSDVPALAECVRLQSPVPEGYALLIESMANTC

SEQ ID NO: 27930 - DNA, 1150 bp, Arabidopsis thaliana
  misc_feature (1)..(1150): Ceres Seq. ID no. 13491427
  misc_feature (1)..(1150): Ortholog of  Ceres SEQ ID NO 14312711 as cited in SEQ ID NO 1401
  misc_feature (1)..(1150): Ortholog of  Ceres SEQ ID NO 13586635 as cited in SEQ ID NO 14217
  misc_feature (1)..(1150): Ortholog of  Ceres SEQ ID NO 12616285 as cited in SEQ ID NO 63483
aacatcttaaaaagtaaaaacacattcatctatccaacaaaaaaaaaaaaaaaaaggagaaatggaaggaatcgatcatagaatggtgagtgtcaatggcataactatgcacattgccgagaaaggtcccaaagaaggacctgtggtgcttctcctccatggattccctgatctctggtacacgtggcgtcaccagattagtgggttatcatctctaggttaccgcgctgtagctccagacctccgaggctacggagactctgattcgccagagtctttctccgagtacacgtgtcttaacgtcgttggggacctcgtagctcttctggacagtgttgctggaaatcaagagaaggtgtttctggtcggtcatgattggggagccattatcggatggtttctctgtttgtttcgacctgaaaagattaacggctttgtgtgtttgagtgtgccgtatagatcaagaaaccctaaagtcaagcccgttcaagggttcaaggctgtatttggagatgattactacatttgtagatttcaggaaccggggaagattgaaggagagattgcaagtgcagatccaagaatatttctgaggaacctcttcacagggaggacactcggtccgccgattttacctaaggataatccctttggggaaaaacctaaccctaatagcgaaaacattgaattgcctgaatggttttctaagaagatctcgatttctatgtctccaaattcgagaaggcaggatttaccggtggattgaactactacagagccatggatctgaattgggagctcactgcaccatggaccggagctaagattcaagttccagtgaagttcatgacaggtgacttcgacatggtttacaccacaccagggatgaaagagtacattcacggtggtggatttgctgcagatgttccaactcttcaagagatagtggtgattgaagatgctggtcacttcgttaaccaagagaaacctcaagaggtcactgctcacatcaatgacttcttcaccaagcttcgggacaacaacaaaagcttttagagttctcgtttggttctattatgttggctctcaaaacaagttggttcttgcatgtgttgtttcgacaagattttgaataagacttggcattatg

SEQ ID NO: 27931 - protein, 234 aa, Arabidopsis thaliana
  peptide (1)..(234): Ceres Seq. ID no. 13491428
MEGIDHRMVSVNGITMHIAEKGPKEGPVVLLLHGFPDLWYTWRHQISGLSSLGYRAVAPDLRGYGDSDSPESFSEYTCLNVVGDLVALLDSVAGNQEKVFLVGHDWGAIIGWFLCLFRPEKINGFVCLSVPYRSRNPKVKPVQGFKAVFGDDYYICRFQEPGKIEGEIASADPRIFLRNLFTGRTLGPPILPKDNPFGEKPNPNSENIELPEWFSKKISISMSPNSRRQDLPVD

SEQ ID NO: 27932 - protein, 227 aa, Arabidopsis thaliana
  peptide (1)..(227): Ceres Seq. ID no. 13491429
MVSVNGITMHIAEKGPKEGPVVLLLHGFPDLWYTWRHQISGLSSLGYRAVAPDLRGYGDSDSPESFSEYTCLNVVGDLVALLDSVAGNQEKVFLVGHDWGAIIGWFLCLFRPEKINGFVCLSVPYRSRNPKVKPVQGFKAVFGDDYYICRFQEPGKIEGEIASADPRIFLRNLFTGRTLGPPILPKDNPFGEKPNPNSENIELPEWFSKKISISMSPNSRRQDLPVD

SEQ ID NO: 27933 - protein, 219 aa, Arabidopsis thaliana
  peptide (1)..(219): Ceres Seq. ID no. 13491430
MHIAEKGPKEGPVVLLLHGFPDLWYTWRHQISGLSSLGYRAVAPDLRGYGDSDSPESFSEYTCLNVVGDLVALLDSVAGNQEKVFLVGHDWGAIIGWFLCLFRPEKINGFVCLSVPYRSRNPKVKPVQGFKAVFGDDYYICRFQEPGKIEGEIASADPRIFLRNLFTGRTLGPPILPKDNPFGEKPNPNSENIELPEWFSKKISISMSPNSRRQDLPVD

SEQ ID NO: 27934 - DNA, 1266 bp, Arabidopsis thaliana
  misc_feature (1)..(1266): Ceres Seq. ID no. 13490700
  misc_feature (1)..(1266): Ortholog of  Ceres SEQ ID NO 15171275 as cited in SEQ ID NO 51428
taatctcttcacaatcccaaaaaatctcacaatcgttttttgcttatctctttcaatggacacctctctctcccaccacggatctctcccgtttcccccatcgcgccgcaatttcgttaaacaaaaccgcggcggcgattgcgtttttctcccctcgcgtcgtaagttccgatacgattcgttggtggtggtttccgctgcgtcttcgggacagagcatcgacgcgcctctagttccacggtcgcctcagggaaggtttctaagttccgtcttggtgaaaaaacggcagctctttcatttcgccgtcgctgatttgcttaaacagctcgctgatgataaggaagcttccttatctcgtatgttccttagttatggttccgatgaagcttccctccacagaaggatagctcaacttaaggagagtgattgccaaattgcaattgaagacataatgtacatgttgatcttgtacaaattctcagagataagagtgcctcttgttccaaagcttcccagttgcatttacaacggaagactcgagatctcgccttcgaaagactgggaacttgagtcaatccatagctttgacgttcttgaactcatcaaagaacatagtaacgcagtcatcagtttaagagtgaattcgagtttgactgacgattgtgcgacaacggagatagataagaatcgtctcagtaaagtatacacagcttcggtcttatatggatactttttaaaatctgcttctcttagacaccaactcgaatgctcattatcacaacaccatggaagtttcactaagcaactgaggcattacatttctgagttcgatcccaagatattgcggagatgcgcaaaaccaaggtcacatgaagcaaaaagcctgatagaaaagcagagtttagctctttttggtcctgaggaaagcagcaaagagagcattgtgacatcgttttctagcctgaagaggttgcttcttgaggctgtggcgtttggtacgtttctatgggacacagaggagtatgtagatggcgcgtttaagctcaaggagaatgagaatgcagaggaagaaacaaatagcagtgtttgaagtatgtatgaaccagtttgctagaagaaaacttgaatatcttttttggtggacattgcatataatatatagattaaatcagggtcaatggctatatgaaattatttttgtctatagtttgagtaatcatatgtatagtgtataatggatgatttaatagagagattggttttgtc

SEQ ID NO: 27935 - protein, 362 aa, Arabidopsis thaliana
  peptide (1)..(362): Ceres Seq. ID no. 13490701
NLFTIPKNLTIVFCLSLSMDTSLSHHGSLPFPPSRRNFVKQNRGGDCVFLPSRRKFRYDSLVVVSAASSGQSIDAPLVPRSPQGRFLSSVLVKKRQLFHFAVADLLKQLADDKEASLSRMFLSYGSDEASLHRRIAQLKESDCQIAIEDIMYMLILYKFSEIRVPLVPKLPSCIYNGRLEISPSKDWELESIHSFDVLELIKEHSNAVISLRVNSSLTDDCATTEIDKNRLSKVYTASVLYGYFLKSASLRHQLECSLSQHHGSFTKQLRHYISEFDPKILRRCAKPRSHEAKSLIEKQSLALFGPEESSKESIVTSFSSLKRLLLEAVAFGTFLWDTEEYVDGAFKLKENENAEEETNSSV

SEQ ID NO: 27936 - protein, 344 aa, Arabidopsis thaliana
  peptide (1)..(344): Ceres Seq. ID no. 13490702
MDTSLSHHGSLPFPPSRRNFVKQNRGGDCVFLPSRRKFRYDSLVVVSAASSGQSIDAPLVPRSPQGRFLSSVLVKKRQLFHFAVADLLKQLADDKEASLSRMFLSYGSDEASLHRRIAQLKESDCQIAIEDIMYMLILYKFSEIRVPLVPKLPSCIYNGRLEISPSKDWELESIHSFDVLELIKEHSNAVISLRVNSSLTDDCATTEIDKNRLSKVYTASVLYGYFLKSASLRHQLECSLSQHHGSFTKQLRHYISEFDPKILRRCAKPRSHEAKSLIEKQSLALFGPEESSKESIVTSFSSLKRLLLEAVAFGTFLWDTEEYVDGAFKLKENENAEEETNSSV

SEQ ID NO: 27937 - protein, 243 aa, Arabidopsis thaliana
  peptide (1)..(243): Ceres Seq. ID no. 13490703
MFLSYGSDEASLHRRIAQLKESDCQIAIEDIMYMLILYKFSEIRVPLVPKLPSCIYNGRLEISPSKDWELESIHSFDVLELIKEHSNAVISLRVNSSLTDDCATTEIDKNRLSKVYTASVLYGYFLKSASLRHQLECSLSQHHGSFTKQLRHYISEFDPKILRRCAKPRSHEAKSLIEKQSLALFGPEESSKESIVTSFSSLKRLLLEAVAFGTFLWDTEEYVDGAFKLKENENAEEETNSSV

SEQ ID NO: 27938 - DNA, 1803 bp, Arabidopsis thaliana
  misc_feature (1)..(1803): Ceres Seq. ID no. 12335487
  misc_feature (1)..(1803): Ortholog of  Ceres SEQ ID NO 15177258 as cited in SEQ ID NO 51386
accactacaaccaccgcaacaaccaccaaaaaccctctcaaagaaatttcttttttttcttactttcttggtttgtcaaatatggtcagccatccaatggagaaagctgcaaatggtgcgtctgcgttggaaacgcagacgggtgagttagatcagccggaacggcttcgtaagatcatatcggtgtcttccattgccgccggtgtacagttcggttgggctttacagttatctctgttgactccttacgtgcagctactcggaatcccacataaatgggcttctctgatttggctctgtggtccaatctccggtatgcttgttcagcctatcgtcggttaccacagtgaccgttgcacctcaagattcggccgtcgtcgtcccttcatcgtcgctggagctggtttagtcaccgttgctgttttccttatcggttacgctgccgatataggtcacagcatgggcgatcagcttgacaaaccgccgaaaacgcgagccatagcgatattcgctctcgggttttggattcttgacgtggctaacaacaccttacaaggaccctgcagagctttcttggctgatttatcagcagggaacgctaagaaaacgcgaaccgcaaacgcgtttttctcgtttttcatggcggttggaaacgttttgggttacgctgcgggatcttacagaaatctctacaaagttgtgcctttcacgatgactgagtcatgcgatctctactgcgcaaacctcaaaacgtgttttttcctatccataacgcttctcctcatagtcactttcgtatctctctgttacgtgaaggagaagccatggacgccagagccaacagccgatggaaaagcctccaacgttccgtttttcggagaaatcttcggagctttcaaggaactaaaaagacccatgtggatgcttcttatagtcactgcactaaactggatcgcttggttccctttccttctcttcgacactgattggatgggccgtgaggtgtacggaggaaactcagacgcaaccgcaaccgcagcctctaagaagctttacaacgacggagtcagagctggtgctttggggcttatgcttaacgctattgttcttggtttcatgtctcttggtgttgaatggattggtcggaaattgggaggagctaaaaggctttggggtattgttaacttcatcctcgccatttgcttggccatgacggttgtggttacgaaacaagctgagaatcaccgacgagatcacggcggcgctaaaacaggtccacctggtaacgtcacagctggtgctttaactctcttcgccatcctcggtatcccccaagccattacgtttagcattccttttgcactagcttccatattttcaaccaattccggtgccggccaaggactttccctaggtgttctgaatctagccattgtcgtccctcagatggtaatatctgtgggaggtggaccattcgacgaactattcggtggtggaaacattccagcatttgtgttaggagcgattgcggcagcggtaagtggtgtattggcgttgacggtgttgccttcaccgcctccggatgctcctgccttcaaagctactatgggatttcattgaattttagcagtggttgtttggctctctttctctcataaaacagtagtgttgtgcaaatcctacataaagaaaaaagaaaaggaaattaaactcattgggttggtttgtattttacctaaacccacgaagttcctttttctttttgtaactcaatttaaatttggagtatattttactttttgc

SEQ ID NO: 27939 - protein, 539 aa, Arabidopsis thaliana
  peptide (1)..(539): Ceres Seq. ID no. 12335488
TTTTTATTTKNPLKEISFFSYFLGLSNMVSHPMEKAANGASALETQTGELDQPERLRKIISVSSIAAGVQFGWALQLSLLTPYVQLLGIPHKWASLIWLCGPISGMLVQPIVGYHSDRCTSRFGRRRPFIVAGAGLVTVAVFLIGYAADIGHSMGDQLDKPPKTRAIAIFALGFWILDVANNTLQGPCRAFLADLSAGNAKKTRTANAFFSFFMAVGNVLGYAAGSYRNLYKVVPFTMTESCDLYCANLKTCFFLSITLLLIVTFVSLCYVKEKPWTPEPTADGKASNVPFFGEIFGAFKELKRPMWMLLIVTALNWIAWFPFLLFDTDWMGREVYGGNSDATATAASKKLYNDGVRAGALGLMLNAIVLGFMSLGVEWIGRKLGGAKRLWGIVNFILAICLAMTVVVTKQAENHRRDHGGAKTGPPGNVTAGALTLFAILGIPQAITFSIPFALASIFSTNSGAGQGLSLGVLNLAIVVPQMVISVGGGPFDELFGGGNIPAFVLGAIAAAVSGVLALTVLPSPPPDAPAFKATMGFH

SEQ ID NO: 27940 - protein, 512 aa, Arabidopsis thaliana; identical to SEQ ID NO: 24986
  peptide (1)..(512): Ceres Seq. ID no. 12335489

SEQ ID NO: 27941 - protein, 507 aa, Arabidopsis thaliana; identical to SEQ ID NO: 24987
  peptide (1)..(507): Ceres Seq. ID no. 12335490

SEQ ID NO: 27942 - DNA, 1323 bp, Arabidopsis thaliana
  misc_feature (1)..(1323): Ceres Seq. ID no. 12335491
  misc_feature (1)..(1323): Ortholog of  Ceres SEQ ID NO 13596891 as cited in SEQ ID NO 62868
  misc_feature (1)..(1323): Ortholog of  Ceres SEQ ID NO 12617235 as cited in SEQ ID NO 63990
  misc_feature (1)..(1323): Ortholog of  Ceres SEQ ID NO 13655371 as cited in SEQ ID NO 68945
aaccaaaaacaaacattttctaaaaaatggcgactaagatcaacaagcaagtcgtgttacttgattacgtaaccggtttcgccaaggaatccgaccttgtaatcacctccaccaccatcgatcttagggtgccaaagggatctatgacggcgttggtgaagaatctctacttgtcttgtgatccttacatgcgaaatcgtatgaggaaacctgatcctctgagccctgctactgctcagtccttcactcccggcaagcctatctcagggtttggagtgtctaaagtgatagattctggacactcagattacgaagaaggtgacttaatttggggagcagtaggatgggaagagtacagtgttattacaccaattcctaatcttcacttcaagatccatcataccaattttcctttatcttactacacaggacttcttggtatgcctggtatgaccgcgtatgttgggttttacgagatatgtactccaaagaaaggagatactgtgtttgtgtcggctgcatctggcgcggttggtcagcttgtaggacaatttgctaagttgatgggttgttatgttgttggaagcgctgggagtaaagaaaaggttgatctcctcaagaacaagtttggattcgatgatgccttcaactacaaggaagaacacaatcttattggtgccctaaaaaggtgtttccctgaaggcattgacatatactttgagaacgtaggaggcaagatgctggatgcagtgatcttaaacatgagaccacacggccgtatcgcggcatgtgggatgatctcacagtacaatctgaagaatccggaaggtatatacggcctctcgctcattacatacaaacgaatccgtattgaagggttcaactgtttcgattacttccacaaatactcggagttcttggagtttgtggttccgtatataaaagaagggaagataaagtatgtggaagatgttgctgatggactcgagagtgctcctgctgctctcgttggactctttcacggtaaaaacgtcgggaaacaacttgtcttggtttcgccatcataagtgataaaatgagatcagtacgtacttgttcggtaagtgatgtttcggaagttggatatgtctccgtacaagatatgaaattgttgaaaagtatatgtatttggtgaagtttgcagaggacgttagtgttgagtcctttaatttggttcataatgttttagtttcttcagcaacaatacaagagatcagggttcggttttgtcaataatgtaataatttgtctaaattatgaaataaataaatttattattagcct

SEQ ID NO: 27943 - protein, 346 aa, Arabidopsis thaliana
  peptide (1)..(346): Ceres Seq. ID no. 12335492
MATKINKQVVLLDYVTGFAKESDLVITSTTIDLRVPKGSMTALVKNLYLSCDPYMRNRMRKPDPLSPATAQSFTPGKPISGFGVSKVIDSGHSDYEEGDLIWGAVGWEEYSVITPIPNLHFKIHHTNFPLSYYTGLLGMPGMTAYVGFYEICTPKKGDTVFVSAASGAVGQLVGQFAKLMGCYVVGSAGSKEKVDLLKNKFGFDDAFNYKEEHNLIGALKRCFPEGIDIYFENVGGKMLDAVILNMRPHGRIAACGMISQYNLKNPEGIYGLSLITYKRIRIEGFNCFDYFHKYSEFLEFVVPYIKEGKIKYVEDVADGLESAPAALVGLFHGKNVGKQLVLVSPS

SEQ ID NO: 27944 - protein, 307 aa, Arabidopsis thaliana
  peptide (1)..(307): Ceres Seq. ID no. 12335493
MTALVKNLYLSCDPYMRNRMRKPDPLSPATAQSFTPGKPISGFGVSKVIDSGHSDYEEGDLIWGAVGWEEYSVITPIPNLHFKIHHTNFPLSYYTGLLGMPGMTAYVGFYEICTPKKGDTVFVSAASGAVGQLVGQFAKLMGCYVVGSAGSKEKVDLLKNKFGFDDAFNYKEEHNLIGALKRCFPEGIDIYFENVGGKMLDAVILNMRPHGRIAACGMISQYNLKNPEGIYGLSLITYKRIRIEGFNCFDYFHKYSEFLEFVVPYIKEGKIKYVEDVADGLESAPAALVGLFHGKNVGKQLVLVSPS

SEQ ID NO: 27945 - protein, 292 aa, Arabidopsis thaliana
  peptide (1)..(292): Ceres Seq. ID no. 12335494
MRNRMRKPDPLSPATAQSFTPGKPISGFGVSKVIDSGHSDYEEGDLIWGAVGWEEYSVITPIPNLHFKIHHTNFPLSYYTGLLGMPGMTAYVGFYEICTPKKGDTVFVSAASGAVGQLVGQFAKLMGCYVVGSAGSKEKVDLLKNKFGFDDAFNYKEEHNLIGALKRCFPEGIDIYFENVGGKMLDAVILNMRPHGRIAACGMISQYNLKNPEGIYGLSLITYKRIRIEGFNCFDYFHKYSEFLEFVVPYIKEGKIKYVEDVADGLESAPAALVGLFHGKNVGKQLVLVSPS

SEQ ID NO: 27946 - DNA, 1342 bp, Arabidopsis thaliana
  misc_feature (1)..(1342): Ceres Seq. ID no. 12562020
  misc_feature (1)..(1342): Ortholog of  Ceres SEQ ID NO 15176911 as cited in SEQ ID NO 54868
  misc_feature (1)..(1342): Ortholog of  Ceres SEQ ID NO 13596433 as cited in SEQ ID NO 68721
  misc_feature (1)..(1342): Ortholog of  Ceres SEQ ID NO 13599169 as cited in SEQ ID NO 0
atgacatttaatgcgtactcaggattgagatctctctctcaagcaatggcagctacaagtgagaaacagaacaccacaaagcctcctccttctccttctcctctccgcaattccaagttttgtcagcccaatatgaggatcttgatctctggaggagctggcttcattggttctcacttggttgataagcttatggaaaatgagaagaatgaggtggttgttgctgataactatttcactggctcaaaagaaaacctcaagaagtggatcggtcaccccaggtttgaacttattcgtcacgatgttaccgagcctttgttgatcgaggttgatcggatttaccatcttgcttgtcctgcctctcctatcttctacaaatacaaccctgttaagacaatcaagaccaatgtgattggtacactcaacatgctcggtcttgccaagcgtgttggagcaagaattttactaacctcaacctctgaagtgtatggagatcctctcatccaccctcaaccagagagctactggggaaatgtcaaccctattggggttcggagttgctatgacgaaggcaagcgggtagccgaaaccttgatgtttgactaccacagacaacatggcattgaaatccgcattgctagaatcttcaacacatatggtcctcgaatgaacatcgatgatgggcgtgttgtgagcaacttcattgctcaagcactccggggtgaggcattgacagttcagaaaccggggacacagacccgcagtttctgttatgtctccgacatggtggatggacttatccgtcttatggaaggcaatgatactggccctatcaacatcggtaacccaggtgagttcacaatggtggaactggctgagacggttaaggagcttattaacccaagcatagagataaagatggtggagaacacaccagatgatccaagacagaggaaaccagacattagtaaagccaaagaagtgttgggttgggagccaaaggtgaagctcagagaaggacttcctctcatggaagaagatttccgactaaggcttaacgtcccaagaaactaaaaccacaagaaaacacagacggttttgagttcacgagagttgtcagctgttgagttatatgatgatgctattatactacaaagtggtgggtttttgtttggtctcatgtgttattcatattgcttttgttcgtagaaaaataagttgggaatgggtctccttgtgaggaatggctcttctttgtttttcagtatattgtggtatggttattatttgtgtggttttaatgaaatttgttcacttaatttgctcatggaattacagtttt

SEQ ID NO: 27947 - protein, 357 aa, Arabidopsis thaliana
  peptide (1)..(357): Ceres Seq. ID no. 12562021
MTFNAYSGLRSLSQAMAATSEKQNTTKPPPSPSPLRNSKFCQPNMRILISGGAGFIGSHLVDKLMENEKNEVVVADNYFTGSKENLKKWIGHPRFELIRHDVTEPLLIEVDRIYHLACPASPIFYKYNPVKTIKTNVIGTLNMLGLAKRVGARILLTSTSEVYGDPLIHPQPESYWGNVNPIGVRSCYDEGKRVAETLMFDYHRQHGIEIRIARIFNTYGPRMNIDDGRVVSNFIAQALRGEALTVQKPGTQTRSFCYVSDMVDGLIRLMEGNDTGPINIGNPGEFTMVELAETVKELINPSIEIKMVENTPDDPRQRKPDISKAKEVLGWEPKVKLREGLPLMEEDFRLRLNVPRN

SEQ ID NO: 27948 - protein, 342 aa, Arabidopsis thaliana
  peptide (1)..(342): Ceres Seq. ID no. 12562022
MAATSEKQNTTKPPPSPSPLRNSKFCQPNMRILISGGAGFIGSHLVDKLMENEKNEVVVADNYFTGSKENLKKWIGHPRFELIRHDVTEPLLIEVDRIYHLACPASPIFYKYNPVKTIKTNVIGTLNMLGLAKRVGARILLTSTSEVYGDPLIHPQPESYWGNVNPIGVRSCYDEGKRVAETLMFDYHRQHGIEIRIARIFNTYGPRMNIDDGRVVSNFIAQALRGEALTVQKPGTQTRSFCYVSDMVDGLIRLMEGNDTGPINIGNPGEFTMVELAETVKELINPSIEIKMVENTPDDPRQRKPDISKAKEVLGWEPKVKLREGLPLMEEDFRLRLNVPRN

SEQ ID NO: 27949 - protein, 313 aa, Arabidopsis thaliana
  peptide (1)..(313): Ceres Seq. ID no. 12562023
MRILISGGAGFIGSHLVDKLMENEKNEVVVADNYFTGSKENLKKWIGHPRFELIRHDVTEPLLIEVDRIYHLACPASPIFYKYNPVKTIKTNVIGTLNMLGLAKRVGARILLTSTSEVYGDPLIHPQPESYWGNVNPIGVRSCYDEGKRVAETLMFDYHRQHGIEIRIARIFNTYGPRMNIDDGRVVSNFIAQALRGEALTVQKPGTQTRSFCYVSDMVDGLIRLMEGNDTGPINIGNPGEFTMVELAETVKELINPSIEIKMVENTPDDPRQRKPDISKAKEVLGWEPKVKLREGLPLMEEDFRLRLNVPRN

SEQ ID NO: 27950 - DNA, 1148 bp, Arabidopsis thaliana
  misc_feature (1)..(1148): Ceres Seq. ID no. 12334358
  misc_feature (1)..(1148): Ortholog of  Ceres SEQ ID NO 14312166 as cited in SEQ ID NO 59253
aagcttttcgaggtatctcctccgcgcgacgatgtcagagactcgccggaatctgtctagcgatgaacaaatcgaaaaatcagagattcaacaccaaagagttgtaattgagaacagtcatggtgagaaactcgtaggagttttgcatgatactggttctacagagactgttgtcatatgccatggatttcgttcatcaaagaatcggattccaatgctgaccattgcaagtttctttgaaagagcaatgatcagttctttccggtttgactttgctggcaacggggaaagccaaggatcatttcagtatggtaactatcgccgtgaacttgaagatttgcgctctgttttgcaacacttgcgtggtgttaaccgtgtgatttctgcgattatcggacatagtaaaggtggaaatgtggtgcttttgtatgcagcaaagtacaatgatgtgcagactgttgtgaatatctcagggcggttttttcttgacagaggaatcgaatttcggcttggtaaggactacttcaagagaatcaaagataatggattcattgatgttggcaacagaaagggaaagtttgaatatcgggtaacagaagagagtctaatggaccgtctcacaaccaatgctcatgaagcatgtctctcaattcgtgaaaactgcagagtcttgacagtccatgggtcaaatgataggattgtgcatgtaacagaagcgtccgaatttgctaaacagataaagaatcataagctgtatgttattgaaggagctgatcatgagttcacttctcaccagcatcagcttgcttcaatcgttctctcattctttaaattggatcctaagaaagatgatgattcaggtgatatcagtacaagtaaccaagactccatgagatcagttgttcctattacatcgcgaatttaaatcgctttgctgagttacttaatgtctcacggtctcgggggtgataataaacggtttgataaacacagttagaaaccaaaatgttcttatggataaaatcttgttggtagtatacagtctatttaaatatctcaacacaaaatcgatcataaaagtttcacttggtttcttaggctttgtttaggatcagttttcgaatctggctgtcctaaactattggctg

SEQ ID NO: 27951 - protein, 307 aa, Arabidopsis thaliana
  peptide (1)..(307): Ceres Seq. ID no. 12334359
SFSRYLLRATMSETRRNLSSDEQIEKSEIQHQRVVIENSHGEKLVGVLHDTGSTETVVICHGFRSSKNRIPMLTIASFFERAMISSFRFDFAGNGESQGSFQYGNYRRELEDLRSVLQHLRGVNRVISAIIGHSKGGNVVLLYAAKYNDVQTVVNISGRFFLDRGIEFRLGKDYFKRIKDNGFIDVGNRKGKFEYRVTEESLMDRLTTNAHEACLSIRENCRVLTVHGSNDRIVHVTEASEFAKQIKNHKLYVIEGADHEFTSHQHQLASIVLSFFKLDPKKDDDSGDISTSNQDSMRSVVPITSRI

SEQ ID NO: 27952 - protein, 297 aa, Arabidopsis thaliana
  peptide (1)..(297): Ceres Seq. ID no. 12334360
MSETRRNLSSDEQIEKSEIQHQRVVIENSHGEKLVGVLHDTGSTETVVICHGFRSSKNRIPMLTIASFFERAMISSFRFDFAGNGESQGSFQYGNYRRELEDLRSVLQHLRGVNRVISAIIGHSKGGNVVLLYAAKYNDVQTVVNISGRFFLDRGIEFRLGKDYFKRIKDNGFIDVGNRKGKFEYRVTEESLMDRLTTNAHEACLSIRENCRVLTVHGSNDRIVHVTEASEFAKQIKNHKLYVIEGADHEFTSHQHQLASIVLSFFKLDPKKDDDSGDISTSNQDSMRSVVPITSRI

SEQ ID NO: 27953 - protein, 236 aa, Arabidopsis thaliana
  peptide (1)..(236): Ceres Seq. ID no. 12334361
MLTIASFFERAMISSFRFDFAGNGESQGSFQYGNYRRELEDLRSVLQHLRGVNRVISAIIGHSKGGNVVLLYAAKYNDVQTVVNISGRFFLDRGIEFRLGKDYFKRIKDNGFIDVGNRKGKFEYRVTEESLMDRLTTNAHEACLSIRENCRVLTVHGSNDRIVHVTEASEFAKQIKNHKLYVIEGADHEFTSHQHQLASIVLSFFKLDPKKDDDSGDISTSNQDSMRSVVPITSRI

SEQ ID NO: 27954 - DNA, 1458 bp, Arabidopsis thaliana
  misc_feature (1)..(1458): Ceres Seq. ID no. 12325068
  misc_feature (1)..(1458): Ortholog of  Ceres SEQ ID NO 15177221 as cited in SEQ ID NO 53046
  misc_feature (1)..(1458): Ortholog of  Ceres SEQ ID NO 14315134 as cited in SEQ ID NO 59476
  misc_feature (1)..(1458): Ortholog of  Ceres SEQ ID NO 12616332 as cited in SEQ ID NO 63449
  misc_feature (1)..(1458): Ortholog of  Ceres SEQ ID NO 13597498 as cited in SEQ ID NO 64648
  misc_feature (1)..(1458): Ortholog of  Ceres SEQ ID NO 14308053 as cited in SEQ ID NO 67790
ctctttcttctttgaacctctccaccacgatgaagcacaaagtctccaaacgagtaatatctctgaaatgggttccatttctctgcatctctttcttcgctctcggagcaatcttcacctccaggtcatgggagccgtcgtcagattccggaagtcagctaatttcacagcatcatcgtgatcatgaacttcagattgtatctgacgattgtgctcataataaaaaagctacacaagaaaaagatgtaactggcgaagttttgagaactcatgaagctatacagtcgttggataagtcagtttctacactttcttctacaaggagctctcaagagatggttgatggctcggaaacaaacccgaggaagaaagtgtttatggtaatgggaatcaataccgcatttagcagtagaaaacggcgtgattcagttagagaaacatggatgcctcaaggtgagaagcttgaaagactggaacaggagaaggggattgtgatcaagttcatgattggacacagtgcgacgtcaaatagtatattggatagagctattgattcagaagatgctcaacacaaagacttccttaggctggagcatgttgaaggatatcacgaactctcagcaaaaaccaagatattcttttccactgcagtagccaaatgggatgcagagttctatatcaaggtagatgatgatgttcacgtcaatctcggtatgcttgcttccacacttgcccgtcaccgctcaaagccgagggtttatattggttgtatgaaatcagggcctgttcttgctcagaagacagtaaagtaccatgaacctgagtattggaaatttggagaggattgtaacaaatactttcgacatgctacaggacagatctatgccatctccaaggatcttgctaattacatatccatcaaccagccaattttgcataagtatgccaatgaagatgtgtctttagggtcatggtttatcggtcttgaggttgaacatattgatgaccgcaacttctgttgtgggactcctccagattgtagatggaaggcagaggcgggcgatgtttgtgtggcctcattcgaatggagctgtagtgggatttgcaagtccgtagagagaatgaagatagtgcatgaagtttgtagtgaaggagaaggagctgtttggaatacgcttctgtaaaagatcatttcagttcccaatcagccaagtggttccaatactaaacataactttgatagactgctacaagaaagggaaagagagagcaagagaggagaaggcaaattttgtaaagaagaaccaaaggtatacaaatcacatacttgagaatatatttgcttagttgttgttgtgtgattggctttgttgtttcttctacttgagttagatcatgttagtataatcttggacaaaagggcaaatgagctaaaaaatgcataactaaagaattttc

SEQ ID NO: 27955 - protein, 393 aa, Arabidopsis thaliana
  peptide (1)..(393): Ceres Seq. ID no. 12325069
LSSLNLSTTMKHKVSKRVISLKWVPFLCISFFALGAIFTSRSWEPSSDSGSQLISQHHRDHELQIVSDDCAHNKKATQEKDVTGEVLRTHEAIQSLDKSVSTLSSTRSSQEMVDGSETNPRKKVFMVMGINTAFSSRKRRDSVRETWMPQGEKLERLEQEKGIVIKFMIGHSATSNSILDRAIDSEDAQHKDFLRLEHVEGYHELSAKTKIFFSTAVAKWDAEFYIKVDDDVHVNLGMLASTLARHRSKPRVYIGCMKSGPVLAQKTVKYHEPEYWKFGEDCNKYFRHATGQIYAISKDLANYISINQPILHKYANEDVSLGSWFIGLEVEHIDDRNFCCGTPPDCRWKAEAGDVCVASFEWSCSGICKSVERMKIVHEVCSEGEGAVWNTLL

SEQ ID NO: 27956 - protein, 384 aa, Arabidopsis thaliana
  peptide (1)..(384): Ceres Seq. ID no. 12325070
MKHKVSKRVISLKWVPFLCISFFALGAIFTSRSWEPSSDSGSQLISQHHRDHELQIVSDDCAHNKKATQEKDVTGEVLRTHEAIQSLDKSVSTLSSTRSSQEMVDGSETNPRKKVFMVMGINTAFSSRKRRDSVRETWMPQGEKLERLEQEKGIVIKFMIGHSATSNSILDRAIDSEDAQHKDFLRLEHVEGYHELSAKTKIFFSTAVAKWDAEFYIKVDDDVHVNLGMLASTLARHRSKPRVYIGCMKSGPVLAQKTVKYHEPEYWKFGEDCNKYFRHATGQIYAISKDLANYISINQPILHKYANEDVSLGSWFIGLEVEHIDDRNFCCGTPPDCRWKAEAGDVCVASFEWSCSGICKSVERMKIVHEVCSEGEGAVWNTLL

SEQ ID NO: 27957 - protein, 282 aa, Arabidopsis thaliana
  peptide (1)..(282): Ceres Seq. ID no. 12325071
MVDGSETNPRKKVFMVMGINTAFSSRKRRDSVRETWMPQGEKLERLEQEKGIVIKFMIGHSATSNSILDRAIDSEDAQHKDFLRLEHVEGYHELSAKTKIFFSTAVAKWDAEFYIKVDDDVHVNLGMLASTLARHRSKPRVYIGCMKSGPVLAQKTVKYHEPEYWKFGEDCNKYFRHATGQIYAISKDLANYISINQPILHKYANEDVSLGSWFIGLEVEHIDDRNFCCGTPPDCRWKAEAGDVCVASFEWSCSGICKSVERMKIVHEVCSEGEGAVWNTLL

SEQ ID NO: 27958 - DNA, 1306 bp, Arabidopsis thaliana
  misc_feature (1)..(1306): Ceres Seq. ID no. 12421637
  misc_feature (1)..(1306): Ortholog of  Ceres SEQ ID NO 14304871 as cited in SEQ ID NO 54194
  misc_feature (1)..(1306): Ortholog of  Ceres SEQ ID NO 13597751 as cited in SEQ ID NO 60721
atcttcttcgttttcctttttcctcaatcgacgacgatcaatctccaacctccaccgcattgattcctctgcttccggttcaatgtcgctgctaaaccaactcttcaaccgtgggatctttggcgccaaatgcaagacaagcttgaacttggcgatagctcgaatgaaattgctgcaaaacaagagagatatgcagcttaaacatatgaagaaggagatagctcacttcttgcaagctggacaagaacccattgctcgaattcgggtggagcatgtgatcagagaaatgaatttatgggcagcttatgagatattggagctattctgcgagtttatacttgctcgtgttccaattcttgaaagtgaaaaggaatgcccgagagagttgagagaggctattgctagcattatctttgctgctccaaggtgctctgaagtacctgatcttcttcaaataaagaatctgtttggtacaaaatatggaaaagaatttatcatggttgcttctgagcttcgtccggattctggtgtcaatcgtactatcattgagaagctttctcctaccagtccatctggagcggcaaggctcaagatgttaaaggaaattgcgcaggagtacagtttgaattgggattcttctgccacggaagcagagttcatgaagagccatgaagacctactgggtggagctaagcaaatacatcgtcaagatggtatctctgaatctcgaccgtcccaacaaggctacggtcagtcttcggtttctagggaagttgaaagtctgcctgcagaggccacacagagattccaaaagcttcaagctcaaaacccagtgagcaaaagcatgccatcatctaagctgacttcagcctttcaagctcctcctgatactagacggaatcagactgatgtaatggagatagctcgagctgccctagctagcgctgatcgtgcaacagcagctgctcgtgctgctgcgcaactagtgaatgtctcttatggggctactacacccacagtagcagcagaagggaagcccttaaacttaatgtagttgccacgtcgtcatttgtgaataaaagcaactgtatttgcttcatacacagaaagaaggataacgatgttttctttggtacttcataggtttggaaaaatgagtatgctaaagagtattggtagattatgctcgagtgttgtgaccttaggttgattcaaaagacagtgatgtttaaatgtgacatacagatataactctgaagtttgttggttttacaaaatctatgcagaaaaaacaacattatcatgc

SEQ ID NO: 27959 - protein, 350 aa, Arabidopsis thaliana
  peptide (1)..(350): Ceres Seq. ID no. 12421638
SSSFSFFLNRRRSISNLHRIDSSASGSMSLLNQLFNRGIFGAKCKTSLNLAIARMKLLQNKRDMQLKHMKKEIAHFLQAGQEPIARIRVEHVIREMNLWAAYEILELFCEFILARVPILESEKECPRELREAIASIIFAAPRCSEVPDLLQIKNLFGTKYGKEFIMVASELRPDSGVNRTIIEKLSPTSPSGAARLKMLKEIAQEYSLNWDSSATEAEFMKSHEDLLGGAKQIHRQDGISESRPSQQGYGQSSVSREVESLPAEATQRFQKLQAQNPVSKSMPSSKLTSAFQAPPDTRRNQTDVMEIARAALASADRATAAARAAAQLVNVSYGATTPTVAAEGKPLNLM

SEQ ID NO: 27960 - protein, 323 aa, Arabidopsis thaliana
  peptide (1)..(323): Ceres Seq. ID no. 12421639
MSLLNQLFNRGIFGAKCKTSLNLAIARMKLLQNKRDMQLKHMKKEIAHFLQAGQEPIARIRVEHVIREMNLWAAYEILELFCEFILARVPILESEKECPRELREAIASIIFAAPRCSEVPDLLQIKNLFGTKYGKEFIMVASELRPDSGVNRTIIEKLSPTSPSGAARLKMLKEIAQEYSLNWDSSATEAEFMKSHEDLLGGAKQIHRQDGISESRPSQQGYGQSSVSREVESLPAEATQRFQKLQAQNPVSKSMPSSKLTSAFQAPPDTRRNQTDVMEIARAALASADRATAAARAAAQLVNVSYGATTPTVAAEGKPLNLM

SEQ ID NO: 27961 - protein, 296 aa, Arabidopsis thaliana
  peptide (1)..(296): Ceres Seq. ID no. 12421640
MKLLQNKRDMQLKHMKKEIAHFLQAGQEPIARIRVEHVIREMNLWAAYEILELFCEFILARVPILESEKECPRELREAIASIIFAAPRCSEVPDLLQIKNLFGTKYGKEFIMVASELRPDSGVNRTIIEKLSPTSPSGAARLKMLKEIAQEYSLNWDSSATEAEFMKSHEDLLGGAKQIHRQDGISESRPSQQGYGQSSVSREVESLPAEATQRFQKLQAQNPVSKSMPSSKLTSAFQAPPDTRRNQTDVMEIARAALASADRATAAARAAAQLVNVSYGATTPTVAAEGKPLNLM

SEQ ID NO: 27962 - DNA, 1935 bp, Arabidopsis thaliana
  misc_feature (1)..(1935): Ceres Seq. ID no. 12371338
  misc_feature (1)..(1935): Ortholog of  Ceres SEQ ID NO 14310841 as cited in SEQ ID NO 53666
  misc_feature (1)..(1935): Ortholog of  Ceres SEQ ID NO 15178736 as cited in SEQ ID NO 56439
  misc_feature (1)..(1935): Ortholog of  Ceres SEQ ID NO 14308493 as cited in SEQ ID NO 60320
agaacactcttgtcacacttccatttagggttttctgcaaatttctccgttcgagatcaattccgtcgagatctcaagctctctcactcgtagtaaaaaaatggcggcggtagcggcaccaatggcttcgaagccccgtggatctaaagctgaatcgttcgtagacaacaagcggagagaagatatccgattcgcgaacatcaactctgctcgagcagtctctgacgccgtccgtactagtttgggaccgaaaggaatggacaagatgatttccacggcgaacggagaggtaatcattactaacgatggagctacgatccttaacaagatggaggttttgcagccagcggcgaagatgttagtcgagctttccaaatctcaagattcagccgccggagatggtaccacaactgtcgtagtaatcgccggtgcgcttctcaaggagtgtcaatcgcttctcacaaacgggatccaccctactgtcatttcagattcgcttcacaaggcgtgtggtaaggcgatcgatattttgactgccatggctgttccagtggagctcactgatagagattcacttgtgaaatctgcgagcacatcgcttaacagtaaggttgttagtcagtactctacattgcttgctcctttagctgtagatgcggttctctctgttatagatccggaaaagcctgagattgtggatttgcgtgatattaagattgttaagaagcttggtgggactgtggatgatacacatactgtgaaaggtttggtttttgataagaaggttagccgtgctgctggtggaccgactcgtgtggagaatgctaagattgctgtgattcagttccagatctcacctcctaagactgatatcgagcagagtattgttgtctctgattatactcagatggataggatcttgaaagaagagaggaattacatattggggatgattaagaagatcaaagcaactggttgcaatgtgttgttgattcagaagagtattttgagggatgcagtgactgatctatctcttcactatttggccaaagctaagattatggttattaaggatgttgagagagatgagattgaatttgtcaccaagacattgaactgcttgcctatcgccaatattgagcatttcagagctgagaagcttggccatgctgatcttgttgaggaggcctcccttggagatggaaagattttgaagatcactggtatcaaggacatggggagaactacatctgttctagttcgtggctccaaccagcttgttctagatgaagctgaaaggagtttacatgatgccttgtgtgtggttaggtgtctagtgagcaaaaggtttttgattgcaggaggtggtgcaccagagattgagctctcaaggcagctcggtgcttgggctaaggtgctacatgggatggaaggttactgtgtgaagtcttttgctgaagctctcgaagttattccttacacactagccgagaatgcagggttaaaccctatcgccattgtgactgaactcaggaacaagcatgctcaaggggaaatcaacgcagggatcaatgtgaggaaaggacagatcactaacatcttggaggaaaatgttgttcagcctctgcttgtgagtaccagtgcgatcactttagcaactgaatgcgttaggatgattttgaagattgatgacatcgtaactgtgaggtagtgtggtagtttctttcaaaacaggtcccagaacacttctattgctctatctaagcttttgtttcgtttttttcatgtgttgtgcttgcacaatggttttgaacttagactcccttttcttgcaacatgtgctattgcagttaagtggctttatttgtggtttagtgcgattgtatttctttctagtgacttgtgatatcaagatctctcagttttttttgtttt

SEQ ID NO: 27963 - protein, 536 aa, Arabidopsis thaliana
  peptide (1)..(536): Ceres Seq. ID no. 12371339
MAAVAAPMASKPRGSKAESFVDNKRREDIRFANINSARAVSDAVRTSLGPKGMDKMISTANGEVIITNDGATILNKMEVLQPAAKMLVELSKSQDSAAGDGTTTVVVIAGALLKECQSLLTNGIHPTVISDSLHKACGKAIDILTAMAVPVELTDRDSLVKSASTSLNSKVVSQYSTLLAPLAVDAVLSVIDPEKPEIVDLRDIKIVKKLGGTVDDTHTVKGLVFDKKVSRAAGGPTRVENAKIAVIQFQISPPKTDIEQSIVVSDYTQMDRILKEERNYILGMIKKIKATGCNVLLIQKSILRDAVTDLSLHYLAKAKIMVIKDVERDEIEFVTKTLNCLPIANIEHFRAEKLGHADLVEEASLGDGKILKITGIKDMGRTTSVLVRGSNQLVLDEAERSLHDALCVVRCLVSKRFLIAGGGAPEIELSRQLGAWAKVLHGMEGYCVKSFAEALEVIPYTLAENAGLNPIAIVTELRNKHAQGEINAGINVRKGQITNILEENVVQPLLVSTSAITLATECVRMILKIDDIVTVR

SEQ ID NO: 27964 - protein, 529 aa, Arabidopsis thaliana
  peptide (1)..(529): Ceres Seq. ID no. 12371340
MASKPRGSKAESFVDNKRREDIRFANINSARAVSDAVRTSLGPKGMDKMISTANGEVIITNDGATILNKMEVLQPAAKMLVELSKSQDSAAGDGTTTVVVIAGALLKECQSLLTNGIHPTVISDSLHKACGKAIDILTAMAVPVELTDRDSLVKSASTSLNSKVVSQYSTLLAPLAVDAVLSVIDPEKPEIVDLRDIKIVKKLGGTVDDTHTVKGLVFDKKVSRAAGGPTRVENAKIAVIQFQISPPKTDIEQSIVVSDYTQMDRILKEERNYILGMIKKIKATGCNVLLIQKSILRDAVTDLSLHYLAKAKIMVIKDVERDEIEFVTKTLNCLPIANIEHFRAEKLGHADLVEEASLGDGKILKITGIKDMGRTTSVLVRGSNQLVLDEAERSLHDALCVVRCLVSKRFLIAGGGAPEIELSRQLGAWAKVLHGMEGYCVKSFAEALEVIPYTLAENAGLNPIAIVTELRNKHAQGEINAGINVRKGQITNILEENVVQPLLVSTSAITLATECVRMILKIDDIVTVR

SEQ ID NO: 27965 - protein, 484 aa, Arabidopsis thaliana
  peptide (1)..(484): Ceres Seq. ID no. 12371341
MDKMISTANGEVIITNDGATILNKMEVLQPAAKMLVELSKSQDSAAGDGTTTVVVIAGALLKECQSLLTNGIHPTVISDSLHKACGKAIDILTAMAVPVELTDRDSLVKSASTSLNSKVVSQYSTLLAPLAVDAVLSVIDPEKPEIVDLRDIKIVKKLGGTVDDTHTVKGLVFDKKVSRAAGGPTRVENAKIAVIQFQISPPKTDIEQSIVVSDYTQMDRILKEERNYILGMIKKIKATGCNVLLIQKSILRDAVTDLSLHYLAKAKIMVIKDVERDEIEFVTKTLNCLPIANIEHFRAEKLGHADLVEEASLGDGKILKITGIKDMGRTTSVLVRGSNQLVLDEAERSLHDALCVVRCLVSKRFLIAGGGAPEIELSRQLGAWAKVLHGMEGYCVKSFAEALEVIPYTLAENAGLNPIAIVTELRNKHAQGEINAGINVRKGQITNILEENVVQPLLVSTSAITLATECVRMILKIDDIVTVR

SEQ ID NO: 27966 - DNA, 1032 bp, Arabidopsis thaliana
  misc_feature (1)..(1032): Ceres Seq. ID no. 12332963
  misc_feature (1)..(1032): Ortholog of  Ceres SEQ ID NO 14308278 as cited in SEQ ID NO 55403
  misc_feature (1)..(1032): Ortholog of  Ceres SEQ ID NO 12618176 as cited in SEQ ID NO 64489
  misc_feature (1)..(1032): Ortholog of  Ceres SEQ ID NO 15179231 as cited in SEQ ID NO 0
accaagaaaaacacaatcgtttaatctcacccaagaagacaaaaacacagagagagaaagagagagaaatggcgacgacaacaacagaagcaacgaagacatcatcgaccaatggagaagatcagaagcagtctcagaatcttcgacatcaagaagttggtcacaagagtctcttacagagcgatgatctctaccagtatatactggagacaagtgtgtatcctagagaaccagaatcaatgaaggaactcagggaagtgacagcaaaacatccatggaacataatgaccacatcagctgatgaaggacagttcttaaacatgcttatcaagctcgttaacgccaagaacacaatggagatcggagtttacactggctactctcttctcgccaccgctcttgctctccctgaagacggcaaaattctggctatggatgtcaacagagagaattacgaattgggtttaccgatcattgagaaagccggcgttgctcacaagatcgacttcagggaaggccctgctcttcccgttcttgatgaaatcgttgctgacgagaagaaccatggaacatatgactttatattcgttgatgctgacaaagacaactacatcaactaccacaagcgtttgatcgatcttgtgaaaattggaggagtgattggctacgacaacactctgtggaatggttctgtcgtggctcctcctgatgcaccaatgaggaagtacgttcgttactacagagactttgttcttgagcttaacaaggctcttgctgctgaccctcggatcgagatctgtatgctccctgttggtgatggaatcactatctgccgtcggatcagttgatttgactcctccctactctgagtttgtccacagtggattactttccatcttcttatacctttcaatcgcattttcaccaaccactaaaatggacctttttatgtatttgtgttaagtaatatctccattgtccttgttttgctttcttctgaacaaagaaataatatgtaccttacttttcttc

SEQ ID NO: 27967 - protein, 281 aa, Arabidopsis thaliana
  peptide (1)..(281): Ceres Seq. ID no. 12332964
QEKHNRLISPKKTKTQREKEREMATTTTEATKTSSTNGEDQKQSQNLRHQEVGHKSLLQSDDLYQYILETSVYPREPESMKELREVTAKHPWNIMTTSADEGQFLNMLIKLVNAKNTMEIGVYTGYSLLATALALPEDGKILAMDVNRENYELGLPIIEKAGVAHKIDFREGPALPVLDEIVADEKNHGTYDFIFVDADKDNYINYHKRLIDLVKIGGVIGYDNTLWNGSVVAPPDAPMRKYVRYYRDFVLELNKALAADPRIEICMLPVGDGITICRRIS

SEQ ID NO: 27968 - protein, 259 aa, Arabidopsis thaliana
  peptide (1)..(259): Ceres Seq. ID no. 12332965
MATTTTEATKTSSTNGEDQKQSQNLRHQEVGHKSLLQSDDLYQYILETSVYPREPESMKELREVTAKHPWNIMTTSADEGQFLNMLIKLVNAKNTMEIGVYTGYSLLATALALPEDGKILAMDVNRENYELGLPIIEKAGVAHKIDFREGPALPVLDEIVADEKNHGTYDFIFVDADKDNYINYHKRLIDLVKIGGVIGYDNTLWNGSVVAPPDAPMRKYVRYYRDFVLELNKALAADPRIEICMLPVGDGITICRRIS

SEQ ID NO: 27969 - protein, 202 aa, Arabidopsis thaliana
  peptide (1)..(202): Ceres Seq. ID no. 12332966
MKELREVTAKHPWNIMTTSADEGQFLNMLIKLVNAKNTMEIGVYTGYSLLATALALPEDGKILAMDVNRENYELGLPIIEKAGVAHKIDFREGPALPVLDEIVADEKNHGTYDFIFVDADKDNYINYHKRLIDLVKIGGVIGYDNTLWNGSVVAPPDAPMRKYVRYYRDFVLELNKALAADPRIEICMLPVGDGITICRRIS

SEQ ID NO: 27970 - DNA, 998 bp, Arabidopsis thaliana
  misc_feature (1)..(998): Ceres Seq. ID no. 12325548
  misc_feature (1)..(998): Ortholog of  Ceres SEQ ID NO 15172948 as cited in SEQ ID NO 51777
  misc_feature (1)..(998): Ortholog of  Ceres SEQ ID NO 12784416 as cited in SEQ ID NO 61324
aaaaactctactgtaactgcaaaatcttgttgttttcttaaacgaagagagaagaaagaaagaaaaaaacgttacggattctctgcttcggtttcgcgattgaagcttgagatttcatcttgaacatccgatatggctgaaatcaaggatgaaggaagcgccaagggctatgctttccctctcaggaaccctaatgttacgctgaatgagagaaactttgcagccttcactcacagatcagctgctgctcatccttggcatgacttggagattggtccagaagctcctactgttttcaactgtgttgttgaaattagcaaaggtggaaaggttaagtacgagctagacaagaacagtggccttattaaggttgatcgcgttctctactcatccattgtgtacccccacaactacggtttcatccctcgaactatctgtgaagacagtgatccaatggatgtcctggtactgatgcaggagcctgtgctaaccggatcattcctccgtgcccgtgctattggtctaatgcccatgattgatcagggtgagaaagacgacaagatcattgcagtatgtgctgatgatcccgagttccgtcactacagagacatcaaagagcttccccctcaccgtctagctgaaatccgtcgcttctttgaggactacaagaagaacgagaacaagaaagtcgacgttgaagctttccttcccgctcaagctgccatagacgctatcaaggactccatggatctttacgcagcttacatcaaagctggcctgcaacgctaatgaagaaaccagtccttttccgttcctcccggtttgcttagacatcactgaagccgccttctatactacatgcatgttagataaaatttcaattggtgcatttaatttcgtaatgctcatcagaaaacattgttgaacttaaagctttctgatgatgatgaaaaatttccagtacaatcataaaatttgaaatattagcttttcttttc

SEQ ID NO: 27971 - protein, 218 aa, Arabidopsis thaliana
  peptide (1)..(218): Ceres Seq. ID no. 12325549
MAEIKDEGSAKGYAFPLRNPNVTLNERNFAAFTHRSAAAHPWHDLEIGPEAPTVFNCVVEISKGGKVKYELDKNSGLIKVDRVLYSSIVYPHNYGFIPRTICEDSDPMDVLVLMQEPVLTGSFLRARAIGLMPMIDQGEKDDKIIAVCADDPEFRHYRDIKELPPHRLAEIRRFFEDYKKNENKKVDVEAFLPAQAAIDAIKDSMDLYAAYIKAGLQR

SEQ ID NO: 27972 - protein, 111 aa, Arabidopsis thaliana
  peptide (1)..(111): Ceres Seq. ID no. 12325550
MDVLVLMQEPVLTGSFLRARAIGLMPMIDQGEKDDKIIAVCADDPEFRHYRDIKELPPHRLAEIRRFFEDYKKNENKKVDVEAFLPAQAAIDAIKDSMDLYAAYIKAGLQR

SEQ ID NO: 27973 - DNA, 908 bp, Arabidopsis thaliana
  misc_feature (1)..(908): Ceres Seq. ID no. 12394059
  misc_feature (1)..(908): Ortholog of  Ceres SEQ ID NO 12610239 as cited in SEQ ID NO 56199
  misc_feature (1)..(908): Ortholog of  Ceres SEQ ID NO 12782126 as cited in SEQ ID NO 60168
aaccatatcttccgatttctcttatctctctgaagccacaaatctccagattcattcgtcgtctcggttaaggttagacggagaagaagatacaacaaatatgggttagtatgaaacaaatgtcgttggtcgtctctgctttgggcgtcttatcctttgttttgggagttatcgccgagaacaagaagcctgcgtctgggactccaataagtggaaaaggagtagttatctgcaaatacccatctgatccaactgttgccttgggatacctttctgctgcttttctccttgcctgcactgtagcaggatacaaatccttgttcatctcttacaagggaaagtctgttcctaactctgtcttgttcaaaagcaccagcttctctgtgttcttcaacattgccttgataacatctggactggccttgtctctgttgctctggccaaccattacagaacaacttcacttgacccgtaatgttcaccgaaacttagaaaccagttgccccacggctaagaccggtctgcttggtggaggtgcctttgtgtctttggactcgtgccttttctggttggttgctctgatgctcgctgataacgcccgtgaagaccattttgatgaagttgaaagcagaagcatcgatgggaactcttcctccagggatgtgaatctcaagattgatgcttgagagaatgatatgcttttattggtattgggtataagaagggtttttcatttgttttctacttgtttgattaggaaaataataatttgtttcttctgttgttttttttttttttttaatgattggctagaatgttatgaaacccatctctgcaccttgatgcattgtgattcataagctgtatctgtgaaaaataatcttttggttatatctcttacatttgac

SEQ ID NO: 27974 - protein, 191 aa, Arabidopsis thaliana
  peptide (1)..(191): Ceres Seq. ID no. 12394060
MKQMSLVVSALGVLSFVLGVIAENKKPASGTPISGKGVVICKYPSDPTVALGYLSAAFLLACTVAGYKSLFISYKGKSVPNSVLFKSTSFSVFFNIALITSGLALSLLLWPTITEQLHLTRNVHRNLETSCPTAKTGLLGGGAFVSLDSCLFWLVALMLADNAREDHFDEVESRSIDGNSSSRDVNLKIDA

SEQ ID NO: 27975 - protein, 188 aa, Arabidopsis thaliana
  peptide (1)..(188): Ceres Seq. ID no. 12394061
MSLVVSALGVLSFVLGVIAENKKPASGTPISGKGVVICKYPSDPTVALGYLSAAFLLACTVAGYKSLFISYKGKSVPNSVLFKSTSFSVFFNIALITSGLALSLLLWPTITEQLHLTRNVHRNLETSCPTAKTGLLGGGAFVSLDSCLFWLVALMLADNAREDHFDEVESRSIDGNSSSRDVNLKIDA

SEQ ID NO: 27976 - DNA, 853 bp, Arabidopsis thaliana
  misc_feature (1)..(853): Ceres Seq. ID no. 12421660
  misc_feature (1)..(853): Ortholog of  Ceres SEQ ID NO 14312262 as cited in SEQ ID NO 57108
cacgggagattttttcttcttctccacttttcgccaccatttcttctccttctctttctctctctctatctaaattcggtggaaggtccaacctcagactatgaccggcggagactggattcacgaggctatgggtgatgattcattagtggcggaggctctgatctgtctcctccatgccgagccgtcacttcctgacacgaagagcggcggcgcgtcggatctcaagctgaagtggagcgtgcgtcagcggaggaccaaggcggcgacgttaaggaagaagggagatcatgatacgcgtgctagtcccacgaccccactttcatggagcggcgcaacctcttttagcggcggtggaggcggtgctgctgctgccgttgatggatttgaggagtcaagtggcgttgtgaaactgtctgaggccgttagatctaagataactcaaacgagtgttacaacaagccctttcaagagatcaagaaagaaaaagacacttgctcaacttaaagaggaggagagtgtgctcttaaaggaaaggaatggcttgagaaatgaactcgcaactatgcaggatctgctcaagcaacaaagagcaagaaatgagtctttaaagaaactccaggctgagtcacaaaagaatgatgattcctccttcttgctccctgaccttaatatagctctggataacaactcgagccctgaaagtctctatggaaccagctgatatataactacgacacaattttcacatcaatattcttttgtcagtgacacgttctctagactacgcgtaactatgtaactatacgatttggataagaatttatagataggtaatagtcgtcccctttcc

SEQ ID NO: 27977 - protein, 207 aa, Arabidopsis thaliana
  peptide (1)..(207): Ceres Seq. ID no. 12421661
MTGGDWIHEAMGDDSLVAEALICLLHAEPSLPDTKSGGASDLKLKWSVRQRRTKAATLRKKGDHDTRASPTTPLSWSGATSFSGGGGGAAAAVDGFEESSGVVKLSEAVRSKITQTSVTTSPFKRSRKKKTLAQLKEEESVLLKERNGLRNELATMQDLLKQQRARNESLKKLQAESQKNDDSSFLLPDLNIALDNNSSPESLYGTS

SEQ ID NO: 27978 - protein, 197 aa, Arabidopsis thaliana
  peptide (1)..(197): Ceres Seq. ID no. 12421662
MGDDSLVAEALICLLHAEPSLPDTKSGGASDLKLKWSVRQRRTKAATLRKKGDHDTRASPTTPLSWSGATSFSGGGGGAAAAVDGFEESSGVVKLSEAVRSKITQTSVTTSPFKRSRKKKTLAQLKEEESVLLKERNGLRNELATMQDLLKQQRARNESLKKLQAESQKNDDSSFLLPDLNIALDNNSSPESLYGTS

SEQ ID NO: 27979 - DNA, 692 bp, Arabidopsis thaliana
  misc_feature (1)..(692): Ceres Seq. ID no. 12340023
  misc_feature (1)..(692): Ortholog of  Ceres SEQ ID NO 12635272 as cited in SEQ ID NO 495
  misc_feature (1)..(692): Ortholog of  Ceres SEQ ID NO 13594789 as cited in SEQ ID NO 52172
  misc_feature (1)..(692): Ortholog of  Ceres SEQ ID NO 14306131 as cited in SEQ ID NO 52246
  misc_feature (1)..(692): Ortholog of  Ceres SEQ ID NO 14309585 as cited in SEQ ID NO 52660
  misc_feature (1)..(692): Ortholog of  Ceres SEQ ID NO 14305267 as cited in SEQ ID NO 0
gaaatttttcttagagaagaagaagaagaggcaaaatggccacaagcgcatcagctttgctctcaccaaccacattctccactgcaatctcccacaaaaaccctaactccatctcattccatggccttcgtcccctccgtggctcctcctccgccctacccaaactatcaaccaccgggagaaaatcctcctccactgtcgtgagagctgagctaagcccttccatcgtcataagtctcagcacaggtctctccctcttcctcggtcgtttcgtcttcttcaacttccagagagagaacgtagcaaaacagggcttaccggagcagaacggaaaaacccatttcgaagctggagatgatcgtgctaaggagtacgtcagtctcttgaaatcgaacgatccaattggattcaacattgttgatgttcttgcttggggttctattggacacatcgttgcttactacatcttggctacttccagcaatggatacgacccaagcttctttggatgattcgtttcaatgtcaatctctcgtatatgtatatgtatatgtttgacttgtgttgcaagctatctaatctgttctctatctctgtttcttcttctgttgttgttgttgttgtctaagacttgtccctctttttgcaaatgttttatttctccatttacaaatattggtttgcagagtttt

SEQ ID NO: 27980 - protein, 158 aa, Arabidopsis thaliana
  peptide (1)..(158): Ceres Seq. ID no. 12340024
MATSASALLSPTTFSTAISHKNPNSISFHGLRPLRGSSSALPKLSTTGRKSSSTVVRAELSPSIVISLSTGLSLFLGRFVFFNFQRENVAKQGLPEQNGKTHFEAGDDRAKEYVSLLKSNDPIGFNIVDVLAWGSIGHIVAYYILATSSNGYDPSFFG

SEQ ID NO: 27981 - DNA, 837 bp, Arabidopsis thaliana
  misc_feature (1)..(837): Ceres Seq. ID no. 12423298
  misc_feature (1)..(837): Ortholog of  Ceres SEQ ID NO 13580026 as cited in SEQ ID NO 62641
accaaaatcagcggagcaaaagttacttccgaaaccctaaaaaaaacacgatgatgctcaagcaagctgcgaagaaggctctagggcttacgtcacgtcaatcaacaccgtggtctgttagtatcttccgaacctaccatgagaacgtcatcgaccactacgataatccccgcaacgttgggtctttcgataagaatgatcccaacgttggcacgggactcgtaggagctcccgcttgtggtgatgtgatgaagcttcaaatcaaggtcgatgagaagactggtcaaatcgttgatgctcgctttaagacttttggttgtggttcagctatcgcttcttcatctgttgccactgaatgggtgaaaggcaaagctatggaggatgttctgaccatcaaaaacaccgaaatcgcaaagcatctttctctcccaccagtcaagctccactgcagtatgttggcggaggacgctatcaaggcagctgtgaaagactacaaggagaagcgtgtgaagacaaatggtgctgcagcagcaggagaaaccacacaggcttgattccttttactagtgtgtataccataatgtgtatatgatggtgaaaacaggggagaagtagaagaggatgatacatacaacctatggtatgttgtaatgttcaagacttaaggagtattttagaataaactctgttcacagaaacgtgtaagaatgattttgctttggccctgtagtttttgctgttttatgcaccgatgtgatgtaatgttttctctcttctttgggaggtttataaattacaactttgacagacaaattttcaattttcaattttgacatt

SEQ ID NO: 27982 - protein, 183 aa, Arabidopsis thaliana
  peptide (1)..(183): Ceres Seq. ID no. 12423299
QNQRSKSYFRNPKKNTMMLKQAAKKALGLTSRQSTPWSVSIFRTYHENVIDHYDNPRNVGSFDKNDPNVGTGLVGAPACGDVMKLQIKVDEKTGQIVDARFKTFGCGSAIASSSVATEWVKGKAMEDVLTIKNTEIAKHLSLPPVKLHCSMLAEDAIKAAVKDYKEKRVKTNGAAAAGETTQA

SEQ ID NO: 27983 - protein, 167 aa, Arabidopsis thaliana
  peptide (1)..(167): Ceres Seq. ID no. 12423300
MMLKQAAKKALGLTSRQSTPWSVSIFRTYHENVIDHYDNPRNVGSFDKNDPNVGTGLVGAPACGDVMKLQIKVDEKTGQIVDARFKTFGCGSAIASSSVATEWVKGKAMEDVLTIKNTEIAKHLSLPPVKLHCSMLAEDAIKAAVKDYKEKRVKTNGAAAAGETTQA

SEQ ID NO: 27984 - protein, 166 aa, Arabidopsis thaliana
  peptide (1)..(166): Ceres Seq. ID no. 12423301
MLKQAAKKALGLTSRQSTPWSVSIFRTYHENVIDHYDNPRNVGSFDKNDPNVGTGLVGAPACGDVMKLQIKVDEKTGQIVDARFKTFGCGSAIASSSVATEWVKGKAMEDVLTIKNTEIAKHLSLPPVKLHCSMLAEDAIKAAVKDYKEKRVKTNGAAAAGETTQA

SEQ ID NO: 27985 - DNA, 911 bp, Arabidopsis thaliana
  misc_feature (1)..(911): Ceres Seq. ID no. 13486631
  misc_feature (1)..(911): Ortholog of  Ceres SEQ ID NO 14303374 as cited in SEQ ID NO 54088
  misc_feature (1)..(911): Ortholog of  Ceres SEQ ID NO 13639250 as cited in SEQ ID NO 56555
  misc_feature (1)..(911): Ortholog of  Ceres SEQ ID NO 15177034 as cited in SEQ ID NO 60024
  misc_feature (1)..(911): Ortholog of  Ceres SEQ ID NO 13598257 as cited in SEQ ID NO 63008
  misc_feature (1)..(911): Ortholog of  Ceres SEQ ID NO 13597309 as cited in SEQ ID NO 63851
  misc_feature (1)..(911): Ortholog of  Ceres SEQ ID NO 12599167 as cited in SEQ ID NO 64443
actaaaacaaaaaatctcttaacaacttctccaccttctccccaccaccaccactcaccgtcggagaaagaaaaaaaacaaccaccatgaaagactgtgaaaaccacggccactctcgccggaaactaataaggcgaatattttggtcaataatcttcgtcctcttcatcatcttcctaacaatcctcctcatttgggcaattctccaaccatcaaagccacgcttcatcctccaagacgccaccgtctacgccttcaacgtctccggcaatccaccgaacctcctcacctccaacttccaaatcactctctcttcccggaaccctaacaacaaaatcggcatttactacgaccggcttgacgtctacgctacttaccggagccaacaaatcactttcccaacatcaatccctcccacgtatcagggacacaaagatgtcgacatctggtcgccgtttgtttacggaacctccgttcccatcgctccttttaacggcgttagtcttgacaccgataaagataacggtgtcgttttgttgatcattcgtgctgatggtagagtgaggtggaaggttgggacttttatcaccgggaagtatcatcttcatgtgaagtgtccagcatatataaacttcggtaacaaagctaacggagttatcgtcggagacaacgccgttaagtatacgtttaccactagttgtagtgttagtgtgtgaaacggcgacgaagaaaaataaggtaactaaacgtcttcgttaagtaatctgtcttagtgatgtgaattgtacattttgcttatacgaatagcaaatattacagattcgtgatgttgtaacgaattttaagaatttcaatatgtatactttttttttattatagttgaattctaaattctattataagttgtgatg

SEQ ID NO: 27986 - protein, 209 aa, Arabidopsis thaliana
  peptide (1)..(209): Ceres Seq. ID no. 13486632
MKDCENHGHSRRKLIRRIFWSIIFVLFIIFLTILLIWAILQPSKPRFILQDATVYAFNVSGNPPNLLTSNFQITLSSRNPNNKIGIYYDRLDVYATYRSQQITFPTSIPPTYQGHKDVDIWSPFVYGTSVPIAPFNGVSLDTDKDNGVVLLIIRADGRVRWKVGTFITGKYHLHVKCPAYINFGNKANGVIVGDNAVKYTFTTSCSVSV

SEQ ID NO: 27987 - DNA, 1368 bp, Arabidopsis thaliana
  misc_feature (1)..(1368): Ceres Seq. ID no. 12423294
  misc_feature (1)..(1368): Ortholog of  Ceres SEQ ID NO 13597205 as cited in SEQ ID NO 63422
  misc_feature (1)..(1368): Ortholog of  Ceres SEQ ID NO 14302511 as cited in SEQ ID NO 67604
  misc_feature (1)..(1368): Ortholog of  Ceres SEQ ID NO 15226642 as cited in SEQ ID NO 0
aaaatttgacggaatctataagataattttctccctagggattagggctcacaatctcaaatctctgattcttcgatacgataaattcttcctcgatatagaaaccactgattagatcctaattcgtcgcctagctcaaaagatggtgctttcgcaaaagcttcatgaagcatttaaaggaacagttgagaggatcacaggtcctcgtacgatctcggcgttcaaggagaagggagttctcagcgtcagcgagttcgtacttgccggagataatctcgtctccaagtgtcccacctggtcttgggaatctggtgacgcaagcaaaaggaagccatacttgccctcggacaaacagtttttgattactagaaatgtaccttgtctacggagagctgcttctgtggcagaggattatgaagctgctggaggtgaagtgttggttgatgatgaagataatgatggttggctggctacacatgggaaaccgaaagataaaggcaaggaagaggataacttaccatccatggatgccttggatataaacgagaaaaatactatccaatcaatacctacgtattttggaggtgaggaggatgatgatattccagacatggaggagttcgatgaggctgacaatgtggtagaaaatgatccggcaactcttcagtcaacttatcttgtggctcatgaacctgatgacgataacattctccgaactcggacatatgatctcagcataacgtatgataagtattaccaaactcctcgtgtttggctgaccggttatgatgagtcaaggatgctgctgcaacctgaacttgtaatggaggatgttagccaagaccatgctcgtaaaacggtcacaatcgaagatcatccacacttgcctggtaaacatgcttcagttcatccatgtcggcatggagctgttatgaagaaaatcattgatgtattaatgtcgcgtggagtagaacctgaagtcgacaagtacctcttcctgttcttgaagttcatggcatcagttattccaacaattgagtacgattacacaatggactttgatctcggtagctcaagcacctaatatcagatttaaacaagtatgtgctcgtgaatccgggaaacaagtatggtctcatggatggctggatggctctgcactgtacataaaacagagtcctcactttcatttctctccaagataaactttaaggtgttgtggtttaatcactcgtttatctaaagtttacgctgatgaatagtaatttgtgacaaaactctgaaaacgggtatttgatcaaaactgattcggtgtggttcaaaaaacagaatgtgatttagtgtgtttaatacactcttgctttggag

SEQ ID NO: 27988 - protein, 313 aa, Arabidopsis thaliana
  peptide (1)..(313): Ceres Seq. ID no. 12423295
MVLSQKLHEAFKGTVERITGPRTISAFKEKGVLSVSEFVLAGDNLVSKCPTWSWESGDASKRKPYLPSDKQFLITRNVPCLRRAASVAEDYEAAGGEVLVDDEDNDGWLATHGKPKDKGKEEDNLPSMDALDINEKNTIQSIPTYFGGEEDDDIPDMEEFDEADNVVENDPATLQSTYLVAHEPDDDNILRTRTYDLSITYDKYYQTPRVWLTGYDESRMLLQPELVMEDVSQDHARKTVTIEDHPHLPGKHASVHPCRHGAVMKKIIDVLMSRGVEPEVDKYLFLFLKFMASVIPTIEYDYTMDFDLGSSST

SEQ ID NO: 27989 - protein, 186 aa, Arabidopsis thaliana
  peptide (1)..(186): Ceres Seq. ID no. 12423296
MDALDINEKNTIQSIPTYFGGEEDDDIPDMEEFDEADNVVENDPATLQSTYLVAHEPDDDNILRTRTYDLSITYDKYYQTPRVWLTGYDESRMLLQPELVMEDVSQDHARKTVTIEDHPHLPGKHASVHPCRHGAVMKKIIDVLMSRGVEPEVDKYLFLFLKFMASVIPTIEYDYTMDFDLGSSST

SEQ ID NO: 27990 - protein, 157 aa, Arabidopsis thaliana
  peptide (1)..(157): Ceres Seq. ID no. 12423297
MEEFDEADNVVENDPATLQSTYLVAHEPDDDNILRTRTYDLSITYDKYYQTPRVWLTGYDESRMLLQPELVMEDVSQDHARKTVTIEDHPHLPGKHASVHPCRHGAVMKKIIDVLMSRGVEPEVDKYLFLFLKFMASVIPTIEYDYTMDFDLGSSST

SEQ ID NO: 27991 - DNA, 919 bp, Arabidopsis thaliana
  misc_feature (1)..(919): Ceres Seq. ID no. 13488627
  misc_feature (1)..(919): Ortholog of  Ceres SEQ ID NO 13587227 as cited in SEQ ID NO 513
  misc_feature (1)..(919): Ortholog of  Ceres SEQ ID NO 13594494 as cited in SEQ ID NO 51293
  misc_feature (1)..(919): Ortholog of  Ceres SEQ ID NO 13595538 as cited in SEQ ID NO 59858
  misc_feature (1)..(919): Ortholog of  Ceres SEQ ID NO 12598249 as cited in SEQ ID NO 61073
  misc_feature (1)..(919): Ortholog of  Ceres SEQ ID NO 13582815 as cited in SEQ ID NO 68106
aatccatatatatccttctccattagcttttgttcttctgttccaattccaattccttctgaaatattcatcgcaattcgtatcggtttaaagtaaaaaagcaatgggaggtggtaaagacaagcatcatgatgagcaagagaaaggatttcatggttttccaggaggtggacattacccacctgctcaaggaggttaccctcctcaaggttacccaccacaacaagggtatcctccagctggaggctacccacctgccggatatcctcctggtgcttaccctgctgcgcccggtggttatcctcctgcacctggaggttaccctcctgctggctatcctgcacctggagctcaccattcaggacattctggtggtggactcggaggcatgatagcaggtgcagctggtgcagccgcagcagcttatggagctcaccatgttggtcacgcctctcacaacccttacgggcatgctgtaggacatggagggtatggccatgcccctgctcatggctttggccatggtggtcatggtaaattcaagcacggaaagcatggaggcaaattcaagcacggaaagcatggaaagcacgggaaacatggcatgtttggaggaggaggcaaattcaagaagtggaagtaatctcaaaaaccccacctttgatcctctcctccagtatagtctcattacctgaccgatgtttctaataatcccccttcaaacatatttcattttaactatgtcggtttagagattactggttgaggaaataattggagagtgctagtataaaccttatggtatctgcagcagaggtttctttaatctctcaatagtagatgctttgaaacttatctataatttggtattgtaatgacagtttgtgtttggttttttcttcagtatcttctttgtttg

SEQ ID NO: 27992 - protein, 179 aa, Arabidopsis thaliana
  peptide (1)..(179): Ceres Seq. ID no. 13488628
MGGGKDKHHDEQEKGFHGFPGGGHYPPAQGGYPPQGYPPQQGYPPAGGYPPAGYPPGAYPAAPGGYPPAPGGYPPAGYPAPGAHHSGHSGGGLGGMIAGAAGAAAAAYGAHHVGHASHNPYGHAVGHGGYGHAPAHGFGHGGHGKFKHGKHGGKFKHGKHGKHGKHGMFGGGGKFKKWK

SEQ ID NO: 27993 - DNA, 1792 bp, Arabidopsis thaliana; identical to SEQ ID NO: 22471
  misc_feature (1)..(1792): Ceres Seq. ID no. 13490532
  misc_feature (1)..(1792): Ortholog of  Ceres SEQ ID NO 13600220 as cited in SEQ ID NO 0

SEQ ID NO: 27994 - protein, 524 aa, Arabidopsis thaliana; identical to SEQ ID NO: 22472
  peptide (1)..(524): Ceres Seq. ID no. 13490533

SEQ ID NO: 27995 - protein, 423 aa, Arabidopsis thaliana; identical to SEQ ID NO: 22473
  peptide (1)..(423): Ceres Seq. ID no. 13490534

SEQ ID NO: 27996 - protein, 413 aa, Arabidopsis thaliana; identical to SEQ ID NO: 22474
  peptide (1)..(413): Ceres Seq. ID no. 13490535

SEQ ID NO: 27997 - DNA, 970 bp, Arabidopsis thaliana
  misc_feature (1)..(970): Ceres Seq. ID no. 13504892
  misc_feature (1)..(970): Ortholog of  Ceres SEQ ID NO 12557432 as cited in SEQ ID NO 92
tctacgggagctaaaaaggaactgggaagagtttgtttcttcgattcgtagatcaattctcagctgacattgaggtttatctcagatcgaaatcgagaagaagatgtttctcactaggactgagtatgacagaggagtcaatacattttctcctgaaggtcgtctctttcaggttgagtatgccattgaagctatcaagcttggttctactgctattggtgtaaagacgaaagagggagttgttcttgcagtcgagaagcgtattacttcgcctttactggagccgagtagtgttgagaagattatggaaattgatgaccatataggttgtgctatgagtggtctgattgctgacgcgcgaacacttgttgagcatgcacgagtagagacccagaaccacaggttctcgtatggtgagccaatgactgtagaatctacaacacaagctttgtgtgatcttgctttacggtttggtgaaggagaggaagagtcaatgtctcgtccatttggagtatcccttctcattgctgggcatgatgaaaatggaccgagcctgtactacacagatccatcgggaacattctggcaatgcaatgcaaaggcaattgggtctggctcagaaggagctgatagttctctccaagagcaattcaacaaggatataactcttcaagaagctgaaacaatagctgtatctatcctaaagcaagtaatggaagaaaaggtgactccaaacaatgtcgacattgccaaagtcgcaccagcttatcacctctacactcctcaggaggttgaagccgtcatcagtcgtctatgaagaaataaaccgccattctcttcctgttatcttaccttgtctgttcggtaatttatcaggcttctgtctgcttccggttctctaaaccaaaaattagtttcgtttaatcagataatggattttatcgagttgagttttattgagctttctatc

SEQ ID NO: 27998 - protein, 237 aa, Arabidopsis thaliana
  peptide (1)..(237): Ceres Seq. ID no. 13504893
MFLTRTEYDRGVNTFSPEGRLFQVEYAIEAIKLGSTAIGVKTKEGVVLAVEKRITSPLLEPSSVEKIMEIDDHIGCAMSGLIADARTLVEHARVETQNHRFSYGEPMTVESTTQALCDLALRFGEGEEESMSRPFGVSLLIAGHDENGPSLYYTDPSGTFWQCNAKAIGSGSEGADSSLQEQFNKDITLQEAETIAVSILKQVMEEKVTPNNVDIAKVAPAYHLYTPQEVEAVISRL

SEQ ID NO: 27999 - protein, 170 aa, Arabidopsis thaliana
  peptide (1)..(170): Ceres Seq. ID no. 13504894
MEIDDHIGCAMSGLIADARTLVEHARVETQNHRFSYGEPMTVESTTQALCDLALRFGEGEEESMSRPFGVSLLIAGHDENGPSLYYTDPSGTFWQCNAKAIGSGSEGADSSLQEQFNKDITLQEAETIAVSILKQVMEEKVTPNNVDIAKVAPAYHLYTPQEVEAVISRL

SEQ ID NO: 28000 - protein, 160 aa, Arabidopsis thaliana
  peptide (1)..(160): Ceres Seq. ID no. 13504895
MSGLIADARTLVEHARVETQNHRFSYGEPMTVESTTQALCDLALRFGEGEEESMSRPFGVSLLIAGHDENGPSLYYTDPSGTFWQCNAKAIGSGSEGADSSLQEQFNKDITLQEAETIAVSILKQVMEEKVTPNNVDIAKVAPAYHLYTPQEVEAVISRL

SEQ ID NO: 28001 - DNA, 1153 bp, Arabidopsis thaliana
  misc_feature (1)..(1153): Ceres Seq. ID no. 12334239
  misc_feature (1)..(1153): Ortholog of  Ceres SEQ ID NO 13656436 as cited in SEQ ID NO 69154
aaaagctaaatcgggaactggcgcattttagtcgtccgccataaccttcgctcttcgctctctgattcttccgattacatcggttttcttctctctccggtacttgtgttctcgtgatcttcttcttccccgcagccgattcattcgatttctctctcttttgtttgatctaattcgatttcgatgaaactcagattttgatctttgagtttttgtttcctttagattcaatggctgctccacctgctagagccagagctgattacgattatctcattaagcttcttttgattggagatagcggtgttggtaaaagttgtcttctactacgtttctctgatggatctttcaccactagcttcattaccactattggcattgactttaagataagaacgattgagcttgacggtaaacgtatcaagcttcagatttgggatacagctggtcaagagcgatttcggactatcaccactgcttattaccgtggggcaatgggcattttgctggtgtatgatgtcacagacgagtcatccttcaacaacattaggaactggattcgtaatatcgaacagcatgcttcggataatgttaacaagatcttggtggaacaaggctgacatggatgaaagcaagagggcagtacctacagcaaagggtcaggctcttgctgatgagtacggaattaagttcttcgaaacaagtgccaagacaaacctaaacgtggaagaagttttcttctcaatagggagggacattaagcagaggctttcagacaccgactcgagggcagagcctgcaacgatcaagataagccaaacggaccaagcagctggagcagggcaggccacacagaaatctgcatgctgtggaacttaaaaaagttttaaaagtgaagtttaagtcgaaaaaagtttgggggtgaagtgaaaaactaagatatcgttgggtgcttatgtaatttttttgttttatgccaacaattctgattcgttcttctaaattgtccttcctatttgtacgaaggtttaatcgaaacttgtatttttcttttctattactgattttttatgacggtgactgaattgtttatgttggtcatcacttctctctatatatcctctgttcttaatttttctcttgcttcctcttt

SEQ ID NO: 28002 - protein, 129 aa, Arabidopsis thaliana
  peptide (1)..(129): Ceres Seq. ID no. 12334240
MAAPPARARADYDYLIKLLLIGDSGVGKSCLLLRFSDGSFTTSFITTIGIDFKIRTIELDGKRIKLQIWDTAGQERFRTITTAYYRGAMGILLVYDVTDESSFNNIRNWIRNIEQHASDNVNKILVEQG

SEQ ID NO: 28003 - protein, 121 aa, Arabidopsis thaliana
  peptide (1)..(121): Ceres Seq. ID no. 12334241
MMSQTSHPSTTLGTGFVISNSMLRIMLTRSWWNKADMDESKRAVPTAKGQALADEYGIKFFETSAKTNLNVEEVFFSIGRDIKQRLSDTDSRAEPATIKISQTDQAAGAGQATQKSACCGT

SEQ ID NO: 28004 - protein, 120 aa, Arabidopsis thaliana
  peptide (1)..(120): Ceres Seq. ID no. 12334242
MSQTSHPSTTLGTGFVISNSMLRIMLTRSWWNKADMDESKRAVPTAKGQALADEYGIKFFETSAKTNLNVEEVFFSIGRDIKQRLSDTDSRAEPATIKISQTDQAAGAGQATQKSACCGT

SEQ ID NO: 28005 - DNA, 1203 bp, Arabidopsis thaliana
  misc_feature (1)..(1203): Ceres Seq. ID no. 12371326
  misc_feature (1)..(1203): Ortholog of  Ceres SEQ ID NO 12609041 as cited in SEQ ID NO 51310
  misc_feature (1)..(1203): Ortholog of  Ceres SEQ ID NO 13594966 as cited in SEQ ID NO 56152
  misc_feature (1)..(1203): Ortholog of  Ceres SEQ ID NO 12582457 as cited in SEQ ID NO 57530
  misc_feature (1)..(1203): Ortholog of  Ceres SEQ ID NO 13655804 as cited in SEQ ID NO 64881
acaacgctttttgtctcatctccttcttcttctccttctcaaatcttttttttcaggcgtaacgaatcgaatcataaacacttacgcagaaacaaaaactaaactttggatcttttaaccgaccatagagattcgtgggttcttcttagtttcgacagattcttgatccgttttagttgttacgctcatctttgcttttatacatcagacccttctcttctcttccttctttatctaagaaacattagggttctttgaaatcttgctaaaaaaaaatgggtgttgagaaaatggtgtgtttagcttctcgtacgggtcgtcagtttcagagatacaacaaaggtcgtcgtcaagtcgttggatgtgttccttacagattcaagctatctaatgatggtaaaataagtgatgaagtagaagttcttgttatctcttcccaaaaaggccacgccttaatgttccccaagggtggttgggagcttgatgaatctgtagaagaagctgcatcaagagaatgtcttgaagaagctggagttcttggcaacgttgagcaccaacttggaaaatgggattttttaagcaaaagcagaggaacatactatgaaggactaatgttccctatgcttgttacagaacaacttgagctttggcctgaacaacatgttaggcaaagaatctggatgaatgtaaccgaagcaagagaagcttgtagagattggtggatgaaagaagcattagatgttttggttgagagactttcatcaccaatgaatcaaccaaaggaagagaagactatgtcaatctctattgaaacaatgtgttgatgatgaagctgatgattgctaaattgctgattgttgatgggagtttttatgagctaatatggatctctgtaggtattaaatagatgggtctcaattagttattgagacggctaaaaaaatctatttcgaaaagccgatgcagagagcatggacaaagaaaaagatggtagagttttaagttttggatcagaaagattaacatcatgtgatttaagaagtcttgtgtttgtgtttataatgtttctgcaagaacttcttaagatatgattaagagggaagatgataaacttagagtgcaagcaaaacctgtataattgtgtttccctctgtttatttttcctctctctttgaatttgcaatggagacatttgatttcatc

SEQ ID NO: 28006 - protein, 182 aa, Arabidopsis thaliana
  peptide (1)..(182): Ceres Seq. ID no. 12371327
MGVEKMVCLASRTGRQFQRYNKGRRQVVGCVPYRFKLSNDGKISDEVEVLVISSQKGHALMFPKGGWELDESVEEAASRECLEEAGVLGNVEHQLGKWDFLSKSRGTYYEGLMFPMLVTEQLELWPEQHVRQRIWMNVTEAREACRDWWMKEALDVLVERLSSPMNQPKEEKTMSISIETMC

SEQ ID NO: 28007 - protein, 177 aa, Arabidopsis thaliana
  peptide (1)..(177): Ceres Seq. ID no. 12371328
MVCLASRTGRQFQRYNKGRRQVVGCVPYRFKLSNDGKISDEVEVLVISSQKGHALMFPKGGWELDESVEEAASRECLEEAGVLGNVEHQLGKWDFLSKSRGTYYEGLMFPMLVTEQLELWPEQHVRQRIWMNVTEAREACRDWWMKEALDVLVERLSSPMNQPKEEKTMSISIETMC

SEQ ID NO: 28008 - protein, 122 aa, Arabidopsis thaliana
  peptide (1)..(122): Ceres Seq. ID no. 12371329
MFPKGGWELDESVEEAASRECLEEAGVLGNVEHQLGKWDFLSKSRGTYYEGLMFPMLVTEQLELWPEQHVRQRIWMNVTEAREACRDWWMKEALDVLVERLSSPMNQPKEEKTMSISIETMC

SEQ ID NO: 28009 - DNA, 1271 bp, Arabidopsis thaliana
  misc_feature (1)..(1271): Ceres Seq. ID no. 13490305
  misc_feature (1)..(1271): Ortholog of  Ceres SEQ ID NO 15224973 as cited in SEQ ID NO 58138
ctctcactgcaagagcgcgaaacagagtaaggctcactttgttttagctttctcctctacttcgataatgccgtttgctccttccttgttgtcatcgtcttcctcagtctctcaatttcttcccagattccccaacgcgactagattcaatgtaactccacggagcagagccgccaccgtcgtcgcggcatccgtcaccgacctagccggggtcgacagtacaacaatcgccgtactcggtggaggatccgtagcagcactcgcggcgatggtttccttaacggatccggagaggaggcggaaattgcaggcggaggaagttggcggaggcgataaggaggttgtgagggagtatttcaatagcacggggttcgagaggtggaggaagatctacggtgagactgatgaagtgaatcgagtacagaaggatattcgactcggtcatgctaagacggtggagaacacgatgcttatgctgactgaagatagatccttggccggtgtcacggtttgcgacgccggttgtggaaccggtttgctctcgattccacttgctaaggaaggagcaatcgtctctgcttccgatatttctgctgctatggttgctgaagctgagatgaaggcaaaggcacaactaccatcagagaatttaccaaaatttgaggtgaatgatttggagagcctaactgggaagtatgataccgttgtatgtctcgacgtgttgatacattacccgcagaacaaagcagacggaatgatcgcacatcttgcttctttagcagagaagagagtgattctgagttttgctccaaagactttttactatgatatcttaaagagaattggagagcttttcccagggccatcaaaagctacaagggcgtatctacactcggaggcggatgtggaaagagcgttgggtaaagtcggctggaaaatcagcaagagaggactcactaccacacagttctacttctctaggctcatcgaagctgttccaatgtagaccaatttgaaaactagtagatctctgtatagcatattccgagaaggattttcgtggaagacatgcagattctcctaaattcgctgaagagattctcataaactcttcttatatactaggaggacggtctgtacaaacttgcacttctgcagaccctaattgataattggccaaaatgttcaatgtaatcaacgttatttgttgtgctgcttaactgtgtccaaaaacatgtctatacttttctacccattcttgtgcatagttt

SEQ ID NO: 28010 - protein, 334 aa, Arabidopsis thaliana
  peptide (1)..(334): Ceres Seq. ID no. 13490306
SHCKSAKQSKAHFVLAFSSTSIMPFAPSLLSSSSSVSQFLPRFPNATRFNVTPRSRAATVVAASVTDLAGVDSTTIAVLGGGSVAALAAMVSLTDPERRRKLQAEEVGGGDKEVVREYFNSTGFERWRKIYGETDEVNRVQKDIRLGHAKTVENTMLMLTEDRSLAGVTVCDAGCGTGLLSIPLAKEGAIVSASDISAAMVAEAEMKAKAQLPSENLPKFEVNDLESLTGKYDTVVCLDVLIHYPQNKADGMIAHLASLAEKRVILSFAPKTFYYDILKRIGELFPGPSKATRAYLHSEADVERALGKVGWKISKRGLTTTQFYFSRLIEAVPM

SEQ ID NO: 28011 - protein, 312 aa, Arabidopsis thaliana
  peptide (1)..(312): Ceres Seq. ID no. 13490307
MPFAPSLLSSSSSVSQFLPRFPNATRFNVTPRSRAATVVAASVTDLAGVDSTTIAVLGGGSVAALAAMVSLTDPERRRKLQAEEVGGGDKEVVREYFNSTGFERWRKIYGETDEVNRVQKDIRLGHAKTVENTMLMLTEDRSLAGVTVCDAGCGTGLLSIPLAKEGAIVSASDISAAMVAEAEMKAKAQLPSENLPKFEVNDLESLTGKYDTVVCLDVLIHYPQNKADGMIAHLASLAEKRVILSFAPKTFYYDILKRIGELFPGPSKATRAYLHSEADVERALGKVGWKISKRGLTTTQFYFSRLIEAVPM

SEQ ID NO: 28012 - protein, 245 aa, Arabidopsis thaliana
  peptide (1)..(245): Ceres Seq. ID no. 13490308
MVSLTDPERRRKLQAEEVGGGDKEVVREYFNSTGFERWRKIYGETDEVNRVQKDIRLGHAKTVENTMLMLTEDRSLAGVTVCDAGCGTGLLSIPLAKEGAIVSASDISAAMVAEAEMKAKAQLPSENLPKFEVNDLESLTGKYDTVVCLDVLIHYPQNKADGMIAHLASLAEKRVILSFAPKTFYYDILKRIGELFPGPSKATRAYLHSEADVERALGKVGWKISKRGLTTTQFYFSRLIEAVPM

SEQ ID NO: 28013 - DNA, 1479 bp, Arabidopsis thaliana
  misc_feature (1)..(1479): Ceres Seq. ID no. 13499756
  misc_feature (1)..(1479): Ortholog of  Ceres SEQ ID NO 13599520 as cited in SEQ ID NO 633
  misc_feature (1)..(1479): Ortholog of  Ceres SEQ ID NO 13595142 as cited in SEQ ID NO 56671
  misc_feature (1)..(1479): Ortholog of  Ceres SEQ ID NO 15168569 as cited in SEQ ID NO 58123
  misc_feature (1)..(1479): Ortholog of  Ceres SEQ ID NO 15226382 as cited in SEQ ID NO 63295
  misc_feature (1)..(1479): Ortholog of  Ceres SEQ ID NO 13598460 as cited in SEQ ID NO 63382
  misc_feature (1)..(1479): Ortholog of  Ceres SEQ ID NO 13597403 as cited in SEQ ID NO 64085
gttttcccccaaattctcataattttcacaaacaacctctcgtcttctaggttaatccaatttcgtcgattcatgaagttcacaattctcccatcggaaaattcttcgtaatcgacgacgaagagatcatgagtaccgtcggaggtatagagcagttgatacctgattccgtttcaacgtcgttcatcgaaacggtgaacggttcgcaccagttcacgattcaaggttactctctagccaaaggcatgagccctgggaagtttatacagagcgatatcttctccgttggtggatacgattgggcgatttacttctatcctgatgggaagaacccggaggaccagtcctcgtatatctctttgttcatcgctttagcgagtgattctaatgatattagggctttgtttgagcttacgcttatggatcagagtgggaaagggaaacataaggtgcatagtcactttgatcgggcgcttgaaggtggtccttatacacttaagtataaaggaagcatgtggggttacaaacgctttttcaaacgatcagctttagaaacctctgactacttaaaggatgattgtcttgtcatcaattgtactgttggcgttgttagagcccgactcgagggtccaaaacagtatggcattgtgctacccctgtcgaatatgggtcagggattgaaagacttgttagattctgaagttggttgtgacatagctttccaagtcggagatgaaacatacaaagctcacaaactgattctcgcggcacgctccccagtttttagagctcagttttttggaccaattgggaataacaatgtggatagaatagtgatagacgacatcgaaccttctatcttcaaggctatgcttagcttcatttacaccgatgtacttcctaatgtgcatgaaattaccgggtcaacttctgccagttcgtttacaaacatgatacaacatctcttggcagctgctgacctctatgaccttgcaaggttaaagatattatgtgaagttttgctatgcgaaaaacttgatgttgataatgtggcaacaacacttgcgttggctgaacagcaccaattcttacagctcaaagcgttctgcttagaatttgttgcatctccagcaaacttgggagctgtaatgaagtccgaagggttcaagcacttgaaacagagctgtcccactttgttatctgagttgctgaacactgttgcagcagcagataagagctcgacgagtggacaatcaaacaagaaaagaagtgcgagcagtgtattagggtgtgacactacaaatgtgaggcaattgaggaggagaacacgaaaagaagtgcgagcagtgtcttaggatcattacataccgtatgcaaaattctagaattatgcattgtgtttcaagcagagtttatgaattccaagtcatcccgtgaacttttttaccagtgagaattatagaggcctgaactctgaac

SEQ ID NO: 28014 - protein, 408 aa, Arabidopsis thaliana
  peptide (1)..(408): Ceres Seq. ID no. 13499757
MSTVGGIEQLIPDSVSTSFIETVNGSHQFTIQGYSLAKGMSPGKFIQSDIFSVGGYDWAIYFYPDGKNPEDQSSYISLFIALASDSNDIRALFELTLMDQSGKGKHKVHSHFDRALEGGPYTLKYKGSMWGYKRFFKRSALETSDYLKDDCLVINCTVGVVRARLEGPKQYGIVLPLSNMGQGLKDLLDSEVGCDIAFQVGDETYKAHKLILAARSPVFRAQFFGPIGNNNVDRIVIDDIEPSIFKAMLSFIYTDVLPNVHEITGSTSASSFTNMIQHLLAAADLYDLARLKILCEVLLCEKLDVDNVATTLALAEQHQFLQLKAFCLEFVASPANLGAVMKSEGFKHLKQSCPTLLSELLNTVAAADKSSTSGQSNKKRSASSVLGCDTTNVRQLRRRTRKEVRAVS

SEQ ID NO: 28015 - protein, 369 aa, Arabidopsis thaliana
  peptide (1)..(369): Ceres Seq. ID no. 13499758
MSPGKFIQSDIFSVGGYDWAIYFYPDGKNPEDQSSYISLFIALASDSNDIRALFELTLMDQSGKGKHKVHSHFDRALEGGPYTLKYKGSMWGYKRFFKRSALETSDYLKDDCLVINCTVGVVRARLEGPKQYGIVLPLSNMGQGLKDLLDSEVGCDIAFQVGDETYKAHKLILAARSPVFRAQFFGPIGNNNVDRIVIDDIEPSIFKAMLSFIYTDVLPNVHEITGSTSASSFTNMIQHLLAAADLYDLARLKILCEVLLCEKLDVDNVATTLALAEQHQFLQLKAFCLEFVASPANLGAVMKSEGFKHLKQSCPTLLSELLNTVAAADKSSTSGQSNKKRSASSVLGCDTTNVRQLRRRTRKEVRAVS

SEQ ID NO: 28016 - protein, 311 aa, Arabidopsis thaliana
  peptide (1)..(311): Ceres Seq. ID no. 13499759
MDQSGKGKHKVHSHFDRALEGGPYTLKYKGSMWGYKRFFKRSALETSDYLKDDCLVINCTVGVVRARLEGPKQYGIVLPLSNMGQGLKDLLDSEVGCDIAFQVGDETYKAHKLILAARSPVFRAQFFGPIGNNNVDRIVIDDIEPSIFKAMLSFIYTDVLPNVHEITGSTSASSFTNMIQHLLAAADLYDLARLKILCEVLLCEKLDVDNVATTLALAEQHQFLQLKAFCLEFVASPANLGAVMKSEGFKHLKQSCPTLLSELLNTVAAADKSSTSGQSNKKRSASSVLGCDTTNVRQLRRRTRKEVRAVS

SEQ ID NO: 28017 - DNA, 1174 bp, Arabidopsis thaliana
  misc_feature (1)..(1174): Ceres Seq. ID no. 13500049
  misc_feature (1)..(1174): Ortholog of  Ceres SEQ ID NO 15178809 as cited in SEQ ID NO 401
  misc_feature (1)..(1174): Ortholog of  Ceres SEQ ID NO 15177055 as cited in SEQ ID NO 57450
  misc_feature (1)..(1174): Ortholog of  Ceres SEQ ID NO 12615854 as cited in SEQ ID NO 62880
ggaattcctcgagctacgtcagggctcatttccatcatcttcgtcttcgtttgttcccctgagatagagataagagaatttcgagagattcgagagaagagacgatgagtttccaagatctcgaagctggtactcgatctccggcgccgaatcgttttaccggtgggagacaacagagaccttcgtctcgtggggatccatctcaggaggtcgccgccgggattttcaggatcagcacggctgtcaattccttcttccgcctcgttaattcgatcggaacacctaaagatactcttgaattacgagataagctgcaaaagacaaggttacagatatccgaattggtgaagaatacttcagctaaacttaaggaagctagcgaagccgaccttcatggatcagctagtcaaattaagaagatagctgatgctaaactggcaaaagatttccaatcagttctcaaagagtttcagaaagctcagagacttgcagctgaaagagaaataacatatactcctgtggtcacaaaagaaatacctaccagttataatgcacctgaactggatactgaatctttaaggatctcccagcagcaagctcttcttctacaatcaagaaggcaagaagtggtgtttttagataacgagataacattcaatgaagcaattattgaggaaagagagcaagggattcgagaaattgaagaccagattcgtgatgtgaatggcatgttcaaagatctagctcttatggtgaaccatcaaggaaatattgtcgatgacatcagctctaaccttgacaactcacatgctgcaactacacaagccactgttcaactcagaaaagcagctaaaactcaaagatcaaactcctctttgacatgcctacttattctcatttttgggattgttctactcattgtcatcatcgttgtcttggtctaagcatcaaacatataactccaagcttcaatcttcaagcatcaagcgaatctatggaaactatacaaagacccattaaagatatatatctaatgtacagattctttatactccatcttccccattcaaccaaattgatcttaacttctcatcgtgtgaatgtttaatcaatgtattactccatcataaggatcttcatgatcaaaagaaataaacataagaaaataatctag

SEQ ID NO: 28018 - protein, 279 aa, Arabidopsis thaliana
  peptide (1)..(279): Ceres Seq. ID no. 13500050
MSFQDLEAGTRSPAPNRFTGGRQQRPSSRGDPSQEVAAGIFRISTAVNSFFRLVNSIGTPKDTLELRDKLQKTRLQISELVKNTSAKLKEASEADLHGSASQIKKIADAKLAKDFQSVLKEFQKAQRLAAEREITYTPVVTKEIPTSYNAPELDTESLRISQQQALLLQSRRQEVVFLDNEITFNEAIIEEREQGIREIEDQIRDVNGMFKDLALMVNHQGNIVDDISSNLDNSHAATTQATVQLRKAAKTQRSNSSLTCLLILIFGIVLLIVIIVVLV

SEQ ID NO: 28019 - DNA, 914 bp, Arabidopsis thaliana
  misc_feature (1)..(914): Ceres Seq. ID no. 12393250
  misc_feature (1)..(914): Ortholog of  Ceres SEQ ID NO 12467471 as cited in SEQ ID NO 55509
  misc_feature (1)..(914): Ortholog of  Ceres SEQ ID NO 13598557 as cited in SEQ ID NO 65168
tcgcatcactctttcaaagcctcgtgtcttgatttctttcaccaaactcatataatcacatatctctccaagttcatcaagaaaataatataaacacacacatacaagaactgaagaatgagcagacccggagattggaactgcaggtcatgcagccatctcaacttccagcgccgtgactcttgccagcgatgcggtgactctcgttccggccccggtggagttggtggcttagactttggtaatttcggtggcagagccatgtctgttttcggattcaccaccggctccgacgttcgtcccggtgattggtactgcaccgtgggaaactgcgggacacacaacttcgccagtcgctccacctgcttcaaatgcggcactttcaaggacgagaccggcgctggaggcggaggtggtggcatcggcggtccggccatgtttgacgccgacattatgcggtctagagtccccggtaacggtggtcgctctagctggaaatccggcgactggatttgcactaggattggttgcaatgagcataactttgcaagcagaatggaatgcttcaggtgcaatgcaccaagggacttcagcaacagaacctctttctaagttatacaaactgcttttgaagtagccttgtctccaatttcttaggcaccgtttcgatcaatggaaaggagaagcaggagcaaaagagagaattaaaagatgataattttgttagatgttgcaatgagagccaatattgtaactttagctgtcgtgcttttggatgtattatccatttttattaagatttcttttcattttctccttaattcgtaatttttcttttgcagtttctttttaagagttttattattctaatcattgtacgctgcatgtctttcttaaaagaagattctcttcgc

SEQ ID NO: 28020 - protein, 164 aa, Arabidopsis thaliana
  peptide (1)..(164): Ceres Seq. ID no. 12393251
MSRPGDWNCRSCSHLNFQRRDSCQRCGDSRSGPGGVGGLDFGNFGGRAMSVFGFTTGSDVRPGDWYCTVGNCGTHNFASRSTCFKCGTFKDETGAGGGGGGIGGPAMFDADIMRSRVPGNGGRSSWKSGDWICTRIGCNEHNFASRMECFRCNAPRDFSNRTSF

SEQ ID NO: 28021 - protein, 116 aa, Arabidopsis thaliana
  peptide (1)..(116): Ceres Seq. ID no. 12393252
MSVFGFTTGSDVRPGDWYCTVGNCGTHNFASRSTCFKCGTFKDETGAGGGGGGIGGPAMFDADIMRSRVPGNGGRSSWKSGDWICTRIGCNEHNFASRMECFRCNAPRDFSNRTSF

SEQ ID NO: 28022 - DNA, 662 bp, Arabidopsis thaliana
  misc_feature (1)..(662): Ceres Seq. ID no. 12333587
  misc_feature (1)..(662): Ortholog of  Ceres SEQ ID NO 15180055 as cited in SEQ ID NO 1186
gattcattctgcgtcgttcggaactctgcaacgagagttagggtttatacagagcaaagagaaggagaaagcgaaaccaaaaatcgacattaatggctgacgaagattacaacgacgtcgatgacttgggatatgaggatgagccagcagagcctgagattgaagaaggagtagaggaagatgttgaaatgaaggagaatgatgatgtcaatggtgagcctattgaagctgaagataaagtcgaaacagaacctgtgcaacgtccacgcaaaacgtcaaagtttatgaccaagtatgagcgtgctcgtatcctcggcactcgcgctttgcagattagcatgaatgctcctgtcatggttgagctagagggtgagactgatccacttgagattgcgatgaaggagcttaggcagcggaagataccattcactattagacgctatctacctgatgggagtttcgaggaatggggagttgatgaactgatcgtggaagactcatggaaacgtcaagttggtggtgattgataatctgaccagagacaaatcgacaaatacgtatgtaacttgcaagctttcctctcttatggatgataaattttctgatgttgtaatggaactaaaaatcagtgaaacttatggataatactagactcatattcc

SEQ ID NO: 28023 - protein, 144 aa, Arabidopsis thaliana
  peptide (1)..(144): Ceres Seq. ID no. 12333588
MADEDYNDVDDLGYEDEPAEPEIEEGVEEDVEMKENDDVNGEPIEAEDKVETEPVQRPRKTSKFMTKYERARILGTRALQISMNAPVMVELEGETDPLEIAMKELRQRKIPFTIRRYLPDGSFEEWGVDELIVEDSWKRQVGGD

SEQ ID NO: 28024 - protein, 112 aa, Arabidopsis thaliana
  peptide (1)..(112): Ceres Seq. ID no. 12333589
MKENDDVNGEPIEAEDKVETEPVQRPRKTSKFMTKYERARILGTRALQISMNAPVMVELEGETDPLEIAMKELRQRKIPFTIRRYLPDGSFEEWGVDELIVEDSWKRQVGGD

SEQ ID NO: 28025 - protein, 80 aa, Arabidopsis thaliana
  peptide (1)..(80): Ceres Seq. ID no. 12333590
MTKYERARILGTRALQISMNAPVMVELEGETDPLEIAMKELRQRKIPFTIRRYLPDGSFEEWGVDELIVEDSWKRQVGGD

SEQ ID NO: 28026 - DNA, 1153 bp, Arabidopsis thaliana
  misc_feature (1)..(1153): Ceres Seq. ID no. 12324234
  misc_feature (1)..(1153): Ortholog of  Ceres SEQ ID NO 14302396 as cited in SEQ ID NO 66907
  misc_feature (1)..(1153): Ortholog of  Ceres SEQ ID NO 13496281 as cited in SEQ ID NO 69175
aatcatacgctcctgagatcctcatgacttgttcttaccgtactccgcgagacatgcgattgatgattcttgactgtattcattgagaaaaactgttcgcaaaaaccttgagcttcatcatcgtccattactcacctttcagtttcagatgcccaagcaaaaagctccaaggaagcagctcaagtcctataaactcaaacacatcaacaagagtattcaagagggagatgctgtgttgatgcggtcgtcggagcctggaaaaccgtcgtacgtagcgagggtagaggcgatcgagacggacgcgcgtggatcgcacgcgaaagttcgtgtgaggtggtattatcgccctgaggaatctatcggagggaggagacaattccatggagccaaggaggtttttctctctgaccacttcgattttcaaagcgccgatacgattgaaggaaagtgtaaggttcacagtttcagtagctacaccaaacttgactctgttggaaacgacgacttcttctgtcgtttcgagtacaattccactaccggcgcgtttgatcctgacagagtcaccgtgttctgcaagtgtgagatgccgtataacccagatgacttgatggtgcaatgcgaggagtgttctgagtggtttcatccttcttgtataggaacaacaatagaggaagctaaaaagccagataacttctactgcgaagagtgttccccacaacagcagaatttgcacaactctaattcaacttccaataacagagatgctaaggtgaatggaaagcgcagcctggaggtaactaaatcgaagaacaaacacactaagcgaccaggttaacataaacttgtaaaggctatagatatctggttggtgagtctgagtatcaatcgtgtaatctacaaaggtggttttgttttctttccctctctagttttttctttcttaaaaaatgagggtttaggtttgttggcttgattgttgtataatttatatgtatagcgtatggtggtttctcatctcctttagttgtcacatataaaatttgggtaaaatggtttgtttataataagaaaacaaaacaaacaaacaaacaaagagagtgttggttccttatttgtttgttttcattgtgaactctagaaacccttcattctt

SEQ ID NO: 28027 - protein, 228 aa, Arabidopsis thaliana
  peptide (1)..(228): Ceres Seq. ID no. 12324235
MPKQKAPRKQLKSYKLKHINKSIQEGDAVLMRSSEPGKPSYVARVEAIETDARGSHAKVRVRWYYRPEESIGGRRQFHGAKEVFLSDHFDFQSADTIEGKCKVHSFSSYTKLDSVGNDDFFCRFEYNSTTGAFDPDRVTVFCKCEMPYNPDDLMVQCEECSEWFHPSCIGTTIEEAKKPDNFYCEECSPQQQNLHNSNSTSNNRDAKVNGKRSLEVTKSKNKHTKRPG

SEQ ID NO: 28028 - protein, 198 aa, Arabidopsis thaliana
  peptide (1)..(198): Ceres Seq. ID no. 12324236
MRSSEPGKPSYVARVEAIETDARGSHAKVRVRWYYRPEESIGGRRQFHGAKEVFLSDHFDFQSADTIEGKCKVHSFSSYTKLDSVGNDDFFCRFEYNSTTGAFDPDRVTVFCKCEMPYNPDDLMVQCEECSEWFHPSCIGTTIEEAKKPDNFYCEECSPQQQNLHNSNSTSNNRDAKVNGKRSLEVTKSKNKHTKRPG

SEQ ID NO: 28029 - DNA, 819 bp, Arabidopsis thaliana
  misc_feature (1)..(819): Ceres Seq. ID no. 13621966
  misc_feature (1)..(819): Ortholog of  Ceres SEQ ID NO 15173567 as cited in SEQ ID NO 57612
  misc_feature (1)..(819): Ortholog of  Ceres SEQ ID NO 12611396 as cited in SEQ ID NO 59809
  misc_feature (1)..(819): Ortholog of  Ceres SEQ ID NO 15178140 as cited in SEQ ID NO 0
atcccctcgtcgctgcgtctctctcccgcaaccttcgattttcgtttattcgcatccatcggagagagaaaacaatcaataagcgaccatgttggtgtaccaagatcttctcaccggtgatgagcttctgtctgactctttcccttacaaggagattgagaatggaatcctctgggaagtagaaggaaagtgggttactgtgggagctgtagatgttaacattggtgccaatccatctgctgaagaaggtggtgaggatgaaggtgttgatgactctactcaaaaggttgttgacattgtcgacaccttcagacttcaggagcaaccaacttatgacaagaagggattcatcgcttacattaagaaatacattaagcttttgacacccaagctcagcgaagaagatcaagctgtcttcaagaagggtattgagggagctaccaagtttttgctccccaggctcagtgacttccaattctttgttggggagggtatgcatgatgacagcactttggtctttgcttactacaaggagggttcaactaacccaacatttttgtacttcgctcatggtttgaaggaggtcaagtgctgagagagaagctctcgttgggttactgtggtcggtcgcagcgactctctaagtttatgtttctttatattgtcctgtgtttcgtcgtcgtcccctattaaaattacctgccagtttacttttctctcttcttgttttctgtgttggaagattctcaagttatttattccgcaaaaaacggtttatcatttacaattagttgaattttggtcgttactttttgtgcc

SEQ ID NO: 28030 - protein, 168 aa, Arabidopsis thaliana
  peptide (1)..(168): Ceres Seq. ID no. 13621967
MLVYQDLLTGDELLSDSFPYKEIENGILWEVEGKWVTVGAVDVNIGANPSAEEGGEDEGVDDSTQKVVDIVDTFRLQEQPTYDKKGFIAYIKKYIKLLTPKLSEEDQAVFKKGIEGATKFLLPRLSDFQFFVGEGMHDDSTLVFAYYKEGSTNPTFLYFAHGLKEVKC

SEQ ID NO: 28031 - DNA, 1087 bp, Arabidopsis thaliana
  misc_feature (1)..(1087): Ceres Seq. ID no. 13497134
  misc_feature (1)..(1087): Ortholog of  Ceres SEQ ID NO 13595414 as cited in SEQ ID NO 56539
aaaagatactataatagtagagatcaaagacctgagcaaaaactgaaaaaaaaaaaaaaaaaaaaagacttctcctcaaaaatggcgtttacactaggtggaagagctcgtcgtctagtctctgcaacatcaattcatcaaaatggttgcttacacaaactgcaacaaattggatcggatcggtttcagcttggtgaagcaaaagcaataagattactacccaggagaacaaacatggttcaagaattaggaatcagggaagaatttatggatccaaacagagaaacagagacaagttatgattttcttgatgaaatgagacacagatttctgaaattcaagagacaaaagtatctaccggagatagaaaagtttaaagctttggccatagctcaatcaccaaaggtaatggtgataggatgtgcagattcaagggtatgtccatcttatgtactaggatttcaacctggtgaagcttttactatccgaaatgtcgccaatctcgttaccccggttcagaatggaccaacagaaaccaactcggctcttgagtttgcggtcaccactcttcaggttgagaacattatagttatgggtcatagcaattgtggaggaattgcagcacttatgagtcatcaaaaccaccaagggcaacactctagtttagtagaaaggtgggttatgaatgggaaagccgctaagttaagaacacaattagcttcatcacatttatcctttgatgaacaatgcagaaactgtgagaaggaatctataaaggattctgtgatgaatttgataacttattcatggataagagatagagtaaagagaggtgaagtcaagattcatggatgttattacaatttgtcagattgtagtcttgagaagtggagattaagttcagacaagactaactatggattctatatttcagacagagagatatggagttgagtaaatattgaacaatcctcatttctaatattcagatgtatctttgtacatatgaaatgatatttacacaattggaaaaaaagaaagaaaaaaaagtaatattgtaataacggaataaaaggtgaattggtcc

SEQ ID NO: 28032 - protein, 317 aa, Arabidopsis thaliana
  peptide (1)..(317): Ceres Seq. ID no. 13497135
KRYYNSRDQRPEQKLKKKKKKKDFSSKMAFTLGGRARRLVSATSIHQNGCLHKLQQIGSDRFQLGEAKAIRLLPRRTNMVQELGIREEFMDPNRETETSYDFLDEMRHRFLKFKRQKYLPEIEKFKALAIAQSPKVMVIGCADSRVCPSYVLGFQPGEAFTIRNVANLVTPVQNGPTETNSALEFAVTTLQVENIIVMGHSNCGGIAALMSHQNHQGQHSSLVERWVMNGKAAKLRTQLASSHLSFDEQCRNCEKESIKDSVMNLITYSWIRDRVKRGEVKIHGCYYNLSDCSLEKWRLSSDKTNYGFYISDREIWS

SEQ ID NO: 28033 - protein, 290 aa, Arabidopsis thaliana
  peptide (1)..(290): Ceres Seq. ID no. 13497136
MAFTLGGRARRLVSATSIHQNGCLHKLQQIGSDRFQLGEAKAIRLLPRRTNMVQELGIREEFMDPNRETETSYDFLDEMRHRFLKFKRQKYLPEIEKFKALAIAQSPKVMVIGCADSRVCPSYVLGFQPGEAFTIRNVANLVTPVQNGPTETNSALEFAVTTLQVENIIVMGHSNCGGIAALMSHQNHQGQHSSLVERWVMNGKAAKLRTQLASSHLSFDEQCRNCEKESIKDSVMNLITYSWIRDRVKRGEVKIHGCYYNLSDCSLEKWRLSSDKTNYGFYISDREIWS

SEQ ID NO: 28034 - protein, 239 aa, Arabidopsis thaliana
  peptide (1)..(239): Ceres Seq. ID no. 13497137
MVQELGIREEFMDPNRETETSYDFLDEMRHRFLKFKRQKYLPEIEKFKALAIAQSPKVMVIGCADSRVCPSYVLGFQPGEAFTIRNVANLVTPVQNGPTETNSALEFAVTTLQVENIIVMGHSNCGGIAALMSHQNHQGQHSSLVERWVMNGKAAKLRTQLASSHLSFDEQCRNCEKESIKDSVMNLITYSWIRDRVKRGEVKIHGCYYNLSDCSLEKWRLSSDKTNYGFYISDREIWS

SEQ ID NO: 28035 - DNA, 1117 bp, Arabidopsis thaliana
  misc_feature (1)..(1117): Ceres Seq. ID no. 12371743
  misc_feature (1)..(1117): Ortholog of  Ceres SEQ ID NO 14313413 as cited in SEQ ID NO 58766
  misc_feature (1)..(1117): Ortholog of  Ceres SEQ ID NO 15171109 as cited in SEQ ID NO 59576
ccaatcaaagcgtgacttcttcctcggtctttttcttgaggttccaatctttttgacttcatacaccatttcttttgcttacaacactttcagataaaagctatagattcagtattttgatccaacgtgtcatatattaacccttaagcaagattagtgaagtgacgagcctttaagatttgttattcttacaagcagcttgcagaagagagagagttaccagcaggaccagaggaaggaggatttgggatgtcatatgaccttctctatggaagagcgggtttcctttgggctgctctgttcctaaaccgatatctcggccaaggaactgttcctgaccatctcttatcacccattgttgcagccatcttagccggtgggcgagttggagctgcagatcatgaagcttgtcctctgttatacaggtttcacggaacgcgattttggggtgctgcgaatggattagctggaatcttgtatgtattgctgcattttccactatcggaagaggatgttaaagatgttcaagggacattgaggtatatgatgagtaataggtttccgaacagcggaaactacccgtgcagcgaagggaatccgagggataagctagtccaatgggctcatggagcaaccggcatggccattactttggctaaagcatctcaggtgtttcccaaggaaagggatttccgcgaagcagccattgaagcaggagaagtagtgtggaagagtggcttggtgaagaaggtaggtttagccgatggagttgctggtatgcctacgctttcttatccctttatcgcttaaccggagatgttgtatatgaagagagagcaaaagcgtttgcgagttacttgtgccgtgatgcgatagagctcgtgaatatgacaagccaagaaacagaacatgattattcgcttttccggggactagctggaccagtatgcctctggttcgatcttgtgtcaccggtagattctaagtttcctggttatgagatataatttaaaacaggtaatagataaaccgtaggttctattatgactatctctttgtgaaaggatcttaggttctccggtttattccactttctataatctattgaagtaacttg

SEQ ID NO: 28036 - protein, 186 aa, Arabidopsis thaliana
  peptide (1)..(186): Ceres Seq. ID no. 12371744
MSYDLLYGRAGFLWAALFLNRYLGQGTVPDHLLSPIVAAILAGGRVGAADHEACPLLYRFHGTRFWGAANGLAGILYVLLHFPLSEEDVKDVQGTLRYMMSNRFPNSGNYPCSEGNPRDKLVQWAHGATGMAITLAKASQVFPKERDFREAAIEAGEVVWKSGLVKKVGLADGVAGMPTLSYPFIA

SEQ ID NO: 28037 - DNA, 1202 bp, Arabidopsis thaliana
  misc_feature (1)..(1202): Ceres Seq. ID no. 13504859
  misc_feature (1)..(1202): Ortholog of  Ceres SEQ ID NO 12583421 as cited in SEQ ID NO 56410
  misc_feature (1)..(1202): Ortholog of  Ceres SEQ ID NO 15169300 as cited in SEQ ID NO 59572
  misc_feature (1)..(1202): Ortholog of  Ceres SEQ ID NO 15176407 as cited in SEQ ID NO 59620
  misc_feature (1)..(1202): Ortholog of  Ceres SEQ ID NO 13596876 as cited in SEQ ID NO 62696
  misc_feature (1)..(1202): Ortholog of  Ceres SEQ ID NO 13655442 as cited in SEQ ID NO 64359
aacaacaagtctttctcacgaaaatggattctcggatttttctcgcattttccctctgttttctcttcactctccctctaatttcatctgcacctaaccgcttcctcactagatcgagtaacactagagatgggtcagtgataaagatgaaaacaagtgcttcttcttttgggtttgatccaactcgtgtcactcaactctcttggactcctagagtttttttgtatgaagggtttctttctgatgaggaatgtgatcattttatcaaattggcgaaagggaagcttgagaagtcaatggtggctgataatgattctggtgagagtgttgagagtgaagtacgcactagttctggaatgtttctctccaaacgacaggatgatatagtaagtaatgtggaggcaaaacttgctgcgtggacctttcttcccgaagagaatggtgaatccatgcaaatattgcattatgagaatggtcaaaagtatgaaccgcattttgactactttcacgaccaggctaatctagagctcggtggtcatcggattgccacagtattgatgtacttgtccaatgttgaaaagggaggagaaacagtgtttcccatgtggaagggtaaagcaactcagttgaaagacgatagctggaccgaatgtgcaaaacaaggctatgcagtgaaaccgaggaaaggggatgcattactgttcttcaatcttcacccaaatgcaaccacagattcaaatagcttacatggaagctgtccagtggttgagggagagaaatggtcagcaaccagatggattcacgttaagtcattcgaaagagcgtttaataagcaatctggatgtatggacgagaatgtgagctgcgaaaaatgggcaaaggcaggggaatgccagaagaatccaacatacatggttggttcagacaaagaccatggatattgcagaaagagttgcaaagcttgctcatcttaagaacaacaagtaaaatcaaagctcttattaaaggatcaaaatttttgtatagcgaaaaaccgggttttcgccattcgggtagataaacatatcgtcaatagaatgaaaaatttagaactatatactaaaaaaataattctgattctatgttactggtttcatgtgcaagttatgttccttatggttcataactagaccaaaacttaataaaagtcggtttatgttacc

SEQ ID NO: 28038 - protein, 323 aa, Arabidopsis thaliana
  peptide (1)..(323): Ceres Seq. ID no. 13504860
QQVFLTKMDSRIFLAFSLCFLFTLPLISSAPNRFLTRSSNTRDGSVIKMKTSASSFGFDPTRVTQLSWTPRVFLYEGFLSDEECDHFIKLAKGKLEKSMVADNDSGESVESEVRTSSGMFLSKRQDDIVSNVEAKLAAWTFLPEENGESMQILHYENGQKYEPHFDYFHDQANLELGGHRIATVLMYLSNVEKGGETVFPMWKGKATQLKDDSWTECAKQGYAVKPRKGDALLFFNLHPNATTDSNSLHGSCPVVEGEKWSATRWIHVKSFERAFNKQSGCMDENVSCEKWAKAGECQKNPTYMVGSDKDHGYCRKSCKACSS

SEQ ID NO: 28039 - protein, 316 aa, Arabidopsis thaliana
  peptide (1)..(316): Ceres Seq. ID no. 13504861
MDSRIFLAFSLCFLFTLPLISSAPNRFLTRSSNTRDGSVIKMKTSASSFGFDPTRVTQLSWTPRVFLYEGFLSDEECDHFIKLAKGKLEKSMVADNDSGESVESEVRTSSGMFLSKRQDDIVSNVEAKLAAWTFLPEENGESMQILHYENGQKYEPHFDYFHDQANLELGGHRIATVLMYLSNVEKGGETVFPMWKGKATQLKDDSWTECAKQGYAVKPRKGDALLFFNLHPNATTDSNSLHGSCPVVEGEKWSATRWIHVKSFERAFNKQSGCMDENVSCEKWAKAGECQKNPTYMVGSDKDHGYCRKSCKACSS

SEQ ID NO: 28040 - protein, 275 aa, Arabidopsis thaliana
  peptide (1)..(275): Ceres Seq. ID no. 13504862
MKTSASSFGFDPTRVTQLSWTPRVFLYEGFLSDEECDHFIKLAKGKLEKSMVADNDSGESVESEVRTSSGMFLSKRQDDIVSNVEAKLAAWTFLPEENGESMQILHYENGQKYEPHFDYFHDQANLELGGHRIATVLMYLSNVEKGGETVFPMWKGKATQLKDDSWTECAKQGYAVKPRKGDALLFFNLHPNATTDSNSLHGSCPVVEGEKWSATRWIHVKSFERAFNKQSGCMDENVSCEKWAKAGECQKNPTYMVGSDKDHGYCRKSCKACSS

SEQ ID NO: 28041 - DNA, 1684 bp, Arabidopsis thaliana; identical to SEQ ID NO: 27249
  misc_feature (1)..(1684): Ceres Seq. ID no. 12739003
  misc_feature (1)..(1684): Ortholog of  Ceres SEQ ID NO 13597407 as cited in SEQ ID NO 64106

SEQ ID NO: 28042 - protein, 332 aa, Arabidopsis thaliana; identical to SEQ ID NO: 27250
  peptide (1)..(332): Ceres Seq. ID no. 12739004

SEQ ID NO: 28043 - protein, 212 aa, Arabidopsis thaliana; identical to SEQ ID NO: 27251
  peptide (1)..(212): Ceres Seq. ID no. 12739005

SEQ ID NO: 28044 - protein, 193 aa, Arabidopsis thaliana; identical to SEQ ID NO: 27252
  peptide (1)..(193): Ceres Seq. ID no. 12739006

SEQ ID NO: 28045 - DNA, 1307 bp, Arabidopsis thaliana
  misc_feature (1)..(1307): Ceres Seq. ID no. 13493913
  misc_feature (1)..(1307): Ortholog of  Ceres SEQ ID NO 13582619 as cited in SEQ ID NO 56520
  misc_feature (1)..(1307): Ortholog of  Ceres SEQ ID NO 14314632 as cited in SEQ ID NO 59923
  misc_feature (1)..(1307): Ortholog of  Ceres SEQ ID NO 13660872 as cited in SEQ ID NO 60830
  misc_feature (1)..(1307): Ortholog of  Ceres SEQ ID NO 12616221 as cited in SEQ ID NO 63291
gaaaagaaactcaactttttttctttatctttaacatcaaaaaactttttcgatatctttacaaccattaaacaaaaaatttggccactacaagttgaaaaagttttgattatatctaatcgctgaaatggattacaaggtatcaagaagtggggagatagtagaaggagaagtagaagattcagaaaagattgatttaccacctggtttcagatttcacccaactgatgaagaacttataacacactatctaagaccaaaggttgtaaactcttttttctctgctatagctattggtgaagttgatctcaacaaagtcgagccttgggacttgccttggaaggctaagcttggggaaaaagagtggtacttcttttgcgtaagagaccgaaaatacccgactggtttaagaacgaatcgtgctactaaagccggttattggaaagctacagggaaagataaagagatcttcaaagggaaatctcttgttggtatgaagaaaacattggttttctacaaaggaagagctcctaaaggagtaaaaacaaattgggtcatgcatgagtatcgattagaaggcaaattcgctatcgataatctctctaaaaccgctaagaacgaatgtgttattagtcgtgtttttcatacacggactgatggtacgaaggagcatatgtccgttggtttacctccgctgatggattcttctccatatctaaagagtagaggacaagactctttagccgggaccacccttggtgggttgttgtctcacgttacctacttctccgaccaaacaaccgatgacaagagtcttgtggccgattttaaaactaccatgtttggttccggatcgactaactttttaccaaacataggttctctactagacttcgatcctctgtttctacaaaacaattcttcagtactgaagatgttgcttgacaatgaagaaacccaatttaagaagaatcttcacaattcaggttcatcagagagtgaactaacagcgagttcttggcaaggtcacaattcttatggttccactggtccagtgaatcttgattgcgtttggaaattctgaatttggaaaatcgaaaatttggatgttaactagggggtatatagggtttttaaaaacagtgtatatatgcgttatgtgttagctttagattctaggatatacaaagatgacactaatagattcttataacattttgtaaaaaaaaatcattgtagtgaatactctcttgccatttgaaatccattgtgtttgcatatttaaggtgttcataaattgtcatgct

SEQ ID NO: 28046 - protein, 318 aa, Arabidopsis thaliana
  peptide (1)..(318): Ceres Seq. ID no. 13493914
MDYKVSRSGEIVEGEVEDSEKIDLPPGFRFHPTDEELITHYLRPKVVNSFFSAIAIGEVDLNKVEPWDLPWKAKLGEKEWYFFCVRDRKYPTGLRTNRATKAGYWKATGKDKEIFKGKSLVGMKKTLVFYKGRAPKGVKTNWVMHEYRLEGKFAIDNLSKTAKNECVISRVFHTRTDGTKEHMSVGLPPLMDSSPYLKSRGQDSLAGTTLGGLLSHVTYFSDQTTDDKSLVADFKTTMFGSGSTNFLPNIGSLLDFDPLFLQNNSSVLKMLLDNEETQFKKNLHNSGSSESELTASSWQGHNSYGSTGPVNLDCVWKF

SEQ ID NO: 28047 - protein, 196 aa, Arabidopsis thaliana
  peptide (1)..(196): Ceres Seq. ID no. 13493915
MKKTLVFYKGRAPKGVKTNWVMHEYRLEGKFAIDNLSKTAKNECVISRVFHTRTDGTKEHMSVGLPPLMDSSPYLKSRGQDSLAGTTLGGLLSHVTYFSDQTTDDKSLVADFKTTMFGSGSTNFLPNIGSLLDFDPLFLQNNSSVLKMLLDNEETQFKKNLHNSGSSESELTASSWQGHNSYGSTGPVNLDCVWKF

SEQ ID NO: 28048 - protein, 175 aa, Arabidopsis thaliana
  peptide (1)..(175): Ceres Seq. ID no. 13493916
MHEYRLEGKFAIDNLSKTAKNECVISRVFHTRTDGTKEHMSVGLPPLMDSSPYLKSRGQDSLAGTTLGGLLSHVTYFSDQTTDDKSLVADFKTTMFGSGSTNFLPNIGSLLDFDPLFLQNNSSVLKMLLDNEETQFKKNLHNSGSSESELTASSWQGHNSYGSTGPVNLDCVWKF

SEQ ID NO: 28049 - DNA, 1023 bp, Arabidopsis thaliana
  misc_feature (1)..(1023): Ceres Seq. ID no. 12334086
  misc_feature (1)..(1023): Ortholog of  Ceres SEQ ID NO 13597272 as cited in SEQ ID NO 63951
aaaaaagatttggcttgtctctggcttgagaacaaagaaaacccctttcttcgatctcagcttaaatcactcgacgaagaagaaatcagaaaagagtcagagaaaaaaaaaatcaaggaagatgagtagcattggaactgggtacgatctctccgtcaccactttctctcccgatggccgtgttttccagatcgagtacgccgctaaagctgtcgacaacagtgggactgttgttggaatcaagtgcaaagatgggattgttatgggagttgagaaacttattgcatcaaagatgatgctaccaggttccaacaggagaatccattctgttcatcgtcatgctggcatggctgttgctgggcttgcagctgatgggaggcaaattgttgcgcgtgctaagtctgaagcacgaagctatgagagtgtttatggcgatgctgtacctgtgaaggaactttctgagcgtgttgcaagttatgtacatctgtgtaccctgtattggtggctcaggccttttggctgtggggttattcttggaggttatgatagagatggacctcaattgtacatgattgaaccatcaggcatatcatatagatactttggtgcggccattggcaaaggaaagcaagctgccaaaacggaaattgagaaattaaatttatctgagatgacatgcaaagaaggcgttatcgaggtggcgaaaatcatctacaagctacacgatgaagccaaggacaaggcttttgaattggagatgagctggatatgcgaggagtcaaaacgagagcatcagaaggtccctgatgatcttctggaagaagcaaagacggcagctaaaactgcgctcgaggagatggatgctgactaaaactgaggagtgtgttgaatttagatccgtcttattgcgtcgtttgatgtttcttatgtactctgaattgaattttgtctggagggacagttgttgcagtttcgcatgaaccattggagtcttttatcttattgctatcaacagttgctacg

SEQ ID NO: 28050 - protein, 289 aa, Arabidopsis thaliana
  peptide (1)..(289): Ceres Seq. ID no. 12334087
KKIWLVSGLRTKKTPFFDLSLNHSTKKKSEKSQRKKKSRKMSSIGTGYDLSVTTFSPDGRVFQIEYAAKAVDNSGTVVGIKCKDGIVMGVEKLIASKMMLPGSNRRIHSVHRHAGMAVAGLAADGRQIVARAKSEARSYESVYGDAVPVKELSERVASYVHLCTLYWWLRPFGCGVILGGYDRDGPQLYMIEPSGISYRYFGAAIGKGKQAAKTEIEKLNLSEMTCKEGVIEVAKIIYKLHDEAKDKAFELEMSWICEESKREHQKVPDDLLEEAKTAAKTALEEMDAD

SEQ ID NO: 28051 - protein, 249 aa, Arabidopsis thaliana
  peptide (1)..(249): Ceres Seq. ID no. 12334088
MSSIGTGYDLSVTTFSPDGRVFQIEYAAKAVDNSGTVVGIKCKDGIVMGVEKLIASKMMLPGSNRRIHSVHRHAGMAVAGLAADGRQIVARAKSEARSYESVYGDAVPVKELSERVASYVHLCTLYWWLRPFGCGVILGGYDRDGPQLYMIEPSGISYRYFGAAIGKGKQAAKTEIEKLNLSEMTCKEGVIEVAKIIYKLHDEAKDKAFELEMSWICEESKREHQKVPDDLLEEAKTAAKTALEEMDAD

SEQ ID NO: 28052 - protein, 202 aa, Arabidopsis thaliana
  peptide (1)..(202): Ceres Seq. ID no. 12334089
MGVEKLIASKMMLPGSNRRIHSVHRHAGMAVAGLAADGRQIVARAKSEARSYESVYGDAVPVKELSERVASYVHLCTLYWWLRPFGCGVILGGYDRDGPQLYMIEPSGISYRYFGAAIGKGKQAAKTEIEKLNLSEMTCKEGVIEVAKIIYKLHDEAKDKAFELEMSWICEESKREHQKVPDDLLEEAKTAAKTALEEMDAD

SEQ ID NO: 28053 - DNA, 817 bp, Arabidopsis thaliana
  misc_feature (1)..(817): Ceres Seq. ID no. 12331774
  misc_feature (1)..(817): Ortholog of  Ceres SEQ ID NO 14309515 as cited in SEQ ID NO 52717
gacacagacaatggcggcggcggcggcgaaagcagcggtggttttgccacggccggtgacgtttgtgactggaaatgctaagaagctcgaagaagtcaaagctatcatcggaaattccattcctttcaagtctctcaaactcgatttgcctgagctccaaggtgagcctgaggatatttccaaagagaaggctcgtttggctgctcttcaggtggatggaccagtgcttgtggaagatacatgtctctgtttcaatgctttgaaagggcttcctgggccatacataaagtggtttctagagaagcttggtcacgaaggtctgaacaacttactgatggcctatgaagataaatcagcttatgcattgtgcgcattctctttctcgcgtggtccaggtgctgaacctcttacatttttggggaaaactccgggtaagatagttccagccagaggaccaactgatttcggatgggatccagtgtttcaacctgatggatatgaccaaacgtatgcagagatggcaaaggaagaaaagaacaagatatcacataggtacaagtctttagcattggtgaaatctcactttaaggaggctggctatgtgttccagacagatgatggtaccatttaaagagaaccagaactcattcatcattgtcttctgcgtttgaagaatggagcaccaatcactcaccagattcttgttcctattctaagctcctttgggaatattgatattgtaactttttttttcctcaaatacaagtagaaaccatggattgcaagaaataatatatttgtatcgttcgtgttgttc

SEQ ID NO: 28054 - protein, 209 aa, Arabidopsis thaliana
  peptide (1)..(209): Ceres Seq. ID no. 12331775
TQTMAAAAAKAAVVLPRPVTFVTGNAKKLEEVKAIIGNSIPFKSLKLDLPELQGEPEDISKEKARLAALQVDGPVLVEDTCLCFNALKGLPGPYIKWFLEKLGHEGLNNLLMAYEDKSAYALCAFSFSRGPGAEPLTFLGKTPGKIVPARGPTDFGWDPVFQPDGYDQTYAEMAKEEKNKISHRYKSLALVKSHFKEAGYVFQTDDGTI

SEQ ID NO: 28055 - protein, 206 aa, Arabidopsis thaliana
  peptide (1)..(206): Ceres Seq. ID no. 12331776
MAAAAAKAAVVLPRPVTFVTGNAKKLEEVKAIIGNSIPFKSLKLDLPELQGEPEDISKEKARLAALQVDGPVLVEDTCLCFNALKGLPGPYIKWFLEKLGHEGLNNLLMAYEDKSAYALCAFSFSRGPGAEPLTFLGKTPGKIVPARGPTDFGWDPVFQPDGYDQTYAEMAKEEKNKISHRYKSLALVKSHFKEAGYVFQTDDGTI

SEQ ID NO: 28056 - DNA, 719 bp, Arabidopsis thaliana
  misc_feature (1)..(719): Ceres Seq. ID no. 13489970
  misc_feature (1)..(719): Ortholog of  Ceres SEQ ID NO 12634455 as cited in SEQ ID NO 0
gagccatttaaatctgattcatatcaaaaaattttcgatttaaaaaaaaaaccctcaaaaggtgttgatacggaaaaagaaaagggaaagaagaagagaatggatctagaatcggtgaaaaagtatctggaaggagatgaagacgaaaaggccaaggaaccaatggtggcgaaattaccacacagattcctcgaacgattcgtaaccaatggtcttaaagtggatctcatcgaacctggccgtatcgtctgctccatgaaaatccctcctcatctcctgaacgcagggaaattcttacacggaggagcaacggcgacgctggtggatttgataggatcagcagtgatctacacagccggagcttcacattccggagtttcagtggagatcaatgtttcataccttgatgctgcttttctcgatgaagagatagagatagaatcaaaggcattgcgtgttggtaaagctgtagcagtagtgagtgtggagctgaggaagaagacgactggtaagattattgctcaaggtcgtcataccaagtactttgctcctcgttccaacctttgatcgttcaaccaacctttcttcttttttacattcaataaacaacatcaaggtgtttttagtctttgtcccatttgcttcttattattattgatactaataaaactacattactatatgtttttctaataatacaaacaaccttactttttcac

SEQ ID NO: 28057 - protein, 188 aa, Arabidopsis thaliana
  peptide (1)..(188): Ceres Seq. ID no. 13489971
EPFKSDSYQKIFDLKKKPSKGVDTEKEKGKKKRMDLESVKKYLEGDEDEKAKEPMVAKLPHRFLERFVTNGLKVDLIEPGRIVCSMKIPPHLLNAGKFLHGGATATLVDLIGSAVIYTAGASHSGVSVEINVSYLDAAFLDEEIEIESKALRVGKAVAVVSVELRKKTTGKIIAQGRHTKYFAPRSNL

SEQ ID NO: 28058 - protein, 155 aa, Arabidopsis thaliana
  peptide (1)..(155): Ceres Seq. ID no. 13489972
MDLESVKKYLEGDEDEKAKEPMVAKLPHRFLERFVTNGLKVDLIEPGRIVCSMKIPPHLLNAGKFLHGGATATLVDLIGSAVIYTAGASHSGVSVEINVSYLDAAFLDEEIEIESKALRVGKAVAVVSVELRKKTTGKIIAQGRHTKYFAPRSNL

SEQ ID NO: 28059 - protein, 134 aa, Arabidopsis thaliana
  peptide (1)..(134): Ceres Seq. ID no. 13489973
MVAKLPHRFLERFVTNGLKVDLIEPGRIVCSMKIPPHLLNAGKFLHGGATATLVDLIGSAVIYTAGASHSGVSVEINVSYLDAAFLDEEIEIESKALRVGKAVAVVSVELRKKTTGKIIAQGRHTKYFAPRSNL

SEQ ID NO: 28060 - DNA, 665 bp, Arabidopsis thaliana
  misc_feature (1)..(665): Ceres Seq. ID no. 12420732
  misc_feature (1)..(665): Ortholog of  Ceres SEQ ID NO 15179206 as cited in SEQ ID NO 0
atgttactcttctcagatctcttgttcgttttgatgtacaatggcgtccttggtagcagctcctatctctttctcaggtgactctcatgtcaaagcacaccgaaacttcaatgcgattcgcaagagctctacattgactgttcaaacaaaatcaaaccgcagtcacaaactctcggtttctgcaggttaccgtgggggaagtaagggtggtggaagtagtgattttgttaccggttttcttctaggaagtgctgtgttcggaactctggcttatatctttgctccacagatccgaagatcagtgctgagcgagaatgaatatggtttcaagaaaccggagcagccgatgtactatgacgaaggcctagaggagagaagagagatattgaatgagaaaatcggccaactcaattccgccattgacaaggtttcgtcgcgtctgaaaggaggtcggagcggtagcagcaagaacacttcttcgccgtctgtcccagttgaaaccgacgcagaagcagaagctactgcatgattgaatgtaatcctctgctctattttaccaattcaaaactgccttccattggttctgtggttttttttttttttttgttggaaccattaggggcttttctgacttttagatattgaaagaaaaagacaatcgtcgc

SEQ ID NO: 28061 - protein, 162 aa, Arabidopsis thaliana
  peptide (1)..(162): Ceres Seq. ID no. 12420733
MASLVAAPISFSGDSHVKAHRNFNAIRKSSTLTVQTKSNRSHKLSVSAGYRGGSKGGGSSDFVTGFLLGSAVFGTLAYIFAPQIRRSVLSENEYGFKKPEQPMYYDEGLEERREILNEKIGQLNSAIDKVSSRLKGGRSGSSKNTSSPSVPVETDAEAEATA

SEQ ID NO: 28062 - DNA, 743 bp, Arabidopsis thaliana
  misc_feature (1)..(743): Ceres Seq. ID no. 12384626
  misc_feature (1)..(743): Ortholog of  Ceres SEQ ID NO 14304183 as cited in SEQ ID NO 53725
  misc_feature (1)..(743): Ortholog of  Ceres SEQ ID NO 14305778 as cited in SEQ ID NO 57220
  misc_feature (1)..(743): Ortholog of  Ceres SEQ ID NO 14309452 as cited in SEQ ID NO 0
aaggcttctttctaccacaaacacaagagcgcgttttcttcacgccggcgaacaacgtcagagtcatggccaccggagatgggaaatcggtgatggtcgtcggagttgacgacagcgagcagagcacttacgccttggagtggacgctcgatcgtttcttcgctccttacgctcccaattatccttttaagctcttcatcgtccacgccaaacctaacgccgtctccgccgttggtctcgctggtcccggaactgcggaggttgtaccttatgttgatgctgatctgaagcataccgctgctaaggttgtcgagaaagccaaagcaatttgtcagagcagatcggttcatggtgcggtgatcgaagttttcgaaggtgatgcaaggaatatcctatgtgaagttgtagataagcatcatgcatctattcttgttgtgggaagccatggatatggagctatcaagagggcggttctcgggagtacgagtgactactgcgctcatcatgctcattgctcggtgatgatcgtgaagaagcctaagatcaaggtctgaaacctaagggaaggctactcggtcaaagcaaagtctctgcatagtcttctaattcagaagaataaagtgaaatacatattagcttgatgtgaaacaacgattcaagacaatatacatttgcatctatatgtgtaattgtttactacatacaatgttttggtatccttagacaatcaatattcgtgtgtt

SEQ ID NO: 28063 - protein, 183 aa, Arabidopsis thaliana
  peptide (1)..(183): Ceres Seq. ID no. 12384627
GFFLPQTQERVFFTPANNVRVMATGDGKSVMVVGVDDSEQSTYALEWTLDRFFAPYAPNYPFKLFIVHAKPNAVSAVGLAGPGTAEVVPYVDADLKHTAAKVVEKAKAICQSRSVHGAVIEVFEGDARNILCEVVDKHHASILVVGSHGYGAIKRAVLGSTSDYCAHHAHCSVMIVKKPKIKV

SEQ ID NO: 28064 - protein, 162 aa, Arabidopsis thaliana; identical to SEQ ID NO: 26463
  peptide (1)..(162): Ceres Seq. ID no. 12384628

SEQ ID NO: 28065 - protein, 153 aa, Arabidopsis thaliana; identical to SEQ ID NO: 26464
  peptide (1)..(153): Ceres Seq. ID no. 12384629

SEQ ID NO: 28066 - DNA, 1362 bp, Arabidopsis thaliana
  misc_feature (1)..(1362): Ceres Seq. ID no. 13618728
  misc_feature (1)..(1362): Ortholog of  Ceres SEQ ID NO 14301572 as cited in SEQ ID NO 66173
gtctccaagcaaaaaaaaaaacctaaaacctccatcaacgccggaggaagaaattttgtgtcatctacaacgaattcgttaatcgcgatgaaggaagacgaagtaaatcgatgccagattcagaattggtatccgagattcaaatccttaaccatcaaaaccaaatttcacaaacttccagaatcattcatcaactatctcatcgacgattctggtccgtttcttctccctcattccgtaacaaacgaagacgcaatgcctaacagagtccacaatttcgaagaagaagatgatttccaagtccccgaagaagcttcagatgacgaaccattgaatcgtccttcttttccagaactcgaaatcgagatcagagaatcaatcgaaaccctaggcggcacaattatcccgaagctgaattggagttcaccaaaagacgcagcttggattagtccatcacagaatctaagctgcacttgtttcaatgagattgctctcttgtttcgttcctctgattcgttaacccatgatctcttcaatgcttatgattcatgtagtgacaaagtctcttcaaggccagaaagtttctaccttgcgttgagaaaatggtacccttcgttgaagcctgagatggaatttagatgctttgtgaaatctaacgagcttgttgggatttgtcagcgtgaggtaactacattttaccctgttcttctcaatgagaaggatttgctcaagggtttgatagaagagttctttgatgataagattaggtttgaatttgaatcagagaattacacttttgatgtttatgtgacgaaagagagaagagttaagctaatagatttcaatacttggtgtggttctactttgccattgatgtatacatgggaagaacttgagaagattcatggagaatgtgatgaattggaattgaggattgttgagagccgtctcagtgtgcttcctggtttgaaaacagctgttccttatgattatcttgacgtgagtgctggtagtggttgggctcaggttcttaagatagtggaagaggagtttcagaaagacgatcagagttctgatgaagttgcttgaagacttagattcttggttattggaagactagacaataattttttgaactatcatagttgtgtgcctaccaataagtgtcgtgttccattgttgttctgaaacggtttaatcacgatgttggaactttgatggtgtctttttcttataagattttctcttctagactgcttttgtatttgtcttgttattcttctgcaaagaattgtgttgagtggcaaattgttcctgattggtttctcattaccaaatttgtacatggatgttggattagtt

SEQ ID NO: 28067 - protein, 362 aa, Arabidopsis thaliana
  peptide (1)..(362): Ceres Seq. ID no. 13618729
VSKQKKKPKTSINAGGRNFVSSTTNSLIAMKEDEVNRCQIQNWYPRFKSLTIKTKFHKLPESFINYLIDDSGPFLLPHSVTNEDAMPNRVHNFEEEDDFQVPEEASDDEPLNRPSFPELEIEIRESIETLGGTIIPKLNWSSPKDAAWISPSQNLSCTCFNEIALLFRSSDSLTHDLFNAYDSCSDKVSSRPESFYLALRKWYPSLKPEMEFRCFVKSNELVGICQREVTTFYPVLLNEKDLLKGLIEEFFDDKIRFEFESENYTFDVYVTKERRVKLIDFNTWCGSTLPLMYTWEELEKIHGECDELELRIVESRLSVLPGLKTAVPYDYLDVSAGSGWAQVLKIVEEEFQKDDQSSDEVA

SEQ ID NO: 28068 - protein, 333 aa, Arabidopsis thaliana
  peptide (1)..(333): Ceres Seq. ID no. 13618730
MKEDEVNRCQIQNWYPRFKSLTIKTKFHKLPESFINYLIDDSGPFLLPHSVTNEDAMPNRVHNFEEEDDFQVPEEASDDEPLNRPSFPELEIEIRESIETLGGTIIPKLNWSSPKDAAWISPSQNLSCTCFNEIALLFRSSDSLTHDLFNAYDSCSDKVSSRPESFYLALRKWYPSLKPEMEFRCFVKSNELVGICQREVTTFYPVLLNEKDLLKGLIEEFFDDKIRFEFESENYTFDVYVTKERRVKLIDFNTWCGSTLPLMYTWEELEKIHGECDELELRIVESRLSVLPGLKTAVPYDYLDVSAGSGWAQVLKIVEEEFQKDDQSSDEVA

SEQ ID NO: 28069 - protein, 277 aa, Arabidopsis thaliana
  peptide (1)..(277): Ceres Seq. ID no. 13618731
MPNRVHNFEEEDDFQVPEEASDDEPLNRPSFPELEIEIRESIETLGGTIIPKLNWSSPKDAAWISPSQNLSCTCFNEIALLFRSSDSLTHDLFNAYDSCSDKVSSRPESFYLALRKWYPSLKPEMEFRCFVKSNELVGICQREVTTFYPVLLNEKDLLKGLIEEFFDDKIRFEFESENYTFDVYVTKERRVKLIDFNTWCGSTLPLMYTWEELEKIHGECDELELRIVESRLSVLPGLKTAVPYDYLDVSAGSGWAQVLKIVEEEFQKDDQSSDEVA

SEQ ID NO: 28070 - DNA, 839 bp, Arabidopsis thaliana
  misc_feature (1)..(839): Ceres Seq. ID no. 12738877
  misc_feature (1)..(839): Ortholog of  Ceres SEQ ID NO 13504237 as cited in SEQ ID NO 100
  misc_feature (1)..(839): Ortholog of  Ceres SEQ ID NO 15176643 as cited in SEQ ID NO 57825
  misc_feature (1)..(839): Ortholog of  Ceres SEQ ID NO 12598265 as cited in SEQ ID NO 65873
  misc_feature (1)..(839): Ortholog of  Ceres SEQ ID NO 15180736 as cited in SEQ ID NO 0
tttagggtttattcttcattgcttgagcttccttctcttcttcttcttcaagccgcggctaaagatccctacttctctcgacacttatagagtttcagtcatggccgcctccgcagaaatcgacgctgagattcaacagcagcttaccaatgaggttaagctcttcaaccgttggagctttgatgacgtttcggttacggatattagtcttgtggactacattggtgttcagccatcgaagcacgcaacttttgttccccatactgctggacgatactctgtgaagaggttcagaaaggcgcagtgcccaattgttgagaggctcactaactctctcatgatgcacggaagaaacaatggtaagaagttgatggctgtcaggatcgtcaagcatgccatggagattatccacctcttgtctgacttgaacccgattcaagttatcattgatgccattgttaacagtggtccacgtgaagatgctaccaggattggatctgctggtgtggttaggaggcaggctgttgatatctctcctctaagacgtgtgaaccaagcgatcttcttgcttacaactggtgcaggtgaagctgcctttagaaacatcaagacaatcgctgagtgccttgctgatgaactcatcaatgctgcaaagggatcttccaacagctatgccatcaagaagaaagatgagattgagagagttgctaaggccaatcgttaagggatctccctttcctctaagtttgcattatatcaaagagtttttgtgttgtttccattagctttggatatgtttcagatgatctctctatctttaatgaaattttgacgcttat

SEQ ID NO: 28071 - protein, 240 aa, Arabidopsis thaliana
  peptide (1)..(240): Ceres Seq. ID no. 12738878
LGFILHCLSFLLFFFFKPRLKIPTSLDTYRVSVMAASAEIDAEIQQQLTNEVKLFNRWSFDDVSVTDISLVDYIGVQPSKHATFVPHTAGRYSVKRFRKAQCPIVERLTNSLMMHGRNNGKKLMAVRIVKHAMEIIHLLSDLNPIQVIIDAIVNSGPREDATRIGSAGVVRRQAVDISPLRRVNQAIFLLTTGAGEAAFRNIKTIAECLADELINAAKGSSNSYAIKKKDEIERVAKANR

SEQ ID NO: 28072 - protein, 207 aa, Arabidopsis thaliana
  peptide (1)..(207): Ceres Seq. ID no. 12738879
MAASAEIDAEIQQQLTNEVKLFNRWSFDDVSVTDISLVDYIGVQPSKHATFVPHTAGRYSVKRFRKAQCPIVERLTNSLMMHGRNNGKKLMAVRIVKHAMEIIHLLSDLNPIQVIIDAIVNSGPREDATRIGSAGVVRRQAVDISPLRRVNQAIFLLTTGAGEAAFRNIKTIAECLADELINAAKGSSNSYAIKKKDEIERVAKANR

SEQ ID NO: 28073 - protein, 128 aa, Arabidopsis thaliana
  peptide (1)..(128): Ceres Seq. ID no. 12738880
MMHGRNNGKKLMAVRIVKHAMEIIHLLSDLNPIQVIIDAIVNSGPREDATRIGSAGVVRRQAVDISPLRRVNQAIFLLTTGAGEAAFRNIKTIAECLADELINAAKGSSNSYAIKKKDEIERVAKANR

SEQ ID NO: 28074 - DNA, 750 bp, Arabidopsis thaliana
  misc_feature (1)..(750): Ceres Seq. ID no. 13580820
  misc_feature (1)..(750): Ortholog of  Ceres SEQ ID NO 15174406 as cited in SEQ ID NO 0
accttctactttcatgcatttgcactcataagctctctctatataaacccaaccttcattaccattcttcattatccaatccaatccattacttactaagtaaaaagagaaaaaaaaaaaattaagatatggagggactcttgaagttgtcaactttggtgattgtgtgcatgttagtgaccgctccaatggcgtccgaggcagcaatctcgtgcggcgcagtcaccggcagcttaggtcaatgctataactacttgacccgaggcggtttcattcctagagggtgttgctctggcgttcagaggctcaacagcttggctcgtaccacccgtgaccgccaacaagcttgtcgttgtatccagggagcagcgagagccttgggttctcgacttaacgctggtcgtgctgctcgtctccctggtgcttgccgtgttaggatctcttaccccatcagtgccagaaccaactgtaacaccgtcaggtgatcaaaagaagatagacgttgaagggttttcatataatcgatgagagagtattaaaaataattaagatgtcacactatatacacactagtgtatccttttactgttattattgttgtgtttctagattttgtgttttcatgtctttctttgtatatgacggtccatttaattggtcgtctgtgttatgtactcctctaatgatatattgaatttacgattatgtattatcttcaaactcttgccattaactttggtcacgttctgc

SEQ ID NO: 28075 - protein, 118 aa, Arabidopsis thaliana
  peptide (1)..(118): Ceres Seq. ID no. 13580821
MEGLLKLSTLVIVCMLVTAPMASEAAISCGAVTGSLGQCYNYLTRGGFIPRGCCSGVQRLNSLARTTRDRQQACRCIQGAARALGSRLNAGRAARLPGACRVRISYPISARTNCNTVR

SEQ ID NO: 28076 - protein, 104 aa, Arabidopsis thaliana
  peptide (1)..(104): Ceres Seq. ID no. 13580822
MLVTAPMASEAAISCGAVTGSLGQCYNYLTRGGFIPRGCCSGVQRLNSLARTTRDRQQACRCIQGAARALGSRLNAGRAARLPGACRVRISYPISARTNCNTVR

SEQ ID NO: 28077 - protein, 98 aa, Arabidopsis thaliana
  peptide (1)..(98): Ceres Seq. ID no. 13580823
MASEAAISCGAVTGSLGQCYNYLTRGGFIPRGCCSGVQRLNSLARTTRDRQQACRCIQGAARALGSRLNAGRAARLPGACRVRISYPISARTNCNTVR

SEQ ID NO: 28078 - DNA, 1482 bp, Arabidopsis thaliana
  misc_feature (1)..(1482): Ceres Seq. ID no. 12324908
  misc_feature (1)..(1482): Ortholog of  Ceres SEQ ID NO 13655660 as cited in SEQ ID NO 63727
actaaactcttaaaccctaaagagtaaagacatttgcactaccccgcgtggtcgacgattcgacgcttccaatgacgtcatctcgcctctatctccgtttcctccgccgcttctccaccgccaccggtatagattctcaaaccactgcttaccccggcgcaatcactatgtccaaagctaaatccaaactccgcaaagtacaagatccagacaaagccttagcgatttacaaatccgtctccaacaattccacatctccactctcctctcgttacgcaatggagcttacagtccaacgtctcgctaaatctcaacgcttctccgacatagaagctctaattgagtctcacaaaaacaacccaaagatcaaaacagagacttttctctctacacttatcagatcttatggacgagcttcaatgtttgatcatgctatgaagatgttcgaggagatggataagcttggcacacccagaaccgttgtttccttcaatgccttactcgctgcttgtcttcattctgatttgtttgaaagagtcccccaactgttcgacgaatttcctcagaggtataataatatcactcctgataaaatctcttacggtatgttgattaagtcgtattgtgactctggtaagcctgaaaaagctatggagattatgagagatatggaggttaaaggtgtggaagttactatcattgctttcactaccattttaggatctttgtataagaatggtttagtcgatgaagcggagagcttgtggattgagatggtgaacaaaggttgtgacttggataacacagtttataatgttagacttatgaatgctgcgaaggaaagtcccgagagagttaaggaattgatggaagaaatgagtagtgtaggattgaaacctgatactgttagctataactatcttatgactgcgtactgcgtgaaaggaatgatgagtgaagccaagaaagtgtatgaagggcttgagcaaccaaacgcagcgacgttcaggacattgatatttcatctgtgtataaacgggttgtatgatcaaggtttaacggtgtttaagaagagcgcgatagtgcacaagattccggatttcaaaacttgtaagcatttgactgaaggattggtgaagaataacagaatggaagatgcaagaggagtggccaggatcgtgaagaagaaattccctccgcgtttggtgaccgagtggaagaaactagaggagaagctgggattgtattcaaagggtaatgcagctgctgtttcatcttcttctcaaactagagaagtgttagatcaagaaagagaggatgatgtataaagctcaagaagttgcttagaagatcttatttttgtttgtgcttgcttgcttcagctaatattatggcttgtggaaactgtgatctagcgtgtagaagacaaacgattcccaatttacttgtctatgctttgagccaattactacgcttgcgttg

SEQ ID NO: 28079 - protein, 418 aa, Arabidopsis thaliana
  peptide (1)..(418): Ceres Seq. ID no. 12324909
MTSSRLYLRFLRRFSTATGIDSQTTAYPGAITMSKAKSKLRKVQDPDKALAIYKSVSNNSTSPLSSRYAMELTVQRLAKSQRFSDIEALIESHKNNPKIKTETFLSTLIRSYGRASMFDHAMKMFEEMDKLGTPRTVVSFNALLAACLHSDLFERVPQLFDEFPQRYNNITPDKISYGMLIKSYCDSGKPEKAMEIMRDMEVKGVEVTIIAFTTILGSLYKNGLVDEAESLWIEMVNKGCDLDNTVYNVRLMNAAKESPERVKELMEEMSSVGLKPDTVSYNYLMTAYCVKGMMSEAKKVYEGLEQPNAATFRTLIFHLCINGLYDQGLTVFKKSAIVHKIPDFKTCKHLTEGLVKNNRMEDARGVARIVKKKFPPRLVTEWKKLEEKLGLYSKGNAAAVSSSSQTREVLDQEREDDV

SEQ ID NO: 28080 - protein, 386 aa, Arabidopsis thaliana
  peptide (1)..(386): Ceres Seq. ID no. 12324910
MSKAKSKLRKVQDPDKALAIYKSVSNNSTSPLSSRYAMELTVQRLAKSQRFSDIEALIESHKNNPKIKTETFLSTLIRSYGRASMFDHAMKMFEEMDKLGTPRTVVSFNALLAACLHSDLFERVPQLFDEFPQRYNNITPDKISYGMLIKSYCDSGKPEKAMEIMRDMEVKGVEVTIIAFTTILGSLYKNGLVDEAESLWIEMVNKGCDLDNTVYNVRLMNAAKESPERVKELMEEMSSVGLKPDTVSYNYLMTAYCVKGMMSEAKKVYEGLEQPNAATFRTLIFHLCINGLYDQGLTVFKKSAIVHKIPDFKTCKHLTEGLVKNNRMEDARGVARIVKKKFPPRLVTEWKKLEEKLGLYSKGNAAAVSSSSQTREVLDQEREDDV

SEQ ID NO: 28081 - protein, 349 aa, Arabidopsis thaliana
  peptide (1)..(349): Ceres Seq. ID no. 12324911
MELTVQRLAKSQRFSDIEALIESHKNNPKIKTETFLSTLIRSYGRASMFDHAMKMFEEMDKLGTPRTVVSFNALLAACLHSDLFERVPQLFDEFPQRYNNITPDKISYGMLIKSYCDSGKPEKAMEIMRDMEVKGVEVTIIAFTTILGSLYKNGLVDEAESLWIEMVNKGCDLDNTVYNVRLMNAAKESPERVKELMEEMSSVGLKPDTVSYNYLMTAYCVKGMMSEAKKVYEGLEQPNAATFRTLIFHLCINGLYDQGLTVFKKSAIVHKIPDFKTCKHLTEGLVKNNRMEDARGVARIVKKKFPPRLVTEWKKLEEKLGLYSKGNAAAVSSSSQTREVLDQEREDDV

SEQ ID NO: 28082 - DNA, 700 bp, Arabidopsis thaliana
  misc_feature (1)..(700): Ceres Seq. ID no. 12423258
  misc_feature (1)..(700): Ortholog of  Ceres SEQ ID NO 13582538 as cited in SEQ ID NO 57724
aaaagaaaactgaagaaccccaaaaatcccaagtgaaagaaaacgttatccacttcgagagagtgacacgtcacgaagcaaatccaaattcaaaacttttccataaaaatcaaatcacttcttcttattacttccccaaatcgaaatcagtcacttattaaaaccctaaatcatgacgatcgcaccggcattgcagacgacgttcgtgtcatcaaccaacttcctgaaacattcttcttcgtggggatcatcatcaccaaacaatgtgattcttcccaaaaacaagagatcttctacctccgtagttgtcgccgccgtcggtgatgtctcttctgacggaacaatctacttaatcggcggagccatcgccgttgcactcgtcggaactgcatttccgatcctcttcaaacgcaaagacacgtgtccggaatgtgatggagcaggatttgtgaggaaaggaggagtgactctgagagccaacgccgcacggaaggatcttcctcagatcgtttgtgctaattgcaatggactcggaaagcttaaccagattgataaatcataagtcttcttcatatatatgtaaaaagctccatttctcattcctcttcttatctacaatatacctctgtaagagtagatagcttcgaatgatcaatggttgcttggagatggatggatatatatatacaattgctttttt

SEQ ID NO: 28083 - protein, 129 aa, Arabidopsis thaliana
  peptide (1)..(129): Ceres Seq. ID no. 12423259
MTIAPALQTTFVSSTNFLKHSSSWGSSSPNNVILPKNKRSSTSVVVAAVGDVSSDGTIYLIGGAIAVALVGTAFPILFKRKDTCPECDGAGFVRKGGVTLRANAARKDLPQIVCANCNGLGKLNQIDKS

SEQ ID NO: 28084 - DNA, 1277 bp, Arabidopsis thaliana
  misc_feature (1)..(1277): Ceres Seq. ID no. 12324789
  misc_feature (1)..(1277): Ortholog of  Ceres SEQ ID NO 14315189 as cited in SEQ ID NO 57702
acgcctctcttcttctgcttcacttcactactgctttctctatttctccatagatggctccttcttcatcacctcttcgtactacaagtgaaacagatgaaaaatatgcgaatgtcaaatgggaagagcttggattcgctctgactccaatagattatatgtatgtagccaaatgcagacaaggagagagctttacacaagggaagattgttccttatggcgacatttcaattagcccttgttctccgattctcaattacggccagggactatttgaaggtctcaaagcttacagaacagaagacgaccggattaggattttccggcctgaccaaaacgctcttcgcatgcaaactggtgcggagaggctttgtatgacacctcctactctagaacaatttgtcgaggcagttaagcaaactgtgcttgccaacaagaaatgggttcctcctccgggtaaaggaactctgtatataaggcctctgctactagggagtggtgctacccttggagtagctccagcacctgaatacacttttctcatatatgcatctcccgtaggagattaccataaggtaagctcaggcttgaacctcaaagttgatcataagtatcaccgagcccattcaggtggaacggggggtgtcaagagctgcacaaactattctccagttgtgaaatcgttactcgaagcaaagtcagcgggtttctctgatgtcctgttcctggatgcagcaactggtagaaacatcgaagagcttactgcttgtaacatcttcattgtcaagggaaacattgtatccaccccaccaacttcaggaaccattttacctggagtcacgaggaaaagcataagtgagctggctcatgatattggctaccaggtcgaagaacgcgatgtatctgtggatgagctactagaggcagaagaagttttctgcacagggactgcagtggtcgttaaagctgttgaaactgtgaccttccatgacaaaaaggtaaaatacaggacaggagaagcagcattgtctacgaagcttcactcgatgttgaccaatattcagatgggagttgttgaagataagaaaggttggatggtggacattgatccttgtcaaggttgaaagaagaagtttagaaagctgatgattctatgtactcaaacgtgtatctttcttctcatgtgttggtttttattaggattcttctttttttatcatgggacttgtaataaataatgggtaactcttaagatacaagaggcggcagtatgttcg

SEQ ID NO: 28085 - protein, 356 aa, Arabidopsis thaliana
  peptide (1)..(356): Ceres Seq. ID no. 12324790
MAPSSSPLRTTSETDEKYANVKWEELGFALTPIDYMYVAKCRQGESFTQGKIVPYGDISISPCSPILNYGQGLFEGLKAYRTEDDRIRIFRPDQNALRMQTGAERLCMTPPTLEQFVEAVKQTVLANKKWVPPPGKGTLYIRPLLLGSGATLGVAPAPEYTFLIYASPVGDYHKVSSGLNLKVDHKYHRAHSGGTGGVKSCTNYSPVVKSLLEAKSAGFSDVLFLDAATGRNIEELTACNIFIVKGNIVSTPPTSGTILPGVTRKSISELAHDIGYQVEERDVSVDELLEAEEVFCTGTAVVVKAVETVTFHDKKVKYRTGEAALSTKLHSMLTNIQMGVVEDKKGWMVDIDPCQG

SEQ ID NO: 28086 - protein, 321 aa, Arabidopsis thaliana
  peptide (1)..(321): Ceres Seq. ID no. 12324791
MYVAKCRQGESFTQGKIVPYGDISISPCSPILNYGQGLFEGLKAYRTEDDRIRIFRPDQNALRMQTGAERLCMTPPTLEQFVEAVKQTVLANKKWVPPPGKGTLYIRPLLLGSGATLGVAPAPEYTFLIYASPVGDYHKVSSGLNLKVDHKYHRAHSGGTGGVKSCTNYSPVVKSLLEAKSAGFSDVLFLDAATGRNIEELTACNIFIVKGNIVSTPPTSGTILPGVTRKSISELAHDIGYQVEERDVSVDELLEAEEVFCTGTAVVVKAVETVTFHDKKVKYRTGEAALSTKLHSMLTNIQMGVVEDKKGWMVDIDPCQG

SEQ ID NO: 28087 - protein, 258 aa, Arabidopsis thaliana
  peptide (1)..(258): Ceres Seq. ID no. 12324792
MQTGAERLCMTPPTLEQFVEAVKQTVLANKKWVPPPGKGTLYIRPLLLGSGATLGVAPAPEYTFLIYASPVGDYHKVSSGLNLKVDHKYHRAHSGGTGGVKSCTNYSPVVKSLLEAKSAGFSDVLFLDAATGRNIEELTACNIFIVKGNIVSTPPTSGTILPGVTRKSISELAHDIGYQVEERDVSVDELLEAEEVFCTGTAVVVKAVETVTFHDKKVKYRTGEAALSTKLHSMLTNIQMGVVEDKKGWMVDIDPCQG

SEQ ID NO: 28088 - DNA, 1067 bp, Arabidopsis thaliana
  misc_feature (1)..(1067): Ceres Seq. ID no. 13646184
  misc_feature (1)..(1067): Ortholog of  Ceres SEQ ID NO 14316095 as cited in SEQ ID NO 52477
acttctctctaatttcttaatcatctcttcttatagtttttaccctaaagaaaatggcaaccgtcgatgtcatcaacggtgattcaatctcaactcttcattctgacataatccaaacccaaatcttgacccgactcgatggtccgacgctagcctccaccgcaacaacctcttcttacctccaaactctatgcacggaagagaaactctggcaagaactctccatcgacacgtggccttcgatcaatgatccacgtgttgtccaagctatctcctctttcccttccggttaccgttctttctttgctgactcgtacccgttcactgaacacacgtggcagtctgaaaaacatgatccaccgacgggattaatctcagccgttgatttatactacagaggagagattatatactcgaaggtacaagagatggaaacagagaaaggtaaatcaggatggttcttgtcatcaccgtttcgggtcgatatactcgacccgaaagagtcggtccaaacccggattcgatatccgggtggggactacgaagcgtgggtgaaagatatggaagagagcatgaaacttaattggatactaatcgatccgatcaagaaacgagcggcgaatatatctagtcgaaaggcggtgtcggcgcggcggaactggctaacgggggatttagaaatacggttttcaacggtagtgacggcggaggcggcggaagtggcggcggttgtgtcatgcgggtcagcggaagcgtggaaagaggtggatgaggaagtgggaggagaaatacacgtgagggacgtgaggctacaagtagaggacatagaaggaaaatgtatgaaaggtagggatagtttggtaattttacaagggttgttagatggaaagagatcgtgtaaagatgatgaagagagaagagctaaagaaaggtatgaagaatacgtgcgaatgaagatacaatggagagagaataaagagaggagagaaaaagctcaagacacaatttgtatgatctttgggttctctatgtttgtgcttttgtggagttttattttgttaaggtaa

SEQ ID NO: 28089 - protein, 337 aa, Arabidopsis thaliana
  peptide (1)..(337): Ceres Seq. ID no. 13646185
MATVDVINGDSISTLHSDIIQTQILTRLDGPTLASTATTSSYLQTLCTEEKLWQELSIDTWPSINDPRVVQAISSFPSGYRSFFADSYPFTEHTWQSEKHDPPTGLISAVDLYYRGEIIYSKVQEMETEKGKSGWFLSSPFRVDILDPKESVQTRIRYPGGDYEAWVKDMEESMKLNWILIDPIKKRAANISSRKAVSARRNWLTGDLEIRFSTVVTAEAAEVAAVVSCGSAEAWKEVDEEVGGEIHVRDVRLQVEDIEGKCMKGRDSLVILQGLLDGKRSCKDDEERRAKERYEEYVRMKIQWRENKERREKAQDTICMIFGFSMFVLLWSFILLR

SEQ ID NO: 28090 - protein, 212 aa, Arabidopsis thaliana
  peptide (1)..(212): Ceres Seq. ID no. 13646186
METEKGKSGWFLSSPFRVDILDPKESVQTRIRYPGGDYEAWVKDMEESMKLNWILIDPIKKRAANISSRKAVSARRNWLTGDLEIRFSTVVTAEAAEVAAVVSCGSAEAWKEVDEEVGGEIHVRDVRLQVEDIEGKCMKGRDSLVILQGLLDGKRSCKDDEERRAKERYEEYVRMKIQWRENKERREKAQDTICMIFGFSMFVLLWSFILLR

SEQ ID NO: 28091 - protein, 168 aa, Arabidopsis thaliana
  peptide (1)..(168): Ceres Seq. ID no. 13646187
MEESMKLNWILIDPIKKRAANISSRKAVSARRNWLTGDLEIRFSTVVTAEAAEVAAVVSCGSAEAWKEVDEEVGGEIHVRDVRLQVEDIEGKCMKGRDSLVILQGLLDGKRSCKDDEERRAKERYEEYVRMKIQWRENKERREKAQDTICMIFGFSMFVLLWSFILLR

SEQ ID NO: 28092 - DNA, 796 bp, Arabidopsis thaliana
  misc_feature (1)..(796): Ceres Seq. ID no. 13499570
  misc_feature (1)..(796): Ortholog of  Ceres SEQ ID NO 14307484 as cited in SEQ ID NO 59427
actttctctattcaatctcacacgcgctaaaccataacccgatattactaatgacgaactacggtgcgattccgacgtcgtctcatgcatctccgttggtggatgtcgagtctctctcacgcgctaaacaccgtatcaaagccgggctagccacgcgccgtgcttggagagtgatgttcgatttccactccatgggactgcctcacggtgtctccgatgcgttcacaagaatcaagaccaatcttgcttacttccgtatgaactacgcaatcgttgtcttgatcgttatcttcttcagcttgatctggcatccgacatcgctcatcgtcttcaccgtcttggtcgttgtttggatctttctgtattttctccgtgatgagcctatcaagctgttccggtttcagatcgatgatcggacggtcttgattgttttatcggtgttaaccgtcgttttactcctgttgaccaacgcgacgtttaatattgttggagcgcttgtgaccggagctgtgttggttttgatccattcggtggttaggaagacggaggatcttttcttggatgaagaagcggcgacgactgagacttctgggctgacgtcatacccgtcgacttaaatcgtttcatctcgaaatttgtgtatcttttctatttttgtatattatcttgtttttttaattatgcgtaatcaatttttattggtgtgagtttggtttgagactttctctctctcttttgttttctgagttttgagctctgtctgaagtttgaacaattctaatttgttataattttt

SEQ ID NO: 28093 - protein, 204 aa, Arabidopsis thaliana
  peptide (1)..(204): Ceres Seq. ID no. 13499571
FLYSISHALNHNPILLMTNYGAIPTSSHASPLVDVESLSRAKHRIKAGLATRRAWRVMFDFHSMGLPHGVSDAFTRIKTNLAYFRMNYAIVVLIVIFFSLIWHPTSLIVFTVLVVVWIFLYFLRDEPIKLFRFQIDDRTVLIVLSVLTVVLLLLTNATFNIVGALVTGAVLVLIHSVVRKTEDLFLDEEAATTETSGLTSYPST

SEQ ID NO: 28094 - protein, 188 aa, Arabidopsis thaliana
  peptide (1)..(188): Ceres Seq. ID no. 13499572
MTNYGAIPTSSHASPLVDVESLSRAKHRIKAGLATRRAWRVMFDFHSMGLPHGVSDAFTRIKTNLAYFRMNYAIVVLIVIFFSLIWHPTSLIVFTVLVVVWIFLYFLRDEPIKLFRFQIDDRTVLIVLSVLTVVLLLLTNATFNIVGALVTGAVLVLIHSVVRKTEDLFLDEEAATTETSGLTSYPST

SEQ ID NO: 28095 - protein, 147 aa, Arabidopsis thaliana
  peptide (1)..(147): Ceres Seq. ID no. 13499573
MFDFHSMGLPHGVSDAFTRIKTNLAYFRMNYAIVVLIVIFFSLIWHPTSLIVFTVLVVVWIFLYFLRDEPIKLFRFQIDDRTVLIVLSVLTVVLLLLTNATFNIVGALVTGAVLVLIHSVVRKTEDLFLDEEAATTETSGLTSYPST

SEQ ID NO: 28096 - DNA, 970 bp, Arabidopsis thaliana
  misc_feature (1)..(970): Ceres Seq. ID no. 12654004
  misc_feature (1)..(970): Ortholog of  Ceres SEQ ID NO 14308640 as cited in SEQ ID NO 60489
  misc_feature (1)..(970): Ortholog of  Ceres SEQ ID NO 12619999 as cited in SEQ ID NO 66123
  misc_feature (1)..(970): Ortholog of  Ceres SEQ ID NO 13656436 as cited in SEQ ID NO 69154
aaaactgtaaccacgcttccgatctctaaaacctgagagagagagagagagagagagagagagacagagagaagtgtttcaatagtttggcgtgaagatggccggaggaggcggatacggcggcgcatcggggaaagttgattacgtcttcaaagttgttctaatcggagattcggctgttgggaaatcgcaactacttgctcgattcgctagagacgaattcagcatggattctaaagccaccatcggcgtcgagttccaaactcgtaccctctccattgaacaaaaaagcattaaggctcagatctgggataccgctggtcaggaaagatacagagccgttacaagcgcatactacagaggagcagttggcgcaatgctggtttatgatatgacgaaacgtgagacctttgagcatattccgcgttggcttgaagaactgagggcgcacgctgataagaacattgtcatcatccttattggaaacaagtctgatctagaagatcaaagagctgttcccactgaagacgctaaagagtttgctgagaaggaaggactctttttcctcgagacctctgctttaaacgcaaccaatgtcgaaaactccttcaacactctaatgactcagatatacaataccgtgaacaagaagaatcttgcatctgaaggcgactcaaataaccccggttcattggctggtaagaagattctcatcccaggttctggacaggagattcccgctaagaccagcacttgttgtacttcttcttgatctgtctcctactcaagcaagattcattttttttcctcctgaaatttgtgatagagaatgctactttcattgtatattctttttcgaatctggcttgtttgctagttcattaaacattggtgtgcaattggacaccgatagaaagtattggaacaaatagcttttgaatgaaatatgaaacaaacagtctttgagagt

SEQ ID NO: 28097 - protein, 224 aa, Arabidopsis thaliana
  peptide (1)..(224): Ceres Seq. ID no. 12654005
MAGGGGYGGASGKVDYVFKVVLIGDSAVGKSQLLARFARDEFSMDSKATIGVEFQTRTLSIEQKSIKAQIWDTAGQERYRAVTSAYYRGAVGAMLVYDMTKRETFEHIPRWLEELRAHADKNIVIILIGNKSDLEDQRAVPTEDAKEFAEKEGLFFLETSALNATNVENSFNTLMTQIYNTVNKKNLASEGDSNNPGSLAGKKILIPGSGQEIPAKTSTCCTSS

SEQ ID NO: 28098 - protein, 181 aa, Arabidopsis thaliana
  peptide (1)..(181): Ceres Seq. ID no. 12654006
MDSKATIGVEFQTRTLSIEQKSIKAQIWDTAGQERYRAVTSAYYRGAVGAMLVYDMTKRETFEHIPRWLEELRAHADKNIVIILIGNKSDLEDQRAVPTEDAKEFAEKEGLFFLETSALNATNVENSFNTLMTQIYNTVNKKNLASEGDSNNPGSLAGKKILIPGSGQEIPAKTSTCCTSS

SEQ ID NO: 28099 - protein, 131 aa, Arabidopsis thaliana
  peptide (1)..(131): Ceres Seq. ID no. 12654007
MLVYDMTKRETFEHIPRWLEELRAHADKNIVIILIGNKSDLEDQRAVPTEDAKEFAEKEGLFFLETSALNATNVENSFNTLMTQIYNTVNKKNLASEGDSNNPGSLAGKKILIPGSGQEIPAKTSTCCTSS

SEQ ID NO: 28100 - DNA, 1521 bp, Arabidopsis thaliana; identical to SEQ ID NO: 22510
  misc_feature (1)..(1521): Ceres Seq. ID no. 12394809
  misc_feature (1)..(1521): Ortholog of  Ceres SEQ ID NO 14310864 as cited in SEQ ID NO 53602
  misc_feature (1)..(1521): Ortholog of  Ceres SEQ ID NO 12597180 as cited in SEQ ID NO 59415

SEQ ID NO: 28101 - protein, 392 aa, Arabidopsis thaliana; identical to SEQ ID NO: 22511
  peptide (1)..(392): Ceres Seq. ID no. 12394810

SEQ ID NO: 28102 - protein, 378 aa, Arabidopsis thaliana; identical to SEQ ID NO: 22512
  peptide (1)..(378): Ceres Seq. ID no. 12394811

SEQ ID NO: 28103 - protein, 205 aa, Arabidopsis thaliana; identical to SEQ ID NO: 22513
  peptide (1)..(205): Ceres Seq. ID no. 12394812

SEQ ID NO: 28104 - DNA, 1002 bp, Arabidopsis thaliana
  misc_feature (1)..(1002): Ceres Seq. ID no. 13622101
  misc_feature (1)..(1002): Ortholog of  Ceres SEQ ID NO 12557432 as cited in SEQ ID NO 92
  misc_feature (1)..(1002): Ortholog of  Ceres SEQ ID NO 14315553 as cited in SEQ ID NO 60445
  misc_feature (1)..(1002): Ortholog of  Ceres SEQ ID NO 15224319 as cited in SEQ ID NO 66044
  misc_feature (1)..(1002): Ortholog of  Ceres SEQ ID NO 13598045 as cited in SEQ ID NO 66822
acttcaaccttctcttctctgcaagaaacctaaaagcctatttatttcacctctctctctctctctctgcaactaatcacttgttcgatctcgaagctgaagctaaagctttcgctaatttgcttaaggagctatgggagatagtcagtactcgttttctctcaccactttcagcccatctggtaagctggtgcagatagaacatgcccttacagctgttggatctggccaaacatctttagggattaaagcttctaatggagttgtcattgcaactgaaaagaagttgccttctattctggttgatgaagcatctgttcaaaaaattcagcatttgactcctaatattggagttgtttacagtggcatgggtcctgattttcgagttcttgttaggaagagtaggaaacaggctgagcaatatcttcgtctgtacaaagaacccatccctgttacccaacttgtaagggaaaccgctactgttatgcaagagtttactcaatcgggaggtgttaggcctttcggggtttccttgctggtggctggatatgatgacaagggtccacaattgtatcaggtggatccatctggctcttatttctcctggaaagcttcagccatggggaagaacgtttctaatgcaaaaaccttccttgagaaaaggtacacagaagacatggaacttgacgatgccattcacacagcgatactgacattgaaagaaggctttgagggagagatctcaagcaaaaatattgaaattggcaaaatcggtgctgacaaagttttcagggtactaacaccagcagagatcgatgattaccttgctgaagtcgagtaactcccagcatagtctagcaacaaagtttaagaccggaatttcgtggcatttacagtcttaaagagttgttttttctgtaaaactttggatctttaaatagtttgttgctgaacacaagctgagtgtctctcaataactaatgaaatctgtttctttttttc

SEQ ID NO: 28105 - protein, 235 aa, Arabidopsis thaliana
  peptide (1)..(235): Ceres Seq. ID no. 13622102
MGDSQYSFSLTTFSPSGKLVQIEHALTAVGSGQTSLGIKASNGVVIATEKKLPSILVDEASVQKIQHLTPNIGVVYSGMGPDFRVLVRKSRKQAEQYLRLYKEPIPVTQLVRETATVMQEFTQSGGVRPFGVSLLVAGYDDKGPQLYQVDPSGSYFSWKASAMGKNVSNAKTFLEKRYTEDMELDDAIHTAILTLKEGFEGEISSKNIEIGKIGADKVFRVLTPAEIDDYLAEVE

SEQ ID NO: 28106 - protein, 157 aa, Arabidopsis thaliana
  peptide (1)..(157): Ceres Seq. ID no. 13622103
MGPDFRVLVRKSRKQAEQYLRLYKEPIPVTQLVRETATVMQEFTQSGGVRPFGVSLLVAGYDDKGPQLYQVDPSGSYFSWKASAMGKNVSNAKTFLEKRYTEDMELDDAIHTAILTLKEGFEGEISSKNIEIGKIGADKVFRVLTPAEIDDYLAEVE

SEQ ID NO: 28107 - protein, 118 aa, Arabidopsis thaliana
  peptide (1)..(118): Ceres Seq. ID no. 13622104
MQEFTQSGGVRPFGVSLLVAGYDDKGPQLYQVDPSGSYFSWKASAMGKNVSNAKTFLEKRYTEDMELDDAIHTAILTLKEGFEGEISSKNIEIGKIGADKVFRVLTPAEIDDYLAEVE

SEQ ID NO: 28108 - DNA, 1326 bp, Arabidopsis thaliana
  misc_feature (1)..(1326): Ceres Seq. ID no. 13501426
  misc_feature (1)..(1326): Ortholog of  Ceres SEQ ID NO 13657014 as cited in SEQ ID NO 65644
  misc_feature (1)..(1326): Ortholog of  Ceres SEQ ID NO 15176878 as cited in SEQ ID NO 0
agtctctctttcgagtctgcagctagcgtgaagacgatgaaatcgatgggaggagatagataagcgcgaatttgagagtgaaaattctaaattcagacccattttcaccggcgcgagtcatcgttgaaccatgtcttggcttcctgtagaatctgatcctggtattttcactgagattatacaacaaatgcaagtgaaaggtgtgcaggttgaggaattgtattccttggacttcaactctctggatgaaataagacctgtctatggattgatattgctttacaagtggcgtccagaagaaaaggagaatcgtgttgtcatcacagagccaaacccgaatttcttctttgcaagccagataatcaacaatgcttgtgcgacccaagcgatattatcagtcctcatgaactcttcgagtattgatattggctcagaactatcagaactgaaacaattcgccaaagaatttcctcctgaactgaaaggtttagccatcaacaacaatgaggcaatacgtgcagctcacaacacatttgccaggcctgacccgtcttccatcatggaagatgaagaattagctgctgcgaaaaatctagacgaagatgatgatgtgtatcattacatcagctacttacctgttgatggtatcttatatgagctcgatggtcttaaagaaggacccattagtcttggacagtgtctgggtgagccagaaggaatcgagtggctcagaatggtccaacctgtggtacaagagcagattgaccggtattcgcagaatgagattcggtttagtctcttagctgtagttaagaacaggaaagagatgtatgtagctgaactgaaagagtatcaaagaaagcgagagagggttttgcagcagttaggtgctttgcaagctgataaatacgctgagaaaagcagttacgaggctcttgatagagagctttcggaagtcaatatcgggatagagactgtttcacaaaagattgtaatggaggaggagaaatctaagaactggaagaaagagaacatgagaaggaaacacaactatgtccctttcctcttcaacttcctcaagattcttgctgacaagaagaagctgaaacctctcattgctaagcaccatccctaaatctgctttaccgggatgttaacttgatagaaatcagatgttttagtgatctgaatactgtggtggcgtggttatatgtagccaaactttaacttgatggaagtcagatgttttagcgatccttgattgtaattggtctgaggattatgttgaaccaaatctttttttttttttacttaattacatgttcc

SEQ ID NO: 28109 - protein, 334 aa, Arabidopsis thaliana
  peptide (1)..(334): Ceres Seq. ID no. 13501427
MSWLPVESDPGIFTEIIQQMQVKGVQVEELYSLDFNSLDEIRPVYGLILLYKWRPEEKENRVVITEPNPNFFFASQIINNACATQAILSVLMNSSSIDIGSELSELKQFAKEFPPELKGLAINNNEAIRAAHNTFARPDPSSIMEDEELAAAKNLDEDDDVYHYISYLPVDGILYELDGLKEGPISLGQCLGEPEGIEWLRMVQPVVQEQIDRYSQNEIRFSLLAVVKNRKEMYVAELKEYQRKRERVLQQLGALQADKYAEKSSYEALDRELSEVNIGIETVSQKIVMEEEKSKNWKKENMRRKHNYVPFLFNFLKILADKKKLKPLIAKHHP

SEQ ID NO: 28110 - protein, 315 aa, Arabidopsis thaliana
  peptide (1)..(315): Ceres Seq. ID no. 13501428
MQVKGVQVEELYSLDFNSLDEIRPVYGLILLYKWRPEEKENRVVITEPNPNFFFASQIINNACATQAILSVLMNSSSIDIGSELSELKQFAKEFPPELKGLAINNNEAIRAAHNTFARPDPSSIMEDEELAAAKNLDEDDDVYHYISYLPVDGILYELDGLKEGPISLGQCLGEPEGIEWLRMVQPVVQEQIDRYSQNEIRFSLLAVVKNRKEMYVAELKEYQRKRERVLQQLGALQADKYAEKSSYEALDRELSEVNIGIETVSQKIVMEEEKSKNWKKENMRRKHNYVPFLFNFLKILADKKKLKPLIAKHHP

SEQ ID NO: 28111 - protein, 243 aa, Arabidopsis thaliana
  peptide (1)..(243): Ceres Seq. ID no. 13501429
MNSSSIDIGSELSELKQFAKEFPPELKGLAINNNEAIRAAHNTFARPDPSSIMEDEELAAAKNLDEDDDVYHYISYLPVDGILYELDGLKEGPISLGQCLGEPEGIEWLRMVQPVVQEQIDRYSQNEIRFSLLAVVKNRKEMYVAELKEYQRKRERVLQQLGALQADKYAEKSSYEALDRELSEVNIGIETVSQKIVMEEEKSKNWKKENMRRKHNYVPFLFNFLKILADKKKLKPLIAKHHP

SEQ ID NO: 28112 - DNA, 1160 bp, Arabidopsis thaliana
  misc_feature (1)..(1160): Ceres Seq. ID no. 12333821
  misc_feature (1)..(1160): Ortholog of  Ceres SEQ ID NO 12614972 as cited in SEQ ID NO 61986
  misc_feature (1)..(1160): Ortholog of  Ceres SEQ ID NO 12625706 as cited in SEQ ID NO 64144
  misc_feature (1)..(1160): Ortholog of  Ceres SEQ ID NO 13584933 as cited in SEQ ID NO 65009
  misc_feature (1)..(1160): Ortholog of  Ceres SEQ ID NO 12634984 as cited in SEQ ID NO 0
  misc_feature (1)..(1160): Ortholog of  Ceres SEQ ID NO 13599377 as cited in SEQ ID NO 0
aatcaacgagtattaatctcttcattacatagccaaaaagaaaacactctctataatggaatccaaaaccataaacgacgtcgtcgtatcagagtcaaatcacgagttagcatcttcgtcgccatcagaatttgagaagaaccagaaacattaccaagaaatcatcgcaactcttcctcacaaagatggctggagaccaaaagatccgttcgttgagtacggtggtcactggtggctacaacctcttcttgaaggtttacttcacgcccagaagttcttcaaggcacgtcccaatgatttcttcgtctgcagctacccaaaaaccggcacgacttggctcaaagccttaactttcgcaatcgcaaatcgctccaagttcgacgtttcaacaaaccctcttctcaaacgtaatccacacgagtttgtgccttacatcgaaatcgacttcccgtttttcccaagcgttgatgttcttaaagacgaaggaaacacgcttttctcgactcatatcccttatgatctcttacctgaatcagttgtgaaatctggttgcaagattgtttacatatggagagacccaaaggacacgtttgtgtcgatgtggacttttgctcacaaggagagatcacaacaaggaccagtgggtattggaaagcttaccaagcaaacccggatcagattttgtttctcaagtatgagacaatgagagctgatccattgccttatgtgaagagattagctgagtttataggttatgggttcacgaaggaggaagaggagggaaatgttgttgagaaagtagtgaagctttgtagctttgagactttgaagaatcttgaagctaacaaaggtgagaaagatagagaagatcgtcctgctgtttatgccaacagtgcgtatttcaggaaagggaaagttggggattggcagaattatctgactccggagatggtggctcgtattgatggtttgatggaagagaagtttaaaggaactggctttctttcttcaaaatcatgaatgtgatcttcttttgtcttgttttcgagctatgaatgtctgattcttctgatccttttgctggttatagcataagttgcttttgtttactagtatactctccattggaggaatatgtggtgaactgctgtattgttgct

SEQ ID NO: 28113 - protein, 216 aa, Arabidopsis thaliana
  peptide (1)..(216): Ceres Seq. ID no. 12333822
MESKTINDVVVSESNHELASSSPSEFEKNQKHYQEIIATLPHKDGWRPKDPFVEYGGHWWLQPLLEGLLHAQKFFKARPNDFFVCSYPKTGTTWLKALTFAIANRSKFDVSTNPLLKRNPHEFVPYIEIDFPFFPSVDVLKDEGNTLFSTHIPYDLLPESVVKSGCKIVYIWRDPKDTFVSMWTFAHKERSQQGPVGIGKLTKQTRIRFCFSSMRQ

SEQ ID NO: 28114 - protein, 150 aa, Arabidopsis thaliana
  peptide (1)..(150): Ceres Seq. ID no. 12333823
MERPKGHVCVDVDFCSQGEITTRTSGYWKAYQANPDQILFLKYETMRADPLPYVKRLAEFIGYGFTKEEEEGNVVEKVVKLCSFETLKNLEANKGEKDREDRPAVYANSAYFRKGKVGDWQNYLTPEMVARIDGLMEEKFKGTGFLSSKS

SEQ ID NO: 28115 - DNA, 951 bp, Arabidopsis thaliana
  misc_feature (1)..(951): Ceres Seq. ID no. 12333817
  misc_feature (1)..(951): Ortholog of  Ceres SEQ ID NO 15173035 as cited in SEQ ID NO 56029
  misc_feature (1)..(951): Ortholog of  Ceres SEQ ID NO 12608745 as cited in SEQ ID NO 58289
acattttcgagttttacaccaaagcctcttcactttctctctctctctctactatagtctcctactacctactactacttcttctctctctctttcattcactacataaaaagcttcgagctcccatcactatataccctccaaagatgcaattttcaagaaactcaatccttaggcaactaagccgaaaagaaggttggagatcggcttctaaaaggtggacttccggagatagctcaacagccttcaacgacgacacaagtggtggtggttgtggtggtggttactcatcaatggagggtctttatggagtttactccggtggagacacggcggcgagaagtaagagagtgatggttgtagttgatgaaagttcgaggtctaagcatgctatgatgtgggctttgactcatttgactaacaaaggagatttagtgactcttcttcatgttgtgtctcctgatgatgaagctactccttctttggctcaatctcttggttctctttgcaaagcttgtaaacccgaggtggatgtggaggcattggtgattcaaggaccaaagctagcaacagtgttaagccaagtaaagaaacttgaagtctctgttcttgtgttgggtcagaagaaatctgcaccactcatctcttgcttatgtggacctagcagatcagaggagctcgtgaatcgttgcatcaacggtgcagattgtttgacgattggtgtgagaaaacaatgcaaaggtgttggtgggtacttgatcaatacacgatggcagaagaatttctggctcttggcctaatcacaattctaatcttaatagataaattgtgttaattctgtgtttattgtagtttaataaactctatgtagtctctttgttgtcttatgttaacctaacttgtcttatatgtcttgtaagaaaaattaaagttgaatctttttatcccacc

SEQ ID NO: 28116 - protein, 265 aa, Arabidopsis thaliana
  peptide (1)..(265): Ceres Seq. ID no. 12333818
IFEFYTKASSLSLSLSTIVSYYLLLLLLSLFHSLHKKLRAPITIYPPKMQFSRNSILRQLSRKEGWRSASKRWTSGDSSTAFNDDTSGGGCGGGYSSMEGLYGVYSGGDTAARSKRVMVVVDESSRSKHAMMWALTHLTNKGDLVTLLHVVSPDDEATPSLAQSLGSLCKACKPEVDVEALVIQGPKLATVLSQVKKLEVSVLVLGQKKSAPLISCLCGPSRSEELVNRCINGADCLTIGVRKQCKGVGGYLINTRWQKNFWLLA

SEQ ID NO: 28117 - protein, 217 aa, Arabidopsis thaliana
  peptide (1)..(217): Ceres Seq. ID no. 12333819
MQFSRNSILRQLSRKEGWRSASKRWTSGDSSTAFNDDTSGGGCGGGYSSMEGLYGVYSGGDTAARSKRVMVVVDESSRSKHAMMWALTHLTNKGDLVTLLHVVSPDDEATPSLAQSLGSLCKACKPEVDVEALVIQGPKLATVLSQVKKLEVSVLVLGQKKSAPLISCLCGPSRSEELVNRCINGADCLTIGVRKQCKGVGGYLINTRWQKNFWLLA

SEQ ID NO: 28118 - protein, 168 aa, Arabidopsis thaliana
  peptide (1)..(168): Ceres Seq. ID no. 12333820
MEGLYGVYSGGDTAARSKRVMVVVDESSRSKHAMMWALTHLTNKGDLVTLLHVVSPDDEATPSLAQSLGSLCKACKPEVDVEALVIQGPKLATVLSQVKKLEVSVLVLGQKKSAPLISCLCGPSRSEELVNRCINGADCLTIGVRKQCKGVGGYLINTRWQKNFWLLA

SEQ ID NO: 28119 - DNA, 1058 bp, Arabidopsis thaliana
  misc_feature (1)..(1058): Ceres Seq. ID no. 12327410
  misc_feature (1)..(1058): Ortholog of  Ceres SEQ ID NO 14304689 as cited in SEQ ID NO 53265
  misc_feature (1)..(1058): Ortholog of  Ceres SEQ ID NO 14307820 as cited in SEQ ID NO 53938
  misc_feature (1)..(1058): Ortholog of  Ceres SEQ ID NO 15177137 as cited in SEQ ID NO 55030
  misc_feature (1)..(1058): Ortholog of  Ceres SEQ ID NO 14302407 as cited in SEQ ID NO 66891
  misc_feature (1)..(1058): Ortholog of  Ceres SEQ ID NO 13599557 as cited in SEQ ID NO 0
aaaacactagtataaaaaattgaacccgttaaccggcgacccgaaacaatgacccggtccgtcagtttccctctcttcctcttcgccgttgtactctccctctcttcttctctcctcgccgacgatcccaaaccaatccgccgtgaggtctacgaaggaggtaagatatacgacatcagccatcgttacacgccggagattccagcttgggaatcttcggaaggattgggaaagacgttcctgcgattagccgcgagtatgaagaatggatcattcgctaacgtatcggagatgaaactatctgttcactctggaactcacgtggatgctccaggtcacttttgggataattattacgatgctggttttgatactgattcgcttgatctccaagtcctaaatggtcctgctttgttggttgatgttccgagagataagaacattactgctgaggtaatggaatcacttcatatacaaagaggagttcgtcgtgtgctctttagaacatccaacaccgacaagcggcttatgtttaagaaagagtttgattcaagctttgctgggttcatgaccgatggggctaaatggttggttgagaatacagacatcaaacttattgggcttgattatctttcatttgctgcttttgaggaatcacctgcaacacacagggttatacttaaaggacgggatataatcccagtggaagcgctgaagctggatggtgtggaggtaggaacatactcgcttcattgcttaccgctgagattagttggagcggaaggagcaccgacaagatgcattctcatcaagtgattcagttcttcttcttcttcttctgtgtaagttgttcagtataccaaactgataatgaataatatgcttcttactttacaagatctcagaacccatgaagcagatgtgatgattcagttgtaaaaggaagcatacctttataaacgtgtgaatgtattatgtatgacagtatatttgtaattctgaaggacatgataataaacctagactgaaacaaacgaataatataaccacttgcagcg

SEQ ID NO: 28120 - protein, 255 aa, Arabidopsis thaliana
  peptide (1)..(255): Ceres Seq. ID no. 12327411
MTRSVSFPLFLFAVVLSLSSSLLADDPKPIRREVYEGGKIYDISHRYTPEIPAWESSEGLGKTFLRLAASMKNGSFANVSEMKLSVHSGTHVDAPGHFWDNYYDAGFDTDSLDLQVLNGPALLVDVPRDKNITAEVMESLHIQRGVRRVLFRTSNTDKRLMFKKEFDSSFAGFMTDGAKWLVENTDIKLIGLDYLSFAAFEESPATHRVILKGRDIIPVEALKLDGVEVGTYSLHCLPLRLVGAEGAPTRCILIK

SEQ ID NO: 28121 - protein, 185 aa, Arabidopsis thaliana
  peptide (1)..(185): Ceres Seq. ID no. 12327412
MKNGSFANVSEMKLSVHSGTHVDAPGHFWDNYYDAGFDTDSLDLQVLNGPALLVDVPRDKNITAEVMESLHIQRGVRRVLFRTSNTDKRLMFKKEFDSSFAGFMTDGAKWLVENTDIKLIGLDYLSFAAFEESPATHRVILKGRDIIPVEALKLDGVEVGTYSLHCLPLRLVGAEGAPTRCILIK

SEQ ID NO: 28122 - protein, 174 aa, Arabidopsis thaliana
  peptide (1)..(174): Ceres Seq. ID no. 12327413
MKLSVHSGTHVDAPGHFWDNYYDAGFDTDSLDLQVLNGPALLVDVPRDKNITAEVMESLHIQRGVRRVLFRTSNTDKRLMFKKEFDSSFAGFMTDGAKWLVENTDIKLIGLDYLSFAAFEESPATHRVILKGRDIIPVEALKLDGVEVGTYSLHCLPLRLVGAEGAPTRCILIK

SEQ ID NO: 28123 - DNA, 731 bp, Arabidopsis thaliana
  misc_feature (1)..(731): Ceres Seq. ID no. 12343557
  misc_feature (1)..(731): Ortholog of  Ceres SEQ ID NO 14314198 as cited in SEQ ID NO 57472
  misc_feature (1)..(731): Ortholog of  Ceres SEQ ID NO 15174264 as cited in SEQ ID NO 61877
aatcaccattcaccactaaactacttcaatcaacttccttttcccgagaaaatcagaaagaaaattcacgatggcaccaagagccgagaagaagcccgccgagaaaaaaaccgccgctgagagaccggtggaagagaacaaggctgctgaaaaggctccggcggagaagaaacccaaggcggggaagaaattgccaccaaaggaagccggtgacaagaagaagaagcgatctaagaaaaacgtcgaaacctacaagatctacatcttcaaggtgctgaagcaggttcatccagatatcggaatttcaagcaaagccatggggattatgaacagtttcatcaacgacatattcgagaagctagctcaggaatcttcgaaactcgctaggtacaacaagaagccgaccattacatctcgcgagatccagacggctgtgagactcgtcctccccggtgaactcgctaaacacgccgtctctgaaggtaccaaggcggttaccaagtttactagctcttgaagagacccggttagggtttttagggatttcaatttcggtttggtttttagtacttgtaggaaattagatgcattattcgcttaacttcgtattttgtggctttgtaactctaggaagtagagaagattgttccttccttttatgaatttcaatgttggattatatatttttaacgatttttttttccatttcaatttcatttacctaatcactt

SEQ ID NO: 28124 - protein, 148 aa, Arabidopsis thaliana
  peptide (1)..(148): Ceres Seq. ID no. 12343558
MAPRAEKKPAEKKTAAERPVEENKAAEKAPAEKKPKAGKKLPPKEAGDKKKKRSKKNVETYKIYIFKVLKQVHPDIGISSKAMGIMNSFINDIFEKLAQESSKLARYNKKPTITSREIQTAVRLVLPGELAKHAVSEGTKAVTKFTSS

SEQ ID NO: 28125 - protein, 91 aa, Arabidopsis thaliana
  peptide (1)..(91): Ceres Seq. ID no. 12343559
SPFTTKLLQSTSFSRENQKENSRWHQEPRRSPPRKKPPLRDRWKRTRLLKRLRRRRNPRRGRNCHQRKPVTRRRSDLRKTSKPTRSTSSRC

SEQ ID NO: 28126 - DNA, 750 bp, Arabidopsis thaliana
  misc_feature (1)..(750): Ceres Seq. ID no. 12339757
  misc_feature (1)..(750): Ortholog of  Ceres SEQ ID NO 15170698 as cited in SEQ ID NO 58326
  misc_feature (1)..(750): Ortholog of  Ceres SEQ ID NO 14302279 as cited in SEQ ID NO 68864
ctgtggaacctctttagattctcaccatggctatattgttgaatatggaaaagatagggatgttgatcttgggtttcatgtggatgactcagaagttagtttaaatgtctgcttgggtaaacaattctctggctgggagctgtattttcgaggggtgagatgtgataagcatgtgaattccgatagcactgaaaaggaagtttatgattactctcatgtacctggtcacgccattcttcatcgtggacgtcatcgccatggtgctagagctacaacttctggacaccgagccaacttgattttgtggtgtagaagctcaacttttcgagagatgaagaattatcagagagatttctcaggttggtgtgtaggatgcaaacttgataaacagagaaggcagcgtgattcgattaatgcaactaaagagatactagcaaggaaagctgcagagaagacacttgttgagctggcttcaaaatcatgtgccgagtagacaaaaacaagaatatgtcaaatacctcatcttctttgtaccattccagaggctatgtgtatatagagaggcaagttaaatcgtttgtttgtaagcaagcattagatacctttgtcaaaggtaaattttgttccatttttcagattgctgcctgtaacaataaatttcttagaggagtgaaggcaaatgaaatacacaaatgttatctcttggagaatttgagaatgttggaagtttttggaagtaaaaatgtttgt

SEQ ID NO: 28127 - protein, 163 aa, Arabidopsis thaliana
  peptide (1)..(163): Ceres Seq. ID no. 12339758
CGTSLDSHHGYIVEYGKDRDVDLGFHVDDSEVSLNVCLGKQFSGWELYFRGVRCDKHVNSDSTEKEVYDYSHVPGHAILHRGRHRHGARATTSGHRANLILWCRSSTFREMKNYQRDFSGWCVGCKLDKQRRQRDSINATKEILARKAAEKTLVELASKSCAE

SEQ ID NO: 28128 - protein, 90 aa, Arabidopsis thaliana
  peptide (1)..(90): Ceres Seq. ID no. 12339759
MCRVDKNKNMSNTSSSLYHSRGYVYIERQVKSFVCKQALDTFVKGKFCSIFQIAACNNKFLRGVKANEIHKCYLLENLRMLEVFGSKNVC

SEQ ID NO: 28129 - DNA, 1024 bp, Arabidopsis thaliana
  misc_feature (1)..(1024): Ceres Seq. ID no. 13495970
  misc_feature (1)..(1024): Ortholog of  Ceres SEQ ID NO 15176514 as cited in SEQ ID NO 1114
  misc_feature (1)..(1024): Ortholog of  Ceres SEQ ID NO 15173688 as cited in SEQ ID NO 61918
  misc_feature (1)..(1024): Ortholog of  Ceres SEQ ID NO 13662513 as cited in SEQ ID NO 63303
  misc_feature (1)..(1024): Ortholog of  Ceres SEQ ID NO 12616929 as cited in SEQ ID NO 63962
  misc_feature (1)..(1024): Ortholog of  Ceres SEQ ID NO 15225803 as cited in SEQ ID NO 67623
  misc_feature (1)..(1024): Ortholog of  Ceres SEQ ID NO 15174088 as cited in SEQ ID NO 0
gtgaaacctccattaccttcgtctttcttcctcagtcgccctacaatggctttgcctttgtctggcacgcgccacctcacgcgcgctctcctctctaatgtcactcttatggctcctcctcggattccttcctctgttcactacggtggatctcggttaggttgttcgacccggttcttctcaattcgatgtggagctaaccggtcaggttctacttactcgccgcttaactctggctctaactttagtgatcggcctccgacggagatggctcctttgtttccgggatgcgattatgagcactggcttattgttatggataaacctggcggggaaggcgcgactaagcagcagatgattgattgttacattcaaaccctagcgaaagtcgttggaagtgaggaagaggcgaagaagcgaatctacaatgtttcatgtgagaggtatttagggtttggttgtgagattgatgaagagacatccactaagcttgaaggtttaccaggtgttctgtttgtgcttccagattcctatgtggatcctgaaaacaaagattatggagctgagctgtttgttaatggagagatagtccaacgatcaccagagaggcagaggcgggttgagccacagccgcagagagcccaagatagaccgagatacaatgacagaactcgttactctcgccgcagagaaaacacaagatgaactgtaactgaagatggtatacatacacctaagctaagccagtatgaggatgatgatgatgatgatgatgatgataatggtggtgaggatgatgttactgccgccacacgagggctctgtattccagtccgttgcagttaatggaccgggcttactttggatattgttgaaattctaagttttgtttctatgtaacaattttatttaataatgtaaattgaggtttcactgttttaggaaattactttgggtagaagattagttttcttttcaagaacaattcatgtgggaaatggtaaatttattttagtaatctttt

SEQ ID NO: 28130 - protein, 234 aa, Arabidopsis thaliana
  peptide (1)..(234): Ceres Seq. ID no. 13495971
VKPPLPSSFFLSRPTMALPLSGTRHLTRALLSNVTLMAPPRIPSSVHYGGSRLGCSTRFFSIRCGANRSGSTYSPLNSGSNFSDRPPTEMAPLFPGCDYEHWLIVMDKPGGEGATKQQMIDCYIQTLAKVVGSEEEAKKRIYNVSCERYLGFGCEIDEETSTKLEGLPGVLFVLPDSYVDPENKDYGAELFVNGEIVQRSPERQRRVEPQPQRAQDRPRYNDRTRYSRRRENTR

SEQ ID NO: 28131 - protein, 219 aa, Arabidopsis thaliana
  peptide (1)..(219): Ceres Seq. ID no. 13495972
MALPLSGTRHLTRALLSNVTLMAPPRIPSSVHYGGSRLGCSTRFFSIRCGANRSGSTYSPLNSGSNFSDRPPTEMAPLFPGCDYEHWLIVMDKPGGEGATKQQMIDCYIQTLAKVVGSEEEAKKRIYNVSCERYLGFGCEIDEETSTKLEGLPGVLFVLPDSYVDPENKDYGAELFVNGEIVQRSPERQRRVEPQPQRAQDRPRYNDRTRYSRRRENTR

SEQ ID NO: 28132 - protein, 198 aa, Arabidopsis thaliana
  peptide (1)..(198): Ceres Seq. ID no. 13495973
MAPPRIPSSVHYGGSRLGCSTRFFSIRCGANRSGSTYSPLNSGSNFSDRPPTEMAPLFPGCDYEHWLIVMDKPGGEGATKQQMIDCYIQTLAKVVGSEEEAKKRIYNVSCERYLGFGCEIDEETSTKLEGLPGVLFVLPDSYVDPENKDYGAELFVNGEIVQRSPERQRRVEPQPQRAQDRPRYNDRTRYSRRRENTR

SEQ ID NO: 28133 - DNA, 656 bp, Arabidopsis thaliana
  misc_feature (1)..(656): Ceres Seq. ID no. 13486772
  misc_feature (1)..(656): Ortholog of  Ceres SEQ ID NO 13596185 as cited in SEQ ID NO 67997
tcatcgctgtctggaacagcttgagtgcttcctagagcaaaggagaaaaaaaatggtgaactatgtgctcaaaatcaccgctgatctcgagaatctcactaatctccagccttccggtggctgcgacgattccaacttcccttacctcttcaagttgaaatgtgaaagatgtggagaggtgactccgaaagaaacatgtgtgactttgaatgagacttttactcctccgggaggtaggggtacttgtcatcttgttcagaagtgtaagttctgtggaagggaagggaatgtgactatgattccgggcaaaggtcgacctttaactctggaagattctgaggctggagaacatgcccctcttatggtgtttgactgtcgtggctatgaacccattgatttcggatttggtggatattggaaagctcaagctgaatctggaaccaaatttgatgagattgatttgtcgagcggggaggaattcacagagtacgatgagaagggagaatgcccagtaatgatatcgaatttccgtgcaagcttcagcgtcaccaagtgaagttggtctctgttgtctattttctgattccctacacacttggtgtatgtaaaaaccatggggattatcatttctcaagttctaataaaattctcttttt

SEQ ID NO: 28134 - protein, 184 aa, Arabidopsis thaliana
  peptide (1)..(184): Ceres Seq. ID no. 13486773
HRCLEQLECFLEQRRKKMVNYVLKITADLENLTNLQPSGGCDDSNFPYLFKLKCERCGEVTPKETCVTLNETFTPPGGRGTCHLVQKCKFCGREGNVTMIPGKGRPLTLEDSEAGEHAPLMVFDCRGYEPIDFGFGGYWKAQAESGTKFDEIDLSSGEEFTEYDEKGECPVMISNFRASFSVTK

SEQ ID NO: 28135 - protein, 167 aa, Arabidopsis thaliana
  peptide (1)..(167): Ceres Seq. ID no. 13486774
MVNYVLKITADLENLTNLQPSGGCDDSNFPYLFKLKCERCGEVTPKETCVTLNETFTPPGGRGTCHLVQKCKFCGREGNVTMIPGKGRPLTLEDSEAGEHAPLMVFDCRGYEPIDFGFGGYWKAQAESGTKFDEIDLSSGEEFTEYDEKGECPVMISNFRASFSVTK

SEQ ID NO: 28136 - DNA, 795 bp, Arabidopsis thaliana
  misc_feature (1)..(795): Ceres Seq. ID no. 13486637
  misc_feature (1)..(795): Ortholog of  Ceres SEQ ID NO 13598160 as cited in SEQ ID NO 61317
  misc_feature (1)..(795): Ortholog of  Ceres SEQ ID NO 12614253 as cited in SEQ ID NO 68518
gctcagataagggagacaaaaatggaagtgaaagggaaagagacagcttcggttctgtgtctgagcaaatacgtggatctatcgagtgaagagagtcatagatactatcttgcgcggcgaaatggcttgcagatgctccgagacagaggctacgaagtctccgacgaagatatcaatctctcccttcacgattttcgaactgtttacggtgaacgtcccgatgttgatcgtcttcgcatctccgctctgcatcgctccgattctaccaaaaaggtaaaaattgtcttttttggtactagtatggttaaagtcaacgcaatccgcagtgtagtagcggatatacttagccaagaaaccataactgggctgatattggttctgcaaaaccatgtaaccaatcaagccttgaaagccattgaacttttttctttcaaggtcgagatattccagataacggatctgctagtcaacataaccaaacattcactgaagccacaacatcaggtgttgaatgatgaagagaagacaacacttctcaagaagttcagcattgaggaaaaacagcttcctcggatttcaaagaaagatgctatcgtccggtactacggattagagaaagggcaagttgtgaaggtgaattacagaggcgaactcacggaatcgcatgttgccttccgatgtgtgtggtgaagaaaccaattaaaaaccatcttgtgtacttattttcaggaaaaaataacttgtatgtttctaaggttttgtttttaatcctagaagatccgttgctttgaacac

SEQ ID NO: 28137 - protein, 229 aa, Arabidopsis thaliana
  peptide (1)..(229): Ceres Seq. ID no. 13486638
AQIRETKMEVKGKETASVLCLSKYVDLSSEESHRYYLARRNGLQMLRDRGYEVSDEDINLSLHDFRTVYGERPDVDRLRISALHRSDSTKKVKIVFFGTSMVKVNAIRSVVADILSQETITGLILVLQNHVTNQALKAIELFSFKVEIFQITDLLVNITKHSLKPQHQVLNDEEKTTLLKKFSIEEKQLPRISKKDAIVRYYGLEKGQVVKVNYRGELTESHVAFRCVW

SEQ ID NO: 28138 - protein, 222 aa, Arabidopsis thaliana
  peptide (1)..(222): Ceres Seq. ID no. 13486639
MEVKGKETASVLCLSKYVDLSSEESHRYYLARRNGLQMLRDRGYEVSDEDINLSLHDFRTVYGERPDVDRLRISALHRSDSTKKVKIVFFGTSMVKVNAIRSVVADILSQETITGLILVLQNHVTNQALKAIELFSFKVEIFQITDLLVNITKHSLKPQHQVLNDEEKTTLLKKFSIEEKQLPRISKKDAIVRYYGLEKGQVVKVNYRGELTESHVAFRCVW

SEQ ID NO: 28139 - protein, 185 aa, Arabidopsis thaliana
  peptide (1)..(185): Ceres Seq. ID no. 13486640
MLRDRGYEVSDEDINLSLHDFRTVYGERPDVDRLRISALHRSDSTKKVKIVFFGTSMVKVNAIRSVVADILSQETITGLILVLQNHVTNQALKAIELFSFKVEIFQITDLLVNITKHSLKPQHQVLNDEEKTTLLKKFSIEEKQLPRISKKDAIVRYYGLEKGQVVKVNYRGELTESHVAFRCVW

SEQ ID NO: 28140 - DNA, 900 bp, Arabidopsis thaliana
  misc_feature (1)..(900): Ceres Seq. ID no. 12325562
  misc_feature (1)..(900): Ortholog of  Ceres SEQ ID NO 14306264 as cited in SEQ ID NO 1386
  misc_feature (1)..(900): Ortholog of  Ceres SEQ ID NO 15179159 as cited in SEQ ID NO 0
aaaagaacaagaaaaaagggtgttgttacgatggcatcgagtgataaggttccggtggcgtgtccggcaagcagtggagatggaaaggagccaatgggaaatccgacgaaaaccactacggcgatgctagagaaaggaacggctatgatgcaatcgatgaaaccgatcaggcaaatgagcctccacgtgtgttcattcgcttgctatagccatgatcccggtcgtcagatcgaagttcatatttacggccaccgtataaaccaggatttcctccaatgtgctgtctacgattccaattcctctaaggctcatctcatagggatcgaatatatagtgtcggaaaagttattcgaaagtctctcaccggaggaacaaaagctttggcactcgcatgattacgagatccaaatggctcttctagtaactccaagggtccctgagctcgttgcgaaaccggagcttaaaaatcttgccaaatcttacgggaaattttggtgtacatggcagattgaccgaggggataaattaccactaggtgtaccatcactaatggtatcgccacaagacgtgaatctcgggagaatcaaaccggagttggtgaaaaagagagatgaagaacatggaaactcgactgaatcgttgaagccgtcaagagatgggatctgtggaccagagaagaagaacctggttgctgattattgggttaggtttaggaaaggctttgcgcttgatgttgttgaaacagatatgaagagaacagctcccttcccctaacttttgtgtgtgctttttttctcagacattaattatataagttttcgtaagcttacactagatgggttgtgtacttattatgttatggagtatgataatgtcataaacatgagaattttttcgccc

SEQ ID NO: 28141 - protein, 257 aa, Arabidopsis thaliana
  peptide (1)..(257): Ceres Seq. ID no. 12325563
KRTRKKGVVTMASSDKVPVACPASSGDGKEPMGNPTKTTTAMLEKGTAMMQSMKPIRQMSLHVCSFACYSHDPGRQIEVHIYGHRINQDFLQCAVYDSNSSKAHLIGIEYIVSEKLFESLSPEEQKLWHSHDYEIQMALLVTPRVPELVAKPELKNLAKSYGKFWCTWQIDRGDKLPLGVPSLMVSPQDVNLGRIKPELVKKRDEEHGNSTESLKPSRDGICGPEKKNLVADYWVRFRKGFALDVVETDMKRTAPFP

SEQ ID NO: 28142 - protein, 247 aa, Arabidopsis thaliana
  peptide (1)..(247): Ceres Seq. ID no. 12325564
MASSDKVPVACPASSGDGKEPMGNPTKTTTAMLEKGTAMMQSMKPIRQMSLHVCSFACYSHDPGRQIEVHIYGHRINQDFLQCAVYDSNSSKAHLIGIEYIVSEKLFESLSPEEQKLWHSHDYEIQMALLVTPRVPELVAKPELKNLAKSYGKFWCTWQIDRGDKLPLGVPSLMVSPQDVNLGRIKPELVKKRDEEHGNSTESLKPSRDGICGPEKKNLVADYWVRFRKGFALDVVETDMKRTAPFP

SEQ ID NO: 28143 - protein, 226 aa, Arabidopsis thaliana
  peptide (1)..(226): Ceres Seq. ID no. 12325565
MGNPTKTTTAMLEKGTAMMQSMKPIRQMSLHVCSFACYSHDPGRQIEVHIYGHRINQDFLQCAVYDSNSSKAHLIGIEYIVSEKLFESLSPEEQKLWHSHDYEIQMALLVTPRVPELVAKPELKNLAKSYGKFWCTWQIDRGDKLPLGVPSLMVSPQDVNLGRIKPELVKKRDEEHGNSTESLKPSRDGICGPEKKNLVADYWVRFRKGFALDVVETDMKRTAPFP

SEQ ID NO: 28144 - DNA, 1145 bp, Arabidopsis thaliana
  misc_feature (1)..(1145): Ceres Seq. ID no. 12340183
  misc_feature (1)..(1145): Ortholog of  Ceres SEQ ID NO 13596944 as cited in SEQ ID NO 68910
ctcaaaccaaccaaccaatatatcagatggcttccatggatcacaatcattttctttttcctctcctcttcatcatcatcatctcttccttgcacgttttgcgtgcttcaaccacaccttcacactcacacaaactaaaatccgccactaccattagaaaaatcaaccgtagaggaccttacattggccttgtgacggtctttgagaccgaagaagatgcttttctcggcagtgttgatttcagactcgatcctacgcatcctttcctcgatctctctggaagacgttttcgtatagggaagattcatggaaagaaggttgtgtatgtcagatgtgggataggaatggtgaacgcagcagcagcaacacaacaaatgatagatgtgttcagtgtgaaagggattgtgcattttgggattgctggaaatataaacaactcgatgtccataggagatgtgagcatccctaagcaaatcacgaatgctggcttgtgggattggctgaatccaggcaaagcaaaaggaaatgaggatgtagcgtacttagatgtcgggaactataatgttccacaaggaaacaataagttaggaactattggatacagttacgaggaattatattcagtcagtggtcacatcaattcaccaaagaaagtgttttggattaatacaactcaagagtggcttcatcttgcagctgatcttgagaagatggagctattgcagtgtgtgaatgcaagtctgtgtcttccaaataaacccaaagtagtagttggattaaaagcagccactgctgacatatttgtggataatgcagcctatagaaatttcttatacgatacttttggagtttcctcctcagacatggagagttctgctgtggccatgacgtgcgcatcaaatgggtatccgataattgtgataaggggattatcagatttagcaggagtaggaggagataacactgttcgaaagttcggatctttggctgccactaacactgccaaagctgttttggagttcattaaaaagctcccactgtcctaattcctacgtgtaacctatcattatggatgtttgaatctgtattttccctcttttttctacgttaagaataaaattactaaaatctgttttttcttctcc

SEQ ID NO: 28145 - protein, 347 aa, Arabidopsis thaliana
  peptide (1)..(347): Ceres Seq. ID no. 12340184
QTNQPIYQMASMDHNHFLFPLLFIIIISSLHVLRASTTPSHSHKLKSATTIRKINRRGPYIGLVTVFETEEDAFLGSVDFRLDPTHPFLDLSGRRFRIGKIHGKKVVYVRCGIGMVNAAAATQQMIDVFSVKGIVHFGIAGNINNSMSIGDVSIPKQITNAGLWDWLNPGKAKGNEDVAYLDVGNYNVPQGNNKLGTIGYSYEELYSVSGHINSPKKVFWINTTQEWLHLAADLEKMELLQCVNASLCLPNKPKVVVGLKAATADIFVDNAAYRNFLYDTFGVSSSDMESSAVAMTCASNGYPIIVIRGLSDLAGVGGDNTVRKFGSLAATNTAKAVLEFIKKLPLS

SEQ ID NO: 28146 - protein, 339 aa, Arabidopsis thaliana
  peptide (1)..(339): Ceres Seq. ID no. 12340185
MASMDHNHFLFPLLFIIIISSLHVLRASTTPSHSHKLKSATTIRKINRRGPYIGLVTVFETEEDAFLGSVDFRLDPTHPFLDLSGRRFRIGKIHGKKVVYVRCGIGMVNAAAATQQMIDVFSVKGIVHFGIAGNINNSMSIGDVSIPKQITNAGLWDWLNPGKAKGNEDVAYLDVGNYNVPQGNNKLGTIGYSYEELYSVSGHINSPKKVFWINTTQEWLHLAADLEKMELLQCVNASLCLPNKPKVVVGLKAATADIFVDNAAYRNFLYDTFGVSSSDMESSAVAMTCASNGYPIIVIRGLSDLAGVGGDNTVRKFGSLAATNTAKAVLEFIKKLPLS

SEQ ID NO: 28147 - protein, 336 aa, Arabidopsis thaliana
  peptide (1)..(336): Ceres Seq. ID no. 12340186
MDHNHFLFPLLFIIIISSLHVLRASTTPSHSHKLKSATTIRKINRRGPYIGLVTVFETEEDAFLGSVDFRLDPTHPFLDLSGRRFRIGKIHGKKVVYVRCGIGMVNAAAATQQMIDVFSVKGIVHFGIAGNINNSMSIGDVSIPKQITNAGLWDWLNPGKAKGNEDVAYLDVGNYNVPQGNNKLGTIGYSYEELYSVSGHINSPKKVFWINTTQEWLHLAADLEKMELLQCVNASLCLPNKPKVVVGLKAATADIFVDNAAYRNFLYDTFGVSSSDMESSAVAMTCASNGYPIIVIRGLSDLAGVGGDNTVRKFGSLAATNTAKAVLEFIKKLPLS

SEQ ID NO: 28148 - DNA, 837 bp, Arabidopsis thaliana
  misc_feature (1)..(837): Ceres Seq. ID no. 13490911
  misc_feature (1)..(837): Ortholog of  Ceres SEQ ID NO 15178836 as cited in SEQ ID NO 1142
gctctctaaaaaccaaaactcttatcttcggtacagagcaaatcacagctcccgatggccgccacgtcatcatcaccgccgtgtaacatctccgcgtcctccctcctcctccgtcaaccttctcgctcaatccttaaagtgttcggtttattaccacctgtaagtaggaataaccgtaaactcggccggttaacggtgacccggtctaatctggcgcaggattttcttggtgacttcggagctcgtgacccttacccggaggagatagcgagtcaattcggagataaagtgttgggatgccaaagcactgagcacaagattttgataccaaacgcatctgttttgtctctctcccagcttcagtgttcccctgtttcgtcttcacagcctcctttgtccggcgatgatgccagaactctcctccacaaggttttgggatggagtatagtggataatgaagcgggtggtctgaaaataaggtgtatgtggaaagtgagggattttgggtgcggtgttgaactcataaacaggatccataaggttgctgaagcttctggtcattacccttctcttcacttggaaagtcctacccaagttcgagctgaactatttacctcttctatcggagggttgagcatgaatgatttcataatggcggctaaaatagatgatatcaagacttctgatctttcccctaggaaaagagcttgggcgtgatcttcttttcattattttggaacatttttgtttgatagtatgtaatgtatgtgatgtattctaaattgtgtgtgatcggtctacatgtcgagttatatagaaagcattgtcataaccgcc

SEQ ID NO: 28149 - protein, 220 aa, Arabidopsis thaliana
  peptide (1)..(220): Ceres Seq. ID no. 13490912
MAATSSSPPCNISASSLLLRQPSRSILKVFGLLPPVSRNNRKLGRLTVTRSNLAQDFLGDFGARDPYPEEIASQFGDKVLGCQSTEHKILIPNASVLSLSQLQCSPVSSSQPPLSGDDARTLLHKVLGWSIVDNEAGGLKIRCMWKVRDFGCGVELINRIHKVAEASGHYPSLHLESPTQVRAELFTSSIGGLSMNDFIMAAKIDDIKTSDLSPRKRAWA

SEQ ID NO: 28150 - DNA, 793 bp, Arabidopsis thaliana
  misc_feature (1)..(793): Ceres Seq. ID no. 12423232
  misc_feature (1)..(793): Ortholog of  Ceres SEQ ID NO 13591265 as cited in SEQ ID NO 61046
  misc_feature (1)..(793): Ortholog of  Ceres SEQ ID NO 15224932 as cited in SEQ ID NO 62225
agaccaccaagaaaacaaagacttatcgatcatgaagatcagacttagcataaccatcatacttttatcatacacagtggctacggtggccggacaacaatgcggtcgtcaaggcggtggtcgaacttgtcccggtaacatctgctgcagtcagtacggttactgtggtaccaccgcggactactgttctccgaccaacaactgtcagagcaattgttggggaagtgggcctagcggaccaggggagagcgcgtcgaacgtacgcgccacctaccatttctataatccggcgcagaataattgggatttgagagccgtgagtgcttattgctccacgtgggatgctgataagccgtacgcatggcggagcaagtatggctggaccgccttctgcgggccggcaggacctcgtggtcaagcttcttgcggcaagtgtttaagggtgaagaacacaagaacaaatgctgcagtaactgtgagaatagtggaccaatgcagcaacggaggcttggatttggatgtagcaatgttcaatcaaatagacaccgatggttttggctatcaacaaggccatctcattgttgactaccaatttgtcgactgtggcaatgagctcattgggcagcctgattccagaaacatgcttgtttcggccattgatcgcgtttgatattatgtaatgattttgaggtcaatatcgatcggtctacataaaaataataaagaccgctatatatgtattgtcgagggatatatgtttcgtatcaataaggaaattttaaatattattatc

SEQ ID NO: 28151 - protein, 222 aa, Arabidopsis thaliana
  peptide (1)..(222): Ceres Seq. ID no. 12423233
DHQENKDLSIMKIRLSITIILLSYTVATVAGQQCGRQGGGRTCPGNICCSQYGYCGTTADYCSPTNNCQSNCWGSGPSGPGESASNVRATYHFYNPAQNNWDLRAVSAYCSTWDADKPYAWRSKYGWTAFCGPAGPRGQASCGKCLRVKNTRTNAAVTVRIVDQCSNGGLDLDVAMFNQIDTDGFGYQQGHLIVDYQFVDCGNELIGQPDSRNMLVSAIDRV

SEQ ID NO: 28152 - protein, 212 aa, Arabidopsis thaliana
  peptide (1)..(212): Ceres Seq. ID no. 12423234
MKIRLSITIILLSYTVATVAGQQCGRQGGGRTCPGNICCSQYGYCGTTADYCSPTNNCQSNCWGSGPSGPGESASNVRATYHFYNPAQNNWDLRAVSAYCSTWDADKPYAWRSKYGWTAFCGPAGPRGQASCGKCLRVKNTRTNAAVTVRIVDQCSNGGLDLDVAMFNQIDTDGFGYQQGHLIVDYQFVDCGNELIGQPDSRNMLVSAIDRV

SEQ ID NO: 28153 - DNA, 1879 bp, Arabidopsis thaliana
  misc_feature (1)..(1879): Ceres Seq. ID no. 13487772
  misc_feature (1)..(1879): Ortholog of  Ceres SEQ ID NO 14314404 as cited in SEQ ID NO 57421
  misc_feature (1)..(1879): Ortholog of  Ceres SEQ ID NO 13493536 as cited in SEQ ID NO 58515
  misc_feature (1)..(1879): Ortholog of  Ceres SEQ ID NO 12618461 as cited in SEQ ID NO 64349
tggatctacttagtacttacttagtagttacttctctgtcttatttgattttgagtctctgttttgtctcttctcttgagattgcgataatgagagaacggattattacattcgtttcgctgcttcttgtagctttgctttcgtttcccagtgttagctactgtgacgaccaaacgatcctgtatgaatcgtttgacgagccttttgatggtcgctgggtcgtttcagagaaagctgaataccaaggtgtgtggaagcacgagaagagtgaagggcatgatgattatggacttctagtgagtgagaaagctaagaagtacggaatagttaaagagcttgatgttgatgagcctctaaaccttaacgaaggaactgttgttcttcaatacgaggctcgtttccaagaagggcttgagtgtggtggtgcttacttaaagtatcttcgtcctcaagaagctggatgggttcctcaagggtttgataatgattctccttactctatcatgtttggacctgataagtgtggtgctaccaacaaggttcatttcatcttgaagcataagaatcccaagagtggcgagtttgttgagcaccatctcaagttccctccttctgttccgtttgacatgctttctcatgtctacactgcggtcttgaaatctgataatgaggtgaggattttggtcgatggtgaggagaagaagaagggtaatttactgtctgctgaagactttgagcctccgttgattccttccaagaccatccctgatccagaggacaagaagccagaagactgggatgagagagccaagattcctgatcctaatgctgtgaagcctgatgactgggatgaggatgcacccatggagattgaagatgaggaagctgagaaacccgaaggatggttggatgatgagcctgtagaggttgaagaccccgaggcaagcaagccagaagattgggatgacgaggaagatggtgagtgggaggctcctaaggtttccaacaccaagtgtgaggcagcacccggatgtggcgaatggaagagaccgatgaagaggaaccctgcttacaagggcaaatggagctcacctctcatagataacccagcttacaagggaatctggaaaccaagagacattccaaatcctgattattttgagcttgagaggccgaatttggagcccattgctgccattggtattgagatatggacaatgcaagacggtatcttatttgacaacatcttgatatctaaagacgagaaggttgctgaaacttacagacaaagcacttggaagcccaagtttgatgtggagaaagagaaacaaaaggcagaggatgaagctgctggtgaggcagatggtctcaagagttaccagaagaaggtgttcgacctcttgtacaaggttgcagacatttctttccttagtgcgtacaagtcaaagattatggaacttattgagaaagctgaaacacagccaaacttaaccatcggtgtgctcatttccatcgtgatcgtcttcctctctctcttcttcaagctcatatttggtggtgcaaaggctaaggtagaaaagaagaaaccggaaacagctgcagagacctcgacaagcgaggcaaagacagaggagaaagcagaagcggtggctgcaccacgaaagaggcagacgaggcgtgagagttagataaaaagaggattagattttgatttttggggctttttgttttgatttatcaccgtatagacaaacagtagtggacctgatattaagacgattattgtaacatgttttttttgtatgcttttagtttcacatgaatctgaatgtggatcacaacatttatgagttgaaatttgataagtaatgggttgtgt

SEQ ID NO: 28154 - protein, 561 aa, Arabidopsis thaliana
  peptide (1)..(561): Ceres Seq. ID no. 13487773
DLLSTYLVVTSLSYLILSLCFVSSLEIAIMRERIITFVSLLLVALLSFPSVSYCDDQTILYESFDEPFDGRWVVSEKAEYQGVWKHEKSEGHDDYGLLVSEKAKKYGIVKELDVDEPLNLNEGTVVLQYEARFQEGLECGGAYLKYLRPQEAGWVPQGFDNDSPYSIMFGPDKCGATNKVHFILKHKNPKSGEFVEHHLKFPPSVPFDMLSHVYTAVLKSDNEVRILVDGEEKKKGNLLSAEDFEPPLIPSKTIPDPEDKKPEDWDERAKIPDPNAVKPDDWDEDAPMEIEDEEAEKPEGWLDDEPVEVEDPEASKPEDWDDEEDGEWEAPKVSNTKCEAAPGCGEWKRPMKRNPAYKGKWSSPLIDNPAYKGIWKPRDIPNPDYFELERPNLEPIAAIGIEIWTMQDGILFDNILISKDEKVAETYRQSTWKPKFDVEKEKQKAEDEAAGEADGLKSYQKKVFDLLYKVADISFLSAYKSKIMELIEKAETQPNLTIGVLISIVIVFLSLFFKLIFGGAKAKVEKKKPETAAETSTSEAKTEEKAEAVAAPRKRQTRRES

SEQ ID NO: 28155 - protein, 532 aa, Arabidopsis thaliana
  peptide (1)..(532): Ceres Seq. ID no. 13487774
MRERIITFVSLLLVALLSFPSVSYCDDQTILYESFDEPFDGRWVVSEKAEYQGVWKHEKSEGHDDYGLLVSEKAKKYGIVKELDVDEPLNLNEGTVVLQYEARFQEGLECGGAYLKYLRPQEAGWVPQGFDNDSPYSIMFGPDKCGATNKVHFILKHKNPKSGEFVEHHLKFPPSVPFDMLSHVYTAVLKSDNEVRILVDGEEKKKGNLLSAEDFEPPLIPSKTIPDPEDKKPEDWDERAKIPDPNAVKPDDWDEDAPMEIEDEEAEKPEGWLDDEPVEVEDPEASKPEDWDDEEDGEWEAPKVSNTKCEAAPGCGEWKRPMKRNPAYKGKWSSPLIDNPAYKGIWKPRDIPNPDYFELERPNLEPIAAIGIEIWTMQDGILFDNILISKDEKVAETYRQSTWKPKFDVEKEKQKAEDEAAGEADGLKSYQKKVFDLLYKVADISFLSAYKSKIMELIEKAETQPNLTIGVLISIVIVFLSLFFKLIFGGAKAKVEKKKPETAAETSTSEAKTEEKAEAVAAPRKRQTRRES

SEQ ID NO: 28156 - protein, 394 aa, Arabidopsis thaliana
  peptide (1)..(394): Ceres Seq. ID no. 13487775
MFGPDKCGATNKVHFILKHKNPKSGEFVEHHLKFPPSVPFDMLSHVYTAVLKSDNEVRILVDGEEKKKGNLLSAEDFEPPLIPSKTIPDPEDKKPEDWDERAKIPDPNAVKPDDWDEDAPMEIEDEEAEKPEGWLDDEPVEVEDPEASKPEDWDDEEDGEWEAPKVSNTKCEAAPGCGEWKRPMKRNPAYKGKWSSPLIDNPAYKGIWKPRDIPNPDYFELERPNLEPIAAIGIEIWTMQDGILFDNILISKDEKVAETYRQSTWKPKFDVEKEKQKAEDEAAGEADGLKSYQKKVFDLLYKVADISFLSAYKSKIMELIEKAETQPNLTIGVLISIVIVFLSLFFKLIFGGAKAKVEKKKPETAAETSTSEAKTEEKAEAVAAPRKRQTRRES

SEQ ID NO: 28157 - DNA, 912 bp, Arabidopsis thaliana
  misc_feature (1)..(912): Ceres Seq. ID no. 12340195
  misc_feature (1)..(912): Ortholog of  Ceres SEQ ID NO 15176771 as cited in SEQ ID NO 55128
cagagaagtggattactctgataaatctgttacagagaacacacgtgctgcctacccaattgagttcattccaaatgcgaaaataccatgtgttggtccacacccgacaaatgtgatacttctggcttgtgatgcctttggtgttctcccacctgtgagcaagctgaatctggcacaaaccatgtaccacttcatcagtggttacactgctcttgttgctggcacagaggatggtatcaaggagccaacagcaacattctcagcttgctttggtgcagctttcataatgttgcatcccacaaagtatgcagctatgttagctgagaagatgaagtcacaaggtgctactggttggctcgtcaacactggttggtctggtggcagttatggtgttggaaacagaatcaagctggcatacactagaaagatcatcgatgcaatccattcgggcagtctcttgaaggcaaactacaagaaaaccgaaatctttggatttgaaatcccaactgagatcgaagggataccttcagagatcttggaccccgtcaactcctggtctgataagaaggcacacaaagatactctggtgaaactgggaggtctgttcaagaagaacttcgaggtttttgctaaccataagattggtgtggatggtaagcttacgaaggagattctcgctgctggtcctatcttttagaaaaaccaaactctgaatgatgttgtcgaaaagaaagaaagatctactattattaagaagaataaaatgagactttgtgtttttctttgctgtgataatctctctgaataatagagagaatttaatgttccaaatgtggtgcgatatggataatgatgatgactatatgtaatttattactatccatcgtcatatatttttgttgggcctttgcc

SEQ ID NO: 28158 - protein, 231 aa, Arabidopsis thaliana
  peptide (1)..(231): Ceres Seq. ID no. 12340196
REVDYSDKSVTENTRAAYPIEFIPNAKIPCVGPHPTNVILLACDAFGVLPPVSKLNLAQTMYHFISGYTALVAGTEDGIKEPTATFSACFGAAFIMLHPTKYAAMLAEKMKSQGATGWLVNTGWSGGSYGVGNRIKLAYTRKIIDAIHSGSLLKANYKKTEIFGFEIPTEIEGIPSEILDPVNSWSDKKAHKDTLVKLGGLFKKNFEVFANHKIGVDGKLTKEILAAGPIF

SEQ ID NO: 28159 - protein, 171 aa, Arabidopsis thaliana
  peptide (1)..(171): Ceres Seq. ID no. 12340197
MYHFISGYTALVAGTEDGIKEPTATFSACFGAAFIMLHPTKYAAMLAEKMKSQGATGWLVNTGWSGGSYGVGNRIKLAYTRKIIDAIHSGSLLKANYKKTEIFGFEIPTEIEGIPSEILDPVNSWSDKKAHKDTLVKLGGLFKKNFEVFANHKIGVDGKLTKEILAAGPIF

SEQ ID NO: 28160 - protein, 136 aa, Arabidopsis thaliana
  peptide (1)..(136): Ceres Seq. ID no. 12340198
MLHPTKYAAMLAEKMKSQGATGWLVNTGWSGGSYGVGNRIKLAYTRKIIDAIHSGSLLKANYKKTEIFGFEIPTEIEGIPSEILDPVNSWSDKKAHKDTLVKLGGLFKKNFEVFANHKIGVDGKLTKEILAAGPIF

SEQ ID NO: 28161 - DNA, 828 bp, Arabidopsis thaliana
  misc_feature (1)..(828): Ceres Seq. ID no. 12340170
  misc_feature (1)..(828): Ortholog of  Ceres SEQ ID NO 13599287 as cited in SEQ ID NO 338
  misc_feature (1)..(828): Ortholog of  Ceres SEQ ID NO 15172934 as cited in SEQ ID NO 51783
  misc_feature (1)..(828): Ortholog of  Ceres SEQ ID NO 14314817 as cited in SEQ ID NO 52571
  misc_feature (1)..(828): Ortholog of  Ceres SEQ ID NO 15174056 as cited in SEQ ID NO 0
atcgaaaatcatcatcatcatcatcatcatcatcatcaaaacgattcgattctgcgaaaccacttttcaattctcatcggattatttctcttccaatttatacaacgggagctaaactttctagatcggagcattcaatggctgcttcttccgaacccaaatctctttacgatttcaccgtcaaggatgctaagggaaatgatgttgatctaagcatctacaaagggaaggttcttttgattgtgaacgttgcttctcaatgtggcttgactaattcgaattatactgagcttgcgcagctgtatgagaagtacaaaggccatggtttcgagattcttgcgtttccgtgtaaccagtttgggaatcaagagcctggtactaatgaagagattgttcagtttgcttgtactcgtttcaaggctgagtacccgattttcgacaaggttgatgttaacggtgacaaagctgccccagtctacaagtttctgaaatcaagcaaaggcgggctctttggagacggcattaagtggaacttcgcaaagttcttggttgacaaagatggaaatgttgtcgatcgtttcgcaccaactacctcacctctcagcattgagaaggatgtgaagaagttgctgggagttactgcttaagcaaggcaagattgcataattagacaaataaaagctcattagtattgtattaccaatactgtgtagtaagctgagttcgcgagtgtgtgtgcctttgggaccgcgtacaattataatccgttttttagcggccaaactatgtaataatcgtagatctaaatatcagatttcccgttaccct

SEQ ID NO: 28162 - protein, 214 aa, Arabidopsis thaliana
  peptide (1)..(214): Ceres Seq. ID no. 12340171
RKSSSSSSSSSSKRFDSAKPLFNSHRIISLPIYTTGAKLSRSEHSMAASSEPKSLYDFTVKDAKGNDVDLSIYKGKVLLIVNVASQCGLTNSNYTELAQLYEKYKGHGFEILAFPCNQFGNQEPGTNEEIVQFACTRFKAEYPIFDKVDVNGDKAAPVYKFLKSSKGGLFGDGIKWNFAKFLVDKDGNVVDRFAPTTSPLSIEKDVKKLLGVTA

SEQ ID NO: 28163 - protein, 169 aa, Arabidopsis thaliana
  peptide (1)..(169): Ceres Seq. ID no. 12340172
MAASSEPKSLYDFTVKDAKGNDVDLSIYKGKVLLIVNVASQCGLTNSNYTELAQLYEKYKGHGFEILAFPCNQFGNQEPGTNEEIVQFACTRFKAEYPIFDKVDVNGDKAAPVYKFLKSSKGGLFGDGIKWNFAKFLVDKDGNVVDRFAPTTSPLSIEKDVKKLLGVTA

SEQ ID NO: 28164 - DNA, 1206 bp, Arabidopsis thaliana
  misc_feature (1)..(1206): Ceres Seq. ID no. 12377569
  misc_feature (1)..(1206): Ortholog of  Ceres SEQ ID NO 14311683 as cited in SEQ ID NO 51263
  misc_feature (1)..(1206): Ortholog of  Ceres SEQ ID NO 15177862 as cited in SEQ ID NO 56033
  misc_feature (1)..(1206): Ortholog of  Ceres SEQ ID NO 13661430 as cited in SEQ ID NO 61258
  misc_feature (1)..(1206): Ortholog of  Ceres SEQ ID NO 13590940 as cited in SEQ ID NO 68653
  misc_feature (1)..(1206): Ortholog of  Ceres SEQ ID NO 14301982 as cited in SEQ ID NO 0
  misc_feature (1)..(1206): Ortholog of  Ceres SEQ ID NO 15179001 as cited in SEQ ID NO 0
  misc_feature (1)..(1206): Ortholog of  Ceres SEQ ID NO 15180040 as cited in SEQ ID NO 0
actctcaaaatcatcttcttcacccaaaaacccctaaaagccttatcccttcttcttcccatggctgcttcagcttcgtctctcgctctctcttccttcaaccctaaatctcttcctttcggcgtctccagacctgcctccgtttccctcttatctccttccctctcctttaaactcaattccgactccgtttccttctccatcgccgccaaatggaactctcccgcttctcgcttcgtccgtaacgttgcgattacctcagagttcgaggtggaagaagatggtttcgctgacgtcgctccgccaaaagagcaatctttctctgctgaccttaaactcttcgttggtaaccttcctttcaacgttgacagtgctcagctcgctcagctctttgagagtgccggaaatgttgagatggttgaggtaatctatgacaaaattacaggaagaagcagaggttttggattcgtgactatgtcttcagtttctgaagttgaggcagctgctcagcagttcaatggctatgagttggatggtagacctttgagagtcaatgctggtcccccaccaccaaagagggaagatggtttctccagaggacctaggagcagctttggaagctcaggttctggatatggaggaggtggtggttctggtgctggttcaggaaaccgtgtttatgtgggtaacctctcttggggagttgatgacatggctcttgagagtttgttctcggagcaaggaaaggttgttgaggccagagtcatctacgacagggacagtggtcgatccaagggttttggatttgtgacatacgactcttctcaagaggtccaaaatgccatcaagtccttggatggtgctgatttggacggtagacaaattagagtctcggaagctgaggctaggcctccaaggcgccaatattgagcaccaatctatgacttcctattctcaaaaacgcatattctggagggcgcttcgaagtaaagagggtttgtgagatgatggcagtttcagacggtactaagctcttagcttcgcctatgtttgttgccttggatgcaagaaggtcgtaaaggaatggtctttttttttttgagaaacgtataattaagatagaaactggagagaccatgttcttgtctgtctgaatgctgccattgactgcttcgctttggttttgattcaatttttttttctctc

SEQ ID NO: 28165 - protein, 309 aa, Arabidopsis thaliana
  peptide (1)..(309): Ceres Seq. ID no. 12377570
TLKIIFFTQKPLKALSLLLPMAASASSLALSSFNPKSLPFGVSRPASVSLLSPSLSFKLNSDSVSFSIAAKWNSPASRFVRNVAITSEFEVEEDGFADVAPPKEQSFSADLKLFVGNLPFNVDSAQLAQLFESAGNVEMVEVIYDKITGRSRGFGFVTMSSVSEVEAAAQQFNGYELDGRPLRVNAGPPPPKREDGFSRGPRSSFGSSGSGYGGGGGSGAGSGNRVYVGNLSWGVDDMALESLFSEQGKVVEARVIYDRDSGRSKGFGFVTYDSSQEVQNAIKSLDGADLDGRQIRVSEAEARPPRRQY

SEQ ID NO: 28166 - protein, 289 aa, Arabidopsis thaliana
  peptide (1)..(289): Ceres Seq. ID no. 12377571
MAASASSLALSSFNPKSLPFGVSRPASVSLLSPSLSFKLNSDSVSFSIAAKWNSPASRFVRNVAITSEFEVEEDGFADVAPPKEQSFSADLKLFVGNLPFNVDSAQLAQLFESAGNVEMVEVIYDKITGRSRGFGFVTMSSVSEVEAAAQQFNGYELDGRPLRVNAGPPPPKREDGFSRGPRSSFGSSGSGYGGGGGSGAGSGNRVYVGNLSWGVDDMALESLFSEQGKVVEARVIYDRDSGRSKGFGFVTYDSSQEVQNAIKSLDGADLDGRQIRVSEAEARPPRRQY

SEQ ID NO: 28167 - protein, 171 aa, Arabidopsis thaliana
  peptide (1)..(171): Ceres Seq. ID no. 12377572
MVEVIYDKITGRSRGFGFVTMSSVSEVEAAAQQFNGYELDGRPLRVNAGPPPPKREDGFSRGPRSSFGSSGSGYGGGGGSGAGSGNRVYVGNLSWGVDDMALESLFSEQGKVVEARVIYDRDSGRSKGFGFVTYDSSQEVQNAIKSLDGADLDGRQIRVSEAEARPPRRQY

SEQ ID NO: 28168 - DNA, 1037 bp, Arabidopsis thaliana
  misc_feature (1)..(1037): Ceres Seq. ID no. 12396853
  misc_feature (1)..(1037): Ortholog of  Ceres SEQ ID NO 13594298 as cited in SEQ ID NO 57803
  misc_feature (1)..(1037): Ortholog of  Ceres SEQ ID NO 13503476 as cited in SEQ ID NO 61978
  misc_feature (1)..(1037): Ortholog of  Ceres SEQ ID NO 12578438 as cited in SEQ ID NO 62201
aatgtgattaagtaaagtgagggagaagcaacgagagatagagatagagagatcaagatgagaggatctgatcagaagattctactgatggttatggtggttgtagcagttgtagctgcggctcaaggccaagaagagactactggattcgtgacatggggtaacaattactaccagacatggggacatcaagctttggttattaataaaacctctgagctccagctcaccctcgataaaaactctgggtccgggtttgaatcccaattgatttacggatcaggatacttcaacgtaagaatcaaggcacctcaaactacgtctacgggagtcattacttccttctatttaatctcccgttcaagccgccatgatgagctctgtttccagatcttgggaaagaatgggccaccgtatttgctgaatacgaatatgtatctgtacggtgaaggaggcaaagatcagaggtttcgtctctggtttgatccaacaaaagattaccattcctacagttttctttggaaccctaatcaacttgtgttttatgttgacgatacaccgatcagggtgtacagcaagaatccagatgtttactacccatcggtgcagacaatgttcctaatgggaagtgtgcaaaacggatcgataattgacccgaagcagatgccttacattgctaagttccaggcatcaaagattgaagggtgtaagactgagttcatgggaatagataaatgcactgatcctaagttctggtggaatcgcaaacagctaagctctaaagagaagacactgtacctaaacgcaaggaagacgtacctggattatgactattgttctgacagacagcgatatccaaaggtgcctcaagaatgtggaagttacacttagagaaagatcaatacctgtcacagggttaagcctacaaaacaaatatcttgaaaaaataacttatgttactgtaagatgctttatgataagccttttctatcaaataacaacattattgtcatcaatgctagatacattactatgcc

SEQ ID NO: 28169 - protein, 277 aa, Arabidopsis thaliana
  peptide (1)..(277): Ceres Seq. ID no. 12396854
MRGSDQKILLMVMVVVAVVAAAQGQEETTGFVTWGNNYYQTWGHQALVINKTSELQLTLDKNSGSGFESQLIYGSGYFNVRIKAPQTTSTGVITSFYLISRSSRHDELCFQILGKNGPPYLLNTNMYLYGEGGKDQRFRLWFDPTKDYHSYSFLWNPNQLVFYVDDTPIRVYSKNPDVYYPSVQTMFLMGSVQNGSIIDPKQMPYIAKFQASKIEGCKTEFMGIDKCTDPKFWWNRKQLSSKEKTLYLNARKTYLDYDYCSDRQRYPKVPQECGSYT

SEQ ID NO: 28170 - protein, 267 aa, Arabidopsis thaliana
  peptide (1)..(267): Ceres Seq. ID no. 12396855
MVMVVVAVVAAAQGQEETTGFVTWGNNYYQTWGHQALVINKTSELQLTLDKNSGSGFESQLIYGSGYFNVRIKAPQTTSTGVITSFYLISRSSRHDELCFQILGKNGPPYLLNTNMYLYGEGGKDQRFRLWFDPTKDYHSYSFLWNPNQLVFYVDDTPIRVYSKNPDVYYPSVQTMFLMGSVQNGSIIDPKQMPYIAKFQASKIEGCKTEFMGIDKCTDPKFWWNRKQLSSKEKTLYLNARKTYLDYDYCSDRQRYPKVPQECGSYT

SEQ ID NO: 28171 - protein, 265 aa, Arabidopsis thaliana
  peptide (1)..(265): Ceres Seq. ID no. 12396856
MVVVAVVAAAQGQEETTGFVTWGNNYYQTWGHQALVINKTSELQLTLDKNSGSGFESQLIYGSGYFNVRIKAPQTTSTGVITSFYLISRSSRHDELCFQILGKNGPPYLLNTNMYLYGEGGKDQRFRLWFDPTKDYHSYSFLWNPNQLVFYVDDTPIRVYSKNPDVYYPSVQTMFLMGSVQNGSIIDPKQMPYIAKFQASKIEGCKTEFMGIDKCTDPKFWWNRKQLSSKEKTLYLNARKTYLDYDYCSDRQRYPKVPQECGSYT

SEQ ID NO: 28172 - DNA, 1297 bp, Arabidopsis thaliana
  misc_feature (1)..(1297): Ceres Seq. ID no. 12422819
  misc_feature (1)..(1297): Ortholog of  Ceres SEQ ID NO 13656147 as cited in SEQ ID NO 64422
  misc_feature (1)..(1297): Ortholog of  Ceres SEQ ID NO 13596496 as cited in SEQ ID NO 68639
tcactataaagccgatccatagataaacgaggaccggccagaaatcgcttcaccattcccaaatctctcttccattttctccacacaaatttctcttcaatctccgataatggaaggaaccggcgttgtggcggtgtacggtaacggtgcgataacggaggcgaagaaatctcccttctccgtgaaggtcggtttggctcagatgctccgtggtggtgttatcatggatgtcgtcaacgccgagcaagctcgtatcgccgaggaggctggtgcttgcgccgtcatggctttggagcgtgttcctgctgatatccgcgctcaaggaggcgtcgctcgtatgagcgatccacaaatgattaaagaaatcaaacaagccgttacgattccggtgatggctaaggctaggattggtcatttcgttgaagctcagatccttgaagcaattggaatcgattacatcgatgagagcgaggttttgactcttgctgatgaagatcatcacatcaacaagcataatttccggatcccgttcgtttgcggttgccggaatctcggcgaggctctgaggaggatccgtgaaggtgcggcgatgattaggaccaaaggtgaagctggaaccggtaacattattgaagctgtgaggcatgtgaggtctgttaatggtgacattagggttttgcgaaacatggatgatgatgaggttttcactttcgctaagaaattagccgctccgtacgatctcgtgatgcagactaagcagcttggtcgtcttcctgtagtccaattcgccgccggtggagtggctactccggctgatgcagctctcatgatgcagcttggatgtgatggtgtctttgttggttctggtatcttcaagagcggtgacccagctcgtcgtgcacgtgccattgttcaggctgtgactcattacagtgaccctgagatgcttgtggaggtgagctgtgggcttggagaagccatggttgggatcaatctcaacgatgagaaggttgagaggttcgctaatcgctccgagtgatcaaagaaataaaaggtaaaatatctcagacgaaatggtttcagaattttctcagaccattttgcagtaatctctttgaaaagaagaagatgatgatattgttggtagtttgtatcctttgtgttttccttataatctttgatagtcttttgttattgtaactcgtaatccctttgcaagaacaagtttgtcagttataataatgtactactctcttgatcgatcagttggttttgaatctgatatattcttcgattc

SEQ ID NO: 28173 - protein, 309 aa, Arabidopsis thaliana
  peptide (1)..(309): Ceres Seq. ID no. 12422820
MEGTGVVAVYGNGAITEAKKSPFSVKVGLAQMLRGGVIMDVVNAEQARIAEEAGACAVMALERVPADIRAQGGVARMSDPQMIKEIKQAVTIPVMAKARIGHFVEAQILEAIGIDYIDESEVLTLADEDHHINKHNFRIPFVCGCRNLGEALRRIREGAAMIRTKGEAGTGNIIEAVRHVRSVNGDIRVLRNMDDDEVFTFAKKLAAPYDLVMQTKQLGRLPVVQFAAGGVATPADAALMMQLGCDGVFVGSGIFKSGDPARRARAIVQAVTHYSDPEMLVEVSCGLGEAMVGINLNDEKVERFANRSE

SEQ ID NO: 28174 - protein, 278 aa, Arabidopsis thaliana
  peptide (1)..(278): Ceres Seq. ID no. 12422821
MLRGGVIMDVVNAEQARIAEEAGACAVMALERVPADIRAQGGVARMSDPQMIKEIKQAVTIPVMAKARIGHFVEAQILEAIGIDYIDESEVLTLADEDHHINKHNFRIPFVCGCRNLGEALRRIREGAAMIRTKGEAGTGNIIEAVRHVRSVNGDIRVLRNMDDDEVFTFAKKLAAPYDLVMQTKQLGRLPVVQFAAGGVATPADAALMMQLGCDGVFVGSGIFKSGDPARRARAIVQAVTHYSDPEMLVEVSCGLGEAMVGINLNDEKVERFANRSE

SEQ ID NO: 28175 - protein, 271 aa, Arabidopsis thaliana
  peptide (1)..(271): Ceres Seq. ID no. 12422822
MDVVNAEQARIAEEAGACAVMALERVPADIRAQGGVARMSDPQMIKEIKQAVTIPVMAKARIGHFVEAQILEAIGIDYIDESEVLTLADEDHHINKHNFRIPFVCGCRNLGEALRRIREGAAMIRTKGEAGTGNIIEAVRHVRSVNGDIRVLRNMDDDEVFTFAKKLAAPYDLVMQTKQLGRLPVVQFAAGGVATPADAALMMQLGCDGVFVGSGIFKSGDPARRARAIVQAVTHYSDPEMLVEVSCGLGEAMVGINLNDEKVERFANRSE

SEQ ID NO: 28176 - DNA, 2308 bp, Arabidopsis thaliana
  misc_feature (1)..(2308): Ceres Seq. ID no. 12325938
  misc_feature (1)..(2308): Ortholog of  Ceres SEQ ID NO 14310784 as cited in SEQ ID NO 58503
ccggggaaataaagaaacttgactgctaattgctaaaggtaatgcttctgagaattggaagctaatgaagctcttcctcaatagcaatctgctcagaaactctattttcttcaagatctccgcctttgttttgatctccgttgcttgtttcttcctcggtaagcattggtctgaggatggcttccgccgtctcatcttcttctccgccgagccttcccgatctcccattgtcgcactctcacctgatttcggaaaaacctataacatctctggtttgatctatgagagtcacccgattttgcctccgtctttgtcaccaccgccgccgccagattctgttgagttgaaggtgtttggaatcgttaatgagaacggaacaatgtctgatgagtttcagattggtgattacgacgttgagtcggcggagacgttggggaatcagacggaattcgagagtagcgacgacgatgatattaaatccaccacagctagagttagtgtgaggaaatttgagatttgttcggagaatatgactgagtacattccttgtttggataatgtagaagccatcaaaaggcttaattcaacggcgcgtggtgagcgattcgaacggaattgtcctaacgatggaatgggattgaattgcaccgttccgattcctcaaggataccgtagtccgattccgtggccgagaagccgtgatgaggtgtggttcaacaatgttccacatactaaacttgttgaagacaaaggtggtcaaaattggatttataaagagaatgacaaatttaagtttcctggtggtggtactcagtttatacacggagctgatcagtacttggatcagatctctcagatgattcctgatattagctttggtaaccatacacgagttgttcttgacattggatgtggtgtggcaagttttggtgcctacttaatgtcacgaaatgtcttgactatgtctatagctccaaaagatgttcacgagaaccagatacagtttgctcttgagcgtggtgttcctgcaatggtggcagcattcacaacacggagattgttgtatccaagccaagcttttgatttggtacattgttcaagatgtagaatcaactggactcgtgaagatgggatcctgctccttgaagttaataggatgcttcgtgccggaggatattttgtttgggcagcacaacctgtatataagcatgaaaaggccttggaagaacagtgggaagagatgctaaacctgaccactaggctgtgctgggttcttgtaaagaaggaaggatatatagctatctggcagaagcctgtaaataacacttgttacctaagtcgtggtgctggagtcagtcctcctttgtgcaattctgaagatgacccagataatgtttggtacgtggatctgaaggcatgcatcactagaattgaagaaaatggatatggagcaaatcttgctccttggccagctcgtttactgaccccaccggataggctgcagacaatacaaattgattcatacatagcccgaaaagagctatttgtagccgaatcaaagtactggaaagaaataatatcaaactatgtaaatgccctacactggaagcagataggactcagaaatgtcttggacatgagagctggatttggcggatttgcagctgcattagctgagctaaaggttgactgctgggttcttaacgtcatcccagtgagtggtcccaacacattgcctgttatatatgaccgtggactgcttggagttatgcacgattggtgtgaaccttttgatacttacccaagaacctacgatttgctgcatgctgcgggtctgttttccattgaaagaaaaagatgcaacatgacaacaatgatgctagagatggaccggattttaagacctggaggacgtgtatacatacgggacacaatcaatgtaacgagtgagcttcaagagattggaaacgcaatgaggtggcacacgagcttacgtgaaactgctgaaggacctcactcaagttacagggttctcttatgtgagaagcggtttgaatcgtctgagaagcgtcgtaccaagaagaggaggaagactaaaggaaaaagagcttgacattttcatagaatacaagtgctgggctagaattttctggggatctttggatcaatggacaatggttagtttagttgggaggctttttggaattttagaaaaattagggacctgaaacagtgaaactgtttgtgaggttttggcgtttaaccctctttaaagttgattgaaaccggattaaactcacttagccct

SEQ ID NO: 28177 - protein, 682 aa, Arabidopsis thaliana
  peptide (1)..(682): Ceres Seq. ID no. 12325939
MKLFLNSNLLRNSIFFKISAFVLISVACFFLGKHWSEDGFRRLIFFSAEPSRSPIVALSPDFGKTYNISGLIYESHPILPPSLSPPPPPDSVELKVFGIVNENGTMSDEFQIGDYDVESAETLGNQTEFESSDDDDIKSTTARVSVRKFEICSENMTEYIPCLDNVEAIKRLNSTARGERFERNCPNDGMGLNCTVPIPQGYRSPIPWPRSRDEVWFNNVPHTKLVEDKGGQNWIYKENDKFKFPGGGTQFIHGADQYLDQISQMIPDISFGNHTRVVLDIGCGVASFGAYLMSRNVLTMSIAPKDVHENQIQFALERGVPAMVAAFTTRRLLYPSQAFDLVHCSRCRINWTREDGILLLEVNRMLRAGGYFVWAAQPVYKHEKALEEQWEEMLNLTTRLCWVLVKKEGYIAIWQKPVNNTCYLSRGAGVSPPLCNSEDDPDNVWYVDLKACITRIEENGYGANLAPWPARLLTPPDRLQTIQIDSYIARKELFVAESKYWKEIISNYVNALHWKQIGLRNVLDMRAGFGGFAAALAELKVDCWVLNVIPVSGPNTLPVIYDRGLLGVMHDWCEPFDTYPRTYDLLHAAGLFSIERKRCNMTTMMLEMDRILRPGGRVYIRDTINVTSELQEIGNAMRWHTSLRETAEGPHSSYRVLLCEKRFESSEKRRTKKRRKTKGKRA

SEQ ID NO: 28178 - protein, 577 aa, Arabidopsis thaliana
  peptide (1)..(577): Ceres Seq. ID no. 12325940
MSDEFQIGDYDVESAETLGNQTEFESSDDDDIKSTTARVSVRKFEICSENMTEYIPCLDNVEAIKRLNSTARGERFERNCPNDGMGLNCTVPIPQGYRSPIPWPRSRDEVWFNNVPHTKLVEDKGGQNWIYKENDKFKFPGGGTQFIHGADQYLDQISQMIPDISFGNHTRVVLDIGCGVASFGAYLMSRNVLTMSIAPKDVHENQIQFALERGVPAMVAAFTTRRLLYPSQAFDLVHCSRCRINWTREDGILLLEVNRMLRAGGYFVWAAQPVYKHEKALEEQWEEMLNLTTRLCWVLVKKEGYIAIWQKPVNNTCYLSRGAGVSPPLCNSEDDPDNVWYVDLKACITRIEENGYGANLAPWPARLLTPPDRLQTIQIDSYIARKELFVAESKYWKEIISNYVNALHWKQIGLRNVLDMRAGFGGFAAALAELKVDCWVLNVIPVSGPNTLPVIYDRGLLGVMHDWCEPFDTYPRTYDLLHAAGLFSIERKRCNMTTMMLEMDRILRPGGRVYIRDTINVTSELQEIGNAMRWHTSLRETAEGPHSSYRVLLCEKRFESSEKRRTKKRRKTKGKRA

SEQ ID NO: 28179 - protein, 527 aa, Arabidopsis thaliana
  peptide (1)..(527): Ceres Seq. ID no. 12325941
MTEYIPCLDNVEAIKRLNSTARGERFERNCPNDGMGLNCTVPIPQGYRSPIPWPRSRDEVWFNNVPHTKLVEDKGGQNWIYKENDKFKFPGGGTQFIHGADQYLDQISQMIPDISFGNHTRVVLDIGCGVASFGAYLMSRNVLTMSIAPKDVHENQIQFALERGVPAMVAAFTTRRLLYPSQAFDLVHCSRCRINWTREDGILLLEVNRMLRAGGYFVWAAQPVYKHEKALEEQWEEMLNLTTRLCWVLVKKEGYIAIWQKPVNNTCYLSRGAGVSPPLCNSEDDPDNVWYVDLKACITRIEENGYGANLAPWPARLLTPPDRLQTIQIDSYIARKELFVAESKYWKEIISNYVNALHWKQIGLRNVLDMRAGFGGFAAALAELKVDCWVLNVIPVSGPNTLPVIYDRGLLGVMHDWCEPFDTYPRTYDLLHAAGLFSIERKRCNMTTMMLEMDRILRPGGRVYIRDTINVTSELQEIGNAMRWHTSLRETAEGPHSSYRVLLCEKRFESSEKRRTKKRRKTKGKRA

SEQ ID NO: 28180 - DNA, 1210 bp, Arabidopsis thaliana
  misc_feature (1)..(1210): Ceres Seq. ID no. 12482200
  misc_feature (1)..(1210): Ortholog of  Ceres SEQ ID NO 14309755 as cited in SEQ ID NO 20741
  misc_feature (1)..(1210): Ortholog of  Ceres SEQ ID NO 13594727 as cited in SEQ ID NO 52169
  misc_feature (1)..(1210): Ortholog of  Ceres SEQ ID NO 13596474 as cited in SEQ ID NO 62169
  misc_feature (1)..(1210): Ortholog of  Ceres SEQ ID NO 13598714 as cited in SEQ ID NO 62656
  misc_feature (1)..(1210): Ortholog of  Ceres SEQ ID NO 13596969 as cited in SEQ ID NO 63375
  misc_feature (1)..(1210): Ortholog of  Ceres SEQ ID NO 13597519 as cited in SEQ ID NO 64759
  misc_feature (1)..(1210): Ortholog of  Ceres SEQ ID NO 13587054 as cited in SEQ ID NO 0
tcactcaaattaaaccataaccaaataattctcttaaaagagctaagaaaatgcattcctctttgataaaattgggatttcttcttcttcttattcaggtatcattgtctcatgctcaactaagcccttccttttacgataaaacatgtccgcaagtctttgacattgcaaccactaccattgtcaatgctctaagatcggaccctcgcatcgctgcaagcatccttcgtcttcatttccacgactgctttgttaatggatgtgatgcatcgatattgttagacaacaccacatcgtttaggacggagaaagatgcgtttgggaacgctaattccgctcgaggtttcgatgtgatcgacaaaatgaaggctgccgtggagaaagcatgtcctaaaactgtttcatgtgctgatttgctcgccatcgcggctcaagaatctgtcgttttggcgggaggtccttcatggagggttccaaatggaagaagagacagcttaagagggttcatggatcttgctaatgataaccttccagctccattctttacccttaaccaacttaaggatagattcaaaaacgtcggactcgaccgtgcttctgatctcgttgctctttctggtggtcacacctttggcaaaaaccaatgtcaattcataatggatcggctttataacttcagtaacactggtttacccgacccaacccttgataaatcttacctctccacactcagaaaacaatgtccacgtaatggaaaccagagtgtattggtagattttgatttacgtacgccaacactctttgacaacaagtattatgtgaacctcaaggagaacaaaggacttatccagagcgaccaagagttattctctagccctgatgcttcagacactcttcctttagtccgagaatacgctgatggtcaagggaaatttttcgatgcgttcgcgaaggcaatgataaggatgagtagtctttcacctttaacagggaaacaaggagaaataagattgaactgtagagtggtgaattcgaaatctaaaatcatggatgtggtagaagatgctcttgaatttgcaagctcaatgtgaggaaatgtttttctttaacaataaataaattatcaatgttgtcaagatgttatctttttttcttacttccttgtttgttttgtgttacttatttaaattctatataactattaaacctt

SEQ ID NO: 28181 - protein, 346 aa, Arabidopsis thaliana
  peptide (1)..(346): Ceres Seq. ID no. 12482201
MHSSLIKLGFLLLLIQVSLSHAQLSPSFYDKTCPQVFDIATTTIVNALRSDPRIAASILRLHFHDCFVNGCDASILLDNTTSFRTEKDAFGNANSARGFDVIDKMKAAVEKACPKTVSCADLLAIAAQESVVLAGGPSWRVPNGRRDSLRGFMDLANDNLPAPFFTLNQLKDRFKNVGLDRASDLVALSGGHTFGKNQCQFIMDRLYNFSNTGLPDPTLDKSYLSTLRKQCPRNGNQSVLVDFDLRTPTLFDNKYYVNLKENKGLIQSDQELFSSPDASDTLPLVREYADGQGKFFDAFAKAMIRMSSLSPLTGKQGEIRLNCRVVNSKSKIMDVVEDALEFASSM

SEQ ID NO: 28182 - protein, 242 aa, Arabidopsis thaliana
  peptide (1)..(242): Ceres Seq. ID no. 12482202
MKAAVEKACPKTVSCADLLAIAAQESVVLAGGPSWRVPNGRRDSLRGFMDLANDNLPAPFFTLNQLKDRFKNVGLDRASDLVALSGGHTFGKNQCQFIMDRLYNFSNTGLPDPTLDKSYLSTLRKQCPRNGNQSVLVDFDLRTPTLFDNKYYVNLKENKGLIQSDQELFSSPDASDTLPLVREYADGQGKFFDAFAKAMIRMSSLSPLTGKQGEIRLNCRVVNSKSKIMDVVEDALEFASSM

SEQ ID NO: 28183 - protein, 194 aa, Arabidopsis thaliana
  peptide (1)..(194): Ceres Seq. ID no. 12482203
MDLANDNLPAPFFTLNQLKDRFKNVGLDRASDLVALSGGHTFGKNQCQFIMDRLYNFSNTGLPDPTLDKSYLSTLRKQCPRNGNQSVLVDFDLRTPTLFDNKYYVNLKENKGLIQSDQELFSSPDASDTLPLVREYADGQGKFFDAFAKAMIRMSSLSPLTGKQGEIRLNCRVVNSKSKIMDVVEDALEFASSM

SEQ ID NO: 28184 - DNA, 2332 bp, Arabidopsis thaliana
  misc_feature (1)..(2332): Ceres Seq. ID no. 12372009
  misc_feature (1)..(2332): Ortholog of  Ceres SEQ ID NO 13656177 as cited in SEQ ID NO 64997
ctcttttgtcgtctctccctgctttcgcacttcatagcctcaatctctcaacaagcagaagagattcgattctccattatcttccttctaaatgccttccctaatgttatctgataagaaagaggagaagaagatgaagaagaagatggctttggataccccagagcttgattctaagaaggggaagaaggagcagaagctgaaactatctgattcggatgaagaagagtcggagaagaagaagagtaagaagaaggataagaagcgtaaggcttccgaggaggaggatgaagtgaagagcgattcaagctcggagaagaagaagagcagcaagaaggttaagttgggcgttgaggatgttgaagttgataaccctaatgctgtttctaagtttcggatttctgcgccgttgagggagaagcttaaggcgaatggtattgaagctcttttcccgattcaggcttccacgtttgatatggttctcgatggtgctgatttagttggacgggctcgtactggtcagggtaaaacattggcttttgtgttgcctatattggaatctttggttaatggacctgccaaaagcaaaaggaagatgggatatggcaggtcaccaagtgttttggtccttttaccgaccagagaattggccaagcaggtggctgctgactttgatgcatatggaggatcacttgggttaagttcatgttgtctctatggaggtgatagctatccagttcaggagggtaaattaaagagaggtgttgacattgtagttggaacccctggtcgtattaaggatcatattgaaagacaaaaccttgatttcagctatctacaattccgtgttcttgatgaagctgatgaaatgttgaggatgggatttgttgaggatgttgaacttattttagggaaagtggaggattctactaaagtccagactcttctcttcagtgctactttgccatcatgggtgaaaaatatctctaacaggtttcttaaaagagaccagaagactattgatcttgttggtaatgataaaatgaaggccagtaatagtgttcgacacattgctattccttgtaataaggcagccatggctcggttgattcctgatattatcagttgctatagcagtggaggccaaactattattttcgctgagactaaagttcaagtttctgagctttctggtttgttggatggatcaagagccttgcatggtgaaatacctcaatcacaacgtgaggttactcttgctggatttaggaatggcaagtttgcaacattggtggctacaaatgttgctgctcgtggtctagatatcaatgatgtgcagttaattatccagtgtgagcctccacgtgaagttgaagcatatattcatcgttcaggccgaacaggaagagctggcaacacaggagttgcggttacactctacgattctagaaagtcgagtgtatccaggatcgaaaaagaagctggtatcaaatttgagcaccttgctgcacctcaacctgatgaaattgccagatctggtggtatggaagctgctgagaaagttaaacaagtgtgtgacagtgtggttcctgcattccttgaagctgccaaggaattattagaaacttctggtttatcagctgaagtactcctcgcaaaagctcttgcaaaaactgcgggcttcactgagataaagaaaaggtcacttcttacatcaatggagaactatgtgacactacatcttgaagcagggaaaccaatatactcgccatcatttgtttatggactgctaaggagagttttaccggatgacaaggtggaaatgattgaagggttatctctaacagcagataaaacaggagctgtgttcgatgttaagcaatcagatctagacttgttcattgcaggagcacaaaagagtgctggaagtatgagtttggaagtggttaaggtgatgcctaaactccaggagagagaaccattgccacaaaaaagattcggtggtggtggcagaggaaatcggtttggtggtggtggaggaaatcggtttggcggtggtggtggcagaggaagaggaggcagtggtggtagaggccagagatattgaaaactggaacccaacttctcctttctatataaaaagaaactaaactccgtcttataatttcattactatcttcttacgctgatgttttctacactataataggtggcttttctgtgttttcctttttctttccttgaacaaacttatggaggctctcttgtaccctcttatcaattttgtgtaatgttggatgataatgatgattaaattattacttcgtcactc

SEQ ID NO: 28185 - protein, 671 aa, Arabidopsis thaliana; identical to SEQ ID NO: 27774
  peptide (1)..(671): Ceres Seq. ID no. 12372010

SEQ ID NO: 28186 - protein, 667 aa, Arabidopsis thaliana; identical to SEQ ID NO: 27775
  peptide (1)..(667): Ceres Seq. ID no. 12372011

SEQ ID NO: 28187 - protein, 657 aa, Arabidopsis thaliana; identical to SEQ ID NO: 27776
  peptide (1)..(657): Ceres Seq. ID no. 12372012

SEQ ID NO: 28188 - DNA, 1591 bp, Arabidopsis thaliana
  misc_feature (1)..(1591): Ceres Seq. ID no. 12324793
  misc_feature (1)..(1591): Ortholog of  Ceres SEQ ID NO 15177903 as cited in SEQ ID NO 54993
  misc_feature (1)..(1591): Ortholog of  Ceres SEQ ID NO 15177994 as cited in SEQ ID NO 55641
  misc_feature (1)..(1591): Ortholog of  Ceres SEQ ID NO 13595454 as cited in SEQ ID NO 56502
  misc_feature (1)..(1591): Ortholog of  Ceres SEQ ID NO 13589016 as cited in SEQ ID NO 68472
ctttttttgaaattaccaaatctctctccgtttcagcgaatctcttcttcagattttcctcttccactaatcttttgcctgtttaatcggagcttagatatcatcagaaggtttttgttctatcaattctccttcattcgatccatttttacccctttctttggaatctccgattcgaccaagcttcttcgccgtctcatcggagacaaacacatattcacgctaaatcaactaaattaagcttagatagatatatagatatataggtaaaaactcaactacgactactcggagatgttgggtgctggatttcagttgacgagaggcagacacggcgacgatcctttctacacttccgcaaaaactcgcagggccaatcagcgcatcgatcagctccgtagagctcagagcgacgtctctaacgttccatcatcagctccttctccgcataaacaacaactcgagccgtccgatttatcttccagtaatcagatcggtttttagagtcggtcacaccatccgtaccggctcagtttttatccaagacatcgctacgagaaagaagagcagatgatgattataataaacttgtgccttattttgtgcttggtgatatatgggactcatttgcagagtggagtgcttacggcaccggtgtgcctcttgttttgaataacaacaaggatcgtgttatccaatactatgtcccttctttgtcagccattcaaatctatgctcattctcatgccttggattcatctcttaaatctaggcgtcctggtgatagtagcgacagtgatttccgggattcaagtagcgatgttagcagcgatagtgattccgagcgggtttctgctagagtagactgtatctcattgagggatcaacatcaggaagactcttccagtgatgatggcgaacctttaggctctcaaggtcgtttgatgtttgagtatcttgaaagagaccttccatacatccgtgaaccttttgctgataaggtcttggacctcgcagctcagtttcccgagctaatgacgctgagaagctgtgacttacttcggtcaagctggttttctgttgcatggtacccaatttacagaatacccacaggaccgacactgaaggacctggatgcttgtttcttgacgtatcattccctacacacatcttttggaggtgaaggcagtgaacaatcaatgagccttacgcaaccaagggagagcgagaagatgtcattgcctgtgtttgggcttgcttcatacaagttcagaggttcattatggacacccattgggggttcggagcaccagctcgtgaaatctctgttccaagccgctgacaaatggctgcattcttgtcatgtcagccaccctgatttcctcttcttctgccgtcgttgagtagggtatgaagttgtgacgcactttgagagagtttcaaaaagaaactcaaaactgttgatatggagggttgttgtcagattcaggtttaaaaacgagttgatttttatgtttgtaagttatagataaaacgaattttgtttggtcagataatgtatgtgaaccgtgggcttacctcgtgttgttgt

SEQ ID NO: 28189 - protein, 152 aa, Arabidopsis thaliana
  peptide (1)..(152): Ceres Seq. ID no. 12324794
MFEYLERDLPYIREPFADKVLDLAAQFPELMTLRSCDLLRSSWFSVAWYPIYRIPTGPTLKDLDACFLTYHSLHTSFGGEGSEQSMSLTQPRESEKMSLPVFGLASYKFRGSLWTPIGGSEHQLVKSLFQAADKWLHSCHVSHPDFLFFCRR

SEQ ID NO: 28190 - protein, 122 aa, Arabidopsis thaliana
  peptide (1)..(122): Ceres Seq. ID no. 12324795
MTLRSCDLLRSSWFSVAWYPIYRIPTGPTLKDLDACFLTYHSLHTSFGGEGSEQSMSLTQPRESEKMSLPVFGLASYKFRGSLWTPIGGSEHQLVKSLFQAADKWLHSCHVSHPDFLFFCRR

SEQ ID NO: 28191 - protein, 79 aa, Arabidopsis thaliana
  peptide (1)..(79): Ceres Seq. ID no. 12324796
LFLKLPNLSPFQRISSSDFPLPLIFCLFNRSLDIIRRFLFYQFSFIRSIFTPFFGISDSTKLLRRLIGDKHIFTLNQLN

SEQ ID NO: 28192 - DNA, 1108 bp, Arabidopsis thaliana
  misc_feature (1)..(1108): Ceres Seq. ID no. 13486907
  misc_feature (1)..(1108): Ortholog of  Ceres SEQ ID NO 15170617 as cited in SEQ ID NO 52614
agaatttgcaaaatcgaatttgtgtggagaaagaagctcgtcaccaagactgaatttgtggctacgtctaaaacacattcttccacatctcttctctgtttctcaagacaaaaaaagaaaaaatggtggaagatgaacaatgacgaagaatcattgttattgttcatgcattaaccttgttgttatgttcctccatggcctgttacatcgttccttattaccaccatcctgttttgtctcatcccaatagagaaatcttcagtcaccgtcaccaccaccaccaccgtttctgcaacaatctcttgaatagaagaattagtgttcctcgaagctccgctattagtgacggtggtgtctcctacaatactctagtctccgaggcggtgaggcttttggttccacaagcaaactttgattcttcaaagcttaaagttgagttcttaggagagttattggagaacaagagtaacggaggaattattacgccgcggacttatattctttcgcattgtgacttcactgctaacttaacgttaacaatctcaaacgttatcaatctggatcaactagaaggctggtacaagaaagatgatgtggttgctgagtggaagaaggtgaatgatgagctgcgtttacatattcattgttgtgtgagtggtatgagtttattgcaggatgttgctgctgagcttaggtatcatattttctccaaggaattgcctttggtacttaaagctgtggtgcatggagattcagttatgtttagagagaatcctgagctaatggatgcttatgtatgggtttatttccattcaagcacacctaagtacaatcggatcgagtgttggggacctcttaaggatgctgcgaagggaaagcagcagggcaatcatcaaggcttcttgagttcgacgacttcgaggaaattgattcgacataagtctatcttccataccttatttacgtttcttctgtgagacaaagttgtacattctcctgtgtttttttttgcaaatgatgtagatttcttaatgagcatctgacacaagtgcaatttgccaacattcaaatgttcatacttgggaaatttatgagagcctagttttct

SEQ ID NO: 28193 - protein, 260 aa, Arabidopsis thaliana
  peptide (1)..(260): Ceres Seq. ID no. 13486908
MACYIVPYYHHPVLSHPNREIFSHRHHHHHRFCNNLLNRRISVPRSSAISDGGVSYNTLVSEAVRLLVPQANFDSSKLKVEFLGELLENKSNGGIITPRTYILSHCDFTANLTLTISNVINLDQLEGWYKKDDVVAEWKKVNDELRLHIHCCVSGMSLLQDVAAELRYHIFSKELPLVLKAVVHGDSVMFRENPELMDAYVWVYFHSSTPKYNRIECWGPLKDAAKGKQQGNHQGFLSSTTSRKLIRHKSIFHTLFTFLL

SEQ ID NO: 28194 - DNA, 1873 bp, Arabidopsis thaliana
  misc_feature (1)..(1873): Ceres Seq. ID no. 12680413
  misc_feature (1)..(1873): Ortholog of  Ceres SEQ ID NO 13599324 as cited in SEQ ID NO 0
aacaaaaatcctcatttctctgagaatctggtgctttagctttggtaaaatgaagatatactctagaacggttgctgtttcactcattgtgtcattcctcctgtgtttctctgcctttgctgagcgcaatgacgggaccttcagagttggactgaaaaaactcaagttggattcgaaaaatcggcttgcagcacgcgtcgaatccaagcaagaaaagcccctgagagcttacagacttggagattctggagatgctgatgttgttgtgcttaagaattatctagatgctcagtactatggtgagatcgccattggtactccacctcagaagttcactgtggtttttgacactgggagctctaacctctgggtgccatcatcaaaatgctatttctcacttgcatgtctcttgcatcccaaatacaagtcgtctcgttcaagcacatatgagaagaatggaaaagctgccgcaattcattacggcactggagcaattgctggtttttttagtaatgatgctgtcacagttggcgatttagttgtcaaggatcaggagtttatcgaggcaaccaaggagcctggtataacatttgttgtagctaaatttgatggtatccttggtcttggattccaagagatctctgttggaaaagctgctcctgtttggtacaacatgctcaagcaaggccttatcaaggagccggttttttcattttggcttaaccgtaatgcagatgaagaagaaggtggtgaacttgtatttggaggtgttgatccaaatcatttcaagggcaaacatacatatgttcctgtgacacaaaagggctactggcagtttgacatgggtgatgttcttattggcggtgcacccactgggttctgtgaaagtggctgttctgcgatagcagattctggtacatctttgcttgccggtccaacgactataatcaccatgataaaccatgctattggagcagctggagttgttagccagcagtgcaagactgttgtggatcaatacgggcagaccattttggatttacttttgtctgagacccaaccgaagaaaatctgctcgcagattggtctgtgtacttttgatggtacccgtggtgtcagtatgggcattgagtcggtggtggacaaggaaaacgccaaattgtctaatggtgttggagatgctgcgtgttctgcatgtgagatggctgttgtgtggatccagagccagttgaggcaaaacatgactcaagagcgcatattgaactacgtcaacgagctatgtgaacgcctccccagcccaatgggagagtctgcagttgactgtgcacaactgtcaacaatgcccactgtttcacttaccattggaggcaaagtatttgatcttgctccagaagagtatgttctgaaagttggtgagggacctgtggcacagtgcatcagtggttttattgctcttgacgttgctccacctcgtggacctctctggatcttgggagatgtgttcatgggcaaataccacaccgtatttgactttggtaacgaacaggtcgggtttgcagaggcagcctaaacacgatcgggttggtgtcgcgtatggttttagtatgaacaatctgcgtctcaagtgttgtttgtatgttttctggagttgaggactttgagtcgtagtagaaatggtggcgcagttccttttaagttgtttcctaacgaaaaaaggcctttgtagttttgaaggcattggctttgtaaataccttctaagtaagttcgatggtgaaaaaactgaaaactttaataaagcctgcctcttttgtttatgcttagtaagttgtatcaaatggttcggtaaaaacggtgtagcataaaaaatttga

SEQ ID NO: 28195 - protein, 522 aa, Arabidopsis thaliana
  peptide (1)..(522): Ceres Seq. ID no. 12680414
TKILISLRIWCFSFGKMKIYSRTVAVSLIVSFLLCFSAFAERNDGTFRVGLKKLKLDSKNRLAARVESKQEKPLRAYRLGDSGDADVVVLKNYLDAQYYGEIAIGTPPQKFTVVFDTGSSNLWVPSSKCYFSLACLLHPKYKSSRSSTYEKNGKAAAIHYGTGAIAGFFSNDAVTVGDLVVKDQEFIEATKEPGITFVVAKFDGILGLGFQEISVGKAAPVWYNMLKQGLIKEPVFSFWLNRNADEEEGGELVFGGVDPNHFKGKHTYVPVTQKGYWQFDMGDVLIGGAPTGFCESGCSAIADSGTSLLAGPTTIITMINHAIGAAGVVSQQCKTVVDQYGQTILDLLLSETQPKKICSQIGLCTFDGTRGVSMGIESVVDKENAKLSNGVGDAACSACEMAVVWIQSQLRQNMTQERILNYVNELCERLPSPMGESAVDCAQLSTMPTVSLTIGGKVFDLAPEEYVLKVGEGPVAQCISGFIALDVAPPRGPLWILGDVFMGKYHTVFDFGNEQVGFAEAA

SEQ ID NO: 28196 - protein, 506 aa, Arabidopsis thaliana
  peptide (1)..(506): Ceres Seq. ID no. 12680415
MKIYSRTVAVSLIVSFLLCFSAFAERNDGTFRVGLKKLKLDSKNRLAARVESKQEKPLRAYRLGDSGDADVVVLKNYLDAQYYGEIAIGTPPQKFTVVFDTGSSNLWVPSSKCYFSLACLLHPKYKSSRSSTYEKNGKAAAIHYGTGAIAGFFSNDAVTVGDLVVKDQEFIEATKEPGITFVVAKFDGILGLGFQEISVGKAAPVWYNMLKQGLIKEPVFSFWLNRNADEEEGGELVFGGVDPNHFKGKHTYVPVTQKGYWQFDMGDVLIGGAPTGFCESGCSAIADSGTSLLAGPTTIITMINHAIGAAGVVSQQCKTVVDQYGQTILDLLLSETQPKKICSQIGLCTFDGTRGVSMGIESVVDKENAKLSNGVGDAACSACEMAVVWIQSQLRQNMTQERILNYVNELCERLPSPMGESAVDCAQLSTMPTVSLTIGGKVFDLAPEEYVLKVGEGPVAQCISGFIALDVAPPRGPLWILGDVFMGKYHTVFDFGNEQVGFAEAA

SEQ ID NO: 28197 - protein, 298 aa, Arabidopsis thaliana
  peptide (1)..(298): Ceres Seq. ID no. 12680416
MLKQGLIKEPVFSFWLNRNADEEEGGELVFGGVDPNHFKGKHTYVPVTQKGYWQFDMGDVLIGGAPTGFCESGCSAIADSGTSLLAGPTTIITMINHAIGAAGVVSQQCKTVVDQYGQTILDLLLSETQPKKICSQIGLCTFDGTRGVSMGIESVVDKENAKLSNGVGDAACSACEMAVVWIQSQLRQNMTQERILNYVNELCERLPSPMGESAVDCAQLSTMPTVSLTIGGKVFDLAPEEYVLKVGEGPVAQCISGFIALDVAPPRGPLWILGDVFMGKYHTVFDFGNEQVGFAEAA

SEQ ID NO: 28198 - DNA, 1114 bp, Arabidopsis thaliana
  misc_feature (1)..(1114): Ceres Seq. ID no. 12324072
  misc_feature (1)..(1114): Ortholog of  Ceres SEQ ID NO 13594794 as cited in SEQ ID NO 51761
aaaaaaaagtccaccactagctcgaactctctcctctcttaaacttatagacaagaatcaatcagtcacacgtctataccacgatttgctcacaaaatctttggcttccaccaaagattataagcagagatcattcacttactcgtatcaatagatcaaatcttcatcacaatagaagaaatggttttagagacggtttcaaagacggaaccaccaccgttgcttggacctcgtatctccttctcatctgatttatctgacggtggagatttcatctgcatcacccccgtaatgtgtaaggaagatgtcgtcaaagggtcagtgaaagtctccgactttgagttcttgtcgtcagaaaatgtgagtccacagagaatgcttaccgccgatgaactcttctccgaaggtaagttgcttcctttttggcaagtaaagcactcagagaagcttaaaaacattactttgaagacgaacgaagaggaagaagcagagaaacgtaaagtggaagtgaagaagaaagatcaggagattaacaatagagataacagagtgacttggtttatagacgaagatccgtctcctcgtcctcccaagtgtaccgttctttggaaagagcttttgagattgaagaaacagaggaatccgtcttcttcgccggtgacggcgaggacagtgtcgtctttgtctccgtcgtcgtccacgtcatcatcaagttcacttgaggacgcagcgaagagagaggagaaagagaaagaagggaagagaggtaagaaaggattagagagaacgagatcggcgagtatgaggataaggccaatgattcatgttcctatttgcactccttctaaatcctctcttcctttgcctcctctgtttcctctttcgcttaagaaaaacagagtagagagacgcgcctagaagatttgatctatctttggattgaaaaaaacaattattggttgaatttgttcagattctcaagtgttaactcatgtggtctaatgcatgtggttaagtgatgtttttcagatgtattatgtgtatgctttatggcttgagatttaatgtgtgacagtgttaagaaattctagtaagaaccgttcctctgttcttc

SEQ ID NO: 28199 - protein, 245 aa, Arabidopsis thaliana
  peptide (1)..(245): Ceres Seq. ID no. 12324073
MVLETVSKTEPPPLLGPRISFSSDLSDGGDFICITPVMCKEDVVKGSVKVSDFEFLSSENVSPQRMLTADELFSEGKLLPFWQVKHSEKLKNITLKTNEEEEAEKRKVEVKKKDQEINNRDNRVTWFIDEDPSPRPPKCTVLWKELLRLKKQRNPSSSPVTARTVSSLSPSSSTSSSSSLEDAAKREEKEKEGKRGKKGLERTRSASMRIRPMIHVPICTPSKSSLPLPPLFPLSLKKNRVERRA

SEQ ID NO: 28200 - protein, 208 aa, Arabidopsis thaliana
  peptide (1)..(208): Ceres Seq. ID no. 12324074
MCKEDVVKGSVKVSDFEFLSSENVSPQRMLTADELFSEGKLLPFWQVKHSEKLKNITLKTNEEEEAEKRKVEVKKKDQEINNRDNRVTWFIDEDPSPRPPKCTVLWKELLRLKKQRNPSSSPVTARTVSSLSPSSSTSSSSSLEDAAKREEKEKEGKRGKKGLERTRSASMRIRPMIHVPICTPSKSSLPLPPLFPLSLKKNRVERRA

SEQ ID NO: 28201 - protein, 180 aa, Arabidopsis thaliana
  peptide (1)..(180): Ceres Seq. ID no. 12324075
MLTADELFSEGKLLPFWQVKHSEKLKNITLKTNEEEEAEKRKVEVKKKDQEINNRDNRVTWFIDEDPSPRPPKCTVLWKELLRLKKQRNPSSSPVTARTVSSLSPSSSTSSSSSLEDAAKREEKEKEGKRGKKGLERTRSASMRIRPMIHVPICTPSKSSLPLPPLFPLSLKKNRVERRA

SEQ ID NO: 28202 - DNA, 1641 bp, Arabidopsis thaliana
  misc_feature (1)..(1641): Ceres Seq. ID no. 13490319
  misc_feature (1)..(1641): Ortholog of  Ceres SEQ ID NO 13596816 as cited in SEQ ID NO 62287
tgattcgtcgtaataataaaaacacaactcaaacgattcacgggtttcacttggaatcgtttggttttctcatttccgaaatataaaaagatggccaaagcgccaccgtcaatctctcttctcctcctcctctgcgccgccgtattcctcaccatccccgccgtgatctccgccatcggtgttaactacggaactctcggaaacctcccaccaccgactcaggtggctaactttatcaagacacaaacttcgattgatagcgtcaagatcttcgatgtgaatcccgatatcctacgtgccttcgctggaactggtatctccgtcgttgtcaccgttcctaacggtgatattccggcgttggctaacggaagacaagctcgtcggtgggtttcggttaacattttgccgtttcatcctcagacgaagattaagtatatctcagtcggaaatgagattctgctcaccggagataataacatgatcaataatctcttaccggcgatgaggaatcttaacaacgctttggttcgtgctggtgtcagagatgttaaggttacaaccgcacactcacttaacatcatagcctatgacctgaccggtgcaccaagcagcggtagattcaggccgggttgggacaaaggcatattggctccaatcctagcttaccatcgccgaaccaagtcacctttcatggttaacccgtacccttactttggttttgaccccaaaaacgtcaacttcgcaattttccgaacaccgtacaaggcagtccgtgacccgttcacccgccacgtctacaccaacatgtttgatgcactcatggactcgacatactcagccatgaaagctcttggatacggtgatgttaacattgtcgttggcgagactggctggccatctgcttgtgacgcaccttggtgctcgcctgcgaatgctgcttggttcaacctcaacattatcaaacgtgcacaaggccaagggacacctctcatgcctaacagacggttcgagacatacattttcggtctcttcaacgaagaaggcaaacccggtccgaccgcagagcgtaactggggacttttccgagcagatttctccccggtttacgatgttggtcttctccgaaacggacaaggcggtggaggccgcccagcattgcccgcacctagtactgccggcggtaaatggtgtgtagcgaggtccggggcgacgaatactcagctgcaagacagtattaattgggtgtgtggtcagggtgttgactgtaaaccgatccaagctggtggttcgtgctttaacccgagcagtttgaggacgcacgcatcttttgttatgaatgcttatttccagagccacggccgcactgatggtgcttgtaacttcagtggaactggtatgatcgtagggaacaacccaagcaatggtgcatgtaagtactaaggagattgtctatgtagtagtatttgtctgaaaaatcctaacataatggttctgaggaactttggatttgagagatcatcagctttgtgtttaatttcggattatcctaattttaagatttttttgttaattattttttcgctgattccttttatttaaataaagtggaacttccataaaatttgcttcagcgttacgctt

SEQ ID NO: 28203 - protein, 449 aa, Arabidopsis thaliana
  peptide (1)..(449): Ceres Seq. ID no. 13490320
MAKAPPSISLLLLLCAAVFLTIPAVISAIGVNYGTLGNLPPPTQVANFIKTQTSIDSVKIFDVNPDILRAFAGTGISVVVTVPNGDIPALANGRQARRWVSVNILPFHPQTKIKYISVGNEILLTGDNNMINNLLPAMRNLNNALVRAGVRDVKVTTAHSLNIIAYDLTGAPSSGRFRPGWDKGILAPILAYHRRTKSPFMVNPYPYFGFDPKNVNFAIFRTPYKAVRDPFTRHVYTNMFDALMDSTYSAMKALGYGDVNIVVGETGWPSACDAPWCSPANAAWFNLNIIKRAQGQGTPLMPNRRFETYIFGLFNEEGKPGPTAERNWGLFRADFSPVYDVGLLRNGQGGGGRPALPAPSTAGGKWCVARSGATNTQLQDSINWVCGQGVDCKPIQAGGSCFNPSSLRTHASFVMNAYFQSHGRTDGACNFSGTGMIVGNNPSNGACKY

SEQ ID NO: 28204 - protein, 320 aa, Arabidopsis thaliana
  peptide (1)..(320): Ceres Seq. ID no. 13490321
MINNLLPAMRNLNNALVRAGVRDVKVTTAHSLNIIAYDLTGAPSSGRFRPGWDKGILAPILAYHRRTKSPFMVNPYPYFGFDPKNVNFAIFRTPYKAVRDPFTRHVYTNMFDALMDSTYSAMKALGYGDVNIVVGETGWPSACDAPWCSPANAAWFNLNIIKRAQGQGTPLMPNRRFETYIFGLFNEEGKPGPTAERNWGLFRADFSPVYDVGLLRNGQGGGGRPALPAPSTAGGKWCVARSGATNTQLQDSINWVCGQGVDCKPIQAGGSCFNPSSLRTHASFVMNAYFQSHGRTDGACNFSGTGMIVGNNPSNGACKY

SEQ ID NO: 28205 - protein, 312 aa, Arabidopsis thaliana
  peptide (1)..(312): Ceres Seq. ID no. 13490322
MRNLNNALVRAGVRDVKVTTAHSLNIIAYDLTGAPSSGRFRPGWDKGILAPILAYHRRTKSPFMVNPYPYFGFDPKNVNFAIFRTPYKAVRDPFTRHVYTNMFDALMDSTYSAMKALGYGDVNIVVGETGWPSACDAPWCSPANAAWFNLNIIKRAQGQGTPLMPNRRFETYIFGLFNEEGKPGPTAERNWGLFRADFSPVYDVGLLRNGQGGGGRPALPAPSTAGGKWCVARSGATNTQLQDSINWVCGQGVDCKPIQAGGSCFNPSSLRTHASFVMNAYFQSHGRTDGACNFSGTGMIVGNNPSNGACKY

SEQ ID NO: 28206 - DNA, 1786 bp, Arabidopsis thaliana
  misc_feature (1)..(1786): Ceres Seq. ID no. 13487784
  misc_feature (1)..(1786): Ortholog of  Ceres SEQ ID NO 13594536 as cited in SEQ ID NO 51382
aaaggtcatatgcttttctccagttcctctctctgtctatctctctcctccttcaataatttctgcaaaccctaactttctcattcggcgctcaagtttctctccacctcttcgagatttggtgcgatgatgttgcgtgctgtttttaggagagcttccattagaggctcttcttctgcttcgggattgggaaaatcattgcaatcctctcgtcttgttgcgtcttcccaatttcattctgtttcagcaacagagacgttggtgccgcgtggaaaccatgctcatagcttccatcaccgttcttgtccagggtgtccagactgttcaaggactgttatcaacggtttccaaggcacagccctgcaaagatgggtcaggcctttttcatctgatagtggggatgtcgtggaagctgttgtgccacacatgggtgaatcaatcactgatggcaccctagccgcctttctgaagaaacctggcgatagagtagaagctgatgaggctattgcacaaattgaaactgacaaggttacaatagatattgctagcccagcaagtggtgtgatccaagagtttctagtcaaggaaggagatactgttgaaccaggaaacaaggttgcaagaatttctacatctgcggatgctgtgtctcatgtggcaccctcagaaaaggcaccagagaaacctgctcccaagccttctcctcctgctgagaagcccaaagttgaaagtaccaaagttgcagagaaacccaaggcaccatcaccgccaccgccatccaaacagtcagctaaagaaccgcagcttccacctaaggatagggaaagacgggttcctatgacaagacttcgcaaacgggtggcaactaggttgaaagactctcaaaacacttttgcgttgctgacaactttcaatgaagttgatatgactaatctgatgaagctccgatctcagtacaaagatgcttttcttgaaaagcacggagtgaagttggggcttatgtctggtttcattaaggctgctgttagtgccctccagcaccaacctgtagtaaatgcagttatcgatggagatgatatcatttacagagactacgtggatatcagtatcgctgttggtacctccaagggtcttgtggttccagtcataagagatgctgacaaaatgaactttgctgacatagagaaaacaataaacggtcttgctaagaaggctactgaaggaaccatatcaatcgatgagatggcaggaggatcattcacagtatcaaatggtggtgtctatggaagtcttataagcactcctatcatcaaccctcctcagtctgctattcttggaatgcattcaattgtgcaacgtccaatggttgtgggaggaagcgtagttccgaggccaatgatgtatgtcgcgctgacttacgatcataggctaattgatggaagagaggctgtgtatttcttgcgccgtattaaggatgttgtggaagatcctcagaggcttcttctcgacatatgataaagatccacgacagaagagatcataagtttctgtctgtttaccagtttcctttcaggtaaaaccattacggatactgcaatctgcaaatgatgctttgaaaaaagaacgaaacttttttttggagtttcttaatagttttaagagtttttgccgggcgaggaaagcatcggtgtattgagttttcttttattttataatattcatacagtttgaacaaaatgttacaattttgactttcaaaaaataatgccactgataattattggtt

SEQ ID NO: 28207 - protein, 462 aa, Arabidopsis thaliana
  peptide (1)..(462): Ceres Seq. ID no. 15220490
MMLRAVFRRASIRGSSSASGLGKSLQSSRLVASSQFHSVSATETLVPRGNHAHSFHHRSCPGCPDCSRTVINGFQGTALQRWVRPFSSDSGDVVEAVVPHMGESITDGTLAAFLKKPGDRVEADEAIAQIETDKVTIDIASPASGVIQEFLVKEGDTVEPGNKVARISTSADAVSHVAPSEKAPEKPAPKPSPPAEKPKVESTKVAEKPKAPSPPPPSKQSAKEPQLPPKDRERRVPMTRLRKRVATRLKDSQNTFALLTTFNEVDMTNLMKLRSQYKDAFLEKHGVKLGLMSGFIKAAVSALQHQPVVNAVIDGDDIIYRDYVDISIAVGTSKGLVVPVIRDADKMNFADIEKTINGLAKKATEGTISIDEMAGGSFTVSNGGVYGSLISTPIINPPQSAILGMHSIVQRPMVVGGSVVPRPMMYVALTYDHRLIDGREAVYFLRRIKDVVEDPQRLLLDI

SEQ ID NO: 28208 - protein, 461 aa, Arabidopsis thaliana
  peptide (1)..(461): Ceres Seq. ID no. 15220491
MLRAVFRRASIRGSSSASGLGKSLQSSRLVASSQFHSVSATETLVPRGNHAHSFHHRSCPGCPDCSRTVINGFQGTALQRWVRPFSSDSGDVVEAVVPHMGESITDGTLAAFLKKPGDRVEADEAIAQIETDKVTIDIASPASGVIQEFLVKEGDTVEPGNKVARISTSADAVSHVAPSEKAPEKPAPKPSPPAEKPKVESTKVAEKPKAPSPPPPSKQSAKEPQLPPKDRERRVPMTRLRKRVATRLKDSQNTFALLTTFNEVDMTNLMKLRSQYKDAFLEKHGVKLGLMSGFIKAAVSALQHQPVVNAVIDGDDIIYRDYVDISIAVGTSKGLVVPVIRDADKMNFADIEKTINGLAKKATEGTISIDEMAGGSFTVSNGGVYGSLISTPIINPPQSAILGMHSIVQRPMVVGGSVVPRPMMYVALTYDHRLIDGREAVYFLRRIKDVVEDPQRLLLDI

SEQ ID NO: 28209 - protein, 362 aa, Arabidopsis thaliana
  peptide (1)..(362): Ceres Seq. ID no. 15220492
MGESITDGTLAAFLKKPGDRVEADEAIAQIETDKVTIDIASPASGVIQEFLVKEGDTVEPGNKVARISTSADAVSHVAPSEKAPEKPAPKPSPPAEKPKVESTKVAEKPKAPSPPPPSKQSAKEPQLPPKDRERRVPMTRLRKRVATRLKDSQNTFALLTTFNEVDMTNLMKLRSQYKDAFLEKHGVKLGLMSGFIKAAVSALQHQPVVNAVIDGDDIIYRDYVDISIAVGTSKGLVVPVIRDADKMNFADIEKTINGLAKKATEGTISIDEMAGGSFTVSNGGVYGSLISTPIINPPQSAILGMHSIVQRPMVVGGSVVPRPMMYVALTYDHRLIDGREAVYFLRRIKDVVEDPQRLLLDI

SEQ ID NO: 28210 - DNA, 1470 bp, Arabidopsis thaliana
  misc_feature (1)..(1470): Ceres Seq. ID no. 12326409
  misc_feature (1)..(1470): Ortholog of  Ceres SEQ ID NO 13662245 as cited in SEQ ID NO 62708
acaaacactagaaaccacaaagacaaaatcaaggtcttaaacaatgagatcccatctcttgattttgttaatctctctcttaatcttgaaatctgaatccataaactgcaatgaaaagagccattcctcagatctaagagtgttccacattaacagtctatgttctccattcaaaacttctgtttcatgggcagatacacttcttcaagataaggctcgtttcctatacttgtcaagcctcgctggcgttaggaaatcatcagttccaatcgcctctggtcgggccatcgttcagagcccgacttacatcgtgagggctaacatcgggacaccggctcagcccatgctcgtggctcttgacactagcaatgacgctgcttggattccttgttctggctgcgttggctgttcttcctctgttctctttgacccttccaagtcaagctcctctcgtactcttcaatgcgaagctcctcagtgtaaacaggctccaaatccaagttgcacagtaagcaaatcatgtggtttcaacatgacctacggtggttcaaccatcgaagcatatctgacacaagacacactaacattggccagtgacgtcatcccaaactacacctttgggtgcatcaacaaagctagtggaacatcgttgccagcgcaaggactcatgggcttaggtcgtggtccattgtctttaatctcacagtcacaaaatctttatcagtctacattctcgtattgcttgcctaatagtaagtccagcaatttctccggatcactaagattgggacctaagaaccaaccgatccggatcaagaccactccattgttaaagaaccctagaagatcatcgctttactatgttaacttggttgggattcgtgtcggaaacaaaattgtggatattcctacaagtgcactcgcctttgatccggccaccggagccggcaccatctttgactcggggacggtctacacaaggctagtcgaaccagcttacgtggcggtgagaaacgagttcaggagacgtgttaagaacgcaaacgcaacttcactaggaggtttcgacacatgctactccggctccgtcgtgttcccgtcggtgacgtttatgttcgccggaatgaacgtgactctgcctccagacaaccttctcatccacagctccgcaggtaacctcagctgcctcgccatggctgcagctccggtcaacgttaactctgtccttaacgtcatcgctagtatgcagcaacagaaccaccgagttctcatcgacgttccaaattccaggctcggaatttcccgtgaaacttgcacctaagttttatcgatttgtatttttgttttcggtcgatttcgtaatgcgttttgaacttttgaattttggaaactatataagttaatgatttttgttaattctcaaacgattgtaaaatctttcgtatgattttctttcgatgttctctgttc

SEQ ID NO: 28211 - protein, 425 aa, Arabidopsis thaliana
  peptide (1)..(425): Ceres Seq. ID no. 12326410
MRSHLLILLISLLILKSESINCNEKSHSSDLRVFHINSLCSPFKTSVSWADTLLQDKARFLYLSSLAGVRKSSVPIASGRAIVQSPTYIVRANIGTPAQPMLVALDTSNDAAWIPCSGCVGCSSSVLFDPSKSSSSRTLQCEAPQCKQAPNPSCTVSKSCGFNMTYGGSTIEAYLTQDTLTLASDVIPNYTFGCINKASGTSLPAQGLMGLGRGPLSLISQSQNLYQSTFSYCLPNSKSSNFSGSLRLGPKNQPIRIKTTPLLKNPRRSSLYYVNLVGIRVGNKIVDIPTSALAFDPATGAGTIFDSGTVYTRLVEPAYVAVRNEFRRRVKNANATSLGGFDTCYSGSVVFPSVTFMFAGMNVTLPPDNLLIHSSAGNLSCLAMAAAPVNVNSVLNVIASMQQQNHRVLIDVPNSRLGISRETCT

SEQ ID NO: 28212 - protein, 325 aa, Arabidopsis thaliana
  peptide (1)..(325): Ceres Seq. ID no. 12326411
MLVALDTSNDAAWIPCSGCVGCSSSVLFDPSKSSSSRTLQCEAPQCKQAPNPSCTVSKSCGFNMTYGGSTIEAYLTQDTLTLASDVIPNYTFGCINKASGTSLPAQGLMGLGRGPLSLISQSQNLYQSTFSYCLPNSKSSNFSGSLRLGPKNQPIRIKTTPLLKNPRRSSLYYVNLVGIRVGNKIVDIPTSALAFDPATGAGTIFDSGTVYTRLVEPAYVAVRNEFRRRVKNANATSLGGFDTCYSGSVVFPSVTFMFAGMNVTLPPDNLLIHSSAGNLSCLAMAAAPVNVNSVLNVIASMQQQNHRVLIDVPNSRLGISRETCT

SEQ ID NO: 28213 - protein, 262 aa, Arabidopsis thaliana
  peptide (1)..(262): Ceres Seq. ID no. 12326412
MTYGGSTIEAYLTQDTLTLASDVIPNYTFGCINKASGTSLPAQGLMGLGRGPLSLISQSQNLYQSTFSYCLPNSKSSNFSGSLRLGPKNQPIRIKTTPLLKNPRRSSLYYVNLVGIRVGNKIVDIPTSALAFDPATGAGTIFDSGTVYTRLVEPAYVAVRNEFRRRVKNANATSLGGFDTCYSGSVVFPSVTFMFAGMNVTLPPDNLLIHSSAGNLSCLAMAAAPVNVNSVLNVIASMQQQNHRVLIDVPNSRLGISRETCT

SEQ ID NO: 28214 - DNA, 1358 bp, Arabidopsis thaliana
  misc_feature (1)..(1358): Ceres Seq. ID no. 12482532
  misc_feature (1)..(1358): Ortholog of  Ceres SEQ ID NO 14308598 as cited in SEQ ID NO 60416
  misc_feature (1)..(1358): Ortholog of  Ceres SEQ ID NO 13502952 as cited in SEQ ID NO 62271
  misc_feature (1)..(1358): Ortholog of  Ceres SEQ ID NO 13502973 as cited in SEQ ID NO 68052
  misc_feature (1)..(1358): Ortholog of  Ceres SEQ ID NO 13596000 as cited in SEQ ID NO 68188
acaatctatcgagctaaaacactgaagcagacattagcgttgagaaaaaaaaaaaaagtaagaacgagagagagaaagccatgtctgcgaaaacaatcctatcatcagtagttttggtggttctcgtcgccgcatcagcagcggctaatatcggattcgatgagtcaaacccgatccgaatggtctccgatggtctccgggaggtagaagaatctgtttcccagatcttaggtcaatctcgtcacgttctctctttcgctcgcttcactcaccgatatggtaaaaagtatcagaacgtggaggagatgaagcttcgattctcgattttcaaggagaatcttgatttgatcagatccaccaacaagaaaggcttatcttacaaactcggtgttaatcaatttgctgatttgacatggcaagagtttcaaaggaccaagcttggtgctgctcagaactgctctgccactttaaagggcagccacaaggtcacagaagcagctcttcctgaaacaaaagactggagagaagatggtatcgttagtccggtcaaagatcagggaggttgtggatcttgctggacattcagcacaactggagctcttgaggcagcttaccatcaggcatttggaaaaggaatatctctctctgagcaacagcttgtggattgtgctggagctttcaataactatggttgcaatggtggccttccttctcaagcctttgaatacataaaatccaacggtggcctcgacacagagaaagcttatccttataccggtaaagatgaaacctgcaaattttcagctgaaaacgttggtgtacaagtcctcaactcagtcaacattactctgggtgctgaagatgaactgaagcatgcggttggattggtacggccagtaagcatagcatttgaggttatacactcgttccggctttacaagagtggagtttacactgatagtcactgtggaagtactccaatggatgtgaaccacgcggttttggccgttggttatggagttgaagacggtgtaccatattggcttattaagaactcatggggagcggattggggcgacaaaggttacttcaagatggagatggggaagaacatgtgtggtattgctacatgtgcatcataccccgttgtggcttgagatgatcagcgaatgtggttggtcaattatcaaattacgaaatgttcacgtatttattggattaagacattacgtaaaagttgggacttgggaatgcatatggtttatgcttgttgtaacataaaaaggtctgttaatatgtacaaaataaagccaaaactatagacgacaaatttataatattttcatgttaaatcaaat

SEQ ID NO: 28215 - protein, 358 aa, Arabidopsis thaliana; identical to SEQ ID NO: 21554
  peptide (1)..(358): Ceres Seq. ID no. 12482533

SEQ ID NO: 28216 - protein, 325 aa, Arabidopsis thaliana; identical to SEQ ID NO: 21555
  peptide (1)..(325): Ceres Seq. ID no. 12482534

SEQ ID NO: 28217 - protein, 283 aa, Arabidopsis thaliana; identical to SEQ ID NO: 21556
  peptide (1)..(283): Ceres Seq. ID no. 12482535

SEQ ID NO: 28218 - DNA, 1371 bp, Arabidopsis thaliana
  misc_feature (1)..(1371): Ceres Seq. ID no. 12333807
  misc_feature (1)..(1371): Ortholog of  Ceres SEQ ID NO 14314869 as cited in SEQ ID NO 58320
atccggatcattaccagacccgtcggtgagatagcgggtttgaaatacacggtattcggtttacgaatctcaggaggaggaagagaaaataaaaatgagttttttaatttcgctctcttcttagatcccgtttgttctctttctcactttggctgtttaagcaaaaaccatggcttctcgctgtgagctacttctgatctgcgtcttctctctcttaattgcttttgctcactccaagacattgaagcgagatgtgaaagctttgaatgaaatcaaagcctctttgggatggagagtggtgtattcatgggttggtgacgatccttgtggagatggagaccttccaccttggtctggtgtcacgtgttctacacaaggagactatagagttgtcacagaattagaagtttatgcggtttcgattgttggacctttccccattgcagtaacaaaccttctggatttgactagactggatctacataacaacaagttgactggtccaatccctccacaaattggacgactgaaacggctgaaagtactaaacctgaggtggaataaactacaagatgtgatccctcccgagattggggagctgaagagactaacccatttgtacttgagcttcaatagcttcaagggagaaattcccaaggaactagctgctcttcccgagcttcggtatctataccttcaagaaaaccgtctcattggtagaattcctgccgaactggggactctgcaaaaccttcgccacctagatgttggtaacaaccatttggtgggaactatacgggagctcatccgttttgatggaagtttcccagctcttcgcaacttgtacttgaataataactatttgagtggagggattcctgctcagctgtcaaatcttacaaacttagagattgtttacctgtcttacaacaaatttattggaaacattccttttgccattgctcatattcctaaactgacatacctgtaccttgatcacaaccaatttaccgggagaatcccagacgcattctacaagcatccattcctcaaagaaatgtacattgaaggcaacatgttcaagtcaggcgtgaacccaattggtacccacaaagttttagaagtttctgatgccgattttgccgtgtgaccggatagaagattccaggaaggttctcgagaaaacgtctcagaaccacctagagattgttccactttagccctcttcactattattattttttgtatggtctgtggatttgcaaatgaaagaaagcataagactacaagtttttatcttcatattgtatagttagacacattccactaatctatatttctccttaatcaaatgattatatatatttagat

SEQ ID NO: 28219 - protein, 326 aa, Arabidopsis thaliana
  peptide (1)..(326): Ceres Seq. ID no. 12333808
MASRCELLLICVFSLLIAFAHSKTLKRDVKALNEIKASLGWRVVYSWVGDDPCGDGDLPPWSGVTCSTQGDYRVVTELEVYAVSIVGPFPIAVTNLLDLTRLDLHNNKLTGPIPPQIGRLKRLKVLNLRWNKLQDVIPPEIGELKRLTHLYLSFNSFKGEIPKELAALPELRYLYLQENRLIGRIPAELGTLQNLRHLDVGNNHLVGTIRELIRFDGSFPALRNLYLNNNYLSGGIPAQLSNLTNLEIVYLSYNKFIGNIPFAIAHIPKLTYLYLDHNQFTGRIPDAFYKHPFLKEMYIEGNMFKSGVNPIGTHKVLEVSDADFAV

SEQ ID NO: 28220 - DNA, 498 bp, Arabidopsis thaliana
  misc_feature (1)..(498): Ceres Seq. ID no. 12333353
  misc_feature (1)..(498): Ortholog of  Ceres SEQ ID NO 13586586 as cited in SEQ ID NO 0
atgaagaattgaatctgtagtcgaaagaaaagagttgggaaaaaaatggacgcaagcatgatggctggacttgatggtcttcctgaagaagacaaagccaaaatggcctccatgatcgatcagcttcagctccgtgatagtttgaggatgtacaattcattggtggagaggtgtttcgtggactgtgttgatagcttcacacgcaaatctctgcagaaacaagaggagacttgtgtgatgcgttgcgctgagaagttccttaagcatacgatgcgtgttggtatgcggtttgctgagctcaatcagaacgcaccaacccaagactgatatagtctgctttttctgtttggttttttcgtacggtttacgagtccgaaaccagaataaaccggttgttagttgttcaggttactactccgatactgttttttgaacatcttgtactgtgaaattattttgactgtatccagttctgatattgatattgacttgtattcc

SEQ ID NO: 28221 - protein, 93 aa, Arabidopsis thaliana
  peptide (1)..(93): Ceres Seq. ID no. 12333354
MDASMMAGLDGLPEEDKAKMASMIDQLQLRDSLRMYNSLVERCFVDCVDSFTRKSLQKQEETCVMRCAEKFLKHTMRVGMRFAELNQNAPTQD

SEQ ID NO: 28222 - protein, 89 aa, Arabidopsis thaliana
  peptide (1)..(89): Ceres Seq. ID no. 12333355
MMAGLDGLPEEDKAKMASMIDQLQLRDSLRMYNSLVERCFVDCVDSFTRKSLQKQEETCVMRCAEKFLKHTMRVGMRFAELNQNAPTQD

SEQ ID NO: 28223 - protein, 88 aa, Arabidopsis thaliana
  peptide (1)..(88): Ceres Seq. ID no. 12333356
MAGLDGLPEEDKAKMASMIDQLQLRDSLRMYNSLVERCFVDCVDSFTRKSLQKQEETCVMRCAEKFLKHTMRVGMRFAELNQNAPTQD

SEQ ID NO: 28224 - DNA, 636 bp, Arabidopsis thaliana
  misc_feature (1)..(636): Ceres Seq. ID no. 12560114
  misc_feature (1)..(636): Ortholog of  Ceres SEQ ID NO 15172660 as cited in SEQ ID NO 68708
agctccggcgcccaccattaaaatctctcgatctctatctgcgaaatttcacggtatttgaaatggcgacagttccaggacaattgatctgggagatcgtgaaaaacaacaactgtttcttggtgaagcagttcggtagaggaaactctaaggttcaattcagcaaggagactaacaacctcaccaacgttcactcttacaagcactctggtcttgcaaacaaaaagactgtgaccatccaggccgctgacaaggaccaagctgttgtgctcgccaccaccaagaccaagaagcagaacaagcctaagctctctgtcaacaagtctatcctcaagaaggaattccccaggatgtcaaaggctgttgctaaccaggtggtggacaactactacaggccggacttgaagaaagctgcacttgctagactcagcgccatcagcaaaggtctcagggttgccaagtccggtgccaagcaaagaaacagacaagcttaagcttcttctttcacaatctgttttttttgaagtaaaagattttgttgaacaggttttatttaagtttgttgctttgaaagttgaaccataatgctattctccttttttcattatcccttattataaaggaggttagaagttt

SEQ ID NO: 28225 - protein, 163 aa, Arabidopsis thaliana
  peptide (1)..(163): Ceres Seq. ID no. 12560115
LRRPPLKSLDLYLRNFTVFEMATVPGQLIWEIVKNNNCFLVKQFGRGNSKVQFSKETNNLTNVHSYKHSGLANKKTVTIQAADKDQAVVLATTKTKKQNKPKLSVNKSILKKEFPRMSKAVANQVVDNYYRPDLKKAALARLSAISKGLRVAKSGAKQRNRQA

SEQ ID NO: 28226 - protein, 143 aa, Arabidopsis thaliana [sequence omitted]

SEQ ID NO: 28227 - DNA, 874 bp, Arabidopsis thaliana
  misc_feature (1)..(874): Ceres Seq. ID no. 12329801
  misc_feature (1)..(874): Ortholog of  Ceres SEQ ID NO 13598028 as cited in SEQ ID NO 66219
accgccattgattagcttcctctctatttttactctcgtcacgtcctccacttttgggtcattattacttctcgaagctcaccaagatcttgaatttgccgacctctcaagattcttgatggtaaaagcatacagacaagagcatgtttacaagcatccgtgggagcgggtgagtgctgcttcatggaggaagtttgcggaccctgaaaacaaacgcatcctttctcacatccttgaagtcgataccttgaacaggaaactcgacactgagaccgggaaactccacaccacgcgtgctctcaccatccatgctcctggtccatggtttctccataggatcattggccaggacatctgtcactgtgttgaatcaacagttgtagatggcaaatcacgttctatgcagctaacaacaaagaacattagtctcaaaaagttcattgaagtggaggagaggataagatatgatccgcatccagataatccatcagcctggacggtttgtagccaggagacaagcattcggatcaaacccttgtcggctctggcctcaatggctgagaaggttgaacagaagtgcgcagagaaattcatgcagaatagcgctaaaggaagagaggttatggagaggatttgtaagtatatggaagcagaatccgctcggatctaaagatcaaaacttcttagattccagtatcttcttggtttgtgattcttgaatgttttgtaagtcaagagagctacgtttttggagcatggttataataagtttatgaaacagtttagatcaaattggtgtttgtttcagtaactcctgttttgtgttagcaactgaaagttgaattgtgaagcttttatccaaatttttgaatcc

SEQ ID NO: 28228 - protein, 222 aa, Arabidopsis thaliana
  peptide (1)..(222): Ceres Seq. ID no. 12329802
PPLISFLSIFTLVTSSTFGSLLLLEAHQDLEFADLSRFLMVKAYRQEHVYKHPWERVSAASWRKFADPENKRILSHILEVDTLNRKLDTETGKLHTTRALTIHAPGPWFLHRIIGQDICHCVESTVVDGKSRSMQLTTKNISLKKFIEVEERIRYDPHPDNPSAWTVCSQETSIRIKPLSALASMAEKVEQKCAEKFMQNSAKGREVMERICKYMEAESARI

SEQ ID NO: 28229 - protein, 183 aa, Arabidopsis thaliana
  peptide (1)..(183): Ceres Seq. ID no. 12329803
MVKAYRQEHVYKHPWERVSAASWRKFADPENKRILSHILEVDTLNRKLDTETGKLHTTRALTIHAPGPWFLHRIIGQDICHCVESTVVDGKSRSMQLTTKNISLKKFIEVEERIRYDPHPDNPSAWTVCSQETSIRIKPLSALASMAEKVEQKCAEKFMQNSAKGREVMERICKYMEAESARI

SEQ ID NO: 28230 - DNA, 935 bp, Arabidopsis thaliana
  misc_feature (1)..(935): Ceres Seq. ID no. 13489309
  misc_feature (1)..(935): Ortholog of  Ceres SEQ ID NO 12781196 as cited in SEQ ID NO 61049
aataaatacaagcctcctaactcataaaataagcataaccctaactctacaaagttcttctgattctttctctctctctctttctttcaagagcggttttcaatccattcgctaaagaccatgaacctagaagagaaaccaaccatgacggcttcaagggcttcccctcaagccgaacatctctactacgtccggtgtagcatctgcaacaccatcctcgcggttgggataccattgaagagaatgcttgacacggtaacggtgaaatgcggccattgtggtaacctctcgtttctcaccacaactcctcctcttcaaggccatgttagcctcacccttcagatgcagagctttggtggaagtgactataagaagggaagctcttcttcttcctcttcctccacctccagcgaccagcccccatctccctcacctccctttgtcgtcaaacctcctgagaagaagcagaggctcccatctgcatacaaccgcttcatgagggatgagatccaacgcatcaaaagtgccaatccggaaataccacaccgtgaagctttcagtgctgctgccaaaaattgggctaagtacatacccaactctcctacttccattacttccggaggccacaacatgatccatggcttgggattcggtgagaagaagtgaacaaaactcaggggaaaagaagcctaaaaataacaaacgcatgcacgtgtgcgagtggctgcgtcgtttttctcatcttgtgttgttcttctgtgtaattttcttatgtatgtcatgttgcagaaaatgatgttgccttagtttttatgactttatatttctgtctgtctttagatttgaaagtaacgtcacttgctatgtccctttggacgtttatgtctggtctttatttgtcttaatcctatcaaaattttatatgcgtattcctg

SEQ ID NO: 28231 - protein, 181 aa, Arabidopsis thaliana
  peptide (1)..(181): Ceres Seq. ID no. 13489310
MNLEEKPTMTASRASPQAEHLYYVRCSICNTILAVGIPLKRMLDTVTVKCGHCGNLSFLTTTPPLQGHVSLTLQMQSFGGSDYKKGSSSSSSSSTSSDQPPSPSPPFVVKPPEKKQRLPSAYNRFMRDEIQRIKSANPEIPHREAFSAAAKNWAKYIPNSPTSITSGGHNMIHGLGFGEKK

SEQ ID NO: 28232 - protein, 173 aa, Arabidopsis thaliana
  peptide (1)..(173): Ceres Seq. ID no. 13489311
MTASRASPQAEHLYYVRCSICNTILAVGIPLKRMLDTVTVKCGHCGNLSFLTTTPPLQGHVSLTLQMQSFGGSDYKKGSSSSSSSSTSSDQPPSPSPPFVVKPPEKKQRLPSAYNRFMRDEIQRIKSANPEIPHREAFSAAAKNWAKYIPNSPTSITSGGHNMIHGLGFGEKK

SEQ ID NO: 28233 - protein, 140 aa, Arabidopsis thaliana
  peptide (1)..(140): Ceres Seq. ID no. 13489312
MLDTVTVKCGHCGNLSFLTTTPPLQGHVSLTLQMQSFGGSDYKKGSSSSSSSSTSSDQPPSPSPPFVVKPPEKKQRLPSAYNRFMRDEIQRIKSANPEIPHREAFSAAAKNWAKYIPNSPTSITSGGHNMIHGLGFGEKK

SEQ ID NO: 28234 - DNA, 593 bp, Arabidopsis thaliana
  misc_feature (1)..(593): Ceres Seq. ID no. 12337607
  misc_feature (1)..(593): Ortholog of  Ceres SEQ ID NO 15173990 as cited in SEQ ID NO 1070
  misc_feature (1)..(593): Ortholog of  Ceres SEQ ID NO 13594900 as cited in SEQ ID NO 52042
gcttttatagattctgggaatagtttagagatggggagattgttcttggtgaatttggaaggcaagtcttacagttgtaagcactgcaagaccaatcttgctctctgtgatgatgtattctctaagtcttttcagtcccgacatgggaaagcttacctcttcagtaaggtagtgaatgtgtatgctggcaagaaagaagataggatgatgatgacgggaatgcatacggtggtcgatatttactgtgtcaaatgcggctcttatgttggatggaaatatgagtttgcttttgagaagaatcaaaagtacaaggaaggaaaatctgttctcgaaaggtacaaggtctggggtccagatgggaacaattattgggtggctcaagaagcttgaagccggagacagcgatactgatgatgcttgattctcatcattcatatctgacttgtacattccctccaactctttcatttttctttattcttttttcctcattttgtaaaccatctatcttacattagaacagcttccgagaccaattgtttggtcattgctgcaactaccttggacacataagttaaagatctcattatctt

SEQ ID NO: 28235 - protein, 129 aa, Arabidopsis thaliana
  peptide (1)..(129): Ceres Seq. ID no. 12337608
AFIDSGNSLEMGRLFLVNLEGKSYSCKHCKTNLALCDDVFSKSFQSRHGKAYLFSKVVNVYAGKKEDRMMMTGMHTVVDIYCVKCGSYVGWKYEFAFEKNQKYKEGKSVLERYKVWGPDGNNYWVAQEA

SEQ ID NO: 28236 - protein, 119 aa, Arabidopsis thaliana
  peptide (1)..(119): Ceres Seq. ID no. 12337609
MGRLFLVNLEGKSYSCKHCKTNLALCDDVFSKSFQSRHGKAYLFSKVVNVYAGKKEDRMMMTGMHTVVDIYCVKCGSYVGWKYEFAFEKNQKYKEGKSVLERYKVWGPDGNNYWVAQEA

SEQ ID NO: 28237 - DNA, 943 bp, Arabidopsis thaliana
  misc_feature (1)..(943): Ceres Seq. ID no. 13489778
  misc_feature (1)..(943): Ortholog of  Ceres SEQ ID NO 15178201 as cited in SEQ ID NO 54736
  misc_feature (1)..(943): Ortholog of  Ceres SEQ ID NO 12616903 as cited in SEQ ID NO 63917
acatttgacatcctccgcttcaattctaaatctcccggcgaagaaaattaccggcaaatttcacggagaaacctcgccaacgaagcggagttatggcgggcatggctgcggtggcaggattacgaccgtggaacgcttttattcaagctctagttctgatatctctatcatttccctttctctccagcgcttaccgacctggagatatcgtccggatgagcaagatggggcagtatcactcttcgagaacgacttggcatgatgtgatcggaaagcattgcccgatcttcgccgtcaatcgcgaggtgttgatcccaatagcgaaaccaattggctacacaggaactgatccttataagataaaattccaagttggaagtgagaaatttctgattcactggcttttggtaattaatcgtaagagctcagaagttccgatgatcgatgtaaatttgagatattctggaggagatctgcttggagtcacagctcaagttatcgacatgcctcatagctatctgaatacacacccggagatccgcaaacagttttgggatcctcaacactggccaaaacatgttcttgttagatacacatggaaggagcagtcagagattgatgtatcctcaggattctatgtcctgtttggctcagctctcacattttcttttgtactctccatttacgtcttacaatcgtcacgagagaagctggcaaggtttgtaagagagacggtggtggagagcagcagcatgaatgttggagaatttggcaagggggattgagtcacatagtcaagtatatgtatgtttctacaattttagatacttggaatatggaattggccgttcaactctcagaaaagatttttcatcaaacatgaatagtcgaaagcaaaaactttgtccttgtaacattatggtttaatagatttacgtttctt

SEQ ID NO: 28238 - protein, 230 aa, Arabidopsis thaliana
  peptide (1)..(230): Ceres Seq. ID no. 13489779
MAGMAAVAGLRPWNAFIQALVLISLSFPFLSSAYRPGDIVRMSKMGQYHSSRTTWHDVIGKHCPIFAVNREVLIPIAKPIGYTGTDPYKIKFQVGSEKFLIHWLLVINRKSSEVPMIDVNLRYSGGDLLGVTAQVIDMPHSYLNTHPEIRKQFWDPQHWPKHVLVRYTWKEQSEIDVSSGFYVLFGSALTFSFVLSIYVLQSSREKLARFVRETVVESSSMNVGEFGKGD

SEQ ID NO: 28239 - protein, 227 aa, Arabidopsis thaliana
  peptide (1)..(227): Ceres Seq. ID no. 13489780
MAAVAGLRPWNAFIQALVLISLSFPFLSSAYRPGDIVRMSKMGQYHSSRTTWHDVIGKHCPIFAVNREVLIPIAKPIGYTGTDPYKIKFQVGSEKFLIHWLLVINRKSSEVPMIDVNLRYSGGDLLGVTAQVIDMPHSYLNTHPEIRKQFWDPQHWPKHVLVRYTWKEQSEIDVSSGFYVLFGSALTFSFVLSIYVLQSSREKLARFVRETVVESSSMNVGEFGKGD

SEQ ID NO: 28240 - protein, 189 aa, Arabidopsis thaliana
  peptide (1)..(189): Ceres Seq. ID no. 13489781
MSKMGQYHSSRTTWHDVIGKHCPIFAVNREVLIPIAKPIGYTGTDPYKIKFQVGSEKFLIHWLLVINRKSSEVPMIDVNLRYSGGDLLGVTAQVIDMPHSYLNTHPEIRKQFWDPQHWPKHVLVRYTWKEQSEIDVSSGFYVLFGSALTFSFVLSIYVLQSSREKLARFVRETVVESSSMNVGEFGKGD

SEQ ID NO: 28241 - DNA, 563 bp, Arabidopsis thaliana; identical to SEQ ID NO: 21572
  misc_feature (1)..(563): Ceres Seq. ID no. 12333265
  misc_feature (1)..(563): Ortholog of  Ceres SEQ ID NO 14309553 as cited in SEQ ID NO 52735
  misc_feature (1)..(563): Ortholog of  Ceres SEQ ID NO 15172828 as cited in SEQ ID NO 60174
  misc_feature (1)..(563): Ortholog of  Ceres SEQ ID NO 12483999 as cited in SEQ ID NO 0

SEQ ID NO: 28242 - protein, 114 aa, Arabidopsis thaliana; identical to SEQ ID NO: 21573
  peptide (1)..(114): Ceres Seq. ID no. 12333266

SEQ ID NO: 28243 - DNA, 759 bp, Arabidopsis thaliana
  misc_feature (1)..(759): Ceres Seq. ID no. 12331788
  misc_feature (1)..(759): Ortholog of  Ceres SEQ ID NO 12624284 as cited in SEQ ID NO 61595
  misc_feature (1)..(759): Ortholog of  Ceres SEQ ID NO 15225557 as cited in SEQ ID NO 0
accccttctctctctctctctctctcacacacacacacaaacgcacatacttgagcaaagtcatcacaatgagcttcttcatcgaagattctggtctcatagtcactcagcttctctacaaaatggctgttctcatcaccgtcttgagatggatcctcgcttggatcttacgctaccgatccagatccagatccacctcttcttccacttccgcctgtccttcgatttcctcacaggcgatcaaagaaagcctctccgtgacgacgttccgtgacgcagctgagagatctccggcgatgatcaacgacacctgcgctgtgtgtctcggagatctggaagatggagatgaggttagagaactcaggaactgtagccatatgtttcaccgtgagtgtattgaccggtggttggattatgaatgttgcggtggtgatgagaataacgaaggtgaggaggataatcaccgtacgtgtcctctttgtagaactccgctacttgctgctaatacgacgtcgtgtggtgattggccgacgaagaacgaacctagctgggccgttgaacggcttctctacctcttcggagatgatcttcacgtctgattaaatttttttttgtcttttcatttgattttttatttagtgggatcgattttgatcaattagaaatttaagtagtgagagtggttaatttttgtaaattgggggatttaatgtgttagattaggaaatataataataatatcatcgattaatttaaacc

SEQ ID NO: 28244 - protein, 198 aa, Arabidopsis thaliana
  peptide (1)..(198): Ceres Seq. ID no. 12331789
PFSLSLSLTHTHKRTYLSKVITMSFFIEDSGLIVTQLLYKMAVLITVLRWILAWILRYRSRSRSTSSSTSACPSISSQAIKESLSVTTFRDAAERSPAMINDTCAVCLGDLEDGDEVRELRNCSHMFHRECIDRWLDYECCGGDENNEGEEDNHRTCPLCRTPLLAANTTSCGDWPTKNEPSWAVERLLYLFGDDLHV

SEQ ID NO: 28245 - protein, 176 aa, Arabidopsis thaliana
  peptide (1)..(176): Ceres Seq. ID no. 12331790
MSFFIEDSGLIVTQLLYKMAVLITVLRWILAWILRYRSRSRSTSSSTSACPSISSQAIKESLSVTTFRDAAERSPAMINDTCAVCLGDLEDGDEVRELRNCSHMFHRECIDRWLDYECCGGDENNEGEEDNHRTCPLCRTPLLAANTTSCGDWPTKNEPSWAVERLLYLFGDDLHV

SEQ ID NO: 28246 - protein, 158 aa, Arabidopsis thaliana
  peptide (1)..(158): Ceres Seq. ID no. 12331791
MAVLITVLRWILAWILRYRSRSRSTSSSTSACPSISSQAIKESLSVTTFRDAAERSPAMINDTCAVCLGDLEDGDEVRELRNCSHMFHRECIDRWLDYECCGGDENNEGEEDNHRTCPLCRTPLLAANTTSCGDWPTKNEPSWAVERLLYLFGDDLHV

SEQ ID NO: 28247 - DNA, 476 bp, Arabidopsis thaliana
  misc_feature (1)..(476): Ceres Seq. ID no. 12393749
  misc_feature (1)..(476): Ortholog of  Ceres SEQ ID NO 15227226 as cited in SEQ ID NO 54691
  misc_feature (1)..(476): Ortholog of  Ceres SEQ ID NO 14303169 as cited in SEQ ID NO 65741
aaagatgtcgaagaaagcaggttggggagtgatgaccagccacagaagtggtgaaaccgaggacacattcattgctgacttagccgttggcttgtccactggacaaatcaaaaccggtgctccttgcagatccgagcgtcttgccaagtacaaccagcttttgcgtattgaggaggagttgggatcagaggcaatttacgctggagtcaacttccgcaaacctgtggaaccctactaaatggagcttttagaagcaaagtggtcttctttgtgacgaggagaagatgacctgagtttgatcatttgctttaattaaataaaacgttctgtttttgtttcttctttgtttggtttcttacgtcttttgttgaaccctttttgggaaaagttactcatttttgtaagggaaacatgagaatgctctgcctttgtcgaggacggtagccccttatttcaatctaatttcggctttactc

SEQ ID NO: 28248 - protein, 78 aa, Arabidopsis thaliana
  peptide (1)..(78): Ceres Seq. ID no. 12393750
KMSKKAGWGVMTSHRSGETEDTFIADLAVGLSTGQIKTGAPCRSERLAKYNQLLRIEEELGSEAIYAGVNFRKPVEPY

SEQ ID NO: 28249 - protein, 77 aa, Arabidopsis thaliana
  peptide (1)..(77): Ceres Seq. ID no. 12393751
MSKKAGWGVMTSHRSGETEDTFIADLAVGLSTGQIKTGAPCRSERLAKYNQLLRIEEELGSEAIYAGVNFRKPVEPY

SEQ ID NO: 28250 - protein, 68 aa, Arabidopsis thaliana
  peptide (1)..(68): Ceres Seq. ID no. 12393752
MTSHRSGETEDTFIADLAVGLSTGQIKTGAPCRSERLAKYNQLLRIEEELGSEAIYAGVNFRKPVEPY

SEQ ID NO: 28251 - DNA, 898 bp, Arabidopsis thaliana
  misc_feature (1)..(898): Ceres Seq. ID no. 12338786
  misc_feature (1)..(898): Ortholog of  Ceres SEQ ID NO 12614809 as cited in SEQ ID NO 68808
  misc_feature (1)..(898): Ortholog of  Ceres SEQ ID NO 12634366 as cited in SEQ ID NO 0
  misc_feature (1)..(898): Ortholog of  Ceres SEQ ID NO 14309113 as cited in SEQ ID NO 0
gagtatttatcacattaattattatcatacaataacagcgtttcaccattctcttttcaatattttcagttactttctataagaaccattcacttattcttttttctctccatctgtgattatggcttcctctatttccgctgctgaagtgaaagttgtcccagaagagtataatttcttgcaaaaacatgtcgccttcttcgacagaaacaaagatggtatcgtttatccctcggagacatttcaaggatttagagcaatcggatgtggatatttgttgtcaacattcgctgctgttttcatcaacatcagtctcagcagcaaaactcgtccggggaaaggattctcattctcgtttccgatagaggttaagaatgtccgcctagggatacatagcagcgattcaggcgtttacgacaaggatggacggtttgtggcttcaaagttcgaggagatatttgcgaagcatgctcacacacatcgcgatgctttgaccagcaaggaacttaaagaacttctcaaggcaaacagagaacctaatgattgtaaaggagggattttagcgtttggggagtggaaggtattgtataatttgtgcaaagacaagagtggtttgctacacaaggagatagtgagagccgtctatgatggttctcttttcgaacaactcgagaaacaaagatcttctaaaactccttagaatataatcatccaaaaaaaatcctaatgtaaattcattgttatgctcgtgaatctgttttagttaaatctttagtagttacagtaatctatggtgtgaagattgggatgtgtttgattttcaagaattatagtttatttgtgtaagtacttgtgtgattgtatcttattcaaataaaagattatatgattttttttt

SEQ ID NO: 28252 - protein, 192 aa, Arabidopsis thaliana
  peptide (1)..(192): Ceres Seq. ID no. 12338787
MASSISAAEVKVVPEEYNFLQKHVAFFDRNKDGIVYPSETFQGFRAIGCGYLLSTFAAVFINISLSSKTRPGKGFSFSFPIEVKNVRLGIHSSDSGVYDKDGRFVASKFEEIFAKHAHTHRDALTSKELKELLKANREPNDCKGGILAFGEWKVLYNLCKDKSGLLHKEIVRAVYDGSLFEQLEKQRSSKTP

SEQ ID NO: 28253 - DNA, 710 bp, Arabidopsis thaliana
  misc_feature (1)..(710): Ceres Seq. ID no. 12439581
  misc_feature (1)..(710): Ortholog of  Ceres SEQ ID NO 13495070 as cited in SEQ ID NO 53216
  misc_feature (1)..(710): Ortholog of  Ceres SEQ ID NO 13661333 as cited in SEQ ID NO 61620
  misc_feature (1)..(710): Ortholog of  Ceres SEQ ID NO 13596812 as cited in SEQ ID NO 62283
  misc_feature (1)..(710): Ortholog of  Ceres SEQ ID NO 13623021 as cited in SEQ ID NO 0
  misc_feature (1)..(710): Ortholog of  Ceres SEQ ID NO 14309080 as cited in SEQ ID NO 0
agaaagagaaaagaaattgagaagaaaaaaaaaaggtgaccgtattctccgtcgattgtagccgcctgaagaaatatcttctcctctctcgttgaaccacgaatttgctctgatattagtgtttctctagccatggtgagctcaattttccacttgttatctcgatcggcgaacgcggcgtctggaatggctgtgcatgatgattgcaagctgagatttctggaactgaaggcgaaaaggacacaccgtttcatagtttacaagattgaggagaagcagaagcaagttgttgttgagaaagttggtcaaccgatccaaacttacgaggagtttgcagcatgtcttccagctgatgaatgccgttacgccatttacgattttgactttgtcactgctgagaattgccagaagagcaagatcttcttcatcgcgtggtgcccggatattgctaaggtgagaagcaagatgatctacgcaagctctaaggacaggttcaagagggaactagatgggattcaagtagagctacaggcaactgatccaacagagatggatctcgatgttttcagaagccgtgccaactaaagagtaaaaaccaaagtttattatcatcatccccttgaaagatctattctcttattctgttatttttgagtgatggtactggtacttgattatgtttttacattgtgttgtgaagttatgaaccc

SEQ ID NO: 28254 - protein, 150 aa, Arabidopsis thaliana
  peptide (1)..(150): Ceres Seq. ID no. 12439582
MVSSIFHLLSRSANAASGMAVHDDCKLRFLELKAKRTHRFIVYKIEEKQKQVVVEKVGQPIQTYEEFAACLPADECRYAIYDFDFVTAENCQKSKIFFIAWCPDIAKVRSKMIYASSKDRFKRELDGIQVELQATDPTEMDLDVFRSRAN

SEQ ID NO: 28255 - protein, 132 aa, Arabidopsis thaliana; identical to SEQ ID NO: 26127
  peptide (1)..(132): Ceres Seq. ID no. 12439583

SEQ ID NO: 28256 - DNA, 938 bp, Arabidopsis thaliana
  misc_feature (1)..(938): Ceres Seq. ID no. 13490234
  misc_feature (1)..(938): Ortholog of  Ceres SEQ ID NO 15176828 as cited in SEQ ID NO 0
actttaccatccaccagttcttctcaatctttctcttcctgggatcatcatcgttatgatttgattagcaacataacctagaatcaaaatgatgaatgaccttatcaacaacgatgggtcaattttcactagattctatttcctcggagatatctgagagaaaaaggttatttcactaatcgttaatcccagaggtgttttttttttgccaaggtcacgtgatatttttttttaatttcaatgactcgtcacgtgattttaaaatccccgttgttagtttcatcggaagaatcaacgatgagaaactctcctccttcgacgacgtcgttaagcaaagagagacgaaaagttggagaggtagcgggaggagcggcggcggagtgtgcggctgtgtggtgttgttgtccatgcgcggtggtgaatctaatggttttagccgtgtataaagttccggccgcggtttgtaaaaaagcttggaggcgaagcaaacgacgacgttttacgaggaaacgacatggtttgcttgcgtcagcgacggcggaaggaagcgaaagtaccgtacacgctagattgaatgaagaagatctaacggctgagattgtttttgaggaatgtcatgtgagtggtggtgagttaaacgacgtcgtcaggcttgaaaatgaaatgttggatcgtttctatggggctggcttttggagaagcccttcacagaaggacacgtcatcaggaagcctatgaattcttcttcttatgagtattttgggttttttgaaagaattaatagtaatttatttgttttttattttatttttttgtatgtaagttcaattgttttatgtggggtatgtgaatagaagaacattgtagtatactttatacatttttatttgttttctgttcgtttaaaatgtaactatgtctctttgtgtcagaatttg

SEQ ID NO: 28257 - protein, 165 aa, Arabidopsis thaliana
  peptide (1)..(165): Ceres Seq. ID no. 13490235
MTRHVILKSPLLVSSEESTMRNSPPSTTSLSKERRKVGEVAGGAAAECAAVWCCCPCAVVNLMVLAVYKVPAAVCKKAWRRSKRRRFTRKRHGLLASATAEGSESTVHARLNEEDLTAEIVFEECHVSGGELNDVVRLENEMLDRFYGAGFWRSPSQKDTSSGSL

SEQ ID NO: 28258 - protein, 146 aa, Arabidopsis thaliana
  peptide (1)..(146): Ceres Seq. ID no. 13490236
MRNSPPSTTSLSKERRKVGEVAGGAAAECAAVWCCCPCAVVNLMVLAVYKVPAAVCKKAWRRSKRRRFTRKRHGLLASATAEGSESTVHARLNEEDLTAEIVFEECHVSGGELNDVVRLENEMLDRFYGAGFWRSPSQKDTSSGSL

SEQ ID NO: 28259 - protein, 103 aa, Arabidopsis thaliana
  peptide (1)..(103): Ceres Seq. ID no. 13490237
MVLAVYKVPAAVCKKAWRRSKRRRFTRKRHGLLASATAEGSESTVHARLNEEDLTAEIVFEECHVSGGELNDVVRLENEMLDRFYGAGFWRSPSQKDTSSGSL

SEQ ID NO: 28260 - DNA, 1741 bp, Arabidopsis thaliana; identical to SEQ ID NO: 22872
  misc_feature (1)..(1741): Ceres Seq. ID no. 12377573
  misc_feature (1)..(1741): Ortholog of  Ceres SEQ ID NO 14315422 as cited in SEQ ID NO 59255

SEQ ID NO: 28261 - protein, 470 aa, Arabidopsis thaliana; identical to SEQ ID NO: 22873
  peptide (1)..(470): Ceres Seq. ID no. 12377574

SEQ ID NO: 28262 - protein, 447 aa, Arabidopsis thaliana; identical to SEQ ID NO: 22874
  peptide (1)..(447): Ceres Seq. ID no. 12377575

SEQ ID NO: 28263 - DNA, 932 bp, Arabidopsis thaliana
  misc_feature (1)..(932): Ceres Seq. ID no. 12332733
  misc_feature (1)..(932): Ortholog of  Ceres SEQ ID NO 15226473 as cited in SEQ ID NO 50919
  misc_feature (1)..(932): Ortholog of  Ceres SEQ ID NO 13639704 as cited in SEQ ID NO 51325
  misc_feature (1)..(932): Ortholog of  Ceres SEQ ID NO 13661747 as cited in SEQ ID NO 60578
  misc_feature (1)..(932): Ortholog of  Ceres SEQ ID NO 13661672 as cited in SEQ ID NO 61462
  misc_feature (1)..(932): Ortholog of  Ceres SEQ ID NO 13599646 as cited in SEQ ID NO 0
ataacttaatcacacacaaggagagaaagagagaaagagagacagagataatggcgtacagtgcgtgtttcctacaccagagcgcattggcttcatcagccgcacgatcatcatcttcctcctcatcccagcgtcacgtgtcgctctccaaacctgttcagatcatctgtaaagctcaacagtctcatgaagacgataactccgccgtctcccgccgtcttgctctcactctcctcgtcggcgccgctgctgttggttccaaagtatctcctgctgatgccgcctacggtgaagctgcaaacgtgtttgggaagccaaagacgaacacagacttcttgccatacaatggagatgggttcaaagtgcaggttccagcaaaatggaacccaagcaaagagattgagtatccaggacaagtccttaggttcgaagacaacttcgatgctactagcaatctcaatgtcatggtcactcctaccgacaagaagtccatcactgattacggttctcccggagagttcctctctcaggttaattacctcctagggaaacaagcttacttcggtgagactgcctctgagggaggctttgacaacaatgcagtggcaacagcaaacattctggagtcatcatctcaggaagttggtgggaaaccctactattacttgtctgtgttgacaagaacggctgatggagacgaaggtgggaagcatcagctgatcacagcaacggtgaatggagggaagctttacatctgcaaagcacaagctggagacaagaggtggttcaagggagccaggaaatttgtcgagagcgcagccacttctttcagtgttgcttgagtgaaagcaacacaacgtaacaatgctctgcttgctttcttcatttgtctcttgtaaaaaatggaaaatgaaactgagcttttgagaacc

SEQ ID NO: 28264 - protein, 279 aa, Arabidopsis thaliana
  peptide (1)..(279): Ceres Seq. ID no. 12332734
NLITHKERKRERETEIMAYSACFLHQSALASSAARSSSSSSSQRHVSLSKPVQIICKAQQSHEDDNSAVSRRLALTLLVGAAAVGSKVSPADAAYGEAANVFGKPKTNTDFLPYNGDGFKVQVPAKWNPSKEIEYPGQVLRFEDNFDATSNLNVMVTPTDKKSITDYGSPGEFLSQVNYLLGKQAYFGETASEGGFDNNAVATANILESSSQEVGGKPYYYLSVLTRTADGDEGGKHQLITATVNGGKLYICKAQAGDKRWFKGARKFVESAATSFSVA

SEQ ID NO: 28265 - protein, 263 aa, Arabidopsis thaliana
  peptide (1)..(263): Ceres Seq. ID no. 12332735
MAYSACFLHQSALASSAARSSSSSSSQRHVSLSKPVQIICKAQQSHEDDNSAVSRRLALTLLVGAAAVGSKVSPADAAYGEAANVFGKPKTNTDFLPYNGDGFKVQVPAKWNPSKEIEYPGQVLRFEDNFDATSNLNVMVTPTDKKSITDYGSPGEFLSQVNYLLGKQAYFGETASEGGFDNNAVATANILESSSQEVGGKPYYYLSVLTRTADGDEGGKHQLITATVNGGKLYICKAQAGDKRWFKGARKFVESAATSFSVA

SEQ ID NO: 28266 - DNA, 2203 bp, Arabidopsis thaliana
  misc_feature (1)..(2203): Ceres Seq. ID no. 12325555
  misc_feature (1)..(2203): Ortholog of  Ceres SEQ ID NO 15171762 as cited in SEQ ID NO 57846
  misc_feature (1)..(2203): Ortholog of  Ceres SEQ ID NO 12597287 as cited in SEQ ID NO 63982
gctttcattctttggatgcgctgttgtcaacttgtccctcgctgcctctgcttcttaactctttctttatcacttttccactcccaaatcaatttttaggttttttttttataattataatttatttgctctcggcaggatctatataatacacagaccagtctttgcgtgtgcttgtgtgcattcattgatcgggtttatatcttttcatcggattttctttgtcgagcaaaagccatgtcactgagacccaacgctaagacggaggttcgccggaaccgatacaaagttgcagtggatgcggaggaaggacgacggaggagagaagacaacatggttgagatccgtaaaagcaagcgtgaggagagtttgatgaagaagagacgtgaaggtatgcaagctcttcagggtttcccttcagcttccgccgcctccgtcgataagaagttggatagtctgaaggatatggtcgctggggtttggtccgatgaccctgccttgcagcttgagtccactactcagttcaggaagcttctctctattgagagaagtcctccaatcgaggaagtgataagtgctggtgttgttcctaggtttgttgagtttcttaagaaagaagattaccccgccattcagtttgaggcagcttgggctctaacaaacattgcatctggaacatcggatcacactaaggttgtaatcgatcacaatgctgttccaatctttgttcagcttcttgcttcccctagcgatgatgttcgtgaacaggctgtatgggctttgggtaacgttgctggtgattcaccacggtgccgtgatcttgttcttggatgtggggcactgcttccgctgctcaatcagcttaatgagcatgctaaattgtccatgcttcgaaatgccacttggaccttgtcaaacttctgtcgtggcaagcctcagcctcactttgaccaggtcaaacctgctcttcccgcccttgaacgactaattcattcagatgatgaagaagtcttgacagatgcctgttgggctctttcttacctctctgatgggaccaatgacaaaatccagactgtcatccaggccggtgttgtcccaaaacttgttgaacttctcctccatcattctccatctgtgctaattcctgctcttcgcactgttggaaatatagttactggagatgatatacaaacacagtgcgtgatcaatagtggtgctctaccttgtcttgccaacctgctcactcaaaaccataagaaaagcataaagaaggaagcttgctggacgatttcaaacatcacagcaggcaacaaagatcagatccagacggtagttgaggctaatttgatttccccgttggtgagtctgcttcaaaatgctgaatttgacattaagaaggaagctgcatgggcaatttcaaatgcaacttcaggtggttctcatgatcaaataaaatacctggtggagcaagggtgcataaaaccattatgcgatctcctggtttgcccagatccaagaatcataactgtctgccttgaaggattggaaaacattttgaaggtgggagaggcagagaagaacttgggtcacacaggagacatgaactattacgctcagctgattgatgatgcagaagggctagaaaagatcgagaaccttcagagccatgacaacaatgagatctatgagaaggctgttaaaattctggagacatactggcttgaagaggaagatgatgagacacagcaacctccaggtgttgatggttctcaggctgggttccagtttggagggaatcaagctccagtaccatccggaggattcaacttcagctgaaggtaaataaaagaatggaattggaagcttgcaacttgagaatggtgaaaggtcagagtcagtcagagtctagtttcactgccatggttatactccaggtctggtctggtctggtctcagaggtttgtaccgggtggtcggtttaaaagtacagcgtctgagaaagtgtttggttcattgtccagggctatttttttgaaatgactggtacaccggtcgtgagtcgacctttgtgttgtttttaaattttggagggttataaaaacttacagtggagtcttttgtttttgtgttgacaacagtttgtatgtcggttaaaaaattgaaaccataaacccttttttggtcttaatatgtttggtgtctg

SEQ ID NO: 28267 - protein, 532 aa, Arabidopsis thaliana
  peptide (1)..(532): Ceres Seq. ID no. 12325556
MSLRPNAKTEVRRNRYKVAVDAEEGRRRREDNMVEIRKSKREESLMKKRREGMQALQGFPSASAASVDKKLDSLKDMVAGVWSDDPALQLESTTQFRKLLSIERSPPIEEVISAGVVPRFVEFLKKEDYPAIQFEAAWALTNIASGTSDHTKVVIDHNAVPIFVQLLASPSDDVREQAVWALGNVAGDSPRCRDLVLGCGALLPLLNQLNEHAKLSMLRNATWTLSNFCRGKPQPHFDQVKPALPALERLIHSDDEEVLTDACWALSYLSDGTNDKIQTVIQAGVVPKLVELLLHHSPSVLIPALRTVGNIVTGDDIQTQCVINSGALPCLANLLTQNHKKSIKKEACWTISNITAGNKDQIQTVVEANLISPLVSLLQNAEFDIKKEAAWAISNATSGGSHDQIKYLVEQGCIKPLCDLLVCPDPRIITVCLEGLENILKVGEAEKNLGHTGDMNYYAQLIDDAEGLEKIENLQSHDNNEIYEKAVKILETYWLEEEDDETQQPPGVDGSQAGFQFGGNQAPVPSGGFNFS

SEQ ID NO: 28268 - protein, 500 aa, Arabidopsis thaliana
  peptide (1)..(500): Ceres Seq. ID no. 12325557
MVEIRKSKREESLMKKRREGMQALQGFPSASAASVDKKLDSLKDMVAGVWSDDPALQLESTTQFRKLLSIERSPPIEEVISAGVVPRFVEFLKKEDYPAIQFEAAWALTNIASGTSDHTKVVIDHNAVPIFVQLLASPSDDVREQAVWALGNVAGDSPRCRDLVLGCGALLPLLNQLNEHAKLSMLRNATWTLSNFCRGKPQPHFDQVKPALPALERLIHSDDEEVLTDACWALSYLSDGTNDKIQTVIQAGVVPKLVELLLHHSPSVLIPALRTVGNIVTGDDIQTQCVINSGALPCLANLLTQNHKKSIKKEACWTISNITAGNKDQIQTVVEANLISPLVSLLQNAEFDIKKEAAWAISNATSGGSHDQIKYLVEQGCIKPLCDLLVCPDPRIITVCLEGLENILKVGEAEKNLGHTGDMNYYAQLIDDAEGLEKIENLQSHDNNEIYEKAVKILETYWLEEEDDETQQPPGVDGSQAGFQFGGNQAPVPSGGFNFS

SEQ ID NO: 28269 - protein, 487 aa, Arabidopsis thaliana
  peptide (1)..(487): Ceres Seq. ID no. 12325558
MKKRREGMQALQGFPSASAASVDKKLDSLKDMVAGVWSDDPALQLESTTQFRKLLSIERSPPIEEVISAGVVPRFVEFLKKEDYPAIQFEAAWALTNIASGTSDHTKVVIDHNAVPIFVQLLASPSDDVREQAVWALGNVAGDSPRCRDLVLGCGALLPLLNQLNEHAKLSMLRNATWTLSNFCRGKPQPHFDQVKPALPALERLIHSDDEEVLTDACWALSYLSDGTNDKIQTVIQAGVVPKLVELLLHHSPSVLIPALRTVGNIVTGDDIQTQCVINSGALPCLANLLTQNHKKSIKKEACWTISNITAGNKDQIQTVVEANLISPLVSLLQNAEFDIKKEAAWAISNATSGGSHDQIKYLVEQGCIKPLCDLLVCPDPRIITVCLEGLENILKVGEAEKNLGHTGDMNYYAQLIDDAEGLEKIENLQSHDNNEIYEKAVKILETYWLEEEDDETQQPPGVDGSQAGFQFGGNQAPVPSGGFNFS

SEQ ID NO: 28270 - DNA, 914 bp, Arabidopsis thaliana
  misc_feature (1)..(914): Ceres Seq. ID no. 12321613
  misc_feature (1)..(914): Ortholog of  Ceres SEQ ID NO 12578688 as cited in SEQ ID NO 27
attctccacaatttcataactttcttccgctcaacttcagataaattcggattctgtagctctttcaatacgactgcggagatcagagccaattatttggttatggcgtctctgatctcagatattgaaccgccgacgagtactacttcagatctcgttcggagaaagaagagatcctctgcttcatccgccgcatcgtctcgttcaagcgcatcttccgtctccggtgagattcacgcgcgatggcgatcggagaagcaacaacggatctactcagccaaactgttccaagcgctccaacaagtccgcctcaactcttccgcctcaacatcatcatctccaacggctcagaaacgaggaaaggccgtccgtgaagccgccgatcgagctcttgccgtttccgctcggggaagaacactctggagcagagcgatcttagctaatcggatcaaactgaaatttcgtaaacagagacgtcctcgagctacgatggcgattccggccatgactacggtggttagtagcagcagcaacagatcgagaaaacggagagtgtcggtgttgagattgaataagaagagtataccggatgttaaccggaaagtacgtgttctaggccggttagttcccggttgcggtaaacaatccgtaccggtgattctagaagaagcaactgattatattcaggctctggagatgcaagtgagagccatgaactctttagttcagcttctctcctcctacggctcagctcctccaccgatttgatgaggttaaaatcgtctttttaattctaccatctctcgatctttcacagcttatgtgtatatagaagattcggtttgattataatctgtaactactcttcccaaccgctgattcttctctgctacaagtaaaagtaaattttgaac

SEQ ID NO: 28271 - protein, 255 aa, Arabidopsis thaliana
  peptide (1)..(255): Ceres Seq. ID no. 12321614
ILHNFITFFRSTSDKFGFCSSFNTTAEIRANYLVMASLISDIEPPTSTTSDLVRRKKRSSASSAASSRSSASSVSGEIHARWRSEKQQRIYSAKLFQALQQVRLNSSASTSSSPTAQKRGKAVREAADRALAVSARGRTLWSRAILANRIKLKFRKQRRPRATMAIPAMTTVVSSSSNRSRKRRVSVLRLNKKSIPDVNRKVRVLGRLVPGCGKQSVPVILEEATDYIQALEMQVRAMNSLVQLLSSYGSAPPPI

SEQ ID NO: 28272 - protein, 221 aa, Arabidopsis thaliana
  peptide (1)..(221): Ceres Seq. ID no. 12321615
MASLISDIEPPTSTTSDLVRRKKRSSASSAASSRSSASSVSGEIHARWRSEKQQRIYSAKLFQALQQVRLNSSASTSSSPTAQKRGKAVREAADRALAVSARGRTLWSRAILANRIKLKFRKQRRPRATMAIPAMTTVVSSSSNRSRKRRVSVLRLNKKSIPDVNRKVRVLGRLVPGCGKQSVPVILEEATDYIQALEMQVRAMNSLVQLLSSYGSAPPPI

SEQ ID NO: 28273 - DNA, 616 bp, Arabidopsis thaliana
  misc_feature (1)..(616): Ceres Seq. ID no. 12322085
  misc_feature (1)..(616): Ortholog of  Ceres SEQ ID NO 13595826 as cited in SEQ ID NO 56092
  misc_feature (1)..(616): Ortholog of  Ceres SEQ ID NO 15176138 as cited in SEQ ID NO 0
aaaaagagagaaaaacacaattaaaaattattatgaagaggaacggcgagacgaaacggcggaggaacgtggcggaggaggcagagcagggagaggatccggcgatgtgggagaatcttgaccggaatttcagacaagtgcaatcagttttagacagaaacagatcactgattcaacaagtcaacgacaatcaccaatcgagaatggctgataacatgtcgaagaacgttgctttgattcaagaactcaacggaaacatttccaaggttgttaacatgtattctgatctcaatactagtttctcgtcgggctttcacggtgggaagaacggtcacgatggtggtggtgctgccggaactagagcttaatgaaccggaatcaaattgtttcttcttagttggaccggccggtttgagaattttgaatctgtccggttcaagctatgatataaagtaaatgtttagtttttgtattgcaatgatgattgtcgttagaataatccgtgggagcaaacccatctctattggggttattttagttatggttttgagtctttttcaatgtgtctctactgcaatctctctaatgattataataataattgatacagtattag

SEQ ID NO: 28274 - protein, 121 aa, Arabidopsis thaliana
  peptide (1)..(121): Ceres Seq. ID no. 12322086
KERKTQLKIIMKRNGETKRRRNVAEEAEQGEDPAMWENLDRNFRQVQSVLDRNRSLIQQVNDNHQSRMADNMSKNVALIQELNGNISKVVNMYSDLNTSFSSGFHGGKNGHDGGGAAGTRA

SEQ ID NO: 28275 - protein, 111 aa, Arabidopsis thaliana
  peptide (1)..(111): Ceres Seq. ID no. 12322087
MKRNGETKRRRNVAEEAEQGEDPAMWENLDRNFRQVQSVLDRNRSLIQQVNDNHQSRMADNMSKNVALIQELNGNISKVVNMYSDLNTSFSSGFHGGKNGHDGGGAAGTRA

SEQ ID NO: 28276 - protein, 87 aa, Arabidopsis thaliana
  peptide (1)..(87): Ceres Seq. ID no. 12322088
MWENLDRNFRQVQSVLDRNRSLIQQVNDNHQSRMADNMSKNVALIQELNGNISKVVNMYSDLNTSFSSGFHGGKNGHDGGGAAGTRA

SEQ ID NO: 28277 - DNA, 629 bp, Arabidopsis thaliana
  misc_feature (1)..(629): Ceres Seq. ID no. 12348641
  misc_feature (1)..(629): Ortholog of  Ceres SEQ ID NO 12322366 as cited in SEQ ID NO 20549
aacaactaaaaccacatttatcattacagtctgatttgagctaagttctctcatcataaactctccttggagaatcatggctatttcaaaagctcttatcgcttctcttctcatatctcttcttgttctccaactcgtccaggctgatgtcgaaaactcacagaagaaaaatggttacgcaaagaagatcgattgtgggagtgcgtgtgtagcacggtgcaggctttcgaggaggccgaggctgtgtcacagagcgtgcgggacttgctgctacaggtgcaactgtgtgcctccgggtacgtacggaaactacgacaagtgccagtgctacgctagcctcaccacccacggtggacgccgcaagtgcccataagaagaaacaaagctcttaattgctgcggataatgggacgatgtcgttttgttagtatttactttggcgtatatatgtggatcgaataataaacgagaacgtacgttgtcgttgtgagtgtgagtactgtattattaatggttctatttgtttttacttgcaagttttcttgttttgaatttgtttttttcatatttgtatatcgattcgtgcattattgtattatttcaatttgtaataagattatgttacctttg

SEQ ID NO: 28278 - protein, 98 aa, Arabidopsis thaliana
  peptide (1)..(98): Ceres Seq. ID no. 12348642
MAISKALIASLLISLLVLQLVQADVENSQKKNGYAKKIDCGSACVARCRLSRRPRLCHRACGTCCYRCNCVPPGTYGNYDKCQCYASLTTHGGRRKCP

SEQ ID NO: 28279 - DNA, 677 bp, Arabidopsis thaliana
  misc_feature (1)..(677): Ceres Seq. ID no. 12577603
  misc_feature (1)..(677): Ortholog of  Ceres SEQ ID NO 13581889 as cited in SEQ ID NO 50900
aatgttttttctgttactgtctccgcgatctgattttacgacaatagagtttcgggttttgtcccattccagtttgaaaataaagatggctcgtaccaagcaaaccgctcgtaagtccaccggaggtaaagctccaaggaagcaacttgctactaaggctgctcgtaaatctgcaccaactactggtggagtcaagaaaccacatcgttaccgtcctggaactgttgctctccgtgaaatccgtaagtaccagaagagtactgagttgcttatcaggaaactgccatttcagaggctagtccgtgagattgctcaagatttcaagactgatttgcgtttccagagccatgctgtcttagctctccaggaagctgcagaagcatatcttgttggtctctttgaagacactaacctttgtgccattcatgccaagcgtgtgaccataatgcccaaagacattcagctcgctcgtcgtatcagaggtgaacgcgcttaagccaaccaagaatccgagatttggttcatgtagtttttgttttttatgaaagcaagatcttaattgctgtgttttttaaatctctgggtatgtagtagtaagagtagtaagaagtctgcaatctaagaatgttgtgttctttaagcttattattatgtgtgttgcgaactctttttaaccc

SEQ ID NO: 28280 - protein, 164 aa, Arabidopsis thaliana
  peptide (1)..(164): Ceres Seq. ID no. 12577604
MFFLLLSPRSDFTTIEFRVLSHSSLKIKMARTKQTARKSTGGKAPRKQLATKAARKSAPTTGGVKKPHRYRPGTVALREIRKYQKSTELLIRKLPFQRLVREIAQDFKTDLRFQSHAVLALQEAAEAYLVGLFEDTNLCAIHAKRVTIMPKDIQLARRIRGERA

SEQ ID NO: 28281 - protein, 136 aa, Arabidopsis thaliana; identical to SEQ ID NO: 26403
  peptide (1)..(136): Ceres Seq. ID no. 12577605

SEQ ID NO: 28282 - DNA, 641 bp, Arabidopsis thaliana
  misc_feature (1)..(641): Ceres Seq. ID no. 12332727
  misc_feature (1)..(641): Ortholog of  Ceres SEQ ID NO 15226758 as cited in SEQ ID NO 58427
aaaaaccctaaatcttgttcgatcagagcattcgccattattaacccgagtttgaaatcgttgaagatttgaagacacagaatgggcaaaccaagcaaaggatcggaagtgacaacgaagtctgataagaagtttgagaagaagcttcaattttacacaaaggtcaaagatacagttacttctttgtctgtccaaaaggagattggcaagaagaagaaaatccgcagccgacaaaagaagctaaaggcgtatgatctcaccaacctgtcggagtttcttcccgagttcaatgctctgcagaaatcagctcttcctgcacccgagctgaaaatgaactgtaaaaggcgacaaaagctcgtattgacagaaggggagagattgaataaggttctagaccatccagcttttcaagctgatccagttggttcgatatttcagcacttgctgagtcaacagccaccggtggaagagaaaccgaagaagaagactaacactaatggaagcaagaaaaggaataagaaaaaaggaaagactgattccatggatttctgatcttgtcctataagtttacttatgttttgtttttgttgttttgttatagtaacatgattttggaaatgaagaatcttcaaatttgattg

SEQ ID NO: 28283 - protein, 156 aa, Arabidopsis thaliana
  peptide (1)..(156): Ceres Seq. ID no. 12332728
MGKPSKGSEVTTKSDKKFEKKLQFYTKVKDTVTSLSVQKEIGKKKKIRSRQKKLKAYDLTNLSEFLPEFNALQKSALPAPELKMNCKRRQKLVLTEGERLNKVLDHPAFQADPVGSIFQHLLSQQPPVEEKPKKKTNTNGSKKRNKKKGKTDSMDF

SEQ ID NO: 28284 - DNA, 1130 bp, Arabidopsis thaliana
  misc_feature (1)..(1130): Ceres Seq. ID no. 13491560
  misc_feature (1)..(1130): Ortholog of  Ceres SEQ ID NO 12609045 as cited in SEQ ID NO 51314
  misc_feature (1)..(1130): Ortholog of  Ceres SEQ ID NO 14316312 as cited in SEQ ID NO 60042
  misc_feature (1)..(1130): Ortholog of  Ceres SEQ ID NO 13595877 as cited in SEQ ID NO 67702
  misc_feature (1)..(1130): Ortholog of  Ceres SEQ ID NO 13654367 as cited in SEQ ID NO 67993
actgtactcttccaccaaatccattaatcatcatcttttcttcacagagaggaaaaaaaaaaaatggcgacagattctcaaccaaaccaaaagctaacgcttccgttaaaaacaagaatcgctctcaccgttatctccaccatgaccgataacgctcaacgtcctgacggaactatcaaccgccgtttcctccgcctcttcgatttccgtgctcctcccaatcctaaacccgtcaacatcgtctccacctccgatttcgtcgtggatcaatcccgtgatctctggttccgattgtacactccacatgtctccggcgataaaatccccgtcgttgttttcttccacggcggtggtttcgctttccttagtcctaatgcgtatccttacgataatgtatgccggagattcgctaggaaattacctgcttatgtcatctccgttaactaccgtctcgctccggagcatcgttatcctgctcaatacgacgacggtttcgatgctttgaagtacatcgaggagaatcacggttcgattcttccggcgaacgctgatctctcgagatgcttcttcgccggagacagtgcaggtggaaacatcgcgcacaacgtcgcgattcgaatttgtcgcgagccgcggtcatctttcaccgccgtgaaactcatcggacttatctcgattcaacctttcttcggcggagaagagagaacggaagcggagaaacaactcgtcggagctcctttggtttcaccggaccgaacagattggtgctggaaagcgatgggattaaaccgggatcatgaagcggttaacgtaggcggaccaaacgcggttgatatatcgggtctggattatccggagacgatggtggtagtagctgggtttgatccgttaaaagattggcagagaagttactacgagtggttaaagttatgcggtaaaaaagcaacgttaatcgaatattcaaacatgtttcatgcgttttacattttccctgaattgcctgaggcgggtcagttaattatgcggattaaggattttgttgatgagcgcgtggcttcactctccgcttaatcaccttcgctaatgatggatttttaaattagctcaatgaataataatgtattaagctt

SEQ ID NO: 28285 - protein, 335 aa, Arabidopsis thaliana
  peptide (1)..(335): Ceres Seq. ID no. 13491561
MATDSQPNQKLTLPLKTRIALTVISTMTDNAQRPDGTINRRFLRLFDFRAPPNPKPVNIVSTSDFVVDQSRDLWFRLYTPHVSGDKIPVVVFFHGGGFAFLSPNAYPYDNVCRRFARKLPAYVISVNYRLAPEHRYPAQYDDGFDALKYIEENHGSILPANADLSRCFFAGDSAGGNIAHNVAIRICREPRSSFTAVKLIGLISIQPFFGGEERTEAEKQLVGAPLVSPDRTDWCWKAMGLNRDHEAVNVGGPNAVDISGLDYPETMVVVAGFDPLKDWQRSYYEWLKLCGKKATLIEYSNMFHAFYIFPELPEAGQLIMRIKDFVDERVASLSA

SEQ ID NO: 28286 - protein, 309 aa, Arabidopsis thaliana
  peptide (1)..(309): Ceres Seq. ID no. 13491562
MTDNAQRPDGTINRRFLRLFDFRAPPNPKPVNIVSTSDFVVDQSRDLWFRLYTPHVSGDKIPVVVFFHGGGFAFLSPNAYPYDNVCRRFARKLPAYVISVNYRLAPEHRYPAQYDDGFDALKYIEENHGSILPANADLSRCFFAGDSAGGNIAHNVAIRICREPRSSFTAVKLIGLISIQPFFGGEERTEAEKQLVGAPLVSPDRTDWCWKAMGLNRDHEAVNVGGPNAVDISGLDYPETMVVVAGFDPLKDWQRSYYEWLKLCGKKATLIEYSNMFHAFYIFPELPEAGQLIMRIKDFVDERVASLSA

SEQ ID NO: 28287 - DNA, 972 bp, Arabidopsis thaliana
  misc_feature (1)..(972): Ceres Seq. ID no. 13487354
  misc_feature (1)..(972): Ortholog of  Ceres SEQ ID NO 15171228 as cited in SEQ ID NO 56948
  misc_feature (1)..(972): Ortholog of  Ceres SEQ ID NO 13597134 as cited in SEQ ID NO 64501
acatcatcaacttcatcaattcatcacctttgtctctctttcaagcttctctgtgtgtgatctccgttggtcaacaacaactacaacagcttattgagcagagatggatcatcaatttggatatggtgttgaagttactgggttatctccatctgttactcataatgatcttatcgatttcttctctttctctggtactatccaagatattgatattgtcaggtcgggtgagcaagcttgtactgcttatgtgatgtttaaggattcttattctcaagaaactgctgttttactcactggcgcaacgatattggatcagcgtgtttgtataactcgttggggacaacatcacgaagagttcgatttctggaatgcgacttcgcgaggttttgaagatgaatcggactcacaacattatgctcaacgaagcgagttcaacgctggagaagcagtgacaaaagctcaagaagtggtgaaaataatgcttgccacaggattcgtgctaggcaaagacgctttaagcaaagctaaagcctttgatgaatcccacggcgtatcagctgcagcggtggctagagtatctcaactagaacagaggattggtcttactgacaaaatctttaccggacttgaagctgttagaatgactgaccaaaggtatcatgtttcagatacagctaaatcagctgtctttgccacaggaagaaccgcggcagcagctgcaactagtgttgtcaatagcagttacttctccagcggagctctttggctgtctggtgcattagagagagctgctaaagccgcatctgatctcggtacccgcggctcaaggcagtgaatagaccaatggcccgattcagaaccgtattcgtctgtgaatatatatgatgcaaagctgatcatgaataactggctcatgaagtgtgataagaccaaattttatcaaaacgaataccatatagaaatctatct

SEQ ID NO: 28288 - protein, 244 aa, Arabidopsis thaliana
  peptide (1)..(244): Ceres Seq. ID no. 13487355
MDHQFGYGVEVTGLSPSVTHNDLIDFFSFSGTIQDIDIVRSGEQACTAYVMFKDSYSQETAVLLTGATILDQRVCITRWGQHHEEFDFWNATSRGFEDESDSQHYAQRSEFNAGEAVTKAQEVVKIMLATGFVLGKDALSKAKAFDESHGVSAAAVARVSQLEQRIGLTDKIFTGLEAVRMTDQRYHVSDTAKSAVFATGRTAAAAATSVVNSSYFSSGALWLSGALERAAKAASDLGTRGSRQ

SEQ ID NO: 28289 - protein, 194 aa, Arabidopsis thaliana
  peptide (1)..(194): Ceres Seq. ID no. 13487356
MFKDSYSQETAVLLTGATILDQRVCITRWGQHHEEFDFWNATSRGFEDESDSQHYAQRSEFNAGEAVTKAQEVVKIMLATGFVLGKDALSKAKAFDESHGVSAAAVARVSQLEQRIGLTDKIFTGLEAVRMTDQRYHVSDTAKSAVFATGRTAAAAATSVVNSSYFSSGALWLSGALERAAKAASDLGTRGSRQ

SEQ ID NO: 28290 - DNA, 1504 bp, Arabidopsis thaliana; identical to SEQ ID NO: 24511
  misc_feature (1)..(1504): Ceres Seq. ID no. 13647866
  misc_feature (1)..(1504): Ortholog of  Ceres SEQ ID NO 13596780 as cited in SEQ ID NO 62360

SEQ ID NO: 28291 - protein, 361 aa, Arabidopsis thaliana; identical to SEQ ID NO: 24512
  peptide (1)..(361): Ceres Seq. ID no. 13647867

SEQ ID NO: 28292 - DNA, 970 bp, Arabidopsis thaliana
  misc_feature (1)..(970): Ceres Seq. ID no. 13592472
  misc_feature (1)..(970): Ortholog of  Ceres SEQ ID NO 14313662 as cited in SEQ ID NO 54162
  misc_feature (1)..(970): Ortholog of  Ceres SEQ ID NO 14302123 as cited in SEQ ID NO 0
  misc_feature (1)..(970): Ortholog of  Ceres SEQ ID NO 15179452 as cited in SEQ ID NO 0
gacgccgctcatttttagggtttcagatataggcagattctcacatttgcaaacatgacgactcagatcagcaagaagagaaagtttgtagcggacggtgtgttctacgctgaattgaatgaggttcttacaagagagctagcagaggatggttactctggtgttgaggttagggttactcctatgaggactgagattatcatcagagctacacgtactcagaatgttctcggtgagaaggggaggagaattagggaattgacttcccttgttcagaagagattcaagtttccagttgacagtgttgagctttatgccgagaaggttaacaacagaggtctctgtgccatcgctcaggctgagtctttacgttacaagcttcttggtggtctcgctgttcgtagggcttgctatggtgtgttgaggtttgttatggagagtggagctaagggatgcgaggttatcgtgagtggaaagcttcgtgctgccagagccaagtctatgaagttcaaagatggctacatggtgtcatctggtcaaccaactaaggaatacatagactctgcagtgagacatgttttgcttagacaaggtgtgttgggaatcaaggtgaaggttatgcttgattgggaccctaagggcatatcaggaccaaagacaccattgcctgatgttgtgatcattcattctcctaaagaagaagaggccatctatgcacctgctcaggttgctgccccggctgctctcgtagcagatgcaccactcacagccgtagattaccctgcgatgatcccagtcgcctaaaagaatcctttgtactagtcgatgtgattttgttttcaactgttcttgctcttttgacagattatagcttctcgtatcttcgaatcagacacgtttcctctgttcttattcgaaaattatctcaagtttccattgttgaaaaagccctttttagtttcataaatcg

SEQ ID NO: 28293 - protein, 249 aa, Arabidopsis thaliana
  peptide (1)..(249): Ceres Seq. ID no. 13592473
MTTQISKKRKFVADGVFYAELNEVLTRELAEDGYSGVEVRVTPMRTEIIIRATRTQNVLGEKGRRIRELTSLVQKRFKFPVDSVELYAEKVNNRGLCAIAQAESLRYKLLGGLAVRRACYGVLRFVMESGAKGCEVIVSGKLRAARAKSMKFKDGYMVSSGQPTKEYIDSAVRHVLLRQGVLGIKVKVMLDWDPKGISGPKTPLPDVVIIHSPKEEEAIYAPAQVAAPAALVADAPLTAVDYPAMIPVA

SEQ ID NO: 28294 - protein, 206 aa, Arabidopsis thaliana
  peptide (1)..(206): Ceres Seq. ID no. 13592474
MRTEIIIRATRTQNVLGEKGRRIRELTSLVQKRFKFPVDSVELYAEKVNNRGLCAIAQAESLRYKLLGGLAVRRACYGVLRFVMESGAKGCEVIVSGKLRAARAKSMKFKDGYMVSSGQPTKEYIDSAVRHVLLRQGVLGIKVKVMLDWDPKGISGPKTPLPDVVIIHSPKEEEAIYAPAQVAAPAALVADAPLTAVDYPAMIPVA

SEQ ID NO: 28295 - DNA, 871 bp, Arabidopsis thaliana
  misc_feature (1)..(871): Ceres Seq. ID no. 12328183
  misc_feature (1)..(871): Ortholog of  Ceres SEQ ID NO 13596116 as cited in SEQ ID NO 62213
atccatccttcattggttttcgacaaatttgattcccacaaattatttgatatcttgaggaaatgaaattcttcatttttattctagcgttacaacaactctacgtacaaagtttcgcccaagatttcgatttcttctacttcgttttacagtggcctggagcgtattgtgattcaagacatagttgttgctatccacaaaccggtaaaccagctgcagattttggaattcacggtctttggcctaactacaaaaccggtggatggccgcaaaattgtaatcctgacagtcgatttgatgatttacgggtttctgatctgatgagcgatttacaaagagaatggccaacgttgtcgtgtccgagcaatgatggtatgaagttttggacacatgagtgggagaaacacggtacgtgcgctgagtccgagcttgaccaacacgattacttcgaagctggtctcaagctcaaacagaaagctaatctccttcatgcccttaccaatgctgggatcaaaccggatgataaattttatgaaatgaaagatattgagaatacgatcaaacaagtagttgggtttgctccgggcattgaatgtaacaaagattcgtcacataatagccaactctatcagatttatttatgtgttgacacttcggcctccaaattcatcaactgtcctgttatgccgcatggtcgatgcgactctcgagttcaatttcccaagttctaaattttatggctacattttttctatgtatttacattctacctattaatttttatttgtgtttcttgcaaaatttagttgtaataaacagtgtataattggacgatacccgtgatttgcatggtaaaaagatgataaaggtt

SEQ ID NO: 28296 - protein, 222 aa, Arabidopsis thaliana
  peptide (1)..(222): Ceres Seq. ID no. 12328184
MKFFIFILALQQLYVQSFAQDFDFFYFVLQWPGAYCDSRHSCCYPQTGKPAADFGIHGLWPNYKTGGWPQNCNPDSRFDDLRVSDLMSDLQREWPTLSCPSNDGMKFWTHEWEKHGTCAESELDQHDYFEAGLKLKQKANLLHALTNAGIKPDDKFYEMKDIENTIKQVVGFAPGIECNKDSSHNSQLYQIYLCVDTSASKFINCPVMPHGRCDSRVQFPKF

SEQ ID NO: 28297 - protein, 136 aa, Arabidopsis thaliana
  peptide (1)..(136): Ceres Seq. ID no. 12328185
MSDLQREWPTLSCPSNDGMKFWTHEWEKHGTCAESELDQHDYFEAGLKLKQKANLLHALTNAGIKPDDKFYEMKDIENTIKQVVGFAPGIECNKDSSHNSQLYQIYLCVDTSASKFINCPVMPHGRCDSRVQFPKF

SEQ ID NO: 28298 - protein, 118 aa, Arabidopsis thaliana
  peptide (1)..(118): Ceres Seq. ID no. 12328186
MKFWTHEWEKHGTCAESELDQHDYFEAGLKLKQKANLLHALTNAGIKPDDKFYEMKDIENTIKQVVGFAPGIECNKDSSHNSQLYQIYLCVDTSASKFINCPVMPHGRCDSRVQFPKF

SEQ ID NO: 28299 - DNA, 629 bp, Arabidopsis thaliana
  misc_feature (1)..(629): Ceres Seq. ID no. 12680276
  misc_feature (1)..(629): Ortholog of  Ceres SEQ ID NO 14301998 as cited in SEQ ID NO 52093
  misc_feature (1)..(629): Ortholog of  Ceres SEQ ID NO 12619783 as cited in SEQ ID NO 69210
attatttcctacacaaaattcccactcaccacacacaacaaaagaatagtgatcgaagctcatggcgtctcttgcaaccgtcgccgctgtgaaaccatccgccgccataaaaggactcggcggcagctcactcgccggagctaagctctccatcaagccttcccgcctgagctttaaacccaaatccatccgggctaatggtgtggtggctaagtatggagacaaaagtgtctactttgacttagaagatttgggtaacacaacaggtcaatgggacgtatacggctctgatgctccttctccttacaatcctcttcagagcaagttctttgagacattcgctgccccattcacaaagagaggattgctcctcaagttcttgatccttggaggaggctctttgcttacttatgtcagcgctacctctaccggcgaagttcttcccatcaagagaggtcctcaggagccgcctaagctcggtcctcgcggcaagctctgatctatattcatgttacctttctcttcttccttctaaaactcatcaacatttctcaatactgcaaacccttttaagtaattttatgtatattctgtttatctgttacatttgaaacgttttttcttcccct

SEQ ID NO: 28300 - protein, 145 aa, Arabidopsis thaliana
  peptide (1)..(145): Ceres Seq. ID no. 12680277
MASLATVAAVKPSAAIKGLGGSSLAGAKLSIKPSRLSFKPKSIRANGVVAKYGDKSVYFDLEDLGNTTGQWDVYGSDAPSPYNPLQSKFFETFAAPFTKRGLLLKFLILGGGSLLTYVSATSTGEVLPIKRGPQEPPKLGPRGKL

SEQ ID NO: 28301 - DNA, 1292 bp, Arabidopsis thaliana
  misc_feature (1)..(1292): Ceres Seq. ID no. 12715029
  misc_feature (1)..(1292): Ortholog of  Ceres SEQ ID NO 13596048 as cited in SEQ ID NO 68476
  misc_feature (1)..(1292): Ortholog of  Ceres SEQ ID NO 12589137 as cited in SEQ ID NO 0
aaaagcgtgaaagcagcagatcaagataagaaagaagaaagaatcatcaaaaaatgggaataatggaggcagagaggaaaacaacaggctgggctgccagagacccatctgggatcctctctccttacacttacactcttagagagactggaccagaggatgtgaacataagaatcatttgctgtggaatctgccacaccgatcttcatcaaactaaaaatgatcttggcatgtctaattaccccatggttcctgggcatgaagtggtaggggaagtagtggaggtgggatcagatgtgagcaagttcaccgtaggggacatagttggagttggttgcctcgttggatgttgcggaggttgtagcccctgcgagagagatctggaacagtattgtccaaagaagatttggagctacaatgatgtttacatcaatggtcaacctacacaaggcggcttcgctaaagccaccgtcgttcaccaaaagtttgtggtcaagattccagaaggaatggcggttgagcaggctgcgccgctactgtgcgctggtgtgactgtgtacagtccactgagccactttggtctgaaacaaccaggcctaagaggaggtatactagggttaggtggagtcggtcacatgggtgtgaaaatagccaaagcaatgggtcaccatgtgactgtcataagctcatcaaacaagaagagagaagaggcattgcaagatcttggagctgatgattacgtgatcggatccgaccaagcgaagatgagcgaattggctgattcgttggattacgtaattgacacggtgcctgttcatcatgcacttgagccatatttgtctctgcttaagcttgatggtaaactcattctcatgggagttatcaacaatccattacagtttctcactcctctgcttatgcttgggaggaaagtgataacggggagcttcatagggagcatgaaggagacagaggagatgcttgagttctgtaaagaaaagggtttgagttcgattatcgaagttgtgaagatggattatgttaacactgcgtttgagagactcgagaagaacgatgtgcgttataggttcgtcgttgatgtcgaaggaagcaatctcgacgcttgatatcatgaaactcgaggctttttatacatactcgaatactcgatttaaacactcttatgtttgtttgtgagctttttcattcgtgtgtcactatttttcatgagaaagtggtaaaagatataatgatattggatttctaatcatgaatcatatgatatatgtgtt

SEQ ID NO: 28302 - protein, 357 aa, Arabidopsis thaliana; identical to SEQ ID NO: 23719
  peptide (1)..(357): Ceres Seq. ID no. 12715030

SEQ ID NO: 28303 - protein, 354 aa, Arabidopsis thaliana; identical to SEQ ID NO: 23720
  peptide (1)..(354): Ceres Seq. ID no. 12715031

SEQ ID NO: 28304 - protein, 298 aa, Arabidopsis thaliana; identical to SEQ ID NO: 23721
  peptide (1)..(298): Ceres Seq. ID no. 12715032

SEQ ID NO: 28305 - DNA, 2508 bp, Arabidopsis thaliana
  misc_feature (1)..(2508): Ceres Seq. ID no. 12482871
  misc_feature (1)..(2508): Ortholog of  Ceres SEQ ID NO 13532807 as cited in SEQ ID NO 53012
  misc_feature (1)..(2508): Ortholog of  Ceres SEQ ID NO 13663060 as cited in SEQ ID NO 60964
  misc_feature (1)..(2508): Ortholog of  Ceres SEQ ID NO 13598532 as cited in SEQ ID NO 65204
  misc_feature (1)..(2508): Ortholog of  Ceres SEQ ID NO 13656849 as cited in SEQ ID NO 65764
  misc_feature (1)..(2508): Ortholog of  Ceres SEQ ID NO 13656501 as cited in SEQ ID NO 69206
acgagagaaccgcacattgaaaagggaaggaagagagatatttggcagagagagaaaacgttggaggaaggattgatatttgttggactttggatcgaaaaattgaaaggtaaaagaggtagagaagctctggattccgtctcttcccgtcgtcggcgacggtggttttgcccgttggctctgaggttatatcaggctttaatttaagtggattgtcatcttctgagatatggaacaagtttttgtctggccaagctgctaccactatcggcttttctcattccaagaagcgctcgattggcggtttcttgtacgttctgatttccttgtgggctctttcgttaactgcacttagtggtcaaaccctcttctatgatctttaggggaaggtgtgaggcaaatttctgagacagggctgaagtctgcaaattcttccttcgcatagtcctagagaaacctctttgttcctctctttcatatcttgttcttatgggtgctggttgaagaaagatacatcaatttcttttctttttcagtttacaaatgtcgtttccttgagtctgaacccctgagtgagatgttgtgagcatagggtccttcctattagccaaaacagtctttcttgttggttccttcgcgtctttgagttctcagtatgtgttttcctcttctcttgctctctttcttttgcctaaatggtcaacccgtttatgttcgaagtaaataacggtcagtctacccagctggagaatcattgattttactgccttggtgtcaagtacttcctacgaacgactggaagattaatgctatataaatctttcagaagttctttacttacataatataaagaggctactttgcttaaccagaaaaaaaaagatggacaggtacaagttaattaaagaggttggtgatggaacttttggtagtgtttggcgagctataaataagcagacgggtgaagtcgttgcaattaagaaaatgaaaaagaagtactactcttgggatgaatgtattaatctgagagaagttaagtcgctcaggagaatgaatcatccaaacattgtgaagttgaaggaagtaatccgggaaaatgatatcctatactttgtctttgagtacatggagtgcaatctttaccaacttatgaaggatcgacaaaagctttttgcagaagctgatatcaaaaattggtgctttcaagtcttccaaggcctttcttacatgcatcagcgtggttacttccaccgcgatcttaagccagaaaatctgttagtctctaaagacatcattaagattgctgattttggcctggcacgtgaggttaattcgagtccaccttttaccgagtatgtttctacacgctggtacagggctcctgaagtacttctacagtcatatgtatacacatcgaaagttgatatgtgggcgatgggagctattatggctgagttgttgtctcttcgccccatttttcctggggctagtgaagcagatgaaatctacaaaatctgcagtgtcataggcaccccaactgaggagacctggttggagggacttaatcttgcaaacacaataaactatcaattccctcagcttcctggtgtacctctttctagcttgatgccatctgctagtgaagacgcaattaatcttattgagcgactttgctcgtgggatccatccagcagaccgactgctgcagaggtgctgcagcacccgttcttccagagttgcttttatgtcccaccatctcttcgtcccaagccttctgttgcaagaactcctccgcctgtcgggcctaggggatcattcgagcaccaatcagttaaacggtacccagtgtctcttgccaatgctaagccattcaatagctatgtttccccaaagtcaaatgccgcttttggcagtggtgtccagcggaaacttgatatggttaatcaagatgggacgagaaacactaaacccgtgagaagttctgtcagagactccaaatacagaccacccggaaaaaagagtcctccagcagcatcgttgaacaagaaccgggtcactcgtagtagtgtatccgagactgctgataaactcgcaaacatgaccattggagcaactggatctcgaagacactctgtgtctgtggttggacagcatcaacagctgaaaccacctccgatgaaggcaggttgggtaggagaaacacgtgacatgttccttagaccaacacaacccaccaccaatgcctactctaggaaagtcgccggatgacccctaaaccaatagtaactcaagcatgcctcttctgagcaaatattttactttataaactctctaataatcttatacatcatcagaaaaaacaagtctccttttttctttttttttcgacggcgcgtctttgcctcgtcaatggttctgcttttgttttcttttcttaatttctgtattgttaaggtttgttttttgcgtgtgtgacaatttggtttgcaataaagatcgacttgggtc

SEQ ID NO: 28306 - protein, 461 aa, Arabidopsis thaliana
  peptide (1)..(461): Ceres Seq. ID no. 12482872
MDRYKLIKEVGDGTFGSVWRAINKQTGEVVAIKKMKKKYYSWDECINLREVKSLRRMNHPNIVKLKEVIRENDILYFVFEYMECNLYQLMKDRQKLFAEADIKNWCFQVFQGLSYMHQRGYFHRDLKPENLLVSKDIIKIADFGLAREVNSSPPFTEYVSTRWYRAPEVLLQSYVYTSKVDMWAMGAIMAELLSLRPIFPGASEADEIYKICSVIGTPTEETWLEGLNLANTINYQFPQLPGVPLSSLMPSASEDAINLIERLCSWDPSSRPTAAEVLQHPFFQSCFYVPPSLRPKPSVARTPPPVGPRGSFEHQSVKRYPVSLANAKPFNSYVSPKSNAAFGSGVQRKLDMVNQDGTRNTKPVRSSVRDSKYRPPGKKSPPAASLNKNRVTRSSVSETADKLANMTIGATGSRRHSVSVVGQHQQLKPPPMKAGWVGETRDMFLRPTQPTTNAYSRKVAG

SEQ ID NO: 28307 - protein, 427 aa, Arabidopsis thaliana
  peptide (1)..(427): Ceres Seq. ID no. 12482873
MKKKYYSWDECINLREVKSLRRMNHPNIVKLKEVIRENDILYFVFEYMECNLYQLMKDRQKLFAEADIKNWCFQVFQGLSYMHQRGYFHRDLKPENLLVSKDIIKIADFGLAREVNSSPPFTEYVSTRWYRAPEVLLQSYVYTSKVDMWAMGAIMAELLSLRPIFPGASEADEIYKICSVIGTPTEETWLEGLNLANTINYQFPQLPGVPLSSLMPSASEDAINLIERLCSWDPSSRPTAAEVLQHPFFQSCFYVPPSLRPKPSVARTPPPVGPRGSFEHQSVKRYPVSLANAKPFNSYVSPKSNAAFGSGVQRKLDMVNQDGTRNTKPVRSSVRDSKYRPPGKKSPPAASLNKNRVTRSSVSETADKLANMTIGATGSRRHSVSVVGQHQQLKPPPMKAGWVGETRDMFLRPTQPTTNAYSRKVAG

SEQ ID NO: 28308 - protein, 405 aa, Arabidopsis thaliana
  peptide (1)..(405): Ceres Seq. ID no. 12482874
MNHPNIVKLKEVIRENDILYFVFEYMECNLYQLMKDRQKLFAEADIKNWCFQVFQGLSYMHQRGYFHRDLKPENLLVSKDIIKIADFGLAREVNSSPPFTEYVSTRWYRAPEVLLQSYVYTSKVDMWAMGAIMAELLSLRPIFPGASEADEIYKICSVIGTPTEETWLEGLNLANTINYQFPQLPGVPLSSLMPSASEDAINLIERLCSWDPSSRPTAAEVLQHPFFQSCFYVPPSLRPKPSVARTPPPVGPRGSFEHQSVKRYPVSLANAKPFNSYVSPKSNAAFGSGVQRKLDMVNQDGTRNTKPVRSSVRDSKYRPPGKKSPPAASLNKNRVTRSSVSETADKLANMTIGATGSRRHSVSVVGQHQQLKPPPMKAGWVGETRDMFLRPTQPTTNAYSRKVAG

SEQ ID NO: 28309 - DNA, 512 bp, Arabidopsis thaliana
  misc_feature (1)..(512): Ceres Seq. ID no. 12603514
  misc_feature (1)..(512): Ortholog of  Ceres SEQ ID NO 12635836 as cited in SEQ ID NO 0
  misc_feature (1)..(512): Ortholog of  Ceres SEQ ID NO 13599004 as cited in SEQ ID NO 0
aaagttggcgatttgcaaacttcattttcaatcgactgcgtctcctctttcttctcctacccaaccaaagtttctcatcattcatttcagatcagccatggaggacgagattgaactgaaaactgctcctgctgattttcggtttccaacaacaaaccaaacgaggcactgcttcacccgttacattgagttccacaggtgcacaactgcaaaaggtgaggatgcaaatgaatgcgagaggttcgccaagtactaccgcgctctctgccctggggaatgggttgacaagtggaatgagcagagggagactggaacattccctggccctctttgattcacacaagaatctctctttttcattttaagtttgagaccaaaaaaggtcgtgtggatgatcatgaaatctataactcttgtctttcattaatcgtttttccttggatgatcaattaaataaattggaacaagacattctttggattcatcatgtcagaattttatttgtcgagaca

SEQ ID NO: 28310 - protein, 110 aa, Arabidopsis thaliana
  peptide (1)..(110): Ceres Seq. ID no. 12603515
KLAICKLHFQSTASPLSSPTQPKFLIIHFRSAMEDEIELKTAPADFRFPTTNQTRHCFTRYIEFHRCTTAKGEDANECERFAKYYRALCPGEWVDKWNEQRETGTFPGPL

SEQ ID NO: 28311 - protein, 78 aa, Arabidopsis thaliana
  peptide (1)..(78): Ceres Seq. ID no. 12603516
MEDEIELKTAPADFRFPTTNQTRHCFTRYIEFHRCTTAKGEDANECERFAKYYRALCPGEWVDKWNEQRETGTFPGPL

SEQ ID NO: 28312 - DNA, 899 bp, Arabidopsis thaliana
  misc_feature (1)..(899): Ceres Seq. ID no. 12420741
  misc_feature (1)..(899): Ortholog of  Ceres SEQ ID NO 14307776 as cited in SEQ ID NO 59397
catcgcttcttgttgttagcgctgatgagaagaaggtgaagcggctgagtcctcttcctgagatcaaagatccaaagattttcactgttttggtagaaaatttgccagaggatcattcagatgagaatattcgagagatatttggtaaagctggaagcattaaaagtgtatccatatgtgatccaaatgctactgaagaatcagagaagggtgggaagaaggaacatttcatcagaaccagattacatgcctttgtggagtatgaaacggtggaggcagctgaaaaagcggtagctacattgaataatgagcaagactggagaaatgggttgcgagttaagcttcttgaacaagcagcaggaaagtttgcacagagaagaccagctaggaaggaagtcgataaagaaaaggacactacaggccgagttcatgatcaaactggaggagataaaaacaaaaagacgcgtgaacatcaaaatcaccgtctccatcattctgataatcctgctgatgacgacggtggcaataaaaatggaaacaaaggcagaggtggaggacaaggaaggcgacagaatcatcaaggcggcaacggacatggaacagcttcatcatcttctcatcataattatcatcctgttgaggtctcaaagcgtccacctggcccgagaatgcctgatgggacgagagggttcacaatggggcgtggtaaagtgattcctcctcccacatctactcaaactagtcatgaagtttgatcggttctgcatgttcggttgtatcattgtgtggttttatttacattaaaaaatgtgaaatttgtatgtaattagaattgagatgttgttttggatttgagtttccttttggcatattcaagtcctccaaatcttcactttggc

SEQ ID NO: 28313 - protein, 250 aa, Arabidopsis thaliana
  peptide (1)..(250): Ceres Seq. ID no. 12420742
SLLVVSADEKKVKRLSPLPEIKDPKIFTVLVENLPEDHSDENIREIFGKAGSIKSVSICDPNATEESEKGGKKEHFIRTRLHAFVEYETVEAAEKAVATLNNEQDWRNGLRVKLLEQAAGKFAQRRPARKEVDKEKDTTGRVHDQTGGDKNKKTREHQNHRLHHSDNPADDDGGNKNGNKGRGGGQGRRQNHQGGNGHGTASSSSHHNYHPVEVSKRPPGPRMPDGTRGFTMGRGKVIPPPTSTQTSHEV

SEQ ID NO: 28314 - protein, 135 aa, Arabidopsis thaliana
  peptide (1)..(135): Ceres Seq. ID no. 12420743
MSKTGEMGCELSFLNKQQESLHREDQLGRKSIKKRTLQAEFMIKLEEIKTKRRVNIKITVSIILIILLMTTVAIKMETKAEVEDKEGDRIIKAATDMEQLHHLLIIIIILLRSQSVHLARECLMGREGSQWGVVK

SEQ ID NO: 28315 - protein, 129 aa, Arabidopsis thaliana
  peptide (1)..(129): Ceres Seq. ID no. 12420744
MGCELSFLNKQQESLHREDQLGRKSIKKRTLQAEFMIKLEEIKTKRRVNIKITVSIILIILLMTTVAIKMETKAEVEDKEGDRIIKAATDMEQLHHLLIIIIILLRSQSVHLARECLMGREGSQWGVVK

SEQ ID NO: 28316 - DNA, 813 bp, Arabidopsis thaliana
  misc_feature (1)..(813): Ceres Seq. ID no. 12420563
  misc_feature (1)..(813): Ortholog of  Ceres SEQ ID NO 12593058 as cited in SEQ ID NO 63090
gaaaggtttcttgcccaaatacaagaacttgacagctccaaagaaagaagcatttctcgatttcctcgctgtcccgacatattactcaatggcgatgctcaaatccaacaatggtccgatgaacacacttgcgacagatggagctaacaagtttgagcttactgtacagaacgatggagagaaggttaccctcaagacaaggatcaacactgtcaagatcgttgatactcttattgatgagcagcctttagctatatatgcgactgataaggttttgttgcctaaagagttgtttaaggcttcggctgttgaagctccggctcctgctccggcaccagaggatggtgatgttgcggattctccaaaagcggctaaagggaaagcgaaaggaaagaagaagaaggctgcaccgtcgccagataatgatccttttggtgactcggattcgcctgccgaagggcctgacggagaggccgatgatgcgacggcagatgatgctggtgcggttaggatcatcggaggagctaaggctggtttggtggtgagcttgctctgcttgtttgcttcttcttggcttctatagtttcacttcttgtttcttcgattcttccatgttttttttttttgtgaatcttttatttatggtttttgggggagagtaaatgaggattatttatttccctctattgttgagttttttttatttatttaaaagttggttgtcgaattaaatagtcggtagtttatatatttgtgtgttcttgtttcacgtgtttgtttagttgatgatgtaaacaagtcctgattttggtg

SEQ ID NO: 28317 - protein, 193 aa, Arabidopsis thaliana
  peptide (1)..(193): Ceres Seq. ID no. 12420564
KGFLPKYKNLTAPKKEAFLDFLAVPTYYSMAMLKSNNGPMNTLATDGANKFELTVQNDGEKVTLKTRINTVKIVDTLIDEQPLAIYATDKVLLPKELFKASAVEAPAPAPAPEDGDVADSPKAAKGKAKGKKKKAAPSPDNDPFGDSDSPAEGPDGEADDATADDAGAVRIIGGAKAGLVVSLLCLFASSWLL

SEQ ID NO: 28318 - protein, 164 aa, Arabidopsis thaliana
  peptide (1)..(164): Ceres Seq. ID no. 12420565
MAMLKSNNGPMNTLATDGANKFELTVQNDGEKVTLKTRINTVKIVDTLIDEQPLAIYATDKVLLPKELFKASAVEAPAPAPAPEDGDVADSPKAAKGKAKGKKKKAAPSPDNDPFGDSDSPAEGPDGEADDATADDAGAVRIIGGAKAGLVVSLLCLFASSWLL

SEQ ID NO: 28319 - protein, 162 aa, Arabidopsis thaliana
  peptide (1)..(162): Ceres Seq. ID no. 12420566
MLKSNNGPMNTLATDGANKFELTVQNDGEKVTLKTRINTVKIVDTLIDEQPLAIYATDKVLLPKELFKASAVEAPAPAPAPEDGDVADSPKAAKGKAKGKKKKAAPSPDNDPFGDSDSPAEGPDGEADDATADDAGAVRIIGGAKAGLVVSLLCLFASSWLL

SEQ ID NO: 28320 - DNA, 787 bp, Arabidopsis thaliana
  misc_feature (1)..(787): Ceres Seq. ID no. 12340441
  misc_feature (1)..(787): Ortholog of  Ceres SEQ ID NO 12474478 as cited in SEQ ID NO 96
  misc_feature (1)..(787): Ortholog of  Ceres SEQ ID NO 14309053 as cited in SEQ ID NO 0
acaaaaaaaatcactaatggcaaaacaatatctctttctaatcctctcaatctcctacctcttatcactggagctcacggcggccaccgcagcctcacagaccggagcttctaagaaagccataaacttcatccaatcttcttgcaaaaccaccacatacccagccttatgcgtccactcactctccgtctacgcaaacgacatccaaacaagccctaaacgtttagctgagaccgctatagccgtgacactaagccgagcccaatccacgaagctctttgtctctcgtctgacacgtatgaaaggtcttaagaagcgcgaggtggaagccatcaaagattgcgtcgaggagatgaacgataccgttgaccgtttgaccagatctgttcaagaactgaagttgtgtgggagtgccaaagatcaagaccagtttgcgtaccacatgagtaatgctcagacttggactagtgcggctttgactgacgagaacacttgctccgatgggttttcgggtcgggttatggatgggaggatcaagaactcggttcgggctagaatcatgaacgtgggacatgaaaccagcaacgctttgtccttgattaatgcctttgctaaaacttactaatttaaaactatattttgtcctgtaaaatatatatatagataaatgtaatgtcttgctaagagtttgatgtgatatatttctttcgattttggtagtttctttttgttttgtaacgtggtttataatagtataatgtgtattttgagctataaagttgttttt

SEQ ID NO: 28321 - protein, 207 aa, Arabidopsis thaliana
  peptide (1)..(207): Ceres Seq. ID no. 12340442
QKKSLMAKQYLFLILSISYLLSLELTAATAASQTGASKKAINFIQSSCKTTTYPALCVHSLSVYANDIQTSPKRLAETAIAVTLSRAQSTKLFVSRLTRMKGLKKREVEAIKDCVEEMNDTVDRLTRSVQELKLCGSAKDQDQFAYHMSNAQTWTSAALTDENTCSDGFSGRVMDGRIKNSVRARIMNVGHETSNALSLINAFAKTY

SEQ ID NO: 28322 - protein, 202 aa, Arabidopsis thaliana
  peptide (1)..(202): Ceres Seq. ID no. 12340443
MAKQYLFLILSISYLLSLELTAATAASQTGASKKAINFIQSSCKTTTYPALCVHSLSVYANDIQTSPKRLAETAIAVTLSRAQSTKLFVSRLTRMKGLKKREVEAIKDCVEEMNDTVDRLTRSVQELKLCGSAKDQDQFAYHMSNAQTWTSAALTDENTCSDGFSGRVMDGRIKNSVRARIMNVGHETSNALSLINAFAKTY

SEQ ID NO: 28323 - protein, 108 aa, Arabidopsis thaliana
  peptide (1)..(108): Ceres Seq. ID no. 12340444
MKGLKKREVEAIKDCVEEMNDTVDRLTRSVQELKLCGSAKDQDQFAYHMSNAQTWTSAALTDENTCSDGFSGRVMDGRIKNSVRARIMNVGHETSNALSLINAFAKTY

SEQ ID NO: 28324 - DNA, 737 bp, Arabidopsis thaliana
  misc_feature (1)..(737): Ceres Seq. ID no. 12393223
  misc_feature (1)..(737): Ortholog of  Ceres SEQ ID NO 12586195 as cited in SEQ ID NO 63768
  misc_feature (1)..(737): Ortholog of  Ceres SEQ ID NO 13599518 as cited in SEQ ID NO 0
aacgacagattaaagcagagagaaaaacaaaatccattgaagaaggagaagaagaaaaaaaatgggagcattttgcaagttgatcgatgcggttctcttcttatactttgctctcatggcggtaattgcgccgcttatcgacggtcaaacgagtcttcccggcgatatcttcccggcgtttatcgtcgatctgaatcgctggtacattgatgaatttggagattatctagtcaaagagaagccgcatttcctagtcggactcgtctggcatgagcttttgcttctttggccgctctcgatcgtcaacgtctacgcaattctcgctgggaaatcgtggtttggtaccacctcaatggtgtacggagcttccgtcgtgacttctatggctgctatactgggagagatgataggatcagggaaggcatctgagaaattgttgatgatgtatgtgccattcatgggtgttggtattctagctcttcttcgtggtcttctttctcaatccaacaaaagtggtggagctgttggcaagagacctgctattttggccaggagaaagcgtgcttgaggtacacttgatgatcagcaagtgtatcttttgactctgagaatttctgctataggtggatttggcttttcaaacagaaaattttgaacctttgtgatgtattcttcctgtttttttagcaatatcatgtcatctgtgttcttgtttgaaattaaatgaagttaaactg

SEQ ID NO: 28325 - protein, 168 aa, Arabidopsis thaliana
  peptide (1)..(168): Ceres Seq. ID no. 12393224
MGAFCKLIDAVLFLYFALMAVIAPLIDGQTSLPGDIFPAFIVDLNRWYIDEFGDYLVKEKPHFLVGLVWHELLLLWPLSIVNVYAILAGKSWFGTTSMVYGASVVTSMAAILGEMIGSGKASEKLLMMYVPFMGVGILALLRGLLSQSNKSGGAVGKRPAILARRKRA

SEQ ID NO: 28326 - protein, 150 aa, Arabidopsis thaliana
  peptide (1)..(150): Ceres Seq. ID no. 12393225
MAVIAPLIDGQTSLPGDIFPAFIVDLNRWYIDEFGDYLVKEKPHFLVGLVWHELLLLWPLSIVNVYAILAGKSWFGTTSMVYGASVVTSMAAILGEMIGSGKASEKLLMMYVPFMGVGILALLRGLLSQSNKSGGAVGKRPAILARRKRA

SEQ ID NO: 28327 - DNA, 1002 bp, Arabidopsis thaliana
  misc_feature (1)..(1002): Ceres Seq. ID no. 12420559
  misc_feature (1)..(1002): Ortholog of  Ceres SEQ ID NO 13594163 as cited in SEQ ID NO 60426
attcaatttttggtggtcttttcaaaagtggaaatacaacaaaacaatgtcgggacttagaagattggatggcaagatcgcaattataacaggcggagctagtgggattggagctgaagcggttaggttgttcacggaccatggagctaaagtggtcatcgtggacatacaagaagagcttggccaaaacctcgccgtttcgatagggctagacaaagcaagtttttaccgttgtaatgtaaccgacgagacggatgtcgagaacgccgttaagttcaccgttgaaaaacacggaaagcttgacgttctgtttagtaacgccggggtcttggaagcgtttggaagcgttcttgatttggatcttgaggcgtttgatcgaacgatggcggttaacgttcgcggtgcggctgcgtttatcaaacacgcggcacgttcgatggtggctagtggtactcgtggctccattgtatgtacgacgagtattgcggcagagataggtggtccgggacctcatagttacacggcttctaagcacgcgcttctcgggctgatccgatcagcgtgtgctggactggggcagtacggtattagagtcaacggtgttgcaccgtatggggttgccactgggatgactagcgcctacaatgaggaagcggtgaagatgcttgaagaatatggtgaagccctagggaatctcaaaggtgtggtgcttaaagctcgccacatcgcagaagcagctttgtttttggcttctgatgattcggtttatattagcggtcagaatctggtggttgatggtggttttagcgtcgttaagctcatgagcacgtgagaaacaactaaaaaatgagggcatagactctcttgacactttcattttatttcttgaataaaaattgaatttataagtactttcgatcattgtgttgtatgttaggctcttgagtttatataaaccttgagtttaataatttactttttcttttagtttctcaattctat

SEQ ID NO: 28328 - protein, 276 aa, Arabidopsis thaliana
  peptide (1)..(276): Ceres Seq. ID no. 12420560
FNFWWSFQKWKYNKTMSGLRRLDGKIAIITGGASGIGAEAVRLFTDHGAKVVIVDIQEELGQNLAVSIGLDKASFYRCNVTDETDVENAVKFTVEKHGKLDVLFSNAGVLEAFGSVLDLDLEAFDRTMAVNVRGAAAFIKHAARSMVASGTRGSIVCTTSIAAEIGGPGPHSYTASKHALLGLIRSACAGLGQYGIRVNGVAPYGVATGMTSAYNEEAVKMLEEYGEALGNLKGVVLKARHIAEAALFLASDDSVYISGQNLVVDGGFSVVKLMST

SEQ ID NO: 28329 - protein, 261 aa, Arabidopsis thaliana
  peptide (1)..(261): Ceres Seq. ID no. 12420561
MSGLRRLDGKIAIITGGASGIGAEAVRLFTDHGAKVVIVDIQEELGQNLAVSIGLDKASFYRCNVTDETDVENAVKFTVEKHGKLDVLFSNAGVLEAFGSVLDLDLEAFDRTMAVNVRGAAAFIKHAARSMVASGTRGSIVCTTSIAAEIGGPGPHSYTASKHALLGLIRSACAGLGQYGIRVNGVAPYGVATGMTSAYNEEAVKMLEEYGEALGNLKGVVLKARHIAEAALFLASDDSVYISGQNLVVDGGFSVVKLMST

SEQ ID NO: 28330 - protein, 149 aa, Arabidopsis thaliana
  peptide (1)..(149): Ceres Seq. ID no. 12420562
MAVNVRGAAAFIKHAARSMVASGTRGSIVCTTSIAAEIGGPGPHSYTASKHALLGLIRSACAGLGQYGIRVNGVAPYGVATGMTSAYNEEAVKMLEEYGEALGNLKGVVLKARHIAEAALFLASDDSVYISGQNLVVDGGFSVVKLMST

SEQ ID NO: 28331 - DNA, 689 bp, Arabidopsis thaliana
  misc_feature (1)..(689): Ceres Seq. ID no. 13494629
  misc_feature (1)..(689): Ortholog of  Ceres SEQ ID NO 13594766 as cited in SEQ ID NO 51913
  misc_feature (1)..(689): Ortholog of  Ceres SEQ ID NO 12609226 as cited in SEQ ID NO 59300
  misc_feature (1)..(689): Ortholog of  Ceres SEQ ID NO 13654942 as cited in SEQ ID NO 62533
  misc_feature (1)..(689): Ortholog of  Ceres SEQ ID NO 13599195 as cited in SEQ ID NO 0
gagagagagagacaaagagagatctgatcctttgaagaaacaacaccaaaaaaaaaaaaaaaagaatggcatcagcggatgaaaaggtggtggaagagaaggcttcggtgatttcaagcttgttggacaaagccaaaggtttctttgcggagaagctggcgaatattccgacgccggaagcaaccgtggacgacgttgatttcaaaggcgtgacacgtgatggagtagattatcacgccaaggtctccgtcaagaatccttactctcaatccatccctatctgccagatctcttacatcctcaagagtgccacaaggacgatcgcgtcaggcacgataccggacccgggttcgttggttgggagcggcacgacggttctggacgtaccggttaaggtggcttatagcatagcggttagtctgatgaaggatatgtgtacggactgggacattgactatcaactagacattgggctaaccttcgacattcctgttgttggtgatatcaccattcctgtctctactcagggagagatcaagctcccttcccttcgcgacttcttttaattaccttatttcaaatatagttttcttaaatcataatctaattttcaataatgtacgatccataaacatagacgatcggagattaatacatttctggaatcctttttttattttgttgattcc

SEQ ID NO: 28332 - protein, 166 aa, Arabidopsis thaliana; identical to SEQ ID NO: 26434
  peptide (1)..(166): Ceres Seq. ID no. 13494630

SEQ ID NO: 28333 - DNA, 678 bp, Arabidopsis thaliana
  misc_feature (1)..(678): Ceres Seq. ID no. 12330045
  misc_feature (1)..(678): Ortholog of  Ceres SEQ ID NO 12557654 as cited in SEQ ID NO 12
  misc_feature (1)..(678): Ortholog of  Ceres SEQ ID NO 15175150 as cited in SEQ ID NO 0
aaaaatttcaaaatccctaaaaagctttcaaacaaataaactcagaaaaaatggccgaaaccgaaacggagtcgatcaccacctcttctccaccgccgatctcagaaatcgaaaactccaccacattaccgacaacggagacggagaagaatccgaatccggtaaccatctcgctccgaatctggccaccgactcaaaaaactcgcgacgccgtgattaaccgtctgatcgaaacactgtcaaccgaatcaatcctctccaagagattcggatctcttgaatcggaagaagcttcctccgtcgcgaaagcaatcgaagaagaagcttacgccgtcgcttctgccaccgtattcggtgatgacgacgggatcgagattcttaaagcttattctaaagagattagtaaacgtatgcttgaatctgttaaagctaagaataatgtggcttctcctccaccaaaggatggtgatggaattgaatcagctgttgattcgaaaattgattcaagtgaagcttgaggaggcttgaatatggtgttgttctcttatctttaactatctttttatttgtgttagattgttatgcgattatctatctcagagtttttgttgttgtataacttgtggatttgggacctgttactaatatgattttgtggttgatttggttttgacgttc

SEQ ID NO: 28334 - protein, 155 aa, Arabidopsis thaliana
  peptide (1)..(155): Ceres Seq. ID no. 12330046
MAETETESITTSSPPPISEIENSTTLPTTETEKNPNPVTISLRIWPPTQKTRDAVINRLIETLSTESILSKRFGSLESEEASSVAKAIEEEAYAVASATVFGDDDGIEILKAYSKEISKRMLESVKAKNNVASPPPKDGDGIESAVDSKIDSSEA

SEQ ID NO: 28335 - DNA, 1463 bp, Arabidopsis thaliana
  misc_feature (1)..(1463): Ceres Seq. ID no. 13487748
  misc_feature (1)..(1463): Ortholog of  Ceres SEQ ID NO 14314925 as cited in SEQ ID NO 57985
  misc_feature (1)..(1463): Ortholog of  Ceres SEQ ID NO 13591365 as cited in SEQ ID NO 62720
gaatctctccctctttcttccatttcccagaactctcagagtttcgccacttcttctgaagaatctgaaagatcacaaagtccaaagaaaaaaaatgagcgtgatcacaactccaatagagaccctgcacctaaagtcaacacttcgtcttctaccacgagctgtttatcgcagtcaacggattcaagttttcccgcccaacatcttctcgaacacttctctgagttctccacttcgcatcgacccaatctctcaagttggcggatcgaggaatttgtggcgtagatatgcatctgataatttctcggagatgggtttggatcctggagctgatccattcaaggttattgagaagccttctatagtggatagaatgaagaaagcaaactcaattcttcctcatgtagtgttggcgagtacaatattagctcttatctatcctccttctttcacttggtttacgtcgaggtactttgtgcccgctttaggttttttgatgtttgcggttggtatcaattcaaacgagaaagactttcttgaagctttcaaaagaccaaaagctatcctcctcggttatgttggacaatatctcgtaaagcctgtcctaggtttcatctttggcctagctgctgtttctcttttccaactcccaactccaattggtgctggaatcatgttggtatcatgtgttagtggagctcagttgtcaaactatgcgacattcctaactgatccagcattggcacctcttagcatcgtcatgacatctctatcaaccgctactgcggttcttgtcacaccgatgctatcactcctgctcattgggaagaaactacccgttgatgtaaaaggaatgatatccagcattcttcaggttgtaatcgcaccaatcgctgcaggattgctactaaacaagttgttcccaaaagtatcaaatgcaatccgaccatttctcccgattctatcggttctcgacacagcttgctgcgttggagcaccactcgcattgaacataaactcggtcatgtctccatttggagccaccatattgttactagtaacaatgtttcatctctcagctttcctcgctggatacttccttaccggttctgtctttagaaacgctccagacgctaaagccatgcaaagaacattgtcctatgaaactggaatgcagagtagccttttggctctagcgcttgctactaagttctttcaagatcctcttgtggggattcctcctgctatatctacggtggtaatgtcattgatggggttcactctcgttttgatctggtctaaggaaaagagtaacacattttaacattttgattttgtttcactccacattttgattatacatatatatatgtactacaaataattggaaaattcttcttgtaatataaataattcaatacagaatttgagatttttaatgtactaatctccattttgtcttt

SEQ ID NO: 28336 - protein, 440 aa, Arabidopsis thaliana
  peptide (1)..(440): Ceres Seq. ID no. 13487749
NLSLFLPFPRTLRVSPLLLKNLKDHKVQRKKMSVITTPIETLHLKSTLRLLPRAVYRSQRIQVFPPNIFSNTSLSSPLRIDPISQVGGSRNLWRRYASDNFSEMGLDPGADPFKVIEKPSIVDRMKKANSILPHVVLASTILALIYPPSFTWFTSRYFVPALGFLMFAVGINSNEKDFLEAFKRPKAILLGYVGQYLVKPVLGFIFGLAAVSLFQLPTPIGAGIMLVSCVSGAQLSNYATFLTDPALAPLSIVMTSLSTATAVLVTPMLSLLLIGKKLPVDVKGMISSILQVVIAPIAAGLLLNKLFPKVSNAIRPFLPILSVLDTACCVGAPLALNINSVMSPFGATILLLVTMFHLSAFLAGYFLTGSVFRNAPDAKAMQRTLSYETGMQSSLLALALATKFFQDPLVGIPPAISTVVMSLMGFTLVLIWSKEKSNTF

SEQ ID NO: 28337 - protein, 409 aa, Arabidopsis thaliana
  peptide (1)..(409): Ceres Seq. ID no. 13487750
MSVITTPIETLHLKSTLRLLPRAVYRSQRIQVFPPNIFSNTSLSSPLRIDPISQVGGSRNLWRRYASDNFSEMGLDPGADPFKVIEKPSIVDRMKKANSILPHVVLASTILALIYPPSFTWFTSRYFVPALGFLMFAVGINSNEKDFLEAFKRPKAILLGYVGQYLVKPVLGFIFGLAAVSLFQLPTPIGAGIMLVSCVSGAQLSNYATFLTDPALAPLSIVMTSLSTATAVLVTPMLSLLLIGKKLPVDVKGMISSILQVVIAPIAAGLLLNKLFPKVSNAIRPFLPILSVLDTACCVGAPLALNINSVMSPFGATILLLVTMFHLSAFLAGYFLTGSVFRNAPDAKAMQRTLSYETGMQSSLLALALATKFFQDPLVGIPPAISTVVMSLMGFTLVLIWSKEKSNTF

SEQ ID NO: 28338 - protein, 337 aa, Arabidopsis thaliana
  peptide (1)..(337): Ceres Seq. ID no. 13487751
MGLDPGADPFKVIEKPSIVDRMKKANSILPHVVLASTILALIYPPSFTWFTSRYFVPALGFLMFAVGINSNEKDFLEAFKRPKAILLGYVGQYLVKPVLGFIFGLAAVSLFQLPTPIGAGIMLVSCVSGAQLSNYATFLTDPALAPLSIVMTSLSTATAVLVTPMLSLLLIGKKLPVDVKGMISSILQVVIAPIAAGLLLNKLFPKVSNAIRPFLPILSVLDTACCVGAPLALNINSVMSPFGATILLLVTMFHLSAFLAGYFLTGSVFRNAPDAKAMQRTLSYETGMQSSLLALALATKFFQDPLVGIPPAISTVVMSLMGFTLVLIWSKEKSNTF

SEQ ID NO: 28339 - DNA, 791 bp, Arabidopsis thaliana
  misc_feature (1)..(791): Ceres Seq. ID no. 13500319
  misc_feature (1)..(791): Ortholog of  Ceres SEQ ID NO 14306286 as cited in SEQ ID NO 56909
gtaaaaattacacaaaggatagtgtctgcaaatatctaaatgaaaacacttaattccaaaatgagaaatcaagtgggttttgcctagctaattgtataaatagtaacacaatcataatctcttcttccatcaggtcttcttcataatatatttcttctctaataattgaaagcaaaagaaaacagtttttttttttagaaaggtaaagaaatggaggaaacaaaggagagaaagatagtagtagcagtagacgaaagcgaagagagcatggaagctctgtcatggagtcttgacaatctttttccatatggttccaataatacactcatcctcctctacgtcaagccccctcttcccgtttactcttccctcgatgccgcagggtttatagtgacaggagacccggttgcagctttgaagaagtatgaatacgagctcgtggaatcggtcatggctcggtctcgaaccgtgtaccaagattatgagtctgatattaatatagagagacgagttggaagaggagatgctaaggaagttatatgcaacgcagttcagaaacttagagttgatatgttagtaatgggcactcatgactatggcttcttcaaaagggctttgctagggagtgtgagcgagtattgcgccaaacgagtcaagtgtcctgtggttatcgtcaagaagcaagctcaagataattaagctcatatgattgcattgtgtatatgtttcgaaagaactggtgtaacacttgaatcaatcttcgtatgcgataataaaatacataacggttt

SEQ ID NO: 28340 - protein, 162 aa, Arabidopsis thaliana
  peptide (1)..(162): Ceres Seq. ID no. 13500320
MEETKERKIVVAVDESEESMEALSWSLDNLFPYGSNNTLILLYVKPPLPVYSSLDAAGFIVTGDPVAALKKYEYELVESVMARSRTVYQDYESDINIERRVGRGDAKEVICNAVQKLRVDMLVMGTHDYGFFKRALLGSVSEYCAKRVKCPVVIVKKQAQDN

SEQ ID NO: 28341 - protein, 143 aa, Arabidopsis thaliana
  peptide (1)..(143): Ceres Seq. ID no. 13500321
MEALSWSLDNLFPYGSNNTLILLYVKPPLPVYSSLDAAGFIVTGDPVAALKKYEYELVESVMARSRTVYQDYESDINIERRVGRGDAKEVICNAVQKLRVDMLVMGTHDYGFFKRALLGSVSEYCAKRVKCPVVIVKKQAQDN

SEQ ID NO: 28342 - protein, 82 aa, Arabidopsis thaliana
  peptide (1)..(82): Ceres Seq. ID no. 13500322
MARSRTVYQDYESDINIERRVGRGDAKEVICNAVQKLRVDMLVMGTHDYGFFKRALLGSVSEYCAKRVKCPVVIVKKQAQDN

SEQ ID NO: 28343 - DNA, 1649 bp, Arabidopsis thaliana
  misc_feature (1)..(1649): Ceres Seq. ID no. 13645741
  misc_feature (1)..(1649): Ortholog of  Ceres SEQ ID NO 14301413 as cited in SEQ ID NO 53524
aaaaatcaattagggttttaacaaaaggttttagatttctggattgctgctctttctcccctgtgccgtcctgtggaaaacatcgttctttcaccaacaatggcgaagaagcgagatcgaattgtcaacactcaaccttttatctccgatgacgcctccctcgcttcttccaggaaacgatcaaaggttccaaaaacccatcagaaacaggaaaagttgattgaagctggtatgagcgagaagatcatgaaacaagctcttgcacaacaaaaggaagttgctgatgaagagaacgccgagagaaaccctagtagcgccgcttttgctgttgccggcgctgcgactgctggagaggagcagaaaattctggaggaggaagaagatgatattgatgattttgatggaacctttgaaaaccagagccaattcaataagcaagaggagattaatgaggatgatgagaagttgtttgagtcattcttaaataagaatgctcctcctcaacgtacgcttactgatatcattatcaagaagctcaaagataaggatgctgacttagctgaagaagagcgtcccgatcctaaaatggaccctgcaataactaagttatataaaggtgttggcaagtttatgagtgagtatacagttgggaaattgccaaaagcatttaagcttgttacttcaatggaacactgggaggatgttttatacttgactgagccagagaaatggtcacctaacgcattgtatcaagccacaaggatctttgcttccaacttgaaagacagacaagttcaacggttttataactatgttttgcttccgcgagtgagagaggatattagaaagcacaagaagctgcactttgctctgtaccaggctctgaaaaagtcactgtataagcctagtgctttcaatcaagggatactattcccgctttgtaagtcggggacatgcaatctcagagaagctgtaattatagggagcattcttgaaaagtgttcgatccctatgcttcactcatgtgttgccttgaacagactggctgagatggattattgtggcacaacaagttactttataaaagttcttttggagaagaaatattgtatgccgtatcgggtgcttgatgcattggttgctcacttcatgagatttgttgacgatataagagttatgcctgtgatttggcaccagtctcttcttacctttgtgcaacggtacaattatgaaatactaaaggaagataaagaacatctccaaactctcctccagaggcaaaaacaccatcttgttactcctgagattctgagagagcttaaggatagcagaaaccgtggagagaaagaagatcctatggtggataattttgccccagtaccggctaaagaagataggtttgacattcctgaagtaccaatggaagaagactgatgattcatggtgtttggtattgaaagaggactgatgattcatagcagcagagataaaccctgaaactgggtgggtatgattctggttttccagttttgacatcgttgtattattatttcttatttgagtaagatttgaaatttttattactacatgatagtgtatctttaaacatggtttaatctttttgatataatccaaatttggtcttgtct

SEQ ID NO: 28344 - protein, 444 aa, Arabidopsis thaliana
  peptide (1)..(444): Ceres Seq. ID no. 13645742
MAKKRDRIVNTQPFISDDASLASSRKRSKVPKTHQKQEKLIEAGMSEKIMKQALAQQKEVADEENAERNPSSAAFAVAGAATAGEEQKILEEEEDDIDDFDGTFENQSQFNKQEEINEDDEKLFESFLNKNAPPQRTLTDIIIKKLKDKDADLAEEERPDPKMDPAITKLYKGVGKFMSEYTVGKLPKAFKLVTSMEHWEDVLYLTEPEKWSPNALYQATRIFASNLKDRQVQRFYNYVLLPRVREDIRKHKKLHFALYQALKKSLYKPSAFNQGILFPLCKSGTCNLREAVIIGSILEKCSIPMLHSCVALNRLAEMDYCGTTSYFIKVLLEKKYCMPYRVLDALVAHFMRFVDDIRVMPVIWHQSLLTFVQRYNYEILKEDKEHLQTLLQRQKHHLVTPEILRELKDSRNRGEKEDPMVDNFAPVPAKEDRFDIPEVPMEED

SEQ ID NO: 28345 - protein, 400 aa, Arabidopsis thaliana
  peptide (1)..(400): Ceres Seq. ID no. 13645743
MSEKIMKQALAQQKEVADEENAERNPSSAAFAVAGAATAGEEQKILEEEEDDIDDFDGTFENQSQFNKQEEINEDDEKLFESFLNKNAPPQRTLTDIIIKKLKDKDADLAEEERPDPKMDPAITKLYKGVGKFMSEYTVGKLPKAFKLVTSMEHWEDVLYLTEPEKWSPNALYQATRIFASNLKDRQVQRFYNYVLLPRVREDIRKHKKLHFALYQALKKSLYKPSAFNQGILFPLCKSGTCNLREAVIIGSILEKCSIPMLHSCVALNRLAEMDYCGTTSYFIKVLLEKKYCMPYRVLDALVAHFMRFVDDIRVMPVIWHQSLLTFVQRYNYEILKEDKEHLQTLLQRQKHHLVTPEILRELKDSRNRGEKEDPMVDNFAPVPAKEDRFDIPEVPMEED

SEQ ID NO: 28346 - protein, 395 aa, Arabidopsis thaliana
  peptide (1)..(395): Ceres Seq. ID no. 13645744
MKQALAQQKEVADEENAERNPSSAAFAVAGAATAGEEQKILEEEEDDIDDFDGTFENQSQFNKQEEINEDDEKLFESFLNKNAPPQRTLTDIIIKKLKDKDADLAEEERPDPKMDPAITKLYKGVGKFMSEYTVGKLPKAFKLVTSMEHWEDVLYLTEPEKWSPNALYQATRIFASNLKDRQVQRFYNYVLLPRVREDIRKHKKLHFALYQALKKSLYKPSAFNQGILFPLCKSGTCNLREAVIIGSILEKCSIPMLHSCVALNRLAEMDYCGTTSYFIKVLLEKKYCMPYRVLDALVAHFMRFVDDIRVMPVIWHQSLLTFVQRYNYEILKEDKEHLQTLLQRQKHHLVTPEILRELKDSRNRGEKEDPMVDNFAPVPAKEDRFDIPEVPMEED

SEQ ID NO: 28347 - DNA, 1041 bp, Arabidopsis thaliana
  misc_feature (1)..(1041): Ceres Seq. ID no. 13504928
  misc_feature (1)..(1041): Ortholog of  Ceres SEQ ID NO 15176379 as cited in SEQ ID NO 59735
aaaaaaactctccactcaactctctctggtcagctgtctcttccccattctctagggttttcaagctcaacctcaagctccactacgatctcttcttcttctctaatctcagttgacagttgaaagatgcaaggtgtgattcgatccttcgtctccggtggaaatgttgtgaaaggctctgtgctgcaacatctccgtgtgattaacccggcgattcagccttctgtgttttgttcacgctatgaatcaactcaacctgcacgtatggaggaatctggattcgagagcacaactatttccgatgtcatgaaatccaaaggcaaaagtgctgatggatcttggctttggtgtactactgatgacactgtttatgatgctgttaaatccatgacacaacacaatgttggtgccttggtggttgtgaaacctggtgagcaacaagctcttgctggtatcattacagagagagattatctacggaagatcattgtgcaagggagatcatccaaatcaacaaaagttggagacattatgactgaagagaataagcttatcactgtgacaccggagaccaaggtcttgcgtgctatgcaactgatgacagataaccgaatcaggcatattccggtaatcaaagacaagggcatgattggaatggtgtccataggagatgttgtccgtgcagtggttcatgagcatagagaggagcttcaacgcctaaatgcgtatattcagggaggttactagatcttgaataatggaaagaaaagagttccctgttgtgtcgtctggtcttgtgctgctgaatctgaaaagcttccagatcagtgtaaatatgcagtcctcgttgttattgttgttgttgttgtgtttgatgttttgtgttgtttcgttgtttaacttgtcaaaactaaggccttgtgctgcttctcttcttgcgcttacttagcaagagaataaaaccaaagacatgatgtttgtttttgttatcaaatcttgcgtcaagtatccatgtgtgttatgaaataatagaattacttc

SEQ ID NO: 28348 - protein, 206 aa, Arabidopsis thaliana
  peptide (1)..(206): Ceres Seq. ID no. 13504929
MQGVIRSFVSGGNVVKGSVLQHLRVINPAIQPSVFCSRYESTQPARMEESGFESTTISDVMKSKGKSADGSWLWCTTDDTVYDAVKSMTQHNVGALVVVKPGEQQALAGIITERDYLRKIIVQGRSSKSTKVGDIMTEENKLITVTPETKVLRAMQLMTDNRIRHIPVIKDKGMIGMVSIGDVVRAVVHEHREELQRLNAYIQGGY

SEQ ID NO: 28349 - protein, 160 aa, Arabidopsis thaliana; identical to SEQ ID NO: 25659
  peptide (1)..(160): Ceres Seq. ID no. 13504930

SEQ ID NO: 28350 - protein, 146 aa, Arabidopsis thaliana; identical to SEQ ID NO: 25660
  peptide (1)..(146): Ceres Seq. ID no. 13504931

SEQ ID NO: 28351 - DNA, 1596 bp, Arabidopsis thaliana
  misc_feature (1)..(1596): Ceres Seq. ID no. 13496758
  misc_feature (1)..(1596): Ortholog of  Ceres SEQ ID NO 14311870 as cited in SEQ ID NO 51574
  misc_feature (1)..(1596): Ortholog of  Ceres SEQ ID NO 15174583 as cited in SEQ ID NO 53693
  misc_feature (1)..(1596): Ortholog of  Ceres SEQ ID NO 13581563 as cited in SEQ ID NO 58942
  misc_feature (1)..(1596): Ortholog of  Ceres SEQ ID NO 13658707 as cited in SEQ ID NO 66286
  misc_feature (1)..(1596): Ortholog of  Ceres SEQ ID NO 13654528 as cited in SEQ ID NO 68080
atgacctctctctccaccgccggttaccttcttctccttctccttctccctataagctacgacggtggcttcatcggagccgccgatgcagaacatgacctcagagccactgatctccataatcatcgccatcgtcgccaccgtaaccaccatcgcggagaagagtttgagtactcagccatatcatgtagagcttactcagcctcattggacgagtttggcgccgtaggagacggtgtaacttcaaatacagcggcgtttcgcgacgcggtgtcacaacttagccgtttcgcagactacggtggctcattgttatttgttcccgccggacggtggctcaccggaaactttaacctgaccagccattttacgcttttcctccaccgtgatgctgttatcctcgcctctcaagaagagagtgactatgaagtgatagagccactgccttcgtacggaagagggcgagacacagatggtggaaggttcatcagtctactttttggttcaaacttaaccgatgttgttatcaccggtgagaatgggacaattgatggacaaggagaaccatggtgggggaaattcaagagaggagaactaaaatacacaagaccttatttgattgagattatgcattctgatggtatccaaatctccaatctcactttcttgaattctccttcttggcatattcacccggtctacagcagcaatatatatatccaaggtttgacgatattagcaccggtcacggtaccaaacactgacggtatcaacccagattcttgtaccaacacgaggattgaggactgctacattgtctccggcgacgattgtatcgccgttaaaagtggatgggatcaatacggaatcaactacggcatgcctacgaaacagctcttgatccgacggctcacatgcatttctcctgatagtgccgtgatcgctctcggcagtgaaatgtccggtggaattgaagatgttcgagctgaagatattgttgccattaactctgaatctggaatcaggattaaaacagctatcggacgaggaggttacgtgaaggatgtatacgtaagaggaatgacaatgatgacaatgaaatatgtgttttggatgaccggaagttacggttcgcatccggacgatcattatgatccgaaagcgttaccggtgattcagaacattaattatcaagacatggtcgccgagaacgtgacgatgcctgctcagttagctggaatatcgggagatcagtttactggaatttgtatctctaacgtgactatcactctatcgaagaaacctaagaaagtgctttggaattgtactgatgtttcgggttatactagtggtgtgactccgcagccgtgtcagttgttaccggagaagcagccggggacggttgtgccgtgtaatttcccggaagatccgattcctattgatgaagtgaagcttcaacgttgctactccagaagaaggaatatgtgaacatgtaataagatcttcttttttttaacaaatacttttcttgggttataagtaaatgtgttatcaaatggggacatatttgattgaataatagacaaagcttcaagg

SEQ ID NO: 28352 - protein, 495 aa, Arabidopsis thaliana
  peptide (1)..(495): Ceres Seq. ID no. 13496759
MTSLSTAGYLLLLLLLPISYDGGFIGAADAEHDLRATDLHNHRHRRHRNHHRGEEFEYSAISCRAYSASLDEFGAVGDGVTSNTAAFRDAVSQLSRFADYGGSLLFVPAGRWLTGNFNLTSHFTLFLHRDAVILASQEESDYEVIEPLPSYGRGRDTDGGRFISLLFGSNLTDVVITGENGTIDGQGEPWWGKFKRGELKYTRPYLIEIMHSDGIQISNLTFLNSPSWHIHPVYSSNIYIQGLTILAPVTVPNTDGINPDSCTNTRIEDCYIVSGDDCIAVKSGWDQYGINYGMPTKQLLIRRLTCISPDSAVIALGSEMSGGIEDVRAEDIVAINSESGIRIKTAIGRGGYVKDVYVRGMTMMTMKYVFWMTGSYGSHPDDHYDPKALPVIQNINYQDMVAENVTMPAQLAGISGDQFTGICISNVTITLSKKPKKVLWNCTDVSGYTSGVTPQPCQLLPEKQPGTVVPCNFPEDPIPIDEVKLQRCYSRRRNM

SEQ ID NO: 28353 - protein, 286 aa, Arabidopsis thaliana
  peptide (1)..(286): Ceres Seq. ID no. 13496760
MHSDGIQISNLTFLNSPSWHIHPVYSSNIYIQGLTILAPVTVPNTDGINPDSCTNTRIEDCYIVSGDDCIAVKSGWDQYGINYGMPTKQLLIRRLTCISPDSAVIALGSEMSGGIEDVRAEDIVAINSESGIRIKTAIGRGGYVKDVYVRGMTMMTMKYVFWMTGSYGSHPDDHYDPKALPVIQNINYQDMVAENVTMPAQLAGISGDQFTGICISNVTITLSKKPKKVLWNCTDVSGYTSGVTPQPCQLLPEKQPGTVVPCNFPEDPIPIDEVKLQRCYSRRRNM

SEQ ID NO: 28354 - DNA, 591 bp, Arabidopsis thaliana
  misc_feature (1)..(591): Ceres Seq. ID no. 12393038
  misc_feature (1)..(591): Ortholog of  Ceres SEQ ID NO 15169443 as cited in SEQ ID NO 58785
acttcttcatcgccgtctgcacaaaaccctgatgttctaggtaatgggtctcctacgagatccatcagtctccacgaaaatgaaggttgttgccgcatacttgctcgctgttttgagcggaaaagcttcaccaaccagtgccgatatcaagactatccttggatcagttggtgctgagacagaggattctcagattgagcttttgttgaaggaagtgaaaggaaaagatttggctgagttgattgctgctggaagggagaagttagcttcagtgccgtctggtggcggaggtggtgttgcggttgcttctgctacatctggaggtggaggaggtggtggtgctcctgctgctgagtccaagaaagaagagaagaaggaagaaaaggaagaatccgatgatgacatgggtttcagtctattcgagtaagctggtagtagcatgaaaagtccggttttgttgtcctcttttaatattgtaaccttttgaaatctatatgttgttgttgtttagtttgtattcgatcatcttttttagacattgctgaaattctcaagagtttttgacccgaatgtcatttgcactttgttgtt

SEQ ID NO: 28355 - protein, 127 aa, Arabidopsis thaliana
  peptide (1)..(127): Ceres Seq. ID no. 12393039
MGLLRDPSVSTKMKVVAAYLLAVLSGKASPTSADIKTILGSVGAETEDSQIELLLKEVKGKDLAELIAAGREKLASVPSGGGGGVAVASATSGGGGGGGAPAAESKKEEKKEEKEESDDDMGFSLFE

SEQ ID NO: 28356 - protein, 115 aa, Arabidopsis thaliana
  peptide (1)..(115): Ceres Seq. ID no. 12393040
MKVVAAYLLAVLSGKASPTSADIKTILGSVGAETEDSQIELLLKEVKGKDLAELIAAGREKLASVPSGGGGGVAVASATSGGGGGGGAPAAESKKEEKKEEKEESDDDMGFSLFE

SEQ ID NO: 28357 - DNA, 1046 bp, Arabidopsis thaliana
  misc_feature (1)..(1046): Ceres Seq. ID no. 12640901
  misc_feature (1)..(1046): Ortholog of  Ceres SEQ ID NO 12610267 as cited in SEQ ID NO 51993
  misc_feature (1)..(1046): Ortholog of  Ceres SEQ ID NO 13495070 as cited in SEQ ID NO 53216
  misc_feature (1)..(1046): Ortholog of  Ceres SEQ ID NO 13661333 as cited in SEQ ID NO 61620
  misc_feature (1)..(1046): Ortholog of  Ceres SEQ ID NO 13596812 as cited in SEQ ID NO 62283
  misc_feature (1)..(1046): Ortholog of  Ceres SEQ ID NO 13623021 as cited in SEQ ID NO 0
  misc_feature (1)..(1046): Ortholog of  Ceres SEQ ID NO 14309080 as cited in SEQ ID NO 0
aaaaattcaaaaacttaattactaagcaaaagtgtgcacgaagaacaaagcgacgcatccgattttatttgtttgataagttcgtgtcgtcttcgtctctctaacccaattctgtggtgtctgaagaaagcagaatcaaatccatgtctttcagaggacttagcaggccaaatgcaatatctggaatgggtgttgcagatgagagcaaaaccacatttctagagcttcaaaggaaaaaaactcatcgctatgtggtcttcaagattgatgaatccaaaaaagaagttgttgttgagaaaactggaaatcctacagagagctacgatgatttcttagcttcacttcctgataatgactgcagatacgctgtttatgactttgatttcgttacttctgagaattgtcaaaagagcaaaatcttcttctttgcttggtctccttcgacctctggaattcgagccaaggtgctttactcgacttctaaagaccagttaagtagggagcttcaagggattcactatgagattcaagctactgatcctactgaggttgatcttgaagtgttacgcgaacgagcgaactgagagcaagcaagattgctatgtctattcaaaacttatggtaatgtaatgaataattcgtattctctgtggattgatttgtgtaaacacagtttcatgttctatgtcaaactgtataacctctggtgtttcagattgcacaacctaaagcttaggtaaactgaatatggtttaagatcgtaaaaggttgatatattagtaatgttaagagggagaagaaacttctctttagtagataacgagaatgttgatgagcatgatgagagagttcttaaactagtctagcaaattctgtataagctcttgttgtagccatcttgaattcgagtctaatccttgcgaacaatatagaaagtggtagtgtgtaaagtttccctcatcatttgtggtttctttttctcactttcttcggtgtagtaaaatttaagttgtatgtataatagttctatcatatacctgctttct

SEQ ID NO: 28358 - protein, 146 aa, Arabidopsis thaliana
  peptide (1)..(146): Ceres Seq. ID no. 12640902
MSFRGLSRPNAISGMGVADESKTTFLELQRKKTHRYVVFKIDESKKEVVVEKTGNPTESYDDFLASLPDNDCRYAVYDFDFVTSENCQKSKIFFFAWSPSTSGIRAKVLYSTSKDQLSRELQGIHYEIQATDPTEVDLEVLRERAN

SEQ ID NO: 28359 - protein, 132 aa, Arabidopsis thaliana
  peptide (1)..(132): Ceres Seq. ID no. 12640903
MGVADESKTTFLELQRKKTHRYVVFKIDESKKEVVVEKTGNPTESYDDFLASLPDNDCRYAVYDFDFVTSENCQKSKIFFFAWSPSTSGIRAKVLYSTSKDQLSRELQGIHYEIQATDPTEVDLEVLRERAN

SEQ ID NO: 28360 - DNA, 701 bp, Arabidopsis thaliana
  misc_feature (1)..(701): Ceres Seq. ID no. 12322232
  misc_feature (1)..(701): Ortholog of  Ceres SEQ ID NO 14305854 as cited in SEQ ID NO 52331
aacttttctaccaatggctcttgaagctcttaattcaccaagattggtcgaggatcccttaagattcaatggcgttgagcagtggaccaaatgtaagaaacgatccaaacgttcgagatctgatcttcatcataaccaccgtctcactgaggaagagtatctagctttctgtctcatgcttcttgctcgtgatggcggcgatcttgattctgtgacggttgaggagaagccgagttataagtgtggcgtttgttacaagacgttttcgtcttaccaagctctcggtggtcacaaagcgagtcaccggagtttatacggtggtggagataacgataagtcgacaccatccaccgccgtgaaatctcacgtttgttcggtttgcgggaaatctttcgccaccggtcaagctctcggcggccacaaggcggtgccactatgatggtggcgtttcgaactcggaaggtgtggggtctactagccacgttagtagtagtagccaccgtggatttgaccttaatattttaccggtgcagggattctcgcgggacgacgaagtgatgagtccgatggcgactaagaagcctcgcctgaagtaagtctttgttgaagacttggaagtttatcaaatgtaaatatcaaatttcaatttcaaggaacaattttgttgattctattaccaatacacaatacgattcaattgc

SEQ ID NO: 28361 - protein, 145 aa, Arabidopsis thaliana
  peptide (1)..(145): Ceres Seq. ID no. 12322233
TFLPMALEALNSPRLVEDPLRFNGVEQWTKCKKRSKRSRSDLHHNHRLTEEEYLAFCLMLLARDGGDLDSVTVEEKPSYKCGVCYKTFSSYQALGGHKASHRSLYGGGDNDKSTPSTAVKSHVCSVCGKSFATGQALGGHKAVPL

SEQ ID NO: 28362 - protein, 141 aa, Arabidopsis thaliana
  peptide (1)..(141): Ceres Seq. ID no. 12322234
MALEALNSPRLVEDPLRFNGVEQWTKCKKRSKRSRSDLHHNHRLTEEEYLAFCLMLLARDGGDLDSVTVEEKPSYKCGVCYKTFSSYQALGGHKASHRSLYGGGDNDKSTPSTAVKSHVCSVCGKSFATGQALGGHKAVPL

SEQ ID NO: 28363 - protein, 87 aa, Arabidopsis thaliana
  peptide (1)..(87): Ceres Seq. ID no. 12322235
MLLARDGGDLDSVTVEEKPSYKCGVCYKTFSSYQALGGHKASHRSLYGGGDNDKSTPSTAVKSHVCSVCGKSFATGQALGGHKAVPL

SEQ ID NO: 28364 - DNA, 678 bp, Arabidopsis thaliana
  misc_feature (1)..(678): Ceres Seq. ID no. 12396573
  misc_feature (1)..(678): Ortholog of  Ceres SEQ ID NO 12614157 as cited in SEQ ID NO 67965
caaccttttttgttcctcccaacaggttctctatttctttctctctatgtaaacattttgttaagataatggtttcatacatgaacgtgagtttgtatctattgttcgaaaggtcaatggaagaggaaaagaactgaaaaacccaatttctctaaaccacaacaaagatttggactttctgttaaagaagttagctccgccactcacggcggttttacttgctgtttcacccatctgtttccctccagaatctcttgggcagactttggatatacagagaggagctacattgtttaatagagcttgtatcgggtgtcatgatacaggtggaaacattattcaaccgggtgcaacgcttttcacaaaagacctcgaaagaaatggagttgatactgaggaagaaatatatcgtgttacctactttggaaagggaagaatgccgggatttggtgagaaatgcacaccgagaggacaatgtacctttggaccgcggttgcaggacgaagaaatcaagcttctcgctgaatttgtaaagtttcaagctgaccaaggctggccaactgtatctaccgactagcaactaggcgttcgtcttgtgagcgtttttgtaatccaattaatccatagggttgtatctacttacacttataactattccttctgggaggtttcattgcg

SEQ ID NO: 28365 - protein, 71 aa, Arabidopsis thaliana
  peptide (1)..(71): Ceres Seq. ID no. 12396574
MIQVETLFNRVQRFSQKTSKEMELILRKKYIVLPTLEREECRDLVRNAHREDNVPLDRGCRTKKSSFSLNL

SEQ ID NO: 28366 - protein, 50 aa, Arabidopsis thaliana
  peptide (1)..(50): Ceres Seq. ID no. 12396575
MELILRKKYIVLPTLEREECRDLVRNAHREDNVPLDRGCRTKKSSFSLNL

SEQ ID NO: 28367 - protein, 46 aa, Arabidopsis thaliana
  peptide (1)..(46): Ceres Seq. ID no. 12396576
MPGFGEKCTPRGQCTFGPRLQDEEIKLLAEFVKFQADQGWPTVSTD

SEQ ID NO: 28368 - DNA, 1746 bp, Arabidopsis thaliana
  misc_feature (1)..(1746): Ceres Seq. ID no. 12738795
  misc_feature (1)..(1746): Ortholog of  Ceres SEQ ID NO 15226950 as cited in SEQ ID NO 68649
  misc_feature (1)..(1746): Ortholog of  Ceres SEQ ID NO 13502947 as cited in SEQ ID NO 69257
atcattgtccctcagacaaatttcactcgctcatctctgtctgaatctcacaagaagaagtgaaagatggtgaagatatgttgtattggagctgggtatgttggtggaccaacaatggcagtgattgcattgaaatgtccagacgttgaagtagcggttgttgatatctctgtaccacgtatcaacgcttggaacagtgacacgcttccgatttacgagcctggtcttgatgatgttgtgaagcaatgccgtggcaagaaccttttctttagtactgatgttgagaaacatgttagggaagctgatattgtgtttgtttctgtcaacacaccgactaagactagaggtcttggtgctggtaaagctgcggatcttacgtactgggagagcgctgcgcgtatgatcgctgatgtttcggtatcggataagattgtcgttgagaaatcgactgttccggttaaaacagctgaagctattgagaagattttgacacataacagtaaagggattaagtttcagattctttcgaatcccgagtttttggcggaaggaaccgcgattaaggacctatttaatccggaccgtgttcttatcggagggcgggaaaccccagaagggtttaaagcggtgcagactctcaaggatgtgtatgcacactgggttcctgaaggccaaatcataacaaccaatctctggtctgctgagctgtccaagcttgcggcaaacgctttcttggctcaaaggatttcatcagtgaatgctatgtcggctctgtgtgaagccacaggcgcagatgtcacgcaagtgtcttacgcggttggtacagactcaaggattggtcccaagttcttgaactcgagtgttggattcggtggttcgtgtttccagaaggacattctaaatcttgtctacatctgtgagtgcaacggactcccggaagtggcagagtactggaagcaagtcatcaagatcaatgactaccagaagagccggttcgtgaaccgtgttgtttcctccatgttcaactctgtatcaaacaagaagattgcggttctcggtttcgcattcaagaaagacaccggtgacacaagggagactccagccatcgatgtgtgcaagggtcttttagaagacaaagcaaggctaagcatttacgacccacaagtgactgaggatcagatccagagggatttatccatgaacaagttcgactgggaccatcctctacatttgcagccaatgagcccaacaacagtgaaacaagtgaccgttacttgggacgcatacgaagcaactaaggacgctcacggtatctgcatcatgaccgagtgggatgagttcaagaatcttgatttccagaagatctttgacaacatgcagaaaccagctttcgtgttcgatggaagaaacattatgaatctgcaaaagctaagggagattggtttcattgtttactccattggtaagcctctcgacgactggctcaaggacatgcctgccgttgcctaatgatgttcattgctgactctttcgtcctccatcatttgtgctttttttcttcttgtggtttgtctttaagacttgttatatttcttacaatatgtttgttatgttctctggtgtgtgttttgttttttttggtattactttcatatttttttggtcgaagaggacttgtattcgacaatgtcgcttcaattttgttgtttccttagaaactaaataaatattggtttatattggagt

SEQ ID NO: 28369 - protein, 480 aa, Arabidopsis thaliana
  peptide (1)..(480): Ceres Seq. ID no. 12738796
MVKICCIGAGYVGGPTMAVIALKCPDVEVAVVDISVPRINAWNSDTLPIYEPGLDDVVKQCRGKNLFFSTDVEKHVREADIVFVSVNTPTKTRGLGAGKAADLTYWESAARMIADVSVSDKIVVEKSTVPVKTAEAIEKILTHNSKGIKFQILSNPEFLAEGTAIKDLFNPDRVLIGGRETPEGFKAVQTLKDVYAHWVPEGQIITTNLWSAELSKLAANAFLAQRISSVNAMSALCEATGADVTQVSYAVGTDSRIGPKFLNSSVGFGGSCFQKDILNLVYICECNGLPEVAEYWKQVIKINDYQKSRFVNRVVSSMFNSVSNKKIAVLGFAFKKDTGDTRETPAIDVCKGLLEDKARLSIYDPQVTEDQIQRDLSMNKFDWDHPLHLQPMSPTTVKQVTVTWDAYEATKDAHGICIMTEWDEFKNLDFQKIFDNMQKPAFVFDGRNIMNLQKLREIGFIVYSIGKPLDDWLKDMPAVA

SEQ ID NO: 28370 - protein, 464 aa, Arabidopsis thaliana
  peptide (1)..(464): Ceres Seq. ID no. 12738797
MAVIALKCPDVEVAVVDISVPRINAWNSDTLPIYEPGLDDVVKQCRGKNLFFSTDVEKHVREADIVFVSVNTPTKTRGLGAGKAADLTYWESAARMIADVSVSDKIVVEKSTVPVKTAEAIEKILTHNSKGIKFQILSNPEFLAEGTAIKDLFNPDRVLIGGRETPEGFKAVQTLKDVYAHWVPEGQIITTNLWSAELSKLAANAFLAQRISSVNAMSALCEATGADVTQVSYAVGTDSRIGPKFLNSSVGFGGSCFQKDILNLVYICECNGLPEVAEYWKQVIKINDYQKSRFVNRVVSSMFNSVSNKKIAVLGFAFKKDTGDTRETPAIDVCKGLLEDKARLSIYDPQVTEDQIQRDLSMNKFDWDHPLHLQPMSPTTVKQVTVTWDAYEATKDAHGICIMTEWDEFKNLDFQKIFDNMQKPAFVFDGRNIMNLQKLREIGFIVYSIGKPLDDWLKDMPAVA

SEQ ID NO: 28371 - protein, 369 aa, Arabidopsis thaliana
  peptide (1)..(369): Ceres Seq. ID no. 12738798
MIADVSVSDKIVVEKSTVPVKTAEAIEKILTHNSKGIKFQILSNPEFLAEGTAIKDLFNPDRVLIGGRETPEGFKAVQTLKDVYAHWVPEGQIITTNLWSAELSKLAANAFLAQRISSVNAMSALCEATGADVTQVSYAVGTDSRIGPKFLNSSVGFGGSCFQKDILNLVYICECNGLPEVAEYWKQVIKINDYQKSRFVNRVVSSMFNSVSNKKIAVLGFAFKKDTGDTRETPAIDVCKGLLEDKARLSIYDPQVTEDQIQRDLSMNKFDWDHPLHLQPMSPTTVKQVTVTWDAYEATKDAHGICIMTEWDEFKNLDFQKIFDNMQKPAFVFDGRNIMNLQKLREIGFIVYSIGKPLDDWLKDMPAVA

SEQ ID NO: 28372 - DNA, 1084 bp, Arabidopsis thaliana
  misc_feature (1)..(1084): Ceres Seq. ID no. 13488418
  misc_feature (1)..(1084): Ortholog of  Ceres SEQ ID NO 13593910 as cited in SEQ ID NO 53081
acatagacaagaagatcacattataaagatctcatctttctcttctccttcttccctcctgtatctgtattctcttatcagacaaaaagttccaagatttttctaatagcgatggattgtgttgaatcttatttatccggagataattctgatgaatctccggtgatgcatacttggttttctccgtctccgtctccgtctgactcttcctcttctccttcatcttctgcttcttcttccattgggaggaatagcgacgacggtgagaaatcgtcggaggacggtggagatgacgccggagagaatgaagttgagtctccgtataaaggtcctcttgaaatgatggaatctctcgaacaagtcttacctgttaggaaagggatatcgaagtattacagtggaaagtcaaagtcttttactaatttaacggcggaggcagcttcggcgttgacttcttcttcgtcgatgaaagatttagcgaagccggagaatccttacagtaggaggaggaggaatctcctctgccatcagatttgggaaaataacaagacgactccacgtggtgggatctcgaagaaacacgttatgagttctagcagaagcgctttgacgctagctatggctgttgcggctggtgtgatgaccggagaaggatcttcttccggaggtgactcgtcgccgggatcaagtccgacgacttctggatctcctccgaggcagctacatcatcatcaacatcagatgaagaagcttcctccgttgtatcctaggagtcaagggtcttttggtaatttgacttcgtctcagtcgtcgttgggtttttgtgcctggagatcgttttcggtggctgattttccgaggtgttttccggcgacggcgagtgggattgggtttaatgactcgtaggaaatgatgataacaattgttttgttaaatttttatattttgaagttagtaacaaccacatccggagaatgtatgtgtatagaagagtttcaaaacttttgaatggatcatccacatcttttttttccattttggttttttgttctatcaattacatcttttcaaaaatctttgtcat

SEQ ID NO: 28373 - protein, 264 aa, Arabidopsis thaliana
  peptide (1)..(264): Ceres Seq. ID no. 13488419
MDCVESYLSGDNSDESPVMHTWFSPSPSPSDSSSSPSSSASSSIGRNSDDGEKSSEDGGDDAGENEVESPYKGPLEMMESLEQVLPVRKGISKYYSGKSKSFTNLTAEAASALTSSSSMKDLAKPENPYSRRRRNLLCHQIWENNKTTPRGGISKKHVMSSSRSALTLAMAVAAGVMTGEGSSSGGDSSPGSSPTTSGSPPRQLHHHQHQMKKLPPLYPRSQGSFGNLTSSQSSLGFCAWRSFSVADFPRCFPATASGIGFNDS

SEQ ID NO: 28374 - protein, 246 aa, Arabidopsis thaliana
  peptide (1)..(246): Ceres Seq. ID no. 13488420
MHTWFSPSPSPSDSSSSPSSSASSSIGRNSDDGEKSSEDGGDDAGENEVESPYKGPLEMMESLEQVLPVRKGISKYYSGKSKSFTNLTAEAASALTSSSSMKDLAKPENPYSRRRRNLLCHQIWENNKTTPRGGISKKHVMSSSRSALTLAMAVAAGVMTGEGSSSGGDSSPGSSPTTSGSPPRQLHHHQHQMKKLPPLYPRSQGSFGNLTSSQSSLGFCAWRSFSVADFPRCFPATASGIGFNDS

SEQ ID NO: 28375 - protein, 188 aa, Arabidopsis thaliana
  peptide (1)..(188): Ceres Seq. ID no. 13488421
MMESLEQVLPVRKGISKYYSGKSKSFTNLTAEAASALTSSSSMKDLAKPENPYSRRRRNLLCHQIWENNKTTPRGGISKKHVMSSSRSALTLAMAVAAGVMTGEGSSSGGDSSPGSSPTTSGSPPRQLHHHQHQMKKLPPLYPRSQGSFGNLTSSQSSLGFCAWRSFSVADFPRCFPATASGIGFNDS

SEQ ID NO: 28376 - DNA, 810 bp, Arabidopsis thaliana
  misc_feature (1)..(810): Ceres Seq. ID no. 12343497
  misc_feature (1)..(810): Ortholog of  Ceres SEQ ID NO 14304132 as cited in SEQ ID NO 56475
  misc_feature (1)..(810): Ortholog of  Ceres SEQ ID NO 13661994 as cited in SEQ ID NO 60568
  misc_feature (1)..(810): Ortholog of  Ceres SEQ ID NO 13664228 as cited in SEQ ID NO 61166
  misc_feature (1)..(810): Ortholog of  Ceres SEQ ID NO 15179439 as cited in SEQ ID NO 0
gatctctctgtctctcgcatcggaagtacgaagaaggatctttgttttcttcctcttctccttcttctactttcgatcactcgtgaatctgattctactctagtctaattgggtgctttcgatttctgaataaaaattcgattttgtctgacgattaagaaagcgaaagtgatggccgccgtaaatggatatcagggaaatactccggcagatcctccggcgtctaatggatcaaaacaacctgcggctccgaccaagactgttgacagccaatctgttctcaaaagactgcaatctgaattgatgggcttgatgatgggcggtggtccaggaatatcggctttccctgaggaagacaacatattctgctggaaagggacaataataggaagcaaagatactgtgtttgaaggaactgagtacagactctcactctctttctccaatgactatcctttcaagcctccaaaggttaagtttgagacatgttgcttccaccccaatgttgatgtctatggcaatatctgcttagacattcttcaggataagtggtcatctgcttacgatgtgaggacgatactactatcgattcagagcctcctgggagaaccgaacatcagttcaccattgaacactcaagcagctcagctttggagtaaccaagaagagtacaggaagatggttgagaagctttacaagcctccaagtgcatgatttctgcaagctgttctgattcataaatctccaatgcctctgatgatttcacataaaacgatttttcagaagaaaacactgtcattcatttgcttt

SEQ ID NO: 28377 - protein, 180 aa, Arabidopsis thaliana
  peptide (1)..(180): Ceres Seq. ID no. 12343498
MAAVNGYQGNTPADPPASNGSKQPAAPTKTVDSQSVLKRLQSELMGLMMGGGPGISAFPEEDNIFCWKGTIIGSKDTVFEGTEYRLSLSFSNDYPFKPPKVKFETCCFHPNVDVYGNICLDILQDKWSSAYDVRTILLSIQSLLGEPNISSPLNTQAAQLWSNQEEYRKMVEKLYKPPSA

SEQ ID NO: 28378 - protein, 136 aa, Arabidopsis thaliana
  peptide (1)..(136): Ceres Seq. ID no. 12343499
MGLMMGGGPGISAFPEEDNIFCWKGTIIGSKDTVFEGTEYRLSLSFSNDYPFKPPKVKFETCCFHPNVDVYGNICLDILQDKWSSAYDVRTILLSIQSLLGEPNISSPLNTQAAQLWSNQEEYRKMVEKLYKPPSA

SEQ ID NO: 28379 - protein, 133 aa, Arabidopsis thaliana
  peptide (1)..(133): Ceres Seq. ID no. 12343500
MMGGGPGISAFPEEDNIFCWKGTIIGSKDTVFEGTEYRLSLSFSNDYPFKPPKVKFETCCFHPNVDVYGNICLDILQDKWSSAYDVRTILLSIQSLLGEPNISSPLNTQAAQLWSNQEEYRKMVEKLYKPPSA

SEQ ID NO: 28380 - DNA, 1008 bp, Arabidopsis thaliana
  misc_feature (1)..(1008): Ceres Seq. ID no. 13496808
  misc_feature (1)..(1008): Ortholog of  Ceres SEQ ID NO 14315553 as cited in SEQ ID NO 60445
  misc_feature (1)..(1008): Ortholog of  Ceres SEQ ID NO 13598045 as cited in SEQ ID NO 66822
atatacacatctctgattcaactccaccgaattcagaagatcgaagaagatgagtagaggaagcggcgctggttatgatcgtcacatcactatcttctcaccggaaggtcgtctctttcaagttgaatatgccttcaaggccgtgaaaacagctggtattacttcaatcggagttcgtgggaaagattcggtttgcgtcgttacccagaaggaagttcctgacaagcttttggatcagtctagtgttacacatctgttccctatcaccaagtacattggattggtagctactggcattacagctgatgcaaggtctttggttcaacaagcaaggaatcaagcagctgaatttcggttcacttatggatatgagatgcctgttgacattcttgctaaatggatagcggacaagtcacaggtctacactcaacatgcttacatgagaccccttggagttgtcgctatggtaatgggtgttgatgaagagaatggtcccttactttacaaatgtgacccagctggacatttttacggtcacaaggcaactagtgctggtatgaaggaacaagaagcagtcaatttcttggagaagaaaatgaaagaaaacccatctttcacatttgatgaaaccgtgcagactgccatatcggctttgcaatctgttcttcaagaagacttcaaggctactgagattgaggtaggtgtggtgagagcagagaacccggaattccgtgcattgacaacggaggagattgaggagcatttgacagccattagtgaacgagactgatcaacttagtgaaacaagtgtgagttacgttgcttcgcttctatcagacattcctctaaagtgaccactctccatcgatcttttgtttggtcttccttccataatttaatttacttagtcaacccagcaaacttgaaaaacaaaaatgcactgtaatgcttaaggctgtgagagtttccgagtcttttgactcttcagaaatgacaccaactttactc

SEQ ID NO: 28381 - protein, 246 aa, Arabidopsis thaliana
  peptide (1)..(246): Ceres Seq. ID no. 13496809
MSRGSGAGYDRHITIFSPEGRLFQVEYAFKAVKTAGITSIGVRGKDSVCVVTQKEVPDKLLDQSSVTHLFPITKYIGLVATGITADARSLVQQARNQAAEFRFTYGYEMPVDILAKWIADKSQVYTQHAYMRPLGVVAMVMGVDEENGPLLYKCDPAGHFYGHKATSAGMKEQEAVNFLEKKMKENPSFTFDETVQTAISALQSVLQEDFKATEIEVGVVRAENPEFRALTTEEIEEHLTAISERD

SEQ ID NO: 28382 - protein, 138 aa, Arabidopsis thaliana
  peptide (1)..(138): Ceres Seq. ID no. 13496810
MPVDILAKWIADKSQVYTQHAYMRPLGVVAMVMGVDEENGPLLYKCDPAGHFYGHKATSAGMKEQEAVNFLEKKMKENPSFTFDETVQTAISALQSVLQEDFKATEIEVGVVRAENPEFRALTTEEIEEHLTAISERD

SEQ ID NO: 28383 - DNA, 772 bp, Arabidopsis thaliana
  misc_feature (1)..(772): Ceres Seq. ID no. 12394403
  misc_feature (1)..(772): Ortholog of  Ceres SEQ ID NO 15174662 as cited in SEQ ID NO 54292
agactctgttttagaccaaagtcgagtgagtgctttcatcttcttcttaagcatctatggccgcgtctctaacatctcttccgaccggtttttgtcttagccatggtgatgaatgttgcaaccgttcacctaccaaatcaccatttccaggccatcatcctctggctgggaggaggaagggtcacttgctccattacgaacgtagtacagtgaggagattggttgtgacggcggcgacggagggatctaaaaaatctaaagaaagtgaaccgtcttgggcgaatcctgactcagatgagccacctccttgggctagaaacgaaggtcgttcttctacgtcccaagagagctttgaggttcctttctttgtttatctgctagcttccgcgattactgccattgctgctattggttctgttttcgagtacacaagcaagaatccagttttcgggatcttggaatctgacagcatcttttatactcctgtgcttggattctttgctcttactggaatccccacttctgtgttcctatggttcaaatccgttgaagctgctaataaggaagctcaagaacaagataaaagagatggctttctttaaaatccttttgtgtgattctgcaactcatacagtgatgattgttgtctccacatatactttgaatataattctgcatttacaaaggagcttgcttctgttcactgtttatcacccgctagattttgtttgtaatttcaacaatatgccatgttccaacgagtaagtgcctg

SEQ ID NO: 28384 - protein, 181 aa, Arabidopsis thaliana
  peptide (1)..(181): Ceres Seq. ID no. 12394404
MAASLTSLPTGFCLSHGDECCNRSPTKSPFPGHHPLAGRRKGHLLHYERSTVRRLVVTAATEGSKKSKESEPSWANPDSDEPPPWARNEGRSSTSQESFEVPFFVYLLASAITAIAAIGSVFEYTSKNPVFGILESDSIFYTPVLGFFALTGIPTSVFLWFKSVEAANKEAQEQDKRDGFL

SEQ ID NO: 28385 - DNA, 2336 bp, Arabidopsis thaliana
  misc_feature (1)..(2336): Ceres Seq. ID no. 13491856
  misc_feature (1)..(2336): Ortholog of  Ceres SEQ ID NO 14303348 as cited in SEQ ID NO 59561
aaagtctctctctctctctctctgcaaacactgattcaacaaagaagaatcaaaatctccagaaattcgatcgtcgttgaagattcgtctcagtttgtgtagtttctagcttagtgttttggaatcgaaaatggcgggtcgagttaaagaagacgagaagaacgagaagattattaggagtcttcttaaacttcctgagaataagaggtgtataaactgtaacagccttggaccacaatatgtttgcactactttctggacttttgtttgtaccaactgcagtggaatacatcgtgagtttacacatcgtgttaaatcgatatcaatggcgaaatttacctcacaagaagttactgctttgaaagaaggtggaaatcagcatgctaaggatatttattttaaaggattggatcaacagcggcaatcagtgcctgacggaagtaatgttgagcggttaagggacttcatcagacatgtgtatgtaaataaaaggtatacgaatgagaagaatgatgataagtctccaagtgagacacgtagttctagtggttctcggagtccaccttatgaagatggatatgaccgtcgttacggcgacagatcaagtcctggtgggagaagtccagggttcgagacgggtagtaggaatgctgttaataacagaaaaagccctgctcgtcctgagatcctgaatgattggcgcagagaggataggtttgggggtagaaaaacatcagaagagggctcccagtcacctgagcaagtaaaagacttgggttcagctagccctcctgtagctcgacctgttagggaaattttgggtgacagtgttattcctcttcgtgtgggagagcctccaaaaccccctgtcagtagaaataccgatgcttcagcacatgcaaagtcaggtacatcattgagtagtttaatgtccacaaatgagaagccaccagaagtgaagctggagactgctttaagcctgattgattttgatactgattttgaaactcctgctccatctgttgcaattcaagcaccactatcgaccacatctcagcctgctccacagccaacaacttcatctaatgataactgggcatctttcgatgctgcacccagtgcccctagtttaaatgtatcgcaaccaccacccagtggaaacacactggattcacttctctcccagttggcagtgacttcttctgtgccaggtcaggcgtctacaccatctaacggacctgtgaatcttggtcattccacgtcacaaatctttgcaccctttcagaatgagcattcgagtgaacagccatggaacacagcacttgcatctaatgtacagaggtcaatgagtgcaccgtcattgcaacctcttcaaggagtcccttctggtggcctgcagtcttctgaagttaaaccttcgggaagatcagaattacctgcggatttattcgctgtaaactacccatcataccatgcaccagtgcctggatggcaagctggtccacctcatgctatgcactatggcatgcagcagtataataaccccgtgccgtatcagaatgttccgcagccaggcaagtcaatgaacccttttgacttcagccctgggccgccatcacaaacacaaacggaaaatatgttcccttccatggctcctctgcaaggtgcattacctccttcaggcatgatgccttctcaaggagtacacaatcaattcaatataccttctcaaggctcagcccatccatctgcaatgccaccaaggtacatgccttctcaaataccaggaagcatgccacctagcaatgtaaacccaattggcgacataaacacgtcatatgacactcaacaaacatatcaaaattttggaagctcgtttgctgctgcagttcctttgaacccaccttctttccaatcaggaggaaacccatttgggtaagaaagagcgagaatattagctcacgagagctatgttatgcatgaggattgcgtttgtgttctaaggtgtagtataagactataaggaggtattaaatcgaatacaaacatgggttaaatagggtgaacgagggaaggtacgggccatgaacctgaagaagaattgggttttgtgagagtgttagattactgtattttttataagcatcaaaatgatttgaaataggtttgatatttattctttggtgtttctatattccatttccattttgttgtttgtccttcagaaaatcttcaggctcctcctgtgttgtatgattttgtataacagtttacacattgaccataaagtcttgtcaaaattgaataaggtaatttagaattgcttttatgagact

SEQ ID NO: 28386 - protein, 602 aa, Arabidopsis thaliana
  peptide (1)..(602): Ceres Seq. ID no. 13491857
MAGRVKEDEKNEKIIRSLLKLPENKRCINCNSLGPQYVCTTFWTFVCTNCSGIHREFTHRVKSISMAKFTSQEVTALKEGGNQHAKDIYFKGLDQQRQSVPDGSNVERLRDFIRHVYVNKRYTNEKNDDKSPSETRSSSGSRSPPYEDGYDRRYGDRSSPGGRSPGFETGSRNAVNNRKSPARPEILNDWRREDRFGGRKTSEEGSQSPEQVKDLGSASPPVARPVREILGDSVIPLRVGEPPKPPVSRNTDASAHAKSGTSLSSLMSTNEKPPEVKLETALSLIDFDTDFETPAPSVAIQAPLSTTSQPAPQPTTSSNDNWASFDAAPSAPSLNVSQPPPSGNTLDSLLSQLAVTSSVPGQASTPSNGPVNLGHSTSQIFAPFQNEHSSEQPWNTALASNVQRSMSAPSLQPLQGVPSGGLQSSEVKPSGRSELPADLFAVNYPSYHAPVPGWQAGPPHAMHYGMQQYNNPVPYQNVPQPGKSMNPFDFSPGPPSQTQTENMFPSMAPLQGALPPSGMMPSQGVHNQFNIPSQGSAHPSAMPPRYMPSQIPGSMPPSNVNPIGDINTSYDTQQTYQNFGSSFAAAVPLNPPSFQSGGNPFG

SEQ ID NO: 28387 - protein, 537 aa, Arabidopsis thaliana
  peptide (1)..(537): Ceres Seq. ID no. 13491858
MAKFTSQEVTALKEGGNQHAKDIYFKGLDQQRQSVPDGSNVERLRDFIRHVYVNKRYTNEKNDDKSPSETRSSSGSRSPPYEDGYDRRYGDRSSPGGRSPGFETGSRNAVNNRKSPARPEILNDWRREDRFGGRKTSEEGSQSPEQVKDLGSASPPVARPVREILGDSVIPLRVGEPPKPPVSRNTDASAHAKSGTSLSSLMSTNEKPPEVKLETALSLIDFDTDFETPAPSVAIQAPLSTTSQPAPQPTTSSNDNWASFDAAPSAPSLNVSQPPPSGNTLDSLLSQLAVTSSVPGQASTPSNGPVNLGHSTSQIFAPFQNEHSSEQPWNTALASNVQRSMSAPSLQPLQGVPSGGLQSSEVKPSGRSELPADLFAVNYPSYHAPVPGWQAGPPHAMHYGMQQYNNPVPYQNVPQPGKSMNPFDFSPGPPSQTQTENMFPSMAPLQGALPPSGMMPSQGVHNQFNIPSQGSAHPSAMPPRYMPSQIPGSMPPSNVNPIGDINTSYDTQQTYQNFGSSFAAAVPLNPPSFQSGGNPFG

SEQ ID NO: 28388 - protein, 336 aa, Arabidopsis thaliana
  peptide (1)..(336): Ceres Seq. ID no. 13491859
MSTNEKPPEVKLETALSLIDFDTDFETPAPSVAIQAPLSTTSQPAPQPTTSSNDNWASFDAAPSAPSLNVSQPPPSGNTLDSLLSQLAVTSSVPGQASTPSNGPVNLGHSTSQIFAPFQNEHSSEQPWNTALASNVQRSMSAPSLQPLQGVPSGGLQSSEVKPSGRSELPADLFAVNYPSYHAPVPGWQAGPPHAMHYGMQQYNNPVPYQNVPQPGKSMNPFDFSPGPPSQTQTENMFPSMAPLQGALPPSGMMPSQGVHNQFNIPSQGSAHPSAMPPRYMPSQIPGSMPPSNVNPIGDINTSYDTQQTYQNFGSSFAAAVPLNPPSFQSGGNPFG

SEQ ID NO: 28389 - DNA, 750 bp, Arabidopsis thaliana
  misc_feature (1)..(750): Ceres Seq. ID no. 12394399
  misc_feature (1)..(750): Ortholog of  Ceres SEQ ID NO 12584790 as cited in SEQ ID NO 62648
aaaacaaccccttgagatttccgaagatcatcaaatccaaaaccctagaaaccgaacaaaagctagcagaagctaggactattcaatggcgtcgaaaagaattaacaaagagcttagggacttgcaaagagatcctcctgtgtcctgcagtgcaggtcctacgggagatgatatgttccaatggcaagcaactatcatgggtccagcagatagcccgtttgccggaggtgtgtttcttgttaccattcacttcccaccagattaccctttcaagccaccaaaggttgccttccggaccaaggtttatcacccaaacatcaacagtaatggaagtatctgtcttgacattctgaaagagcagtggagccctgcacttaccgtatccaaggttcttctgtcgatatgctcattgctgacggatccaaaccctgacgatcctttggttcctgaaatagcgcacatctacaagacagaccgagtcaagtacgagtccacagctcaatcctggactcagaagtatgcaatgggatgataacaagcaataatacccaccaccagtacattgcgtattaaacaggagaaataagaaagaaagaaaaaaactcagtttggcttttactttggctacttttgcttattagtttttttttttaattatatcttgaagctgtgtgttgggtgtgtacatgagctttatgccttatttgaaacattgagatcttgcaaatgcttttaagccaataatccgct

SEQ ID NO: 28390 - protein, 148 aa, Arabidopsis thaliana
  peptide (1)..(148): Ceres Seq. ID no. 12394400
MASKRINKELRDLQRDPPVSCSAGPTGDDMFQWQATIMGPADSPFAGGVFLVTIHFPPDYPFKPPKVAFRTKVYHPNINSNGSICLDILKEQWSPALTVSKVLLSICSLLTDPNPDDPLVPEIAHIYKTDRVKYESTAQSWTQKYAMG

SEQ ID NO: 28391 - protein, 119 aa, Arabidopsis thaliana
  peptide (1)..(119): Ceres Seq. ID no. 12394401
MFQWQATIMGPADSPFAGGVFLVTIHFPPDYPFKPPKVAFRTKVYHPNINSNGSICLDILKEQWSPALTVSKVLLSICSLLTDPNPDDPLVPEIAHIYKTDRVKYESTAQSWTQKYAMG

SEQ ID NO: 28392 - protein, 116 aa, Arabidopsis thaliana
  peptide (1)..(116): Ceres Seq. ID no. 12394402
NNPLRFPKIIKSKTLETEQKLAEARTIQWRRKELTKSLGTCKEILLCPAVQVLREMICSNGKQLSWVQQIARLPEVCFLLPFTSHQITLSSHQRLPSGPRFITQTSTVMEVSVLTF

SEQ ID NO: 28393 - DNA, 964 bp, Arabidopsis thaliana; identical to SEQ ID NO: 22782
  misc_feature (1)..(964): Ceres Seq. ID no. 13509136
  misc_feature (1)..(964): Ortholog of  Ceres SEQ ID NO 15173873 as cited in SEQ ID NO 62620
  misc_feature (1)..(964): Ortholog of  Ceres SEQ ID NO 13655610 as cited in SEQ ID NO 64148
  misc_feature (1)..(964): Ortholog of  Ceres SEQ ID NO 14302675 as cited in SEQ ID NO 0

SEQ ID NO: 28394 - protein, 233 aa, Arabidopsis thaliana; identical to SEQ ID NO: 22783
  peptide (1)..(233): Ceres Seq. ID no. 13509137

SEQ ID NO: 28395 - protein, 206 aa, Arabidopsis thaliana; identical to SEQ ID NO: 22784
  peptide (1)..(206): Ceres Seq. ID no. 13509138

SEQ ID NO: 28396 - DNA, 971 bp, Arabidopsis thaliana
  misc_feature (1)..(971): Ceres Seq. ID no. 12332975
  misc_feature (1)..(971): Ortholog of  Ceres SEQ ID NO 15226909 as cited in SEQ ID NO 61336
  misc_feature (1)..(971): Ortholog of  Ceres SEQ ID NO 15179474 as cited in SEQ ID NO 0
aattcaaaattatataaaatgggaagcagcagcgacgagacgccagtggttctcatcacaggatgttctcagggaggaatcggtcacgcgttggcgcgtgagttctcggctaatggttgtcgtgtggtggcgacgagtcgatcgcagaagacgatgactgaattggagaaagattccaagttctttgtgcaagagctcgatgttcagtctgagcagagcgtgagtaaagttgtgtcgaaagttatcgacaaatttggtcagattgatgttttggttaataacgccggagttcagtgtatcggacctttggcggagattccaatttcagccatggattacaccttcaacaccaatgtgctcggttccatgaggatgactcaagctgttgtacctcacatggcgtctaagaaaaagggaaagattgtgaacataggaagtattagcataatggcaccaggaccatgggctggggtttatactgcatcaaaagctgctcttcatgctcttaccgacactttaaggttggagcttaagccatttgggattgatgtaatcaacattgtaccaggaggtattcaatcaaacatagctaactcagggatatcgagtttcaacaatttacctgaattgaaactatacaaaccgttcgaggacgctatccgtgagagagcgtttctgtcgcaaaacataaagccgatacccacagagacttttgcgaaagagactgtttccgtggtgctgaagaaaaacccaccggcttggtactctacaggtaggttatctacagtcatggcgatcatgcaccatataccgattttcatgaaagattttctgttgactaagagttttatgaaaaagggagtaaaacctgaatagttgtgttcttggttagaaactgttttaaatgtatccaacaaagtaaatgtgttgcctaaccatgttacatctttagtaaaaggattaatcaaggt

SEQ ID NO: 28397 - protein, 291 aa, Arabidopsis thaliana
  peptide (1)..(291): Ceres Seq. ID no. 12332976
NSKLYKMGSSSDETPVVLITGCSQGGIGHALAREFSANGCRVVATSRSQKTMTELEKDSKFFVQELDVQSEQSVSKVVSKVIDKFGQIDVLVNNAGVQCIGPLAEIPISAMDYTFNTNVLGSMRMTQAVVPHMASKKKGKIVNIGSISIMAPGPWAGVYTASKAALHALTDTLRLELKPFGIDVINIVPGGIQSNIANSGISSFNNLPELKLYKPFEDAIRERAFLSQNIKPIPTETFAKETVSVVLKKNPPAWYSTGRLSTVMAIMHHIPIFMKDFLLTKSFMKKGVKPE

SEQ ID NO: 28398 - protein, 285 aa, Arabidopsis thaliana
  peptide (1)..(285): Ceres Seq. ID no. 12332977
MGSSSDETPVVLITGCSQGGIGHALAREFSANGCRVVATSRSQKTMTELEKDSKFFVQELDVQSEQSVSKVVSKVIDKFGQIDVLVNNAGVQCIGPLAEIPISAMDYTFNTNVLGSMRMTQAVVPHMASKKKGKIVNIGSISIMAPGPWAGVYTASKAALHALTDTLRLELKPFGIDVINIVPGGIQSNIANSGISSFNNLPELKLYKPFEDAIRERAFLSQNIKPIPTETFAKETVSVVLKKNPPAWYSTGRLSTVMAIMHHIPIFMKDFLLTKSFMKKGVKPE

SEQ ID NO: 28399 - protein, 240 aa, Arabidopsis thaliana
  peptide (1)..(240): Ceres Seq. ID no. 12332978
MTELEKDSKFFVQELDVQSEQSVSKVVSKVIDKFGQIDVLVNNAGVQCIGPLAEIPISAMDYTFNTNVLGSMRMTQAVVPHMASKKKGKIVNIGSISIMAPGPWAGVYTASKAALHALTDTLRLELKPFGIDVINIVPGGIQSNIANSGISSFNNLPELKLYKPFEDAIRERAFLSQNIKPIPTETFAKETVSVVLKKNPPAWYSTGRLSTVMAIMHHIPIFMKDFLLTKSFMKKGVKPE

SEQ ID NO: 28400 - DNA, 908 bp, Arabidopsis thaliana
  misc_feature (1)..(908): Ceres Seq. ID no. 13491283
  misc_feature (1)..(908): Ortholog of  Ceres SEQ ID NO 13662677 as cited in SEQ ID NO 63824
atggtaacgtgtctttttcattaggcgagactagccaatctaagcaaacagagtcgtctttatatctaaacgaacattttgtgaaagaaagagagactaaggtgaatccatggcgtccaagattgtctcagccatagtatttgtgtttaacctcattgcctttggtttagccgttgctgctgaacaaagaagaagcactgcaagggttgtgcaggacactgaggtgcaatataactactgtgtgtatgactcggacagagctacagggtatggagttggagcctttttgttctcagtggctagtcaaatccttatcatgctcgttagccgttgcttctgttgtggaaagcctctcaagcctggcggttcacgcgctcttgccctcattctcttcattgttagctggatgttcttcttgatagcggagatatgtctattagctggatcggtagagaatgcataccacacaaagtacaggacaatgttcatggacaatcctcctgattgtcaaactctacgtaaaggcgtctttgcagcaggcgcctcattcgtcttcttcaacgccattgtctctcagttctactatttcttctatttctctgctgctgaggcctctctttcaccttactagaggttcttaaccaacaaataagttttattttttttctctctaaatgtgctatttgatatgctaatatcatattttgaggtgggttttctatgtacaactatgatgaaatgttacaactatgacaaaattatttgaaagtgatggtacacatgagatttgtagatttatttgtatggttattagatcgagttgaaatgttgttttaaaaagagtggatgtaatttgacgattttgtgacatatgacataatgctcttattcattgaataaggtttgag

SEQ ID NO: 28401 - protein, 173 aa, Arabidopsis thaliana; identical to SEQ ID NO: 22629
  peptide (1)..(173): Ceres Seq. ID no. 13491284

SEQ ID NO: 28402 - protein, 104 aa, Arabidopsis thaliana; identical to SEQ ID NO: 22630
  peptide (1)..(104): Ceres Seq. ID no. 13491285

SEQ ID NO: 28403 - DNA, 1701 bp, Arabidopsis thaliana
  misc_feature (1)..(1701): Ceres Seq. ID no. 13496299
  misc_feature (1)..(1701): Ortholog of  Ceres SEQ ID NO 15179641 as cited in SEQ ID NO 56414
  misc_feature (1)..(1701): Ortholog of  Ceres SEQ ID NO 15176851 as cited in SEQ ID NO 61348
  misc_feature (1)..(1701): Ortholog of  Ceres SEQ ID NO 14316049 as cited in SEQ ID NO 67036
  misc_feature (1)..(1701): Ortholog of  Ceres SEQ ID NO 14313252 as cited in SEQ ID NO 67134
  misc_feature (1)..(1701): Ortholog of  Ceres SEQ ID NO 14302220 as cited in SEQ ID NO 69121
gcgaacattttggattcttcacgtttgtttatattttgggttggctctacacctactctcagaagtcataagccaagcaaagggggttttagggtttttgaccgcgagccagatctctttcttttgtttctcccacttccgaatcaatggccttctcttctctcctcagatctgccgcctcctacacggttgccgctcctcgccctgactttttctcgtcgccggcgtctgatcattctaaggtgttgtcaagtcttggatttagtcgcaacctgaagccatcaagattttcttctgggatatcttcatctctacaaaatggcaatgcaagaagtgtgcaacccatcaaggccacggctacagaagtgccatctgcagttcgaaggtcaagtagcagtggaaagacaaaggttgggatcaacggttttggtcggattggaaggttggtcctccgcattgcaacatcaagggatgatattgaggttgtagcagtgaatgacccattcattgatgccaagtacatggcttacatgttgaagtatgattctactcatggaaatttcaagggaagcatcaatgtcattgatgattctactttggagatcaatgggaagaaggtcaatgttgtcagcaagagagatccatctgagatcccatgggctgatcttggagctgattatgttgttgagtcttccggtgtattcaccaccctgtcaaaggctgcatcccatttgaagggcggtgccaagaaagttataatttctgccccttctgctgacgcacctatgtttgttgttggagtaaacgagcacacataccaaccaaacatggatatagtctccaatgcaagttgtaccaccaattgtcttgcccctcttgccaaggtggtgcatgaggaatttggtattcttgaaggcttgatgacaactgtccacgcaactacagctactcagaaaactgttgatgggccatcaatgaaggactggagaggaggtcggggcgctagtcaaaacatcattcctagctcaaccggcgccgcgaaggctgtaggtaaagttcttccagaactgaatgggaaacttacgggaatggccttccgtgtaccaacatcgaatgtttctgtggtggatttaacttgtcgacttgagaagggtgcctcttacgaagatgttaaggcagccattaagcatgcctcagaaggacctcttaaaggcattctcgggtacacagatgaagatgtcgtctccaatgatttcgtcggtgattcaaggtccagtatctttgacgccaatgctggtattggattgagcaagtcctttgtgaaacttgtctcttggtacgacaacgaatggggttacagcaaccgagttcttgaccttatagagcacatggctttggtagctgccagccactaaatacacacaccagttcttgcagaagcttgagtctttctgctttttgcgtaacctgctctacaaagccggtttggatttgttcggttcaattaggtgccactgtgctaggtgttttgaaatatttggcttgaatctcgagcctttactctatttttgttctgttccagtatcagcaaccatgatttggtccaaaagactgaaaaactgtgcgacttacatctatgaataaggggctaagctagttgtactttaccaaaaatagcttaccagtataagcaacgtttgg

SEQ ID NO: 28404 - protein, 422 aa, Arabidopsis thaliana
  peptide (1)..(422): Ceres Seq. ID no. 13496300
MAFSSLLRSAASYTVAAPRPDFFSSPASDHSKVLSSLGFSRNLKPSRFSSGISSSLQNGNARSVQPIKATATEVPSAVRRSSSSGKTKVGINGFGRIGRLVLRIATSRDDIEVVAVNDPFIDAKYMAYMLKYDSTHGNFKGSINVIDDSTLEINGKKVNVVSKRDPSEIPWADLGADYVVESSGVFTTLSKAASHLKGGAKKVIISAPSADAPMFVVGVNEHTYQPNMDIVSNASCTTNCLAPLAKVVHEEFGILEGLMTTVHATTATQKTVDGPSMKDWRGGRGASQNIIPSSTGAAKAVGKVLPELNGKLTGMAFRVPTSNVSVVDLTCRLEKGASYEDVKAAIKHASEGPLKGILGYTDEDVVSNDFVGDSRSSIFDANAGIGLSKSFVKLVSWYDNEWGYSNRVLDLIEHMALVAASH

SEQ ID NO: 28405 - protein, 297 aa, Arabidopsis thaliana
  peptide (1)..(297): Ceres Seq. ID no. 13496301
MAYMLKYDSTHGNFKGSINVIDDSTLEINGKKVNVVSKRDPSEIPWADLGADYVVESSGVFTTLSKAASHLKGGAKKVIISAPSADAPMFVVGVNEHTYQPNMDIVSNASCTTNCLAPLAKVVHEEFGILEGLMTTVHATTATQKTVDGPSMKDWRGGRGASQNIIPSSTGAAKAVGKVLPELNGKLTGMAFRVPTSNVSVVDLTCRLEKGASYEDVKAAIKHASEGPLKGILGYTDEDVVSNDFVGDSRSSIFDANAGIGLSKSFVKLVSWYDNEWGYSNRVLDLIEHMALVAASH

SEQ ID NO: 28406 - protein, 294 aa, Arabidopsis thaliana
  peptide (1)..(294): Ceres Seq. ID no. 13496302
MLKYDSTHGNFKGSINVIDDSTLEINGKKVNVVSKRDPSEIPWADLGADYVVESSGVFTTLSKAASHLKGGAKKVIISAPSADAPMFVVGVNEHTYQPNMDIVSNASCTTNCLAPLAKVVHEEFGILEGLMTTVHATTATQKTVDGPSMKDWRGGRGASQNIIPSSTGAAKAVGKVLPELNGKLTGMAFRVPTSNVSVVDLTCRLEKGASYEDVKAAIKHASEGPLKGILGYTDEDVVSNDFVGDSRSSIFDANAGIGLSKSFVKLVSWYDNEWGYSNRVLDLIEHMALVAASH

SEQ ID NO: 28407 - DNA, 1134 bp, Arabidopsis thaliana
  misc_feature (1)..(1134): Ceres Seq. ID no. 12370160
  misc_feature (1)..(1134): Ortholog of  Ceres SEQ ID NO 13594740 as cited in SEQ ID NO 51721
  misc_feature (1)..(1134): Ortholog of  Ceres SEQ ID NO 14316497 as cited in SEQ ID NO 58285
  misc_feature (1)..(1134): Ortholog of  Ceres SEQ ID NO 13595944 as cited in SEQ ID NO 68153
atataggcatcgtttatatttttttgtctcataccagctgataaaacaaagtaagaagaagatgaagatgaacgtatgttttagtgtgattttgatgtttctaagcatcttcttcatcaatggtgctttgtcgaagcttgaaaggttgaaacatccggtgaagaagaaatctgatggctctctgagttttcttgttatcggagactggggacgcaaaggtgggtttaatcaatctctcgttgcacatcagatgggagttgtgggagagaaattagacatagattttgtgatatcagtaggagataatttctacgacgacggattaaaaggagtcaatgatccttcctttgaagcctctttctctcatatctacactcatcctagtctccaaaaacaatggtattcagttttgggtaaccatgattacagaggaaatgttgaagcacaactaagtaaagttctcacccaaaaagattggagatggttttgtcgcagatcttgtgtcttatcctcaggaatggtggattttttcttcgcggacacaaatccttttgtagaaaaatacttcactgaaccagaagatcacacttatgattggagaaatgtcttaccaagaaataaatacatctcaaacctcttacatgatttagatttagagattaaaaactcacgtgcgacatggaaatttgtcgtgggacatcacgggatcaaaaccgcaggagaataaagtggacttgtacataaatggacatgatcactgcttgcaacacattggttctcacggtaaaacccaatttcttacaagtggaggaggatcaaaggcatggagaggagatgttcagccatgggatccaaaagaactcaaactgtattacgatggacaaggtttcatgtctcttcacatcactcactccaaagctaaattcatctactatgatgtttccggcaatgttcttcaccgatcctcattgtccaaaagatctgctcatctttaaataacatttctaagaataaaatttgcacacaatttaatttaagtttttatttacaataaatttattgatgtatgattattgaacacaatggtcttgaataatatagagttttttcacgttctgaaaacgtggttccgtt

SEQ ID NO: 28408 - protein, 241 aa, Arabidopsis thaliana
  peptide (1)..(241): Ceres Seq. ID no. 12370161
YRHRLYFFVSYQLIKQSKKKMKMNVCFSVILMFLSIFFINGALSKLERLKHPVKKKSDGSLSFLVIGDWGRKGGFNQSLVAHQMGVVGEKLDIDFVISVGDNFYDDGLKGVNDPSFEASFSHIYTHPSLQKQWYSVLGNHDYRGNVEAQLSKVLTQKDWRWFCRRSCVLSSGMVDFFFADTNPFVEKYFTEPEDHTYDWRNVLPRNKYISNLLHDLDLEIKNSRATWKFVVGHHGIKTAGE

SEQ ID NO: 28409 - protein, 221 aa, Arabidopsis thaliana
  peptide (1)..(221): Ceres Seq. ID no. 12370162
MKMNVCFSVILMFLSIFFINGALSKLERLKHPVKKKSDGSLSFLVIGDWGRKGGFNQSLVAHQMGVVGEKLDIDFVISVGDNFYDDGLKGVNDPSFEASFSHIYTHPSLQKQWYSVLGNHDYRGNVEAQLSKVLTQKDWRWFCRRSCVLSSGMVDFFFADTNPFVEKYFTEPEDHTYDWRNVLPRNKYISNLLHDLDLEIKNSRATWKFVVGHHGIKTAGE

SEQ ID NO: 28410 - protein, 219 aa, Arabidopsis thaliana
  peptide (1)..(219): Ceres Seq. ID no. 12370163
MNVCFSVILMFLSIFFINGALSKLERLKHPVKKKSDGSLSFLVIGDWGRKGGFNQSLVAHQMGVVGEKLDIDFVISVGDNFYDDGLKGVNDPSFEASFSHIYTHPSLQKQWYSVLGNHDYRGNVEAQLSKVLTQKDWRWFCRRSCVLSSGMVDFFFADTNPFVEKYFTEPEDHTYDWRNVLPRNKYISNLLHDLDLEIKNSRATWKFVVGHHGIKTAGE

SEQ ID NO: 28411 - DNA, 741 bp, Arabidopsis thaliana
  misc_feature (1)..(741): Ceres Seq. ID no. 13497018
  misc_feature (1)..(741): Ortholog of  Ceres SEQ ID NO 14307480 as cited in SEQ ID NO 54235
agagaatctgacgaagctcgaagggatttgagaaaaagaagagatgacgacgatacgtagattcagctgcaatgaccttctccgattcacttccgtgaatctggaccacctcactgaaacattcaatatgtccttctacatgacctatttagcgagatggcctgactattttcatgttgctgaaggtcccggcaatcgtgtcatgggttatattatgggtaaagttgaaggacagggtgaatcttggcatggtcatgtgacagccgtcactgtctctccagaataccgcaggcagcaacttgcaaagaaactgatgaaccttctggaagatataagtgataagattgataaagcctactttgtggatctttttgtaagagcttccaacacaccagccatcaagatgtatgaaaagcttggatacataatttataggcgggttttacgctattattcaggagaggaagatggattagatatgaggaaggcattatcaagaaatgtagagaaaaagtctgtgattcctctcaagagacctatcacacctgatgaattagagtatgattaagaccctaacttggttcacaattgttatctgcattaaaaatttctccaagagcctttagatgatgttactattcctgttgtttcgtatttgaactattatgtttcgttttcttccacacaaatttataattagttttgattaaactttaatctatatatacatttttggagggt

SEQ ID NO: 28412 - protein, 174 aa, Arabidopsis thaliana
  peptide (1)..(174): Ceres Seq. ID no. 13497019
MTTIRRFSCNDLLRFTSVNLDHLTETFNMSFYMTYLARWPDYFHVAEGPGNRVMGYIMGKVEGQGESWHGHVTAVTVSPEYRRQQLAKKLMNLLEDISDKIDKAYFVDLFVRASNTPAIKMYEKLGYIIYRRVLRYYSGEEDGLDMRKALSRNVEKKSVIPLKRPITPDELEYD

SEQ ID NO: 28413 - protein, 146 aa, Arabidopsis thaliana
  peptide (1)..(146): Ceres Seq. ID no. 13497020
MSFYMTYLARWPDYFHVAEGPGNRVMGYIMGKVEGQGESWHGHVTAVTVSPEYRRQQLAKKLMNLLEDISDKIDKAYFVDLFVRASNTPAIKMYEKLGYIIYRRVLRYYSGEEDGLDMRKALSRNVEKKSVIPLKRPITPDELEYD

SEQ ID NO: 28414 - protein, 142 aa, Arabidopsis thaliana
  peptide (1)..(142): Ceres Seq. ID no. 13497021
MTYLARWPDYFHVAEGPGNRVMGYIMGKVEGQGESWHGHVTAVTVSPEYRRQQLAKKLMNLLEDISDKIDKAYFVDLFVRASNTPAIKMYEKLGYIIYRRVLRYYSGEEDGLDMRKALSRNVEKKSVIPLKRPITPDELEYD

SEQ ID NO: 28415 - DNA, 1195 bp, Arabidopsis thaliana
  misc_feature (1)..(1195): Ceres Seq. ID no. 13486843
  misc_feature (1)..(1195): Ortholog of  Ceres SEQ ID NO 12333459 as cited in SEQ ID NO 20477
  misc_feature (1)..(1195): Ortholog of  Ceres SEQ ID NO 15176155 as cited in SEQ ID NO 0
tgactgcaatttctctctttcgcttctaaaaaaaaacctaacaacctctcttctctcttcctcgttcaacaacaatggagttctggggagttgcggtgacaccaaaaaacgctactaaggtgactcctgaagaagacagccttgtccacatttctcaggcttcacttgactgcacagtgaaatctggagaatctgtggttttgagtgtgactgttggtggggctaaacttgttattggaacactttcacaagacaagttccctcagattagctttgatttggtttttgataaagagtttgagctttcacacagcggtaccaaagcaaatgttcatttcattggctacaaatcccccaacatcgagcaggatgacttcactagttcggatgatgaggatgttcctgaagctgttcctgctcctgcccctactgctgttactgccaacggaaatgctggagcagctgttgtcaaggctgacacaaagccaaaggccaaacctgccgaagtgaagcctgcagaagagaagcctgaatcagacgaggaagatgagtctgatgatgaagatgagtctgaagaggatgatgactctgagaaaggaatggatgttgatgaagatgactcagatgatgacgaggaggaggattctgaggatgaagaagaggaggagactcctaagaagcctgagccaatcaacaagaagaggccaaatgaatctgtatccaaaacacccgtctctggaaagaaggcaaaaccagcagcagcaccagcttctactcctcagaagacagaagagaagaagaaaggaggacacaccgccacaccacacccagctaagaagggtggaaagtctcctgtgaatgctaaccagagccccaagtctggaggtcaatcatccggtggtaacaacaacaagaagccattcaactcaggcaaacaatttggtggttccaacaacaagggttctaacaagggcaagggaaagggtagagcttaaggacgtggatcaaggagaggttttgggttttcgagtagatgatgaaaacacttggaagtgtggttttggatttttatcttattttattagtataacttgttatcggatgagctattttgagtatttgcaatttctactttcctatgtaattcagtatatgaatatttgctgaaatgagaaagaagactcgaattgcaaac

SEQ ID NO: 28416 - protein, 306 aa, Arabidopsis thaliana
  peptide (1)..(306): Ceres Seq. ID no. 13486844
MEFWGVAVTPKNATKVTPEEDSLVHISQASLDCTVKSGESVVLSVTVGGAKLVIGTLSQDKFPQISFDLVFDKEFELSHSGTKANVHFIGYKSPNIEQDDFTSSDDEDVPEAVPAPAPTAVTANGNAGAAVVKADTKPKAKPAEVKPAEEKPESDEEDESDDEDESEEDDDSEKGMDVDEDDSDDDEEEDSEDEEEEETPKKPEPINKKRPNESVSKTPVSGKKAKPAAAPASTPQKTEEKKKGGHTATPHPAKKGGKSPVNANQSPKSGGQSSGGNNNKKPFNSGKQFGGSNNKGSNKGKGKGRA

SEQ ID NO: 28417 - DNA, 731 bp, Arabidopsis thaliana
  misc_feature (1)..(731): Ceres Seq. ID no. 13490081
  misc_feature (1)..(731): Ortholog of  Ceres SEQ ID NO 15173170 as cited in SEQ ID NO 64240
atccaccgttaaaagcccctttatatcccaagaaataggtgaacttgttacagaacaagcaaagatcaaagagaaaaatatcccaaaaccaaaaacagaggaagaaagaagaagaaaagatgccttcaagcacattctccgggactgttagcacgccgaagctgtcggtggcagtggacatgggaaacccttttctcaatctcaccgttgatgccttcctcaagatcggagctgttggagtcactaaatctcttgcagaagacacttacaaggccatcgacaaagggagtctctccaagagcactttggagcatgcgcttaagaagttgtgtaaagaaggtgtttactggggagctgctggtggagtgtacattggaacagaatacggaatcgaacgtatccgtggcagcagagattggaaaaacgcaatgttagcaggcgcggcgacaggagcagtgctctcagcggttggtaagaaaggcaaagacactattgtgatcgatgccattcttggtggcgcgcttgcaaccgcttctcagttcgttaacaatcattatttctactgattctccatcttcctttagggaccaatttggttcatatggtgtggattcctttgtttactctttaaataataataaaaaacaatgtagtgtttttgaaatgaatacattcgagtattgttgacgttaaatatgcaatttagctattttcaatatgagaaatgcctc

SEQ ID NO: 28418 - protein, 148 aa, Arabidopsis thaliana
  peptide (1)..(148): Ceres Seq. ID no. 13490082
MPSSTFSGTVSTPKLSVAVDMGNPFLNLTVDAFLKIGAVGVTKSLAEDTYKAIDKGSLSKSTLEHALKKLCKEGVYWGAAGGVYIGTEYGIERIRGSRDWKNAMLAGAATGAVLSAVGKKGKDTIVIDAILGGALATASQFVNNHYFY

SEQ ID NO: 28419 - protein, 128 aa, Arabidopsis thaliana
  peptide (1)..(128): Ceres Seq. ID no. 13490083
MGNPFLNLTVDAFLKIGAVGVTKSLAEDTYKAIDKGSLSKSTLEHALKKLCKEGVYWGAAGGVYIGTEYGIERIRGSRDWKNAMLAGAATGAVLSAVGKKGKDTIVIDAILGGALATASQFVNNHYFY

SEQ ID NO: 28420 - protein, 74 aa, Arabidopsis thaliana
  peptide (1)..(74): Ceres Seq. ID no. 13490084
MPSSRSELLESLNLLQKTLTRPSTKGVSPRALWSMRLRSCVKKVFTGELLVECTLEQNTESNVSVAAEIGKTQC

SEQ ID NO: 28421 - DNA, 777 bp, Arabidopsis thaliana
  misc_feature (1)..(777): Ceres Seq. ID no. 12331800
  misc_feature (1)..(777): Ortholog of  Ceres SEQ ID NO 12598353 as cited in SEQ ID NO 62205
atagatctgaatcagagaattggtaagtagtaagaaccctagctttagattcgtcagattctgattactcgaatcaaagcagggtttttgacactaaaaatccgatctcgtgaagtgtgttttgcatcgaatcggaaaatatgaaagaagggaaatcatcgaagtcgtcgagtcaacaagagcagcatgaacagatttatcatcaaaacagtcacttgggttctttcaacttcgccaaattgtttgattctgaagcttcctgggacaaggatcaactgggagatgtgttgcattggatcaggcaagtagttggtttactctgcggattgttgtggggtgcgatacctttggtaggaggcatatggcttcttctatttcttgcaatctcctctggcatagtatatggttactatgcattggttctaaagatcgatgaagaagacttcggtggtcacgcagctttgctccaggacggtctatttgcttctctaagtttattcctgcttgcgtggattctggtgtatagcttgtctagcttctgatagagacacagtatctcgcgcttgagctgctccgtgaagaagtttagcagaacgtacctttcatggtttctccaatttacgatgtgcccttcatgcttttgttttctgaagatgggaactagcattggtagattttcatttttctgatggaacttttggtttccttttgttcttgttaattactttgtgtaataaaaatgagtattattatgcaaggatacagtatgtgtttagt

SEQ ID NO: 28422 - protein, 133 aa, Arabidopsis thaliana
  peptide (1)..(133): Ceres Seq. ID no. 12331801
MKEGKSSKSSSQQEQHEQIYHQNSHLGSFNFAKLFDSEASWDKDQLGDVLHWIRQVVGLLCGLLWGAIPLVGGIWLLLFLAISSGIVYGYYALVLKIDEEDFGGHAALLQDGLFASLSLFLLAWILVYSLSSF

SEQ ID NO: 28423 - DNA, 1201 bp, Arabidopsis thaliana
  misc_feature (1)..(1201): Ceres Seq. ID no. 12680985
  misc_feature (1)..(1201): Ortholog of  Ceres SEQ ID NO 14308077 as cited in SEQ ID NO 58566
  misc_feature (1)..(1201): Ortholog of  Ceres SEQ ID NO 15226608 as cited in SEQ ID NO 64190
gtagcgctcttttcgacgttttgctgtgattattttggccgtgagcttctccatttccatttccatcgccatcggactctctcctcttacaaacttttcatttttgttagctctcatctctacgtcgaattgctttttctcttcttctccgattcgaaaatgaggacaatcgtttcgcgtttgattcgttatcaatcgtctctttcccagatacggtttgtttctgcctctggtggcgggaggtatctctcgacagactctaacaaaattgatgagcccttcaatgtggaagaagctgagactgtacatgtgcctccacctcctactgagaagctgcttgtcctgggaggaaatggttttgtgggatcacatgtctgtaaagaagctttagatcgcggcttatctgtctctagccttagcaggtcaggtaggtcgtctttacaagagtcctgggcctccagagtaacatggcatcaaggaaaccttctatcatctgatttattgaaagatgctcttgagggagtgacttctgtgatttcttgtgttggtggttttggttcaaactcatatatgtataagattaacgggactgcaaacatcaacgcaattagggctgcctcagaaaaaggtgttaaaagatttgtctatatttctgctgcggatttcggattagccaactacttgttgagaggatactatgagggaaagcgagctgctgagaccgagctgctcacaagatttgcatatggaggtataatcttgcgacctggttttatatatggaactcgcagtgttgggagcatgaagatcccgttaggagtatttggttcacccatggagatggttcttcaacaagcaaaacctctgaaccagcttccattagtcggacctttgttcacacctccggtgaatgttgaatcggttgcaaaagtcgcagttagagcagccacagatccagtgttccctcccgggattgtggatgtccatggaatacaacgttacagccaacagaaatcgagataagtccgttttgaaaagcttaagtatgctcaatgtcgttttgtagagcttggctgcttttagtactctgctggattcgaatggtgggaacaaaaatgtttacttgtttctctcgccagaaatttcccacaaataaataaagaagagaagcttttatttatttattgaactatacatctct

SEQ ID NO: 28424 - protein, 340 aa, Arabidopsis thaliana
  peptide (1)..(340): Ceres Seq. ID no. 12680986
VALFSTFCCDYFGRELLHFHFHRHRTLSSYKLFIFVSSHLYVELLFLFFSDSKMRTIVSRLIRYQSSLSQIRFVSASGGGRYLSTDSNKIDEPFNVEEAETVHVPPPPTEKLLVLGGNGFVGSHVCKEALDRGLSVSSLSRSGRSSLQESWASRVTWHQGNLLSSDLLKDALEGVTSVISCVGGFGSNSYMYKINGTANINAIRAASEKGVKRFVYISAADFGLANYLLRGYYEGKRAAETELLTRFAYGGIILRPGFIYGTRSVGSMKIPLGVFGSPMEMVLQQAKPLNQLPLVGPLFTPPVNVESVAKVAVRAATDPVFPPGIVDVHGIQRYSQQKSR

SEQ ID NO: 28425 - protein, 287 aa, Arabidopsis thaliana
  peptide (1)..(287): Ceres Seq. ID no. 12680987
MRTIVSRLIRYQSSLSQIRFVSASGGGRYLSTDSNKIDEPFNVEEAETVHVPPPPTEKLLVLGGNGFVGSHVCKEALDRGLSVSSLSRSGRSSLQESWASRVTWHQGNLLSSDLLKDALEGVTSVISCVGGFGSNSYMYKINGTANINAIRAASEKGVKRFVYISAADFGLANYLLRGYYEGKRAAETELLTRFAYGGIILRPGFIYGTRSVGSMKIPLGVFGSPMEMVLQQAKPLNQLPLVGPLFTPPVNVESVAKVAVRAATDPVFPPGIVDVHGIQRYSQQKSR

SEQ ID NO: 28426 - DNA, 1531 bp, Arabidopsis thaliana
  misc_feature (1)..(1531): Ceres Seq. ID no. 12377341
  misc_feature (1)..(1531): Ortholog of  Ceres SEQ ID NO 14316522 as cited in SEQ ID NO 58267
aaaaccctaaatctctgatccgccatgagaggagctctcttgagaaatgcatctctctgcgctcgcagaatcattctttctcctcgtataacccatcagatctcccccaatgttccctttctcgctccaatcgccgctcctgctgctcccaagttcagatttttctcctccgaatccggtgagaactcgactacggcccctgagtcttcgccgactgattcacccgagaagaaagatctcgttgtagaagatgtaagcaacaaagagcttaaaagccgtatagagaagtatttcaatgagggtaatgaagatgctttacccggagttattgaagcacttctacagagaagacttgtagacaaacacgcagagactgatgatgaattgttggaaaaaatcgagtctctacctttcaaagatgatgtcaaggatgaagattttgaatccgatttcgaggaagcacattctactgacgaagaacttgaggatttgtacaattctcccgagtatgtagctgaaaagatgaggaagaatgagtttttcaacatggatgataagaagtgggatcacatgattagagaaggtatccaacatgggtgtcttactgatactaaagaatgcgaggagattcttgaggatatgctcaaatgggaccagcttcttcctgatgacttgaagaaaaaggttgaagcaaagtttaatgagcttggagatatgtgtgaaagaggtgaaattgaggctgaagcagcttatgagctttttaaggaatttgaagatgagatggtaattcagtatggggatcagatggaagctgagggtcctccccaatttggtgaaacagatgcttccgataggaatactgacttggatgatccccctggtaaaggcccaatcctcaggtggcaatcaaggatagtttttgctcctggaggtgatgcgtggcatccaaagaacaggaaagttaaaatgtctgttacagtgaaagagcttgggctctcaaagcatcaggctaaaaggctaagggaacttgtagggaaaagataccattcggggaaagacgagcttacaatcaccagcgagaggtttgaacaccgagaggaaaacaggaaagactgcttaagaactctttacgggttgatagaagaagctgggaaagccaacaagatcgctgaagacataagaacttcatatgtaaaacaaagactccgtgccaatccagcttttatgcagaaactacaagccaagatcataaggtctaaagaatcagatgccatcaacgcttgaacaaaacttttcccggttagcgcctttcttgtctcaccaaataatctgtaggatcgtcttcttttggcaatcatttgatccgttatggcttttcagatccatgaagaatctttgatggtaactcctatcttagtttggtttgcttgttgtatctcatgaagacatgaaccttggctgtgctgttggtgtctattagagactagttaacgttttctcagaattatgaatctctcctaaagttaaggtt

SEQ ID NO: 28427 - protein, 419 aa, Arabidopsis thaliana
  peptide (1)..(419): Ceres Seq. ID no. 12377342
MRGALLRNASLCARRIILSPRITHQISPNVPFLAPIAAPAAPKFRFFSSESGENSTTAPESSPTDSPEKKDLVVEDVSNKELKSRIEKYFNEGNEDALPGVIEALLQRRLVDKHAETDDELLEKIESLPFKDDVKDEDFESDFEEAHSTDEELEDLYNSPEYVAEKMRKNEFFNMDDKKWDHMIREGIQHGCLTDTKECEEILEDMLKWDQLLPDDLKKKVEAKFNELGDMCERGEIEAEAAYELFKEFEDEMVIQYGDQMEAEGPPQFGETDASDRNTDLDDPPGKGPILRWQSRIVFAPGGDAWHPKNRKVKMSVTVKELGLSKHQAKRLRELVGKRYHSGKDELTITSERFEHREENRKDCLRTLYGLIEEAGKANKIAEDIRTSYVKQRLRANPAFMQKLQAKIIRSKESDAINA

SEQ ID NO: 28428 - protein, 253 aa, Arabidopsis thaliana
  peptide (1)..(253): Ceres Seq. ID no. 12377343
MRKNEFFNMDDKKWDHMIREGIQHGCLTDTKECEEILEDMLKWDQLLPDDLKKKVEAKFNELGDMCERGEIEAEAAYELFKEFEDEMVIQYGDQMEAEGPPQFGETDASDRNTDLDDPPGKGPILRWQSRIVFAPGGDAWHPKNRKVKMSVTVKELGLSKHQAKRLRELVGKRYHSGKDELTITSERFEHREENRKDCLRTLYGLIEEAGKANKIAEDIRTSYVKQRLRANPAFMQKLQAKIIRSKESDAINA

SEQ ID NO: 28429 - protein, 245 aa, Arabidopsis thaliana
  peptide (1)..(245): Ceres Seq. ID no. 12377344
MDDKKWDHMIREGIQHGCLTDTKECEEILEDMLKWDQLLPDDLKKKVEAKFNELGDMCERGEIEAEAAYELFKEFEDEMVIQYGDQMEAEGPPQFGETDASDRNTDLDDPPGKGPILRWQSRIVFAPGGDAWHPKNRKVKMSVTVKELGLSKHQAKRLRELVGKRYHSGKDELTITSERFEHREENRKDCLRTLYGLIEEAGKANKIAEDIRTSYVKQRLRANPAFMQKLQAKIIRSKESDAINA

SEQ ID NO: 28430 - DNA, 799 bp, Arabidopsis thaliana
  misc_feature (1)..(799): Ceres Seq. ID no. 12393692
  misc_feature (1)..(799): Ortholog of  Ceres SEQ ID NO 15177004 as cited in SEQ ID NO 57554
  misc_feature (1)..(799): Ortholog of  Ceres SEQ ID NO 13662587 as cited in SEQ ID NO 63275
  misc_feature (1)..(799): Ortholog of  Ceres SEQ ID NO 13599500 as cited in SEQ ID NO 0
acacctccactttcccttttgcccctcttttttacagatttcactctctgctctactactctctcctcctcctcctcctaaagaaagttcttaactctcctgggttcttcaggtttttccttttctggaataaaaagaagaagaaatgggtgttcttgatcatgtctctgaaatgtttgactgctctcatggtcacaagattaaaaagcgcaaacagttgcagacggtggagattaaagtgaaaatggactgcgaaggttgcgagcggaaagtgcggcgttctgtcgaaggcatgaagggtgtgtcttctgtgacgttggagcccaaagcccataaagtcactgtagtcggctacgtcgatcccaacaaggtggtggctcgaatgtctcacaggaccggcaagaaagtcgagctctggccatatgtgccctacgacgtggtcgctcatccttacgctgccggtgtctacgacaagaaggcaccctccggttatgtccgaagagtcgacgaccccggagtgtcgcagctggctcgtgctagctccaccgaggtccgctacaccactgcatttagcgacgagaacccggcggcttgtgtggtcatgtgatgtcatatggactactactgtttcaatttgttatggcttaatttaatgtcttgttttgtacattaataccataacggtaggtttcttgttttggttttagttccttggtctgtattccttacactttatgattgcaatatgtgtttttccctttcttccaaagacttttaatgttaataaatatttctaccc

SEQ ID NO: 28431 - protein, 153 aa, Arabidopsis thaliana
  peptide (1)..(153): Ceres Seq. ID no. 12393693
MGVLDHVSEMFDCSHGHKIKKRKQLQTVEIKVKMDCEGCERKVRRSVEGMKGVSSVTLEPKAHKVTVVGYVDPNKVVARMSHRTGKKVELWPYVPYDVVAHPYAAGVYDKKAPSGYVRRVDDPGVSQLARASSTEVRYTTAFSDENPAACVVM

SEQ ID NO: 28432 - protein, 144 aa, Arabidopsis thaliana
  peptide (1)..(144): Ceres Seq. ID no. 12393694
MFDCSHGHKIKKRKQLQTVEIKVKMDCEGCERKVRRSVEGMKGVSSVTLEPKAHKVTVVGYVDPNKVVARMSHRTGKKVELWPYVPYDVVAHPYAAGVYDKKAPSGYVRRVDDPGVSQLARASSTEVRYTTAFSDENPAACVVM

SEQ ID NO: 28433 - protein, 120 aa, Arabidopsis thaliana
  peptide (1)..(120): Ceres Seq. ID no. 12393695
MDCEGCERKVRRSVEGMKGVSSVTLEPKAHKVTVVGYVDPNKVVARMSHRTGKKVELWPYVPYDVVAHPYAAGVYDKKAPSGYVRRVDDPGVSQLARASSTEVRYTTAFSDENPAACVVM

SEQ ID NO: 28434 - DNA, 597 bp, Arabidopsis thaliana
  misc_feature (1)..(597): Ceres Seq. ID no. 12331802
  misc_feature (1)..(597): Ortholog of  Ceres SEQ ID NO 12612527 as cited in SEQ ID NO 52588
ctgaagagagagagatggcaacggcgtcgtttaggtggatcttgcagcttcacagagacgtaccaaaagcggctcgattctacgagaaaggtctcgatttctccgtcaatgtcgttaccttacgttgggctgaacttcaatctggtcctcttaagctagctcttatgcaagctcccagcgagcatgtgatgagtgagaagggatactcttcgttactatcgttcactgtagcagacattaatacaacaatctctaaacttatggaattaggagctgaactcgatggctctatcaaatatgaagtccatggcaaggttgcttctgtgagatgtcttgatggtcatgtgctcggactctatgaaccttcatgagttttctattcagttcggattatgtggatttgattttgtttttttcgatccgattttggttgaataatgtttcaaaattttgctaatcggatgtttggtaaggacttagctctaagacaaatgtaaatctaatatatccggcgtagaaaagtcgttaattgattgttcaactaatcgtctagacattcgatctattaaagacaggggagatatgttttacaaattt

SEQ ID NO: 28435 - protein, 122 aa, Arabidopsis thaliana
  peptide (1)..(122): Ceres Seq. ID no. 12331803
EEREMATASFRWILQLHRDVPKAARFYEKGLDFSVNVVTLRWAELQSGPLKLALMQAPSEHVMSEKGYSSLLSFTVADINTTISKLMELGAELDGSIKYEVHGKVASVRCLDGHVLGLYEPS

SEQ ID NO: 28436 - protein, 118 aa, Arabidopsis thaliana
  peptide (1)..(118): Ceres Seq. ID no. 12331804
MATASFRWILQLHRDVPKAARFYEKGLDFSVNVVTLRWAELQSGPLKLALMQAPSEHVMSEKGYSSLLSFTVADINTTISKLMELGAELDGSIKYEVHGKVASVRCLDGHVLGLYEPS

SEQ ID NO: 28437 - protein, 68 aa, Arabidopsis thaliana
  peptide (1)..(68): Ceres Seq. ID no. 12331805
MQAPSEHVMSEKGYSSLLSFTVADINTTISKLMELGAELDGSIKYEVHGKVASVRCLDGHVLGLYEPS

SEQ ID NO: 28438 - DNA, 1068 bp, Arabidopsis thaliana
  misc_feature (1)..(1068): Ceres Seq. ID no. 12327625
  misc_feature (1)..(1068): Ortholog of  Ceres SEQ ID NO 13594430 as cited in SEQ ID NO 60181
  misc_feature (1)..(1068): Ortholog of  Ceres SEQ ID NO 13597809 as cited in SEQ ID NO 64598
  misc_feature (1)..(1068): Ortholog of  Ceres SEQ ID NO 12617960 as cited in SEQ ID NO 69051
  misc_feature (1)..(1068): Ortholog of  Ceres SEQ ID NO 13589401 as cited in SEQ ID NO 0
  misc_feature (1)..(1068): Ortholog of  Ceres SEQ ID NO 15179361 as cited in SEQ ID NO 0
acacactcttcaaatcttcaatcagtaaagagttttaggtttttttttcttcttctcggaggtttgtagaatcaacaaaaatggtggaagaccacaagcacgaggaatcgatcttggagaagattgttgagaagatccatggccacggtgactcgtcttctctgtccgattccgacgacgataagaaatctacatcgtcttcgtcgtcgtccttcaagtcaaagatttaccgacttttcggaagggagaaacctgttcacaaggttctcggtggtggaaaacctgctgatatattcctttggaggaacaagaaggtatctggtggagtcttgggtgctgtaactgcgtcttgggtcttattcgagttattcgaataccatctcctcgcttttctctgtcactttgcgatttttgctcttgcagcattgttcttgtggtctaatgcttgtacattcatccacaagtcaactcctcacatcccggaagttcacatccctgaagatcctattcttcaacttgtttctggattaaggattgaaatcaatcgtggtttgacccttcttaggaacattgcatcaggaaaagatgtcaagaaatttatcctggtaattgctggcttgtgggttttgtccattattggcagctgctacaacttcttgacattgttctacactgctactgtccttctcttcaccattcctgtactctacgagaagtatgaggacaaagtagatgcctatggggagaaggcgatgagggagatcaaaaagcaatatgcagtacttgatgagaaggtattgcgtaaggtcataagcaagattccaagaggagctctgaacaagaagaaggattaaggaatgtgagttactctctcattggaatcgtagtaatggttcaagacatgttttgttagaagctgttggttgataaaccctttgatctcttgttattattatgttcattataaatttgggggttttaactaaaaatatttagattatgagagaacacggatgcatgataattattgttgttagttatttgtcttagttaatttctcatcctttt

SEQ ID NO: 28439 - protein, 257 aa, Arabidopsis thaliana
  peptide (1)..(257): Ceres Seq. ID no. 12327626
MVEDHKHEESILEKIVEKIHGHGDSSSLSDSDDDKKSTSSSSSSFKSKIYRLFGREKPVHKVLGGGKPADIFLWRNKKVSGGVLGAVTASWVLFELFEYHLLAFLCHFAIFALAALFLWSNACTFIHKSTPHIPEVHIPEDPILQLVSGLRIEINRGLTLLRNIASGKDVKKFILVIAGLWVLSIIGSCYNFLTLFYTATVLLFTIPVLYEKYEDKVDAYGEKAMREIKKQYAVLDEKVLRKVISKIPRGALNKKKD

SEQ ID NO: 28440 - DNA, 1036 bp, Arabidopsis thaliana
  misc_feature (1)..(1036): Ceres Seq. ID no. 12488547
  misc_feature (1)..(1036): Ortholog of  Ceres SEQ ID NO 14311477 as cited in SEQ ID NO 51390
  misc_feature (1)..(1036): Ortholog of  Ceres SEQ ID NO 14302840 as cited in SEQ ID NO 62295
  misc_feature (1)..(1036): Ortholog of  Ceres SEQ ID NO 13596892 as cited in SEQ ID NO 62900
aaataggcttccgttgttaaataaaagttgaacatttaaataaagtagagaggttgtgttggttctgcaaacatggatatgcttcacaccattctcaattttcttcttcctcctcttactatcagttttctcgttctcttttacccattttatctttttatcaaacttgtgagatttcttgttaagcaccttcgctttgaaaacgttaccgggaaagtagttcttatcaccggagcttcctccggcatcggagagcatgtggcatacgagtacgcaaagaaaggagcaaagttagctcttgttgctcgaagaaaggatcgtctagagatagtagcagaaacatcacgtcaattaggatctggcgatgtcatcatcatacctggtgatgtttctaaagttgaggactgcaagaagttcatcgacggaacgattcatcatttcggaaaactagaccacctgatcaacaatgctggagtacctcaaaccgttatattcgaagatttcacacaaattcaagacgctatttctataatggatatcaacttttggggctcaacgtccatcacttattttgctattcctcatcttcgaaaaagcaaaggaaaaattgttgtgatttcttctgctacggcaattatacctttgccagcggcaagcgtctattcagcaagcaaagcagctttagtaaaattctttgaaacattaagagttgagatcagtcccgatatcaaaataacaatcgctctttccggatttatatctacggatatgaccactcctcagtttaaagaaatgtacggttcagatttcatacttttggaatcagtgagtcaatgcgcaaaagcgatcttcagaggtattggtagaggagaggcatacgtcatagagccatcttggataaaatggatctttttgataaaaaatgtttgtcctgagatcgttgactacgtactcgactatatatttgttagttatctaagaccttatttcaagcgtgattaatcatatcgatctatccaagatctctctggttttc

SEQ ID NO: 28441 - protein, 309 aa, Arabidopsis thaliana
  peptide (1)..(309): Ceres Seq. ID no. 12488548
MDMLHTILNFLLPPLTISFLVLFYPFYLFIKLVRFLVKHLRFENVTGKVVLITGASSGIGEHVAYEYAKKGAKLALVARRKDRLEIVAETSRQLGSGDVIIIPGDVSKVEDCKKFIDGTIHHFGKLDHLINNAGVPQTVIFEDFTQIQDAISIMDINFWGSTSITYFAIPHLRKSKGKIVVISSATAIIPLPAASVYSASKAALVKFFETLRVEISPDIKITIALSGFISTDMTTPQFKEMYGSDFILLESVSQCAKAIFRGIGRGEAYVIEPSWIKWIFLIKNVCPEIVDYVLDYIFVSYLRPYFKRD

SEQ ID NO: 28442 - protein, 307 aa, Arabidopsis thaliana
  peptide (1)..(307): Ceres Seq. ID no. 12488549
MLHTILNFLLPPLTISFLVLFYPFYLFIKLVRFLVKHLRFENVTGKVVLITGASSGIGEHVAYEYAKKGAKLALVARRKDRLEIVAETSRQLGSGDVIIIPGDVSKVEDCKKFIDGTIHHFGKLDHLINNAGVPQTVIFEDFTQIQDAISIMDINFWGSTSITYFAIPHLRKSKGKIVVISSATAIIPLPAASVYSASKAALVKFFETLRVEISPDIKITIALSGFISTDMTTPQFKEMYGSDFILLESVSQCAKAIFRGIGRGEAYVIEPSWIKWIFLIKNVCPEIVDYVLDYIFVSYLRPYFKRD

SEQ ID NO: 28443 - protein, 156 aa, Arabidopsis thaliana
  peptide (1)..(156): Ceres Seq. ID no. 12488550
MDINFWGSTSITYFAIPHLRKSKGKIVVISSATAIIPLPAASVYSASKAALVKFFETLRVEISPDIKITIALSGFISTDMTTPQFKEMYGSDFILLESVSQCAKAIFRGIGRGEAYVIEPSWIKWIFLIKNVCPEIVDYVLDYIFVSYLRPYFKRD

SEQ ID NO: 28444 - DNA, 1299 bp, Arabidopsis thaliana
  misc_feature (1)..(1299): Ceres Seq. ID no. 12324245
  misc_feature (1)..(1299): Ortholog of  Ceres SEQ ID NO 14302514 as cited in SEQ ID NO 65814
tccatttccgtcttcacacagtttagggttcacaacttgattcggatcgaaagcaccgagaagaagaagccaatcaatcatgtctagacaagtggcaaggcttatcggatctctgtcatcaaaagctcgccgttgttctaccggcggctcagaggtttttccgtcatgccagtctctcacttcgttgacccaatctcgctccttcgcgtcggatcctcatcctcctgcggcggttttcgttgacaaaaacacacgagtcctctgtcaaggcatcaccggaaagaacggcactttccacactgaacaagccattgagtacggcaccaaaatggtggcaggagtgacaccgaagaagggtggaacagaacacttgggtctcccagttttcaactctgttgctgaagctaaggctgacaccaaagccaatgcctctgtgatttatgttcctgctccttttgctgctgctgctattatggagggtattgaggctgagttagatcttattgtgtgtatcaccgaaggaatccctcaacatgacatggtacgtgtaaagcatgctcttaacagtcaatcgaaaactaggctgattggtccaaactgccctgggattatcaagcctggtgaatgcaaaattggaattatgccgggatacatccacaagcctgggaagattggaattgtctcacgatctggaaccttgacatatgaagctgttttccaaacaactgcagtgggtctaggccaatctacttgtgtaggaatcggtggggatccttttaacgggacaaactttgtcgactgcttggagaaattctttgttgatcctcaaacagaaggtatcgttctcattggagaaatcggaggcactgcagaagaagatgctgcagcattgataaaggcaagtggtactgagaagcctgttgttgcttttattgctggacttactgcaccaccgggtcgtcgaatgggtcatgccggagccattgtttccggtggtaaaggtacggctcaggacaaaattaagagtttgaatgatgctggagtgaaggttgttgaatctccggctaagattggatcagcgatgtatgagctctttcaagaaagaggtcttttgaagcagtgaagtgaatttcactagctttcgcttctttttttccatcttgaaaccttcaagaaaaaagaaaagaaaaaaaccctaattccacgccattgatggctgcacacttttttggggtttgttttgctatattgatatgatttttccaattgaacagtgataattaaaagagattcaaatcc

SEQ ID NO: 28445 - protein, 347 aa, Arabidopsis thaliana
  peptide (1)..(347): Ceres Seq. ID no. 12324246
MSRQVARLIGSLSSKARRCSTGGSEVFPSCQSLTSLTQSRSFASDPHPPAAVFVDKNTRVLCQGITGKNGTFHTEQAIEYGTKMVAGVTPKKGGTEHLGLPVFNSVAEAKADTKANASVIYVPAPFAAAAIMEGIEAELDLIVCITEGIPQHDMVRVKHALNSQSKTRLIGPNCPGIIKPGECKIGIMPGYIHKPGKIGIVSRSGTLTYEAVFQTTAVGLGQSTCVGIGGDPFNGTNFVDCLEKFFVDPQTEGIVLIGEIGGTAEEDAAALIKASGTEKPVVAFIAGLTAPPGRRMGHAGAIVSGGKGTAQDKIKSLNDAGVKVVESPAKIGSAMYELFQERGLLKQ

SEQ ID NO: 28446 - protein, 264 aa, Arabidopsis thaliana
  peptide (1)..(264): Ceres Seq. ID no. 12324247
MVAGVTPKKGGTEHLGLPVFNSVAEAKADTKANASVIYVPAPFAAAAIMEGIEAELDLIVCITEGIPQHDMVRVKHALNSQSKTRLIGPNCPGIIKPGECKIGIMPGYIHKPGKIGIVSRSGTLTYEAVFQTTAVGLGQSTCVGIGGDPFNGTNFVDCLEKFFVDPQTEGIVLIGEIGGTAEEDAAALIKASGTEKPVVAFIAGLTAPPGRRMGHAGAIVSGGKGTAQDKIKSLNDAGVKVVESPAKIGSAMYELFQERGLLKQ

SEQ ID NO: 28447 - protein, 216 aa, Arabidopsis thaliana
  peptide (1)..(216): Ceres Seq. ID no. 12324248
MEGIEAELDLIVCITEGIPQHDMVRVKHALNSQSKTRLIGPNCPGIIKPGECKIGIMPGYIHKPGKIGIVSRSGTLTYEAVFQTTAVGLGQSTCVGIGGDPFNGTNFVDCLEKFFVDPQTEGIVLIGEIGGTAEEDAAALIKASGTEKPVVAFIAGLTAPPGRRMGHAGAIVSGGKGTAQDKIKSLNDAGVKVVESPAKIGSAMYELFQERGLLKQ

SEQ ID NO: 28448 - DNA, 1294 bp, Arabidopsis thaliana
  misc_feature (1)..(1294): Ceres Seq. ID no. 13487534
  misc_feature (1)..(1294): Ortholog of  Ceres SEQ ID NO 13659644 as cited in SEQ ID NO 67118
  misc_feature (1)..(1294): Ortholog of  Ceres SEQ ID NO 14302856 as cited in SEQ ID NO 68824
aaaaacttccgtatcctggagagtaaattcctttatggctacgaatgggttaatggcgtcgtccagtgtgtttcttcatcgcccgcgtatcgcatttgcttctagaacgaatcagactgtaggaaaatacggtaaaggccgtgttagtttcatgggcattgggacacgtcgtcttccggtggttttatccatgacggcgatggcggattccggtgaggaggccgtgaaatctgttttgcctggaaatggcatatccatcatggtgaatggatgtagtggcaaaatggggaaagctgtaattaaagcagcagactctgcaggagtaaatattgttcccatatcgtttggatctgctggtgaggatggtcagagagttgaggtctgtggaaaggagattactgtgcacggtccaactgaaagagaaaaggttctttcttcggtgtttgagaagcacccggagctaattgttgtcgactacacaattccctctgcagtaaatgataatgcggagctgtatagcaaagtaggtgttcctttcgtcatgggaacaactggtggagataggaacaaattgtatgaaactgttgaggaagcaaagatttatgctgtgatttctccacagatgggtaaacaggttgtagcatttcttgcggccatggagatcatggctgagcagtttccgggagccttttctggttattccttggatgtgatggagtctcatcaagctagcaaattggatgcatccggaacagcaaaagctgttatttcttgcttccaggaattgggtgtgtcttacgacatggatcagatacaattgattcgggatccaaaacagcaagtggagatggtgggtgtacctgaggagcatatctctggtcacgctttccatctttatcacttgacatcacccgatgaaactgtctccttcgagttccagcacaatgtctgcggccgatcaatttatgctgagggtactgttgatgccgtgctcttcctcgccaaaaagattcgattgaaagcagatcagcgaatctacaacatgatcgatgtcttgagagagggaaatatgcgttgagctttcgagttttgccagtgcattgaccaaatggtggttgtagaagagctgagattagatttaccaaatcatcagctgtgaaaattagatgtttggtttcccacttcttctgccttgagcacaggcttttgaaattccttggtatatacaagaacttgccattgtattgttcatgttttgacctctttacctcaatgttattctcctttctggatc

SEQ ID NO: 28449 - protein, 358 aa, Arabidopsis thaliana
  peptide (1)..(358): Ceres Seq. ID no. 13487535
KTSVSWRVNSFMATNGLMASSSVFLHRPRIAFASRTNQTVGKYGKGRVSFMGIGTRRLPVVLSMTAMADSGEEAVKSVLPGNGISIMVNGCSGKMGKAVIKAADSAGVNIVPISFGSAGEDGQRVEVCGKEITVHGPTEREKVLSSVFEKHPELIVVDYTIPSAVNDNAELYSKVGVPFVMGTTGGDRNKLYETVEEAKIYAVISPQMGKQVVAFLAAMEIMAEQFPGAFSGYSLDVMESHQASKLDASGTAKAVISCFQELGVSYDMDQIQLIRDPKQQVEMVGVPEEHISGHAFHLYHLTSPDETVSFEFQHNVCGRSIYAEGTVDAVLFLAKKIRLKADQRIYNMIDVLREGNMR

SEQ ID NO: 28450 - protein, 347 aa, Arabidopsis thaliana
  peptide (1)..(347): Ceres Seq. ID no. 13487536
MATNGLMASSSVFLHRPRIAFASRTNQTVGKYGKGRVSFMGIGTRRLPVVLSMTAMADSGEEAVKSVLPGNGISIMVNGCSGKMGKAVIKAADSAGVNIVPISFGSAGEDGQRVEVCGKEITVHGPTEREKVLSSVFEKHPELIVVDYTIPSAVNDNAELYSKVGVPFVMGTTGGDRNKLYETVEEAKIYAVISPQMGKQVVAFLAAMEIMAEQFPGAFSGYSLDVMESHQASKLDASGTAKAVISCFQELGVSYDMDQIQLIRDPKQQVEMVGVPEEHISGHAFHLYHLTSPDETVSFEFQHNVCGRSIYAEGTVDAVLFLAKKIRLKADQRIYNMIDVLREGNMR

SEQ ID NO: 28451 - protein, 341 aa, Arabidopsis thaliana
  peptide (1)..(341): Ceres Seq. ID no. 13487537
MASSSVFLHRPRIAFASRTNQTVGKYGKGRVSFMGIGTRRLPVVLSMTAMADSGEEAVKSVLPGNGISIMVNGCSGKMGKAVIKAADSAGVNIVPISFGSAGEDGQRVEVCGKEITVHGPTEREKVLSSVFEKHPELIVVDYTIPSAVNDNAELYSKVGVPFVMGTTGGDRNKLYETVEEAKIYAVISPQMGKQVVAFLAAMEIMAEQFPGAFSGYSLDVMESHQASKLDASGTAKAVISCFQELGVSYDMDQIQLIRDPKQQVEMVGVPEEHISGHAFHLYHLTSPDETVSFEFQHNVCGRSIYAEGTVDAVLFLAKKIRLKADQRIYNMIDVLREGNMR

SEQ ID NO: 28452 - DNA, 1520 bp, Arabidopsis thaliana
  misc_feature (1)..(1520): Ceres Seq. ID no. 13499768
  misc_feature (1)..(1520): Ortholog of  Ceres SEQ ID NO 13639663 as cited in SEQ ID NO 57850
aagaaacaagaggtaggctcttctagcgaactcctttcatacgttttctctctactctcatcgcttttcttatctctctcggagctcttccgtcgtccaccattgattacgggagtgtattgagctaaatatggctataatacaacttggaagtacatgtgttgctcaatggagtattcgtcctcaatttgcagtcagagcttattatcccagcagaatcgaatcaactcgccatcaaaattccagtagccaagtaaattgtttgggagcttcaaagtcgagtatgttctcacatgggtcattgcccttcttgtccatgacgggaatgtccagaaatatgcatcctcctcgcagaggatctcgcttcactgttagagctgatgcagattactattcggtactcggagtttcgaaaaatgcaaccaaagctgagattaaaagcgcttatcggaagctggctaggaattaccatccggatgtgaacaaggatcctggcgcagaagagaaattcaaagaaataagtaacgcatatgaggttttatcagatgatgaaaagaaatctctttacgataggtatggtgaggccggacttaaaggcgctgctggatttggcaatggggattttagtaatccgttcgatctattcgactcattattcgaaggcttcggtggtgggatgggtagaggttcaagaagcagagctgtggatggtcaagacgagtattacacgctaatcttaaacttcaaagaagcggttttcggaatggagaaagaaatagagatatcccggctcgagagctgtgggacatgtgaaggttcaggtgcaaaacctggaaccaaaccgaccaaatgcaccacgtgtggcggacaaggccaagtggtttcagcagctagaactcctctgggcgtgttccaacaagtcatgacttgctcgtcctgtaatggcactggagagatctcgacgccgtgtggtacttgctctggagacggacgcgtgaggaagacaaaacggataagtctcaaagtaccagccggggttgattcaggtagccggttgagagtgagaggagaaggcaatgccgggaagagaggcggatcaccgggcgatctgtttgttgttatagaagttatcccagacccgattttgaaacgagacgatacaaatattctctacacttgcaagatatcgtatatcgatgcgattttagggacgacactgaaagtaccaacagtggatgggacagtagatttgaaagttccagctgggacacaacctagcacgacgcttgtgatggcgaaaaaaggagttccggtattgaacaagagtaatatgagaggagatcagttggtgagagtacaagtggagatacctaagagattgagcaaagaggagaaaaaacttattgaagagcttgctgatatgagcaagaacaggactgctaatagcaccagtagatgattagaaacacgaaaattttgacattgaaattatgaatctctctatacatatacatttttct

SEQ ID NO: 28453 - protein, 442 aa, Arabidopsis thaliana
  peptide (1)..(442): Ceres Seq. ID no. 13499769
MAIIQLGSTCVAQWSIRPQFAVRAYYPSRIESTRHQNSSSQVNCLGASKSSMFSHGSLPFLSMTGMSRNMHPPRRGSRFTVRADADYYSVLGVSKNATKAEIKSAYRKLARNYHPDVNKDPGAEEKFKEISNAYEVLSDDEKKSLYDRYGEAGLKGAAGFGNGDFSNPFDLFDSLFEGFGGGMGRGSRSRAVDGQDEYYTLILNFKEAVFGMEKEIEISRLESCGTCEGSGAKPGTKPTKCTTCGGQGQVVSAARTPLGVFQQVMTCSSCNGTGEISTPCGTCSGDGRVRKTKRISLKVPAGVDSGSRLRVRGEGNAGKRGGSPGDLFVVIEVIPDPILKRDDTNILYTCKISYIDAILGTTLKVPTVDGTVDLKVPAGTQPSTTLVMAKKGVPVLNKSNMRGDQLVRVQVEIPKRLSKEEKKLIEELADMSKNRTANSTSR

SEQ ID NO: 28454 - protein, 391 aa, Arabidopsis thaliana
  peptide (1)..(391): Ceres Seq. ID no. 13499770
MFSHGSLPFLSMTGMSRNMHPPRRGSRFTVRADADYYSVLGVSKNATKAEIKSAYRKLARNYHPDVNKDPGAEEKFKEISNAYEVLSDDEKKSLYDRYGEAGLKGAAGFGNGDFSNPFDLFDSLFEGFGGGMGRGSRSRAVDGQDEYYTLILNFKEAVFGMEKEIEISRLESCGTCEGSGAKPGTKPTKCTTCGGQGQVVSAARTPLGVFQQVMTCSSCNGTGEISTPCGTCSGDGRVRKTKRISLKVPAGVDSGSRLRVRGEGNAGKRGGSPGDLFVVIEVIPDPILKRDDTNILYTCKISYIDAILGTTLKVPTVDGTVDLKVPAGTQPSTTLVMAKKGVPVLNKSNMRGDQLVRVQVEIPKRLSKEEKKLIEELADMSKNRTANSTSR

SEQ ID NO: 28455 - protein, 380 aa, Arabidopsis thaliana
  peptide (1)..(380): Ceres Seq. ID no. 13499771
MTGMSRNMHPPRRGSRFTVRADADYYSVLGVSKNATKAEIKSAYRKLARNYHPDVNKDPGAEEKFKEISNAYEVLSDDEKKSLYDRYGEAGLKGAAGFGNGDFSNPFDLFDSLFEGFGGGMGRGSRSRAVDGQDEYYTLILNFKEAVFGMEKEIEISRLESCGTCEGSGAKPGTKPTKCTTCGGQGQVVSAARTPLGVFQQVMTCSSCNGTGEISTPCGTCSGDGRVRKTKRISLKVPAGVDSGSRLRVRGEGNAGKRGGSPGDLFVVIEVIPDPILKRDDTNILYTCKISYIDAILGTTLKVPTVDGTVDLKVPAGTQPSTTLVMAKKGVPVLNKSNMRGDQLVRVQVEIPKRLSKEEKKLIEELADMSKNRTANSTSR

SEQ ID NO: 28456 - DNA, 1200 bp, Arabidopsis thaliana
  misc_feature (1)..(1200): Ceres Seq. ID no. 12327357
  misc_feature (1)..(1200): Ortholog of  Ceres SEQ ID NO 15176130 as cited in SEQ ID NO 1136
  misc_feature (1)..(1200): Ortholog of  Ceres SEQ ID NO 15171728 as cited in SEQ ID NO 57131
  misc_feature (1)..(1200): Ortholog of  Ceres SEQ ID NO 14308198 as cited in SEQ ID NO 59072
  misc_feature (1)..(1200): Ortholog of  Ceres SEQ ID NO 13654213 as cited in SEQ ID NO 60614
  misc_feature (1)..(1200): Ortholog of  Ceres SEQ ID NO 12617527 as cited in SEQ ID NO 64697
aaacacggctctctcttcttcatcatcatcatcatcttcctctcgatcggaaaatagtcaaaagtttctataaattgttgaatcaaagcagagaagaagaagaagacgatcatgaatccagattccgattatcctcatctccctaacatcaagatccaccatccttcatctcctcgtcactctcaccaccactcttcctccactccttccgccgctactcctaccccaaccgccggtgctcgccgtaagatcggagtcgccgttgacctttccgaagaaagcgctttcgctgttcgctgggctgtcgatcattacatccgtcccggagacgccgtcgtcattctccacgtttctccaacctccgttctcttcggcgccgattggggacctctccctctccaaactcctcctcctccttccgccgctaccgatcccggagctcagccgaagcctagtcaggaagatttcgatgcgtttacttcttccaaagtagcggatctagcgaagccgttgaaggaagctgggtttcctcataagatccatatagtgaaagatcacgatatgagagagaggctttgcttagagactgaaaggcttaatctaagcgccgtgataatgggaagcagaggatttggtgctgagaagagaggaagtgatggcaagcttggctctgttagtgattattgtgttcaccattgtgtttgtcctgttgttgttgttagatatcctgatgatcgtgatggtcctgctcctcctgggaatgttggagctaccagggaagctattgtcactgttaaatcacgtagggatgatgacgatgatgatgatgaagatcatgaggctaagattgctgctgctgcttccgatcatcatgaacacatcaaagatgagtaaagtgccttagtatctcatcaggttcaccctcttcacagtcaggtacaacgatggatgaaacaaaacggatttgtgcagaggagtgtgtttgtgtgtttgtttattgctatcttttgcaatattgaaaagtctctggaatctcctctggattatttattcccagtccttgttcttcttataattctccatgtatgattttcacatttaaacaatgcccttttccatgtatgactttcacatttaaacaatacccttttggggttatgaccttaatcttcaatctaatttgatatccgatgagatact

SEQ ID NO: 28457 - protein, 260 aa, Arabidopsis thaliana
  peptide (1)..(260): Ceres Seq. ID no. 12327358
MNPDSDYPHLPNIKIHHPSSPRHSHHHSSSTPSAATPTPTAGARRKIGVAVDLSEESAFAVRWAVDHYIRPGDAVVILHVSPTSVLFGADWGPLPLQTPPPPSAATDPGAQPKPSQEDFDAFTSSKVADLAKPLKEAGFPHKIHIVKDHDMRERLCLETERLNLSAVIMGSRGFGAEKRGSDGKLGSVSDYCVHHCVCPVVVVRYPDDRDGPAPPGNVGATREAIVTVKSRRDDDDDDDEDHEAKIAAAASDHHEHIKDE

SEQ ID NO: 28458 - DNA, 1432 bp, Arabidopsis thaliana
  misc_feature (1)..(1432): Ceres Seq. ID no. 12559942
  misc_feature (1)..(1432): Ortholog of  Ceres SEQ ID NO 14306797 as cited in SEQ ID NO 53354
  misc_feature (1)..(1432): Ortholog of  Ceres SEQ ID NO 15176525 as cited in SEQ ID NO 54495
  misc_feature (1)..(1432): Ortholog of  Ceres SEQ ID NO 15169519 as cited in SEQ ID NO 67237
aaaccttccaaagtttttttcaaaacaacacagaaaaaatggcagcaaccgccgcaacaacgacgtcgtctcaccttcttctctcaagctcacgtcacgtggcatcatcatcccagccttcaatcctttcaccgagatctctcttctccaacaacgggaaacgagcaccaactggagtgaggaaccatcagtatgcgagtggagtgaggtgtatggccgtagcggcggatgctgctgagacgaaaacggcggcgaggaagaagagtggatacgaacttcaaacgttgacgggctggttgctgagacaagagatgaaaggagagatagatgcagagctgacgatagtgatgtcgagtatatcattggcttgtaagcagatcgcttcacttgttcaacgtgccggaatctctaacctgaccggagttcaaggcgccgttaatattcagggagaggatcagaagaagcttgacgtcatctctaatgaggtgttttccaactgtttgagatcaagtggaagaacgggaatcatagcctcggaggaagaggacgtgccagttgcggtggaggagagttactccggcaactacgtcgtcgtgtttgaccctcttgatggttcctccaacattgacgctgccgtctctactggttctatcttcggtatctatagccccaatgacgaatgcattgtcgacgactccgacgatatctcagctcttgggtcagaagaacaaaggtgtatagtaaacgtgtgccagccagggaacaacttgttagcagccggctactgtatgtactcgagctcggtcatcttcgttcttactctaggcaaaggcgttttctccttcacgctcgatccaatgtacggtgagtttgtcctcacgcaagaaaacattgagatccccaaagccgggagaatctactctttcaacgaagggaattaccagatgtgggacgataaactaaagaagtacattgatgatcttaaggaccctggtccaactgggaagccttactccgcaaggtacattggaagtttggttggagattttcacaggactttattgtatggtgggatttacgggtaccctcgtgacgcaaagagcaaaaatggaaaacttaggctgttgtatgagtgtgcaccaatgagtttcattgttgaacaagctggagggaaaggttctgatggacattcgagagtactagatatccaaccgactgagatacatcagagggttcctctatacattggaagcacagaggaagtagagaagctggagaagtacttggcttgagtcatgtactaaacataagccatttaatttctattgtaagccagtttctgactacatggtatatgcaaatagatgcataatggtgaaagtcctattttgttgtcaatatcaatatagagaagaaatcagctgttaaaact

SEQ ID NO: 28459 - protein, 429 aa, Arabidopsis thaliana
  peptide (1)..(429): Ceres Seq. ID no. 12559943
TFQSFFQNNTEKMAATAATTTSSHLLLSSSRHVASSSQPSILSPRSLFSNNGKRAPTGVRNHQYASGVRCMAVAADAAETKTAARKKSGYELQTLTGWLLRQEMKGEIDAELTIVMSSISLACKQIASLVQRAGISNLTGVQGAVNIQGEDQKKLDVISNEVFSNCLRSSGRTGIIASEEEDVPVAVEESYSGNYVVVFDPLDGSSNIDAAVSTGSIFGIYSPNDECIVDDSDDISALGSEEQRCIVNVCQPGNNLLAAGYCMYSSSVIFVLTLGKGVFSFTLDPMYGEFVLTQENIEIPKAGRIYSFNEGNYQMWDDKLKKYIDDLKDPGPTGKPYSARYIGSLVGDFHRTLLYGGIYGYPRDAKSKNGKLRLLYECAPMSFIVEQAGGKGSDGHSRVLDIQPTEIHQRVPLYIGSTEEVEKLEKYLA

SEQ ID NO: 28460 - protein, 417 aa, Arabidopsis thaliana
  peptide (1)..(417): Ceres Seq. ID no. 12559944
MAATAATTTSSHLLLSSSRHVASSSQPSILSPRSLFSNNGKRAPTGVRNHQYASGVRCMAVAADAAETKTAARKKSGYELQTLTGWLLRQEMKGEIDAELTIVMSSISLACKQIASLVQRAGISNLTGVQGAVNIQGEDQKKLDVISNEVFSNCLRSSGRTGIIASEEEDVPVAVEESYSGNYVVVFDPLDGSSNIDAAVSTGSIFGIYSPNDECIVDDSDDISALGSEEQRCIVNVCQPGNNLLAAGYCMYSSSVIFVLTLGKGVFSFTLDPMYGEFVLTQENIEIPKAGRIYSFNEGNYQMWDDKLKKYIDDLKDPGPTGKPYSARYIGSLVGDFHRTLLYGGIYGYPRDAKSKNGKLRLLYECAPMSFIVEQAGGKGSDGHSRVLDIQPTEIHQRVPLYIGSTEEVEKLEKYLA

SEQ ID NO: 28461 - protein, 359 aa, Arabidopsis thaliana
  peptide (1)..(359): Ceres Seq. ID no. 12559945
MAVAADAAETKTAARKKSGYELQTLTGWLLRQEMKGEIDAELTIVMSSISLACKQIASLVQRAGISNLTGVQGAVNIQGEDQKKLDVISNEVFSNCLRSSGRTGIIASEEEDVPVAVEESYSGNYVVVFDPLDGSSNIDAAVSTGSIFGIYSPNDECIVDDSDDISALGSEEQRCIVNVCQPGNNLLAAGYCMYSSSVIFVLTLGKGVFSFTLDPMYGEFVLTQENIEIPKAGRIYSFNEGNYQMWDDKLKKYIDDLKDPGPTGKPYSARYIGSLVGDFHRTLLYGGIYGYPRDAKSKNGKLRLLYECAPMSFIVEQAGGKGSDGHSRVLDIQPTEIHQRVPLYIGSTEEVEKLEKYLA

SEQ ID NO: 28462 - DNA, 569 bp, Arabidopsis thaliana
  misc_feature (1)..(569): Ceres Seq. ID no. 12482101
  misc_feature (1)..(569): Ortholog of  Ceres SEQ ID NO 12422485 as cited in SEQ ID NO 20557
atttccgtcggactcagtggagaagaagaagaagatccaaatcgatccgttgaaaagtttctccatttcggattctggtttaggaatttcgaatttgctgtgcgatgtcgagtgcggtggacgctacgggaaacccgatccctacttcggcggttttaacggcgtcagcgaagcatataggtatgaggtgtatgccggagaatgttgcgttcctcaaatgcaagaagaatgatccaaacccagagaagtgtctcgacaaaggtcgtgacgtcactcgctgcgtgcttggcttgctgaaggatcttcaccagaagtgccaaaaggagatggatgattatgttgggtgtatgtattactacacaaacgagtttgatctgtgtaggaaagagcaagaagccttcgagaaagtgtgtcccttgaaatgagaatcacaagttcttgtcatgttttgatttgtatctcataataaagcaaaatgttcatttttgaatgagctttactctctccatctcttgtttgttgtcatcccatttatttcctctcagatgctttcgtagtgagttccaaag

SEQ ID NO: 28463 - protein, 106 aa, Arabidopsis thaliana
  peptide (1)..(106): Ceres Seq. ID no. 12482102
MSSAVDATGNPIPTSAVLTASAKHIGMRCMPENVAFLKCKKNDPNPEKCLDKGRDVTRCVLGLLKDLHQKCQKEMDDYVGCMYYYTNEFDLCRKEQEAFEKVCPLK

SEQ ID NO: 28464 - protein, 80 aa, Arabidopsis thaliana
  peptide (1)..(80): Ceres Seq. ID no. 12482103
MRCMPENVAFLKCKKNDPNPEKCLDKGRDVTRCVLGLLKDLHQKCQKEMDDYVGCMYYYTNEFDLCRKEQEAFEKVCPLK

SEQ ID NO: 28465 - protein, 77 aa, Arabidopsis thaliana
  peptide (1)..(77): Ceres Seq. ID no. 12482104
MPENVAFLKCKKNDPNPEKCLDKGRDVTRCVLGLLKDLHQKCQKEMDDYVGCMYYYTNEFDLCRKEQEAFEKVCPLK

SEQ ID NO: 28466 - DNA, 588 bp, Arabidopsis thaliana
  misc_feature (1)..(588): Ceres Seq. ID no. 12336000
  misc_feature (1)..(588): Ortholog of  Ceres SEQ ID NO 13581902 as cited in SEQ ID NO 52223
aatccagatctcaactttctctcatcttcaaattaaaatcaaacagtttcttaataacattttacctcatggctcgtaccaagcagacggctaggaaatcaaccggaggaaaggctccaaggaagcagctggcgacaaaagcggcgaggaaatctgctccggccaccggaggagtgaagaagccacacagattcagacccggaactgttgctttaagagaaatcaggaagtaccagaagagcactgagcttcttatccgtaaactccctttccagaggcttgtcagagagatcgctcaggacttcaaaaccgatcttcgtttccagagcagtgccgtcgccgctcttcaggaagctgctgaagcttacctcgtcggactcttcgaagacaccaatctctgcgccattcacgccaagagggtcacgatcatgcccaaggacatccagctcgcgagaagaatcagaggagaacgagcttagatctaagtattctggttactcttgtgttttgattagaaccataagattgtaaaatttcaagttaaatccaagggttataatattaattccaagcaattatcttttgttc

SEQ ID NO: 28467 - protein, 158 aa, Arabidopsis thaliana
  peptide (1)..(158): Ceres Seq. ID no. 12336001
SRSQLSLIFKLKSNSFLITFYLMARTKQTARKSTGGKAPRKQLATKAARKSAPATGGVKKPHRFRPGTVALREIRKYQKSTELLIRKLPFQRLVREIAQDFKTDLRFQSSAVAALQEAAEAYLVGLFEDTNLCAIHAKRVTIMPKDIQLARRIRGERA

SEQ ID NO: 28468 - protein, 136 aa, Arabidopsis thaliana; identical to SEQ ID NO: 8709
  peptide (1)..(136): Ceres Seq. ID no. 12336002

SEQ ID NO: 28469 - DNA, 1005 bp, Arabidopsis thaliana
  misc_feature (1)..(1005): Ceres Seq. ID no. 15178652
  misc_feature (1)..(1005): Ortholog of  Ceres SEQ ID NO 14302123 as cited in SEQ ID NO 0
  misc_feature (1)..(1005): Ortholog of  Ceres SEQ ID NO 15179452 as cited in SEQ ID NO 0
taacgcactctcttctccgaatctagggtttttgtctctagcctcctcaagctttgcaaacaatcatggcgacccagatcagcaagaagagaaagttcgtagccgatggtgtgttttacgctgaactcaatgaggttctaaccagagagcttgctgaggatggttactctggtgttgaggttcgcgtcactcctatgcgtactgagatcatcattagagccactcgtactcaaaacgttctcggtgagaagggaaggaggattagggaattgacatctcttgtacaaaagagattcaaatttcctcaggacagtgttgagctttatgctgagaaggttgctaacagaggtctttgtgctattgctcaggctgagtctcttcgttacaagcttcttggtggtcttgctgttcgtagggcgtgctatggtgttttaaggtttgttatggagagtggagctaaaggatgcgaagtcattgtgagtggaaaactccgtgctgcacgtgctaagtagatgaagttcaaggatggttacatggtttcctcaggtcagccaaccaaggaatacattgatgctgcagttaggcatgttcttcttagacagggtgtgcttggtctcaaggtgaagatcatgcttgactgggaccccaagggcaaacaaggaccgatgacaccattgcctgatgttgtgatcatccatacaccgaaagaagatgatgtatacattgcacctgctcaggttgttactcaagctgcttttgtaccggaagctccattaaccaccacagattatccagcaatgccagttgcttagagagccttttcgttttctggtttaaaacccaatggggatggttctttttttgggacagtactagttttctcatgttattctaagttaatacttaaagttctggaggttgaattacatcaaggatatgaatgtatgtttttcgttatcttttgtttaaattttatttatctattaaagaaaaaaaaaaaaaaaa

SEQ ID NO: 28470 - protein, 148 aa, Arabidopsis thaliana
  peptide (1)..(148): Ceres Seq. ID no. 15178653
MATQISKKRKFVADGVFYAELNEVLTRELAEDGYSGVEVRVTPMRTEIIIRATRTQNVLGEKGRRIRELTSLVQKRFKFPQDSVELYAEKVANRGLCAIAQAESLRYKLLGGLAVRRACYGVLRFVMESGAKGCEVIVSGKLRAARAK

SEQ ID NO: 28471 - protein, 105 aa, Arabidopsis thaliana
  peptide (1)..(105): Ceres Seq. ID no. 15178654
MRTEIIIRATRTQNVLGEKGRRIRELTSLVQKRFKFPQDSVELYAEKVANRGLCAIAQAESLRYKLLGGLAVRRACYGVLRFVMESGAKGCEVIVSGKLRAARAK

SEQ ID NO: 28472 - protein, 99 aa, Arabidopsis thaliana
  peptide (1)..(99): Ceres Seq. ID no. 15178655
MKFKDGYMVSSGQPTKEYIDAAVRHVLLRQGVLGLKVKIMLDWDPKGKQGPMTPLPDVVIIHTPKEDDVYIAPAQVVTQAAFVPEAPLTTTDYPAMPVA

SEQ ID NO: 28473 - DNA, 1905 bp, Arabidopsis thaliana; identical to SEQ ID NO: 20321
  misc_feature (1)..(1905): Ceres Seq. ID no. 13486771
  misc_feature (1)..(1905): Ortholog of  Ceres SEQ ID NO 13595840 as cited in SEQ ID NO 56647
  misc_feature (1)..(1905): Ortholog of  Ceres SEQ ID NO 13582260 as cited in SEQ ID NO 59799
  misc_feature (1)..(1905): Ortholog of  Ceres SEQ ID NO 15180619 as cited in SEQ ID NO 0

SEQ ID NO: 28474 - protein, 297 aa, Arabidopsis thaliana; identical to SEQ ID NO: 20322
  peptide (1)..(297): Ceres Seq. ID no. 15218567

SEQ ID NO: 28475 - protein, 293 aa, Arabidopsis thaliana; identical to SEQ ID NO: 20323
  peptide (1)..(293): Ceres Seq. ID no. 15218568

SEQ ID NO: 28476 - protein, 226 aa, Arabidopsis thaliana; identical to SEQ ID NO: 20324
  peptide (1)..(226): Ceres Seq. ID no. 15218569

SEQ ID NO: 28477 - DNA, 909 bp, Arabidopsis thaliana
  misc_feature (1)..(909): Ceres Seq. ID no. 12332583
  misc_feature (1)..(909): Ortholog of  Ceres SEQ ID NO 12619999 as cited in SEQ ID NO 66123
  misc_feature (1)..(909): Ortholog of  Ceres SEQ ID NO 13656436 as cited in SEQ ID NO 69154
agaaagaggatacagaatagtgattactaacatcttctccgatggcggttgcgccggcaagagctcgttcagactatgattatctcatcaagcttctcctcatcggtgatagcggtgtgggaaaaagttgcttgttactgcgtttttcggatgatactttcaccacgagtttcattactaccattggaatcgacttcaagataagaacagtcgaacttgatgggaagcgtatcaaattgcagatatgggacactgctggacaagaacgttttagaactataaccacagcatattacagaggagcgatgggtatattactcgtctatgatgtaacagatgagtcatcattcaacaacattaggaactggatgaaaaacattgagcagcatgcgtccgatagtgtcaacaagatattggtcggtaacaaagccgacatggacgaaagcaaaagggctgtcccaacatcaaaaggacaagctcttgctgatgagtatggaatcaaattctttgagacgagtgcaaaaacaaaccagaatgtcgagcaggttttcctttctatcgctaaagacataaaacaaagactcacagaaagcgatacaaaagccgagccccaagggatcaagatcactaaacaagatgctaacaaagcctcatcgtcttctacaaatgagaaatcagcttgctgcagttatgtttagaagttctctgaacctgtttctaatctcttaccgtctttaatcttcttcgcatcattcaagggatcgtcctatgttcttattagtaggaggatagacttaattgatagctgtgtgtattttgctatctcgatggccaaacactgtactggtaatggtagacaatgtttaagtgcttaaactttgaattaatgaaatgcagatgttatgtgtg

SEQ ID NO: 28478 - protein, 218 aa, Arabidopsis thaliana
  peptide (1)..(218): Ceres Seq. ID no. 12332584
MAVAPARARSDYDYLIKLLLIGDSGVGKSCLLLRFSDDTFTTSFITTIGIDFKIRTVELDGKRIKLQIWDTAGQERFRTITTAYYRGAMGILLVYDVTDESSFNNIRNWMKNIEQHASDSVNKILVGNKADMDESKRAVPTSKGQALADEYGIKFFETSAKTNQNVEQVFLSIAKDIKQRLTESDTKAEPQGIKITKQDANKASSSSTNEKSACCSYV

SEQ ID NO: 28479 - protein, 130 aa, Arabidopsis thaliana
  peptide (1)..(130): Ceres Seq. ID no. 12332585
MGILLVYDVTDESSFNNIRNWMKNIEQHASDSVNKILVGNKADMDESKRAVPTSKGQALADEYGIKFFETSAKTNQNVEQVFLSIAKDIKQRLTESDTKAEPQGIKITKQDANKASSSSTNEKSACCSYV

SEQ ID NO: 28480 - protein, 109 aa, Arabidopsis thaliana
  peptide (1)..(109): Ceres Seq. ID no. 12332586
MKNIEQHASDSVNKILVGNKADMDESKRAVPTSKGQALADEYGIKFFETSAKTNQNVEQVFLSIAKDIKQRLTESDTKAEPQGIKITKQDANKASSSSTNEKSACCSYV

SEQ ID NO: 28481 - DNA, 1047 bp, Arabidopsis thaliana
  misc_feature (1)..(1047): Ceres Seq. ID no. 12332587
  misc_feature (1)..(1047): Ortholog of  Ceres SEQ ID NO 13656050 as cited in SEQ ID NO 64724
acctcttatcaaacaccaaaccacaccagaacagaactcagccatggcttcttcttcttcttctcttctaatcctagccgttgcttgtttcgtctcgctaatctcaccggcgatttcacaacaggcttgcaaatcacagaacttgaactccgccggtccgttcgatagttgcgaagaccttccggtactcaattcctacctccattacacctacaattcctcaaattcatctctctccgtcgctttcgtcgccactccatctcaagccaacggtggctgggtcgcttgggctattaatcctacggggactaagatggctggttctcaagccttcctcgcttacagatccggcggtggtgcggctccggtcgtgaagacgtacaacattagcagctacagcagtctcgtcgaaggtaaacttgcttttgatttttggaatctacgcgccgagtcgttaagcggcggtaggatcgccattttcaaccgaacggttaaggttccggcgggacgtgatagtgtgaatcaggtatggcagatcggcggcaatgttaccaacggtcgtcccggtgtacatcctttcggtcctgataatttgggctcccaccgtgtgttgagtttcacagaagatgcagcaccgggctctgctccttcgccgggatctgctccttcgccgggatctgctccggcgccgggcaccagtggctcgactaccccaggaacagcggcgggaggtccagggaacgcggggtcattgacgaggaacgtaaattttggggtcaatttgggaattttggttttgttgggttctatttttattttctgaatggggatctctctctagtctctcttctcttcttgagtctctctctatttttttttttttttggtttgttcgaacaataatggagccccatacttttgtactgttttagtcttagggccatttactttgtttcaccacattacttagagttattggattgtatggaccattactatcatgagattgagattatcttatcttcttaaaatatctatttgccatcc

SEQ ID NO: 28482 - protein, 273 aa, Arabidopsis thaliana
  peptide (1)..(273): Ceres Seq. ID no. 12332588
PLIKHQTTPEQNSAMASSSSSLLILAVACFVSLISPAISQQACKSQNLNSAGPFDSCEDLPVLNSYLHYTYNSSNSSLSVAFVATPSQANGGWVAWAINPTGTKMAGSQAFLAYRSGGGAAPVVKTYNISSYSSLVEGKLAFDFWNLRAESLSGGRIAIFNRTVKVPAGRDSVNQVWQIGGNVTNGRPGVHPFGPDNLGSHRVLSFTEDAAPGSAPSPGSAPSPGSAPAPGTSGSTTPGTAAGGPGNAGSLTRNVNFGVNLGILVLLGSIFIF

SEQ ID NO: 28483 - protein, 259 aa, Arabidopsis thaliana
  peptide (1)..(259): Ceres Seq. ID no. 12332589
MASSSSSLLILAVACFVSLISPAISQQACKSQNLNSAGPFDSCEDLPVLNSYLHYTYNSSNSSLSVAFVATPSQANGGWVAWAINPTGTKMAGSQAFLAYRSGGGAAPVVKTYNISSYSSLVEGKLAFDFWNLRAESLSGGRIAIFNRTVKVPAGRDSVNQVWQIGGNVTNGRPGVHPFGPDNLGSHRVLSFTEDAAPGSAPSPGSAPSPGSAPAPGTSGSTTPGTAAGGPGNAGSLTRNVNFGVNLGILVLLGSIFIF

SEQ ID NO: 28484 - protein, 169 aa, Arabidopsis thaliana
  peptide (1)..(169): Ceres Seq. ID no. 12332590
MAGSQAFLAYRSGGGAAPVVKTYNISSYSSLVEGKLAFDFWNLRAESLSGGRIAIFNRTVKVPAGRDSVNQVWQIGGNVTNGRPGVHPFGPDNLGSHRVLSFTEDAAPGSAPSPGSAPSPGSAPAPGTSGSTTPGTAAGGPGNAGSLTRNVNFGVNLGILVLLGSIFIF

SEQ ID NO: 28485 - DNA, 773 bp, Arabidopsis thaliana
  misc_feature (1)..(773): Ceres Seq. ID no. 12420842
  misc_feature (1)..(773): Ortholog of  Ceres SEQ ID NO 12635789 as cited in SEQ ID NO 0
atccgcagaaaaccctattgctcccctttgctcaagctcagtgcctctttgcagcgaaagctcaaccaacaagacgatgattatctcagagaacaatcgcagagagatctgcaaataccttttcaaagagggagtatgctttgctaagaaggatttcaatctcccaaagcatccgttgattgatgtaccaaacctgcaagtgattaagctcatgcagagtttcaagtccaaggagtacgttagggagacatttgcgtggatgcattattattggtttctgactaatgaaggaattgagttcttgagaacttatcttaaccttccttccgatgttgtccctgctactttgaagaagtctgctaagcccggtggtcgtccctttggtggcccacctggtgatcgccaaagaggaccacctcgctctgatggagaccgtcccagatttggtgaccgtgatggataccgtggaggcccacgtggtggtgatgagaagggtggagctccagctgatttccagccgtctttccaaggaggtggtggtaggcctggttttggccgtggtgcaggcggttacagtgcagcagcaccatctggttcagggttcccttgaaaaatttgttgtcatattgcgacgatggaaggacagttttgttttttgttctagttctgtttgtgtaatgcaaatctggaatctataatctatctattaccttcaccttggtttaaacgaacaaatcctgtagtttcaggattagtgtcaaaattcatgtttc

SEQ ID NO: 28486 - protein, 202 aa, Arabidopsis thaliana
  peptide (1)..(202): Ceres Seq. ID no. 12420843
SAENPIAPLCSSSVPLCSESSTNKTMIISENNRREICKYLFKEGVCFAKKDFNLPKHPLIDVPNLQVIKLMQSFKSKEYVRETFAWMHYYWFLTNEGIEFLRTYLNLPSDVVPATLKKSAKPGGRPFGGPPGDRQRGPPRSDGDRPRFGDRDGYRGGPRGGDEKGGAPADFQPSFQGGGGRPGFGRGAGGYSAAAPSGSGFP

SEQ ID NO: 28487 - protein, 177 aa, Arabidopsis thaliana
  peptide (1)..(177): Ceres Seq. ID no. 12420844
MIISENNRREICKYLFKEGVCFAKKDFNLPKHPLIDVPNLQVIKLMQSFKSKEYVRETFAWMHYYWFLTNEGIEFLRTYLNLPSDVVPATLKKSAKPGGRPFGGPPGDRQRGPPRSDGDRPRFGDRDGYRGGPRGGDEKGGAPADFQPSFQGGGGRPGFGRGAGGYSAAAPSGSGFP

SEQ ID NO: 28488 - protein, 132 aa, Arabidopsis thaliana
  peptide (1)..(132): Ceres Seq. ID no. 12420845
MQSFKSKEYVRETFAWMHYYWFLTNEGIEFLRTYLNLPSDVVPATLKKSAKPGGRPFGGPPGDRQRGPPRSDGDRPRFGDRDGYRGGPRGGDEKGGAPADFQPSFQGGGGRPGFGRGAGGYSAAAPSGSGFP

SEQ ID NO: 28489 - DNA, 682 bp, Arabidopsis thaliana
  misc_feature (1)..(682): Ceres Seq. ID no. 12393018
  misc_feature (1)..(682): Ortholog of  Ceres SEQ ID NO 14314198 as cited in SEQ ID NO 57472
  misc_feature (1)..(682): Ortholog of  Ceres SEQ ID NO 12783998 as cited in SEQ ID NO 61535
  misc_feature (1)..(682): Ortholog of  Ceres SEQ ID NO 15174264 as cited in SEQ ID NO 61877
aacaaacacaaaacttgatctcacgactccatcttctaaaattcagaatctttctttgaaacttttgtgtgaagaaaatggcaccaaaggcagagaagaagccggcagagaagaaaccagtggaagagaaatcaaaagccgaaaaagctccagcggagaagaaaccaaaagccggcaagaaactcccgaaggaagccggtgccggcggcgataagaagaagaaaatgaagaagaagagtgttgagacgtacaagatctacatcttcaaggttctgaaacaagttcatccagatattggtatttcaagcaaagctatggggattatgaacagtttcatcaacgacatctttgagaaattggcatcggaatcgtcgaaactcgcgaggtataataagaagccgacgattacttctcgggagattcagactgctgttagacttgttcttcctggtgagcttgcgaaacatgctgtttctgaaggaactaaggcggtgactaagtttactagctcttgaattgtggatcttgttgaaatcgatgtttgtaaaattagggttttttagatttgatggttgttgttgactctttgatcgatttctgtttcgttttcttgttgcgatgttaatcaaatcggatccgatttctttcttaaatcaaatctatcaagtaaaatcttttgccg

SEQ ID NO: 28490 - protein, 145 aa, Arabidopsis thaliana; identical to SEQ ID NO: 21275
  peptide (1)..(145): Ceres Seq. ID no. 12393019

SEQ ID NO: 28491 - protein, 96 aa, Arabidopsis thaliana; identical to SEQ ID NO: 21276
  peptide (1)..(96): Ceres Seq. ID no. 12393020

SEQ ID NO: 28492 - DNA, 932 bp, Arabidopsis thaliana
  misc_feature (1)..(932): Ceres Seq. ID no. 12574162
  misc_feature (1)..(932): Ortholog of  Ceres SEQ ID NO 14302000 as cited in SEQ ID NO 52175
  misc_feature (1)..(932): Ortholog of  Ceres SEQ ID NO 14316371 as cited in SEQ ID NO 60113
agtttcgctgcgctgtttcaagggttttcgtttttatcttttcctccgaagaagaagataagaggttgaagaagaagaagatgccaggtccagttattgaggaagtgaatgaggaggctcttatggatgccattaaagagcagatgaagctccagaaggagaacgatgttgttgttgaggatgtgaaagatggagacgaagacgatgatgatgttgatgacgacgacgatgagattgctgatggagctggtgagaatgaggcttccaagcaaagtagaagcgagaagaaaagccgaaaggcgatgctgaaactcggaatgaaacctgttactgatgttagcagagtgactatcaagagatcaaagaatgtgttgtttgtcatctcgaagccggatgtgttcaagagtccgaactctgagacctatgtgatattcggtgaggctaagattgatgacatgagctctcagctacaagcacaagctgctcagaggttcaagatgcctgacgttgcgtctatgatccccaacactgatggttctgaagcagccacggttgcacaagaggaggaagacgatgaagatgttgatgagactggtgttgaagccaaggacattgatcttgtgatgactcaagccggtgtctcgaggcccaaggctgttaaggctcttaaagagagtaacggagatattgtttccgccattatggaactcactacataggttttagtgagttgcaaaagacttgtgatggttcgtctttgttgcttcatttctgattcggttagcaattttctcgaacatctctgtttctccacttttttgaggctatttctttttacctttctctgagccataaacaatgttgcttcacatctataatttgagacgtttatgtctagtgttgttaactctttagcaagaaagattgatgag

SEQ ID NO: 28493 - protein, 238 aa, Arabidopsis thaliana
  peptide (1)..(238): Ceres Seq. ID no. 12574163
FRCAVSRVFVFIFSSEEEDKRLKKKKMPGPVIEEVNEEALMDAIKEQMKLQKENDVVVEDVKDGDEDDDDVDDDDDEIADGAGENEASKQSRSEKKSRKAMLKLGMKPVTDVSRVTIKRSKNVLFVISKPDVFKSPNSETYVIFGEAKIDDMSSQLQAQAAQRFKMPDVASMIPNTDGSEAATVAQEEEDDEDVDETGVEAKDIDLVMTQAGVSRPKAVKALKESNGDIVSAIMELTT

SEQ ID NO: 28494 - protein, 212 aa, Arabidopsis thaliana
  peptide (1)..(212): Ceres Seq. ID no. 12574164
MPGPVIEEVNEEALMDAIKEQMKLQKENDVVVEDVKDGDEDDDDVDDDDDEIADGAGENEASKQSRSEKKSRKAMLKLGMKPVTDVSRVTIKRSKNVLFVISKPDVFKSPNSETYVIFGEAKIDDMSSQLQAQAAQRFKMPDVASMIPNTDGSEAATVAQEEEDDEDVDETGVEAKDIDLVMTQAGVSRPKAVKALKESNGDIVSAIMELTT

SEQ ID NO: 28495 - protein, 198 aa, Arabidopsis thaliana
  peptide (1)..(198): Ceres Seq. ID no. 12574165
MDAIKEQMKLQKENDVVVEDVKDGDEDDDDVDDDDDEIADGAGENEASKQSRSEKKSRKAMLKLGMKPVTDVSRVTIKRSKNVLFVISKPDVFKSPNSETYVIFGEAKIDDMSSQLQAQAAQRFKMPDVASMIPNTDGSEAATVAQEEEDDEDVDETGVEAKDIDLVMTQAGVSRPKAVKALKESNGDIVSAIMELTT

SEQ ID NO: 28496 - DNA, 930 bp, Arabidopsis thaliana
  misc_feature (1)..(930): Ceres Seq. ID no. 12332556
  misc_feature (1)..(930): Ortholog of  Ceres SEQ ID NO 13638976 as cited in SEQ ID NO 55790
  misc_feature (1)..(930): Ortholog of  Ceres SEQ ID NO 13595442 as cited in SEQ ID NO 56456
  misc_feature (1)..(930): Ortholog of  Ceres SEQ ID NO 12616626 as cited in SEQ ID NO 64532
  misc_feature (1)..(930): Ortholog of  Ceres SEQ ID NO 12635864 as cited in SEQ ID NO 0
aaaaattgctttttaaaatccctcctcacacagattccttccttcatcacctcacacactctctacgcttgacatggccttcgatctccaccatggctcagcttcagatacgcattcatcagaacttccgtcgttttctctcccaccttatcctcagatgataatggaagcgattgagtccttgaacgataagaacggctgcaacaaaacgacgattgctaagcacatcgagtcgactcaacaaactctaccgccgtcacacatgacgctgctcagctaccatctcaaccagatgaagaaaaccggtcagctaatcatggtgaagaacaattatatgaaaccagatccagatgctcctcctaagcgtggtcgtggccgtcctccgaagcagaagactcaggccgaatctgacgccgctgctgctgctgttgttgctgccaccgtcgtctctacagatccgcctagatctcgtggccgtccaccgaagccgaaagatccatcggagcctccccaggagaaggtcattaccggatctggaaggccacgaggacgaccaccgaagagaccgagaacagattcggagacggttgctgcgccggaaccggcagctcaggcgacaggtgagcgtaggggacgtgggagacctccgaaggtgaagccgacggtggttgctccggttgggtgctgaattaatcggtacttatgcaatttcggaatctttagttactgaaaaatggaatctcttagagagtaagagagtgctttaatttagcttaattagatttatttggatttctttcagtatttggattgtaaactttagaatttgtgtgtgtgttgttgcttagtcctgagataagatataacattagcgactgtgtattattattattactgcattgtgttatgtgaaactttgttctcttgttg

SEQ ID NO: 28497 - protein, 204 aa, Arabidopsis thaliana
  peptide (1)..(204): Ceres Seq. ID no. 12332557
MAFDLHHGSASDTHSSELPSFSLPPYPQMIMEAIESLNDKNGCNKTTIAKHIESTQQTLPPSHMTLLSYHLNQMKKTGQLIMVKNNYMKPDPDAPPKRGRGRPPKQKTQAESDAAAAAVVAATVVSTDPPRSRGRPPKPKDPSEPPQEKVITGSGRPRGRPPKRPRTDSETVAAPEPAAQATGERRGRGRPPKVKPTVVAPVGC

SEQ ID NO: 28498 - protein, 176 aa, Arabidopsis thaliana
  peptide (1)..(176): Ceres Seq. ID no. 12332558
MIMEAIESLNDKNGCNKTTIAKHIESTQQTLPPSHMTLLSYHLNQMKKTGQLIMVKNNYMKPDPDAPPKRGRGRPPKQKTQAESDAAAAAVVAATVVSTDPPRSRGRPPKPKDPSEPPQEKVITGSGRPRGRPPKRPRTDSETVAAPEPAAQATGERRGRGRPPKVKPTVVAPVGC

SEQ ID NO: 28499 - protein, 174 aa, Arabidopsis thaliana
  peptide (1)..(174): Ceres Seq. ID no. 12332559
MEAIESLNDKNGCNKTTIAKHIESTQQTLPPSHMTLLSYHLNQMKKTGQLIMVKNNYMKPDPDAPPKRGRGRPPKQKTQAESDAAAAAVVAATVVSTDPPRSRGRPPKPKDPSEPPQEKVITGSGRPRGRPPKRPRTDSETVAAPEPAAQATGERRGRGRPPKVKPTVVAPVGC

SEQ ID NO: 28500 - DNA, 735 bp, Arabidopsis thaliana
  misc_feature (1)..(735): Ceres Seq. ID no. 12393721
  misc_feature (1)..(735): Ortholog of  Ceres SEQ ID NO 12617704 as cited in SEQ ID NO 65314
gcttagctaatgttgacgactcttcgatctcgttgttcgtctcttcttctagatcaatcatggaagctagctcccaatcgcatcttcgcttcctctccctctttttcttcaaccgccgggatctctaatgtctcagagattctcacacttcccgaagtggagaagattctcgccgacgtgaaagctgataacgtgactgtgattcctacacataatcattgtttctgggctgatttcactgtcatcgccaccggtagatccgattggcacttaagaaacatcgctcaagctttagtttatagggccaagcaaaagcagaaaggagctaaacatgtaatgttaccttctgtgcaagggtacaatagcaagtggattgtcatagactacggaaagtttgtagtccatgcacttgatgagaaagccagaggttatttcaatttggaaagcctttggtctgctgaatcctctggtactgatacttcagatcaggatctccaaaacgtttttgtaaaggtccgaccaaagaacaattcgaaaaggaaaccggctaaagtgagttcttgatcctgtccgatggatacaatttctcataaacttctcgagtctagacgagttaagaataggaggattttaaagcctattaagtatttatctccttaatattttttttttggtaagttttatctccttaatatttgtagtcatctatctattttttccttaatatctttgctt

SEQ ID NO: 28501 - protein, 184 aa, Arabidopsis thaliana
  peptide (1)..(184): Ceres Seq. ID no. 12393722
MLTTLRSRCSSLLLDQSWKLAPNRIFASSPSFSSTAGISNVSEILTLPEVEKILADVKADNVTVIPTHNHCFWADFTVIATGRSDWHLRNIAQALVYRAKQKQKGAKHVMLPSVQGYNSKWIVIDYGKFVVHALDEKARGYFNLESLWSAESSGTDTSDQDLQNVFVKVRPKNNSKRKPAKVSS

SEQ ID NO: 28502 - DNA, 725 bp, Arabidopsis thaliana
  misc_feature (1)..(725): Ceres Seq. ID no. 13645709
  misc_feature (1)..(725): Ortholog of  Ceres SEQ ID NO 13594023 as cited in SEQ ID NO 55192
  misc_feature (1)..(725): Ortholog of  Ceres SEQ ID NO 15174297 as cited in SEQ ID NO 0
aaaggaaagcagaaacgttagatttctttagacgcgcaaactgaaagagctttgatcgatcgatttggaggattcgtagaagatatgtcgagtatatacagaactgtttcgagaaaagagaaaccgagacgtcatcatggattgacgacacagaagaagcaagagattaaggaagcttttgagctatttgacactgatggttctggtaccattgatgctaaagagcttaatgttgctatgagggcgcttggttttgaaatgacggaagagcaaatcaacaaaatgatagctgatgtggataaagatggaagtggagctatagattttgatgagtttgttcatatgatgactgctaagattggtgaaagagacacaaaagaagagctcactaaagcattccagatcattgatcttgacaaaaatgggaagatatctccggatgatatcaaacgcatggcaaaggacttgggtgagaatttcactgatgctgagatacgagagatggttgaagaagcagaccgagaccgtgatggtgaagttaacatggatgaattcatgaggatgatgaggagaactgcttatggtggtaactagaaaggttgttgctgttcttaacgatatttgatgagctctattatagttctttaactgaggcttaattatctgtaatattattactgaagatacatatatcacagttttaatctatagctcatcttaatggc

SEQ ID NO: 28503 - protein, 169 aa, Arabidopsis thaliana
  peptide (1)..(169): Ceres Seq. ID no. 13645710
MSSIYRTVSRKEKPRRHHGLTTQKKQEIKEAFELFDTDGSGTIDAKELNVAMRALGFEMTEEQINKMIADVDKDGSGAIDFDEFVHMMTAKIGERDTKEELTKAFQIIDLDKNGKISPDDIKRMAKDLGENFTDAEIREMVEEADRDRDGEVNMDEFMRMMRRTAYGGN

SEQ ID NO: 28504 - protein, 118 aa, Arabidopsis thaliana
  peptide (1)..(118): Ceres Seq. ID no. 13645711
MRALGFEMTEEQINKMIADVDKDGSGAIDFDEFVHMMTAKIGERDTKEELTKAFQIIDLDKNGKISPDDIKRMAKDLGENFTDAEIREMVEEADRDRDGEVNMDEFMRMMRRTAYGGN

SEQ ID NO: 28505 - protein, 111 aa, Arabidopsis thaliana
  peptide (1)..(111): Ceres Seq. ID no. 13645712
MTEEQINKMIADVDKDGSGAIDFDEFVHMMTAKIGERDTKEELTKAFQIIDLDKNGKISPDDIKRMAKDLGENFTDAEIREMVEEADRDRDGEVNMDEFMRMMRRTAYGGN

SEQ ID NO: 28506 - DNA, 1107 bp, Arabidopsis thaliana
  misc_feature (1)..(1107): Ceres Seq. ID no. 12334388
  misc_feature (1)..(1107): Ortholog of  Ceres SEQ ID NO 13594855 as cited in SEQ ID NO 51970
gttggttctcttcttcaaaacaagctctctctgtccctctctgtctctctctttgggtaatcggaaaaatcagaaaaatgggaaccctaggacgagcgattcacactgtgggtaatcggattcgtggaactgcccaagcccaagctcgcgttggttctcttcttcaaggaagccaccacatcgagaaacatctgtcgaggcatcggacgttgattactgtggctccgaacgcttctgtgattggtgatgttcagatcaataaaggctcgttcatttcgtatgcaagtgtttctcgtgatttgcagtatcctcgtgcaatgggaatgggacaggtccggagatttagcgaagatgtttctcacatgcctgaaatggaagactctgatgttctgaatgcattcaaagacttgatggctgcagattgggctgagcttccttctgctgttgttaaagatgctaaaaccgcgatatcgaaaaacacagatgacaaggcagggcaagaggctttgaaaaatgtgttccgagcagctgaagctgtagaggaatttggtgggattctcacttcgattaagatggaaatcgatgatagcattggaatgagtggggagggtgtgaagcctttaccaaatgatataaccgatgcgctgcgtactgcttatcagaggtatgctgagtatctagactcctttgaacctgaagaagtctacttgaagaagaaggttgagatggagttggggactaagatgatccacttgaagatgagatgcagcgggcttggttctgaatggggaaaggttactgttcttggaacctcaggactctcgggatcttacgtggagcaaagggcctaaaacaaaaagagaagatctagaattacgtgcgaagcttgttatgttgttattgcgttattttgtcttagcacataataaaggtcaatctgaccaaaagacatatcaggtgagtctgttcattgtttcctccaaatgaagctttaaaatttagagcttaacaccaattgaaaaataaactcacatgaatttgtgttcatttgttactgtttccttttatgagagatcttttgtttataatgattcaatattttgagct

SEQ ID NO: 28507 - protein, 282 aa, Arabidopsis thaliana
  peptide (1)..(282): Ceres Seq. ID no. 12334389
WFSSSKQALSVPLCLSLWVIGKIRKMGTLGRAIHTVGNRIRGTAQAQARVGSLLQGSHHIEKHLSRHRTLITVAPNASVIGDVQINKGSFISYASVSRDLQYPRAMGMGQVRRFSEDVSHMPEMEDSDVLNAFKDLMAADWAELPSAVVKDAKTAISKNTDDKAGQEALKNVFRAAEAVEEFGGILTSIKMEIDDSIGMSGEGVKPLPNDITDALRTAYQRYAEYLDSFEPEEVYLKKKVEMELGTKMIHLKMRCSGLGSEWGKVTVLGTSGLSGSYVEQRA

SEQ ID NO: 28508 - protein, 257 aa, Arabidopsis thaliana
  peptide (1)..(257): Ceres Seq. ID no. 12334390
MGTLGRAIHTVGNRIRGTAQAQARVGSLLQGSHHIEKHLSRHRTLITVAPNASVIGDVQINKGSFISYASVSRDLQYPRAMGMGQVRRFSEDVSHMPEMEDSDVLNAFKDLMAADWAELPSAVVKDAKTAISKNTDDKAGQEALKNVFRAAEAVEEFGGILTSIKMEIDDSIGMSGEGVKPLPNDITDALRTAYQRYAEYLDSFEPEEVYLKKKVEMELGTKMIHLKMRCSGLGSEWGKVTVLGTSGLSGSYVEQRA

SEQ ID NO: 28509 - protein, 177 aa, Arabidopsis thaliana
  peptide (1)..(177): Ceres Seq. ID no. 12334391
MGMGQVRRFSEDVSHMPEMEDSDVLNAFKDLMAADWAELPSAVVKDAKTAISKNTDDKAGQEALKNVFRAAEAVEEFGGILTSIKMEIDDSIGMSGEGVKPLPNDITDALRTAYQRYAEYLDSFEPEEVYLKKKVEMELGTKMIHLKMRCSGLGSEWGKVTVLGTSGLSGSYVEQRA

SEQ ID NO: 28510 - DNA, 857 bp, Arabidopsis thaliana
  misc_feature (1)..(857): Ceres Seq. ID no. 12323469
  misc_feature (1)..(857): Ortholog of  Ceres SEQ ID NO 13599311 as cited in SEQ ID NO 0
aaattctcactttactcaaaagattcctcggatcatcagaaaatggctatggctacgcgagcgattcgataccagttaccgtcaccgagatttagagctcctagatgcgaatcatcggaaccgattaagcagattcagatccagcaacgaccaagaggtggcgatttagccgagaacgggaagatcgtgctccaaccaaggctttgcacgctgagatcttatggatctgatatggtcatcgctaaaaaggacggcggagatggtggaggaggaggatctgatgttgagttagcgtctccgttttttgagacgcttacggattacatagagagttcgaagaagagtcaggatttcgaaaccatctccggtagactcgccatgattgtatttgcggtgacggtgacggaggagattgttacggggaactcgttgtttaagaaactagatgtggaaggattgagtgaagctattggagctggtctcgccgcgatgggatgcgcggcgatgtttgcttggttaacgatttctcggaacagagtcggacggatctttacagtgagttgcaactcgttcattgactcgttggttgatcagatcgttgatggactgttctacgataccaagcctagtgattggtctgatgatctttaagttcataaatgataaataccactctcaaatgtattactattgtacactttcatctataatagtatagtatagttttgctcttcttcatggtgcttgaagatgataatgaaagtctgtaacttttgtgtctttatatatatatataaaagatatggaagttcatgtgaaacaattgagtgttgttatgggacgtagttgtatcgatt

SEQ ID NO: 28511 - protein, 216 aa, Arabidopsis thaliana
  peptide (1)..(216): Ceres Seq. ID no. 12323470
KFSLYSKDSSDHQKMAMATRAIRYQLPSPRFRAPRCESSEPIKQIQIQQRPRGGDLAENGKIVLQPRLCTLRSYGSDMVIAKKDGGDGGGGGSDVELASPFFETLTDYIESSKKSQDFETISGRLAMIVFAVTVTEEIVTGNSLFKKLDVEGLSEAIGAGLAAMGCAAMFAWLTISRNRVGRIFTVSCNSFIDSLVDQIVDGLFYDTKPSDWSDDL

SEQ ID NO: 28512 - protein, 202 aa, Arabidopsis thaliana
  peptide (1)..(202): Ceres Seq. ID no. 12323471
MAMATRAIRYQLPSPRFRAPRCESSEPIKQIQIQQRPRGGDLAENGKIVLQPRLCTLRSYGSDMVIAKKDGGDGGGGGSDVELASPFFETLTDYIESSKKSQDFETISGRLAMIVFAVTVTEEIVTGNSLFKKLDVEGLSEAIGAGLAAMGCAAMFAWLTISRNRVGRIFTVSCNSFIDSLVDQIVDGLFYDTKPSDWSDDL

SEQ ID NO: 28513 - protein, 200 aa, Arabidopsis thaliana
  peptide (1)..(200): Ceres Seq. ID no. 12323472
MATRAIRYQLPSPRFRAPRCESSEPIKQIQIQQRPRGGDLAENGKIVLQPRLCTLRSYGSDMVIAKKDGGDGGGGGSDVELASPFFETLTDYIESSKKSQDFETISGRLAMIVFAVTVTEEIVTGNSLFKKLDVEGLSEAIGAGLAAMGCAAMFAWLTISRNRVGRIFTVSCNSFIDSLVDQIVDGLFYDTKPSDWSDDL

SEQ ID NO: 28514 - DNA, 1261 bp, Arabidopsis thaliana
  misc_feature (1)..(1261): Ceres Seq. ID no. 13491264
  misc_feature (1)..(1261): Ortholog of  Ceres SEQ ID NO 13590307 as cited in SEQ ID NO 67154
acgctctctcactgatcattcacaatctctctctttttttcaccggcgataattttccgatctcgattataagatggcgaaggaaccagttcgtgttcttgttaccggagctgcaggacaaatcggatatgctcttgttcctatgattgcaagggggataatgcttggtgctgatcagcctgtgatcctccacatgcttgacatcccttttgcagcagaagctttgaacggtgtgaagatggaattggtcgatgctgctttccctcttctaaagggtgtggtggctacaactgatgctgttgaagcgtgtaccggtgttaatgttgctgtcatggttggtggtttcccgaggaaggaaggaatggagaggaaggatgttatgtccaagaacgtttccatttacaagtctcaagcttctgccttggagaagcatgctgcaccaaactgcaaggttctggttgttgcaaaccctgcaaacaccaatgcattgatcctgaaggaatttgcaccatcgatcccagagaagaacattacttgcttgaccaggcttgaccacaacagggcattgggacaagtgtctgagaggttaagcgtaccagtgtctgatgtgaagaacgtgattatctggggaaaccactcatcaacccaatacccagatgtcaaccacgctaccgttaagacttccgttggagagaagccagtgcgtgagctagtcaagaatgacgagtggttgaatggagagttcatctctaccgttcaacaacgtggtgctgccattatcaaggccaggaagctgtctagtgcactttctgcagctagctcagcttgtgaccatatccgtgattgggttgttggaacacctgagggcacatttgtttcaatgggagtatactcagatggatcctacaatgttccagctggacttatctactccttccccgtaacctgccgtaatggagagtggaccattgttcaaggtttaccgattgatgacgcatcgaggaagaagatggatttgacagcagaggagttgaaggaagagaaggacctcgcttactcatgcctctcttaaaccggtcttttctcagctggtttaatcagtgaaagctttgtttcgaataaagaagttttgttataaaatgaacttttaataacctcatgagcttgaggtttagttttcctaatgttcccatgatgtgtcggtactgatttgctgaccatatataaacaatcattttgataattgacctcttttggtttc

SEQ ID NO: 28515 - protein, 332 aa, Arabidopsis thaliana
  peptide (1)..(332): Ceres Seq. ID no. 13491265
MAKEPVRVLVTGAAGQIGYALVPMIARGIMLGADQPVILHMLDIPFAAEALNGVKMELVDAAFPLLKGVVATTDAVEACTGVNVAVMVGGFPRKEGMERKDVMSKNVSIYKSQASALEKHAAPNCKVLVVANPANTNALILKEFAPSIPEKNITCLTRLDHNRALGQVSERLSVPVSDVKNVIIWGNHSSTQYPDVNHATVKTSVGEKPVRELVKNDEWLNGEFISTVQQRGAAIIKARKLSSALSAASSACDHIRDWVVGTPEGTFVSMGVYSDGSYNVPAGLIYSFPVTCRNGEWTIVQGLPIDDASRKKMDLTAEELKEEKDLAYSCLS

SEQ ID NO: 28516 - protein, 309 aa, Arabidopsis thaliana
  peptide (1)..(309): Ceres Seq. ID no. 13491266
MIARGIMLGADQPVILHMLDIPFAAEALNGVKMELVDAAFPLLKGVVATTDAVEACTGVNVAVMVGGFPRKEGMERKDVMSKNVSIYKSQASALEKHAAPNCKVLVVANPANTNALILKEFAPSIPEKNITCLTRLDHNRALGQVSERLSVPVSDVKNVIIWGNHSSTQYPDVNHATVKTSVGEKPVRELVKNDEWLNGEFISTVQQRGAAIIKARKLSSALSAASSACDHIRDWVVGTPEGTFVSMGVYSDGSYNVPAGLIYSFPVTCRNGEWTIVQGLPIDDASRKKMDLTAEELKEEKDLAYSCLS

SEQ ID NO: 28517 - protein, 303 aa, Arabidopsis thaliana
  peptide (1)..(303): Ceres Seq. ID no. 13491267
MLGADQPVILHMLDIPFAAEALNGVKMELVDAAFPLLKGVVATTDAVEACTGVNVAVMVGGFPRKEGMERKDVMSKNVSIYKSQASALEKHAAPNCKVLVVANPANTNALILKEFAPSIPEKNITCLTRLDHNRALGQVSERLSVPVSDVKNVIIWGNHSSTQYPDVNHATVKTSVGEKPVRELVKNDEWLNGEFISTVQQRGAAIIKARKLSSALSAASSACDHIRDWVVGTPEGTFVSMGVYSDGSYNVPAGLIYSFPVTCRNGEWTIVQGLPIDDASRKKMDLTAEELKEEKDLAYSCLS

SEQ ID NO: 28518 - DNA, 871 bp, Arabidopsis thaliana
  misc_feature (1)..(871): Ceres Seq. ID no. 12348502
  misc_feature (1)..(871): Ortholog of  Ceres SEQ ID NO 15179026 as cited in SEQ ID NO 0
aatattcctcatatacacaagctttggttattcgtttgctcttgtttttatcaggtaagcatcatttgtagactacattttcagagagaaatgggtgtatttcctggtttgatcaatcagaacacacaacagcctccagaggtcgagtccaagagatctaggaatgttaaacgtaagtcagtgtctgagacttatccagagaacagagaagaattaaagaagcaattaaaactttggagagcttcagataagaaatctccatggtatgattatcctcctaaggttaaggaacacgtatcaaaaaaggtttttagcgatcttggaccgacagagaagcacgtgagggtggaaaaagctgcaccctggaggttcctttggtggtctggatctatcccggtacatctaactttcaatgagagccgaaaagatttcagcacactatatatgattcctaaaaagaacgtgatgttcatgaaaacgttctatggtaagtggcaaatagagccatggtacgtagataacatgcgcttttgcaagccgagactcccaaagaatcgagaagaatatagacaatgtaccggtggaaaaggattgattggctctagagtgacattggaccagtattttcagccttcttcttatcttaacctgccaccactttcttggtacatccgtagggccaccgtcaagaccaccaaggctctagttgaagatcttcaaattcaggccgccgttatcagaagcgtttgaaactctttccaatccgatatttgttagttataccgtttttatacaaacattaaactcaaatattggaatactgtaaaaaaaaaatcacgttctgtcaagaagaaagaaagaatcactttat

SEQ ID NO: 28519 - protein, 249 aa, Arabidopsis thaliana
  peptide (1)..(249): Ceres Seq. ID no. 12348503
NIPHIHKLWLFVCSCFYQVSIICRLHFQREMGVFPGLINQNTQQPPEVESKRSRNVKRKSVSETYPENREELKKQLKLWRASDKKSPWYDYPPKVKEHVSKKVFSDLGPTEKHVRVEKAAPWRFLWWSGSIPVHLTFNESRKDFSTLYMIPKKNVMFMKTFYGKWQIEPWYVDNMRFCKPRLPKNREEYRQCTGGKGLIGSRVTLDQYFQPSSYLNLPPLSWYIRRATVKTTKALVEDLQIQAAVIRSV

SEQ ID NO: 28520 - protein, 219 aa, Arabidopsis thaliana
  peptide (1)..(219): Ceres Seq. ID no. 12348504
MGVFPGLINQNTQQPPEVESKRSRNVKRKSVSETYPENREELKKQLKLWRASDKKSPWYDYPPKVKEHVSKKVFSDLGPTEKHVRVEKAAPWRFLWWSGSIPVHLTFNESRKDFSTLYMIPKKNVMFMKTFYGKWQIEPWYVDNMRFCKPRLPKNREEYRQCTGGKGLIGSRVTLDQYFQPSSYLNLPPLSWYIRRATVKTTKALVEDLQIQAAVIRSV

SEQ ID NO: 28521 - DNA, 673 bp, Arabidopsis thaliana
  misc_feature (1)..(673): Ceres Seq. ID no. 12331840
  misc_feature (1)..(673): Ortholog of  Ceres SEQ ID NO 15171100 as cited in SEQ ID NO 50966
cagagcttcgacagcttctggagtctggtaacatagatctttgctttgctaacgaggacgaagcagcagagctccttaggggtgagcaagaagcgggtccggaggcagctcttgagttcctaggcagacattgcagatgggctgtggtaactttagggtcgaaagggtgcattgcaaaacatgataaagaggtggtatatatatcagccataggagagacagtagcaactgatgccacaggagccggtgacctattcgcaagcgggtttctgtacggactaataaagggattgtctttggaagaatgttgcaaagtgggatcatgcagtggtggatctgtcatccgtgctctcggtggagaagtaaccccagaaaactggcaatggatgcacaaacagttgcagttgaagggcttacctgttcctgacatccacaactgatgatatcaccatcagattgtagaatttcaaacaatttcgttgaagggccggttctgattcaagcagctcttagcattatgttgttcacagagattctcacagcatttacttcaatacacattgtgttgttttcaatctttttttgtgaaaaataaaaatgcgtttgtcaaggtttaggatcaatcttacttactccacctttctgttccttaaacaatgttcctttttctggc

SEQ ID NO: 28522 - protein, 145 aa, Arabidopsis thaliana
  peptide (1)..(145): Ceres Seq. ID no. 12331841
ELRQLLESGNIDLCFANEDEAAELLRGEQEAGPEAALEFLGRHCRWAVVTLGSKGCIAKHDKEVVYISAIGETVATDATGAGDLFASGFLYGLIKGLSLEECCKVGSCSGGSVIRALGGEVTPENWQWMHKQLQLKGLPVPDIHN

SEQ ID NO: 28523 - DNA, 950 bp, Arabidopsis thaliana
  misc_feature (1)..(950): Ceres Seq. ID no. 12579476
  misc_feature (1)..(950): Ortholog of  Ceres SEQ ID NO 13648511 as cited in SEQ ID NO 179
attcgtgactaaaaaagctcctaggcaccaaaatcgagacactctcgacaaccatactctctgacgccggtggtggttccgatcgccagcgtcgggacttatcaactcccatcaaccttcatgtgttctatataagctttatcttcattgaatcttcctccgttatctcaaatctctcaaaatatctaaatctccttttttatgtgagcttcttcactgaaagttttctttgtgacggaagagtatatcgatgctctattggctccgatctgactcagatcttggatgcatctctgtcttcgaacccaaaacaagaaaattcacaacagtccaacagctcctcttctcaaacatcagagcaagacttcatcaacttatcaaaaagctctagatctggactagcaccaacaccacctttggtttcttctcaccggttttcgttgatggcaggagtatctcttggaccatcagttgtgcttcttcggctgggaacgtcgacgacacacgacgagttcaaacgctggcaaatggtcaccctatatattcacagtcgcccatcatttcaattcttcaaaatgacggaggcgctttccttatcccgacaacatcaaccctagggtttgattggatgagccccatctttcattaaagcccaatatctcccatgtggcccatatccaggtctgatttccctatcaatttgcatagtctctctttgctttgtttctcgacaaaggatggtagtggactccattcagctttaggaacaatgcatctagaggggatttgcttattcaattatcgaaaccttatgatagtcctgattgtttatcaccggatgcatcttaacaattgtttaaattaaaattttgaaacatgacatgtaagaagcaaatcttagtttttaattcataaaaacttcttagataagaagcaaatcttagtttttc

SEQ ID NO: 28524 - protein, 66 aa, Arabidopsis thaliana
  peptide (1)..(66): Ceres Seq. ID no. 12579477
MWPISRSDFPINLHSLSLLCFSTKDGSGLHSALGTMHLEGICLFNYRNLMIVLIVYHRMHLNNCLN

SEQ ID NO: 28525 - protein, 57 aa, Arabidopsis thaliana
  peptide (1)..(57): Ceres Seq. ID no. 12579478
MAGVSLGPSVVLLRLGTSTTHDEFKRWQMVTLYIHSRPSFQFFKMTEALSLSRQHQP

SEQ ID NO: 28526 - protein, 46 aa, Arabidopsis thaliana
  peptide (1)..(46): Ceres Seq. ID no. 12579479
MLYWLRSDSDLGCISVFEPKTRKFTTVQQLLFSNIRARLHQLIKKL

SEQ ID NO: 28527 - DNA, 1076 bp, Arabidopsis thaliana
  misc_feature (1)..(1076): Ceres Seq. ID no. 12421106
  misc_feature (1)..(1076): Ortholog of  Ceres SEQ ID NO 14304791 as cited in SEQ ID NO 53562
  misc_feature (1)..(1076): Ortholog of  Ceres SEQ ID NO 13594298 as cited in SEQ ID NO 57803
  misc_feature (1)..(1076): Ortholog of  Ceres SEQ ID NO 14301894 as cited in SEQ ID NO 61677
  misc_feature (1)..(1076): Ortholog of  Ceres SEQ ID NO 13503476 as cited in SEQ ID NO 61978
  misc_feature (1)..(1076): Ortholog of  Ceres SEQ ID NO 12578438 as cited in SEQ ID NO 62201
  misc_feature (1)..(1076): Ortholog of  Ceres SEQ ID NO 12617675 as cited in SEQ ID NO 64656
aatctcacatcacaattcacatctcctcgaacaaacaaattataaacccattttccttcataaatttctaaaataaaaccccttaaactttcattcacatcatccaacccccaatgggtcgaatcttgaaccgtaccgtgttaatgactcttctagtcgtaacaatggccggaacagcattctccggtagcttcaacgaagagtttgacttaacttggggtgaacacagaggcaaaatcttcagtggaggaaaaatgttgtcactctcactagaccgggtttccgggtcgggttttaaatccaagaaagaatatttgttcggaagaatcgacatgcagcttaaactcgtcgccggtaactccgctggaaccgtcactgcctactacttgtcatcggaaggaccaacacacgacgagatagactttgagtttcttggtaatgaaacagggaagccttatgttcttcacactaatgtatttgctcaaggcaaaggaaacagagaacaacagttttatctctggtttgatccaaccaagaacttccacacttattctcttgtctggagaccacaacacatcatatttatggtagataatgttccaatcagagtattcaacaatgcagagcaacttggtgttccatttcccaagaaccaaccaatgaagatatactcgagtttatggaatgcagatgattgggctacaagaggtggtttggttaagacagattggtctaaagctcctttcacagcttactacagaggctttaacgctgcagcttgtactgtttcttcagggtcatctttctgtgatcctaagtttaagagttcttttactaatggtgaatctcaagtggctaatgagcttaatgcttatgggataagaagattaagatgggttcagaagtattttatgatttatgattattgttctgatttaaaaaggtttcctcaaggattcccaccagagtgtaggaagtctagagtctaaaaaccaatgattctctctttgttgttgtttagtgcaaattaaattctctttgttgtttctttaataaattgatttgatttttcttcg

SEQ ID NO: 28528 - protein, 291 aa, Arabidopsis thaliana
  peptide (1)..(291): Ceres Seq. ID no. 12421107
MGRILNRTVLMTLLVVTMAGTAFSGSFNEEFDLTWGEHRGKIFSGGKMLSLSLDRVSGSGFKSKKEYLFGRIDMQLKLVAGNSAGTVTAYYLSSEGPTHDEIDFEFLGNETGKPYVLHTNVFAQGKGNREQQFYLWFDPTKNFHTYSLVWRPQHIIFMVDNVPIRVFNNAEQLGVPFPKNQPMKIYSSLWNADDWATRGGLVKTDWSKAPFTAYYRGFNAAACTVSSGSSFCDPKFKSSFTNGESQVANELNAYGIRRLRWVQKYFMIYDYCSDLKRFPQGFPPECRKSRV

SEQ ID NO: 28529 - protein, 281 aa, Arabidopsis thaliana
  peptide (1)..(281): Ceres Seq. ID no. 12421108
MTLLVVTMAGTAFSGSFNEEFDLTWGEHRGKIFSGGKMLSLSLDRVSGSGFKSKKEYLFGRIDMQLKLVAGNSAGTVTAYYLSSEGPTHDEIDFEFLGNETGKPYVLHTNVFAQGKGNREQQFYLWFDPTKNFHTYSLVWRPQHIIFMVDNVPIRVFNNAEQLGVPFPKNQPMKIYSSLWNADDWATRGGLVKTDWSKAPFTAYYRGFNAAACTVSSGSSFCDPKFKSSFTNGESQVANELNAYGIRRLRWVQKYFMIYDYCSDLKRFPQGFPPECRKSRV

SEQ ID NO: 28530 - protein, 274 aa, Arabidopsis thaliana
  peptide (1)..(274): Ceres Seq. ID no. 12421109
MAGTAFSGSFNEEFDLTWGEHRGKIFSGGKMLSLSLDRVSGSGFKSKKEYLFGRIDMQLKLVAGNSAGTVTAYYLSSEGPTHDEIDFEFLGNETGKPYVLHTNVFAQGKGNREQQFYLWFDPTKNFHTYSLVWRPQHIIFMVDNVPIRVFNNAEQLGVPFPKNQPMKIYSSLWNADDWATRGGLVKTDWSKAPFTAYYRGFNAAACTVSSGSSFCDPKFKSSFTNGESQVANELNAYGIRRLRWVQKYFMIYDYCSDLKRFPQGFPPECRKSRV

SEQ ID NO: 28531 - DNA, 743 bp, Arabidopsis thaliana
  misc_feature (1)..(743): Ceres Seq. ID no. 12338308
  misc_feature (1)..(743): Ortholog of  Ceres SEQ ID NO 15178928 as cited in SEQ ID NO 1118
aagttgaggcatcgtcatcgtgaaatgtgcagctccggaaataaataatcactaaaataaccagatccgatctactgccccggtttctcgccggaatctccattctgtaaccggcgatcctctttctgttatggaagacgtgaaagggaaggagattattgatgatgctcctattgacaacaaggtttcagatgaaatggagagtgaggaaaatgcgatcaagaaaaagtatggaggattgttgcctaagaagattcctttgatatctaaggaccatgaacgtgcgttttttgactcagctgattgggctttaggcaagcaaaaaggacagaagccgaaagggcctttggaagctctccgcccaaaactgcagccaaccccgcaacagcaaccaagagcaagacgaatggcttattcttcaggcgaaactgaagacactgagattgataacaacgaagctccggatgaccaagcctgcgcatcagctgtggatagtaccaatttaaaggacgatggaggcgcaaaagacaacatcaaatcatgaacaacatatagagatctcttgaggagcgcaaacaaacaacatcacaagtcaatttacagaagaataagcgaccaggtttgctttgcaacggttgtaatatcaagtctcttaccttatcatacttgggactgcaaatctgtatcacttacaaacctcctggcttgaaacgtctattggacgattgcaaatgatttgcttt

SEQ ID NO: 28532 - protein, 137 aa, Arabidopsis thaliana
  peptide (1)..(137): Ceres Seq. ID no. 12338309
MEDVKGKEIIDDAPIDNKVSDEMESEENAIKKKYGGLLPKKIPLISKDHERAFFDSADWALGKQKGQKPKGPLEALRPKLQPTPQQQPRARRMAYSSGETEDTEIDNNEAPDDQACASAVDSTNLKDDGGAKDNIKS

SEQ ID NO: 28533 - protein, 115 aa, Arabidopsis thaliana
  peptide (1)..(115): Ceres Seq. ID no. 12338310
MESEENAIKKKYGGLLPKKIPLISKDHERAFFDSADWALGKQKGQKPKGPLEALRPKLQPTPQQQPRARRMAYSSGETEDTEIDNNEAPDDQACASAVDSTNLKDDGGAKDNIKS

SEQ ID NO: 28534 - DNA, 731 bp, Arabidopsis thaliana
  misc_feature (1)..(731): Ceres Seq. ID no. 12333813
  misc_feature (1)..(731): Ortholog of  Ceres SEQ ID NO 13647648 as cited in SEQ ID NO 20346
actttttcaacttactttatcgtgcgtctgtacggaccacaaaaggctctctctttatttctctgtgagatttttttaggatctggagagccaaagatcatggaggaaagccaagaacttgccttgacccagttgagaaaatcggtcgagaaactctcttcttctactgagagtttgttgtttatgcgctagacaaaacaatcgcaagtggcaacaatggcaaagaagttggaggtgagaaattagtagccgttattgatctggcaaacattacatacaagaacctagatgctcgtggattgatcactggctttcaattcttacaatcttactacccggaacgccttgcaaaatgctacattttgcatatgcccggattcttcgtgaccgtttggaaattcgtctgccgttttctagagaaagcaactcaggaaaagattgtgatagttacggatggagaagaacagagaaaattcgaggaggagatcggagcagatgctttaccggaagagtacggtggccgagctaagctcacagcaatccaagatgttcttcttcctcaggctgctccagtaactctaacaaacaataatgtttagctctttatttttggaagcattaacctgaatatttgtaatggtcagaacataactagtggtacatctctaaatttccaaaagaagcaatgaaaacatgagaaagtaatgcgaatatattcaatctggtgactg

SEQ ID NO: 28535 - protein, 76 aa, Arabidopsis thaliana
  peptide (1)..(76): Ceres Seq. ID no. 12333814
MPGFFVTVWKFVCRFLEKATQEKIVIVTDGEEQRKFEEEIGADALPEEYGGRAKLTAIQDVLLPQAAPVTLTNNNV

SEQ ID NO: 28536 - protein, 63 aa, Arabidopsis thaliana
  peptide (1)..(63): Ceres Seq. ID no. 12333815
TFSTYFIVRLYGPQKALSLFLCEIFLGSGEPKIMEESQELALTQLRKSVEKLSSSTESLLFMR

SEQ ID NO: 28537 - protein, 58 aa, Arabidopsis thaliana
  peptide (1)..(58): Ceres Seq. ID no. 12333816
MLHFAYARILRDRLEIRLPFSRESNSGKDCDSYGWRRTEKIRGGDRSRCFTGRVRWPS

SEQ ID NO: 28538 - DNA, 681 bp, Arabidopsis thaliana
  misc_feature (1)..(681): Ceres Seq. ID no. 12389159
  misc_feature (1)..(681): Ortholog of  Ceres SEQ ID NO 12610954 as cited in SEQ ID NO 55930
  misc_feature (1)..(681): Ortholog of  Ceres SEQ ID NO 12625335 as cited in SEQ ID NO 63326
  misc_feature (1)..(681): Ortholog of  Ceres SEQ ID NO 12566590 as cited in SEQ ID NO 0
  misc_feature (1)..(681): Ortholog of  Ceres SEQ ID NO 14305152 as cited in SEQ ID NO 0
  misc_feature (1)..(681): Ortholog of  Ceres SEQ ID NO 15179949 as cited in SEQ ID NO 0
actcaagtcaaacaaaactcttctattttcctctgtcttcaaaaccacagagatctcttcatggctccaattactgtcggcgatgttgtaccagacggaactatctctttcttcgatgaaaatgatcagcttcagaccgtctccgttcactctatcgccgccggtaaaaaagtcattctctttggtgttcctggtgctttcactcccacatgcagtatgagccatgtgcctggattcattgggaaagcagaggagctgaagtcaaagggtattgatgagatcatttgctttagtgtgaatgatccatttgtgatgaaggcatggggaaaaacatatccagagaacaagcatgtgaagtttgtagcagatgggtctggagaatacacgcatcttcttggacttgagcttgaccttaaggacaagggtcttggtattaggtcaaggagattcgctttgttgcttgataaccttaaggtgactgtagccaatgttgaatctggtggcgagttcacggtttccagcgcagaggatattctcaaggctctttaagaaactttatcgtttcgcttgttgtattgtgaatctaaactgctgtatgtgaagaagagatttctatagcttgatttcaatcaacaagcatgtgtttgacttgcttggcataataaagtatttgataaacgt

SEQ ID NO: 28539 - protein, 182 aa, Arabidopsis thaliana
  peptide (1)..(182): Ceres Seq. ID no. 12389160
TQVKQNSSIFLCLQNHRDLFMAPITVGDVVPDGTISFFDENDQLQTVSVHSIAAGKKVILFGVPGAFTPTCSMSHVPGFIGKAEELKSKGIDEIICFSVNDPFVMKAWGKTYPENKHVKFVADGSGEYTHLLGLELDLKDKGLGIRSRRFALLLDNLKVTVANVESGGEFTVSSAEDILKAL

SEQ ID NO: 28540 - protein, 162 aa, Arabidopsis thaliana
  peptide (1)..(162): Ceres Seq. ID no. 12389161
MAPITVGDVVPDGTISFFDENDQLQTVSVHSIAAGKKVILFGVPGAFTPTCSMSHVPGFIGKAEELKSKGIDEIICFSVNDPFVMKAWGKTYPENKHVKFVADGSGEYTHLLGLELDLKDKGLGIRSRRFALLLDNLKVTVANVESGGEFTVSSAEDILKAL

SEQ ID NO: 28541 - protein, 110 aa, Arabidopsis thaliana
  peptide (1)..(110): Ceres Seq. ID no. 12389162
MSHVPGFIGKAEELKSKGIDEIICFSVNDPFVMKAWGKTYPENKHVKFVADGSGEYTHLLGLELDLKDKGLGIRSRRFALLLDNLKVTVANVESGGEFTVSSAEDILKAL

SEQ ID NO: 28542 - DNA, 1341 bp, Arabidopsis thaliana
  misc_feature (1)..(1341): Ceres Seq. ID no. 12370545
  misc_feature (1)..(1341): Ortholog of  Ceres SEQ ID NO 14307296 as cited in SEQ ID NO 53966
  misc_feature (1)..(1341): Ortholog of  Ceres SEQ ID NO 15175368 as cited in SEQ ID NO 60071
  misc_feature (1)..(1341): Ortholog of  Ceres SEQ ID NO 15225423 as cited in SEQ ID NO 64689
  misc_feature (1)..(1341): Ortholog of  Ceres SEQ ID NO 15179340 as cited in SEQ ID NO 0
aaatgagtttaaggtcctgcaaaaactgggtttttcctcgtgtacttgttcatcttatctcctctgcataaacttcattgaagaaaaagtcttttttattttgttgatctcttttaattaagatccttttgggtttaatttattaatctccaagaaaaaaaatggatatgagaagccatgaaatgatagagagaagaagagaagacaatggcaacaacaatggtggtgttgttattagtaacatcattagtactaatattgatgataattgcaatggtaataacaacaacactcgtgtctcttgcaactctcaaaccctagatcaccaccaatccaagtctccctcttcgttttccatctccgccgcagctaaacccaccgtaagataccgtgagtgtctaaagaatcatgcggcgagcgtcggcggaagtgttcacgacggatgcggcgagtttatgccgagtggtgaagaaggaacaatcgaagctctcagatgcgctgcttgtgattgtcaccgtaatttccaccggaaagaaatggacggcgttggaagctcggatttgatctctcaccaccgtcatcaccactaccaccataaccaatacggtggaggaggagggagaagacctccgccgccgaatatgatgcttaacccactcatgcttcctccgccaccgaattatcagccgattcaccaccacaagtatggaatgagtcctcccggaggaggaggaatggtgacgccgatgagcgttgcttacggcggtggaggaggaggagctgagtcgtctagtgaagatctgaatctgtacggacaatcaagcggagaaggagctggtgcggcggcgggacaaatggcgttttcgatgtcgtcgtctaagaaaagattcaggacaaagttcacgacggatcagaaggagaggatgatggactttgcggagaagctagggtggaggatgaacaagcaagacgaagaagagcttaagagattctgcggcgagatcggagtgaagagacaagtcttcaaagtttggatgcataacaacaagaacaatgctaagaaaccaccaacaccaacaactactctctaatcagtgatcatatgattaattgagagattatgtaagagattttcttttaatctacttttgttgttgttgtttatttaatgttttccttcttctaggtttttgtagtttgtacgatctttggatcaatcaatggatcttttgtttgcttagttaatgtttttaattttggtttgctttttttttttagtctttttattttattttgttgtcttttacccggatcgtacttgtaatcagcttctgttgcttc

SEQ ID NO: 28543 - protein, 309 aa, Arabidopsis thaliana
  peptide (1)..(309): Ceres Seq. ID no. 12370546
MDMRSHEMIERRREDNGNNNGGVVISNIISTNIDDNCNGNNNNTRVSCNSQTLDHHQSKSPSSFSISAAAKPTVRYRECLKNHAASVGGSVHDGCGEFMPSGEEGTIEALRCAACDCHRNFHRKEMDGVGSSDLISHHRHHHYHHNQYGGGGGRRPPPPNMMLNPLMLPPPPNYQPIHHHKYGMSPPGGGGMVTPMSVAYGGGGGGAESSSEDLNLYGQSSGEGAGAAAGQMAFSMSSSKKRFRTKFTTDQKERMMDFAEKLGWRMNKQDEEELKRFCGEIGVKRQVFKVWMHNNKNNAKKPPTPTTTL

SEQ ID NO: 28544 - protein, 307 aa, Arabidopsis thaliana
  peptide (1)..(307): Ceres Seq. ID no. 12370547
MRSHEMIERRREDNGNNNGGVVISNIISTNIDDNCNGNNNNTRVSCNSQTLDHHQSKSPSSFSISAAAKPTVRYRECLKNHAASVGGSVHDGCGEFMPSGEEGTIEALRCAACDCHRNFHRKEMDGVGSSDLISHHRHHHYHHNQYGGGGGRRPPPPNMMLNPLMLPPPPNYQPIHHHKYGMSPPGGGGMVTPMSVAYGGGGGGAESSSEDLNLYGQSSGEGAGAAAGQMAFSMSSSKKRFRTKFTTDQKERMMDFAEKLGWRMNKQDEEELKRFCGEIGVKRQVFKVWMHNNKNNAKKPPTPTTTL

SEQ ID NO: 28545 - protein, 302 aa, Arabidopsis thaliana
  peptide (1)..(302): Ceres Seq. ID no. 12370548
MIERRREDNGNNNGGVVISNIISTNIDDNCNGNNNNTRVSCNSQTLDHHQSKSPSSFSISAAAKPTVRYRECLKNHAASVGGSVHDGCGEFMPSGEEGTIEALRCAACDCHRNFHRKEMDGVGSSDLISHHRHHHYHHNQYGGGGGRRPPPPNMMLNPLMLPPPPNYQPIHHHKYGMSPPGGGGMVTPMSVAYGGGGGGAESSSEDLNLYGQSSGEGAGAAAGQMAFSMSSSKKRFRTKFTTDQKERMMDFAEKLGWRMNKQDEEELKRFCGEIGVKRQVFKVWMHNNKNNAKKPPTPTTTL

SEQ ID NO: 28546 - DNA, 1094 bp, Arabidopsis thaliana
  misc_feature (1)..(1094): Ceres Seq. ID no. 12333831
  misc_feature (1)..(1094): Ortholog of  Ceres SEQ ID NO 13597757 as cited in SEQ ID NO 65472
aactgccaaaactcttcgcttaattctccggcgtatacaagtcgccggcaaaaatgtcgatgtcgaagagctccaagatgcttcagttcataaactacaggatgcgagtaacaatccaagacggaagacagctaatcggaaaattcatggcgttcgatcgccacatgaatcttgttcttggcgactgcgaagagtttcgaaaacttcctccggcgaaaggtaataagaagacgaacgaagaaagagaagagcgtcgtacgcttggtttggttttacttagaggagaagaagtgatttcgatgactgtcgaaggtccaccgccacctgaagaatctcgcgccaaatctggatctgtaaccgctgtggctggtcccggaatcggtcgtgctgctggacgtggagtacctactggtccattggttcaagctcagcctggtttatctggtcctgttcgtggaattggtggacctgctcctggaatgatgcagcctcagatctctagaccaccacagattattcgtcctccgggacaaatgccaccacagcctccttttgctggtcaaggaggtcctcctccaccttatggtatgagaccaccgtatcctggtccaccaccgcctcagtatggtggacagcaaaggccaatgatgattcctccacctggtggtatgatgagaggacctcctccacctcatggtatgcaaggaccgcctccttctcgccctggaatgcctccccccggtggtgctccgatgtttgctccgcctcatcctggcatgccacctgctccgccaaatcaccataatcagcaacattgattaggagtcacttcatctacaacgaaagcaacatccacatgattgagttacccctcggctagtcgtagcgtttttctccgtgaagctcagagaattgatgagttcatattggtgatttctcgtggaaaaagcaactgattttagaaatagtgaacttgtaggagttacaaccttgctccatgaacttgaatgtattacttgtaaaagaggctctcaatggttttgactggcaattcggttctcaacatatattaggctatgttgctggttatgtac

SEQ ID NO: 28547 - protein, 254 aa, Arabidopsis thaliana
  peptide (1)..(254): Ceres Seq. ID no. 12333832
MSMSKSSKMLQFINYRMRVTIQDGRQLIGKFMAFDRHMNLVLGDCEEFRKLPPAKGNKKTNEEREERRTLGLVLLRGEEVISMTVEGPPPPEESRAKSGSVTAVAGPGIGRAAGRGVPTGPLVQAQPGLSGPVRGIGGPAPGMMQPQISRPPQIIRPPGQMPPQPPFAGQGGPPPPYGMRPPYPGPPPPQYGGQQRPMMIPPPGGMMRGPPPPHGMQGPPPSRPGMPPPGGAPMFAPPHPGMPPAPPNHHNQQH

SEQ ID NO: 28548 - protein, 252 aa, Arabidopsis thaliana
  peptide (1)..(252): Ceres Seq. ID no. 12333833
MSKSSKMLQFINYRMRVTIQDGRQLIGKFMAFDRHMNLVLGDCEEFRKLPPAKGNKKTNEEREERRTLGLVLLRGEEVISMTVEGPPPPEESRAKSGSVTAVAGPGIGRAAGRGVPTGPLVQAQPGLSGPVRGIGGPAPGMMQPQISRPPQIIRPPGQMPPQPPFAGQGGPPPPYGMRPPYPGPPPPQYGGQQRPMMIPPPGGMMRGPPPPHGMQGPPPSRPGMPPPGGAPMFAPPHPGMPPAPPNHHNQQH

SEQ ID NO: 28549 - protein, 246 aa, Arabidopsis thaliana
  peptide (1)..(246): Ceres Seq. ID no. 12333834
MLQFINYRMRVTIQDGRQLIGKFMAFDRHMNLVLGDCEEFRKLPPAKGNKKTNEEREERRTLGLVLLRGEEVISMTVEGPPPPEESRAKSGSVTAVAGPGIGRAAGRGVPTGPLVQAQPGLSGPVRGIGGPAPGMMQPQISRPPQIIRPPGQMPPQPPFAGQGGPPPPYGMRPPYPGPPPPQYGGQQRPMMIPPPGGMMRGPPPPHGMQGPPPSRPGMPPPGGAPMFAPPHPGMPPAPPNHHNQQH

SEQ ID NO: 28550 - DNA, 1415 bp, Arabidopsis thaliana
  misc_feature (1)..(1415): Ceres Seq. ID no. 12396906
  misc_feature (1)..(1415): Ortholog of  Ceres SEQ ID NO 14313159 as cited in SEQ ID NO 54676
  misc_feature (1)..(1415): Ortholog of  Ceres SEQ ID NO 13598547 as cited in SEQ ID NO 65200
  misc_feature (1)..(1415): Ortholog of  Ceres SEQ ID NO 12617920 as cited in SEQ ID NO 65480
gccattaccggggagagagtgaaattagggctgagcgagagagattctgaaataatttcttttacggcggtgaagatgactgagctaacgtcggcgatggacattgacgtagacgaaattcagcctcgcaagccgataaacaagggcaaagacgtcgtcggttttggacctccgccgcagagtaaggcgacgccttgggttgagaagtatcgacctcagtcgcttgatgacgtggctgcacatcgtgacattattgatacgattgataggctgaccaatgagaacaaattgccccatcttctgttgtatggtcctcccggtactggcaaaacatccaccattctagctgttgcccggaaactatatggaccaaagtaccggaatatgattcttgaactgaacgcatcagacgatagaggaatcgatgttgtaaggcagcagattcaagatttcgctagcacgcagagtttctctttaggaaaatcttcggtgaagttggttttgctagatgaagcagatgccatgacaaaagatgctcagtttgccttgcgtagagtgattgagaaatacactaagagtactaggtttgcgctcattggaaaccatgtcaataagatcatcccagctttgcagtcgagatgtactcgatttagatttgcccctcttgatggagttcatatgagtcaacgtcttaaacatgtaatagaagctgaaaggcttgttgtaagtgactgtggtttggcagctcttgtacggctgagcaatggggacatgagaaaagcattgaacattttgcagtcaacgcatatggcgtcaaaggaaattacagaggaagagtcaaagcaaattacagaggaagacgtttacctctgcaccggaaacccattgcccaaggacattgagcagatatctcactggcttctgaataaaccatttgatgagtgctacaaagacgtttcagaaatcaagacgagaaaaggacttgccattgttgatatcgtcaaagagattaccttgtttatttttaaaatcaagatgccttccgctgtcagagttcaactgataaacgatttggcagacattgagtacagattaagttttggttgcaacgacaaactgcagcttggagctatcatttctactttcacacatgcccggtctatcattgttggtgcagcaaagtaaaccatgtttttaccattttggaacccgcagtagctcgccaccttaacaaaccgctagaatgttttatctccgtgatgttttcctgatagtctctgtacattttgtggcgtttgtgaccaataggcttgctttttatttcttatgaagagtttcaatgccaccttgttatcctcttctcatctcctcgaatttgtaactttcaatttcttgatcaaattatgttttaatga

SEQ ID NO: 28551 - protein, 394 aa, Arabidopsis thaliana
  peptide (1)..(394): Ceres Seq. ID no. 12396907
AITGERVKLGLSERDSEIISFTAVKMTELTSAMDIDVDEIQPRKPINKGKDVVGFGPPPQSKATPWVEKYRPQSLDDVAAHRDIIDTIDRLTNENKLPHLLLYGPPGTGKTSTILAVARKLYGPKYRNMILELNASDDRGIDVVRQQIQDFASTQSFSLGKSSVKLVLLDEADAMTKDAQFALRRVIEKYTKSTRFALIGNHVNKIIPALQSRCTRFRFAPLDGVHMSQRLKHVIEAERLVVSDCGLAALVRLSNGDMRKALNILQSTHMASKEITEEESKQITEEDVYLCTGNPLPKDIEQISHWLLNKPFDECYKDVSEIKTRKGLAIVDIVKEITLFIFKIKMPSAVRVQLINDLADIEYRLSFGCNDKLQLGAIISTFTHARSIIVGAAK

SEQ ID NO: 28552 - protein, 369 aa, Arabidopsis thaliana
  peptide (1)..(369): Ceres Seq. ID no. 12396908
MTELTSAMDIDVDEIQPRKPINKGKDVVGFGPPPQSKATPWVEKYRPQSLDDVAAHRDIIDTIDRLTNENKLPHLLLYGPPGTGKTSTILAVARKLYGPKYRNMILELNASDDRGIDVVRQQIQDFASTQSFSLGKSSVKLVLLDEADAMTKDAQFALRRVIEKYTKSTRFALIGNHVNKIIPALQSRCTRFRFAPLDGVHMSQRLKHVIEAERLVVSDCGLAALVRLSNGDMRKALNILQSTHMASKEITEEESKQITEEDVYLCTGNPLPKDIEQISHWLLNKPFDECYKDVSEIKTRKGLAIVDIVKEITLFIFKIKMPSAVRVQLINDLADIEYRLSFGCNDKLQLGAIISTFTHARSIIVGAAK

SEQ ID NO: 28553 - protein, 362 aa, Arabidopsis thaliana
  peptide (1)..(362): Ceres Seq. ID no. 12396909
MDIDVDEIQPRKPINKGKDVVGFGPPPQSKATPWVEKYRPQSLDDVAAHRDIIDTIDRLTNENKLPHLLLYGPPGTGKTSTILAVARKLYGPKYRNMILELNASDDRGIDVVRQQIQDFASTQSFSLGKSSVKLVLLDEADAMTKDAQFALRRVIEKYTKSTRFALIGNHVNKIIPALQSRCTRFRFAPLDGVHMSQRLKHVIEAERLVVSDCGLAALVRLSNGDMRKALNILQSTHMASKEITEEESKQITEEDVYLCTGNPLPKDIEQISHWLLNKPFDECYKDVSEIKTRKGLAIVDIVKEITLFIFKIKMPSAVRVQLINDLADIEYRLSFGCNDKLQLGAIISTFTHARSIIVGAAK

SEQ ID NO: 28554 - DNA, 800 bp, Arabidopsis thaliana
  misc_feature (1)..(800): Ceres Seq. ID no. 12331823
  misc_feature (1)..(800): Ortholog of  Ceres SEQ ID NO 12473409 as cited in SEQ ID NO 104
  misc_feature (1)..(800): Ortholog of  Ceres SEQ ID NO 15170477 as cited in SEQ ID NO 52825
  misc_feature (1)..(800): Ortholog of  Ceres SEQ ID NO 13595055 as cited in SEQ ID NO 55744
  misc_feature (1)..(800): Ortholog of  Ceres SEQ ID NO 13662009 as cited in SEQ ID NO 61951
ctacattttctcttccattagtttcgttatctttttattttctctatctatctggatattattttttcacttggggatttggagaaacctctcctctctctatctatagccatggctgctttcacttgtacctctcgtcctccgatttctctccgctccgagaccagaatcgtatcctcatcaccatcggcttcttctctctcttctcggcggatgttcgccgtcttaccggaatcatcaggtttgagaatccgtctttctctctctccggcttcgttgacctcgattcatcaacctagggtttctcgattacgaagagccgtcgtctgtgaagctcaggaaactactaccgatattcaagtggtcaatgactcgacatgggactctctagttcttaaagcaactgggcctgtagttgtcgacttttgggcaccatggtgtggaccttgcaagatgattgatccgcttgtaaacgatctagcacagcattacactgggaagatcaagttctacaaattaaacactgatgaatctcctaatactcccggccagtacggagttagaagcatcccaacgatcatgatctttgtcggtggcgagaagaaggatacaatcataggtgcagtgcccaaaaccacactcacatctagcctcgacaagttcttgccatgaaatatcacttgtggagtctgtaagatctcgtatctctctgtctctcgttcttgttctcattatctctgtaactcattatcactgaacatctagacctggataaataatatgatgtcatgtcttatgtc

SEQ ID NO: 28555 - protein, 186 aa, Arabidopsis thaliana
  peptide (1)..(186): Ceres Seq. ID no. 12331824
MAAFTCTSRPPISLRSETRIVSSSPSASSLSSRRMFAVLPESSGLRIRLSLSPASLTSIHQPRVSRLRRAVVCEAQETTTDIQVVNDSTWDSLVLKATGPVVVDFWAPWCGPCKMIDPLVNDLAQHYTGKIKFYKLNTDESPNTPGQYGVRSIPTIMIFVGGEKKDTIIGAVPKTTLTSSLDKFLP

SEQ ID NO: 28556 - protein, 152 aa, Arabidopsis thaliana
  peptide (1)..(152): Ceres Seq. ID no. 12331825
MFAVLPESSGLRIRLSLSPASLTSIHQPRVSRLRRAVVCEAQETTTDIQVVNDSTWDSLVLKATGPVVVDFWAPWCGPCKMIDPLVNDLAQHYTGKIKFYKLNTDESPNTPGQYGVRSIPTIMIFVGGEKKDTIIGAVPKTTLTSSLDKFLP

SEQ ID NO: 28557 - protein, 98 aa, Arabidopsis thaliana
  peptide (1)..(98): Ceres Seq. ID no. 12331826
TFSLPLVSLSFYFLYLSGYYFFTWGFGETSPLSIYSHGCFHLYLSSSDFSPLRDQNRILITIGFFSLFSADVRRLTGIIRFENPSFSLSGFVDLDSST

SEQ ID NO: 28558 - DNA, 960 bp, Arabidopsis thaliana
  misc_feature (1)..(960): Ceres Seq. ID no. 13488570
  misc_feature (1)..(960): Ortholog of  Ceres SEQ ID NO 14305858 as cited in SEQ ID NO 52329
aaattcacactactatcttcttcttcttcgatttagcacagaagctgcagttttatcaatgttctccctttcgtttccatcttcttcttctgcccttttaccttctctcgttgctttcgattcttcgcgtcgtctctctttgcaaccaaagaagttaaatcgtcttcaaagtcacttattttcacctcaacatctctcattctctcagtctaatgtctctcgttacagagcgttttgtgtttcttcaagctctcctccagagggaacagtctccgtagtcgatttccatgagaaagattggtcctttctcgaatctatggaaattgactccactgaacatactcagaagattgagaggatcataaaggctggagaattatccgaatcttcgagggttttggtttcaattagctccgaaacattcgttgatcgtttggtagaatcttcaccttctcagcttttgctcattgtccatgactccctttttacgttagcctgtatcaaagagaagtacgacaaagtcaaatgttggcaaggagaaatgatctatgtcccggagaaatggtctccattagacgctgtgtttctctactttcttccagctttgccttttgacctcgacgaactgttcaagacactctctcaacgttgttcctcaggtgcaagagtagtaatcagtcacccgcaaggtagactaggcttggagcagcaaaggaaagagttttcagatgtggtcgtctctgatttacctgatgagtccacattgagtaatgttgctgagaagcattcatttgagctaacccagtttgttgatgagcaaggcctttatctcgctgttctgaaatcctctaaacaatagtagattatgtcaagagaacatctgttgtatgagattatatttttgcctgttgtgttgtgatgaaatatacagccaacaatggagaaattattcattctgag

SEQ ID NO: 28559 - protein, 285 aa, Arabidopsis thaliana
  peptide (1)..(285): Ceres Seq. ID no. 13488571
NSHYYLLLLRFSTEAAVLSMFSLSFPSSSSALLPSLVAFDSSRRLSLQPKKLNRLQSHLFSPQHLSFSQSNVSRYRAFCVSSSSPPEGTVSVVDFHEKDWSFLESMEIDSTEHTQKIERIIKAGELSESSRVLVSISSETFVDRLVESSPSQLLLIVHDSLFTLACIKEKYDKVKCWQGEMIYVPEKWSPLDAVFLYFLPALPFDLDELFKTLSQRCSSGARVVISHPQGRLGLEQQRKEFSDVVVSDLPDESTLSNVAEKHSFELTQFVDEQGLYLAVLKSSKQ

SEQ ID NO: 28560 - protein, 266 aa, Arabidopsis thaliana
  peptide (1)..(266): Ceres Seq. ID no. 13488572
MFSLSFPSSSSALLPSLVAFDSSRRLSLQPKKLNRLQSHLFSPQHLSFSQSNVSRYRAFCVSSSSPPEGTVSVVDFHEKDWSFLESMEIDSTEHTQKIERIIKAGELSESSRVLVSISSETFVDRLVESSPSQLLLIVHDSLFTLACIKEKYDKVKCWQGEMIYVPEKWSPLDAVFLYFLPALPFDLDELFKTLSQRCSSGARVVISHPQGRLGLEQQRKEFSDVVVSDLPDESTLSNVAEKHSFELTQFVDEQGLYLAVLKSSKQ

SEQ ID NO: 28561 - protein, 180 aa, Arabidopsis thaliana
  peptide (1)..(180): Ceres Seq. ID no. 13488573
MEIDSTEHTQKIERIIKAGELSESSRVLVSISSETFVDRLVESSPSQLLLIVHDSLFTLACIKEKYDKVKCWQGEMIYVPEKWSPLDAVFLYFLPALPFDLDELFKTLSQRCSSGARVVISHPQGRLGLEQQRKEFSDVVVSDLPDESTLSNVAEKHSFELTQFVDEQGLYLAVLKSSKQ

SEQ ID NO: 28562 - DNA, 966 bp, Arabidopsis thaliana
  misc_feature (1)..(966): Ceres Seq. ID no. 12322155
  misc_feature (1)..(966): Ortholog of  Ceres SEQ ID NO 12615268 as cited in SEQ ID NO 62391
agaagaaagagctccgtccccaaaaacaaaggaaacaaaaaatcagtcggcgaaacgggaagagatctatcggaaatcttacggcggcggaagtcatggcgaacatagaatcagaagcagtcgatttcgagccagaggaggatgaccttatggacgaagaaggtacagctattgacggagctgatgtttctccacgcgcgggacatccgaggcttaagtcggctattgccggagctaatggcgaatcagcaaagaagaccaaaggccgtgggtttcgcgaggagaaagattccgatcgtcagcgtcgtctttcctcacgcgatttcgaatcacttggttcagatggccgtcctggtcccagagatccgttgaaggatggattatcttggtctctggagttcatgaggagacacaggaggaggatataaccaatgcttttggtgattttggggagattaagaatctaaatctcaatctcgatcgccgtagtggttatgtcaagggatatgctttgatagaatatgagaagaaggaagaagcacagagcgctatttcagcaatgaatggtgctgagcttctaacacagaatgttagcgttgactgggccttcagcagcggtcccagtggtggtgaatcttacaggagaaagaactcgaggtatgggaggtcgcaacgttcaagaagtccgagaagacgttactgattgtatgatttggtggagagttctccccatatctctctgtattagggattccctctcttatctgtaaggtactgatgcaagacgctgagtgttgaacaaatttttttctggggtttttgtagggtttggctgcttttgcattggtttatctctttatgcatttgcatgggattgttgcgtttaaacaccatgagatctgttttaatgctttgtattggtaaaagaagagaaacattggatgaggaagaatgttttaattttcg

SEQ ID NO: 28563 - protein, 141 aa, Arabidopsis thaliana
  peptide (1)..(141): Ceres Seq. ID no. 12322156
KKELRPQKQRKQKISRRNGKRSIGNLTAAEVMANIESEAVDFEPEEDDLMDEEGTAIDGADVSPRAGHPRLKSAIAGANGESAKKTKGRGFREEKDSDRQRRLSSRDFESLGSDGRPGPRDPLKDGLSWSLEFMRRHRRRI

SEQ ID NO: 28564 - protein, 110 aa, Arabidopsis thaliana
  peptide (1)..(110): Ceres Seq. ID no. 12322157
MANIESEAVDFEPEEDDLMDEEGTAIDGADVSPRAGHPRLKSAIAGANGESAKKTKGRGFREEKDSDRQRRLSSRDFESLGSDGRPGPRDPLKDGLSWSLEFMRRHRRRI

SEQ ID NO: 28565 - protein, 92 aa, Arabidopsis thaliana
  peptide (1)..(92): Ceres Seq. ID no. 12322158
MDEEGTAIDGADVSPRAGHPRLKSAIAGANGESAKKTKGRGFREEKDSDRQRRLSSRDFESLGSDGRPGPRDPLKDGLSWSLEFMRRHRRRI

SEQ ID NO: 28566 - DNA, 822 bp, Arabidopsis thaliana
  misc_feature (1)..(822): Ceres Seq. ID no. 12396880
  misc_feature (1)..(822): Ortholog of  Ceres SEQ ID NO 12611019 as cited in SEQ ID NO 56243
gtcgctctcaattaaaccctaaaaccctcctcagaagagaggcagagagaaaaaaaacgcagtctttgcggaatctgtgaaaggagaaaagatgagaccaccaatgagaggcggcgggggtttccgtggaaggggaggacgagacggtggtggtggcggtaggttcggtggaggaggcggtagattcggtggaggaggaggacgctttggtggtggaggcggtcgctttggtggttttagagacgaaggtcctcctagcgaagtcgtggaggttgcaactttcgttcatgcttgcgagggagatgctgtgaccaaactctcacaggagaagattcctcattttaacgctccgatctacctagagaacaagactcagattgggaaagtagatgaaatctttggcccaattaatgaatctttgttttctatcaaaatgatggaaggtattgtagccacctcgtattctccaggagataagttcttcatcgacccttacaagcttttgccactcgctcgattccttcctcagccaaagggtcagtcaacgggtggacgtggaggtgcaggtcgtggaagaggtgatagtagaggtcgtggaagaggtggatcatttagtagaggtagaggtgctccaagaggtggtagatttccaccacgcggtggctctcgtggaagctttagaggccgaggaagattttaggttcttctcctgctttataagccttatccaaacttgtaccctttgttttatgaatgactatcgttctcccgtattctcaattttcaagactttggttttatctatggagtaaaaatatttgc

SEQ ID NO: 28567 - protein, 202 aa, Arabidopsis thaliana
  peptide (1)..(202): Ceres Seq. ID no. 12396881
MRPPMRGGGGFRGRGGRDGGGGGRFGGGGGRFGGGGGRFGGGGGRFGGFRDEGPPSEVVEVATFVHACEGDAVTKLSQEKIPHFNAPIYLENKTQIGKVDEIFGPINESLFSIKMMEGIVATSYSPGDKFFIDPYKLLPLARFLPQPKGQSTGGRGGAGRGRGDSRGRGRGGSFSRGRGAPRGGRFPPRGGSRGSFRGRGRF

SEQ ID NO: 28568 - protein, 198 aa, Arabidopsis thaliana
  peptide (1)..(198): Ceres Seq. ID no. 12396882
MRGGGGFRGRGGRDGGGGGRFGGGGGRFGGGGGRFGGGGGRFGGFRDEGPPSEVVEVATFVHACEGDAVTKLSQEKIPHFNAPIYLENKTQIGKVDEIFGPINESLFSIKMMEGIVATSYSPGDKFFIDPYKLLPLARFLPQPKGQSTGGRGGAGRGRGDSRGRGRGGSFSRGRGAPRGGRFPPRGGSRGSFRGRGRF

SEQ ID NO: 28569 - DNA, 847 bp, Arabidopsis thaliana
  misc_feature (1)..(847): Ceres Seq. ID no. 13496902
  misc_feature (1)..(847): Ortholog of  Ceres SEQ ID NO 14316367 as cited in SEQ ID NO 57626
  misc_feature (1)..(847): Ortholog of  Ceres SEQ ID NO 14315039 as cited in SEQ ID NO 57668
  misc_feature (1)..(847): Ortholog of  Ceres SEQ ID NO 13664189 as cited in SEQ ID NO 66834
  misc_feature (1)..(847): Ortholog of  Ceres SEQ ID NO 13654321 as cited in SEQ ID NO 67850
atgactgcttcactttctctttctcttttgttcaagtagtttgggagagagaagagaagaagaagacaccctttaagcaaaacagaggattttcattctctgttctgtttgaattattactaatctatcatcttgttgttctcttcgtcgacaatgtcgggaaacaaagaagaagaggatcctcgtatccatggaatcaaaactaagatccgtgtcgttccagattttcccaagaaaggaataatgtttcaagacataacaacagtgttgttggatccgaaagccttcaaagacacaattgatctgtttgtggagaggtacagagacaagaacatctcagtggttgcaggaatagaggctcgtggtttcctattcggtccaccgatcgcgctagccattggagcaaaatttgttcctctgcgcaaacccaagaaactacctggtgaaacaatatttgaggaatacgagttggaatatggaaatgaccgcctagagatgcacataggagccgtcgaggctggcgatcgagctttggtcgttgatgatcttatcgcgactggtggtactctctgcgctgccattaacttgctcgagagggttggagcagaagttgtggaatgtgcatgtgtgatcgagttacccgaattaaagggaaggcagagacttaaggggaagccactatgtatgcttgtggagtaccgatgatgattttagctttacttatttggataaaattattcggttaattaatttatgctccgaaaattcggattatgcagacttcttattattggattctacaatattttgatttaaattctagcggattagctggaagaaataatcc

SEQ ID NO: 28570 - protein, 183 aa, Arabidopsis thaliana
  peptide (1)..(183): Ceres Seq. ID no. 13496903
MSGNKEEEDPRIHGIKTKIRVVPDFPKKGIMFQDITTVLLDPKAFKDTIDLFVERYRDKNISVVAGIEARGFLFGPPIALAIGAKFVPLRKPKKLPGETIFEEYELEYGNDRLEMHIGAVEAGDRALVVDDLIATGGTLCAAINLLERVGAEVVECACVIELPELKGRQRLKGKPLCMLVEYR

SEQ ID NO: 28571 - protein, 153 aa, Arabidopsis thaliana
  peptide (1)..(153): Ceres Seq. ID no. 13496904
MFQDITTVLLDPKAFKDTIDLFVERYRDKNISVVAGIEARGFLFGPPIALAIGAKFVPLRKPKKLPGETIFEEYELEYGNDRLEMHIGAVEAGDRALVVDDLIATGGTLCAAINLLERVGAEVVECACVIELPELKGRQRLKGKPLCMLVEYR

SEQ ID NO: 28572 - DNA, 1072 bp, Arabidopsis thaliana
  misc_feature (1)..(1072): Ceres Seq. ID no. 13622027
  misc_feature (1)..(1072): Ortholog of  Ceres SEQ ID NO 15173907 as cited in SEQ ID NO 62356
  misc_feature (1)..(1072): Ortholog of  Ceres SEQ ID NO 13596519 as cited in SEQ ID NO 62572
  misc_feature (1)..(1072): Ortholog of  Ceres SEQ ID NO 12625108 as cited in SEQ ID NO 68102
atcatcatcatcatctctttcttcttccaaaagtcataatcatgtcaaagtctctagctggattggcggttttggccgctctttttattgcggttgatgcgtttaggccttctggttaactaatggtcacgctacattctatggaggaagtgacgcttctggaacaatgggtggagcttgtggttacggagatctttactcggcggggtacgggacaatgacggcggcgttaagcacggctctgttcaacgacggagcttcttgcggagaatgctataggataacgtgtgatcacgcggcggactcacggtggtgcttgaaaggagcttctgtggttattacagccactaacttttgcccaccaaactttgctttgcctaacaacaacggtggttggtgcaatccgccgcttaaacatttcgacatggcacaacccgcttgggaaaagatcggaatttacagaggaggaatcgttcccgtcgttttccaaagagtaagctgttacaagaaaggaggagttagattcagaataaacggaagagactacttcgagctagtgaatattcaaaatgtaggaggagcaggttctattaaatctgtatccatcaaaggatcaaagactggttggttagccatgtctcgtaactggggagctaattggcaatcgaatgcttatctagatggtcaagctctctctttctccattaccactactgatggtgctactagagtctttctcaatgttgttccttcttcttggtcttttggacagatttattcttccaacgttcagttttaagttttttttttttgttttgtatgaaatatcattggcagtggtcgcgctttgagtctgtttcttttctccctgagcgacccgccctctttgttttttttatcttatggtatgatgggtctgttaatacaaaagacccgatatgatttgagggtatatgattatatgaagtgtattgtatttgaatgtttcagactcgaaaaagattctgtagcaaaaggagttttaacacatttgtacttggttttgtttatatgaagtttgttttagtttttt

SEQ ID NO: 28573 - protein, 210 aa, Arabidopsis thaliana
  peptide (1)..(210): Ceres Seq. ID no. 13622028
MGGACGYGDLYSAGYGTMTAALSTALFNDGASCGECYRITCDHAADSRWCLKGASVVITATNFCPPNFALPNNNGGWCNPPLKHFDMAQPAWEKIGIYRGGIVPVVFQRVSCYKKGGVRFRINGRDYFELVNIQNVGGAGSIKSVSIKGSKTGWLAMSRNWGANWQSNAYLDGQALSFSITTTDGATRVFLNVVPSSWSFGQIYSSNVQF

SEQ ID NO: 28574 - protein, 193 aa, Arabidopsis thaliana
  peptide (1)..(193): Ceres Seq. ID no. 13622029
MTAALSTALFNDGASCGECYRITCDHAADSRWCLKGASVVITATNFCPPNFALPNNNGGWCNPPLKHFDMAQPAWEKIGIYRGGIVPVVFQRVSCYKKGGVRFRINGRDYFELVNIQNVGGAGSIKSVSIKGSKTGWLAMSRNWGANWQSNAYLDGQALSFSITTTDGATRVFLNVVPSSWSFGQIYSSNVQF

SEQ ID NO: 28575 - protein, 124 aa, Arabidopsis thaliana
  peptide (1)..(124): Ceres Seq. ID no. 13622030
MAQPAWEKIGIYRGGIVPVVFQRVSCYKKGGVRFRINGRDYFELVNIQNVGGAGSIKSVSIKGSKTGWLAMSRNWGANWQSNAYLDGQALSFSITTTDGATRVFLNVVPSSWSFGQIYSSNVQF

SEQ ID NO: 28576 - DNA, 1748 bp, Arabidopsis thaliana
  misc_feature (1)..(1748): Ceres Seq. ID no. 13580541
  misc_feature (1)..(1748): Ortholog of  Ceres SEQ ID NO 13582285 as cited in SEQ ID NO 59817
atcagaagagtaaataaacatcaaaatccaacaaaccaaactagaaaaatgtcagtagttttactctcttctacttctgcaacaatcaccaaatcccaatccaaaaagattccctttttatctcccaccacaaaattcccattaaaggtctcaatttctccatcaagatcgaaacttttccacaaccctttacgcgtggcggcgccgccgtctgtacccacttcggattcgacggaggagaagcggatcgaagaagaatacggcggagataaggaagaagaagggtctgagtttaagtggagagatcattggtatccagtttctttggttgaggatttggatccgaatgtgccaaccccgttccagctcttgggtcgagaccttgtactctggtttgatcggaatgatcagaaatgggcagcctttgatgatctctgccctcaccggctcgctcctttatctgaaggaaggttggatgagaatggacacttgcaatgttcgtatcatggatggtcatttggtgggtgtggatcttgcactaggattcctcaggctgctacttcaggtcctgaagctcgtgctgttaaatccccgagagcttgtgctattaagttcccgacaatggtgtctcaaggtcttctctttgtgtggcctgatgaaaatggttgggatagagccaattcaattgaaccccctaggttgccggatgatttcgataaaccggaattttcgacggtgacaattcaaagggatcttttctatggatatgatactctcatggaaaatgtatctgatccttcccatatagattttgctcatcacaaggttacaggaagaagagacagagccaaaccattgccgttcaaggtggagtcaagtgggccttggggtttccaaggtgcgaatgatgacagtccaaggataaccgcaaaatttgttgctccgtgctattctatgaacaaaattgagttagatgcgaaactaccaatcgtcggtaatcaaaaatgggtcatttggatttgctcattcaatataccaatggctccaggaaagacccgttccatcgtttgcagcgcccgtaacttctttcagttctctgtaccaggaccagcttggtggcaggttgtaccaagatggtatgaacactggacttcgaacttagtctatgacggagacatgatcgtacttcaaggacaagagaaagtattcctcgctaaatcaatggagtcaccagactacgacgtgaacaaacagtacacaaagctcacattcactccaacccaggcagaccgttttgttctagcattcagaaactggctcagacggcatggtaagagtcagcctgaatggttcggctccaccccgtctaaccaacctctcccttccactgtcttaaccaagcgtcagatgctagatagatttgatcagcatacacaagtatgctcttcctgcaaaggagcttacaacagtttccaaatcctcaagaagtttctcgttggcgcgacggttttctgggccgccacggctggtgttccttctgatgttcagattcgactggttcttgctggtttatcactgatatcagctgcttctgcatatgctttacatgaacaagagaagaactttgtgtttagagattatgtacattctgaaatcgagtagatttgttgtgtatatgtataatcatcatacaaagtacaaacattgtaaatcaaaatccagaggaacttttagcagtttacatctgc

SEQ ID NO: 28577 - protein, 553 aa, Arabidopsis thaliana
  peptide (1)..(553): Ceres Seq. ID no. 13580542
IRRVNKHQNPTNQTRKMSVVLLSSTSATITKSQSKKIPFLSPTTKFPLKVSISPSRSKLFHNPLRVAAPPSVPTSDSTEEKRIEEEYGGDKEEEGSEFKWRDHWYPVSLVEDLDPNVPTPFQLLGRDLVLWFDRNDQKWAAFDDLCPHRLAPLSEGRLDENGHLQCSYHGWSFGGCGSCTRIPQAATSGPEARAVKSPRACAIKFPTMVSQGLLFVWPDENGWDRANSIEPPRLPDDFDKPEFSTVTIQRDLFYGYDTLMENVSDPSHIDFAHHKVTGRRDRAKPLPFKVESSGPWGFQGANDDSPRITAKFVAPCYSMNKIELDAKLPIVGNQKWVIWICSFNIPMAPGKTRSIVCSARNFFQFSVPGPAWWQVVPRWYEHWTSNLVYDGDMIVLQGQEKVFLAKSMESPDYDVNKQYTKLTFTPTQADRFVLAFRNWLRRHGKSQPEWFGSTPSNQPLPSTVLTKRQMLDRFDQHTQVCSSCKGAYNSFQILKKFLVGATVFWAATAGVPSDVQIRLVLAGLSLISAASAYALHEQEKNFVFRDYVHSEIE

SEQ ID NO: 28578 - protein, 537 aa, Arabidopsis thaliana
  peptide (1)..(537): Ceres Seq. ID no. 13580543
MSVVLLSSTSATITKSQSKKIPFLSPTTKFPLKVSISPSRSKLFHNPLRVAAPPSVPTSDSTEEKRIEEEYGGDKEEEGSEFKWRDHWYPVSLVEDLDPNVPTPFQLLGRDLVLWFDRNDQKWAAFDDLCPHRLAPLSEGRLDENGHLQCSYHGWSFGGCGSCTRIPQAATSGPEARAVKSPRACAIKFPTMVSQGLLFVWPDENGWDRANSIEPPRLPDDFDKPEFSTVTIQRDLFYGYDTLMENVSDPSHIDFAHHKVTGRRDRAKPLPFKVESSGPWGFQGANDDSPRITAKFVAPCYSMNKIELDAKLPIVGNQKWVIWICSFNIPMAPGKTRSIVCSARNFFQFSVPGPAWWQVVPRWYEHWTSNLVYDGDMIVLQGQEKVFLAKSMESPDYDVNKQYTKLTFTPTQADRFVLAFRNWLRRHGKSQPEWFGSTPSNQPLPSTVLTKRQMLDRFDQHTQVCSSCKGAYNSFQILKKFLVGATVFWAATAGVPSDVQIRLVLAGLSLISAASAYALHEQEKNFVFRDYVHSEIE

SEQ ID NO: 28579 - protein, 346 aa, Arabidopsis thaliana
  peptide (1)..(346): Ceres Seq. ID no. 13580544
MVSQGLLFVWPDENGWDRANSIEPPRLPDDFDKPEFSTVTIQRDLFYGYDTLMENVSDPSHIDFAHHKVTGRRDRAKPLPFKVESSGPWGFQGANDDSPRITAKFVAPCYSMNKIELDAKLPIVGNQKWVIWICSFNIPMAPGKTRSIVCSARNFFQFSVPGPAWWQVVPRWYEHWTSNLVYDGDMIVLQGQEKVFLAKSMESPDYDVNKQYTKLTFTPTQADRFVLAFRNWLRRHGKSQPEWFGSTPSNQPLPSTVLTKRQMLDRFDQHTQVCSSCKGAYNSFQILKKFLVGATVFWAATAGVPSDVQIRLVLAGLSLISAASAYALHEQEKNFVFRDYVHSEIE

SEQ ID NO: 28580 - DNA, 895 bp, Arabidopsis thaliana
  misc_feature (1)..(895): Ceres Seq. ID no. 12482479
  misc_feature (1)..(895): Ortholog of  Ceres SEQ ID NO 12619999 as cited in SEQ ID NO 66123
  misc_feature (1)..(895): Ortholog of  Ceres SEQ ID NO 13656436 as cited in SEQ ID NO 69154
accactttaccacttatcaaagcttcttcaaagcttgcaaaaaattctccacagtctcgaagaagtagaagaagatgggtaaggaagatgaccgaggagaagagtacctgttcaagattgtcctaatcggcgattccgctgtcggaaaatcgaacttgctgtctcgattttcgcgggatgagttcgacacgaactcaaaagcgacaatcggagtggaatttcagacgcagctggttgaaatcgaagggaaagaagtgaaagctcagatctgggacactgctggtcaagagaggtttagagctgtcacttctgcttattacagaggtgcttttggtgctctcatcgtttatgacatcactcgaggtgacactttcgaaagcgttaaacgttggctccaggaactcaacactcattgtgacacggcagtggcacaaatgctagttgggaataaatgcgatttggaggatataagagcggtgagtgtggaggaagggaaagctcttgcggaggaagaaggattgttctttatggaaacatcggctctggacgccacaaatgtagacaaagcctttgagatcgttatcagagagatcttcaacaatgtcagccgcaaacttctcaactctgatgcttacaaagcagagctttccgttaaccgggtcagccttgtcaacaaccaagatggctccgagagctcttggcggaatccgtcttgttgctcccgatgatttcaatcaatcttgtttttaccagagaaagctttataaggttataattatcatttatgaagtcagacttataataagatacttgcaatctgttttgtcttgatactacacattggttctggccgagggattaaacaaaaatgacctgaccgaatagagaaaatggc

SEQ ID NO: 28581 - protein, 217 aa, Arabidopsis thaliana
  peptide (1)..(217): Ceres Seq. ID no. 12482480
MGKEDDRGEEYLFKIVLIGDSAVGKSNLLSRFSRDEFDTNSKATIGVEFQTQLVEIEGKEVKAQIWDTAGQERFRAVTSAYYRGAFGALIVYDITRGDTFESVKRWLQELNTHCDTAVAQMLVGNKCDLEDIRAVSVEEGKALAEEEGLFFMETSALDATNVDKAFEIVIREIFNNVSRKLLNSDAYKAELSVNRVSLVNNQDGSESSWRNPSCCSR

SEQ ID NO: 28582 - DNA, 597 bp, Arabidopsis thaliana
  misc_feature (1)..(597): Ceres Seq. ID no. 12579462
  misc_feature (1)..(597): Ortholog of  Ceres SEQ ID NO 15179080 as cited in SEQ ID NO 0
aagcgaatagcggaagaacagaaaaagggaaattctgaggaaaggtagaagaatcgagtcggaaaaatggaaacgacgaagagtaacagcagcgagtccgatgtcaacgccaaatgggacgcttgtctcgatctcactgctcgtcgctttgtctactcttccctcggcggcgctttcgccggtcttctcttcttcaggagtccggttacgagatgggcgtcgattgcttttggtgctggaattggtattggttctgcatacacagattgttctcgtgtttttgatgcgtcttcttcaacttcagctactttattagcagctcccaagagtacagagacttctgtatctcaggcagcagaagagtgaagacaacgaggaagcttggaggtaaaaaaccaaacattgatagggttacattacgaaatggtaattgatcttgcaggacaaggcttttgagataacgccattgttaaaaaaaaacttttgcttctcagtgtggttttgtacactgatgtcaaaattgttaatgacccactcattttttttgttttgaaaaatcttatgttcttttacttgagaaataattcctccggtttg

SEQ ID NO: 28583 - protein, 99 aa, Arabidopsis thaliana; identical to SEQ ID NO: 24405
  peptide (1)..(99): Ceres Seq. ID no. 12579463

SEQ ID NO: 28584 - protein, 71 aa, Arabidopsis thaliana; identical to SEQ ID NO: 24406
  peptide (1)..(71): Ceres Seq. ID no. 12579464

SEQ ID NO: 28585 - protein, 56 aa, Arabidopsis thaliana; identical to SEQ ID NO: 24407
  peptide (1)..(56): Ceres Seq. ID no. 12579465

SEQ ID NO: 28586 - DNA, 826 bp, Arabidopsis thaliana
  misc_feature (1)..(826): Ceres Seq. ID no. 12393708
  misc_feature (1)..(826): Ortholog of  Ceres SEQ ID NO 15169763 as cited in SEQ ID NO 1284
  misc_feature (1)..(826): Ortholog of  Ceres SEQ ID NO 12610243 as cited in SEQ ID NO 56206
  misc_feature (1)..(826): Ortholog of  Ceres SEQ ID NO 13661089 as cited in SEQ ID NO 61053
  misc_feature (1)..(826): Ortholog of  Ceres SEQ ID NO 12586495 as cited in SEQ ID NO 64946
ccacaacacaacttcagctttaagacagctaaaactaaatacaaagaaacagagatgggtttggttacagaggaggtgagagctaaggcagagatgtacaccggagatgagatatgtagagagaagacaaagtgtttcctcaaggaaatatctatgcccaatggtttattaccattgaaggatatagaagaggttgggtatgacagagagtcaggtgttgtatggctgaagcagaagaagagcatcactcacaagttcacagagatagataagcttgtctcctatggaaccgaagtcacagccattgttgagaccgggaaaatcaagaagctcactggagtcaaagccaaggaacttcttatttgggtcactatcaatgagatctataccgaggaaccccctaccaagatcacgttcaagacaccgaccacactgtccaggactttcccggtcacagcttttatagtcccagaagaacctgccaaggaggaacctgccaaagaggaacctgccaaggagaagagcagcgaagccaccgaggccaaggaggctgttgcaatcaaggaggctgtcgcagtcaaagaggcggcctaatcagctcagcttcagcagataaaagagacccgaatttttaagtgtacttcaagaatttgaacaaatcatggagagttagtgtttctcactgctctaactatcatgtattatctacctaccacttgttgctgcttgttttacctgtaataagatatcaatatcatcctgttccactaaaacttatccttaattatctataaactacaatacagctggttctgtatgtcacttc

SEQ ID NO: 28587 - protein, 197 aa, Arabidopsis thaliana
  peptide (1)..(197): Ceres Seq. ID no. 12393709
PQHNFSFKTAKTKYKETEMGLVTEEVRAKAEMYTGDEICREKTKCFLKEISMPNGLLPLKDIEEVGYDRESGVVWLKQKKSITHKFTEIDKLVSYGTEVTAIVETGKIKKLTGVKAKELLIWVTINEIYTEEPPTKITFKTPTTLSRTFPVTAFIVPEEPAKEEPAKEEPAKEKSSEATEAKEAVAIKEAVAVKEAA

SEQ ID NO: 28588 - protein, 179 aa, Arabidopsis thaliana
  peptide (1)..(179): Ceres Seq. ID no. 12393710
MGLVTEEVRAKAEMYTGDEICREKTKCFLKEISMPNGLLPLKDIEEVGYDRESGVVWLKQKKSITHKFTEIDKLVSYGTEVTAIVETGKIKKLTGVKAKELLIWVTINEIYTEEPPTKITFKTPTTLSRTFPVTAFIVPEEPAKEEPAKEEPAKEKSSEATEAKEAVAIKEAVAVKEAA

SEQ ID NO: 28589 - protein, 166 aa, Arabidopsis thaliana
  peptide (1)..(166): Ceres Seq. ID no. 12393711
MYTGDEICREKTKCFLKEISMPNGLLPLKDIEEVGYDRESGVVWLKQKKSITHKFTEIDKLVSYGTEVTAIVETGKIKKLTGVKAKELLIWVTINEIYTEEPPTKITFKTPTTLSRTFPVTAFIVPEEPAKEEPAKEEPAKEKSSEATEAKEAVAIKEAVAVKEAA

SEQ ID NO: 28590 - DNA, 1044 bp, Arabidopsis thaliana
  misc_feature (1)..(1044): Ceres Seq. ID no. 13491459
  misc_feature (1)..(1044): Ortholog of  Ceres SEQ ID NO 13638897 as cited in SEQ ID NO 55839
  misc_feature (1)..(1044): Ortholog of  Ceres SEQ ID NO 15177758 as cited in SEQ ID NO 57504
  misc_feature (1)..(1044): Ortholog of  Ceres SEQ ID NO 13596958 as cited in SEQ ID NO 63319
  misc_feature (1)..(1044): Ortholog of  Ceres SEQ ID NO 12614814 as cited in SEQ ID NO 68816
  misc_feature (1)..(1044): Ortholog of  Ceres SEQ ID NO 13624040 as cited in SEQ ID NO 0
atcaacaagtctttctctctctctagacaaccacaagaacacaaaacacacaaaaacaaagaggttctttctttgaagaagaaatggaaaaagttgatgtttatgatgagcttgttaacctaaaggcaacagagctgagattgggattaccagggacagaagaaactgtttcttgtggaaaaagcaacaaaagagttttacctgaagctactgagaaagagattgaatccactggaaaaactgaaaccgcttctcctccaaaggctcagattgttggatggccaccagttagatcttacagaaagaacaatgttcagacaaagaagagtgaatctgaaggtcaaggaaactatgtgaaagtaagtatggatggtgctccatatctaaggaagatagatctaacgatgtataaacaatatccagagttgatgaaatcacttgaaaacatgtttaaattctctgtgggagaatattttgagagagaaggatataaaggctcagactttgtacctacttatgaagacaaagatggtgattggatgcttgttggtgatgttccttgggagatgtttgtttcgtcttgtaagaggctaaggatcatgaaaggatctgaagttaaaggtttaggttgtggtggtctttaacaaacctaattgagagataaagatcaaagagaaagattcaaaaacagagttttttgttctgtttcttgaaacagagtaaatatagctctgaaactgctcgggttcttggggagagatgtttcatacaatcatactttgtgaatgtttacctcatcggtaaaaagagagatgcttaaaatggtcttaagcataaaagtgtgagaaagatctaaatctaaactttagctgtaactctgtctccattaaagagaaaggttttgtggtattagaaagatctaatctgaagattatctttgtgtttttcactttttataatgttcttatcgaacagctttgatgtttttgatgtaattacccatttttctgttctgtttctcttcaaattaagatctgtctttgc

SEQ ID NO: 28591 - protein, 186 aa, Arabidopsis thaliana
  peptide (1)..(186): Ceres Seq. ID no. 13491460
MEKVDVYDELVNLKATELRLGLPGTEETVSCGKSNKRVLPEATEKEIESTGKTETASPPKAQIVGWPPVRSYRKNNVQTKKSESEGQGNYVKVSMDGAPYLRKIDLTMYKQYPELMKSLENMFKFSVGEYFEREGYKGSDFVPTYEDKDGDWMLVGDVPWEMFVSSCKRLRIMKGSEVKGLGCGGL

SEQ ID NO: 28592 - DNA, 1398 bp, Arabidopsis thaliana
  misc_feature (1)..(1398): Ceres Seq. ID no. 13576792
  misc_feature (1)..(1398): Ortholog of  Ceres SEQ ID NO 13623732 as cited in SEQ ID NO 0
atagagaagtgaagagacagagatagttgtgacagagagattcatggcggaagcttgcggagtgagaaggatgaagctgggaagccaaggccttgaggtatctgcgcaaggccttggttgcatgggcctctccgctttctacggtgctcccaagccggaaaatgaagccatcgctctcatccaccacgctattcactccggcgttactctccttgacacctccgatatctacggccctgagaccaatgaagttctcctcggaaaggctctcaaggatggggtgagagaaaaagtggaacttgcgaccaaatttggaatcagttatgcagaggggaaaagagaggtcagaggagatcctgaatatgtaagggctgcttgtgaggcaagtttaaagaggctagatattgcctgcatcgatctctattatcagcatcgtgtcgatactcgtgtccctatcgaaatcactatgggagaactgaagaagctggttgaagagggtaaaataaagtacattggtttgtctgaagcctctgcctcaactatcagaagagcacatgctgttcacccaattactgccgtgcagatagaatggtccttgtggacgagagatgtggaagaagaaatcattccgacctgcagggaacttgggattgggattgttgcttacagtcctctaggacgaggtttcttcgcatctggacccaagcttgttgagaacctagaaaaggatgacttcagaaaggctctaccaagattccaagaggaaaacttagaccacaacaagattgtttatgaaaaagtttgtgcaatatcggagaagaaagggtgcactcctggacaactagccctggcatgggttcatcaccagggagatgacgtttgccctatcccaggaaccactaagatcgagaacctcaaacagaacattggagctttgtcagtgaaactcactcctgaagagatgactgagcttgaggccattgcccaaccaggttttgtgaaaggagatagatacagtaacatgataccaactttcaagaacgctgagacaccaccattgtctgcttggaaagccgcttaaaaccggctgaagtttctacggttgtggtggtgcatcatgacattgaagtggtcttaactttctgtcagctagatcagtgtgttggggaataatggtgcgtcttcgagagtagagtatcattcccacggaaacccaagtatcatggttaatgccttgaagaataaataatgtagagttccccaagtgaaaacttcaattttacatttccatacattgtaaccaaactctataaataaagtgttgtgatacataccttaccaaaaaaggctatctatattgtaaaattcatcttctactcaataacttgtgcttctctc

SEQ ID NO: 28593 - protein, 345 aa, Arabidopsis thaliana
  peptide (1)..(345): Ceres Seq. ID no. 13576793
MAEACGVRRMKLGSQGLEVSAQGLGCMGLSAFYGAPKPENEAIALIHHAIHSGVTLLDTSDIYGPETNEVLLGKALKDGVREKVELATKFGISYAEGKREVRGDPEYVRAACEASLKRLDIACIDLYYQHRVDTRVPIEITMGELKKLVEEGKIKYIGLSEASASTIRRAHAVHPITAVQIEWSLWTRDVEEEIIPTCRELGIGIVAYSPLGRGFFASGPKLVENLEKDDFRKALPRFQEENLDHNKIVYEKVCAISEKKGCTPGQLALAWVHHQGDDVCPIPGTTKIENLKQNIGALSVKLTPEEMTELEAIAQPGFVKGDRYSNMIPTFKNAETPPLSAWKAA

SEQ ID NO: 28594 - protein, 336 aa, Arabidopsis thaliana
  peptide (1)..(336): Ceres Seq. ID no. 13576794
MKLGSQGLEVSAQGLGCMGLSAFYGAPKPENEAIALIHHAIHSGVTLLDTSDIYGPETNEVLLGKALKDGVREKVELATKFGISYAEGKREVRGDPEYVRAACEASLKRLDIACIDLYYQHRVDTRVPIEITMGELKKLVEEGKIKYIGLSEASASTIRRAHAVHPITAVQIEWSLWTRDVEEEIIPTCRELGIGIVAYSPLGRGFFASGPKLVENLEKDDFRKALPRFQEENLDHNKIVYEKVCAISEKKGCTPGQLALAWVHHQGDDVCPIPGTTKIENLKQNIGALSVKLTPEEMTELEAIAQPGFVKGDRYSNMIPTFKNAETPPLSAWKAA

SEQ ID NO: 28595 - protein, 319 aa, Arabidopsis thaliana
  peptide (1)..(319): Ceres Seq. ID no. 13576795
MGLSAFYGAPKPENEAIALIHHAIHSGVTLLDTSDIYGPETNEVLLGKALKDGVREKVELATKFGISYAEGKREVRGDPEYVRAACEASLKRLDIACIDLYYQHRVDTRVPIEITMGELKKLVEEGKIKYIGLSEASASTIRRAHAVHPITAVQIEWSLWTRDVEEEIIPTCRELGIGIVAYSPLGRGFFASGPKLVENLEKDDFRKALPRFQEENLDHNKIVYEKVCAISEKKGCTPGQLALAWVHHQGDDVCPIPGTTKIENLKQNIGALSVKLTPEEMTELEAIAQPGFVKGDRYSNMIPTFKNAETPPLSAWKAA

SEQ ID NO: 28596 - DNA, 2940 bp, Arabidopsis thaliana
  misc_feature (1)..(2940): Ceres Seq. ID no. 13490223
  misc_feature (1)..(2940): Ortholog of  Ceres SEQ ID NO 12609146 as cited in SEQ ID NO 52118
  misc_feature (1)..(2940): Ortholog of  Ceres SEQ ID NO 13638136 as cited in SEQ ID NO 58644
  misc_feature (1)..(2940): Ortholog of  Ceres SEQ ID NO 15177947 as cited in SEQ ID NO 60308
  misc_feature (1)..(2940): Ortholog of  Ceres SEQ ID NO 12585640 as cited in SEQ ID NO 63164
  misc_feature (1)..(2940): Ortholog of  Ceres SEQ ID NO 15225826 as cited in SEQ ID NO 64774
  misc_feature (1)..(2940): Ortholog of  Ceres SEQ ID NO 13599119 as cited in SEQ ID NO 0
ctccgccggcgaacagttttattatctctctctttctgcgtgttccaatttcttccacaaaaccctaattttctcttaaaccctgaaattcgtgtaacctttcaacaatctcttcaattttgttttcgattctgaatccattgtttacgaatctctcatctaaagctacattcttcgttaaatcgtttttaatcgactcgctcactcgtgagttgactcgtcagctgtttccataattgcttattgaatttttatacgatgatgtttcaatatggaagaaactagaggaatttctgatccagagaatgggagttcgagttacggcggtaaaccgccgaatccactctccttctcttcttcctccgccgctgctgccgtttacaggcaaaccttcgacggcgagcgatcgttggcgccgtgtaataagaggtcactggttcgacactcatctctcgtgaagacaatggtgtcagatatatctgttgagaatgagtttactatagagaagaacaagtctgagtttgttcctgctacgcgttctggagcttggtctgatattggctccaggtcaagcatggaagatgcttatctatgcgttgataatttcatggatagctttggccttctgaattctgaggctggtccaagtgccttctatggggtatttgatggacatggtgggaagcatgccgctgagtttgcatgtcaccatataccgaggtacattgttgaagatcaagagtttcctagtgaaatcaataaggtgttatcttcagcatttcttcaaacagacactgccttcttagaggcgtgttcattggatgggagccttgcttcaggaactactgctttggcagctattctttttggaaggtcgttggtggtagcaaacgctggagattgcagagcagtcttatcccgtcagggaaaagccattgaaatgtcaagagaccacaaacccatgagcagtaaggaaaggagacgcattgaagcatcgggtggacatgtattcgatggctatctaaatggacaacttaatgtggctcgagcgctaggtgactttcatatggaaggcatgaagaagaagaaagatggttctgattgtggacctctaattgcagagcctgagctcatgacaacaaaactaacagaagaggatgagttccttataattgggtgtgacggggtttgggatgtgttcatgagccagaatgctgtagattttgccagaaggagactacaggagcacaatgacccggtcatgtgtagtaaggagctggttgaggaagctttgaagaggaagagtgctgataatgtgacggcagtggttgtgtgtcttcagccacagccaccaccgaacttggtagcgccgaggttgagagttcacagaagcttctcggcggagggtttaaaagatttacagagctacttggatggcttgggaaactaattgggggacatgaggatggtgacgaatgattgatttctctgtttttgttttgtcttttcttacaattttatagtttggggtttggaggttttgttctgttaaattctcgcaatttgagtaagttataacatgaggcggcatacaataatttattgtttggtaggatatatttttttgtcacttttgcataataataattctgcttcagtctcatttgttttgtaactagaaagttattccaattcctgcgtttaccgaatatgttgtgttcttgcagaatgacgtatgttagatatgcagtaaactcgagggtcggctttgaccacatcgccacttatcggtttgcggatgctggaaaagtcagtctagtgatgaggctgagtgagccatcgtcagttactattttatcgtgaaactctgaacaacgagattgtcccggatattcaaatgaggaacaaggcccaatagtccgatcaaagtgggctattcgtatcgcttacgaggcctatacgatggtaattgaattcacgcgcattcatcagcgcgtgatttggagttgctcaatttcagatcgcacaggctctgttaatcatctcctcctccgaaagacagagaaagagacaaatcaaattcattcatatcaaagagatagagagaaaatgtccggtgtggctattcatgcgagttcatggggcgcggctctggtgagaatctccccgtacactttctccgccatcggaatcgccatctccatcggcgtctctgttcttggtgctgcctggggaatttacattaccggaagtagtttgatcggtgccgccattgaagctcctcgaatcacttccaagaatctcatcagtgtaatcttctgtgaagccgtggctatatacggtgttattgtggcaatcatattacaaacgaagttggagagtgtaccatcatcaaagatgtatgatgctgagtctctaagagctggatatgcaatctttgcttctggaatcattgttggattcgcaaaccttgtatgcgggttatgtgtaggaatcattggaagcagttgcgcattgtctgatgctcagaactcgacgctctttgttaagattcttgtgattgagatctttgggagtgctctcgggttatttggagttatcgttgggattattatgtcagctcaagctacatggcctacaaaatagagatatataaactggtaacttatggacttgtactctatagtctatacattctatgatctatttttcaaagttccggataaaaattacacttctttgctgttatatctcttgtgtagaagaaaaaccatgtgtgattaagattctccttgagttgaatccctattttttggtaatgttcaaatttggtaataagtcacttggagaaacctcttcatgcttgtactctttggttctcttttgacaaatgataagagagtctgtaaatttttgatgagcattgaatgagctttaaac

SEQ ID NO: 28597 - protein, 392 aa, Arabidopsis thaliana
  peptide (1)..(392): Ceres Seq. ID no. 13490224
MEETRGISDPENGSSSYGGKPPNPLSFSSSSAAAAVYRQTFDGERSLAPCNKRSLVRHSSLVKTMVSDISVENEFTIEKNKSEFVPATRSGAWSDIGSRSSMEDAYLCVDNFMDSFGLLNSEAGPSAFYGVFDGHGGKHAAEFACHHIPRYIVEDQEFPSEINKVLSSAFLQTDTAFLEACSLDGSLASGTTALAAILFGRSLVVANAGDCRAVLSRQGKAIEMSRDHKPMSSKERRRIEASGGHVFDGYLNGQLNVARALGDFHMEGMKKKKDGSDCGPLIAEPELMTTKLTEEDEFLIIGCDGVWDVFMSQNAVDFARRRLQEHNDPVMCSKELVEEALKRKSADNVTAVVVCLQPQPPPNLVAPRLRVHRSFSAEGLKDLQSYLDGLGN

SEQ ID NO: 28598 - protein, 328 aa, Arabidopsis thaliana
  peptide (1)..(328): Ceres Seq. ID no. 13490225
MVSDISVENEFTIEKNKSEFVPATRSGAWSDIGSRSSMEDAYLCVDNFMDSFGLLNSEAGPSAFYGVFDGHGGKHAAEFACHHIPRYIVEDQEFPSEINKVLSSAFLQTDTAFLEACSLDGSLASGTTALAAILFGRSLVVANAGDCRAVLSRQGKAIEMSRDHKPMSSKERRRIEASGGHVFDGYLNGQLNVARALGDFHMEGMKKKKDGSDCGPLIAEPELMTTKLTEEDEFLIIGCDGVWDVFMSQNAVDFARRRLQEHNDPVMCSKELVEEALKRKSADNVTAVVVCLQPQPPPNLVAPRLRVHRSFSAEGLKDLQSYLDGLGN

SEQ ID NO: 28599 - protein, 291 aa, Arabidopsis thaliana
  peptide (1)..(291): Ceres Seq. ID no. 13490226
MEDAYLCVDNFMDSFGLLNSEAGPSAFYGVFDGHGGKHAAEFACHHIPRYIVEDQEFPSEINKVLSSAFLQTDTAFLEACSLDGSLASGTTALAAILFGRSLVVANAGDCRAVLSRQGKAIEMSRDHKPMSSKERRRIEASGGHVFDGYLNGQLNVARALGDFHMEGMKKKKDGSDCGPLIAEPELMTTKLTEEDEFLIIGCDGVWDVFMSQNAVDFARRRLQEHNDPVMCSKELVEEALKRKSADNVTAVVVCLQPQPPPNLVAPRLRVHRSFSAEGLKDLQSYLDGLGN

SEQ ID NO: 28600 - DNA, 703 bp, Arabidopsis thaliana
  misc_feature (1)..(703): Ceres Seq. ID no. 12330136
  misc_feature (1)..(703): Ortholog of  Ceres SEQ ID NO 13661143 as cited in SEQ ID NO 61139
  misc_feature (1)..(703): Ortholog of  Ceres SEQ ID NO 13597234 as cited in SEQ ID NO 64118
atagaagaacaacaacaacaacaacaacaacacacgaagaagaagaagagaagcttatggcaggaggaggaacagaagcgtttcctgatcttggagagcattgccaagaccctgattgcaaattactcgattttctcccttttacatgcgacggctgcaaattggtgttttgtttggagcatagatcatacaagtcacataactgtccgaaatctgatcacgggagcagaacagtttccatctgtgaaacatgttctatagcgattgaaacaactggttttgatgaaagaggaatcaaatctttgcttgagaaacacgaaagatccggagattgtgatccaaacaagaaaaagaaaccaacgtgtcctgtaaaacgttgcaaagagattctgacttttgcgaataaccttacttgcaaagattgtggagtcaagttctgtttgaaacaccggtttccgacagatcatgtttgtaacaagaagaccattaataccgcgggaacaagatcgaggtggaacgagaggtttatggaagctttgagtttaagaaaccagaaaggatgtggaagaggaagctctgtttcatcaaaatctccagcatcagttagatcgttttagtttcttctcttgtgacaatactttgcatcaaccaattccttctttacgttctcatgtattttccattgtttgcaagaaagaagatt

SEQ ID NO: 28601 - protein, 204 aa, Arabidopsis thaliana
  peptide (1)..(204): Ceres Seq. ID no. 12330137
RRTTTTTTTTHEEEEEKLMAGGGTEAFPDLGEHCQDPDCKLLDFLPFTCDGCKLVFCLEHRSYKSHNCPKSDHGSRTVSICETCSIAIETTGFDERGIKSLLEKHERSGDCDPNKKKKPTCPVKRCKEILTFANNLTCKDCGVKFCLKHRFPTDHVCNKKTINTAGTRSRWNERFMEALSLRNQKGCGRGSSVSSKSPASVRSF

SEQ ID NO: 28602 - protein, 186 aa, Arabidopsis thaliana
  peptide (1)..(186): Ceres Seq. ID no. 12330138
MAGGGTEAFPDLGEHCQDPDCKLLDFLPFTCDGCKLVFCLEHRSYKSHNCPKSDHGSRTVSICETCSIAIETTGFDERGIKSLLEKHERSGDCDPNKKKKPTCPVKRCKEILTFANNLTCKDCGVKFCLKHRFPTDHVCNKKTINTAGTRSRWNERFMEALSLRNQKGCGRGSSVSSKSPASVRSF

SEQ ID NO: 28603 - DNA, 983 bp, Arabidopsis thaliana
  misc_feature (1)..(983): Ceres Seq. ID no. 12335989
  misc_feature (1)..(983): Ortholog of  Ceres SEQ ID NO 12627129 as cited in SEQ ID NO 68657
  misc_feature (1)..(983): Ortholog of  Ceres SEQ ID NO 15179538 as cited in SEQ ID NO 0
acggagctctgattcagcaacttcagctcttgaatttttttcgtttcagactaacggatcgaaacttctcagccaaatcagccgcatctaacctcacgcgccgccgcaatggcaactccaccgacgctacctgtcaccaatcagcaagctgttcaatctcagcctccaatcaacacacctgcttttcgtactttcttctcacgtctctccacctcgatccgtgatggcttgtcacagcgtcgtccatggacggagctcatcgatcgtagttccatggcgagacctgaatctctcaccgatgccttgtcccggataaggaagaatctcgcttacttcaaggttaactacgtcgccatcgtctccctcgtactcgccttttcgcttttctctcatcctctctccctccttgtcctcatcggactcctaggcggttggatgtttctctacctcttccgtccctcagatcagccactggtcgtcttcggtcgcactttctctgatcgagagactctgcttgctcttgtgctgtctacgatcgtcgtcgtgtttatgacgagcgttggatctctcttaacctccgcgcttatgattggtgttgcaatcgtttgcgtacacggtgcgtttgtggttccggatgatctcttcttggacgagcaagagcctgcgaatgctggattactctcattccttggaggttctgctacctcagctgctgcagctgtctcagggagagtctaagagctggatttgattcagatctcgtcaattgtggttggtaactccgtactgattttagtgatttgttgttgttgaaatggaatgtagattcgtaacgaagctctacagatttagaactacgaatttttggttgcagtatctgcttcttcttgttgttttatctctttggtggctcgacacttttatgttcagatgtagaaaactcaaagttgatctttctctatcgtttctcctattgtgggatt

SEQ ID NO: 28604 - protein, 209 aa, Arabidopsis thaliana
  peptide (1)..(209): Ceres Seq. ID no. 12335990
MATPPTLPVTNQQAVQSQPPINTPAFRTFFSRLSTSIRDGLSQRRPWTELIDRSSMARPESLTDALSRIRKNLAYFKVNYVAIVSLVLAFSLFSHPLSLLVLIGLLGGWMFLYLFRPSDQPLVVFGRTFSDRETLLALVLSTIVVVFMTSVGSLLTSALMIGVAIVCVHGAFVVPDDLFLDEQEPANAGLLSFLGGSATSAAAAVSGRV

SEQ ID NO: 28605 - protein, 154 aa, Arabidopsis thaliana
  peptide (1)..(154): Ceres Seq. ID no. 12335991
MARPESLTDALSRIRKNLAYFKVNYVAIVSLVLAFSLFSHPLSLLVLIGLLGGWMFLYLFRPSDQPLVVFGRTFSDRETLLALVLSTIVVVFMTSVGSLLTSALMIGVAIVCVHGAFVVPDDLFLDEQEPANAGLLSFLGGSATSAAAAVSGRV

SEQ ID NO: 28606 - DNA, 1601 bp, Arabidopsis thaliana
  misc_feature (1)..(1601): Ceres Seq. ID no. 13491911
  misc_feature (1)..(1601): Ortholog of  Ceres SEQ ID NO 15225627 as cited in SEQ ID NO 64323
gttttgtaattgagacgaaaacttctgatatcacttaaaaacttcacagaaacaacacctcgatctcatcgaagctcctctctcttacatatcatcacttcacatcaaccaaacctacttctgtctctctctctcgctctctatctctcacgctctcacagtagaagaaaaaattagaaaggttgtgagaatggcggctacagcagcttcaagcttacaaattgctacacgaaggccgagcatgtcttcgcctagcaaaattcttaaagcaggaacctacattgttggtgccaatcctggaaacgcttcatgggataaactttcatgcactcgccaattatcaaaccttggatgtttgagaaaccacagtgctgttccaacttgtaagagacccttttctttttccacaagggcaatgtctgaatccagtgaaaacaaggctccttcagggcttccaattgatttgagagggaaaagagctttcattgctggtatagctgatgataatggctatggttgggccatagcaaaatctcttgctgctgctggagctgaaatattggttgggacttgggttcctgcacttaatatatttgagacaagcttgagacgtggaaaattcgaccagtcacgagtgttgcctgacgggtcattgatggagattaagaaggtttatgctttggatgctgtgtttgacaatcctgaagatgtgcctgaagatgtgaaaacgaataagcgatatgcaggatcgtcaaactggaccgtacaggaagctgctgaatgtgtgaaaaaagattttggaagcattgacattcttgtccattcccttgcaaatggcccagaggttagcaaacctcttctggagacatcaaggaaaggctatctcgctgctatctctgcttcgagttactcctttgtttccttgctgaggcattttctgccaattatgaacccaggaggtgcttcaatatctcttacttacattgcctctgaaagaatcattcctgggtatggtggaggtatgagttctgccaaagctgcactagagagtgacacacgggtgcttgcatatgaagctggaaggaaatcaaacattagggtcaacaccatctctgcgggtcctttgggaagccgagcagcaaaagccattgggttcatagacaccatgattgagtattcctacaataatgggcctattcagaaaacactgaccgcagatgaagttgggaatgcagcagccttcttggcatctccattggcctctgccataaccggtgcaaccatatatgtggacaatggtttgaatgcaatggggcgttgcactggacagcccggtgttcaaagaccttaacagcaagaattagagtcttgatcgacgactggactcgagaaattccgtgttttcgtgagcttgcttgtttctttatgagttagtatgtacggcatatgttccccatcggctgtctttttttttctttctttaagagaataaattatggttctaggttgggtcatttagcaactatatatgtagtgatggattattattcctcttatgattgaaaatttgcaagtgagaaaaactatcatgtttcttgtaa

SEQ ID NO: 28607 - protein, 386 aa, Arabidopsis thaliana
  peptide (1)..(386): Ceres Seq. ID no. 13491912
MAATAASSLQIATRRPSMSSPSKILKAGTYIVGANPGNASWDKLSCTRQLSNLGCLRNHSAVPTCKRPFSFSTRAMSESSENKAPSGLPIDLRGKRAFIAGIADDNGYGWAIAKSLAAAGAEILVGTWVPALNIFETSLRRGKFDQSRVLPDGSLMEIKKVYALDAVFDNPEDVPEDVKTNKRYAGSSNWTVQEAAECVKKDFGSIDILVHSLANGPEVSKPLLETSRKGYLAAISASSYSFVSLLRHFLPIMNPGGASISLTYIASERIIPGYGGGMSSAKAALESDTRVLAYEAGRKSNIRVNTISAGPLGSRAAKAIGFIDTMIEYSYNNGPIQKTLTADEVGNAAAFLASPLASAITGATIYVDNGLNAMGRCTGQPGVQRP

SEQ ID NO: 28608 - protein, 369 aa, Arabidopsis thaliana
  peptide (1)..(369): Ceres Seq. ID no. 13491913
MSSPSKILKAGTYIVGANPGNASWDKLSCTRQLSNLGCLRNHSAVPTCKRPFSFSTRAMSESSENKAPSGLPIDLRGKRAFIAGIADDNGYGWAIAKSLAAAGAEILVGTWVPALNIFETSLRRGKFDQSRVLPDGSLMEIKKVYALDAVFDNPEDVPEDVKTNKRYAGSSNWTVQEAAECVKKDFGSIDILVHSLANGPEVSKPLLETSRKGYLAAISASSYSFVSLLRHFLPIMNPGGASISLTYIASERIIPGYGGGMSSAKAALESDTRVLAYEAGRKSNIRVNTISAGPLGSRAAKAIGFIDTMIEYSYNNGPIQKTLTADEVGNAAAFLASPLASAITGATIYVDNGLNAMGRCTGQPGVQRP

SEQ ID NO: 28609 - protein, 311 aa, Arabidopsis thaliana
  peptide (1)..(311): Ceres Seq. ID no. 13491914
MSESSENKAPSGLPIDLRGKRAFIAGIADDNGYGWAIAKSLAAAGAEILVGTWVPALNIFETSLRRGKFDQSRVLPDGSLMEIKKVYALDAVFDNPEDVPEDVKTNKRYAGSSNWTVQEAAECVKKDFGSIDILVHSLANGPEVSKPLLETSRKGYLAAISASSYSFVSLLRHFLPIMNPGGASISLTYIASERIIPGYGGGMSSAKAALESDTRVLAYEAGRKSNIRVNTISAGPLGSRAAKAIGFIDTMIEYSYNNGPIQKTLTADEVGNAAAFLASPLASAITGATIYVDNGLNAMGRCTGQPGVQRP

SEQ ID NO: 28610 - DNA, 1691 bp, Arabidopsis thaliana
  misc_feature (1)..(1691): Ceres Seq. ID no. 12325280
  misc_feature (1)..(1691): Ortholog of  Ceres SEQ ID NO 14314480 as cited in SEQ ID NO 52362
  misc_feature (1)..(1691): Ortholog of  Ceres SEQ ID NO 13593854 as cited in SEQ ID NO 53403
  misc_feature (1)..(1691): Ortholog of  Ceres SEQ ID NO 12581680 as cited in SEQ ID NO 55019
  misc_feature (1)..(1691): Ortholog of  Ceres SEQ ID NO 15172112 as cited in SEQ ID NO 59632
agagagagagagaggctctggaaatcttgtgatccataaattgtctctcttcttttcctctgttctcatatacaaggaaaagggcttcctctgttctgttcctaataaatatctgaaatcaaaaacagagagagtcttttctttttttctttcactctatctctctccacacatgttacttacaacttaatagtttctctatatctccttgagatctccatccagctgttgctttttttactaaacaaaactcctctttgtgtgagtgaatgaatggaagtttccgactctctcttcttttgttttttcaacatacttcattcattcattttagcataacaatcggtggttggggatgatatgagatgaggcccgatgttatcccttttcttcaactttttgacctcttgtctctggccctcttcttccaccacttcccacacttattctgattccaaaggcaaacaagacggccttctctggtacaaagactctgctcaccacctttttggtgatttctccatggccgttgtccaggccaacaacctcctcgaggatcagagccaggtcgaatccggtcctttgaccaccctctcttcttctggtccctatggaacctttgttggcgtctatgacggccacggaggccctgagacctcccgttttgtcaacgatcatctctttcaccatctcaagagattcgcagcggagcaggattccatgtctgtggatgtgataagaaaggcctatgaggcaaccgaagaagggtttctaggggtggtggccaagcagtgggcagtgaagccacatatagcagcggttggctcttgttgcctgatcggtgtggtctgcgatgggaagctttacgtagctaacgttggggactcccgtgcggttttgggaaaggtcatcaaggccacaggtgaggttaatgcgcttcagctctcagctgagcataacgtgagcatagagtctgtgaggcaggaaatgcactccttacaccctgatgactcccatattgtcgtcttaaaacacaatgtctggcgtgttaagggcattattcaggtatcacgatccataggagacgtgtatcttaagaaatcggagttcaacaaggaacctttgtacacaaagtaccgattgcgggagccaatgaaaagacctatcttgagttgggaaccgtcgataaccgtgcatgatctccaaccagacgatcagtttctgatatttgcatcagacggactttgggagcagcttagcaaccaagaggctgttgaaatcgttcagaaccacccaagaaacgggatagcgaggagactggtgaaagctgcgctgcaggaggcagcaaagaaaagagagatgagatattctgatctcaacaagattgagagaggagtcaggaggcatttccatgacgacatcactgtggtcgtcctcttcctggacaccaatctgctcagcagagcctcctctcttaaaaccccttctgtttctatccgtggtggtggtatcactttacctaagaaactttaaaaccaggctccatccatcttctagttatatttatccaaccaaagatatgtgttttttttttctttctttatgtttttttgtctttttgggttcactcttcctggtataagaaatgtataatttaaaactgaagctattgacatgttggatctcatgcc

SEQ ID NO: 28611 - protein, 385 aa, Arabidopsis thaliana
  peptide (1)..(385): Ceres Seq. ID no. 12325281
MLSLFFNFLTSCLWPSSSTTSHTYSDSKGKQDGLLWYKDSAHHLFGDFSMAVVQANNLLEDQSQVESGPLTTLSSSGPYGTFVGVYDGHGGPETSRFVNDHLFHHLKRFAAEQDSMSVDVIRKAYEATEEGFLGVVAKQWAVKPHIAAVGSCCLIGVVCDGKLYVANVGDSRAVLGKVIKATGEVNALQLSAEHNVSIESVRQEMHSLHPDDSHIVVLKHNVWRVKGIIQVSRSIGDVYLKKSEFNKEPLYTKYRLREPMKRPILSWEPSITVHDLQPDDQFLIFASDGLWEQLSNQEAVEIVQNHPRNGIARRLVKAALQEAAKKREMRYSDLNKIERGVRRHFHDDITVVVLFLDTNLLSRASSLKTPSVSIRGGGITLPKKL

SEQ ID NO: 28612 - protein, 336 aa, Arabidopsis thaliana
  peptide (1)..(336): Ceres Seq. ID no. 12325282
MAVVQANNLLEDQSQVESGPLTTLSSSGPYGTFVGVYDGHGGPETSRFVNDHLFHHLKRFAAEQDSMSVDVIRKAYEATEEGFLGVVAKQWAVKPHIAAVGSCCLIGVVCDGKLYVANVGDSRAVLGKVIKATGEVNALQLSAEHNVSIESVRQEMHSLHPDDSHIVVLKHNVWRVKGIIQVSRSIGDVYLKKSEFNKEPLYTKYRLREPMKRPILSWEPSITVHDLQPDDQFLIFASDGLWEQLSNQEAVEIVQNHPRNGIARRLVKAALQEAAKKREMRYSDLNKIERGVRRHFHDDITVVVLFLDTNLLSRASSLKTPSVSIRGGGITLPKKL

SEQ ID NO: 28613 - protein, 270 aa, Arabidopsis thaliana
  peptide (1)..(270): Ceres Seq. ID no. 12325283
MSVDVIRKAYEATEEGFLGVVAKQWAVKPHIAAVGSCCLIGVVCDGKLYVANVGDSRAVLGKVIKATGEVNALQLSAEHNVSIESVRQEMHSLHPDDSHIVVLKHNVWRVKGIIQVSRSIGDVYLKKSEFNKEPLYTKYRLREPMKRPILSWEPSITVHDLQPDDQFLIFASDGLWEQLSNQEAVEIVQNHPRNGIARRLVKAALQEAAKKREMRYSDLNKIERGVRRHFHDDITVVVLFLDTNLLSRASSLKTPSVSIRGGGITLPKKL

SEQ ID NO: 28614 - DNA, 1416 bp, Arabidopsis thaliana
  misc_feature (1)..(1416): Ceres Seq. ID no. 13487514
  misc_feature (1)..(1416): Ortholog of  Ceres SEQ ID NO 12617323 as cited in SEQ ID NO 64129
aattcaacacggattttcaacacagagctgacgttagcatttgtctctgaaatcccagatccgaaaacccaacaatggcgtcagagaacaacggatccagatccgattccgaatccatcaccgctcccaaagctgattccaccgtcgttgaaccgaggaagatagctctgatcaccggaatcaccggccaggacggatcatacctgacggagttccttctcggaaaaggctacgaatttcatggtctgatccgtcgatcatcgaatttcaacacccagcgaatcaaccatatctacatcgatccacacaatgtcaacaaagctctgatgaaactccactacgccgatctcaccgacgcttcctctctccgtcgttggatcgatgtgatcaagcctgacgaagtttataacctagctgctcaatctcacgtcgctgtctccttcgagatccctgattacacagccgatgtagtcgcaaccggtgctctccgtctccttgaagccgtcagatctcacaccatcgacagtggccgtaccgtcaagtattaccaagccggatcttcggagatgtttggatcaactcctcctccacaatcggagacgacgccgtttcaccccagatctccttacgcagcttccaaatgcgctgctcattggtacacagtgaattacagagaggcgtacggtctcttcgcttgtaacggaatcttgttcaatcacgagtcacctcgccgtggtgagaatttcgtgacgaggaagatcacaagagcattgggaaggatcaaggttggtttgcagacgaagctattccttgggaatttgcaagcgtcaagagattggggatttgcaggagattatgtggaagcaatgtggttgatgttgcagcaagagaagccagatgattacgttgtggcaacagaggaaggacacacagtggaagagtttcttgatgtgtcatttgggtatttgggactcaattggaaagattatgttgagattgaccagaggtactttaggcctgctgaagtagataaccttcaaggagatgcaagcaaggcaaaggaagtgttggggtggaaaccacaagtagggtttgagaagcttgtgaagatgatggttgatgaagatcttgagcttgctaagagggagaaagtgcttgttgatgctggatacatggatgctaagcagcaaccttgatttgatcaattatacaaagatggagtttcttacatttatctgcttttatagagttttaaatttcgtttttttttctttctctttttgttgctttggtggttgtttgttgtctttttatgttttagtttctttgttgctttttaagttatctaaattgtttccctccaatgagttgaggatgaaagcgcagtgaattttgaatgaaggagcaaaaagaatc

SEQ ID NO: 28615 - protein, 373 aa, Arabidopsis thaliana
  peptide (1)..(373): Ceres Seq. ID no. 13487515
MASENNGSRSDSESITAPKADSTVVEPRKIALITGITGQDGSYLTEFLLGKGYEFHGLIRRSSNFNTQRINHIYIDPHNVNKALMKLHYADLTDASSLRRWIDVIKPDEVYNLAAQSHVAVSFEIPDYTADVVATGALRLLEAVRSHTIDSGRTVKYYQAGSSEMFGSTPPPQSETTPFHPRSPYAASKCAAHWYTVNYREAYGLFACNGILFNHESPRRGENFVTRKITRALGRIKVGLQTKLFLGNLQASRDWGFAGDYVEAMWLMLQQEKPDDYVVATEEGHTVEEFLDVSFGYLGLNWKDYVEIDQRYFRPAEVDNLQGDASKAKEVLGWKPQVGFEKLVKMMVDEDLELAKREKVLVDAGYMDAKQQP

SEQ ID NO: 28616 - protein, 289 aa, Arabidopsis thaliana
  peptide (1)..(289): Ceres Seq. ID no. 13487516
MKLHYADLTDASSLRRWIDVIKPDEVYNLAAQSHVAVSFEIPDYTADVVATGALRLLEAVRSHTIDSGRTVKYYQAGSSEMFGSTPPPQSETTPFHPRSPYAASKCAAHWYTVNYREAYGLFACNGILFNHESPRRGENFVTRKITRALGRIKVGLQTKLFLGNLQASRDWGFAGDYVEAMWLMLQQEKPDDYVVATEEGHTVEEFLDVSFGYLGLNWKDYVEIDQRYFRPAEVDNLQGDASKAKEVLGWKPQVGFEKLVKMMVDEDLELAKREKVLVDAGYMDAKQQP

SEQ ID NO: 28617 - protein, 209 aa, Arabidopsis thaliana
  peptide (1)..(209): Ceres Seq. ID no. 13487517
MFGSTPPPQSETTPFHPRSPYAASKCAAHWYTVNYREAYGLFACNGILFNHESPRRGENFVTRKITRALGRIKVGLQTKLFLGNLQASRDWGFAGDYVEAMWLMLQQEKPDDYVVATEEGHTVEEFLDVSFGYLGLNWKDYVEIDQRYFRPAEVDNLQGDASKAKEVLGWKPQVGFEKLVKMMVDEDLELAKREKVLVDAGYMDAKQQP

SEQ ID NO: 28618 - DNA, 1257 bp, Arabidopsis thaliana
  misc_feature (1)..(1257): Ceres Seq. ID no. 12334073
  misc_feature (1)..(1257): Ortholog of  Ceres SEQ ID NO 15177787 as cited in SEQ ID NO 59431
  misc_feature (1)..(1257): Ortholog of  Ceres SEQ ID NO 12617197 as cited in SEQ ID NO 63406
  misc_feature (1)..(1257): Ortholog of  Ceres SEQ ID NO 13597804 as cited in SEQ ID NO 64182
  misc_feature (1)..(1257): Ortholog of  Ceres SEQ ID NO 13598565 as cited in SEQ ID NO 65250
  misc_feature (1)..(1257): Ortholog of  Ceres SEQ ID NO 13598597 as cited in SEQ ID NO 65496
  misc_feature (1)..(1257): Ortholog of  Ceres SEQ ID NO 13596284 as cited in SEQ ID NO 68273
  misc_feature (1)..(1257): Ortholog of  Ceres SEQ ID NO 14308995 as cited in SEQ ID NO 0
aaggaagaagaaaaatcgagaaccatcttctcagccgattttagtaaccatcttcttgtttgctccgaacaatcaagagatcgaaaatggctgatgttcacaaaggaaaggtttgtgtaaccggtgccggagggtttttgggttcgtgggtcgtcgatcttcttctctctaaggattacttcgtccatggcactgtcagagaccctgataatgaaaagtatgctcatttgaagaagctcgagaaagctggtgacaaactcaagctcttcaaggctgatttgttggactacggctctcttcaatctgctattgcaggttgcagcggagtcttccatgtcgcttgcccggttccaccagcttcagtccctaatcctgaggtagaattgatcgcacctgctgtggatggcacgctgaatgtgcttaaggcatgcattgaagcgaatgttaagcgtgttgtgtatgtttcctctgtagctgcggctttcatgaaccctatgtggtcaaagaatcaagtattagatgaggcatgttggtctgaccaggaatactgcaagaaaactgagaattggtattgtctggcaaagacacgagcagagagtgaagcttttgaatttgcaaaacgaaccggacttcatctcgtcagtgtttgccctacccttgttttgggacctatactgcagcagaacacagtaaatgctagtagcctggttcttcttaagcttcttaaagagggttttgaaacacgtgataaccaagaacgtcatttggtagatgtgcgtgatgtagctcaagctttactcttggtttatgagaaagcagaagctgaaggaagatacatatgtacatcccacacggttaaagaagagattgtggttgagaagctgaagagtttttatccacattacaactacccaaagaaatacattgatgcggaagatagagtgaaggtgagttcagagaaattgcagaagttgggttggacttaccggccgttggaggaaacacttgtggattctgttgagagctaccggaaagctaagcttgtggactgaaaacttggaaagaagagcaaaatagtgttttagcttcatatgttatagttatagtgttccattctgcacacacacacacactctctcatcgtttactcaataataagagttgtgcattcaccatggatttctgagtttttgttattttctttttagatatcattacttttattaccaatctacaattttctttccataatatttt

SEQ ID NO: 28619 - protein, 321 aa, Arabidopsis thaliana
  peptide (1)..(321): Ceres Seq. ID no. 12334074
MADVHKGKVCVTGAGGFLGSWVVDLLLSKDYFVHGTVRDPDNEKYAHLKKLEKAGDKLKLFKADLLDYGSLQSAIAGCSGVFHVACPVPPASVPNPEVELIAPAVDGTLNVLKACIEANVKRVVYVSSVAAAFMNPMWSKNQVLDEACWSDQEYCKKTENWYCLAKTRAESEAFEFAKRTGLHLVSVCPTLVLGPILQQNTVNASSLVLLKLLKEGFETRDNQERHLVDVRDVAQALLLVYEKAEAEGRYICTSHTVKEEIVVEKLKSFYPHYNYPKKYIDAEDRVKVSSEKLQKLGWTYRPLEETLVDSVESYRKAKLVD

SEQ ID NO: 28620 - protein, 188 aa, Arabidopsis thaliana
  peptide (1)..(188): Ceres Seq. ID no. 12334075
MNPMWSKNQVLDEACWSDQEYCKKTENWYCLAKTRAESEAFEFAKRTGLHLVSVCPTLVLGPILQQNTVNASSLVLLKLLKEGFETRDNQERHLVDVRDVAQALLLVYEKAEAEGRYICTSHTVKEEIVVEKLKSFYPHYNYPKKYIDAEDRVKVSSEKLQKLGWTYRPLEETLVDSVESYRKAKLVD

SEQ ID NO: 28621 - protein, 185 aa, Arabidopsis thaliana
  peptide (1)..(185): Ceres Seq. ID no. 12334076
MWSKNQVLDEACWSDQEYCKKTENWYCLAKTRAESEAFEFAKRTGLHLVSVCPTLVLGPILQQNTVNASSLVLLKLLKEGFETRDNQERHLVDVRDVAQALLLVYEKAEAEGRYICTSHTVKEEIVVEKLKSFYPHYNYPKKYIDAEDRVKVSSEKLQKLGWTYRPLEETLVDSVESYRKAKLVD

SEQ ID NO: 28622 - DNA, 1254 bp, Arabidopsis thaliana
  misc_feature (1)..(1254): Ceres Seq. ID no. 12338154
  misc_feature (1)..(1254): Ortholog of  Ceres SEQ ID NO 12779935 as cited in SEQ ID NO 66774
  misc_feature (1)..(1254): Ortholog of  Ceres SEQ ID NO 13598695 as cited in SEQ ID NO 67368
  misc_feature (1)..(1254): Ortholog of  Ceres SEQ ID NO 13591174 as cited in SEQ ID NO 68289
gcgttagtcggatgcatactcgattaggttcatcgaagaaaatggtggagaaccttgctttctcagctattcttagcaataagaaacaatataatcctgatttttacaattggaatagagtgaaagttagatactgtgacggggcatcattcacaggagatgtagaagcagtgaaccctgctactaatcttcacttcagaggtgctcgagtttggttagccgttatgcaagagctgctagctaaaggcatgataaacgccgagaatgctgttttgtctggctgttctgctggcgggttagcttcgctgatgcattgtgatagtttccgtgctctattaccgatgggaaccaaagtaaaatgtctttcagatgctgggttttttctcaacacaagagacgtctcaggagttcaatacattaaaacatacttcgaagatgttgttactcttcatggatcagcaaagaacttgccgaggtcatgcacatcaagattaactcctgcaatgtgtttctttccgcaatatgtggctcgccagattagaactcctctgttcattcttaatgccgcttatgactcttggcagataaagaacattttggctccgcgagcagctgatccttacggaaaatggcaaagttgtcaactagacatcaagaattgccatccaagtcagatcaaagttatgcaagatttcaggttagagttcttgagtgcagtgataggtttagggagatcttcatcaagagggatgttcatagattcttgctacactcactgccaaaccgagacacaaacttcatggttctggcaagattctccaattctaaaccgaacgacaatagcaaaagctgttggagattgggtttatgacagaacattgtttcagaagatagattgtccttacccttgtaaccctacttgccaccacagggttttcactcctctagatgctcctccaatttaagtgattctaccatatacagtatagatttattattattttgaaaagaaaatttgcttataaatgattcatttgttagatacatatagtgaaatattcctagggtttagctatagaagatgaaaaagaaaaagagtgtgattaattcttgagtgttgagaataagcaataggagtaattttcttcagcacttgtcttgtgtgctgtttaaattgctctgtttctcttctattctgatgtaaaatgcaaattgttacctttatcctatcaaataaagtataattcttttccc

SEQ ID NO: 28623 - protein, 320 aa, Arabidopsis thaliana
  peptide (1)..(320): Ceres Seq. ID no. 12338155
VSRMHTRLGSSKKMVENLAFSAILSNKKQYNPDFYNWNRVKVRYCDGASFTGDVEAVNPATNLHFRGARVWLAVMQELLAKGMINAENAVLSGCSAGGLASLMHCDSFRALLPMGTKVKCLSDAGFFLNTRDVSGVQYIKTYFEDVVTLHGSAKNLPRSCTSRLTPAMCFFPQYVARQIRTPLFILNAAYDSWQIKNILAPRAADPYGKWQSCQLDIKNCHPSQIKVMQDFRLEFLSAVIGLGRSSSRGMFIDSCYTHCQTETQTSWFWQDSPILNRTTIAKAVGDWVYDRTLFQKIDCPYPCNPTCHHRVFTPLDAPPI

SEQ ID NO: 28624 - protein, 317 aa, Arabidopsis thaliana
  peptide (1)..(317): Ceres Seq. ID no. 12338156
MHTRLGSSKKMVENLAFSAILSNKKQYNPDFYNWNRVKVRYCDGASFTGDVEAVNPATNLHFRGARVWLAVMQELLAKGMINAENAVLSGCSAGGLASLMHCDSFRALLPMGTKVKCLSDAGFFLNTRDVSGVQYIKTYFEDVVTLHGSAKNLPRSCTSRLTPAMCFFPQYVARQIRTPLFILNAAYDSWQIKNILAPRAADPYGKWQSCQLDIKNCHPSQIKVMQDFRLEFLSAVIGLGRSSSRGMFIDSCYTHCQTETQTSWFWQDSPILNRTTIAKAVGDWVYDRTLFQKIDCPYPCNPTCHHRVFTPLDAPPI

SEQ ID NO: 28625 - protein, 307 aa, Arabidopsis thaliana
  peptide (1)..(307): Ceres Seq. ID no. 12338157
MVENLAFSAILSNKKQYNPDFYNWNRVKVRYCDGASFTGDVEAVNPATNLHFRGARVWLAVMQELLAKGMINAENAVLSGCSAGGLASLMHCDSFRALLPMGTKVKCLSDAGFFLNTRDVSGVQYIKTYFEDVVTLHGSAKNLPRSCTSRLTPAMCFFPQYVARQIRTPLFILNAAYDSWQIKNILAPRAADPYGKWQSCQLDIKNCHPSQIKVMQDFRLEFLSAVIGLGRSSSRGMFIDSCYTHCQTETQTSWFWQDSPILNRTTIAKAVGDWVYDRTLFQKIDCPYPCNPTCHHRVFTPLDAPPI

SEQ ID NO: 28626 - DNA, 1332 bp, Arabidopsis thaliana
  misc_feature (1)..(1332): Ceres Seq. ID no. 12334081
  misc_feature (1)..(1332): Ortholog of  Ceres SEQ ID NO 14314331 as cited in SEQ ID NO 57390
aaagtcgaagcccttgttagggcttctatacatcaccggcgatattggtttacgcgtcggagagatggttggtgagtgttattgatgacacgagatttcaattctcggcggtgtaacgtgaagtcttaacaatttcattgtccaatggtggaatttacagagagagaggaccgagtttctttggaactcagcgaagaaattatacagagcatggaacctggcgccgttttcagagactataattgcaggatcagctcaattgactttcacaaaacttcgacttgtatggtgacagctagcgacgatgactcaattcgtctctatgatgttgccagcgccacatgtctgaagacaattaatagcaaaaagtatggtgttgatcttgtttgcttcacttctcatcctactactgtcatctactcttccagaaacggatgggacgactctctgaggcttctctctttgcacgataataagtacttgcgctacttcaaaggacatcatgacagagttgtttcgcttagcttgtgttctggtggggaatgcttcatctccggttcccttgatcgtactgttttgctttgggatcaaagggtcgagaaatgccagggtctcttacgagtccaaggaaggcctgctgcagcatatgatgatcaagggttaatttttgcaattgcctttggtggctacataagaatgtttgatgcccgtatgtacgaaaagggtccttttgaaatattttccgttggtggtgatctttctgaggcaaacgttgtgaaatttagtaatgatggaaggctcatgctgcttacaaccatggatggttttattcatgtgcttgactcgtttcgtggaactcttctgtccacatttagtgtgaaaccagtagctggagaatctacattggatgcagcctttagtcctgaagggatgtttgttgtttcaggttcaggtgatggtagtacccatgcatggggtgtaaggagcggaaaacaggtacatagttggatgggtttagggagtgagcccccagtcattaaatggggtccaggaagtcccatgtttgtgacaggctcttccgaacttgcttttgttatacccgacttatcgaaattgccagcttatgccattcggaaataggacgactatcacgtctgtgccatgtaaatgaggcctcatttggccttttggtttcagactttgttgtgggttatgccggtaacttatcccttgcactctgattaatatatatttgggtcttgtaacatgaagataaaccccaagtctttctaatgttgtaattcgtgtaatttacaagtttgactgtttctg

SEQ ID NO: 28627 - protein, 331 aa, Arabidopsis thaliana
  peptide (1)..(331): Ceres Seq. ID no. 12334082
MVEFTEREDRVSLELSEEIIQSMEPGAVFRDYNCRISSIDFHKTSTCMVTASDDDSIRLYDVASATCLKTINSKKYGVDLVCFTSHPTTVIYSSRNGWDDSLRLLSLHDNKYLRYFKGHHDRVVSLSLCSGGECFISGSLDRTVLLWDQRVEKCQGLLRVQGRPAAAYDDQGLIFAIAFGGYIRMFDARMYEKGPFEIFSVGGDLSEANVVKFSNDGRLMLLTTMDGFIHVLDSFRGTLLSTFSVKPVAGESTLDAAFSPEGMFVVSGSGDGSTHAWGVRSGKQVHSWMGLGSEPPVIKWGPGSPMFVTGSSELAFVIPDLSKLPAYAIRK

SEQ ID NO: 28628 - protein, 309 aa, Arabidopsis thaliana
  peptide (1)..(309): Ceres Seq. ID no. 12334083
MEPGAVFRDYNCRISSIDFHKTSTCMVTASDDDSIRLYDVASATCLKTINSKKYGVDLVCFTSHPTTVIYSSRNGWDDSLRLLSLHDNKYLRYFKGHHDRVVSLSLCSGGECFISGSLDRTVLLWDQRVEKCQGLLRVQGRPAAAYDDQGLIFAIAFGGYIRMFDARMYEKGPFEIFSVGGDLSEANVVKFSNDGRLMLLTTMDGFIHVLDSFRGTLLSTFSVKPVAGESTLDAAFSPEGMFVVSGSGDGSTHAWGVRSGKQVHSWMGLGSEPPVIKWGPGSPMFVTGSSELAFVIPDLSKLPAYAIRK

SEQ ID NO: 28629 - protein, 284 aa, Arabidopsis thaliana
  peptide (1)..(284): Ceres Seq. ID no. 12334084
MVTASDDDSIRLYDVASATCLKTINSKKYGVDLVCFTSHPTTVIYSSRNGWDDSLRLLSLHDNKYLRYFKGHHDRVVSLSLCSGGECFISGSLDRTVLLWDQRVEKCQGLLRVQGRPAAAYDDQGLIFAIAFGGYIRMFDARMYEKGPFEIFSVGGDLSEANVVKFSNDGRLMLLTTMDGFIHVLDSFRGTLLSTFSVKPVAGESTLDAAFSPEGMFVVSGSGDGSTHAWGVRSGKQVHSWMGLGSEPPVIKWGPGSPMFVTGSSELAFVIPDLSKLPAYAIRK

SEQ ID NO: 28630 - DNA, 1740 bp, Arabidopsis thaliana
  misc_feature (1)..(1740): Ceres Seq. ID no. 13487482
  misc_feature (1)..(1740): Ortholog of  Ceres SEQ ID NO 15176532 as cited in SEQ ID NO 58184
  misc_feature (1)..(1740): Ortholog of  Ceres SEQ ID NO 13597546 as cited in SEQ ID NO 65017
  misc_feature (1)..(1740): Ortholog of  Ceres SEQ ID NO 14308015 as cited in SEQ ID NO 65798
  misc_feature (1)..(1740): Ortholog of  Ceres SEQ ID NO 15176077 as cited in SEQ ID NO 66728
  misc_feature (1)..(1740): Ortholog of  Ceres SEQ ID NO 14307908 as cited in SEQ ID NO 67189
  misc_feature (1)..(1740): Ortholog of  Ceres SEQ ID NO 13654353 as cited in SEQ ID NO 68318
aaccaaagactcttaaccatctcttctctctctctttgaaaacatagcacacacaaaaaaaagacagagcaaaaaaacacacaaagatgggcataatgatgatgattttgggtcttcttgtgatcattgtttgtttatgtactgctcttctccgatggaaccagatgcgatattctaagaaaggtcttcctcctggaaccatgggctggccaatatttggtgaaacgactgagtttcttaaacaaggaccagatttcatgaaaaaccaaagactaagatatgggagtttcttcaagtctcacattcttggttgcccaacaatagtctcaatggacgcagagttaaacagatacattctaatgaatgaatcgaaaggacttgttgccggttacccgcaatctatgcttgatattctagggacatgcaacatagctgcggttcatggcccgagccaccggctaatgagaggctcgttgctttctttaataagcccaaccatgatgaaagaccatctcttgcctaagattgatgatttcatgagaaactatctttgtggttgggatgatcttgagacagttgatatccaagaaaagaccaaacatatggcatttttatcatcgttgttacaaatagctgagactttgaaaaaaccagaggttgaagaatatagaacagagtttttcaagcttgttgtgggaactctatcggtcccgatcgatatcccgggaacgaattaccgcagtggagtccaagcaagaaacaacatcgataggttattgacagaactgatgcaagaaagaaaagagtctggagaaactttcacagacatgttgggttacttgatgaagaaggaagataaccgatacttgttaaccgataaagagataagagatcaagtggtaacgatcttgtattccggttatgagactgtctctacaacctccatgatggctcttaagtatctccatgatcatccaaaagctcttgaagaactcagaagagaacatttggctataagggagagaaaacgacctgacgaaccgctcactctcgacgatattaaatcgatgaaattcactcgagctgtgatctttgagacatcaagattggcaacgattgttaatggtgtccttaggaaaactactcacgacttagaactcaacggttatttaatcccaaaaggttggagaatttacgtatacacaagagagattaactatgatacatctctttatgaagatccaatgatctttaacccatggagatggatggaaaagagcttagaatcaaagagctatttcttactctttggaggtggagttaggctttgccctggaaaggaactaggaatctcggaagtctcaagcttccttcactactttgttacaaaatatagatgggaagagaatggagaagacaaattaatggtctttccaagagtttctgcaccaaaaggataccatcttaagtgttcaccttactgactagttttgtcctaatattgaaaaatgtgtaaataaatctattaagggtcattttgtagggctaattaacctattttatctattaaatctctcaagatcatagaggagatggataatgtacagagagaaagagagaagaagaaaatggaatatagaaaaaaataaaatatttgaaatgttgagcttagtctcttatcttgtaaatttgtaacccataaatttttacatttcataattacgttctgtgttttttttt

SEQ ID NO: 28631 - protein, 465 aa, Arabidopsis thaliana
  peptide (1)..(465): Ceres Seq. ID no. 13487483
MGIMMMILGLLVIIVCLCTALLRWNQMRYSKKGLPPGTMGWPIFGETTEFLKQGPDFMKNQRLRYGSFFKSHILGCPTIVSMDAELNRYILMNESKGLVAGYPQSMLDILGTCNIAAVHGPSHRLMRGSLLSLISPTMMKDHLLPKIDDFMRNYLCGWDDLETVDIQEKTKHMAFLSSLLQIAETLKKPEVEEYRTEFFKLVVGTLSVPIDIPGTNYRSGVQARNNIDRLLTELMQERKESGETFTDMLGYLMKKEDNRYLLTDKEIRDQVVTILYSGYETVSTTSMMALKYLHDHPKALEELRREHLAIRERKRPDEPLTLDDIKSMKFTRAVIFETSRLATIVNGVLRKTTHDLELNGYLIPKGWRIYVYTREINYDTSLYEDPMIFNPWRWMEKSLESKSYFLLFGGGVRLCPGKELGISEVSSFLHYFVTKYRWEENGEDKLMVFPRVSAPKGYHLKCSPY

SEQ ID NO: 28632 - protein, 462 aa, Arabidopsis thaliana
  peptide (1)..(462): Ceres Seq. ID no. 13487484
MMMILGLLVIIVCLCTALLRWNQMRYSKKGLPPGTMGWPIFGETTEFLKQGPDFMKNQRLRYGSFFKSHILGCPTIVSMDAELNRYILMNESKGLVAGYPQSMLDILGTCNIAAVHGPSHRLMRGSLLSLISPTMMKDHLLPKIDDFMRNYLCGWDDLETVDIQEKTKHMAFLSSLLQIAETLKKPEVEEYRTEFFKLVVGTLSVPIDIPGTNYRSGVQARNNIDRLLTELMQERKESGETFTDMLGYLMKKEDNRYLLTDKEIRDQVVTILYSGYETVSTTSMMALKYLHDHPKALEELRREHLAIRERKRPDEPLTLDDIKSMKFTRAVIFETSRLATIVNGVLRKTTHDLELNGYLIPKGWRIYVYTREINYDTSLYEDPMIFNPWRWMEKSLESKSYFLLFGGGVRLCPGKELGISEVSSFLHYFVTKYRWEENGEDKLMVFPRVSAPKGYHLKCSPY

SEQ ID NO: 28633 - protein, 461 aa, Arabidopsis thaliana
  peptide (1)..(461): Ceres Seq. ID no. 13487485
MMILGLLVIIVCLCTALLRWNQMRYSKKGLPPGTMGWPIFGETTEFLKQGPDFMKNQRLRYGSFFKSHILGCPTIVSMDAELNRYILMNESKGLVAGYPQSMLDILGTCNIAAVHGPSHRLMRGSLLSLISPTMMKDHLLPKIDDFMRNYLCGWDDLETVDIQEKTKHMAFLSSLLQIAETLKKPEVEEYRTEFFKLVVGTLSVPIDIPGTNYRSGVQARNNIDRLLTELMQERKESGETFTDMLGYLMKKEDNRYLLTDKEIRDQVVTILYSGYETVSTTSMMALKYLHDHPKALEELRREHLAIRERKRPDEPLTLDDIKSMKFTRAVIFETSRLATIVNGVLRKTTHDLELNGYLIPKGWRIYVYTREINYDTSLYEDPMIFNPWRWMEKSLESKSYFLLFGGGVRLCPGKELGISEVSSFLHYFVTKYRWEENGEDKLMVFPRVSAPKGYHLKCSPY

SEQ ID NO: 28634 - DNA, 1450 bp, Arabidopsis thaliana; identical to SEQ ID NO: 24649
  misc_feature (1)..(1450): Ceres Seq. ID no. 12682693
  misc_feature (1)..(1450): Ortholog of  Ceres SEQ ID NO 13654728 as cited in SEQ ID NO 62302
  misc_feature (1)..(1450): Ortholog of  Ceres SEQ ID NO 13597134 as cited in SEQ ID NO 64501
  misc_feature (1)..(1450): Ortholog of  Ceres SEQ ID NO 15174333 as cited in SEQ ID NO 0
  misc_feature (1)..(1450): Ortholog of  Ceres SEQ ID NO 15179047 as cited in SEQ ID NO 0

SEQ ID NO: 28635 - protein, 278 aa, Arabidopsis thaliana; identical to SEQ ID NO: 23413
  peptide (1)..(278): Ceres Seq. ID no. 12682694

SEQ ID NO: 28636 - protein, 260 aa, Arabidopsis thaliana; identical to SEQ ID NO: 23414
  peptide (1)..(260): Ceres Seq. ID no. 12682695

SEQ ID NO: 28637 - protein, 219 aa, Arabidopsis thaliana; identical to SEQ ID NO: 23415
  peptide (1)..(219): Ceres Seq. ID no. 12682696

SEQ ID NO: 28638 - DNA, 1063 bp, Arabidopsis thaliana
  misc_feature (1)..(1063): Ceres Seq. ID no. 13486755
  misc_feature (1)..(1063): Ortholog of  Ceres SEQ ID NO 15180793 as cited in SEQ ID NO 0
aaatcacttgctagtactcttcacactctctacaatgttgtctatgctctggttccttctatctcttctctctcttcttctacttccttgtctccgaccttgctttcctgctaaaggatctctgaaaaacaaaaagaagattgacaagggaacttatgtggtcggagaggaggagacacctaaagagcttcagagagagctgatgccgagacacgtggcagtgataatggacggaaaccggagatgggctaaacagaccggattgttgacgtcacaaggctacgaggctggagctaaacggcttctcgagttcgctgacctctgcttcaaactagggataaatactgtctcagcttttgctttctccactgagaattggggaagacacaagattgaagtcaaatgcttgatgtatttgttccaacgttacctcaagtcaaagatccaatttttccagagcaaggaaatccgagtttctgttatcgggaatcttgcgaagatccctgagtctctcctccgaacagttcacgagttagaggaagctacaaagagttacaagaagaagcatctcatcttggccatagattacagcgggagattcgacatcttgggtgcttgcaagaacattgtgaagaaatcagaacaaggtttgatccgagaggaagacgtggacgagacgttgttcgagagagagcttcagactcggtgtaccgagttcccaagtcctgatctcttgattaggactagtggggaacagaggattagtaacttcttcttgtggcagctcgcttataccgagtttttcttttcgcctgtactttggcctgatttcgataagcagaagtttatagaggccctggtttcgtatcagcgcagggatagacgatttggctcccggctttgatccacatttgatcctatggtctgtcatgtttcctctgttttgttctgtttctctctgtgtctttatgttcatctgacttttgcagaaataattatactgtctagtctctcgtagatcaatgtggtatttccaatgaagtaacatattttatgtgttgcg

SEQ ID NO: 28639 - protein, 300 aa, Arabidopsis thaliana
  peptide (1)..(300): Ceres Seq. ID no. 13486756
NHLLVLFTLSTMLSMLWFLLSLLSLLLLPCLRPCFPAKGSLKNKKKIDKGTYVVGEEETPKELQRELMPRHVAVIMDGNRRWAKQTGLLTSQGYEAGAKRLLEFADLCFKLGINTVSAFAFSTENWGRHKIEVKCLMYLFQRYLKSKIQFFQSKEIRVSVIGNLAKIPESLLRTVHELEEATKSYKKKHLILAIDYSGRFDILGACKNIVKKSEQGLIREEDVDETLFERELQTRCTEFPSPDLLIRTSGEQRISNFFLWQLAYTEFFFSPVLWPDFDKQKFIEALVSYQRRDRRFGSRL

SEQ ID NO: 28640 - protein, 289 aa, Arabidopsis thaliana
  peptide (1)..(289): Ceres Seq. ID no. 13486757
MLSMLWFLLSLLSLLLLPCLRPCFPAKGSLKNKKKIDKGTYVVGEEETPKELQRELMPRHVAVIMDGNRRWAKQTGLLTSQGYEAGAKRLLEFADLCFKLGINTVSAFAFSTENWGRHKIEVKCLMYLFQRYLKSKIQFFQSKEIRVSVIGNLAKIPESLLRTVHELEEATKSYKKKHLILAIDYSGRFDILGACKNIVKKSEQGLIREEDVDETLFERELQTRCTEFPSPDLLIRTSGEQRISNFFLWQLAYTEFFFSPVLWPDFDKQKFIEALVSYQRRDRRFGSRL

SEQ ID NO: 28641 - protein, 286 aa, Arabidopsis thaliana
  peptide (1)..(286): Ceres Seq. ID no. 13486758
MLWFLLSLLSLLLLPCLRPCFPAKGSLKNKKKIDKGTYVVGEEETPKELQRELMPRHVAVIMDGNRRWAKQTGLLTSQGYEAGAKRLLEFADLCFKLGINTVSAFAFSTENWGRHKIEVKCLMYLFQRYLKSKIQFFQSKEIRVSVIGNLAKIPESLLRTVHELEEATKSYKKKHLILAIDYSGRFDILGACKNIVKKSEQGLIREEDVDETLFERELQTRCTEFPSPDLLIRTSGEQRISNFFLWQLAYTEFFFSPVLWPDFDKQKFIEALVSYQRRDRRFGSRL

SEQ ID NO: 28642 - DNA, 1521 bp, Arabidopsis thaliana
  misc_feature (1)..(1521): Ceres Seq. ID no. 13580594
  misc_feature (1)..(1521): Ortholog of  Ceres SEQ ID NO 12625388 as cited in SEQ ID NO 63299
  misc_feature (1)..(1521): Ortholog of  Ceres SEQ ID NO 15179860 as cited in SEQ ID NO 66716
gtgaacaagattaaaaagacgacttctcttttaacttattcctcctctgcttcttcaagatccattgtctgcaatttcaatcccttgtctcgtcatggattccgtcttctctaacgttgctcgtgctcccgaagatcctattctcggtgtaactgttgcttacaacaatgatcctagtcctgttaagatcaatttgggtgtcggtgcctaccgaactgaggaagggaagcctcttgttcttgatgtggtgcgtaaggcagagcaacagctagtgaacgatccgtctcgggtcaaggaatacattcccattgttggtatttccgattttaacaagttaagcgccaagctcatcttaggtgctgacagtcctgcgattacagaaagtagagttactacagtccagtgcttgtctggtactggttcgttgagagttggggctgagtttctcaaaacacactaccaccaaagtgtcatttacattccaaaaccaacttgggggaaccatcccaaagttttcaacttggcaggcttgtctgtggagtatttccgctactatgatcctgcaacccgtggtcttgacttcaaaggcttgctcgaggatcttggcgctgcaccatctggagctattgtcttacttcatgcatgtgcacacaatcccactggagttgacccaacctctgaacagtgggaacagattcgacagctgatgagatctaaaagcttattacccttttttgatagtgcatatcagggttttgctagtggtagccttgacacagatgcacaatctgtccgtacatttgttgctgatggcggtgaatgcttgatagctcaaagttacgccaaaaatatgggactttatggggagcgtgttggtgcccttagcattgtctgcaagtcagcagatgtggctagtaaggttgagagccaggtgaagcttgttgtgcggcccatgtattcgagcccccctattcatggagcatcaattgttgccaccattctaaaaagcagtgatatgtacaacaactggaccatcgagctgaaagaaatggctgaccgtataaagagcatgcgccaacagttatttgaagctatacaagctagaggtacacctggtgactggagtcatattatcaaacagattgggatgtttacatttactggattgaacaaggagcaagttgaattcatgaccaaagagttccacatttacatgacctctgatgggagaataagcatggcaggtctaagttcgaagacagtgcctcaccttgccgatgctatgcatgctgcagtgacccgcctcggctaaactagcgaccatacatttttttgctgtttctacaaataaaatgggacaaaaaaaaagaacaccgtttttgttggcttatatactatggtttttttctgatggtaccatatgtttcctcatgtcttttgactaaagatggttgaaccaaaaccaaagtgaggattgtgacattgagatctaccgtttctaaggaaaatattggttacttt

SEQ ID NO: 28643 - protein, 405 aa, Arabidopsis thaliana
  peptide (1)..(405): Ceres Seq. ID no. 15222734
MDSVFSNVARAPEDPILGVTVAYNNDPSPVKINLGVGAYRTEEGKPLVLDVVRKAEQQLVNDPSRVKEYIPIVGISDFNKLSAKLILGADSPAITESRVTTVQCLSGTGSLRVGAEFLKTHYHQSVIYIPKPTWGNHPKVFNLAGLSVEYFRYYDPATRGLDFKGLLEDLGAAPSGAIVLLHACAHNPTGVDPTSEQWEQIRQLMRSKSLLPFFDSAYQGFASGSLDTDAQSVRTFVADGGECLIAQSYAKNMGLYGERVGALSIVCKSADVASKVESQVKLVVRPMYSSPPIHGASIVATILKSSDMYNNWTIELKEMADRIKSMRQQLFEAIQARGTPGDWSHIIKQIGMFTFTGLNKEQVEFMTKEFHIYMTSDGRISMAGLSSKTVPHLADAMHAAVTRLG

SEQ ID NO: 28644 - DNA, 1803 bp, Arabidopsis thaliana
  misc_feature (1)..(1803): Ceres Seq. ID no. 13494313
  misc_feature (1)..(1803): Ortholog of  Ceres SEQ ID NO 13600098 as cited in SEQ ID NO 0
acactaatattttaactctccccactctttgccttgcccttggctctagaaccgaacgtgactctccagatagacttttggagtcacaacattgagtttgaagaggagggaagaagtgagctagggattggttcagagtgaacataaatggctctcaaggcattagactacgatactctgaatgaaaacgtcaagaagtgtcagtatgccgtaagaggtgaactttatctccgagcttctgagctgcagaaagaaggcaaaaagattattttcacaaacgttgggaaccctcatgctttaggacagaagccattgacatttcctcgccaggtggttgcgctttgccaagctccgtttctactagatgacccaaatgttggaatgctatttccagctgatgctattgcaagagctaaacattatctttccttgacttcaggcggtttaggtgcttacagtgattcaagaggccttccaggagttaggaaagaggttgctgagttcattcaacggcgtgatgggtatccaagtgacccagaactcatctttctcactgatggagctagcaaaggtgtgatgcaaatcttgaattgtgttatacgcggtaatggagatgggattctagttccggttccacagtatccactttactcagctaccatatcactgttaggtggtactcttgttccttactatcttgatgagtctgaaaactggggacttgatgttgctaaccttcgacaatccgttgctcaggctcgttctcaagggataacagtaagggcaatggtgatcattaaccctgggaacccaactggccagtgtctaagcgaagctaacataagagagatattgaagttctgttataacgagaaactggttcttctgggagacgaggtttatcagcagaacatataccaggatgagcgtccctttatcagctccaagaaggttttgatggaaatgggttcgccgttcagcaaggaagttcagcttgtatcttttcacacagtctctaaaggatattggggtgaatgtggacagcgaggtggatactttgagatgaccaacctccctccaagggttgttgaggagatatacaaggttgcatcaattgccctcagccctaatgtctctgcgcaaatctttatgggtttgatggttaatcctccaaagcctggagacatttcatatgaccagttcgcccgtgaaagcaaggggattcttgaatctttgagaagaagagcaaggctcatgacagatggattcaacagctgcaaaaacgtcgtgtgcaatttcacagaaggtgcaatgtattcgtttcctcaaatacggttaccaacgggagctctccaagctgcaaaacaagctggaaaagtgccagacgttttctactgtctcaagctcttagaagccacaggaatctccacagtacctggctctggatttggacagaaagaaggtgtgttccatctgaggacaacaatcctgccagcagaagatgagatgccggagatcatggatagcttcaagaagttcaacgacgagttcatgactcagtatgataataactttggttattcgaaaatgtgattacttcttcttctgaacgactattgtgttctgctacactctttaaagctaaatctctgtagtacactctttctctttgccctattctataaaccatatctctctctttgtgtctcttttttttgggtgtaaactctctcttgtgtctctatttctattttcaattggaaactgattaagatcttttctcaatgaaatgaagtttaggcc

SEQ ID NO: 28645 - protein, 481 aa, Arabidopsis thaliana
  peptide (1)..(481): Ceres Seq. ID no. 13494314
MALKALDYDTLNENVKKCQYAVRGELYLRASELQKEGKKIIFTNVGNPHALGQKPLTFPRQVVALCQAPFLLDDPNVGMLFPADAIARAKHYLSLTSGGLGAYSDSRGLPGVRKEVAEFIQRRDGYPSDPELIFLTDGASKGVMQILNCVIRGNGDGILVPVPQYPLYSATISLLGGTLVPYYLDESENWGLDVANLRQSVAQARSQGITVRAMVIINPGNPTGQCLSEANIREILKFCYNEKLVLLGDEVYQQNIYQDERPFISSKKVLMEMGSPFSKEVQLVSFHTVSKGYWGECGQRGGYFEMTNLPPRVVEEIYKVASIALSPNVSAQIFMGLMVNPPKPGDISYDQFARESKGILESLRRRARLMTDGFNSCKNVVCNFTEGAMYSFPQIRLPTGALQAAKQAGKVPDVFYCLKLLEATGISTVPGSGFGQKEGVFHLRTTILPAEDEMPEIMDSFKKFNDEFMTQYDNNFGYSKM

SEQ ID NO: 28646 - protein, 403 aa, Arabidopsis thaliana
  peptide (1)..(403): Ceres Seq. ID no. 13494315
MLFPADAIARAKHYLSLTSGGLGAYSDSRGLPGVRKEVAEFIQRRDGYPSDPELIFLTDGASKGVMQILNCVIRGNGDGILVPVPQYPLYSATISLLGGTLVPYYLDESENWGLDVANLRQSVAQARSQGITVRAMVIINPGNPTGQCLSEANIREILKFCYNEKLVLLGDEVYQQNIYQDERPFISSKKVLMEMGSPFSKEVQLVSFHTVSKGYWGECGQRGGYFEMTNLPPRVVEEIYKVASIALSPNVSAQIFMGLMVNPPKPGDISYDQFARESKGILESLRRRARLMTDGFNSCKNVVCNFTEGAMYSFPQIRLPTGALQAAKQAGKVPDVFYCLKLLEATGISTVPGSGFGQKEGVFHLRTTILPAEDEMPEIMDSFKKFNDEFMTQYDNNFGYSKM

SEQ ID NO: 28647 - protein, 338 aa, Arabidopsis thaliana
  peptide (1)..(338): Ceres Seq. ID no. 13494316
MQILNCVIRGNGDGILVPVPQYPLYSATISLLGGTLVPYYLDESENWGLDVANLRQSVAQARSQGITVRAMVIINPGNPTGQCLSEANIREILKFCYNEKLVLLGDEVYQQNIYQDERPFISSKKVLMEMGSPFSKEVQLVSFHTVSKGYWGECGQRGGYFEMTNLPPRVVEEIYKVASIALSPNVSAQIFMGLMVNPPKPGDISYDQFARESKGILESLRRRARLMTDGFNSCKNVVCNFTEGAMYSFPQIRLPTGALQAAKQAGKVPDVFYCLKLLEATGISTVPGSGFGQKEGVFHLRTTILPAEDEMPEIMDSFKKFNDEFMTQYDNNFGYSKM

SEQ ID NO: 28648 - DNA, 920 bp, Arabidopsis thaliana
  misc_feature (1)..(920): Ceres Seq. ID no. 13580545
  misc_feature (1)..(920): Ortholog of  Ceres SEQ ID NO 15174240 as cited in SEQ ID NO 61866
aaaaattcagattccaaatttctcaaactcctaaatcgttctctcaaatctctagtcgtgatcaagatgcagatctttgttaagactctcaccggaaagactatcaccctcgaggtggaaagctctgacaccatcgacaacgttaaggccaagatccaggataaggaaggcattcctccggatcagcagaggcttattttcgccggaaaacagctagaggatggccgtacgttggctgattacaatatccagaaggartccaccctycayttggttctcaggctccgtggtggtatgcagatttttgtcaagacsttracgggaaagacgatcactyttgaggtggagagytctgacaccatcgacaaygtcaargccaagatccargacaargagggtatyccwccggaccagcagagrttgatcttcgcyggaaarcaasttggargatggyagaactcttggctgactacaacatycagaaggagtcyacacttcacttggtgttgcgkctccgtggaggtatgcagattttcgtgaagactctsactggaaagaccatcactcttgargtkgagagctcygacaccatygacaacgtgaaggcyaagatccaggacaaggarggtatccctccggaccagcagmgrtytsatcttcgctggaaaacagcttgaggatggtmgwactttggcygactacaacatccaaaaggagtctacccttcacttggtgctaaggctccgtggtggtttctaaaaacttatctctgttatgaatcagaagaagttcatgtctcgtttcatttaaaactttggtggtttgtgttttggggccttgtaaagcccctgatgaataattgttcaactatgtttccgttcctgtgttatacctttctttctaatgagtaatgacatacc

SEQ ID NO: 28649 - protein, 179 aa, Arabidopsis thaliana
  peptide (1)..(179): Ceres Seq. ID no. 15222729
  misc_feature (86)..(86): Xaa is any aa, unknown or other
  misc_feature (89)..(89): Xaa is any aa, unknown or other
  misc_feature (90)..(90): Xaa is any aa, unknown or other
  misc_feature (105)..(105): Xaa is any aa, unknown or other
  misc_feature (106)..(106): Xaa is any aa, unknown or other
  misc_feature (113)..(113): Xaa is any aa, unknown or other
  misc_feature (117)..(117): Xaa is any aa, unknown or other
  misc_feature (123)..(123): Xaa is any aa, unknown or other
  misc_feature (125)..(125): Xaa is any aa, unknown or other
  misc_feature (129)..(129): Xaa is any aa, unknown or other
  misc_feature (131)..(131): Xaa is any aa, unknown or other
  misc_feature (134)..(134): Xaa is any aa, unknown or other
  misc_feature (135)..(135): Xaa is any aa, unknown or other
  misc_feature (140)..(140): Xaa is any aa, unknown or other
  misc_feature (144)..(144): Xaa is any aa, unknown or other
  misc_feature (146)..(146): Xaa is any aa, unknown or other
  misc_feature (148)..(148): Xaa is any aa, unknown or other
  misc_feature (150)..(150): Xaa is any aa, unknown or other
  misc_feature (152)..(152): Xaa is any aa, unknown or other
  misc_feature (160)..(160): Xaa is any aa, unknown or other
  misc_feature (164)..(164): Xaa is any aa, unknown or other
  misc_feature (171)..(171): Xaa is any aa, unknown or other
KNSDSKFLKLLNRSLKSLVVIKMQIFVKTLTGKTITLEVESSDTIDNVKAKIQDKEGIPPDQQRLIFAGKQLEDGRTLADYNIQKXSTXXLVLRLRGGMQIFVKXXTGKTITXEVEXSDTIDXVXAKIXDXEGXXPDQQXLIFXGXQXGXWXNSWLTTTXRRSXHFTWCCXSVEVCRFS

SEQ ID NO: 28650 - protein, 157 aa, Arabidopsis thaliana
  peptide (1)..(157): Ceres Seq. ID no. 15222730
  misc_feature (64)..(64): Xaa is any aa, unknown or other
  misc_feature (67)..(67): Xaa is any aa, unknown or other
  misc_feature (68)..(68): Xaa is any aa, unknown or other
  misc_feature (83)..(83): Xaa is any aa, unknown or other
  misc_feature (84)..(84): Xaa is any aa, unknown or other
  misc_feature (91)..(91): Xaa is any aa, unknown or other
  misc_feature (95)..(95): Xaa is any aa, unknown or other
  misc_feature (101)..(101): Xaa is any aa, unknown or other
  misc_feature (103)..(103): Xaa is any aa, unknown or other
  misc_feature (107)..(107): Xaa is any aa, unknown or other
  misc_feature (109)..(109): Xaa is any aa, unknown or other
  misc_feature (112)..(112): Xaa is any aa, unknown or other
  misc_feature (113)..(113): Xaa is any aa, unknown or other
  misc_feature (118)..(118): Xaa is any aa, unknown or other
  misc_feature (122)..(122): Xaa is any aa, unknown or other
  misc_feature (124)..(124): Xaa is any aa, unknown or other
  misc_feature (126)..(126): Xaa is any aa, unknown or other
  misc_feature (128)..(128): Xaa is any aa, unknown or other
  misc_feature (130)..(130): Xaa is any aa, unknown or other
  misc_feature (138)..(138): Xaa is any aa, unknown or other
  misc_feature (142)..(142): Xaa is any aa, unknown or other
  misc_feature (149)..(149): Xaa is any aa, unknown or other
MQIFVKTLTGKTITLEVESSDTIDNVKAKIQDKEGIPPDQQRLIFAGKQLEDGRTLADYNIQKXSTXXLVLRLRGGMQIFVKXXTGKTITXEVEXSDTIDXVXAKIXDXEGXXPDQQXLIFXGXQXGXWXNSWLTTTXRRSXHFTWCCXSVEVCRFS

SEQ ID NO: 28651 - DNA, 1287 bp, Arabidopsis thaliana
  misc_feature (1)..(1287): Ceres Seq. ID no. 13497685
  misc_feature (1)..(1287): Ortholog of  Ceres SEQ ID NO 12582736 as cited in SEQ ID NO 51489
  misc_feature (1)..(1287): Ortholog of  Ceres SEQ ID NO 13658622 as cited in SEQ ID NO 60780
atgtataaaaacacttgcgagcgcagcttcatcgccatcgccattctctctctcatcaaaagcttttctccttgattttcgcattctttagagtcttaacgcaaagatgagacctcctctaactggaagtggtggtgggttcagtggtggaagagggcgtggtggatacagtggtggtagaggtgacggtggattcagtggtggtcgaggtggcggtggtagaggaggaggaagaggtttcagcgaccgtggtggtcgcggcagaggaagaggaccaccacgtggtggtgctcgcggcggcagaggaccagctggccgtggaggcatgaaaggaggaagcaaagtgattgtggaacctcacagacacgcaggagtgttcattgcaaagggtaaagaagatgcccttgttaccaagaatttggttcctggtgaagctgtctacaacgagaagagaatctctgttcagaacgaagatggaaccaagactgaatacagagtttggaatcctttccgttcgaagttggctgctgctattcttggtggtgttgataacatctggattaaacctggtgctaaagttctataccttggtgctgcttctggaaccacagtctctcatgtgtctgatcttgttggccctgaggggtgtgtgtacgcggttgagttttctcatagaagtggtagagatttggtgaacatggcaaagaagagaaccaatgttattccaatcatcgaggatgctagacacccagctaaatacagaatgcttgtaggcatggttgatgttatcttctctgatgttgctcagccagatcaggctaggatcttggctttgaatgcatcatacttcctcaagtcaggaggacactttgtgatctcaataaaggcaaactgtatcgactccaccgttccagcagaagctgtgttccagactgaagtgaagaagcttcaacaggagcaattcaaaccagctgagcaagtgacgcttgagccatttgagcgtgaccatgcatgtgtcgttggtggctaccgtatgcctaagaagccaaaggctgctactgctgcttagaagttttctactctacgctcttcccagtacctcagattttgctttgtctcggtctctttagaatctgtatggttttagggtttatcttaaattttgagctttgtaatcattttgaaccctggttatgttcacttggcttccagcgctaactttttcgacaagtttttgatatatggaacaattataatagaattttgtcgactgaggttgatttcttt

SEQ ID NO: 28652 - protein, 320 aa, Arabidopsis thaliana
  peptide (1)..(320): Ceres Seq. ID no. 13497686
MRPPLTGSGGGFSGGRGRGGYSGGRGDGGFSGGRGGGGRGGGRGFSDRGGRGRGRGPPRGGARGGRGPAGRGGMKGGSKVIVEPHRHAGVFIAKGKEDALVTKNLVPGEAVYNEKRISVQNEDGTKTEYRVWNPFRSKLAAAILGGVDNIWIKPGAKVLYLGAASGTTVSHVSDLVGPEGCVYAVEFSHRSGRDLVNMAKKRTNVIPIIEDARHPAKYRMLVGMVDVIFSDVAQPDQARILALNASYFLKSGGHFVISIKANCIDSTVPAEAVFQTEVKKLQQEQFKPAEQVTLEPFERDHACVVGGYRMPKKPKAATAA

SEQ ID NO: 28653 - protein, 247 aa, Arabidopsis thaliana
  peptide (1)..(247): Ceres Seq. ID no. 13497687
MKGGSKVIVEPHRHAGVFIAKGKEDALVTKNLVPGEAVYNEKRISVQNEDGTKTEYRVWNPFRSKLAAAILGGVDNIWIKPGAKVLYLGAASGTTVSHVSDLVGPEGCVYAVEFSHRSGRDLVNMAKKRTNVIPIIEDARHPAKYRMLVGMVDVIFSDVAQPDQARILALNASYFLKSGGHFVISIKANCIDSTVPAEAVFQTEVKKLQQEQFKPAEQVTLEPFERDHACVVGGYRMPKKPKAATAA

SEQ ID NO: 28654 - DNA, 2388 bp, Arabidopsis thaliana
  misc_feature (1)..(2388): Ceres Seq. ID no. 12326046
  misc_feature (1)..(2388): Ortholog of  Ceres SEQ ID NO 14313674 as cited in SEQ ID NO 59602
cttcgtcttcttctctggtttgggattcatgagttgagtcacaaggaaaaagcatgttagactgtggcaaaaaagcagtcaaatcacaagtaatcagtggccgtctcgagaagtttgtaaggttggatagtatggattctaggtactcgcagacttctgatactggtctaaacagatgcactctcaatttacaaggaccaacacgtggtggtggtgctcagggaaacaatgtatcttctggttcctttaagaaagggtttagaaaatgttctaaaggtctttggtctataggaagatcaattggtttaggggtttcacgagcagtttttcctaaagatcttaaagtatcagagaagaagatttttgatccacaggacaagtttcttttgctctgtaacaaactgtttgttacttcttgcattctcgctgtgtctgtggatccgctcttcttgtatcttccgtttgttaaggataatgagaaatgtatcggtatagaccggaagttggctattatagcaacaacgctgcggacagtaattgatgcgttttatctttttcacatggctcttcggtttagaacagcttttgtcgccccttcttctcgggtttttggtcgaggcgaacttgtgattgaccctgcacagatagcaaaacgttatttgcagcagtatttcatcattgactttctctctgtgcttccacttccacagattgtagtttggagatttctttacatctctaaaggtgcaagtgtgctagcaacaaagcgggcattgcgatctatcattttagttcaatatattccaagattcattcggttgtatcctttgagctcagagttaaagagaacagctggtgtttttgctgaaactgcttgggctggtgcagcttattacttgctactctacatgctcgcaagccatattgttggggctatatggtacttattggccttggaacgttataatggatgctggaccaaggtttgcagtaatagcagcttggactgtcacagaaacttcctgttttgtggtaatgaaaaaatggatggttatgcagcttggactaccatcaaagattctgttctgcaattaaattgcccagttaatacaaccgataatcctccttttgattttgggatctacttaagagccttgtcctctggcattgtctcatctaagagctttgtctctaagtacttcttctgtttatggtggggacttcagaatctcagcactcttggtcaagggcttgaaaccagcacataccctggagaagttatattctccatagcacttgccattgctggacttcttctctttgctcttcttattggaaacatgcagacttatcttcaatcccttacaatccggcttgaagaaatgagagtgaaaagacgtgattcagaacagtggatgcatcatcgaatgcttccaccggaactgcgagaacgagtcagacgatatgaccagtacaaatggttggagacacgcggagttgatgaagagaatttggttcagaacctcccaaaggatctgagaagagatatcaaacgccatctctgtctggctttggttcggagggttccattgtttgagaatatggatgagaggctgctcgatgcaatctgtgagcggttgaagccgtgtctgtacacagagagctcttatttggttcgggaaggcgacccggttaacgagatgctcttcattatccgtggtcggcttgagagtgtgaccaccgatggcggaagaagcggtttcttcaaccgcagtttgcttaaagaaggagatttctgtggggaagagcttttgacatgggcacttgatcccaaatctggttccaacctaccatcctctaccagaaccgcaaaggctctaactgaagtagaggcttttgctttgatagcagatgagctcaaatttgtggctagccagttcagaagactacacagcaggcgagttcaacacacattcagattctactcgcaacaatggagaacttgggctgctatcttcatacaagccgcgtggcgacgatacgtgaagaagaagaaacttgagcaactcaggaaagaagaagaagaaggagaaggatcagttactagcatcagagcgacgttcctggcttcaaagtttgctgcaaatgcacttcgtaaagttcacaagaaccgtattgaagcaaagtctactatagaacttgtgaaatatcagaagccttcagaacctgatttctctgctgatgatactagttgaccaaattttaccagaaaagtgctaatgtctatgaacgcttataacttgtataactcggattgaattttattgtttgatttgtgttgctacattaagataaagaaaaaggtggtaacataaaagattatttgtt

SEQ ID NO: 28655 - protein, 733 aa, Arabidopsis thaliana
  peptide (1)..(733): Ceres Seq. ID no. 12326047
MLDCGKKAVKSQVISGRLEKFVRLDSMDSRYSQTSDTGLNRCTLNLQGPTRGGGAQGNNVSSGSFKKGFRKCSKGLWSIGRSIGLGVSRAVFPKDLKVSEKKIFDPQDKFLLLCNKLFVTSCILAVSVDPLFLYLPFVKDNEKCIGIDRKLAIIATTLRTVIDAFYLFHMALRFRTAFVAPSSRVFGRGELVIDPAQIAKRYLQQYFIIDFLSVLPLPQIVVWRFLYISKGASVLATKRALRSIILVQYIPRFIRLYPLSSELKRTAGVFAETAWAGAAYYLLLYMLASHIVGAIWYLLALERYNGCWTKVCSNSSLDCHRNFLFCGNEKMDGYAAWTTIKDSVLQLNCPVNTTDNPPFDFGIYLRALSSGIVSSKSFVSKYFFCLWWGLQNLSTLGQGLETSTYPGEVIFSIALAIAGLLLFALLIGNMQTYLQSLTIRLEEMRVKRRDSEQWMHHRMLPPELRERVRRYDQYKWLETRGVDEENLVQNLPKDLRRDIKRHLCLALVRRVPLFENMDERLLDAICERLKPCLYTESSYLVREGDPVNEMLFIIRGRLESVTTDGGRSGFFNRSLLKEGDFCGEELLTWALDPKSGSNLPSSTRTAKALTEVEAFALIADELKFVASQFRRLHSRRVQHTFRFYSQQWRTWAAIFIQAAWRRYVKKKKLEQLRKEEEEGEGSVTSIRATFLASKFAANALRKVHKNRIEAKSTIELVKYQKPSEPDFSADDTS

SEQ ID NO: 28656 - protein, 707 aa, Arabidopsis thaliana
  peptide (1)..(707): Ceres Seq. ID no. 12326048
MDSRYSQTSDTGLNRCTLNLQGPTRGGGAQGNNVSSGSFKKGFRKCSKGLWSIGRSIGLGVSRAVFPKDLKVSEKKIFDPQDKFLLLCNKLFVTSCILAVSVDPLFLYLPFVKDNEKCIGIDRKLAIIATTLRTVIDAFYLFHMALRFRTAFVAPSSRVFGRGELVIDPAQIAKRYLQQYFIIDFLSVLPLPQIVVWRFLYISKGASVLATKRALRSIILVQYIPRFIRLYPLSSELKRTAGVFAETAWAGAAYYLLLYMLASHIVGAIWYLLALERYNGCWTKVCSNSSLDCHRNFLFCGNEKMDGYAAWTTIKDSVLQLNCPVNTTDNPPFDFGIYLRALSSGIVSSKSFVSKYFFCLWWGLQNLSTLGQGLETSTYPGEVIFSIALAIAGLLLFALLIGNMQTYLQSLTIRLEEMRVKRRDSEQWMHHRMLPPELRERVRRYDQYKWLETRGVDEENLVQNLPKDLRRDIKRHLCLALVRRVPLFENMDERLLDAICERLKPCLYTESSYLVREGDPVNEMLFIIRGRLESVTTDGGRSGFFNRSLLKEGDFCGEELLTWALDPKSGSNLPSSTRTAKALTEVEAFALIADELKFVASQFRRLHSRRVQHTFRFYSQQWRTWAAIFIQAAWRRYVKKKKLEQLRKEEEEGEGSVTSIRATFLASKFAANALRKVHKNRIEAKSTIELVKYQKPSEPDFSADDTS

SEQ ID NO: 28657 - protein, 564 aa, Arabidopsis thaliana
  peptide (1)..(564): Ceres Seq. ID no. 12326049
MALRFRTAFVAPSSRVFGRGELVIDPAQIAKRYLQQYFIIDFLSVLPLPQIVVWRFLYISKGASVLATKRALRSIILVQYIPRFIRLYPLSSELKRTAGVFAETAWAGAAYYLLLYMLASHIVGAIWYLLALERYNGCWTKVCSNSSLDCHRNFLFCGNEKMDGYAAWTTIKDSVLQLNCPVNTTDNPPFDFGIYLRALSSGIVSSKSFVSKYFFCLWWGLQNLSTLGQGLETSTYPGEVIFSIALAIAGLLLFALLIGNMQTYLQSLTIRLEEMRVKRRDSEQWMHHRMLPPELRERVRRYDQYKWLETRGVDEENLVQNLPKDLRRDIKRHLCLALVRRVPLFENMDERLLDAICERLKPCLYTESSYLVREGDPVNEMLFIIRGRLESVTTDGGRSGFFNRSLLKEGDFCGEELLTWALDPKSGSNLPSSTRTAKALTEVEAFALIADELKFVASQFRRLHSRRVQHTFRFYSQQWRTWAAIFIQAAWRRYVKKKKLEQLRKEEEEGEGSVTSIRATFLASKFAANALRKVHKNRIEAKSTIELVKYQKPSEPDFSADDTS

SEQ ID NO: 28658 - DNA, 1401 bp, Arabidopsis thaliana
  misc_feature (1)..(1401): Ceres Seq. ID no. 13500186
  misc_feature (1)..(1401): Ortholog of  Ceres SEQ ID NO 14312844 as cited in SEQ ID NO 55601
  misc_feature (1)..(1401): Ortholog of  Ceres SEQ ID NO 14312866 as cited in SEQ ID NO 55630
  misc_feature (1)..(1401): Ortholog of  Ceres SEQ ID NO 13597376 as cited in SEQ ID NO 64002
  misc_feature (1)..(1401): Ortholog of  Ceres SEQ ID NO 13503573 as cited in SEQ ID NO 65402
  misc_feature (1)..(1401): Ortholog of  Ceres SEQ ID NO 13659615 as cited in SEQ ID NO 67248
gtgtcggttccagaaatcagaaagtaaatcatacagtcaaaaccgcttcttctataaaaccctttttagctcaatcccaaaacgcaataaaaaacaaaacgctctccagaatttcgaaacttctaagatattttgttttctctcttaacgatggcgaagagtgttttggttaccggcggcgctggctatatcggaagtcatactgttcttcaactgcttgaaggtggttactccgccgtcgttgttgacaattacgacaattcctctgctgcttcgcttcagcgcgtgaagaaactcgccggcgaaaacggaaaccgcctctccttccaccaggtggatctccgagacaggcctgcgcttgagaagatattctcagaaacaaagtttgatgcagtgatacactttgctggacttaaagcagtaggtgagagtgtggagaagcctttgctctattataataataacattgttggcactgttactcttttggaggttatggctcaatacggctgcaaaaatcttgtattttcatcatcagctactgtctatggctggcctaaggaggttccttgcactgaggagtcaccaatttctgccactaacccatatggccgtacaaagctttttatcgaagagatttgccgggatgtacatcgttctgactcggaatggaagatcatattgcttagatacttcaaccctgttggtgcacatcctagtggttacattggtgaagatcctcttggagttcccaacaatctcatgccttatgtccaacaagttgcagttggccggagacctcaccttactgtctttggaaccgactacaagacaaaggatggtacaggggttagagattacattcatgtcatggatttagcagatggacacatagctgctctgcgtaagctagatgatctcaaaatcagttgtgaggtatacaatcttggaacgggtaatggaacatcggtcctagaaatggtcgctgcctttgaaaaagcatccggaaagaaaatccctttggtgatggctggacgacgtcctggagacgctgaagttgtttacgcctcaacggaaaaagcagagcgcgaactaaattggaaggctaagaatgggatagaggagatgtgtagggatctatggaattgggcaagcaataacccttacggctacaattcctcctccaacggctcctcttcataattctccttttttaatttttattttgccttttttgcttacttatattcatataaacaaacacataaaaaaaaagaagagaaaggctgacaagtacccaaactttagaagaaattgaggaaaattcttgtactatcaatttatcatagaaactatatttattaaatcgttagttttcaatcgttgggagttttttttctt

SEQ ID NO: 28659 - protein, 350 aa, Arabidopsis thaliana
  peptide (1)..(350): Ceres Seq. ID no. 13500187
MAKSVLVTGGAGYIGSHTVLQLLEGGYSAVVVDNYDNSSAASLQRVKKLAGENGNRLSFHQVDLRDRPALEKIFSETKFDAVIHFAGLKAVGESVEKPLLYYNNNIVGTVTLLEVMAQYGCKNLVFSSSATVYGWPKEVPCTEESPISATNPYGRTKLFIEEICRDVHRSDSEWKIILLRYFNPVGAHPSGYIGEDPLGVPNNLMPYVQQVAVGRRPHLTVFGTDYKTKDGTGVRDYIHVMDLADGHIAALRKLDDLKISCEVYNLGTGNGTSVLEMVAAFEKASGKKIPLVMAGRRPGDAEVVYASTEKAERELNWKAKNGIEEMCRDLWNWASNNPYGYNSSSNGSSS

SEQ ID NO: 28660 - protein, 235 aa, Arabidopsis thaliana
  peptide (1)..(235): Ceres Seq. ID no. 13500188
MAQYGCKNLVFSSSATVYGWPKEVPCTEESPISATNPYGRTKLFIEEICRDVHRSDSEWKIILLRYFNPVGAHPSGYIGEDPLGVPNNLMPYVQQVAVGRRPHLTVFGTDYKTKDGTGVRDYIHVMDLADGHIAALRKLDDLKISCEVYNLGTGNGTSVLEMVAAFEKASGKKIPLVMAGRRPGDAEVVYASTEKAERELNWKAKNGIEEMCRDLWNWASNNPYGYNSSSNGSSS

SEQ ID NO: 28661 - DNA, 925 bp, Arabidopsis thaliana
  misc_feature (1)..(925): Ceres Seq. ID no. 12397142
  misc_feature (1)..(925): Ortholog of  Ceres SEQ ID NO 14314461 as cited in SEQ ID NO 52355
  misc_feature (1)..(925): Ortholog of  Ceres SEQ ID NO 14306812 as cited in SEQ ID NO 56361
  misc_feature (1)..(925): Ortholog of  Ceres SEQ ID NO 15168461 as cited in SEQ ID NO 57068
cttggtatcatctctctgtttttccgaagaactaacacatgtcgggacctcagtgctgtgaaaacccgccaactcttaacccggtttccgggtcgggtcatgtcgagaagctgggtgggcttgatgcctacgtctccggctctgccgagtccaagctctgcgtcctcctcatttctgatatttttggttttgaagctccaaacttaagggcgcttgcggacaaggttgcagcttctggattctatgttgtggttcctgattactttggtggagatccttataatccctctaaccaggacagacccatccctgtctggatcaaagaccatggctgtgataagggctttgaaaacacgaaaccagtacttgaaaccataaagaacaaaggcataactgccattggagccgcagggatgtgttggggtgcaaaagtagtggtggaactgtctaaagaagagcttattcaagcagctgtgttgcttcatccttcttttgtcaatgttgatgatatcaaaggtgggaaggctccaattgctatattaggagctgaaattgatcaaatgtccccaccagcactcttgaagcaatttgaggagattctatcttccaaacccgaggtgaatagttacgtgaagatacacccgaaagtgtcacacggatggacagttagatacaacatcgatgaaccagaggcggttaaagcagcagaagaagctcacaaggagatgcttgattggtttgtgacctacatcaaatgatttgagaaagaaagaaaggtattgtctattacttcatatatgcaaagaataaaaattaaagagagacaaagcaaaactcttggttggtgtttcaatttctactttctatagtcttttgaagcattctctgagattctgtgataccttttgttaatcattgttttatg

SEQ ID NO: 28662 - protein, 239 aa, Arabidopsis thaliana
  peptide (1)..(239): Ceres Seq. ID no. 12397143
MSGPQCCENPPTLNPVSGSGHVEKLGGLDAYVSGSAESKLCVLLISDIFGFEAPNLRALADKVAASGFYVVVPDYFGGDPYNPSNQDRPIPVWIKDHGCDKGFENTKPVLETIKNKGITAIGAAGMCWGAKVVVELSKEELIQAAVLLHPSFVNVDDIKGGKAPIAILGAEIDQMSPPALLKQFEEILSSKPEVNSYVKIHPKVSHGWTVRYNIDEPEAVKAAEEAHKEMLDWFVTYIK

SEQ ID NO: 28663 - DNA, 1392 bp, Arabidopsis thaliana
  misc_feature (1)..(1392): Ceres Seq. ID no. 13487454
  misc_feature (1)..(1392): Ortholog of  Ceres SEQ ID NO 14306059 as cited in SEQ ID NO 52249
  misc_feature (1)..(1392): Ortholog of  Ceres SEQ ID NO 15170479 as cited in SEQ ID NO 52835
  misc_feature (1)..(1392): Ortholog of  Ceres SEQ ID NO 13596087 as cited in SEQ ID NO 68336
atttgaatttccggaaaagaaaaaaaaacaaacacaaaacacgcttctcttgttgagaagctagcaaaacaacactaaacctgaaacaaacgtaaatccgccgcaacaacccagtttttttcgacggtgtacaagcttcctccgccgtaacgccgtcgtttaacaccacgaagcttgattaggtttccgtagtgtgtgatttgtgagattcgttttaaggttctgaacactgatgtcaaacccattgaaggagtcaagagaggatattgcagattctactcctcacatgagggataatgagtatgttcggctagttgtggctcatgaagcctccgcagctgaaaccgtgttgtctctatcgcaatcagaggtgcagagtaagaaattgatgtggtggttgaaagctttgggaatatgtgcagttgctctcttgcttacgcttgttttcggtaaatggggagttccgtttgtgtttcaaaaggttcttattccaattttgcaatgggaagcaactgcgtttggccgtcctatgctcgcgattgtccttgttgtttccttggctttgtttcctgtgttcttgataccttctggtccttccatgtggttagctgggatgatttttggttatggtctcggttttgttattatcatggttggaaccaccattggcatggttctcccttacttaatcgggcttatgttccgtgatcgcctccatcaatggttaaaaagatggcctcgtcaagctgctgttctaagactagctgcagaaggaagctggttccatcaattcagagtcgtggcaatctttcgggtttccccatttccttacacgatttttaactacgcaatcgtcgtgacaagcatgagattctggccttacttcttcggatccatagcaggaatgataccagaagctttcatctacatttacagcggtcggttaatcagaacattcgcagatgtgcaatacggacatcaacgtttgacaacagtggagattgtgtacaatgtaatctccttaatcattgcggttgtgaccactgttgctttcactgtgtacgcgaaaagagctttgagagagcttcaaaacgcagaagctaatgaagatgaagaagttcaagtaagaaaagtgagattcgagatgaagaacgtagttcagcacgaagaagataatcatcagcgtttgccttagccgaaagttgacacaaagctatgataggtttgtataaagctttgaacgttgacatgttcttcagcaggatttagagtaaataacaaaaggggtaaaaaaagtctgatgtagtaggaagactaagactagtcaagattggatttatattagtgtgactgattccaattattgaaacaaataaaagaagcatttaggcc

SEQ ID NO: 28664 - protein, 320 aa, Arabidopsis thaliana
  peptide (1)..(320): Ceres Seq. ID no. 13487455
MSNPLKESREDIADSTPHMRDNEYVRLVVAHEASAAETVLSLSQSEVQSKKLMWWLKALGICAVALLLTLVFGKWGVPFVFQKVLIPILQWEATAFGRPMLAIVLVVSLALFPVFLIPSGPSMWLAGMIFGYGLGFVIIMVGTTIGMVLPYLIGLMFRDRLHQWLKRWPRQAAVLRLAAEGSWFHQFRVVAIFRVSPFPYTIFNYAIVVTSMRFWPYFFGSIAGMIPEAFIYIYSGRLIRTFADVQYGHQRLTTVEIVYNVISLIIAVVTTVAFTVYAKRALRELQNAEANEDEEVQVRKVRFEMKNVVQHEEDNHQRLP

SEQ ID NO: 28665 - protein, 302 aa, Arabidopsis thaliana
  peptide (1)..(302): Ceres Seq. ID no. 13487456
MRDNEYVRLVVAHEASAAETVLSLSQSEVQSKKLMWWLKALGICAVALLLTLVFGKWGVPFVFQKVLIPILQWEATAFGRPMLAIVLVVSLALFPVFLIPSGPSMWLAGMIFGYGLGFVIIMVGTTIGMVLPYLIGLMFRDRLHQWLKRWPRQAAVLRLAAEGSWFHQFRVVAIFRVSPFPYTIFNYAIVVTSMRFWPYFFGSIAGMIPEAFIYIYSGRLIRTFADVQYGHQRLTTVEIVYNVISLIIAVVTTVAFTVYAKRALRELQNAEANEDEEVQVRKVRFEMKNVVQHEEDNHQRLP

SEQ ID NO: 28666 - protein, 268 aa, Arabidopsis thaliana
  peptide (1)..(268): Ceres Seq. ID no. 13487457
MWWLKALGICAVALLLTLVFGKWGVPFVFQKVLIPILQWEATAFGRPMLAIVLVVSLALFPVFLIPSGPSMWLAGMIFGYGLGFVIIMVGTTIGMVLPYLIGLMFRDRLHQWLKRWPRQAAVLRLAAEGSWFHQFRVVAIFRVSPFPYTIFNYAIVVTSMRFWPYFFGSIAGMIPEAFIYIYSGRLIRTFADVQYGHQRLTTVEIVYNVISLIIAVVTTVAFTVYAKRALRELQNAEANEDEEVQVRKVRFEMKNVVQHEEDNHQRLP

SEQ ID NO: 28667 - DNA, 1012 bp, Arabidopsis thaliana
  misc_feature (1)..(1012): Ceres Seq. ID no. 12423264
  misc_feature (1)..(1012): Ortholog of  Ceres SEQ ID NO 14304830 as cited in SEQ ID NO 54884
  misc_feature (1)..(1012): Ortholog of  Ceres SEQ ID NO 14316297 as cited in SEQ ID NO 57465
  misc_feature (1)..(1012): Ortholog of  Ceres SEQ ID NO 12784351 as cited in SEQ ID NO 60968
  misc_feature (1)..(1012): Ortholog of  Ceres SEQ ID NO 13584213 as cited in SEQ ID NO 63690
acttcagcaaaaccactacacctttcttatctctcagattttctcaagaagattgtgtggaagatgatgagacggaagatttttctctttggtgattccatcactgaagaatcctttagtgacggtggctggggtgcttctctcgccgatcttctccgccgcaaggctgatatggtgctacgaggatacagtggatataacacgaggtgggcactgaaagtggtggagagagtttttccggtggcagaagaagacggcggagattctccggcagctgtgactgttttctttggagcgaacgacgcgtgtcttccggagagatgctcggggtttcagcatgtgccacttcacgagtacaagcagaatcttcgctctattgtttcgtttctcaagaatcgttggccacaaacggccattattcttataactccgcctccaatagacgaagaggcccgcctcagatatccttatatcgaaaacacaacggggttgccggaaagaacgaatgaagtagccggactatacgcaaaagcatgtatagcagtagctgaggaatgtcaaatttcggtcactgatctttggtccaaaatgcagcaaattccaaattggcaaacagaatgtctatgggacgggttacatttgagtcgggtcggtaacaaagtagtgtttgaagaagtagcaaagaagcttaaagaagaaggcattggagctgaggacttagctgtggatcttccccttatagaagatgttgaccctaaggatcctctcaaatcctttgatgagttttgatgctttatattactaccatgcagtttggttcttctatctttgattacttcttaatttcgatattaatttagggaatgtgacattattaggcactttgtgagaatctttttgtgagaatctttttacgtttgaggcacttgtgagagagagggcactttgccatctttttttagaggagattgaaccaatttgcccctgaagtgatgaaaacacaataattttt

SEQ ID NO: 28668 - protein, 262 aa, Arabidopsis thaliana
  peptide (1)..(262): Ceres Seq. ID no. 12423265
TSAKPLHLSYLSDFLKKIVWKMMRRKIFLFGDSITEESFSDGGWGASLADLLRRKADMVLRGYSGYNTRWALKVVERVFPVAEEDGGDSPAAVTVFFGANDACLPERCSGFQHVPLHEYKQNLRSIVSFLKNRWPQTAIILITPPPIDEEARLRYPYIENTTGLPERTNEVAGLYAKACIAVAEECQISVTDLWSKMQQIPNWQTECLWDGLHLSRVGNKVVFEEVAKKLKEEGIGAEDLAVDLPLIEDVDPKDPLKSFDEF

SEQ ID NO: 28669 - protein, 241 aa, Arabidopsis thaliana
  peptide (1)..(241): Ceres Seq. ID no. 12423266
MMRRKIFLFGDSITEESFSDGGWGASLADLLRRKADMVLRGYSGYNTRWALKVVERVFPVAEEDGGDSPAAVTVFFGANDACLPERCSGFQHVPLHEYKQNLRSIVSFLKNRWPQTAIILITPPPIDEEARLRYPYIENTTGLPERTNEVAGLYAKACIAVAEECQISVTDLWSKMQQIPNWQTECLWDGLHLSRVGNKVVFEEVAKKLKEEGIGAEDLAVDLPLIEDVDPKDPLKSFDEF

SEQ ID NO: 28670 - protein, 240 aa, Arabidopsis thaliana
  peptide (1)..(240): Ceres Seq. ID no. 12423267
MRRKIFLFGDSITEESFSDGGWGASLADLLRRKADMVLRGYSGYNTRWALKVVERVFPVAEEDGGDSPAAVTVFFGANDACLPERCSGFQHVPLHEYKQNLRSIVSFLKNRWPQTAIILITPPPIDEEARLRYPYIENTTGLPERTNEVAGLYAKACIAVAEECQISVTDLWSKMQQIPNWQTECLWDGLHLSRVGNKVVFEEVAKKLKEEGIGAEDLAVDLPLIEDVDPKDPLKSFDEF

SEQ ID NO: 28671 - DNA, 606 bp, Arabidopsis thaliana
  misc_feature (1)..(606): Ceres Seq. ID no. 12421141
  misc_feature (1)..(606): Ortholog of  Ceres SEQ ID NO 12610253 as cited in SEQ ID NO 56230
accaatttctctctttcatctacaatcactgaacaatggcgatttctcaagctcagtctctgcttcttctcctcgtatcgctcttcttcttacctgctttgcacgccacttctttctcctactgcgataagaggttcgatcccgttaaggtcacgggtgtgaagatctctcctgaccctgttgtgagtggtgcagccgcaacatttaagatttttggttctactggcgaagacatctctggaggaaaagtagtgatcagggtttcatactttgggattcctgtccataccgaaactcatgacctctgcgatgagacggcatgtccggttgcacctggcagctttgtgctttctcattctcaaacactcccttcaattacaccatctggtacttacacgctaaagatgacaatcaacgacaagaatggcggaagactaacatgtatcagcttcaaattcaagatcacagtaggttccgcggtctttgctagttaagttttatggtgtaaattgtgtctttgtgaatctctctctcgtttacttttgtggtgtccaaataaaaaatgctcttttgagacttgagttgatctatatgaaacaaagagtc

SEQ ID NO: 28672 - protein, 152 aa, Arabidopsis thaliana
  peptide (1)..(152): Ceres Seq. ID no. 12421142
MAISQAQSLLLLLVSLFFLPALHATSFSYCDKRFDPVKVTGVKISPDPVVSGAAATFKIFGSTGEDISGGKVVIRVSYFGIPVHTETHDLCDETACPVAPGSFVLSHSQTLPSITPSGTYTLKMTINDKNGGRLTCISFKFKITVGSAVFAS

SEQ ID NO: 28673 - DNA, 1061 bp, Arabidopsis thaliana
  misc_feature (1)..(1061): Ceres Seq. ID no. 13580294
  misc_feature (1)..(1061): Ortholog of  Ceres SEQ ID NO 15177991 as cited in SEQ ID NO 53915
  misc_feature (1)..(1061): Ortholog of  Ceres SEQ ID NO 15174347 as cited in SEQ ID NO 58577
  misc_feature (1)..(1061): Ortholog of  Ceres SEQ ID NO 13596609 as cited in SEQ ID NO 63070
  misc_feature (1)..(1061): Ortholog of  Ceres SEQ ID NO 12616895 as cited in SEQ ID NO 63909
  misc_feature (1)..(1061): Ortholog of  Ceres SEQ ID NO 14302096 as cited in SEQ ID NO 68356
  misc_feature (1)..(1061): Ortholog of  Ceres SEQ ID NO 13598574 as cited in SEQ ID NO 69083
atgtcttcatcacctcttctttaacgcctctggctctgcatttctcagtctttttgcacaagaaacaaagctcaggaaaacctcaaaaccctaagctatgagaacaagcaaccatctcataggtttagtcaacttcctcactttcctcctctcaataccaatcctcggcggtggaatatggttaagcagccgagctaactccaccgactgtttaagattccttcaatggcctctcatcgtcatcggaatctcaatcatggtcgtatctttagctggattcgctggagcttgttaccgtaacaagttccttatgtggctatacctagtagtcatgcttctcatcatcgctgctcttatcggtttcatcatcttcgcttacgcggttacagataaaggatccggtcgaaccgtacttaaccggggttatcttgactattatcttgaagattactctggttggttgaaagatcgagtttctgatgatagctattggggtaaaattagttcttgtcttagagattctggtgcttgtagaaagatcgaagaaattttaatggtgtacctgaaactgctgatatgttcttccttagaagacttagccctgttgagtccggttgttgcaagccaccaacagattgcggtttttcatatgtgaatgagaccggatgggacacgagaggagggatgataggaccgaaccaggactgtatggtgtggagcaacgaccagagcatgctctgttatcagtgtagttcttgtaaagctggtgttcttgggagtttgaagaagagttggagaaaagtatcggtgatcaacattgtggtacttatcattctagttatcttttacgttatcgcttatgcagcttataggaatgtcaagaggaacgataacgatgaaccggctggtgaagctaggatgacaaaatcacatcctagtcatttccatctttgatcaaaatttggaacagttcaaaaaaatgtatcgaggctttgatttatgtttaaaggttttagtacttttgtgtatgtttttggtatgtaacacatttttttgtgtgc

SEQ ID NO: 28674 - protein, 185 aa, Arabidopsis thaliana
  peptide (1)..(185): Ceres Seq. ID no. 13580295
MRTSNHLIGLVNFLTFLLSIPILGGGIWLSSRANSTDCLRFLQWPLIVIGISIMVVSLAGFAGACYRNKFLMWLYLVVMLLIIAALIGFIIFAYAVTDKGSGRTVLNRGYLDYYLEDYSGWLKDRVSDDSYWGKISSCLRDSGACRKIEEILMVYLKLLICSSLEDLALLSPVVASHQQIAVFHM

SEQ ID NO: 28675 - protein, 132 aa, Arabidopsis thaliana
  peptide (1)..(132): Ceres Seq. ID no. 13580296
MVVSLAGFAGACYRNKFLMWLYLVVMLLIIAALIGFIIFAYAVTDKGSGRTVLNRGYLDYYLEDYSGWLKDRVSDDSYWGKISSCLRDSGACRKIEEILMVYLKLLICSSLEDLALLSPVVASHQQIAVFHM

SEQ ID NO: 28676 - protein, 125 aa, Arabidopsis thaliana
  peptide (1)..(125): Ceres Seq. ID no. 13580297
MFFLRRLSPVESGCCKPPTDCGFSYVNETGWDTRGGMIGPNQDCMVWSNDQSMLCYQCSSCKAGVLGSLKKSWRKVSVINIVVLIILVIFYVIAYAAYRNVKRNDNDEPAGEARMTKSHPSHFHL

SEQ ID NO: 28677 - DNA, 1518 bp, Arabidopsis thaliana
  misc_feature (1)..(1518): Ceres Seq. ID no. 12579421
  misc_feature (1)..(1518): Ortholog of  Ceres SEQ ID NO 15177947 as cited in SEQ ID NO 60308
ttttttgtccttaggatttgattgtacatacatctgatctcaagtgatttcaagtggttggttctgttccttttctcgtccccgatcaagtttcttctcctaaactccagaatttggtcttgaagatctctaaaggctcttcctttttgttcatttctctacccagatatcgatgggtacatacctaagttctccgaaaactgaaaagttatcagaagatggtgagaatgataagctcagatttggtttatcgtctatgcaaggttggcgcgctaccatggaagacgcgcatgctgcaattcttgatcttgatgataagacatcgttcttcggtgtgtatgatggccatggaggtaaagtcgttgcaaagttctgtgccaagtatctacaccagcaggttatcagtaatgaagcgtataaaactggagacgtcgaaacatctcttcgaagagcattctttagaatggatgacatgatgcaaggacaaagaggatggcgagagttagctgtacttggcgacaagatgaacaaatttagcggcatgattgaaggatttatatggtcaccaagaagcggtgacaccaataaccaacccgatagttggcctcttgaagatggtcctcattctgatttcacgggacctacctcggggtgcacagcgtgtgtagctcttattaaagataagaagctctttgttgcaaatgccggtgactcacgttgtgtgatatcaagaaagagtcaggcttacaatctttctaaagatcacaagcctgatcttgaagttgaaaaagaaaggatattgaaagctggtggctttattcacgctgggagaatcaatggaagcttgaatctgacaagagccattggtgatatggagttcaagcagaataagtttttaccatctgaaaagcaaatggttactgctgatccagatataaacactattgacctatgtgatgatgatgactttcttgttgttgcttgcgatggaatatgggattgtatgtcaagccaggaactagttgattttatccatgaacagttaaaatctgaaacaaaactttcaacagtatgtgaaaaggttgttgatagatgtttggctccagatacagcgactggtgaaggttgtgataatatgaccatcatcttggttcagttcaagaagcctaacccatctgagactgaaccagaagattccaaaccagaaccaagcgaagatgagccgagctcatcaagctagatatctttaaagagccaagaggaagaagatttgtgaaagtgtctcttttatcattgactttttgttcaacattgtaaatccttttgaatgtggcttagattcaagaagctggctttttcccagtttagcttcaagaagtctgagatgtcacagagtttggtttaatcttaaaaggacctttgtatagatatttcttgtgattgatgttttcagctatagtttaaaaaattcacaaggacaagctttttgtaccaacatcatgggatttgttttcatcg

SEQ ID NO: 28678 - protein, 355 aa, Arabidopsis thaliana
  peptide (1)..(355): Ceres Seq. ID no. 12579422
MGTYLSSPKTEKLSEDGENDKLRFGLSSMQGWRATMEDAHAAILDLDDKTSFFGVYDGHGGKVVAKFCAKYLHQQVISNEAYKTGDVETSLRRAFFRMDDMMQGQRGWRELAVLGDKMNKFSGMIEGFIWSPRSGDTNNQPDSWPLEDGPHSDFTGPTSGCTACVALIKDKKLFVANAGDSRCVISRKSQAYNLSKDHKPDLEVEKERILKAGGFIHAGRINGSLNLTRAIGDMEFKQNKFLPSEKQMVTADPDINTIDLCDDDDFLVVACDGIWDCMSSQELVDFIHEQLKSETKLSTVCEKVVDRCLAPDTATGEGCDNMTIILVQFKKPNPSETEPEDSKPEPSEDEPSSSS

SEQ ID NO: 28679 - protein, 327 aa, Arabidopsis thaliana
  peptide (1)..(327): Ceres Seq. ID no. 12579423
MQGWRATMEDAHAAILDLDDKTSFFGVYDGHGGKVVAKFCAKYLHQQVISNEAYKTGDVETSLRRAFFRMDDMMQGQRGWRELAVLGDKMNKFSGMIEGFIWSPRSGDTNNQPDSWPLEDGPHSDFTGPTSGCTACVALIKDKKLFVANAGDSRCVISRKSQAYNLSKDHKPDLEVEKERILKAGGFIHAGRINGSLNLTRAIGDMEFKQNKFLPSEKQMVTADPDINTIDLCDDDDFLVVACDGIWDCMSSQELVDFIHEQLKSETKLSTVCEKVVDRCLAPDTATGEGCDNMTIILVQFKKPNPSETEPEDSKPEPSEDEPSSSS

SEQ ID NO: 28680 - protein, 320 aa, Arabidopsis thaliana
  peptide (1)..(320): Ceres Seq. ID no. 12579424
MEDAHAAILDLDDKTSFFGVYDGHGGKVVAKFCAKYLHQQVISNEAYKTGDVETSLRRAFFRMDDMMQGQRGWRELAVLGDKMNKFSGMIEGFIWSPRSGDTNNQPDSWPLEDGPHSDFTGPTSGCTACVALIKDKKLFVANAGDSRCVISRKSQAYNLSKDHKPDLEVEKERILKAGGFIHAGRINGSLNLTRAIGDMEFKQNKFLPSEKQMVTADPDINTIDLCDDDDFLVVACDGIWDCMSSQELVDFIHEQLKSETKLSTVCEKVVDRCLAPDTATGEGCDNMTIILVQFKKPNPSETEPEDSKPEPSEDEPSSSS

SEQ ID NO: 28681 - DNA, 1331 bp, Arabidopsis thaliana
  misc_feature (1)..(1331): Ceres Seq. ID no. 12337850
  misc_feature (1)..(1331): Ortholog of  Ceres SEQ ID NO 13595222 as cited in SEQ ID NO 56312
  misc_feature (1)..(1331): Ortholog of  Ceres SEQ ID NO 13654209 as cited in SEQ ID NO 62121
  misc_feature (1)..(1331): Ortholog of  Ceres SEQ ID NO 13596965 as cited in SEQ ID NO 63363
ggagatatgaatctcttctttctctggatttgaaagttcgatgaaaatctactgatacatcgacttctggaagcgatctcgatctctctagaattgtttcgacgacgaagatgaagaagattcaaattggtgcggtggcgctattggtgtttctatctgtggcctctctctttgaaatcggattggcttctccgaacacagttcctgctttcctctggtctccgcatctccagtctgctaatggtgaattggatgaggctgtaaattatcaggtcatgtctgcaaaggatctagttggttctgttttcactcaaggaggttggtcaaactttctgtgctcagagaagaagcttgagcaacctgttgatgttgcacttgtgttcataggcagagagttactgtcttctgatgtttcttcaaaaaggaactcagatcctgcccttgttaacacattgaataatctatttacagcttccaacttctcattggcattcccatatattgctgctccagaggaagaaaggatggagaatttgttactttcagggcttaaagaagcttgtcccaacaatgtaggagtcagcaatatcgtgttctcagattcgtgctttgttgaggatggaacaattcagaaactttcagacttgcagtctttcaaagatcatttgcttgctagaagagaaacaaggaaagaaggagaaactgacttggttgtgctctgttccgagggttctgaatcgaatagtcaagctggacagtcacattcagagcgtgaaagcttcttggaacttgttagttctgtagaacaatccggcagtaaatatacagctctttatgtttctgatccttattggtacacatcttacaaaactctccaaaggtttctagctgaaactgctaaaggaaacagtactcctgaaattgctactggctgtgatgaactctgcaaatttaagtcatcacttttggagggcatactagtgggaatcgtttttcttctcatcttgatcagtggactttgctgtatggcgggtatcgatacaccgactagattcgagactcctcaagattcttaagctgttgaccttaagagccatccccaccttttgctttgcttttgacgagtcttttcttgtgcatagtgcgcattgtggaaggtacttcaatgtcgatttgttacattattacttcaaaacaaaatctgcatatgccataaaatccccttgtatcatttattcatcttgtttgtgagtctttcttaaacgtcataaattaataatggagaacgagtaaaaaaccagagatacatacactggagaacggattacatt

SEQ ID NO: 28682 - protein, 321 aa, Arabidopsis thaliana
  peptide (1)..(321): Ceres Seq. ID no. 12337851
MKKIQIGAVALLVFLSVASLFEIGLASPNTVPAFLWSPHLQSANGELDEAVNYQVMSAKDLVGSVFTQGGWSNFLCSEKKLEQPVDVALVFIGRELLSSDVSSKRNSDPALVNTLNNLFTASNFSLAFPYIAAPEEERMENLLLSGLKEACPNNVGVSNIVFSDSCFVEDGTIQKLSDLQSFKDHLLARRETRKEGETDLVVLCSEGSESNSQAGQSHSERESFLELVSSVEQSGSKYTALYVSDPYWYTSYKTLQRFLAETAKGNSTPEIATGCDELCKFKSSLLEGILVGIVFLLILISGLCCMAGIDTPTRFETPQDS

SEQ ID NO: 28683 - protein, 266 aa, Arabidopsis thaliana
  peptide (1)..(266): Ceres Seq. ID no. 12337852
MSAKDLVGSVFTQGGWSNFLCSEKKLEQPVDVALVFIGRELLSSDVSSKRNSDPALVNTLNNLFTASNFSLAFPYIAAPEEERMENLLLSGLKEACPNNVGVSNIVFSDSCFVEDGTIQKLSDLQSFKDHLLARRETRKEGETDLVVLCSEGSESNSQAGQSHSERESFLELVSSVEQSGSKYTALYVSDPYWYTSYKTLQRFLAETAKGNSTPEIATGCDELCKFKSSLLEGILVGIVFLLILISGLCCMAGIDTPTRFETPQDS

SEQ ID NO: 28684 - protein, 183 aa, Arabidopsis thaliana
  peptide (1)..(183): Ceres Seq. ID no. 12337853
MENLLLSGLKEACPNNVGVSNIVFSDSCFVEDGTIQKLSDLQSFKDHLLARRETRKEGETDLVVLCSEGSESNSQAGQSHSERESFLELVSSVEQSGSKYTALYVSDPYWYTSYKTLQRFLAETAKGNSTPEIATGCDELCKFKSSLLEGILVGIVFLLILISGLCCMAGIDTPTRFETPQDS

SEQ ID NO: 28685 - DNA, 737 bp, Arabidopsis thaliana
  misc_feature (1)..(737): Ceres Seq. ID no. 12580393
  misc_feature (1)..(737): Ortholog of  Ceres SEQ ID NO 13597604 as cited in SEQ ID NO 65175
aaacaaaaagcttccttttgattatcttcaatcggaatttcaggtgggagagatgggttctgaaggaccaaaagcaataacgattcatgtgactggtttcaagaaatttcttggggtttcagagaatcctactgagaagatagctaatggtttgaaatcgtatgtggagaaacgaggtttgccttctggattgtgtcttggtagctgtagtgttcttgacactgctggggaaggtgcaaaatctaagctttatgaggttttggagtctagtgttgtctctggagataagaacaacaatggaactgttgtctggcttcatctcggggtgaatagcggagcgacaaaattcgccattgaaagacaggcagtgaacgaagctcatttccgttgtcctgatgaattgggctggcaaccgcagcggcttcccatagttgttgaagatggaggcatttcaaaggcaaaagagacttcatgctcgacggagtccattttccagttattaaagaagaaaggctttgaggttgttcaatcagacgatgctggacgttttgtatgcaactacgtgtactatcactctctaaggttcgcagagcaaaagggacacaagtctctgttcgttcacgttcctctcttctccaaaatcgatgaagatactcaaatgcagttcgtggcttcactcttggaggcaattgcagctacttgctagtgtttataagaatccactaaagccaaatatt

SEQ ID NO: 28686 - protein, 234 aa, Arabidopsis thaliana
  peptide (1)..(234): Ceres Seq. ID no. 12580394
NKKLPFDYLQSEFQVGEMGSEGPKAITIHVTGFKKFLGVSENPTEKIANGLKSYVEKRGLPSGLCLGSCSVLDTAGEGAKSKLYEVLESSVVSGDKNNNGTVVWLHLGVNSGATKFAIERQAVNEAHFRCPDELGWQPQRLPIVVEDGGISKAKETSCSTESIFQLLKKKGFEVVQSDDAGRFVCNYVYYHSLRFAEQKGHKSLFVHVPLFSKIDEDTQMQFVASLLEAIAATC

SEQ ID NO: 28687 - protein, 217 aa, Arabidopsis thaliana
  peptide (1)..(217): Ceres Seq. ID no. 12580395
MGSEGPKAITIHVTGFKKFLGVSENPTEKIANGLKSYVEKRGLPSGLCLGSCSVLDTAGEGAKSKLYEVLESSVVSGDKNNNGTVVWLHLGVNSGATKFAIERQAVNEAHFRCPDELGWQPQRLPIVVEDGGISKAKETSCSTESIFQLLKKKGFEVVQSDDAGRFVCNYVYYHSLRFAEQKGHKSLFVHVPLFSKIDEDTQMQFVASLLEAIAATC

SEQ ID NO: 28688 - DNA, 998 bp, Arabidopsis thaliana
  misc_feature (1)..(998): Ceres Seq. ID no. 12384543
  misc_feature (1)..(998): Ortholog of  Ceres SEQ ID NO 12610385 as cited in SEQ ID NO 55938
  misc_feature (1)..(998): Ortholog of  Ceres SEQ ID NO 13661939 as cited in SEQ ID NO 61170
aatttcatttccatttcgattcgattcctcctttgtgtgggaggcctttgttcggtcaacttatgtgttctgtttttgtctcttttttattgattagggaccgatctatcaaggcttcaagggcaaacagaaatggaccacgacaagacaggatgccaaagcccacctgaaggtcccaagctatgtactaacaactgcggtttctttggaagcgctgccacaatgaacatgtgttctaagtgtcacaaggatatgttgttccaacaggagcagggcgctaagtttgcatctgcagtgtctggaacatcgtcatccagcaacatcataaaggaaacctttaccgctgcgttggtcgatattgaaaccaaatccgttgagccgatgactgtttctgtacagccatcctctgtccaagtcgttgcagaggtagtagcaccagaagaagctgcgaaaccaaagggaccaagccgatgtactacttgcaataagcgggttggcctgactggattcaaatgtcgctgtgggagcctcttctgcggaacacaccgctatgcagacatacatgactgctccttcaattaccatgctgctgcgcaagaggcgatagctaaggcaaacccggttgtgaaagcagagaagcttgacaaaatctgaaaatctaagtaaacttctctggtttcatcaggtggcctggtgtttccttctcctgtctgtgtctggttcaagtattctcatgttaaaaaggttttatataaggtcgaatgaaagcgtgcttgatctttagcgtcttccatctctctgcaatatttgtggtgtggaactttctattatctgtgtttgcaagcagagaaacgtgctcttaaaaaaaatgctttgtgtgtttatctttctactatttttgagcactgtgttattgtttcctgtttggtctgtatcatattgagattgtctctgtagctacatgaagcttatttaaaaaaggcctgtgtttgtccttc

SEQ ID NO: 28689 - protein, 173 aa, Arabidopsis thaliana
  peptide (1)..(173): Ceres Seq. ID no. 12384544
MDHDKTGCQSPPEGPKLCTNNCGFFGSAATMNMCSKCHKDMLFQQEQGAKFASAVSGTSSSSNIIKETFTAALVDIETKSVEPMTVSVQPSSVQVVAEVVAPEEAAKPKGPSRCTTCNKRVGLTGFKCRCGSLFCGTHRYADIHDCSFNYHAAAQEAIAKANPVVKAEKLDKI

SEQ ID NO: 28690 - protein, 143 aa, Arabidopsis thaliana
  peptide (1)..(143): Ceres Seq. ID no. 12384545
MNMCSKCHKDMLFQQEQGAKFASAVSGTSSSSNIIKETFTAALVDIETKSVEPMTVSVQPSSVQVVAEVVAPEEAAKPKGPSRCTTCNKRVGLTGFKCRCGSLFCGTHRYADIHDCSFNYHAAAQEAIAKANPVVKAEKLDKI

SEQ ID NO: 28691 - protein, 141 aa, Arabidopsis thaliana
  peptide (1)..(141): Ceres Seq. ID no. 12384546
MCSKCHKDMLFQQEQGAKFASAVSGTSSSSNIIKETFTAALVDIETKSVEPMTVSVQPSSVQVVAEVVAPEEAAKPKGPSRCTTCNKRVGLTGFKCRCGSLFCGTHRYADIHDCSFNYHAAAQEAIAKANPVVKAEKLDKI

SEQ ID NO: 28692 - DNA, 905 bp, Arabidopsis thaliana
  misc_feature (1)..(905): Ceres Seq. ID no. 12711793
  misc_feature (1)..(905): Ortholog of  Ceres SEQ ID NO 13599287 as cited in SEQ ID NO 338
  misc_feature (1)..(905): Ortholog of  Ceres SEQ ID NO 15172934 as cited in SEQ ID NO 51783
  misc_feature (1)..(905): Ortholog of  Ceres SEQ ID NO 14314817 as cited in SEQ ID NO 52571
  misc_feature (1)..(905): Ortholog of  Ceres SEQ ID NO 15174056 as cited in SEQ ID NO 0
gtgagaaaagaatcttcttttgcaaatgcttcgctcctcaattcgacttctctatataagaagaaccagtcctctgcttcgaagtttatcatcatcatcatcatcatcatcatcaaaacgattcgattctgcgaaaccacttttcaattctcatcggattatttctcttccaatttctacaacgggagctaaactatctagatcggagcattcaatggctgcttcttccgaacccaaatctctttacgatttcaccgtcaaggatgctaagggaaacgatgttgatctaagcatctacaaagggaaggttcttttgattgtgaacgttgcttctcaatgtggcttgactaattcgaattatactgagcttgcgcagctgtatgagaagtacaaaggccatggtttcgagattcttgcgtttccgtgtaaccagtttgggaatcaagagcctggtactaatgaagagattgttcagtttgcttgtactcgtttcaaggctgagtacccgattttcgacaaggttgatgttaacggtgacaaagctgccccagtctacaagtttctgaaatcaagcaaaggcgggctctttggagacggcattaagtggaacttcgcaaagttcttggttgacaaagatggaaatgttgtcgatcgtttcgcaccaactacctcacctctcagcattgagaaggatgtgaagaagttgttgggagttactgcttaagcaaggcaagattgcataattagacaaataaaagctcattagtattgtattaccaatactgtgtagtaagctgagttcgtgagtgtgtgcctttgggaccgcgtacaattataatccgttttttagcggccaaactatgtaataatcgtagatctaaatatcagatttcccgttaccttac

SEQ ID NO: 28693 - protein, 232 aa, Arabidopsis thaliana
  peptide (1)..(232): Ceres Seq. ID no. 12711794
MLRSSIRLLYIRRTSPLLRSLSSSSSSSSSKRFDSAKPLFNSHRIISLPISTTGAKLSRSEHSMAASSEPKSLYDFTVKDAKGNDVDLSIYKGKVLLIVNVASQCGLTNSNYTELAQLYEKYKGHGFEILAFPCNQFGNQEPGTNEEIVQFACTRFKAEYPIFDKVDVNGDKAAPVYKFLKSSKGGLFGDGIKWNFAKFLVDKDGNVVDRFAPTTSPLSIEKDVKKLLGVTA

SEQ ID NO: 28694 - protein, 169 aa, Arabidopsis thaliana; identical to SEQ ID NO: 28163
  peptide (1)..(169): Ceres Seq. ID no. 12711795

SEQ ID NO: 28695 - DNA, 1645 bp, Arabidopsis thaliana
  misc_feature (1)..(1645): Ceres Seq. ID no. 12343397
  misc_feature (1)..(1645): Ortholog of  Ceres SEQ ID NO 14303850 as cited in SEQ ID NO 53464
  misc_feature (1)..(1645): Ortholog of  Ceres SEQ ID NO 13656177 as cited in SEQ ID NO 64997
aaagcatttgggggaaatcaatcgaaaaccctaggagagataaaaacaaaaatctagacggagatttatggcgacagcgaatcctggccgtggaggtggtagaagaggcggtggagctatggatgacgataagttggtcttcgagactaccgatggaattgagcccatcacgagcttcaatgatatgggcattaaggaagatgtgcttcgcggtgtctacgaatatggattcgagaagccttccgcgattcagcagagggctgttatgccgattcttcaaggacgtgatgttattgctcaagctcagtccggtaccgggaagacatctatgattgctctctccgtttgtcaagtcgttgatacttcttctagagaggttcaggccttgatattatccccaacaagagagctggctacacaaacagagaagacgatacaagctattggattacatgccaatattcaggcacatgcttgcatcggtgggaatagtgttggagaagacatcaggaagctggagcatggtgttcatgttgtgtctgggacacctggtcgtgtctgtgacatgataaagaggagaagtcttcgtaccagagctattaaacttctgattcttgatgaatcagatgaaatgctgagcagagggttcaaggaccagatctatgatgtttacagatatcttccaccagatcttcaggtttgcttggtttctgcaactcttcctcacgagattttggagatgacatccaagtttatgacagaaccagtgaagatacttgtgaagcgtgatgagttgactcttgaaggaatcaaacaattttttgttgctgttgagaaggaagagtggaaatttgatacactctgtgatctttatgacacgcttactatcactcaagctgttatcttctgcaatactaaacgaaaggtggattatcttagtgagaaaatgagaagtcacaacttcactgtctcatcaatgcatggagacatgcctcagaaggagagagacgccatcatgaatgagtttcggtcaggtgatagtcgtgttttgataacaacagatgtatgggcacgtgggattgatgtgcaacaagtttctcttgttatcaattatgatctccccaacaaccgtgagctctacatccatcgtattgggcggtctggtcgattcgggcgtaagggtgttgcaatcaactttgttaaaagcgacgacatcaagattctcagagacattgagcagtactacagtacccagattgatgagatgccaatgaatgtagctgatcttatctaaaagagcttgtctgagatttttgtgctttcagcggggaagtgtctggatgaaaaagtattgttgagcgcttctgtcaaattattgcactatcttaacggtgtatttcctttgatgtttctgtgggctcttttgaacaaacttaaactcgcgtgtggtaaatgtttaatgacttgagaagcgatttaggtttagggtttggaccgtttggtttttcgtttcctcgtaattgattctgggggctttgattgtggtttgtgggtcaaaactctcaactatcactacttgtaagacttttgctcgacagttgaaacggttcattgttatcttatttcgtaaagcttggatcattgc

SEQ ID NO: 28696 - protein, 408 aa, Arabidopsis thaliana
  peptide (1)..(408): Ceres Seq. ID no. 12343398
MATANPGRGGGRRGGGAMDDDKLVFETTDGIEPITSFNDMGIKEDVLRGVYEYGFEKPSAIQQRAVMPILQGRDVIAQAQSGTGKTSMIALSVCQVVDTSSREVQALILSPTRELATQTEKTIQAIGLHANIQAHACIGGNSVGEDIRKLEHGVHVVSGTPGRVCDMIKRRSLRTRAIKLLILDESDEMLSRGFKDQIYDVYRYLPPDLQVCLVSATLPHEILEMTSKFMTEPVKILVKRDELTLEGIKQFFVAVEKEEWKFDTLCDLYDTLTITQAVIFCNTKRKVDYLSEKMRSHNFTVSSMHGDMPQKERDAIMNEFRSGDSRVLITTDVWARGIDVQQVSLVINYDLPNNRELYIHRIGRSGRFGRKGVAINFVKSDDIKILRDIEQYYSTQIDEMPMNVADLI

SEQ ID NO: 28697 - protein, 391 aa, Arabidopsis thaliana
  peptide (1)..(391): Ceres Seq. ID no. 12343399
MDDDKLVFETTDGIEPITSFNDMGIKEDVLRGVYEYGFEKPSAIQQRAVMPILQGRDVIAQAQSGTGKTSMIALSVCQVVDTSSREVQALILSPTRELATQTEKTIQAIGLHANIQAHACIGGNSVGEDIRKLEHGVHVVSGTPGRVCDMIKRRSLRTRAIKLLILDESDEMLSRGFKDQIYDVYRYLPPDLQVCLVSATLPHEILEMTSKFMTEPVKILVKRDELTLEGIKQFFVAVEKEEWKFDTLCDLYDTLTITQAVIFCNTKRKVDYLSEKMRSHNFTVSSMHGDMPQKERDAIMNEFRSGDSRVLITTDVWARGIDVQQVSLVINYDLPNNRELYIHRIGRSGRFGRKGVAINFVKSDDIKILRDIEQYYSTQIDEMPMNVADLI

SEQ ID NO: 28698 - protein, 369 aa, Arabidopsis thaliana
  peptide (1)..(369): Ceres Seq. ID no. 12343400
MGIKEDVLRGVYEYGFEKPSAIQQRAVMPILQGRDVIAQAQSGTGKTSMIALSVCQVVDTSSREVQALILSPTRELATQTEKTIQAIGLHANIQAHACIGGNSVGEDIRKLEHGVHVVSGTPGRVCDMIKRRSLRTRAIKLLILDESDEMLSRGFKDQIYDVYRYLPPDLQVCLVSATLPHEILEMTSKFMTEPVKILVKRDELTLEGIKQFFVAVEKEEWKFDTLCDLYDTLTITQAVIFCNTKRKVDYLSEKMRSHNFTVSSMHGDMPQKERDAIMNEFRSGDSRVLITTDVWARGIDVQQVSLVINYDLPNNRELYIHRIGRSGRFGRKGVAINFVKSDDIKILRDIEQYYSTQIDEMPMNVADLI

SEQ ID NO: 28699 - DNA, 1047 bp, Arabidopsis thaliana
  misc_feature (1)..(1047): Ceres Seq. ID no. 12333793
  misc_feature (1)..(1047): Ortholog of  Ceres SEQ ID NO 13595627 as cited in SEQ ID NO 59826
  misc_feature (1)..(1047): Ortholog of  Ceres SEQ ID NO 15177889 as cited in SEQ ID NO 0
aggaagcttcgtggaagctgccatggcttctctctttctctccccatttaataccctccttcctcgttctttcctctcaaaccaaaaaacaagaagaagaatcaatactcaaatctcaatcatctctctttcttatcttcttctccgatatgaagctcgccgctagcctcaaccgcctcagccccaaacgtctcttccgtaccaaatcaaaagcttccgtctccagatctgagccttcttccttcagctccaatgcttcttcctcttcctctgatggatcttacggtaacctcaaacaaggtccaaccgcgactccgatcagtgttctccctcaaaactccggcgatttttacactgagcttgttcaagcttttaaactgatcgatcgtgatgacgacggtgttgtttccagaggagatctcgcggcgttgattagcaggttaagtcatgaaccaccgagtcaagaagaggtgagtttgatgctaagagaagtagacggcggagacggtggttgtatcagccttgaagatcttgctagccgtgtcgctggtacttccggtgaaggctctgttgagacggaggagctgagagaggtgttcgagatttttgacgtggatcgtaacggaaaaatatcggcggaggagttacacagagtttttggagtgatcggagatgaacggtgcacgttagaagagtgtatgcgtatgatagcgacggttgatggaaacggtgacggttttgtttgcttcgatgacttttgccgcatgatggttccagcgatgaatgatcatcatcattagaatcatgtttgattgatgatggtgacatcaccatactctttgtcttttttttttgttaccgaaaaattatttattttactgtttttgcggtggttattgtgacggcaagcatttaaattgttcaccgtcggtttaaattcagacgtctttctcaaaatggttatatactaatgtgaacatgtttctagtttcactcttctgttggttcaaaacaaactagtttcctcgaaacgtattaacatatggt

SEQ ID NO: 28700 - protein, 265 aa, Arabidopsis thaliana
  peptide (1)..(265): Ceres Seq. ID no. 12333794
EASWKLPWLLSFSPHLIPSFLVLSSQTKKQEEESILKSQSSLFLIFFSDMKLAASLNRLSPKRLFRTKSKASVSRSEPSSFSSNASSSSSDGSYGNLKQGPTATPISVLPQNSGDFYTELVQAFKLIDRDDDGVVSRGDLAALISRLSHEPPSQEEVSLMLREVDGGDGGCISLEDLASRVAGTSGEGSVETEELREVFEIFDVDRNGKISAEELHRVFGVIGDERCTLEECMRMIATVDGNGDGFVCFDDFCRMMVPAMNDHHH

SEQ ID NO: 28701 - protein, 216 aa, Arabidopsis thaliana
  peptide (1)..(216): Ceres Seq. ID no. 12333795
MKLAASLNRLSPKRLFRTKSKASVSRSEPSSFSSNASSSSSDGSYGNLKQGPTATPISVLPQNSGDFYTELVQAFKLIDRDDDGVVSRGDLAALISRLSHEPPSQEEVSLMLREVDGGDGGCISLEDLASRVAGTSGEGSVETEELREVFEIFDVDRNGKISAEELHRVFGVIGDERCTLEECMRMIATVDGNGDGFVCFDDFCRMMVPAMNDHHH

SEQ ID NO: 28702 - DNA, 1351 bp, Arabidopsis thaliana; identical to SEQ ID NO: 24717
  misc_feature (1)..(1351): Ceres Seq. ID no. 12334222
  misc_feature (1)..(1351): Ortholog of  Ceres SEQ ID NO 13502858 as cited in SEQ ID NO 65109

SEQ ID NO: 28703 - protein, 309 aa, Arabidopsis thaliana; identical to SEQ ID NO: 24718
  peptide (1)..(309): Ceres Seq. ID no. 12334223

SEQ ID NO: 28704 - protein, 267 aa, Arabidopsis thaliana; identical to SEQ ID NO: 24719
  peptide (1)..(267): Ceres Seq. ID no. 12334224

SEQ ID NO: 28705 - protein, 238 aa, Arabidopsis thaliana; identical to SEQ ID NO: 24720
  peptide (1)..(238): Ceres Seq. ID no. 12334225

SEQ ID NO: 28706 - DNA, 1511 bp, Arabidopsis thaliana
  misc_feature (1)..(1511): Ceres Seq. ID no. 12394381
  misc_feature (1)..(1511): Ortholog of  Ceres SEQ ID NO 13594814 as cited in SEQ ID NO 51876
gaacaaacccaaaaagatacatatcaagagattaaaccttatccaactaagagaagccatttttattttttttgggtctctgagttgtgtattgagcttcatctccttcaaatggcttccttatcaaccacttccctaagcttcaaagctccgtccaccacaatttcacaggttttaaggaaagcctcaagttctcagtctgtgacctttggtcgtttcacgtcttcaacaaagagccttcgtcttcaaatcagttgtgccgcgaaagcagagacggtgcagaaagtgagtgacattgtaaaagaacaattggctttagctgctgatgttccgctcactgctgaatccaagttctctgctcttggtgccgattctctcgacaccgtggagatagtgatggcgttggaggaaaagtttaacataagtgtggaggaatctgatgctcaaaacattacgaccatccaagaggcggctgatttgatagaggaccttgttcaaaagaaacccgcggcggaaacttcctgaaccggctgtcttttctttcctgacctattcttgccttcagagcgttttattacggtatattagaccgtttgttatttttatttatttcggaagctaagattgggtgttgacaatgagacaactttggtacgttgagattgattctttgtggtgattggtcttatgacgaattcataattgtgtattgtttcaaaaaagctgagtatgtgtggtgatatagagtttgtgtggtgagagcaacaatggagtttgtgaagattgtgtagcttttgtactttacatcacggagaaacctctctagattttgattttgtgtagatttagtgcaaaacaacgacaaaagaggcggtgatgacgtgacacaactccataaatcgaaaaccagttctgattgatttcatcttcttcttgaatgaagcttttttgatttttttttgaatcactggtacagttctgatttacttatttttggccagttatatatgttagttatacaaaaaatgaattttgattgaattttttattggccaagttatatatgtgagcttgatcaaattcaatttgttatagtcatcgaagccaacaaaattcgaaagtgaaaacataataagaaagtttgtttcctttagttgccatttcaggcggtgagagagttagcacatcgtgttttgggttgatgtaggaagaacgaagagaaatctctggacttgaaaaatcatggaatctttgctttcacagccgatgctttgcgtttatactctaacgctttacaagtatccatccacaagtgaccatttcatgttgaacatatagttagagttatatggatcctttacatttttctattgacttaatcatatccaaaattgtttatggatgttgttggacgcacccgaccatttatagtcgtccatatggataaaccaatttgtaaaattacatatgaacacaagttatatgaagggaaactcaagttaacaccaaag

SEQ ID NO: 28707 - protein, 174 aa, Arabidopsis thaliana
  peptide (1)..(174): Ceres Seq. ID no. 12394382
EQTQKDTYQEIKPYPTKRSHFYFFWVSELCIELHLLQMASLSTTSLSFKAPSTTISQVLRKASSSQSVTFGRFTSSTKSLRLQISCAAKAETVQKVSDIVKEQLALAADVPLTAESKFSALGADSLDTVEIVMALEEKFNISVEESDAQNITTIQEAADLIEDLVQKKPAAETS

SEQ ID NO: 28708 - protein, 137 aa, Arabidopsis thaliana
  peptide (1)..(137): Ceres Seq. ID no. 12394383
MASLSTTSLSFKAPSTTISQVLRKASSSQSVTFGRFTSSTKSLRLQISCAAKAETVQKVSDIVKEQLALAADVPLTAESKFSALGADSLDTVEIVMALEEKFNISVEESDAQNITTIQEAADLIEDLVQKKPAAETS

SEQ ID NO: 28709 - DNA, 873 bp, Arabidopsis thaliana
  misc_feature (1)..(873): Ceres Seq. ID no. 12602545
  misc_feature (1)..(873): Ortholog of  Ceres SEQ ID NO 13660094 as cited in SEQ ID NO 60820
  misc_feature (1)..(873): Ortholog of  Ceres SEQ ID NO 13656436 as cited in SEQ ID NO 69154
aatacagtatatactttttctgtaaatcacacgaagaagaagaaccaaaagagagagattgtgaaagaagaaaacagagacagtttcttcgctgaaaagaaaaaccaaatcagctaaatccctaaaagtttccgtcaatgtcttctcgccggagagttcttctcaaggttatcattctcggtgatagcggtgttgggaagacttcgttgatgaatcagtttgtgaatcgaaagtttagtaatcagtataaagctacgattggagcagattttttgactaaagaggttcaaatagatgacagaatcttcactttacagatttgggatactgctggacaagaaagatttcaaagtttgggagttgcgttttaccgaggagcggattgttgtgttcttgtctatgatgtcaatgttatgaaatcttttgataatcttaataactggagggaagagttcttgattcaggctagtccttcagatcctgaaaactttccatttgttgtgttggggaacaagactgatgttgatggtggaaagagcagagtggtttctgagaaaaaggcaaaggcatggtgtgcatctaaaggaaacattccttactttgagacttccgccaaagaaggattcaatgtagatgcggctttcgaatgcattaccaaaaatgctttcaagaatgaacctgaagaagaaccgtaccttcccgacaccattgatgttgccggaggtcagcaacaaagatcaacagggtgtgaatgctaatcaagcaaaagtttgttgcagatacattgttttgtttggcacattttgattttgtaacaatatatttataacttccagaaatgtattttcagattcattttgagttacagattgt

SEQ ID NO: 28710 - protein, 206 aa, Arabidopsis thaliana
  peptide (1)..(206): Ceres Seq. ID no. 12602546
MSSRRRVLLKVIILGDSGVGKTSLMNQFVNRKFSNQYKATIGADFLTKEVQIDDRIFTLQIWDTAGQERFQSLGVAFYRGADCCVLVYDVNVMKSFDNLNNWREEFLIQASPSDPENFPFVVLGNKTDVDGGKSRVVSEKKAKAWCASKGNIPYFETSAKEGFNVDAAFECITKNAFKNEPEEEPYLPDTIDVAGGQQQRSTGCEC

SEQ ID NO: 28711 - protein, 182 aa, Arabidopsis thaliana
  peptide (1)..(182): Ceres Seq. ID no. 12602547
MNQFVNRKFSNQYKATIGADFLTKEVQIDDRIFTLQIWDTAGQERFQSLGVAFYRGADCCVLVYDVNVMKSFDNLNNWREEFLIQASPSDPENFPFVVLGNKTDVDGGKSRVVSEKKAKAWCASKGNIPYFETSAKEGFNVDAAFECITKNAFKNEPEEEPYLPDTIDVAGGQQQRSTGCEC

SEQ ID NO: 28712 - protein, 114 aa, Arabidopsis thaliana
  peptide (1)..(114): Ceres Seq. ID no. 12602548
MKSFDNLNNWREEFLIQASPSDPENFPFVVLGNKTDVDGGKSRVVSEKKAKAWCASKGNIPYFETSAKEGFNVDAAFECITKNAFKNEPEEEPYLPDTIDVAGGQQQRSTGCEC

SEQ ID NO: 28713 - DNA, 908 bp, Arabidopsis thaliana
  misc_feature (1)..(908): Ceres Seq. ID no. 12332602
  misc_feature (1)..(908): Ortholog of  Ceres SEQ ID NO 12626108 as cited in SEQ ID NO 64252
agtccgcgaaaaaatggcgtttctctgttcgtctctcccaagttcatcctctatcgccattttcggcgacccaaacacagatggatcatcacgctcgtatctttcgattccttcattgaagttacggttccgtcccgtcgctgcttcctcacacatttgtgctccagcgatcgacaagtcgactttcgtcatatccgaatcggtgtcagaagatgagctttgggctgcagcttgtctccgcgtacgaaccttcaacgaactcaatccttctgcttacaatatccaagatcatagaagatacttggcagagcgtgaattcgaggcgcttaaggagagaacttcagggaagagggaagggtttacgcgggtcgcttgcataaatgctacccttccattgtcgcaattatcaagctcttttgaggatttatgctctgcatgtaagttctctgatggcatagaagacagagttgtggtgggaagccttgatcttaaccaatgtcgttggcttcctgatgaaattgctggaacaaaaccagaggggattggtgtggattttgctagagcatacttgagcaacgtctgtgttgcaaaagagctgcatcgtaatggagttggttacaaacttattgacaagtctaagagagttgctggagaatggggcataacggatatgtacgtgcatgtgacggtagacaatgaagcagcgaagagtctatacatgaaaagtgggtttgagcaagagaccgctgagccagcgtggcaagctcgatacctcaataggccacaacggctcctcctctggctcgcccttcctacctccccaatcatgtccatgtaattgtaaattttccaatatatccaatatgtcaacctgttcttggcaatcaataaaagctttataactctcg

SEQ ID NO: 28714 - protein, 278 aa, Arabidopsis thaliana
  peptide (1)..(278): Ceres Seq. ID no. 12332603
VREKMAFLCSSLPSSSSIAIFGDPNTDGSSRSYLSIPSLKLRFRPVAASSHICAPAIDKSTFVISESVSEDELWAAACLRVRTFNELNPSAYNIQDHRRYLAEREFEALKERTSGKREGFTRVACINATLPLSQLSSSFEDLCSACKFSDGIEDRVVVGSLDLNQCRWLPDEIAGTKPEGIGVDFARAYLSNVCVAKELHRNGVGYKLIDKSKRVAGEWGITDMYVHVTVDNEAAKSLYMKSGFEQETAEPAWQARYLNRPQRLLLWLALPTSPIMSM

SEQ ID NO: 28715 - protein, 274 aa, Arabidopsis thaliana
  peptide (1)..(274): Ceres Seq. ID no. 12332604
MAFLCSSLPSSSSIAIFGDPNTDGSSRSYLSIPSLKLRFRPVAASSHICAPAIDKSTFVISESVSEDELWAAACLRVRTFNELNPSAYNIQDHRRYLAEREFEALKERTSGKREGFTRVACINATLPLSQLSSSFEDLCSACKFSDGIEDRVVVGSLDLNQCRWLPDEIAGTKPEGIGVDFARAYLSNVCVAKELHRNGVGYKLIDKSKRVAGEWGITDMYVHVTVDNEAAKSLYMKSGFEQETAEPAWQARYLNRPQRLLLWLALPTSPIMSM

SEQ ID NO: 28716 - DNA, 933 bp, Arabidopsis thaliana
  misc_feature (1)..(933): Ceres Seq. ID no. 13487208
  misc_feature (1)..(933): Ortholog of  Ceres SEQ ID NO 15172991 as cited in SEQ ID NO 51333
  misc_feature (1)..(933): Ortholog of  Ceres SEQ ID NO 13594870 as cited in SEQ ID NO 51929
  misc_feature (1)..(933): Ortholog of  Ceres SEQ ID NO 12610679 as cited in SEQ ID NO 56077
  misc_feature (1)..(933): Ortholog of  Ceres SEQ ID NO 12635481 as cited in SEQ ID NO 0
aacatttcgtgcgaaatttcaatttttttgcaatatcctttattgattgaccgaagatattttacaagcctttctccactaagcccttctctcttcttctcttggcctctcacttgaatctcccacaaagcgatcaatcacaaattccttcttctctctctctcttttcgtccctaagaatcaattatgaaaggagctaaatcaaagactgaaaccaggagctccaagctctctgtgaccaagaagccggctaaaggagcagggcgtggcaaagctgctgctaaggaccccaacaaaccaaagaggccagccagtgctttcttcgttttcatggaagatttccgtgagactttcaagaaggaaaaccccaagaacaagtctgtagctactgttggaaaagctgctggagacaagtggaagtccttgtctgattctgagaaagctccttatgttgctaaggctgagaaacgcaaggttgaatatgagaagaacattaaagcttacaacaagaaactggaggaaggtccaaaagaagatgaggaatctgacaagtcagtgtcagaggtcaatgacgaggatgatgctgaggatggtagtgaagaggaggaggacgatgactaagaagctgaatgttggtagcattagtatagatggctgcaaaaatctctctgtttttatctttacttgaaatgttaacggggctgattaaaatgggtctttctttttatctttttatatttccacaatctctcactaaagccctctgaatggagaaagtgaattgtagaatgtttagatggtgaaagagagacttgcagctctgtactctttgctttataaaacgatttagttttcttttctcagtttattatattgttgaattgatgatgatgttagctaaatctctttgtactttgtaaaagaaatggtccc

SEQ ID NO: 28717 - protein, 144 aa, Arabidopsis thaliana
  peptide (1)..(144): Ceres Seq. ID no. 13487209
MKGAKSKTETRSSKLSVTKKPAKGAGRGKAAAKDPNKPKRPASAFFVFMEDFRETFKKENPKNKSVATVGKAAGDKWKSLSDSEKAPYVAKAEKRKVEYEKNIKAYNKKLEEGPKEDEESDKSVSEVNDEDDAEDGSEEEEDDD

SEQ ID NO: 28718 - protein, 96 aa, Arabidopsis thaliana
  peptide (1)..(96): Ceres Seq. ID no. 13487210
MEDFRETFKKENPKNKSVATVGKAAGDKWKSLSDSEKAPYVAKAEKRKVEYEKNIKAYNKKLEEGPKEDEESDKSVSEVNDEDDAEDGSEEEEDDD

SEQ ID NO: 28719 - protein, 79 aa, Arabidopsis thaliana
  peptide (1)..(79): Ceres Seq. ID no. 13487211
MLLRLRNARLNMRRTLKLTTRNWRKVQKKMRNLTSQCQRSMTRMMLRMVVKRRRTMTKKLNVGSISIDGCKNLSVFIFT

SEQ ID NO: 28720 - DNA, 651 bp, Arabidopsis thaliana
  misc_feature (1)..(651): Ceres Seq. ID no. 12776716
  misc_feature (1)..(651): Ortholog of  Ceres SEQ ID NO 12556948 as cited in SEQ ID NO 54
aaaccgaccggtttaactcccaagagctacttggagttgtcgtaaacacagagatcacaaacttaccaaattttcacacaccgacatgtctagatccttagctctcgtttacttatccttactttgtcttcaaacccatctctcaatctccgtcacagttccgattccgtcggtaaacggcgaaatcgacgcaatgctgaaccggaacggcgtaatcggagaggaataaggagaggagatgatgccatcggagataagtcggagagtaatgatgatgcggaaacagtacataagctacgaaactttaaggagagatatggttccttgtcagaaaccaggtgcttcttattacgcttgtcgctctggtcaggctaatgcttacaacagaggatgtagtgtcattactaggtgtgctagagacactaacgacatcaagacttgaaaacattggggtctttaagtacatttgagttttaaactcagatgctctagaggcaagtgaaatcttattattcttgtcttttgttttgtaatgttgttgtttacattagatttcttaattattgatatgtaattttggctattaatgttcaagtaattgatatttatagtcttgaaagtgttgagtggagtaatagatggaagattgtg

SEQ ID NO: 28721 - protein, 67 aa, Arabidopsis thaliana
  peptide (1)..(67): Ceres Seq. ID no. 12776717
MMPSEISRRVMMMRKQYISYETLRRDMVPCQKPGASYYACRSGQANAYNRGCSVITRCARDTNDIKT

SEQ ID NO: 28722 - protein, 66 aa, Arabidopsis thaliana
  peptide (1)..(66): Ceres Seq. ID no. 12776718
MPSEISRRVMMMRKQYISYETLRRDMVPCQKPGASYYACRSGQANAYNRGCSVITRCARDTNDIKT

SEQ ID NO: 28723 - protein, 57 aa, Arabidopsis thaliana
  peptide (1)..(57): Ceres Seq. ID no. 12776719
MMMRKQYISYETLRRDMVPCQKPGASYYACRSGQANAYNRGCSVITRCARDTNDIKT

SEQ ID NO: 28724 - DNA, 515 bp, Arabidopsis thaliana
  misc_feature (1)..(515): Ceres Seq. ID no. 12331831
  misc_feature (1)..(515): Ortholog of  Ceres SEQ ID NO 13661547 as cited in SEQ ID NO 60586
atttccgatctcaaatccttttgtcccacttgctataatggcgttcgtttccagctttcgccgtctcgttgccggatccagtagcctcttgtcttctccatccttgtgtgttcgccgctgctcaactcttacgtctccccggctcttcgttagcggtctctccagactcacaacaaatgaaaagcttcaggatgcatttgcttcttttggacagctcgtcgatgcgagagtgatcacagacagagattccgggagatcaaagggttttggttttgtgacatatgcaacaattgaagatgcagagaaagccaaggcagagatgaatgcaaagttcttggacggttgggtaatttttgttgatcctgcaagacctagagaaccaagacggcctctgcaacaggaaccgcttcggccttcctccgaatctggtttcacaaccaacaaaaccatcggatggtgtaaatgaacaaaatccaactacttatgctatgaaatgaaaataatttcttggagcc

SEQ ID NO: 28725 - protein, 154 aa, Arabidopsis thaliana
  peptide (1)..(154): Ceres Seq. ID no. 12331832
FPISNPFVPLAIMAFVSSFRRLVAGSSSLLSSPSLCVRRCSTLTSPRLFVSGLSRLTTNEKLQDAFASFGQLVDARVITDRDSGRSKGFGFVTYATIEDAEKAKAEMNAKFLDGWVIFVDPARPREPRRPLQQEPLRPSSESGFTTNKTIGWCK

SEQ ID NO: 28726 - protein, 142 aa, Arabidopsis thaliana
  peptide (1)..(142): Ceres Seq. ID no. 12331833
MAFVSSFRRLVAGSSSLLSSPSLCVRRCSTLTSPRLFVSGLSRLTTNEKLQDAFASFGQLVDARVITDRDSGRSKGFGFVTYATIEDAEKAKAEMNAKFLDGWVIFVDPARPREPRRPLQQEPLRPSSESGFTTNKTIGWCK

SEQ ID NO: 28727 - DNA, 1164 bp, Arabidopsis thaliana
  misc_feature (1)..(1164): Ceres Seq. ID no. 12420728
  misc_feature (1)..(1164): Ortholog of  Ceres SEQ ID NO 15177746 as cited in SEQ ID NO 57935
ccattaattactaaacccaaacccaaccaaagatcttcacaaagaaaaaaacaattggtggtatcaatggggaagaagaagatgaaactctcttctctgttcaaaggcggagccggaggattactagcggttcctctctgttacaatgccaaaactctttcgttccgagtcggcgacgacatgatcaagacggtgaactctgttttcttcgaccaccaccacaacaacaacaatggaggagatttgttggaagcggagacgcctgagtcatggtttactaactcgtccgagacagcgagtcactcaaccgagtcggatcaagaccttgacgctgagtccttagagatggtggttcgtggcgttgttagatcggagcggttattcttcgatccaggagttacgagttcgattctggaagagattgaagagaaatcgaaatcggatttgaaatcgaaggaaacggttgcggtgggagaagatcggagtacgccgattgaggagattagtgtcgcggtggcgatggaatccgaggatccgtacggtgatttccggcgatcgatggaggagatggtgacgagtcacggtgagttggctaaagattgggagagcttggaatcgatgctcgcttggtatttgaggatgaatgggaggaagagtcacggcgttatcgtcagtgcttttgttgatcttctctctggactctctgattccggcgccggaataacgtcggcttcggtatcggattcggctcgttattcaaccgccgtttcgtctttgccgtcgtcgccggtttattcgttatctcaaggtcagacggagattcaagaggaagagagacggagctgttaaaaataaaaaaaggcttaagattcggttttaaattttttaatctccggttttgtttagattaattaaccctttttggattttgtaaaaagtaattagtggttagaggaaaaagaaccattaaatatatatcaaaaatatttttagagccattattgttgatttatgtataacagtgccttttgtcataactcgaaagttacactatttttcccccaaaattcatgaaactcagcgaagtttatgccaacagattcagagaaattttgtataacagccccattttaaaaggaaatatacataagaataaattctgtg

SEQ ID NO: 28728 - protein, 282 aa, Arabidopsis thaliana
  peptide (1)..(282): Ceres Seq. ID no. 12420729
PLITKPKPNQRSSQRKKQLVVSMGKKKMKLSSLFKGGAGGLLAVPLCYNAKTLSFRVGDDMIKTVNSVFFDHHHNNNNGGDLLEAETPESWFTNSSETASHSTESDQDLDAESLEMVVRGVVRSERLFFDPGVTSSILEEIEEKSKSDLKSKETVAVGEDRSTPIEEISVAVAMESEDPYGDFRRSMEEMVTSHGELAKDWESLESMLAWYLRMNGRKSHGVIVSAFVDLLSGLSDSGAGITSASVSDSARYSTAVSSLPSSPVYSLSQGQTEIQEEERRSC

SEQ ID NO: 28729 - protein, 260 aa, Arabidopsis thaliana
  peptide (1)..(260): Ceres Seq. ID no. 12420730
MGKKKMKLSSLFKGGAGGLLAVPLCYNAKTLSFRVGDDMIKTVNSVFFDHHHNNNNGGDLLEAETPESWFTNSSETASHSTESDQDLDAESLEMVVRGVVRSERLFFDPGVTSSILEEIEEKSKSDLKSKETVAVGEDRSTPIEEISVAVAMESEDPYGDFRRSMEEMVTSHGELAKDWESLESMLAWYLRMNGRKSHGVIVSAFVDLLSGLSDSGAGITSASVSDSARYSTAVSSLPSSPVYSLSQGQTEIQEEERRSC

SEQ ID NO: 28730 - protein, 255 aa, Arabidopsis thaliana
  peptide (1)..(255): Ceres Seq. ID no. 12420731
MKLSSLFKGGAGGLLAVPLCYNAKTLSFRVGDDMIKTVNSVFFDHHHNNNNGGDLLEAETPESWFTNSSETASHSTESDQDLDAESLEMVVRGVVRSERLFFDPGVTSSILEEIEEKSKSDLKSKETVAVGEDRSTPIEEISVAVAMESEDPYGDFRRSMEEMVTSHGELAKDWESLESMLAWYLRMNGRKSHGVIVSAFVDLLSGLSDSGAGITSASVSDSARYSTAVSSLPSSPVYSLSQGQTEIQEEERRSC

SEQ ID NO: 28731 - DNA, 695 bp, Arabidopsis thaliana
  misc_feature (1)..(695): Ceres Seq. ID no. 12370089
  misc_feature (1)..(695): Ortholog of  Ceres SEQ ID NO 12471935 as cited in SEQ ID NO 122
  misc_feature (1)..(695): Ortholog of  Ceres SEQ ID NO 13594582 as cited in SEQ ID NO 51986
  misc_feature (1)..(695): Ortholog of  Ceres SEQ ID NO 13661310 as cited in SEQ ID NO 61077
aattccacaatcatccgatatcaaacaagctatggcgccctttccactctctttgatttttggaaagaaaaaacgtcgtcgcgacgacgagatacgaagacaaaagccgacgctcaagggtgttatgacggctttttttgccactgaagctgcaatatgcctcttgttgctggccggtatatctctaaccggcacagccgtggcactattcgcgtccatgccgctattcctcgtttttagccccgttcttgtacccgcgggtattgccaccactattcttgcttcaggtttaatggccggaggcacctctggtgtgtcgggtctcaccatcttaatgtggctctacaagaaatatacgggtagagactttccaattaaaattccaggtgctgccgcagcaggtggagctgccccagccgctcccgctgcccctgcccctgctgcacctgccgctaaaccagcagctaaaccgggcgcgtgaaaattagtcaaggacatagacaaggatgcatgacgatatggaaaaatttgctctataaccattgaaattccataaattaaagatatttatccacttcttttttttgctaagtactaattattacgtactgatgaaactaaatttctcaatcgtcattctattgatgtatgccgtgctacagaaacaataacatatatatgcatgtttattgttt

SEQ ID NO: 28732 - protein, 159 aa, Arabidopsis thaliana
  peptide (1)..(159): Ceres Seq. ID no. 12370090
IPQSSDIKQAMAPFPLSLIFGKKKRRRDDEIRRQKPTLKGVMTAFFATEAAICLLLLAGISLTGTAVALFASMPLFLVFSPVLVPAGIATTILASGLMAGGTSGVSGLTILMWLYKKYTGRDFPIKIPGAAAAGGAAPAAPAAPAPAAPAAKPAAKPGA

SEQ ID NO: 28733 - protein, 149 aa, Arabidopsis thaliana
  peptide (1)..(149): Ceres Seq. ID no. 12370091
MAPFPLSLIFGKKKRRRDDEIRRQKPTLKGVMTAFFATEAAICLLLLAGISLTGTAVALFASMPLFLVFSPVLVPAGIATTILASGLMAGGTSGVSGLTILMWLYKKYTGRDFPIKIPGAAAAGGAAPAAPAAPAPAAPAAKPAAKPGA

SEQ ID NO: 28734 - protein, 118 aa, Arabidopsis thaliana
  peptide (1)..(118): Ceres Seq. ID no. 12370092
MTAFFATEAAICLLLLAGISLTGTAVALFASMPLFLVFSPVLVPAGIATTILASGLMAGGTSGVSGLTILMWLYKKYTGRDFPIKIPGAAAAGGAAPAAPAAPAPAAPAAKPAAKPGA

SEQ ID NO: 28735 - DNA, 940 bp, Arabidopsis thaliana
  misc_feature (1)..(940): Ceres Seq. ID no. 12327087
  misc_feature (1)..(940): Ortholog of  Ceres SEQ ID NO 14308320 as cited in SEQ ID NO 59093
  misc_feature (1)..(940): Ortholog of  Ceres SEQ ID NO 12590628 as cited in SEQ ID NO 0
aaaaaacattactcccgaagaagcccaaattgacgacaggcgttagtggcgattggcgatggcagctcctgcggtggaggcaaccgtcgcaagtgctctccgctctgtgattcttagagctcgtaaggcggcggagcaagtaggaagagatcccgagcgggtcagggtccttccagtctccaagactaaacccgtctcacttatccgccaaatctacgacgcaggtcaccgttgcttcggcgagaattacgttcaagaaatcatcgataaagctccacagcttccggaagatatagagtggcatttcgtggggcatttacagagcaacaaagccaaaacgctattgactggagtcccaaatttggcaatggttcatggtgtggatggagaaaaggtagcaaatcatctagatcgagctgtttcaaatcttgggagacatccactaaaggttttggtccaagtgaacacaagcggagaagtttctaaatctggaatcgaaccttctagcgttgtagagctagcaagacatgtgaaacatcactgtccaaatctggtattctccggattaatgactattgggatgcctgattatacgtctaccccagagaacttcaggacactttcaaactgtagagctgatgtatgcaaggcacttggaatggctgaggatcaatttgaactgtccatgggcatgtctggtgacttcgagctagcgattgagatgggaagcaccaatgtgagggttggttccaccattttcggaccaagagagtaccccaagaaaacaacttagctactatgctcaaacacttgttgtaaaattcatgtataatgttattttgtcgattattttaaacaattttattcttcattgataaacttaggtgtattcacaaagttactttatagaaaattagaaatcaatacattgttaagggcc

SEQ ID NO: 28736 - protein, 244 aa, Arabidopsis thaliana
  peptide (1)..(244): Ceres Seq. ID no. 12327088
MAAPAVEATVASALRSVILRARKAAEQVGRDPERVRVLPVSKTKPVSLIRQIYDAGHRCFGENYVQEIIDKAPQLPEDIEWHFVGHLQSNKAKTLLTGVPNLAMVHGVDGEKVANHLDRAVSNLGRHPLKVLVQVNTSGEVSKSGIEPSSVVELARHVKHHCPNLVFSGLMTIGMPDYTSTPENFRTLSNCRADVCKALGMAEDQFELSMGMSGDFELAIEMGSTNVRVGSTIFGPREYPKKTT

SEQ ID NO: 28737 - protein, 141 aa, Arabidopsis thaliana
  peptide (1)..(141): Ceres Seq. ID no. 12327089
MVHGVDGEKVANHLDRAVSNLGRHPLKVLVQVNTSGEVSKSGIEPSSVVELARHVKHHCPNLVFSGLMTIGMPDYTSTPENFRTLSNCRADVCKALGMAEDQFELSMGMSGDFELAIEMGSTNVRVGSTIFGPREYPKKTT

SEQ ID NO: 28738 - DNA, 840 bp, Arabidopsis thaliana
  misc_feature (1)..(840): Ceres Seq. ID no. 12332656
  misc_feature (1)..(840): Ortholog of  Ceres SEQ ID NO 13495070 as cited in SEQ ID NO 53216
  misc_feature (1)..(840): Ortholog of  Ceres SEQ ID NO 12598241 as cited in SEQ ID NO 61025
  misc_feature (1)..(840): Ortholog of  Ceres SEQ ID NO 13661333 as cited in SEQ ID NO 61620
  misc_feature (1)..(840): Ortholog of  Ceres SEQ ID NO 15173749 as cited in SEQ ID NO 61775
  misc_feature (1)..(840): Ortholog of  Ceres SEQ ID NO 13596812 as cited in SEQ ID NO 62283
  misc_feature (1)..(840): Ortholog of  Ceres SEQ ID NO 13623021 as cited in SEQ ID NO 0
  misc_feature (1)..(840): Ortholog of  Ceres SEQ ID NO 14309080 as cited in SEQ ID NO 0
aagaagaaagtaaagagagaagaagcaaaaagagtcatattcgttgaaaacatcattcactcttctctgcgtctccttctttcacccgaaattgtctctgacaccgttttgattcagccatggctaatgctgcgtcaggaatggcagtccatgatgactgcaagctaagatttctggaactgaaggcgaaaaggacacaccgtttcattgtctacaagattgaggagaagcagaagcaagtgattgttgagaaagttggtgaacctattctaacttacgaggactttgcagcaagtcttccagctgacgaatgccgatacgccatttatgatttcgactttgtcactgcagagaattgccagaagagcaagattttcttcattgcatggtgtcccgacgtagcaaaggtgagaagcaagatgatctatgcgagctctaaggacaggttcaagcgtgaacttgatggaattcaagtggagcttcaagcaactgatccaactgagatggatcttgatgttttgaaaagccgcgtcaactaaaagaaactctctttgataagcttccgattatattcgactattatgaaatggtgttttctattctcttacagtctcttgtgactgttagatacacttgacacccttcattctatctgtctggtctgttctctgtgtctatgttaccgtacagtgtctcatctatattcaaaattatcacaaggtttgtgctgtgtttgcttcctttgtttcaactctaccaaagcttaagattaagatttgggtaagatgattcttttaagcttccctttgttctctttgttacagagggtataaaaaatgc

SEQ ID NO: 28739 - protein, 139 aa, Arabidopsis thaliana
  peptide (1)..(139): Ceres Seq. ID no. 12332657
MANAASGMAVHDDCKLRFLELKAKRTHRFIVYKIEEKQKQVIVEKVGEPILTYEDFAASLPADECRYAIYDFDFVTAENCQKSKIFFIAWCPDVAKVRSKMIYASSKDRFKRELDGIQVELQATDPTEMDLDVLKSRVN

SEQ ID NO: 28740 - protein, 132 aa, Arabidopsis thaliana
  peptide (1)..(132): Ceres Seq. ID no. 12332658
MAVHDDCKLRFLELKAKRTHRFIVYKIEEKQKQVIVEKVGEPILTYEDFAASLPADECRYAIYDFDFVTAENCQKSKIFFIAWCPDVAKVRSKMIYASSKDRFKRELDGIQVELQATDPTEMDLDVLKSRVN

SEQ ID NO: 28741 - DNA, 586 bp, Arabidopsis thaliana
  misc_feature (1)..(586): Ceres Seq. ID no. 12332652
  misc_feature (1)..(586): Ortholog of  Ceres SEQ ID NO 14306303 as cited in SEQ ID NO 56884
gtccagtcaaatataataataagccattgaaaaaaatggcggaggagagcagagtcccatcatcggtgtcggtaacagtcgcccacgaccttcttctagccggccaccgctatctagacgtcaggactccagaagagttcagccagggacatgcctgtggggcgatcaacgtgccttacatgaatcgaggagcatcagggatgtcaaagaaccccgacttcctggaacaagtctcctcccatttcggacaatccgataacatcattgttggctgccagagcggtggtagatctatcaaagccaccaccgatcttctccatgcaggtttcacgggagtcaaagatatcgtcggtggctatagtgcctgggccaagaatggccttcctacaaaggcttgatgactcaccattcaccaaacatctttccttatctcttcgtctccttcttcttcaataatgcatcctttccgcatgtaatcatcaataaatgaccctcctttctctttgctgtctgatgtgatagcttggagggaggggctcatcgcatctttttaaaatatataaaaatacgagtgtgtgttgattgc

SEQ ID NO: 28742 - protein, 131 aa, Arabidopsis thaliana
  peptide (1)..(131): Ceres Seq. ID no. 12332653
PVKYNNKPLKKMAEESRVPSSVSVTVAHDLLLAGHRYLDVRTPEEFSQGHACGAINVPYMNRGASGMSKNPDFLEQVSSHFGQSDNIIVGCQSGGRSIKATTDLLHAGFTGVKDIVGGYSAWAKNGLPTKA

SEQ ID NO: 28743 - protein, 120 aa, Arabidopsis thaliana
  peptide (1)..(120): Ceres Seq. ID no. 12332654
MAEESRVPSSVSVTVAHDLLLAGHRYLDVRTPEEFSQGHACGAINVPYMNRGASGMSKNPDFLEQVSSHFGQSDNIIVGCQSGGRSIKATTDLLHAGFTGVKDIVGGYSAWAKNGLPTKA

SEQ ID NO: 28744 - protein, 72 aa, Arabidopsis thaliana
  peptide (1)..(72): Ceres Seq. ID no. 12332655
MNRGASGMSKNPDFLEQVSSHFGQSDNIIVGCQSGGRSIKATTDLLHAGFTGVKDIVGGYSAWAKNGLPTKA

SEQ ID NO: 28745 - DNA, 589 bp, Arabidopsis thaliana
  misc_feature (1)..(589): Ceres Seq. ID no. 12384610
  misc_feature (1)..(589): Ortholog of  Ceres SEQ ID NO 12624098 as cited in SEQ ID NO 61354
atggccaaaacctacgaatctgaaatttgaagaagcataagtttgtctattaaagatggaatcaaagacgttctggatcgttactcttcttctctgtggaacaattcaattagcgatttgcagatcagaagagaaaagcacagagaagacgatgatgctaggaggcgttcatgatctccgaggaaatcagaacagtggagagatcgagagtctcgctcgatttgccattcaagaacataacaaacaacagaacaaaattcttgagttcaagaagattgtcaaagcaagggagcaggtagttgcaggaacgatgtaccacttaaccctagaagcaaaagaaggtgatcagactaagaattttgaagccaaagtgtgggtgaagccatggatgaacttcaaacagttgcaggagttcaaggaatcatcttcttgaatttcacttgttcaagttaatgattacaaatgctctgagagtaattaattatatgtgtgtaaaatactttgctatatgcgaaacctaaaaagttaatgtaatcaagaaacttgttcttatgtcctgcaaatatctttgtatgtttgtttcctgttt

SEQ ID NO: 28746 - protein, 125 aa, Arabidopsis thaliana
  peptide (1)..(125): Ceres Seq. ID no. 12384611
MESKTFWIVTLLLCGTIQLAICRSEEKSTEKTMMLGGVHDLRGNQNSGEIESLARFAIQEHNKQQNKILEFKKIVKAREQVVAGTMYHLTLEAKEGDQTKNFEAKVWVKPWMNFKQLQEFKESSS

SEQ ID NO: 28747 - protein, 93 aa, Arabidopsis thaliana
  peptide (1)..(93): Ceres Seq. ID no. 12384612
MMLGGVHDLRGNQNSGEIESLARFAIQEHNKQQNKILEFKKIVKAREQVVAGTMYHLTLEAKEGDQTKNFEAKVWVKPWMNFKQLQEFKESSS

SEQ ID NO: 28748 - protein, 92 aa, Arabidopsis thaliana
  peptide (1)..(92): Ceres Seq. ID no. 12384613
MLGGVHDLRGNQNSGEIESLARFAIQEHNKQQNKILEFKKIVKAREQVVAGTMYHLTLEAKEGDQTKNFEAKVWVKPWMNFKQLQEFKESSS

SEQ ID NO: 28749 - DNA, 608 bp, Arabidopsis thaliana
  misc_feature (1)..(608): Ceres Seq. ID no. 12393664
  misc_feature (1)..(608): Ortholog of  Ceres SEQ ID NO 13661491 as cited in SEQ ID NO 61696
ggaaacaaaagaaatcaaaaatccgatggggaggaagaagggattgccggagttcgaagagtcggcgccggatggattcgatcctgagaatccgtacaaggatccggttgcgatggtggagatgagagaacacattgttcgtgagaaatggatccatatcgagaaggctaagatcttacgtgagaaggtcaaatggtgttaccgcgtcgaaggcgttaaccattaccagaagtgtcgtcatcttgttcagcagtatctcgatgccactcgcggcgttggttggggcaaagaccaccgtcctatctctcttcacggtcctaagccagtagctgttgaagaagctgaatgatgttgtgtgcgtgattgatctttggtgagtgagagctttgattaccatacatgaatggagtctctgttgcaagttaatgctccacatcaaggttgttacttgatttatgcttttctgtttcgtaaaacatatattactaattggacttgggagttccaattggttaagctcagcttcgtttttcaaatgatttatatatatttttggcttgttgtacattgcgtccctgtttgtcgaaataatgaaattcccaagtacc

SEQ ID NO: 28750 - protein, 115 aa, Arabidopsis thaliana
  peptide (1)..(115): Ceres Seq. ID no. 12393665
ETKEIKNPMGRKKGLPEFEESAPDGFDPENPYKDPVAMVEMREHIVREKWIHIEKAKILREKVKWCYRVEGVNHYQKCRHLVQQYLDATRGVGWGKDHRPISLHGPKPVAVEEAE

SEQ ID NO: 28751 - protein, 107 aa, Arabidopsis thaliana
  peptide (1)..(107): Ceres Seq. ID no. 12393666
MGRKKGLPEFEESAPDGFDPENPYKDPVAMVEMREHIVREKWIHIEKAKILREKVKWCYRVEGVNHYQKCRHLVQQYLDATRGVGWGKDHRPISLHGPKPVAVEEAE

SEQ ID NO: 28752 - protein, 78 aa, Arabidopsis thaliana
  peptide (1)..(78): Ceres Seq. ID no. 12393667
MVEMREHIVREKWIHIEKAKILREKVKWCYRVEGVNHYQKCRHLVQQYLDATRGVGWGKDHRPISLHGPKPVAVEEAE

SEQ ID NO: 28753 - DNA, 636 bp, Arabidopsis thaliana
  misc_feature (1)..(636): Ceres Seq. ID no. 13496892
  misc_feature (1)..(636): Ortholog of  Ceres SEQ ID NO 12627215 as cited in SEQ ID NO 60976
  misc_feature (1)..(636): Ortholog of  Ceres SEQ ID NO 12635879 as cited in SEQ ID NO 0
  misc_feature (1)..(636): Ortholog of  Ceres SEQ ID NO 13599649 as cited in SEQ ID NO 0
aatcatcactttcacaatcttcttcatcgatttctctcttccaaatctcccaaaagatgtcgaaccctagagttttcttcgacatgagtctcagcggtactcccatcggacggatcgagatggagcttttcgctgatacaaccccaaacacggcggagaatttccgtgctctctgtaccggcgagaaaggaatgggaaagctaagttcaaggacgagaactttatcaagaagcatacaggagctgggattctctcaatggctaactctggtcctaacactaacggatctcagttcttcatctgtaccgataagacgtcgtggttagatggtaagcacgttgtgtttggacaagttgttaaaggcttggacgtcgtgaaggcgattgagaaagttggatctgattctggaaagacttccaaagtcgttaccatcactgattgtggtcagctttcttagatctaagtgagaaagtgagagactttgatctttatgagtaataatggtgtcttttgctttcggttgttcttcctcttaccttaatggattattctgtttagggtttgagttttcgtttcagagtttgtaacaaaacccttttgtgttttctggggtttgaaataattatgagcttactc

SEQ ID NO: 28754 - protein, 107 aa, Arabidopsis thaliana
  peptide (1)..(107): Ceres Seq. ID no. 13496893
SSLSQSSSSISLFQISQKMSNPRVFFDMSLSGTPIGRIEMELFADTTPNTAENFRALCTGEKGMGKLSSRTRTLSRSIQELGFSQWLTLVLTLTDLSSSSVPIRRRG

SEQ ID NO: 28755 - protein, 89 aa, Arabidopsis thaliana
  peptide (1)..(89): Ceres Seq. ID no. 13496894
MSNPRVFFDMSLSGTPIGRIEMELFADTTPNTAENFRALCTGEKGMGKLSSRTRTLSRSIQELGFSQWLTLVLTLTDLSSSSVPIRRRG

SEQ ID NO: 28756 - protein, 80 aa, Arabidopsis thaliana
  peptide (1)..(80): Ceres Seq. ID no. 13496895
MSLSGTPIGRIEMELFADTTPNTAENFRALCTGEKGMGKLSSRTRTLSRSIQELGFSQWLTLVLTLTDLSSSSVPIRRRG

SEQ ID NO: 28757 - DNA, 1000 bp, Arabidopsis thaliana
  misc_feature (1)..(1000): Ceres Seq. ID no. 13489993
  misc_feature (1)..(1000): Ortholog of  Ceres SEQ ID NO 12610607 as cited in SEQ ID NO 56214
  misc_feature (1)..(1000): Ortholog of  Ceres SEQ ID NO 13664294 as cited in SEQ ID NO 61328
  misc_feature (1)..(1000): Ortholog of  Ceres SEQ ID NO 13596425 as cited in SEQ ID NO 62039
gctctcgacaaagcagctgagcgacttttgcacatttctagggttccaatcaaaatctatctgcaacaaaaatggctaatcgtttcagatcagggatctccttcttcaagaccatcgccgtaacagattctgtctcctccgttagatccaagtcgcttttcccagcgttgagaacttatgcaactgcttctgctcaaacaaccgctaatgttaaggtgcctattgctttagttggtgaaaatgggaactttgcttcatggctatacattgcagctgtgaaaatgaattccttggaaaagattgagacggatctttctgagatgattgaggcaatgaagacagctcctatttttgctcagtttacaaaggatccctctgttcctagagggacaagattggctgctattagggatgcttgtgatcaagcaaagtttgccgaacccactaagaacttcctctctttgttagctgagaatggaaagctgaagaacctagatgccattgtgaagaaatttatgcagctgacaaacgcacataggggagatgtcaaagttttggttaccacagtcattccgcttccccctgctgaggagaaagaactgactgagacgcttcaggagatcattggagcagggaagaaaatcactgtggaacaaaagattgatccaagtatctacggtggactaatcgtagagttccaacaaaaggtgttggacatgtcaatcaggacaagggcacaacagatggagaggctcctccgtgaacctgttgacttcaacaacctctgaaaatcttgagagaaatttcccccaagaaaacatgcttgtgatgaatgccaccaattgacaaataaatatggaccctcctgggaaacaatataatagctggccacttctctccctttgaattttgtcatttgctttttacatattgttgtttgcttcgaaataaagcttttcgagacatcaaatttcaatgagattgtttttgtttagatttg

SEQ ID NO: 28758 - protein, 238 aa, Arabidopsis thaliana
  peptide (1)..(238): Ceres Seq. ID no. 13489994
MANRFRSGISFFKTIAVTDSVSSVRSKSLFPALRTYATASAQTTANVKVPIALVGENGNFASWLYIAAVKMNSLEKIETDLSEMIEAMKTAPIFAQFTKDPSVPRGTRLAAIRDACDQAKFAEPTKNFLSLLAENGKLKNLDAIVKKFMQLTNAHRGDVKVLVTTVIPLPPAEEKELTETLQEIIGAGKKITVEQKIDPSIYGGLIVEFQQKVLDMSIRTRAQQMERLLREPVDFNNL

SEQ ID NO: 28759 - protein, 168 aa, Arabidopsis thaliana
  peptide (1)..(168): Ceres Seq. ID no. 13489995
MNSLEKIETDLSEMIEAMKTAPIFAQFTKDPSVPRGTRLAAIRDACDQAKFAEPTKNFLSLLAENGKLKNLDAIVKKFMQLTNAHRGDVKVLVTTVIPLPPAEEKELTETLQEIIGAGKKITVEQKIDPSIYGGLIVEFQQKVLDMSIRTRAQQMERLLREPVDFNNL

SEQ ID NO: 28760 - protein, 155 aa, Arabidopsis thaliana
  peptide (1)..(155): Ceres Seq. ID no. 13489996
MIEAMKTAPIFAQFTKDPSVPRGTRLAAIRDACDQAKFAEPTKNFLSLLAENGKLKNLDAIVKKFMQLTNAHRGDVKVLVTTVIPLPPAEEKELTETLQEIIGAGKKITVEQKIDPSIYGGLIVEFQQKVLDMSIRTRAQQMERLLREPVDFNNL

SEQ ID NO: 28761 - DNA, 1067 bp, Arabidopsis thaliana
  misc_feature (1)..(1067): Ceres Seq. ID no. 12327360
  misc_feature (1)..(1067): Ortholog of  Ceres SEQ ID NO 15224924 as cited in SEQ ID NO 64061
aggaatctttgcttctcagacaatggcggcttctacattgtacaaatcctgtcttcttcaacccaagtctggctccaccactcgccgcctaaacccttctctcgttaaccctcttacgaatcccacaagagtttccgttttggggaagagtcgtagagatgtctttgcgaaagcttcgattgaaatggcggaatcgaattcgataccttccgttgttgtcaattcctctaagcagcatggtccaatcatcgtgattgataattacgacagcttcacatacaatctctgccagtatatgggagagctaggatgccattttgaagtttaccgcaatgatgaacttacagtagaagagctgaaaaaaaaaaatccaagaggggtgttgatttctccagggcctggtacccctcaagactctgggatttccttgcaaactgttttggaactcggaccacttgttcctttatttggagtatgtatgggtttgcagtgtataggagaagcatttggaggaaagattgtgcggtcaccatttggtgttatgcatgggaaaagctcaatggttcactatgatgagaaaggagaagaaggcttgttctctggattatcaaaccctttcattgtaggtagatatcacagtctcgtgatcgaaaaagatacatttcctagtgatgaactcgaggttacagcatggacagaagatggtctggtaatggctgcccgtcacagaaagtacaagcatatacagggagtccaatttcatccggagagtattataacaactgagggcaagacaattgtccgcaatttcatcaaaatagtagagaaaaaggagtccgagaagctgacatagactagcctgaatgagaaaatcagctgtgttcgaatagtgcctccctgtaataatatttgccaatgcaaaatgttccttgccatcttcccattgtttctatcataaaaattcgacttgttcctccacttttacttaatttgtgaaaagtggaaagcagaaagctatggttatttaagcatgcctagcgacaaaaatggccgagggcctttcagtt

SEQ ID NO: 28762 - protein, 283 aa, Arabidopsis thaliana
  peptide (1)..(283): Ceres Seq. ID no. 12327361
GIFASQTMAASTLYKSCLLQPKSGSTTRRLNPSLVNPLTNPTRVSVLGKSRRDVFAKASIEMAESNSIPSVVVNSSKQHGPIIVIDNYDSFTYNLCQYMGELGCHFEVYRNDELTVEELKKKNPRGVLISPGPGTPQDSGISLQTVLELGPLVPLFGVCMGLQCIGEAFGGKIVRSPFGVMHGKSSMVHYDEKGEEGLFSGLSNPFIVGRYHSLVIEKDTFPSDELEVTAWTEDGLVMAARHRKYKHIQGVQFHPESIITTEGKTIVRNFIKIVEKKESEKLT

SEQ ID NO: 28763 - protein, 276 aa, Arabidopsis thaliana
  peptide (1)..(276): Ceres Seq. ID no. 12327362
MAASTLYKSCLLQPKSGSTTRRLNPSLVNPLTNPTRVSVLGKSRRDVFAKASIEMAESNSIPSVVVNSSKQHGPIIVIDNYDSFTYNLCQYMGELGCHFEVYRNDELTVEELKKKNPRGVLISPGPGTPQDSGISLQTVLELGPLVPLFGVCMGLQCIGEAFGGKIVRSPFGVMHGKSSMVHYDEKGEEGLFSGLSNPFIVGRYHSLVIEKDTFPSDELEVTAWTEDGLVMAARHRKYKHIQGVQFHPESIITTEGKTIVRNFIKIVEKKESEKLT

SEQ ID NO: 28764 - protein, 222 aa, Arabidopsis thaliana
  peptide (1)..(222): Ceres Seq. ID no. 12327363
MAESNSIPSVVVNSSKQHGPIIVIDNYDSFTYNLCQYMGELGCHFEVYRNDELTVEELKKKNPRGVLISPGPGTPQDSGISLQTVLELGPLVPLFGVCMGLQCIGEAFGGKIVRSPFGVMHGKSSMVHYDEKGEEGLFSGLSNPFIVGRYHSLVIEKDTFPSDELEVTAWTEDGLVMAARHRKYKHIQGVQFHPESIITTEGKTIVRNFIKIVEKKESEKLT

SEQ ID NO: 28765 - DNA, 524 bp, Arabidopsis thaliana
  misc_feature (1)..(524): Ceres Seq. ID no. 12385784
  misc_feature (1)..(524): Ortholog of  Ceres SEQ ID NO 12615235 as cited in SEQ ID NO 62537
gtcttctttcttcttcacttctgcctcttagggttaagcaagagagaaactagagatgaggttgataacgcacaacatgctttcctgcaacatcaaaggagtcaccagtggatttcctctacggatcgaagctgggaacgtgattgagaaggaagtcgatttcaatcccgattttatcaggcacatgttcgcgaagattgagtggaaagctctggtggaaggtgcgcgttccatgggatacgctgagttaccggaggaatctccggacgccgcggtgctgaaatcagatgagcccttccttaagaaactccaccacgcgttgctcgagctccaccttgaggaaggcgcgcttgtttgccctgagactggacggaagtttccggttaataaaggaatcccaaatatgcttctccatgaagacgaggtttaattgattgtgagatttttccttgtaagtttcaatctatgatgtttctgatgatgtgaaccttttagtgagatatgcaattgaatgattccatttg

SEQ ID NO: 28766 - protein, 124 aa, Arabidopsis thaliana
  peptide (1)..(124): Ceres Seq. ID no. 12385785
MRLITHNMLSCNIKGVTSGFPLRIEAGNVIEKEVDFNPDFIRHMFAKIEWKALVEGARSMGYAELPEESPDAAVLKSDEPFLKKLHHALLELHLEEGALVCPETGRKFPVNKGIPNMLLHEDEV

SEQ ID NO: 28767 - protein, 117 aa, Arabidopsis thaliana
  peptide (1)..(117): Ceres Seq. ID no. 12385786
MLSCNIKGVTSGFPLRIEAGNVIEKEVDFNPDFIRHMFAKIEWKALVEGARSMGYAELPEESPDAAVLKSDEPFLKKLHHALLELHLEEGALVCPETGRKFPVNKGIPNMLLHEDEV

SEQ ID NO: 28768 - protein, 81 aa, Arabidopsis thaliana
  peptide (1)..(81): Ceres Seq. ID no. 12385787
MFAKIEWKALVEGARSMGYAELPEESPDAAVLKSDEPFLKKLHHALLELHLEEGALVCPETGRKFPVNKGIPNMLLHEDEV

SEQ ID NO: 28769 - DNA, 503 bp, Arabidopsis thaliana
  misc_feature (1)..(503): Ceres Seq. ID no. 12322297
  misc_feature (1)..(503): Ortholog of  Ceres SEQ ID NO 15177246 as cited in SEQ ID NO 57731
aaaggacgctacacagtcgtcttctcggagccgcaaagatttctgtagagcaaactttgatcatcccctgcatctgcggcaatgggtaaaggaacagggagctttggtaagaggaggaacaagtcacacacgctctgtgtgagatgtggtcgccggagctttcacatccagaagagtcgttgctcggcatgtgcttatccagctgccagaaagaggacatataactggagtgtgaaggcaataagaagaaagacaacaggaactggtaggatgaggtatctccgtaatgtccctcgaaggttcaagacttgctttagagaaggtacgcaagccaccccaagaaacaaagctgcagcttcgtcttcctaggcattgttcagtttgcgttttgccatctctttcttgctatgtagcttttttttttaattcgtttgtttatcttttttgctcttgtacttcctttactgtgcaatcctatttctgatagtgtgatcactcatcaa

SEQ ID NO: 28770 - protein, 95 aa, Arabidopsis thaliana [sequence omitted]

SEQ ID NO: 28771 - protein, 65 aa, Arabidopsis thaliana
  peptide (1)..(65): Ceres Seq. ID no. 12322299
MSLEGSRLALEKVRKPPQETKLQLRLPRHCSVCVLPSLSCYVAFFFNSFVYLFCSCTSFTVQSYF

SEQ ID NO: 28772 - DNA, 1029 bp, Arabidopsis thaliana
  misc_feature (1)..(1029): Ceres Seq. ID no. 13486649
  misc_feature (1)..(1029): Ortholog of  Ceres SEQ ID NO 15169248 as cited in SEQ ID NO 55022
  misc_feature (1)..(1029): Ortholog of  Ceres SEQ ID NO 14315042 as cited in SEQ ID NO 56959
  misc_feature (1)..(1029): Ortholog of  Ceres SEQ ID NO 12608620 as cited in SEQ ID NO 60192
  misc_feature (1)..(1029): Ortholog of  Ceres SEQ ID NO 13662898 as cited in SEQ ID NO 66199
  misc_feature (1)..(1029): Ortholog of  Ceres SEQ ID NO 13654314 as cited in SEQ ID NO 67914
aattaggttttcttctacacttgttcttcttcatttgctctcttcttcatcaatctctctctttttgtaaacggcgattttaaaatggttgatgcaaaacaagttcgtttcatcatcggagttatcggaaatgttatctcctttggtctctttgccgcaccagcgaagactttctggaggatcttcaagaagaaatcagtggaagagttttcgtatgtgccgtacgtagcaacggtgatgaattgtatgttgtgggtgttttacggtctccctgtggttcacaaagacagtattctagtttcaaccattaatggtgttgggttagttatcgaacttttctacgttggtgtctacttgatgtactgtggtcacaagaagaaccatcgaaggaacattttgggattcttagctcttgaagttattttggtggtggctatcattcttattacgctctttgcgcttaagggtgattttgttaagcaaacatttgttggtgtgatttgcgatgtcttcaacattgctatgtatggagctccttcattggccattattaaagtggtaaaaacaaagagtgttgaatacatgccattcttgttgtctttggtctgtttcgttaatgctggaatttggactacttactcgctcatcttcaagatcgattactacgtcctcgcaagtaatgggattggaacctttttggcactttctcagttgatagtgtacttcatgtactataagtcaactccaaaggagaagacggtgaagccatcagaagttgagatttctgctacggagagggtttaggagaattgtgctttggattctatcttcttacgtacattttacatacacaatttgtgtgtatgtttaggcttttgggtttttatgtttggtagaattttccaatcgtttagtttctggattttgaggattcgtcttggttcattttcttaatacattttttatggtgtgaaacgctttgacggaaatcatcaagttttggatttattctatttatgttttagatac

SEQ ID NO: 28773 - protein, 239 aa, Arabidopsis thaliana
  peptide (1)..(239): Ceres Seq. ID no. 13486650
MVDAKQVRFIIGVIGNVISFGLFAAPAKTFWRIFKKKSVEEFSYVPYVATVMNCMLWVFYGLPVVHKDSILVSTINGVGLVIELFYVGVYLMYCGHKKNHRRNILGFLALEVILVVAIILITLFALKGDFVKQTFVGVICDVFNIAMYGAPSLAIIKVVKTKSVEYMPFLLSLVCFVNAGIWTTYSLIFKIDYYVLASNGIGTFLALSQLIVYFMYYKSTPKEKTVKPSEVEISATERV

SEQ ID NO: 28774 - protein, 188 aa, Arabidopsis thaliana
  peptide (1)..(188): Ceres Seq. ID no. 13486651
MNCMLWVFYGLPVVHKDSILVSTINGVGLVIELFYVGVYLMYCGHKKNHRRNILGFLALEVILVVAIILITLFALKGDFVKQTFVGVICDVFNIAMYGAPSLAIIKVVKTKSVEYMPFLLSLVCFVNAGIWTTYSLIFKIDYYVLASNGIGTFLALSQLIVYFMYYKSTPKEKTVKPSEVEISATERV

SEQ ID NO: 28775 - protein, 185 aa, Arabidopsis thaliana
  peptide (1)..(185): Ceres Seq. ID no. 13486652
MLWVFYGLPVVHKDSILVSTINGVGLVIELFYVGVYLMYCGHKKNHRRNILGFLALEVILVVAIILITLFALKGDFVKQTFVGVICDVFNIAMYGAPSLAIIKVVKTKSVEYMPFLLSLVCFVNAGIWTTYSLIFKIDYYVLASNGIGTFLALSQLIVYFMYYKSTPKEKTVKPSEVEISATERV

SEQ ID NO: 28776 - DNA, 1221 bp, Arabidopsis thaliana
  misc_feature (1)..(1221): Ceres Seq. ID no. 12396606
  misc_feature (1)..(1221): Ortholog of  Ceres SEQ ID NO 15170760 as cited in SEQ ID NO 52747
  misc_feature (1)..(1221): Ortholog of  Ceres SEQ ID NO 15168549 as cited in SEQ ID NO 56976
  misc_feature (1)..(1221): Ortholog of  Ceres SEQ ID NO 14314335 as cited in SEQ ID NO 57305
accacatcaattctctcatatctctctctcactttcgaatatatcttaagataacagagacacatactcttaagtttggtgaagaataagaagacaatgacgaaggaagtggttggtgataagagatctttctccgggaaagactatcaagacccaccacctgaacctctattcgacgctactgagcttgggaagtggtctttctacagagctctcatcgctgagttcatagccactctccttttcctctatgtcactattatgactgtcatcggttacaagagccagaccgatccagccctgaatcctgaccagtgtacaggcgttggcgtccttggtatcgcatgggcctttggtggcatgatcttcatcctcgtctactgcaccgccggcatctctggtgggcatattaatccggcagtgacttttgggctgttgttggctcggaaagtgacgttggtgagagcagtgatgtacatggtggctcagtgcctcggtgccatttgtggtgtggctttggtcaaggccttccagtctgcttacttcacccgctacggtggtggcgcaaatggtctctctgacggttacagcatcggcaccggtgttgcagccgagatcattggtacattcgtcttagtctacaccgtcttctctgccactgatcccaagaggagtgcgcgtgactctcacgttcctgtattggctccattgccaattggatttgcagtgttcatcgttcacttagctacaatcccaatcacgggcactggtatcaaccctgcaagaagtctcggagctgcaatcatctacaacaaggacaaagcttgggaccatcattggatattctgggtgggtccgtttgctggtgcagccatcgcagctttctaccatcagtttgtgttgagggctggtgcgattaaggcgctcgggtctttcaggagccagcctcacgtttaactttgatatgctcttccctgagtacatcaaagagagaaaaagagaagataataagagaggcttgtaattttatcttgtgtagacggttggagccaagtgacgtgtagtactagtatctaatttctagctttggtgaggagagatattttgaagtgtcgcttgcgggccaactttgaattgctacttctatgattaaatctatgtctctactccttgactattaagattgctctatttattagtactaaatattccttatatatg

SEQ ID NO: 28777 - protein, 286 aa, Arabidopsis thaliana
  peptide (1)..(286): Ceres Seq. ID no. 12396607
MTKEVVGDKRSFSGKDYQDPPPEPLFDATELGKWSFYRALIAEFIATLLFLYVTIMTVIGYKSQTDPALNPDQCTGVGVLGIAWAFGGMIFILVYCTAGISGGHINPAVTFGLLLARKVTLVRAVMYMVAQCLGAICGVALVKAFQSAYFTRYGGGANGLSDGYSIGTGVAAEIIGTFVLVYTVFSATDPKRSARDSHVPVLAPLPIGFAVFIVHLATIPITGTGINPARSLGAAIIYNKDKAWDHHWIFWVGPFAGAAIAAFYHQFVLRAGAIKALGSFRSQPHV

SEQ ID NO: 28778 - protein, 231 aa, Arabidopsis thaliana
  peptide (1)..(231): Ceres Seq. ID no. 12396608
MTVIGYKSQTDPALNPDQCTGVGVLGIAWAFGGMIFILVYCTAGISGGHINPAVTFGLLLARKVTLVRAVMYMVAQCLGAICGVALVKAFQSAYFTRYGGGANGLSDGYSIGTGVAAEIIGTFVLVYTVFSATDPKRSARDSHVPVLAPLPIGFAVFIVHLATIPITGTGINPARSLGAAIIYNKDKAWDHHWIFWVGPFAGAAIAAFYHQFVLRAGAIKALGSFRSQPHV

SEQ ID NO: 28779 - protein, 198 aa, Arabidopsis thaliana
  peptide (1)..(198): Ceres Seq. ID no. 12396609
MIFILVYCTAGISGGHINPAVTFGLLLARKVTLVRAVMYMVAQCLGAICGVALVKAFQSAYFTRYGGGANGLSDGYSIGTGVAAEIIGTFVLVYTVFSATDPKRSARDSHVPVLAPLPIGFAVFIVHLATIPITGTGINPARSLGAAIIYNKDKAWDHHWIFWVGPFAGAAIAAFYHQFVLRAGAIKALGSFRSQPHV

SEQ ID NO: 28780 - DNA, 821 bp, Arabidopsis thaliana
  misc_feature (1)..(821): Ceres Seq. ID no. 12322096
  misc_feature (1)..(821): Ortholog of  Ceres SEQ ID NO 15172991 as cited in SEQ ID NO 51333
  misc_feature (1)..(821): Ortholog of  Ceres SEQ ID NO 13594870 as cited in SEQ ID NO 51929
  misc_feature (1)..(821): Ortholog of  Ceres SEQ ID NO 12610679 as cited in SEQ ID NO 56077
  misc_feature (1)..(821): Ortholog of  Ceres SEQ ID NO 12635481 as cited in SEQ ID NO 0
atcccccacttaaccctctcatctctcggcctctcactcgaatctccttcacaaagcgtacaaatcacaaacacgtagttattctctctttactctctctatttctctctcttcaaaccctacgaagatcttcttcttcttcttcaagaatcgatcatgaaaggagctaaatctaaggctgaaaccaggagcacaaagctctctgtgactaagaagcctgctaagggagccaaaggtgctgctaaagatccaaacaaacctaagaggccttccagtgccttcttcgttttcatggaagatttccgtgtgacgtacaaggaggagcaccctaagaacaagtctgttgctgctgttggcaaagctggtggtgaaaagtggaaatccttgtctgactctgagaaggctccttatgtggctaaggctgacaagcgcaaggttgagtatgagaagaacatgaaagcctacaacaagaaattggaggaaggccctaaggaagatgaggaatctgacaagtcagtttcagaggttaacgatgaggatgatgctgaggatggcagtgaagaggaggaagacgatgattaagaagttgaagttgtggtagcgtaatatagaaggctgcaaggaatctctcggatgtttttatctcttctcttaaaatgttaattcggctggttaaagtggtttttttttttttttctttttctttttcttactgatgtttcgttttagtaaactattacctatctcccactgattctacgggtaatggaaaaagtgaatgtagaatgtttagatggtgaaatgagagatttgtagctctg

SEQ ID NO: 28781 - protein, 141 aa, Arabidopsis thaliana
  peptide (1)..(141): Ceres Seq. ID no. 12322097
MKGAKSKAETRSTKLSVTKKPAKGAKGAAKDPNKPKRPSSAFFVFMEDFRVTYKEEHPKNKSVAAVGKAGGEKWKSLSDSEKAPYVAKADKRKVEYEKNMKAYNKKLEEGPKEDEESDKSVSEVNDEDDAEDGSEEEEDDD

SEQ ID NO: 28782 - protein, 96 aa, Arabidopsis thaliana
  peptide (1)..(96): Ceres Seq. ID no. 12322098
MEDFRVTYKEEHPKNKSVAAVGKAGGEKWKSLSDSEKAPYVAKADKRKVEYEKNMKAYNKKLEEGPKEDEESDKSVSEVNDEDDAEDGSEEEEDDD

SEQ ID NO: 28783 - DNA, 1186 bp, Arabidopsis thaliana
  misc_feature (1)..(1186): Ceres Seq. ID no. 12422578
  misc_feature (1)..(1186): Ortholog of  Ceres SEQ ID NO 14316324 as cited in SEQ ID NO 55612
  misc_feature (1)..(1186): Ortholog of  Ceres SEQ ID NO 14316378 as cited in SEQ ID NO 57746
  misc_feature (1)..(1186): Ortholog of  Ceres SEQ ID NO 13596097 as cited in SEQ ID NO 68421
  misc_feature (1)..(1186): Ortholog of  Ceres SEQ ID NO 13598439 as cited in SEQ ID NO 69016
  misc_feature (1)..(1186): Ortholog of  Ceres SEQ ID NO 13599524 as cited in SEQ ID NO 0
aagcacattccaaatcattttcttaccactcaaagagtgcgcactcattatcatcgtttgaaactaaacatggcgacggagaaaagcaagattctggtgatcggaggaactggttacatcgggaaattcctagtagaagcgagcgccaaagctggccactccacattcgctctcgttagagaagcaactctatccgatcctgtcaagggcaaaaccgtccagagtttcaaagatctcggcgtcacaatactacacggagatttgaatgatcacgagagcttagtgaaggctattaaacaggttgatgtggtgatatctaccgttgggagcatgcaaatcttggatcaaaccaagatcatttccgccatcaaagaagccggtaatgtcaagagattcttgccgtctgagtttggggtggatgtggataggacgagtgcggttgagccagctaaatcggcttttgcagggaagatacagatcaggagaaccatcgaagcggaaggaataccatacacttacgctgttaccggttgctttggtggttactacttgccaacattggttcagttcgagcctggtctcacttctcctcctagagacaaagtcaccattcttggcgatggaaatgccaaagctgtgatcaacaaagaggaagatattgctgcttacacgatcaaggcggtggatgatcctaggactctgaacaaaatcctatacattaagccttctaacaacactttatcgatgaacgaaatagtcaccttgtgggagaaaaagattggcaagtctcttgagaagactcacctcccagaggaacaactacttaaaagcatccaagagtctccgattcccatcaatgttgttctgtcgataaaccacgcggtgtttgtgaatggagataccaatatcagtatagagccttcctttggtgtggaagcctctgagctttaccctgatgtcaagtacacaagtgttgacgagtatctcagttatttcgcttgatgaacttcattataaacgtaatttaccaccatgacgcgctagtttcatgttctgtatcaataaaagaatggttcttgtaatggtgaatgtgtgtgtgtatgtgtgactaatcagtaatcacagtgctttacctctgtttccgagcttcccaagaaatatgaattagtaatatataattcatacc

SEQ ID NO: 28784 - protein, 333 aa, Arabidopsis thaliana
  peptide (1)..(333): Ceres Seq. ID no. 12422579
KHIPNHFLTTQRVRTHYHRLKLNMATEKSKILVIGGTGYIGKFLVEASAKAGHSTFALVREATLSDPVKGKTVQSFKDLGVTILHGDLNDHESLVKAIKQVDVVISTVGSMQILDQTKIISAIKEAGNVKRFLPSEFGVDVDRTSAVEPAKSAFAGKIQIRRTIEAEGIPYTYAVTGCFGGYYLPTLVQFEPGLTSPPRDKVTILGDGNAKAVINKEEDIAAYTIKAVDDPRTLNKILYIKPSNNTLSMNEIVTLWEKKIGKSLEKTHLPEEQLLKSIQESPIPINVVLSINHAVFVNGDTNISIEPSFGVEASELYPDVKYTSVDEYLSYFA

SEQ ID NO: 28785 - protein, 310 aa, Arabidopsis thaliana
  peptide (1)..(310): Ceres Seq. ID no. 12422580
MATEKSKILVIGGTGYIGKFLVEASAKAGHSTFALVREATLSDPVKGKTVQSFKDLGVTILHGDLNDHESLVKAIKQVDVVISTVGSMQILDQTKIISAIKEAGNVKRFLPSEFGVDVDRTSAVEPAKSAFAGKIQIRRTIEAEGIPYTYAVTGCFGGYYLPTLVQFEPGLTSPPRDKVTILGDGNAKAVINKEEDIAAYTIKAVDDPRTLNKILYIKPSNNTLSMNEIVTLWEKKIGKSLEKTHLPEEQLLKSIQESPIPINVVLSINHAVFVNGDTNISIEPSFGVEASELYPDVKYTSVDEYLSYFA

SEQ ID NO: 28786 - protein, 223 aa, Arabidopsis thaliana
  peptide (1)..(223): Ceres Seq. ID no. 12422581
MQILDQTKIISAIKEAGNVKRFLPSEFGVDVDRTSAVEPAKSAFAGKIQIRRTIEAEGIPYTYAVTGCFGGYYLPTLVQFEPGLTSPPRDKVTILGDGNAKAVINKEEDIAAYTIKAVDDPRTLNKILYIKPSNNTLSMNEIVTLWEKKIGKSLEKTHLPEEQLLKSIQESPIPINVVLSINHAVFVNGDTNISIEPSFGVEASELYPDVKYTSVDEYLSYFA

SEQ ID NO: 28787 - DNA, 1078 bp, Arabidopsis thaliana
  misc_feature (1)..(1078): Ceres Seq. ID no. 12334300
  misc_feature (1)..(1078): Ortholog of  Ceres SEQ ID NO 14315973 as cited in SEQ ID NO 57637
atggtgatgacacatttttcacgtctccgacaacttcttcttctccaacccaaattcctctcttctcaacctcgtcctctccgttctcctcctccaacatttctccgatcagtgatgggttcgtcttcttctttctcctcttcttcctcgaagcttctctttcgtcaactctttgagaacgaatcttccacctttacttatcttctcgccgacgtttctcatcctgataaacctgctttgttgattgatccggtggacaagactgtggatagagacttgaaactgattgatgagttaggactaaagcttatctatgctatgaacactcatgttcatgctgatcatgtcactggtactggacttcttaagacgaagctcccgggtgtgaaatccgttatttcgaaagcaagtggttccaaagctgatttgtttcttgaacctggtgacaaagtatctattggtgatatataccttgaggttcgtgctacacctggacacactgcaggatgtgttacatatgtgactggtgaaggagctgatcagccccaaccaagaatggcttttaccggggatgctgtactcatccgtggttgtgggaggactgactttcaggaaggaagctcagatcaactctacgagtctgtacattcacagatatttacattgccaaaggacacattgatctatcctgctcacgactacaaaggtttcgaggtaagtacagttggagaagagatgcaacacaacccgcgtctaactaaagataaagaaacattcaaaaccattatgtcaaatctgaatctgtcgtatccgaagatgattgatgttgcagtaccagcaaatatggtctgtgggttacaagatgtgccttctcaagccaactaaaaaaaactcttacatataatgtttgtctttttatcgatgtcattctatatttaccaaagccaataaaaactcttgagagtaatttctacaataagatttgcttccgttgtagataagttcattagaaaattgtgtaaattagattgaacatgtggaatttgttatgaagatgaagacagtatttgcgtgttcg

SEQ ID NO: 28788 - protein, 294 aa, Arabidopsis thaliana
  peptide (1)..(294): Ceres Seq. ID no. 12334301
MVMTHFSRLRQLLLLQPKFLSSQPRPLRSPPPTFLRSVMGSSSSFSSSSSKLLFRQLFENESSTFTYLLADVSHPDKPALLIDPVDKTVDRDLKLIDELGLKLIYAMNTHVHADHVTGTGLLKTKLPGVKSVISKASGSKADLFLEPGDKVSIGDIYLEVRATPGHTAGCVTYVTGEGADQPQPRMAFTGDAVLIRGCGRTDFQEGSSDQLYESVHSQIFTLPKDTLIYPAHDYKGFEVSTVGEEMQHNPRLTKDKETFKTIMSNLNLSYPKMIDVAVPANMVCGLQDVPSQAN

SEQ ID NO: 28789 - protein, 292 aa, Arabidopsis thaliana
  peptide (1)..(292): Ceres Seq. ID no. 12334302
MTHFSRLRQLLLLQPKFLSSQPRPLRSPPPTFLRSVMGSSSSFSSSSSKLLFRQLFENESSTFTYLLADVSHPDKPALLIDPVDKTVDRDLKLIDELGLKLIYAMNTHVHADHVTGTGLLKTKLPGVKSVISKASGSKADLFLEPGDKVSIGDIYLEVRATPGHTAGCVTYVTGEGADQPQPRMAFTGDAVLIRGCGRTDFQEGSSDQLYESVHSQIFTLPKDTLIYPAHDYKGFEVSTVGEEMQHNPRLTKDKETFKTIMSNLNLSYPKMIDVAVPANMVCGLQDVPSQAN

SEQ ID NO: 28790 - protein, 256 aa, Arabidopsis thaliana
  peptide (1)..(256): Ceres Seq. ID no. 12334303
MGSSSSFSSSSSKLLFRQLFENESSTFTYLLADVSHPDKPALLIDPVDKTVDRDLKLIDELGLKLIYAMNTHVHADHVTGTGLLKTKLPGVKSVISKASGSKADLFLEPGDKVSIGDIYLEVRATPGHTAGCVTYVTGEGADQPQPRMAFTGDAVLIRGCGRTDFQEGSSDQLYESVHSQIFTLPKDTLIYPAHDYKGFEVSTVGEEMQHNPRLTKDKETFKTIMSNLNLSYPKMIDVAVPANMVCGLQDVPSQAN

SEQ ID NO: 28791 - DNA, 1155 bp, Arabidopsis thaliana
  misc_feature (1)..(1155): Ceres Seq. ID no. 12371691
  misc_feature (1)..(1155): Ortholog of  Ceres SEQ ID NO 15171366 as cited in SEQ ID NO 51578
  misc_feature (1)..(1155): Ortholog of  Ceres SEQ ID NO 14306949 as cited in SEQ ID NO 54919
  misc_feature (1)..(1155): Ortholog of  Ceres SEQ ID NO 14308536 as cited in SEQ ID NO 55469
  misc_feature (1)..(1155): Ortholog of  Ceres SEQ ID NO 15175723 as cited in SEQ ID NO 57875
  misc_feature (1)..(1155): Ortholog of  Ceres SEQ ID NO 14314909 as cited in SEQ ID NO 58002
atcacaaccatttctctctctcgtcttcgtcttcgtcttcttcttcttcaacgttcctctccaaaatcctcagaccaagaaatcatcatggccgtcgatctaatgcgtttccctaagatagatgatcaaacggctattcaggaagctgcatcgcaaggtttacaaagtatggaacatctgatccgtgtcctctctaaccgtcccgaacaacaacacaacgttgactgctccgagatcactgacttcaccgtttctaaattcaaaaccgtcatttctctccttaaccgtactggtcacgctcggttcagacgcggaccggttcactccacttcctctgccgcatctcagaaactacagagtcagatcgttaaaaatactcaacctgaggctccgatagtgagaacaactacgaatcaccctcaaatcgttcctccaccgtctagtgtaacactcgatttctctaaaccaagcatcttcggcaccaaagctaagagcgccgagctggaattctccaaagaaaacttcagtgtttctttaaactcctcattcatgtcgtcggcgataaccggagacggcagcgtctccaatggaaaaatcttccttgcttctgctccgttgcagcctgttaactcttccggaaaaccaccgttggctggtcatccttacagaaagagatgtctcgagcatgagcactcagagagtttctccggaaaagtctccggctccgcctacggaaagtgccattgcaagaaaagcaggaaaaatcggatgaagagaaccgtgagagtaccggcgataagtgcaaagatcgccgatattccaccggacgaatattcgtggaggaagtacggacaaaaaccgatcaagggctcaccacacccacgtggttactacaagtgcagtacattcagaggatgtccagcgaggaaacacgtggaacgagcattagatgatccagcgatgcttattgtgacatacgaaggagagcaccgtcataaccaatccgcgatgcaggagaatatttcttcttcaggcattaatgatttagtgtttgcctcggcttgacttttttttgtactatttgttttttgattttttgagtactttagatggattgaaatttgtaaatttttttattaagaaatcaatttaaat

SEQ ID NO: 28792 - protein, 354 aa, Arabidopsis thaliana
  peptide (1)..(354): Ceres Seq. ID no. 12371692
ITTISLSRLRLRLLLLQRSSPKSSDQEIIMAVDLMRFPKIDDQTAIQEAASQGLQSMEHLIRVLSNRPEQQHNVDCSEITDFTVSKFKTVISLLNRTGHARFRRGPVHSTSSAASQKLQSQIVKNTQPEAPIVRTTTNHPQIVPPPSSVTLDFSKPSIFGTKAKSAELEFSKENFSVSLNSSFMSSAITGDGSVSNGKIFLASAPLQPVNSSGKPPLAGHPYRKRCLEHEHSESFSGKVSGSAYGKCHCKKSRKNRMKRTVRVPAISAKIADIPPDEYSWRKYGQKPIKGSPHPRGYYKCSTFRGCPARKHVERALDDPAMLIVTYEGEHRHNQSAMQENISSSGINDLVFASA

SEQ ID NO: 28793 - protein, 325 aa, Arabidopsis thaliana
  peptide (1)..(325): Ceres Seq. ID no. 12371693
MAVDLMRFPKIDDQTAIQEAASQGLQSMEHLIRVLSNRPEQQHNVDCSEITDFTVSKFKTVISLLNRTGHARFRRGPVHSTSSAASQKLQSQIVKNTQPEAPIVRTTTNHPQIVPPPSSVTLDFSKPSIFGTKAKSAELEFSKENFSVSLNSSFMSSAITGDGSVSNGKIFLASAPLQPVNSSGKPPLAGHPYRKRCLEHEHSESFSGKVSGSAYGKCHCKKSRKNRMKRTVRVPAISAKIADIPPDEYSWRKYGQKPIKGSPHPRGYYKCSTFRGCPARKHVERALDDPAMLIVTYEGEHRHNQSAMQENISSSGINDLVFASA

SEQ ID NO: 28794 - protein, 320 aa, Arabidopsis thaliana
  peptide (1)..(320): Ceres Seq. ID no. 12371694
MRFPKIDDQTAIQEAASQGLQSMEHLIRVLSNRPEQQHNVDCSEITDFTVSKFKTVISLLNRTGHARFRRGPVHSTSSAASQKLQSQIVKNTQPEAPIVRTTTNHPQIVPPPSSVTLDFSKPSIFGTKAKSAELEFSKENFSVSLNSSFMSSAITGDGSVSNGKIFLASAPLQPVNSSGKPPLAGHPYRKRCLEHEHSESFSGKVSGSAYGKCHCKKSRKNRMKRTVRVPAISAKIADIPPDEYSWRKYGQKPIKGSPHPRGYYKCSTFRGCPARKHVERALDDPAMLIVTYEGEHRHNQSAMQENISSSGINDLVFASA

SEQ ID NO: 28795 - DNA, 1043 bp, Arabidopsis thaliana
  misc_feature (1)..(1043): Ceres Seq. ID no. 12333847
  misc_feature (1)..(1043): Ortholog of  Ceres SEQ ID NO 13599581 as cited in SEQ ID NO 0
aatctttccctctcctcctcgaacaaaagcaacaaacgcagagaaactcaaaactcaaaaacgacaacgtttcatatagcaacgatgctttcttcatctccaacttcctttactcatccatttctctcttcttctccgcctctatctccgatatctccgccgtctcgcacggctcggatctctccacctctcgtctccgcctcttgctcatacacctacacggaagattcgccgagactgcatcagatcccgcggcgattgacgacggtgccagcttcgctttacgatgttcttgaggttcctttaggcgcgacgagtcaggatatcaaatcggcttaccggagattagccaggatctgccatccagacgtggcgggaactgatcggacttcttcttcatcggcggatgaattcatgaagatccatgccgcttactgtacgctttctgatcctgagaaacgctccgtttatgatcggaggatgttgcgacggagccgtcctttgaccgtcggaacttccgggttgggaaggtacgtcggacggaactgggaaaccgatcagtgttggtagtgagttaactcggtgaccgagttagtagaacgagttaattagtgtaaatacgaagccataaaatccttgtaatttaatcatagtaagctaacatggacgggaactagtgtgctaacatacgccatgtgcttaccgtacgctccctcccccacgagcgatcggtgccgtttgtatccgtgtttacgtaggatctacgcgttttttttaccttgtgaatcctattagtttaaataatcaatgaaaatcatatgaaaaaaatattttcttttcattatggtttggtttctttccctaaggtaagctcactaagcactgattttgagcacttctttattgttgttgatattacttgttcaaaataaccgagtgtaataaaataaacaaatctaatagtatggttttattttagttgcaatcaattacgtttaggtttatagccaagttaatgctaaaacgcgggtattctgtgttcc

SEQ ID NO: 28796 - protein, 189 aa, Arabidopsis thaliana
  peptide (1)..(189): Ceres Seq. ID no. 12333848
NLSLSSSNKSNKRRETQNSKTTTFHIATMLSSSPTSFTHPFLSSSPPLSPISPPSRTARISPPLVSASCSYTYTEDSPRLHQIPRRLTTVPASLYDVLEVPLGATSQDIKSAYRRLARICHPDVAGTDRTSSSSADEFMKIHAAYCTLSDPEKRSVYDRRMLRRSRPLTVGTSGLGRYVGRNWETDQCW

SEQ ID NO: 28797 - protein, 161 aa, Arabidopsis thaliana
  peptide (1)..(161): Ceres Seq. ID no. 12333849
MLSSSPTSFTHPFLSSSPPLSPISPPSRTARISPPLVSASCSYTYTEDSPRLHQIPRRLTTVPASLYDVLEVPLGATSQDIKSAYRRLARICHPDVAGTDRTSSSSADEFMKIHAAYCTLSDPEKRSVYDRRMLRRSRPLTVGTSGLGRYVGRNWETDQCW

SEQ ID NO: 28798 - protein, 97 aa, Arabidopsis thaliana
  peptide (1)..(97): Ceres Seq. ID no. 12333850
SFPLLLEQKQQTQRNSKLKNDNVSYSNDAFFISNFLYSSISLFFSASISDISAVSHGSDLSTSRLRLLLIHLHGRFAETASDPAAIDDGASFALRCS

SEQ ID NO: 28799 - DNA, 1017 bp, Arabidopsis thaliana
  misc_feature (1)..(1017): Ceres Seq. ID no. 12422208
  misc_feature (1)..(1017): Ortholog of  Ceres SEQ ID NO 13638835 as cited in SEQ ID NO 52005
  misc_feature (1)..(1017): Ortholog of  Ceres SEQ ID NO 12614289 as cited in SEQ ID NO 68735
  misc_feature (1)..(1017): Ortholog of  Ceres SEQ ID NO 14309007 as cited in SEQ ID NO 0
gaccatcgaccatcgtcgtcttcgcggagctcagttgaaagatgttaacggctgatataccaccaaatcagtcaatctacataaaacatatcaatgagaagatcaagaaagaagagctgaagaggtctctttactgtttgttctctcagtttggaagattacttgatgtggttgcgttaaagactcctaagctccggggacaagcatgggttgtttttactgaagtcaccgctgctagcaacgctgtccgtcagatgcagaactttcctttctatgataagcctatgcggatacaatatgcaaaatcaaagtcagattatgttactaaagccgaagggtcttttgttccaaaagaaaagaagatgaagcaagaagagaaagttgaaaggaagcgacatgctgaagaaactcaacaaccaagcatgcctaatggcgcaactactcagaacggaatgcctgtggcaatttctctttctcgcatcattccaacaatacaatattatcttctgacagacgtcattatcgcaacttagtctgtaaattcttgtttcctaatacccgtctctgtaatttcacagcctcctttccagccgagtgggcaagacacgatgccaccaaacaacatactcttcattcataatcttcccattgagacgaatagtatgatgcttcagctgctctttgagcaatacccaggattcaaagagataagaatgatcgaagcaaaacccggaattgcgtttgtggagtatgaagacgatgttcagtcttccatggccatgcaggctcttcagggtttcaagatcactccgcagaatccaatggtcgtctcttttgccaagaagtgaaaaccagagttttgttatgcggatgaatggtaatgatatactaattagtagctgtttaaaagcaaactgtcttattttatttggttcgtttccgattagtggtgtgaatgaccccgaagctttagaccagaatgtaatgagatcgaagaattgagagtgatttggttgg

SEQ ID NO: 28800 - protein, 163 aa, Arabidopsis thaliana
  peptide (1)..(163): Ceres Seq. ID no. 12422209
MLTADIPPNQSIYIKHINEKIKKEELKRSLYCLFSQFGRLLDVVALKTPKLRGQAWVVFTEVTAASNAVRQMQNFPFYDKPMRIQYAKSKSDYVTKAEGSFVPKEKKMKQEEKVERKRHAEETQQPSMPNGATTQNGMPVAISLSRIIPTIQYYLLTDVIIAT

SEQ ID NO: 28801 - protein, 92 aa, Arabidopsis thaliana
  peptide (1)..(92): Ceres Seq. ID no. 12422210
MQNFPFYDKPMRIQYAKSKSDYVTKAEGSFVPKEKKMKQEEKVERKRHAEETQQPSMPNGATTQNGMPVAISLSRIIPTIQYYLLTDVIIAT

SEQ ID NO: 28802 - protein, 83 aa, Arabidopsis thaliana
  peptide (1)..(83): Ceres Seq. ID no. 12422211
MKTMFSLPWPCRLFRVSRSLRRIQWSSLLPRSENQSFVMRMNGNDILISSCLKANCLILFGSFPISGVNDPEALDQNVMRSKN

SEQ ID NO: 28803 - DNA, 938 bp, Arabidopsis thaliana
  misc_feature (1)..(938): Ceres Seq. ID no. 13491243
  misc_feature (1)..(938): Ortholog of  Ceres SEQ ID NO 15177083 as cited in SEQ ID NO 51917
  misc_feature (1)..(938): Ortholog of  Ceres SEQ ID NO 12609093 as cited in SEQ ID NO 52008
  misc_feature (1)..(938): Ortholog of  Ceres SEQ ID NO 12609839 as cited in SEQ ID NO 52022
  misc_feature (1)..(938): Ortholog of  Ceres SEQ ID NO 13638931 as cited in SEQ ID NO 52200
  misc_feature (1)..(938): Ortholog of  Ceres SEQ ID NO 13638885 as cited in SEQ ID NO 55803
  misc_feature (1)..(938): Ortholog of  Ceres SEQ ID NO 14301452 as cited in SEQ ID NO 60984
  misc_feature (1)..(938): Ortholog of  Ceres SEQ ID NO 12587429 as cited in SEQ ID NO 63113
  misc_feature (1)..(938): Ortholog of  Ceres SEQ ID NO 12615635 as cited in SEQ ID NO 63133
  misc_feature (1)..(938): Ortholog of  Ceres SEQ ID NO 12586351 as cited in SEQ ID NO 64028
  misc_feature (1)..(938): Ortholog of  Ceres SEQ ID NO 15173174 as cited in SEQ ID NO 64046
  misc_feature (1)..(938): Ortholog of  Ceres SEQ ID NO 13654441 as cited in SEQ ID NO 67814
  misc_feature (1)..(938): Ortholog of  Ceres SEQ ID NO 12635608 as cited in SEQ ID NO 0
  misc_feature (1)..(938): Ortholog of  Ceres SEQ ID NO 14309027 as cited in SEQ ID NO 0
aaaaaaaaaaaaaaaacgtctatacacaaaaaaacaaatgggagagaaagaggaagtgaaactattaggagtatggtacagtccatacgccataagacctaagatcgctcttcgtctcaaatcagtggattatgattacgttgaggaaaatctgtttggatccaagagtgagcttcttctcaaatcaaacccggttcacaagaaagtccctgttctcctccacaacaacaaaccgattgtcgagtctctcaacatcgttgaatacattgatgagacgtggaactcatctgcaccgtccattcttccttcacatccttatgatcgtgctcttgctcgcttttggtctgacttcgttgataacaagtggtttccggcgttgagaatggcggcgatcactaaatcggaagacgcaaaagcgaaagccatggaagaagtggaagaagggttgttgcaactcgaggatgcgtttgtttctataagcaaagggaaaccctttttcggcggtgaagcaatcgggtttatggatatttgctttggaagctttgtggttctcttgaaagctagagaaaagtttaaagcagaaaagcttttagtcgaatcaaaaactccttctctttgtaaatgggccgaccggttcttgtccgatgaaacggtgaagaatgtggcaccggagatcgaaaaagtagctgagtttctacaagaacttgaggttagagctcaatccgcagcttcaagatcttgagatcatcttagaaatgtattgcaatgcaattgtgttttgtgtacatgtaaaacgaaaataagttgaagttttaaagtgttgtgttcagtctatgctaggatttatgacgcggtgtatgggctacggactattttcagtttatgtttatcgaaaatataagggtcagcccaagattattaggggtcgtccccccttt

SEQ ID NO: 28804 - protein, 246 aa, Arabidopsis thaliana
  peptide (1)..(246): Ceres Seq. ID no. 13491244
KKKKKRLYTKKQMGEKEEVKLLGVWYSPYAIRPKIALRLKSVDYDYVEENLFGSKSELLLKSNPVHKKVPVLLHNNKPIVESLNIVEYIDETWNSSAPSILPSHPYDRALARFWSDFVDNKWFPALRMAAITKSEDAKAKAMEEVEEGLLQLEDAFVSISKGKPFFGGEAIGFMDICFGSFVVLLKAREKFKAEKLLVESKTPSLCKWADRFLSDETVKNVAPEIEKVAEFLQELEVRAQSAASRS

SEQ ID NO: 28805 - protein, 234 aa, Arabidopsis thaliana
  peptide (1)..(234): Ceres Seq. ID no. 13491245
MGEKEEVKLLGVWYSPYAIRPKIALRLKSVDYDYVEENLFGSKSELLLKSNPVHKKVPVLLHNNKPIVESLNIVEYIDETWNSSAPSILPSHPYDRALARFWSDFVDNKWFPALRMAAITKSEDAKAKAMEEVEEGLLQLEDAFVSISKGKPFFGGEAIGFMDICFGSFVVLLKAREKFKAEKLLVESKTPSLCKWADRFLSDETVKNVAPEIEKVAEFLQELEVRAQSAASRS

SEQ ID NO: 28806 - DNA, 2023 bp, Arabidopsis thaliana
  misc_feature (1)..(2023): Ceres Seq. ID no. 12370614
  misc_feature (1)..(2023): Ortholog of  Ceres SEQ ID NO 13582619 as cited in SEQ ID NO 56520
  misc_feature (1)..(2023): Ortholog of  Ceres SEQ ID NO 12611392 as cited in SEQ ID NO 56826
  misc_feature (1)..(2023): Ortholog of  Ceres SEQ ID NO 13660872 as cited in SEQ ID NO 60830
aatccaaaatctatctaccgccgatcaaaaaaccctagaatttcttccactgttatgtaagtttgatcatgttgtctccactaagaggcgaagagagaaagagggttttaggttgtgtgttctgtttcaaagggtttacttctcgttgaccccgatcgagatggttgattcttctcgtgattcgtgtttcaaagctggtaagtttagtgctccaggttttcgatttcaccctactgatgaagagcttgtggtttattatcttaagaggaagatctgttgtaaaaaacttcgaatcaatgccattggtgtcgttgatgtttacaaagtcgatccttctgaattgcctggtctatcgatgttgaagacgggagatagacagtggttctttttcactccaaggaataggaagtatcctaacgcagctaggtcaagtagaggtactgcaactggttattggaaggcgacaggaaaggatcgagtcattgagtacaattcaagatctgttggactcaagaagactcttgttttctatagaggtcgtgctcctaatggtgagagaactgactgggtgatgcatgagtacactatggatgaagaagagctagggagatgtaagaacgctaaggagtattatgctctttataagctttataagaagagtggggctggtcctaagaatggtgaacagtatggtgctccgttccaagaagaagaatgggttgatagtgatagtgaagatgcagatagtgtcgctataccggattatcccgtggtccgttatgagaatggtccttgtgtggatgatactaaattttgcaatcctgtcaaacttcagttagaggatattgagaagcttctcaatgaaatcccagatgcacccggggttaaccaaagacagtttgatgagtttgttggtgtttccaacagggtaatagtgcagaagtgatacagagcacattggctgaataattcttctggagagtatattgaccctcggacgaatggaatgttcttgccaaatggccagctatacaacagggactcgagttttcagtcccatttgaattcatttgaggctacctctggtatggcacctcttctagataatgagaaggaggagtacattgaaatgaatgatcttctgatccctgagctcggtgcttcttcaacagagaaatccacagagttcttgaaccatggtgaatttggtgatgttaatgaatacgaccaattgttcaatgacatatctgtttttcagggaacttctacagatctgtcttgtctgagtaattttactaataacacatcaggccaaagacagcaattactttatgaacagttccagtaccagacacctgagaaccagcttaataactacatgcatcctagtaccactcttaatcagttcactgacaatatgtggtttaaagatgatcaggctgctctctatgttcaaccaccacaatcttcttctggagcattcacttcacagtcaacaggtgtgatgcctgagtctatgaatcccactatgagtgtaaatccccaatacaaggaagtacaaaatggtggtggaacaaggagccagttctcatcagctctgtgggaattattggaatcaataccatcaacaccagcctctgcctgtgagggtcctcttaaccagacctttgtgcgtatgtctagcttcagccgcatcaggttcaatggaacgtcagtgactagtagaaaagtcactgtagcaaagaagcgtatcagtaacagaggttttcttctgttatcaattatgggtgctttgtgtgctatcttctgggtgttcatagccaccgttggagttatgggaagacctctcttgtcgtgacctagactcttgaatcttgattcagcataagttagcctgatccacatctttgattatgtatagagtttgaaagagtttaattcttaacaaaagatttcttttttcctggattctctgatggctttgaaattttgcttgcacttatcatattaagcagaatttttg

SEQ ID NO: 28807 - protein, 314 aa, Arabidopsis thaliana
  peptide (1)..(314): Ceres Seq. ID no. 12370615
IQNLSTADQKTLEFLPLLCKFDHVVSTKRRREKEGFRLCVLFQRVYFSLTPIEMVDSSRDSCFKAGKFSAPGFRFHPTDEELVVYYLKRKICCKKLRINAIGVVDVYKVDPSELPGLSMLKTGDRQWFFFTPRNRKYPNAARSSRGTATGYWKATGKDRVIEYNSRSVGLKKTLVFYRGRAPNGERTDWVMHEYTMDEEELGRCKNAKEYYALYKLYKKSGAGPKNGEQYGAPFQEEEWVDSDSEDADSVAIPDYPVVRYENGPCVDDTKFCNPVKLQLEDIEKLLNEIPDAPGVNQRQFDEFVGVSNRVIVQK

SEQ ID NO: 28808 - protein, 283 aa, Arabidopsis thaliana
  peptide (1)..(283): Ceres Seq. ID no. 12370616
MFLPNGQLYNRDSSFQSHLNSFEATSGMAPLLDNEKEEYIEMNDLLIPELGASSTEKSTEFLNHGEFGDVNEYDQLFNDISVFQGTSTDLSCLSNFTNNTSGQRQQLLYEQFQYQTPENQLNNYMHPSTTLNQFTDNMWFKDDQAALYVQPPQSSSGAFTSQSTGVMPESMNPTMSVNPQYKEVQNGGGTRSQFSSALWELLESIPSTPASACEGPLNQTFVRMSSFSRIRFNGTSVTSRKVTVAKKRISNRGFLLLSIMGALCAIFWVFIATVGVMGRPLLS

SEQ ID NO: 28809 - protein, 261 aa, Arabidopsis thaliana
  peptide (1)..(261): Ceres Seq. ID no. 12370617
MVDSSRDSCFKAGKFSAPGFRFHPTDEELVVYYLKRKICCKKLRINAIGVVDVYKVDPSELPGLSMLKTGDRQWFFFTPRNRKYPNAARSSRGTATGYWKATGKDRVIEYNSRSVGLKKTLVFYRGRAPNGERTDWVMHEYTMDEEELGRCKNAKEYYALYKLYKKSGAGPKNGEQYGAPFQEEEWVDSDSEDADSVAIPDYPVVRYENGPCVDDTKFCNPVKLQLEDIEKLLNEIPDAPGVNQRQFDEFVGVSNRVIVQK

SEQ ID NO: 28810 - DNA, 1739 bp, Arabidopsis thaliana
  misc_feature (1)..(1739): Ceres Seq. ID no. 12324446
  misc_feature (1)..(1739): Ortholog of  Ceres SEQ ID NO 13600220 as cited in SEQ ID NO 0
aaaccaaacggtcaaacctcactcaccatgagacaccttagctcacctccatggcctctcctccttctcctcctcctctcttctttcacctccggcgaatcctctctgtccgcagaaaaaaacaaattgcacaccggtggtctcagtagacagagttttcctaaaggattcgtgtttggaaccgccacgtcagcttatcaagtcgaaggcgagactcatcaagacggtcgtggcccaagcatttgggatgccttcgtcaagattcctgggaagatcgccaagaatgccacggctgagataacagtggaccagtatcaccgttacaaggaagatgtggatttgatgaagaaactgaacttcgatgcttacagattttccatttcatggtccaggatattccctgagggaagtggtaaagtcaactggaaaggagttgcttattacaatagattgattgattacatggttcaaaaagggattacaccttatgctaatctgtaccactacgatcttccattggctttggaaaacaagtataaaggcttgcttggtagacaagtagtgaaagattttgcggattacgctgagttttgttacaagacatttggtgatagagtgaaaaattggatgacgttcaacgagccgcgtgtggtagctgctttaggttatgataatggtattttcgcaccgggtagatgctcaaaagcatttggaaattgcactgaaggaaactccgcgacagagccatacatagttactcatcaccttatcttggcccacgcagcagcagtccaaagataccgcaaatattaccaagcgaaacaaaagggaagggttgggatacttttagatttcgtttggtatgagccgcttactagaagtaaagcagataatcttgcagctcaaagagcaagagacttccatatcggatggtttattcacccattagtatatggagagtatccaaagacaatgcagaacattgtgaaagagaggcttccaaagttcacggagaaagaagtgaaaatggtgaaaggttccatagattttgtgggaataaaccaatacacgacttattacatgtccgaaccacatcccaccaccaaacctaaggatttgggttatcaacaagattggaatgtggaatttggctttgctaagttggggaagccaataggtccaagggcttactcgtcttggttatacaacgtaccatggggaatgtacaaggccttgatgtatatgaaggaacgttacggcaaccctactatgatcctctctgaaaacggtatggatgacccgggaaacgttactctagctcaaggactacatgacaccacgagaatcaagtattacaaagattacttaaccaaccttaagaaagctagggatgatggagccaatgtggttggatattttgcgtggtcattgctagataatttcgaatggttatcaggatatacttcaaggtttgggatcgtttatgttgattacaaaacattgaagaggtaccccaagatgtctgctcagtggtttaagcaacttctgaaacgaaacaacaaatgatctcaatgtatcaatgccgggtggatttagtttttaaaaaggttggaattgatgattgaagaaataatggggccggtttagtcactttgtttattataaggggggtgaattgtaacttgaactctctccttcttcagttctttgacttttcaacacaaataaaataaaagttt

SEQ ID NO: 28811 - protein, 521 aa, Arabidopsis thaliana
  peptide (1)..(521): Ceres Seq. ID no. 12324447
KPNGQTSLTMRHLSSPPWPLLLLLLLSSFTSGESSLSAEKNKLHTGGLSRQSFPKGFVFGTATSAYQVEGETHQDGRGPSIWDAFVKIPGKIAKNATAEITVDQYHRYKEDVDLMKKLNFDAYRFSISWSRIFPEGSGKVNWKGVAYYNRLIDYMVQKGITPYANLYHYDLPLALENKYKGLLGRQVVKDFADYAEFCYKTFGDRVKNWMTFNEPRVVAALGYDNGIFAPGRCSKAFGNCTEGNSATEPYIVTHHLILAHAAAVQRYRKYYQAKQKGRVGILLDFVWYEPLTRSKADNLAAQRARDFHIGWFIHPLVYGEYPKTMQNIVKERLPKFTEKEVKMVKGSIDFVGINQYTTYYMSEPHPTTKPKDLGYQQDWNVEFGFAKLGKPIGPRAYSSWLYNVPWGMYKALMYMKERYGNPTMILSENGMDDPGNVTLAQGLHDTTRIKYYKDYLTNLKKARDDGANVVGYFAWSLLDNFEWLSGYTSRFGIVYVDYKTLKRYPKMSAQWFKQLLKRNNK

SEQ ID NO: 28812 - protein, 512 aa, Arabidopsis thaliana
  peptide (1)..(512): Ceres Seq. ID no. 12324448
MRHLSSPPWPLLLLLLLSSFTSGESSLSAEKNKLHTGGLSRQSFPKGFVFGTATSAYQVEGETHQDGRGPSIWDAFVKIPGKIAKNATAEITVDQYHRYKEDVDLMKKLNFDAYRFSISWSRIFPEGSGKVNWKGVAYYNRLIDYMVQKGITPYANLYHYDLPLALENKYKGLLGRQVVKDFADYAEFCYKTFGDRVKNWMTFNEPRVVAALGYDNGIFAPGRCSKAFGNCTEGNSATEPYIVTHHLILAHAAAVQRYRKYYQAKQKGRVGILLDFVWYEPLTRSKADNLAAQRARDFHIGWFIHPLVYGEYPKTMQNIVKERLPKFTEKEVKMVKGSIDFVGINQYTTYYMSEPHPTTKPKDLGYQQDWNVEFGFAKLGKPIGPRAYSSWLYNVPWGMYKALMYMKERYGNPTMILSENGMDDPGNVTLAQGLHDTTRIKYYKDYLTNLKKARDDGANVVGYFAWSLLDNFEWLSGYTSRFGIVYVDYKTLKRYPKMSAQWFKQLLKRNNK

SEQ ID NO: 28813 - protein, 407 aa, Arabidopsis thaliana
  peptide (1)..(407): Ceres Seq. ID no. 12324449
MKKLNFDAYRFSISWSRIFPEGSGKVNWKGVAYYNRLIDYMVQKGITPYANLYHYDLPLALENKYKGLLGRQVVKDFADYAEFCYKTFGDRVKNWMTFNEPRVVAALGYDNGIFAPGRCSKAFGNCTEGNSATEPYIVTHHLILAHAAAVQRYRKYYQAKQKGRVGILLDFVWYEPLTRSKADNLAAQRARDFHIGWFIHPLVYGEYPKTMQNIVKERLPKFTEKEVKMVKGSIDFVGINQYTTYYMSEPHPTTKPKDLGYQQDWNVEFGFAKLGKPIGPRAYSSWLYNVPWGMYKALMYMKERYGNPTMILSENGMDDPGNVTLAQGLHDTTRIKYYKDYLTNLKKARDDGANVVGYFAWSLLDNFEWLSGYTSRFGIVYVDYKTLKRYPKMSAQWFKQLLKRNNK

SEQ ID NO: 28814 - DNA, 1589 bp, Arabidopsis thaliana
  misc_feature (1)..(1589): Ceres Seq. ID no. 13497178
  misc_feature (1)..(1589): Ortholog of  Ceres SEQ ID NO 13596816 as cited in SEQ ID NO 62287
ctctctctctctctctctcacttcatctatggcttcttcttctctgcagtctctcttctctctgttttgccttgctctgttctctcttcctctcatcgtctcctccatcggcatcaactatgggcaggtcgctaacaaccttcctccccctaaaaacgtcatccctctcctcaagtctgtgggagctacaaaagtcaagctctatgacgccgatccacaagccctacgtgccttcgccggctccggcttcgagctcaccgtggccctcggtaacgagtacctggctcagatgagcgaccctattaaagcccaaggctgggtgaaggagaacgtccaagcttacctcccaaacaccaagatcgtggccatcgtagtgggaaacgaagtcctcacctcaaaccagtcagccctcacggcagccctcttcccggctatgcaaagcatccacggtgctctggtggattgtggcctaaacaagcagatctttgtgacgacggctcactcactagccatcttggatgtatcctaccctccctcggccacttccttccgccgcgacctcctcggctccctcactcccatcttggacttccacgtcaagactggctcaccaatcctcatcaacgcctaccctttcttcgcctacgaagaaaaccccaaacacgtttctctcgacttcgtactcttccaaccaaatcaaggcttcaccgatcctggctctaatttccactacgacaacatgctcttcgctcaggtcgacgcagtctatcacgctcttgacgctgtcggcatcagctacaagaaagttcccattgtcgtctccgagaccggatggccttccaacggtgacccgcaagaagtcggagccacctgcgacaatgctcgcaagtacaatgggaatctgatcaagatgatgatgagcaagaagatgaggacgcctatacgacctgagtgcgatctcaccatcttcgtctttgctctctttaacgagaacatgaagcctggaccaacctccgagaggaactacggtctcttcaaccctgacggaactccggtttactcacttgggatcaagacctcttccactcatagtagtggtagtggtagcagcaactccactggtggtagtagcagtggcggtggcggtaacactggtggctcttccagcggtggtggcatctatcagccagtcacgggtaacccatcaccggattacatgtccatttcctccgccgggggaaaaggcagattcgttgagtgtgtgttgttcttcttcttgctttgcatcatcaagcttcggttgtaaaagcttctccactagatctcgtcggctttgtacttttactcggttgatgacgtgatatagcccccaaatttaatttaattagttttgtgttggtgttttggtcggaggatgatttaggagacataccatctttgttgtgccgacctcctctccaactctttttttttttccttttccattctcctttttcttgtttaagcatagattatttaaataatgaatcttagttgattagatttttctaaagaagatgatgattttcgataattgtataacttgaagg

SEQ ID NO: 28815 - protein, 434 aa, Arabidopsis thaliana
  peptide (1)..(434): Ceres Seq. ID no. 13497179
SLSLSLTSSMASSSLQSLFSLFCLALFSLPLIVSSIGINYGQVANNLPPPKNVIPLLKSVGATKVKLYDADPQALRAFAGSGFELTVALGNEYLAQMSDPIKAQGWVKENVQAYLPNTKIVAIVVGNEVLTSNQSALTAALFPAMQSIHGALVDCGLNKQIFVTTAHSLAILDVSYPPSATSFRRDLLGSLTPILDFHVKTGSPILINAYPFFAYEENPKHVSLDFVLFQPNQGFTDPGSNFHYDNMLFAQVDAVYHALDAVGISYKKVPIVVSETGWPSNGDPQEVGATCDNARKYNGNLIKMMMSKKMRTPIRPECDLTIFVFALFNENMKPGPTSERNYGLFNPDGTPVYSLGIKTSSTHSSGSGSSNSTGGSSSGGGGNTGGSSSGGGIYQPVTGNPSPDYMSISSAGGKGRFVECVLFFFLLCIIKLRL

SEQ ID NO: 28816 - protein, 425 aa, Arabidopsis thaliana
  peptide (1)..(425): Ceres Seq. ID no. 13497180
MASSSLQSLFSLFCLALFSLPLIVSSIGINYGQVANNLPPPKNVIPLLKSVGATKVKLYDADPQALRAFAGSGFELTVALGNEYLAQMSDPIKAQGWVKENVQAYLPNTKIVAIVVGNEVLTSNQSALTAALFPAMQSIHGALVDCGLNKQIFVTTAHSLAILDVSYPPSATSFRRDLLGSLTPILDFHVKTGSPILINAYPFFAYEENPKHVSLDFVLFQPNQGFTDPGSNFHYDNMLFAQVDAVYHALDAVGISYKKVPIVVSETGWPSNGDPQEVGATCDNARKYNGNLIKMMMSKKMRTPIRPECDLTIFVFALFNENMKPGPTSERNYGLFNPDGTPVYSLGIKTSSTHSSGSGSSNSTGGSSSGGGGNTGGSSSGGGIYQPVTGNPSPDYMSISSAGGKGRFVECVLFFFLLCIIKLRL

SEQ ID NO: 28817 - protein, 338 aa, Arabidopsis thaliana
  peptide (1)..(338): Ceres Seq. ID no. 13497181
MSDPIKAQGWVKENVQAYLPNTKIVAIVVGNEVLTSNQSALTAALFPAMQSIHGALVDCGLNKQIFVTTAHSLAILDVSYPPSATSFRRDLLGSLTPILDFHVKTGSPILINAYPFFAYEENPKHVSLDFVLFQPNQGFTDPGSNFHYDNMLFAQVDAVYHALDAVGISYKKVPIVVSETGWPSNGDPQEVGATCDNARKYNGNLIKMMMSKKMRTPIRPECDLTIFVFALFNENMKPGPTSERNYGLFNPDGTPVYSLGIKTSSTHSSGSGSSNSTGGSSSGGGGNTGGSSSGGGIYQPVTGNPSPDYMSISSAGGKGRFVECVLFFFLLCIIKLRL

SEQ ID NO: 28818 - DNA, 1132 bp, Arabidopsis thaliana
  misc_feature (1)..(1132): Ceres Seq. ID no. 12371695
  misc_feature (1)..(1132): Ortholog of  Ceres SEQ ID NO 15170760 as cited in SEQ ID NO 52747
  misc_feature (1)..(1132): Ortholog of  Ceres SEQ ID NO 14314335 as cited in SEQ ID NO 57305
  misc_feature (1)..(1132): Ortholog of  Ceres SEQ ID NO 15177588 as cited in SEQ ID NO 60367
acaagccctacaacaaccacaaagcaaaacacttacttagaaagtccagaaacatccattaacacatatggctaaagacgtggaaggacctgatggatttcagacgagagattacgaagatcctccgccaacaccgtttttcgacgcagaggagcttaccaagtggtctttatacagagcagtcatcgccgagttcgtagccactctcctcttcttgtacgtcaccgttttaactgtcattggttacaagattcagtccgacacaaaagccggtggagttgactgcggcggcgtcggaatccttggcatcgcgtgggcttttggtggcatgatcttcatccttgtctactgcaccgccggtatctcaggtggtcacataaaccctgcggtgacgtttggtttgttcttagcccggaaggtatcgctgattagggcggtgctttacatggtggctcagtgtttgggtgctatttgtggagttgggtttgtgaaggcatttcaaagctctcactatgttaattacggtggaggagccaactttctagctgacggctacaatacaggcaccggactcgcggcagagatcatcggaacattcgtgcttgtctacacagtcttctccgctactgatcccaaacgcaacgctagagactcccacgttccggttttggcgccacttccgattgggtttgcggtgtttatggtacatttggccactattccgatcaccggaaccggtatcaacccggctaggagtttcggagccgccgtaatctttaacaagagcaagccatgggatgaccactggatattctgggtgggaccattcattggagctacgatagctgcattttatcaccaattcgttctaagggcctcaggctccaagtccctcggttcattcagaagtgcagccaacgtttaaacttagccacgaaagaaaaaaagtgtgcctacaattatgtagaaacatatcctcttttccactcgtatcttagcttcttcctattttctatttctaactgtgtgattccatattaaatcgagtgaaatgtttttcaattcatctttgcaacgtatgtaagtttggtgtattgagaaaaaaaaatcgagaaagacaactttttcttcg

SEQ ID NO: 28819 - protein, 285 aa, Arabidopsis thaliana
  peptide (1)..(285): Ceres Seq. ID no. 12371696
MAKDVEGPDGFQTRDYEDPPPTPFFDAEELTKWSLYRAVIAEFVATLLFLYVTVLTVIGYKIQSDTKAGGVDCGGVGILGIAWAFGGMIFILVYCTAGISGGHINPAVTFGLFLARKVSLIRAVLYMVAQCLGAICGVGFVKAFQSSHYVNYGGGANFLADGYNTGTGLAAEIIGTFVLVYTVFSATDPKRNARDSHVPVLAPLPIGFAVFMVHLATIPITGTGINPARSFGAAVIFNKSKPWDDHWIFWVGPFIGATIAAFYHQFVLRASGSKSLGSFRSAANV

SEQ ID NO: 28820 - protein, 198 aa, Arabidopsis thaliana
  peptide (1)..(198): Ceres Seq. ID no. 12371697
MIFILVYCTAGISGGHINPAVTFGLFLARKVSLIRAVLYMVAQCLGAICGVGFVKAFQSSHYVNYGGGANFLADGYNTGTGLAAEIIGTFVLVYTVFSATDPKRNARDSHVPVLAPLPIGFAVFMVHLATIPITGTGINPARSFGAAVIFNKSKPWDDHWIFWVGPFIGATIAAFYHQFVLRASGSKSLGSFRSAANV

SEQ ID NO: 28821 - protein, 159 aa, Arabidopsis thaliana
  peptide (1)..(159): Ceres Seq. ID no. 12371698
MVAQCLGAICGVGFVKAFQSSHYVNYGGGANFLADGYNTGTGLAAEIIGTFVLVYTVFSATDPKRNARDSHVPVLAPLPIGFAVFMVHLATIPITGTGINPARSFGAAVIFNKSKPWDDHWIFWVGPFIGATIAAFYHQFVLRASGSKSLGSFRSAANV

SEQ ID NO: 28822 - DNA, 1154 bp, Arabidopsis thaliana; identical to SEQ ID NO: 26919
  misc_feature (1)..(1154): Ceres Seq. ID no. 12385275
  misc_feature (1)..(1154): Ortholog of  Ceres SEQ ID NO 14312711 as cited in SEQ ID NO 1401
  misc_feature (1)..(1154): Ortholog of  Ceres SEQ ID NO 13586635 as cited in SEQ ID NO 14217
  misc_feature (1)..(1154): Ortholog of  Ceres SEQ ID NO 15170220 as cited in SEQ ID NO 55383
  misc_feature (1)..(1154): Ortholog of  Ceres SEQ ID NO 14304198 as cited in SEQ ID NO 56479
  misc_feature (1)..(1154): Ortholog of  Ceres SEQ ID NO 14316543 as cited in SEQ ID NO 57118
  misc_feature (1)..(1154): Ortholog of  Ceres SEQ ID NO 12616285 as cited in SEQ ID NO 63483

SEQ ID NO: 28823 - protein, 350 aa, Arabidopsis thaliana; identical to SEQ ID NO: 26920
  peptide (1)..(350): Ceres Seq. ID no. 12385276

SEQ ID NO: 28824 - protein, 331 aa, Arabidopsis thaliana; identical to SEQ ID NO: 21476
  peptide (1)..(331): Ceres Seq. ID no. 12385277

SEQ ID NO: 28825 - protein, 324 aa, Arabidopsis thaliana; identical to SEQ ID NO: 21477
  peptide (1)..(324): Ceres Seq. ID no. 12385278

SEQ ID NO: 28826 - DNA, 1013 bp, Arabidopsis thaliana; identical to SEQ ID NO: 26249
  misc_feature (1)..(1013): Ceres Seq. ID no. 12580328
  misc_feature (1)..(1013): Ortholog of  Ceres SEQ ID NO 13589868 as cited in SEQ ID NO 55521
  misc_feature (1)..(1013): Ortholog of  Ceres SEQ ID NO 15226426 as cited in SEQ ID NO 55985
  misc_feature (1)..(1013): Ortholog of  Ceres SEQ ID NO 14312250 as cited in SEQ ID NO 59168
  misc_feature (1)..(1013): Ortholog of  Ceres SEQ ID NO 15173326 as cited in SEQ ID NO 63793
  misc_feature (1)..(1013): Ortholog of  Ceres SEQ ID NO 12617659 as cited in SEQ ID NO 65286
  misc_feature (1)..(1013): Ortholog of  Ceres SEQ ID NO 12780566 as cited in SEQ ID NO 65822
  misc_feature (1)..(1013): Ortholog of  Ceres SEQ ID NO 15179979 as cited in SEQ ID NO 0

SEQ ID NO: 28827 - protein, 182 aa, Arabidopsis thaliana; identical to SEQ ID NO: 26250
  peptide (1)..(182): Ceres Seq. ID no. 12580329

SEQ ID NO: 28828 - protein, 175 aa, Arabidopsis thaliana; identical to SEQ ID NO: 26251
  peptide (1)..(175): Ceres Seq. ID no. 12580330

SEQ ID NO: 28829 - protein, 144 aa, Arabidopsis thaliana; identical to SEQ ID NO: 26252
  peptide (1)..(144): Ceres Seq. ID no. 12580331

SEQ ID NO: 28830 - DNA, 1148 bp, Arabidopsis thaliana
  misc_feature (1)..(1148): Ceres Seq. ID no. 12334441
  misc_feature (1)..(1148): Ortholog of  Ceres SEQ ID NO 13639514 as cited in SEQ ID NO 55736
  misc_feature (1)..(1148): Ortholog of  Ceres SEQ ID NO 14312254 as cited in SEQ ID NO 59148
  misc_feature (1)..(1148): Ortholog of  Ceres SEQ ID NO 13662804 as cited in SEQ ID NO 65394
  misc_feature (1)..(1148): Ortholog of  Ceres SEQ ID NO 13656519 as cited in SEQ ID NO 69226
aaggaggttgggttggtcgactttgctaagataagagaagagagactgactctctctctctctaactcttcattcttctctcttttaccttctctccaagaaatcttcactttctctctagaaaaaagttggaagctgactcgataaagactctctttttcttcttcttcctgcaaatggcgatcgaggatcaagagaacacaatccgtgaaatcaaacctaagaacagaagaatcatgggagctggtggaccggaggaagaggagaaccggtggccgccatggttgaaacctttgcttaaagagcaattctttgttcattgcaagtttcatggagactctcataagagtgaatgcaatatgtattgcttagactgcaccaatggcccactttgctctctttgtcttgctcatcacaaggatcatcgcaccattcagataaggagatcttcttatcatgatgttataagggtgaatgagatacaaaagtatcttgatataggtgggatccaaacctatgtgatcaatagtgctaaagtcgtcttcctgaatgagaggcctcagcctaggcctgggaaaggagtgaccaatacctgcaaggtttgctatcgtagcctcgttgatgatagcttccgcttctgctctcttggctgcaagattgctggaacatcaagaggctttgaaaagggaagggagaacctgctaatggaaacagaggattcaagtagcagcattgcaattgggaagaacattacaaatctccagagtttcagcccatcaacacctccacttactacatctagtaactgcagaatcgtcaagcgaagaaagggaattcctcaccgatctccaatgggataagaaccgagataagaaagaagctagtttcttcatcagattacacacaaaggttttagctaatacagaggcttcttctgtctcttatctttcctcgtataccaaaagaaatggtcttttgcttgtgttagcaaaaaaagaaaggccttaagttaggttttgttgtcctactacttgggcaaatatgtgaatatgtaatgtgctttgtatatgatgcaaaagggtagaaatggaaatataggggttttagtgggctaaaagtaagaataaaaacaaaattagtttttggtc

SEQ ID NO: 28831 - protein, 227 aa, Arabidopsis thaliana
  peptide (1)..(227): Ceres Seq. ID no. 12334442
MAIEDQENTIREIKPKNRRIMGAGGPEEEENRWPPWLKPLLKEQFFVHCKFHGDSHKSECNMYCLDCTNGPLCSLCLAHHKDHRTIQIRRSSYHDVIRVNEIQKYLDIGGIQTYVINSAKVVFLNERPQPRPGKGVTNTCKVCYRSLVDDSFRFCSLGCKIAGTSRGFEKGRENLLMETEDSSSSIAIGKNITNLQSFSPSTPPLTTSSNCRIVKRRKGIPHRSPMG

SEQ ID NO: 28832 - protein, 207 aa, Arabidopsis thaliana
  peptide (1)..(207): Ceres Seq. ID no. 12334443
MGAGGPEEEENRWPPWLKPLLKEQFFVHCKFHGDSHKSECNMYCLDCTNGPLCSLCLAHHKDHRTIQIRRSSYHDVIRVNEIQKYLDIGGIQTYVINSAKVVFLNERPQPRPGKGVTNTCKVCYRSLVDDSFRFCSLGCKIAGTSRGFEKGRENLLMETEDSSSSIAIGKNITNLQSFSPSTPPLTTSSNCRIVKRRKGIPHRSPMG

SEQ ID NO: 28833 - protein, 166 aa, Arabidopsis thaliana
  peptide (1)..(166): Ceres Seq. ID no. 12334444
MYCLDCTNGPLCSLCLAHHKDHRTIQIRRSSYHDVIRVNEIQKYLDIGGIQTYVINSAKVVFLNERPQPRPGKGVTNTCKVCYRSLVDDSFRFCSLGCKIAGTSRGFEKGRENLLMETEDSSSSIAIGKNITNLQSFSPSTPPLTTSSNCRIVKRRKGIPHRSPMG

SEQ ID NO: 28834 - DNA, 1854 bp, Arabidopsis thaliana
  misc_feature (1)..(1854): Ceres Seq. ID no. 13499750
  misc_feature (1)..(1854): Ortholog of  Ceres SEQ ID NO 13664013 as cited in SEQ ID NO 67686
ggtggcgttaagtcgttaactgcgtctgatctactcgtagcttcttcgttcttcagcatttgatcggagtagtgacctttttgattgacagatggaagctctgtcttctcttacgttcaagggttctcttccagaagccatatttgaagccaaagggaagaagaagctttttgttgtctacatttctggagaggatgaagagtcggataagttgaacagattgacttggactgatgcatcggtggcagattcgttgtcgaagtattgtattttagtgcatatccaagctggaagtgttgacgccacaaacttctctgcaatatacccatattcatctgttccttgtatagctgccattggattcagtggtacacaagtttggagaaccgaaggatttatcactgctgaagaccttgcatccagtttagagaaagcgtggttaggacttcatatccaggaaacaactgcaagtatcttttcagcagcacttgcatcacagaactcagagacacctgtttctagtgcttcgagtgttgtcttgcctcccggaagtgttcctttagatgcagcggttgcatctccatcgacggcttctagtgttcaaccctcagagacaaagtcaacggtaacatctgcatcaacaacagaaaacaatgatggcacagttgcagttaagggcaaagaatctgctgaacccagtaatttgtgtgatactactaaaaaccagccagcaccctctgttgatggaactaaggccaatgttgaacatgaagcgacagagacccctttgcgtgttcaggcagaaaaggagccaattcgtcctacagccccaggaacaaatgataatacatccagggttcgatcttctgttgatagaaaaaggaaacagggaactgtgataaatgaagaggatagtggtgtaggtgttagtggaagggacattaatctaacaaaatctgtcgatacaaaagagaccatgaagccaaaggatgaaggaggagaggaagaggatggagaaaaatccaaaaaagcatctgacgttcatttaaacattcgattacctgatggtagtagccttcaggagaagttttctgtgacaagtatattgagaatggtcaaggattatgtgaacagtaatcaaacaatcggactgggtgcttatgatcttgcggttccttacccacgtaaggtgtatactgaccaagatctggataagtctctatccgagttgagattgttcgatagacaagcacttgtagtagttccgcgaaaaagagcaaccgtctatcaaagaggaacatcttactcggagtctaacaacaacacagaccctaatagtggcggttactttgcttatgttagaagagtactgtcttatgcaaacccgttttcatattttggcggtggtactgccaacgcatcaagctctgttccagaacgtcaaacaagaccaaatacggaggtgagaaacaatctggggcaagtagggacgtcctttcaagatccatcagaaggtaggagcaacgttaggaataggagaccaaccacttctcggattggaagtaacatccatacgttgaatcacaatgaagatgaggctccgtttggtgatggaaacgctttttggaacggaaactccacacagtacggtggtggaagcggtggagacagtaatgatagacgatgaaataagagaagttgaaatctgtgtggatagatacagaaacagctcgggtgtttactttttatacttgactctttatgaaccatttaagagaccagctgcaaaatgtatcctgatgcgtttccgttttttcggttgctcgtattaaatttaaatctaaaaaaactacc

SEQ ID NO: 28835 - protein, 531 aa, Arabidopsis thaliana
  peptide (1)..(531): Ceres Seq. ID no. 13499751
MEALSSLTFKGSLPEAIFEAKGKKKLFVVYISGEDEESDKLNRLTWTDASVADSLSKYCILVHIQAGSVDATNFSAIYPYSSVPCIAAIGFSGTQVWRTEGFITAEDLASSLEKAWLGLHIQETTASIFSAALASQNSETPVSSASSVVLPPGSVPLDAAVASPSTASSVQPSETKSTVTSASTTENNDGTVAVKGKESAEPSNLCDTTKNQPAPSVDGTKANVEHEATETPLRVQAEKEPIRPTAPGTNDNTSRVRSSVDRKRKQGTVINEEDSGVGVSGRDINLTKSVDTKETMKPKDEGGEEEDGEKSKKASDVHLNIRLPDGSSLQEKFSVTSILRMVKDYVNSNQTIGLGAYDLAVPYPRKVYTDQDLDKSLSELRLFDRQALVVVPRKRATVYQRGTSYSESNNNTDPNSGGYFAYVRRVLSYANPFSYFGGGTANASSSVPERQTRPNTEVRNNLGQVGTSFQDPSEGRSNVRNRRPTTSRIGSNIHTLNHNEDEAPFGDGNAFWNGNSTQYGGGSGGDSNDRR

SEQ ID NO: 28836 - DNA, 1377 bp, Arabidopsis thaliana
  misc_feature (1)..(1377): Ceres Seq. ID no. 13487616
  misc_feature (1)..(1377): Ortholog of  Ceres SEQ ID NO 13595464 as cited in SEQ ID NO 59792
  misc_feature (1)..(1377): Ortholog of  Ceres SEQ ID NO 14316416 as cited in SEQ ID NO 60078
acttccctttgttcagacgtttctttattcttcttccttccttcttctccttcttcttgatcgtgttcagaaatcatattcatcacctctctctctctatgtctctatatttggattctttataacatgtgagatcgatctatttttgatcagagacagagagaagactagaagaagcaaagaatatttcaagaatgatgaagatgaatacaggaacatcgccgtcggtcatcggcggcgggactagtggtaatgagtgggagtctcgacctggaggaatggttgttcaacgtcggacagatcagaactccgatgtgccacgtgtctttcgtgttcgggttaaatacgggtcggtttatcacgagatcaacatcaattcccaatcttccttcggagagttgaagaagatgttgtctgatcaagtgggacttcaccatgaagacatgaaggttttgtacaaagacaaagagagagattcaaagatgtttcttgatctttgtggagttaaagatcggtcaaagcttgttgttaaagaagatccaatttctcaggagaaacgtctccttgcaaaaaggaaaaacgccgccattgaaaaagcttctaaatctatctctgatattagtttcgaagtcgacagactcgccggacaggtgtcggcgtttgagacggtgattaataaaggaggtaaagttgaagagaagagtcttgtgaatctgatagagatgttgatgaatcagttattgagacttgatgctattattgctgatggtgatgtcaaattgatgaggaagatgcaggtgcaaagagttcagaagtacgttgaggcactcgacctcttaaaagtcaaaaactctgccaaaaaagttgaagtcaacaagtccgtccgccacaaaccgcaaacgcaaacgcgatttgagcaacgcgatttgttatcgtttgtggaggaagaggaggaggagcctaggaattccaatgcatcatcctcatcaggtactccggcggttgtagcttcaaaatgggaaatgtttgattccgcatcgacggccaaggcggctgaaacggttaaaccggtccctccgcgattcaaatgggaattcttcgattaagatgaacactatatatacatacatgataaatatgtcttttttttctccggtttcatatgtgatttgttttgtttttcatctcaactgagatgtgtatgatttgtgatttgatcttggctattttttgaggctttgtctagaatatcttttggttggactcccttttaagtcaatcaaaaataataggggagtttcaacaattactatcattgtaatacctaaagatttggattttctttactattacaataaaaagctatcaaaaagatgc

SEQ ID NO: 28837 - protein, 303 aa, Arabidopsis thaliana
  peptide (1)..(303): Ceres Seq. ID no. 13487617
MMKMNTGTSPSVIGGGTSGNEWESRPGGMVVQRRTDQNSDVPRVFRVRVKYGSVYHEININSQSSFGELKKMLSDQVGLHHEDMKVLYKDKERDSKMFLDLCGVKDRSKLVVKEDPISQEKRLLAKRKNAAIEKASKSISDISFEVDRLAGQVSAFETVINKGGKVEEKSLVNLIEMLMNQLLRLDAIIADGDVKLMRKMQVQRVQKYVEALDLLKVKNSAKKVEVNKSVRHKPQTQTRFEQRDLLSFVEEEEEEPRNSNASSSSGTPAVVASKWEMFDSASTAKAAETVKPVPPRFKWEFFD

SEQ ID NO: 28838 - protein, 302 aa, Arabidopsis thaliana
  peptide (1)..(302): Ceres Seq. ID no. 13487618
MKMNTGTSPSVIGGGTSGNEWESRPGGMVVQRRTDQNSDVPRVFRVRVKYGSVYHEININSQSSFGELKKMLSDQVGLHHEDMKVLYKDKERDSKMFLDLCGVKDRSKLVVKEDPISQEKRLLAKRKNAAIEKASKSISDISFEVDRLAGQVSAFETVINKGGKVEEKSLVNLIEMLMNQLLRLDAIIADGDVKLMRKMQVQRVQKYVEALDLLKVKNSAKKVEVNKSVRHKPQTQTRFEQRDLLSFVEEEEEEPRNSNASSSSGTPAVVASKWEMFDSASTAKAAETVKPVPPRFKWEFFD

SEQ ID NO: 28839 - protein, 300 aa, Arabidopsis thaliana
  peptide (1)..(300): Ceres Seq. ID no. 13487619
MNTGTSPSVIGGGTSGNEWESRPGGMVVQRRTDQNSDVPRVFRVRVKYGSVYHEININSQSSFGELKKMLSDQVGLHHEDMKVLYKDKERDSKMFLDLCGVKDRSKLVVKEDPISQEKRLLAKRKNAAIEKASKSISDISFEVDRLAGQVSAFETVINKGGKVEEKSLVNLIEMLMNQLLRLDAIIADGDVKLMRKMQVQRVQKYVEALDLLKVKNSAKKVEVNKSVRHKPQTQTRFEQRDLLSFVEEEEEEPRNSNASSSSGTPAVVASKWEMFDSASTAKAAETVKPVPPRFKWEFFD

SEQ ID NO: 28840 - DNA, 1159 bp, Arabidopsis thaliana
  misc_feature (1)..(1159): Ceres Seq. ID no. 12335058
  misc_feature (1)..(1159): Ortholog of  Ceres SEQ ID NO 12610958 as cited in SEQ ID NO 55963
  misc_feature (1)..(1159): Ortholog of  Ceres SEQ ID NO 14309410 as cited in SEQ ID NO 0
aagatttttacagattctgcctcgatcaacagactctaatcagcagcaaatgtggagcgtcaccggagcattgactgtggcggtgccgcctaccgccgccgcttgccgtacgaaaccctttctcatctcctcttcctttcccaagcagacaaagaaactccatctctcttcgccttctctgtctctaccatcatcacatttctcctcctctttcaaaaccgcagctacctccatcgagcaacagtcttctgttaacaagggagagagcaccaagtaccatttcctggtagcaaacgctaaattcatgcttgacgaagaggagcacttccaggagcaattgtttgaacgtctccgttacttcggtgagcgtgaattagtgcaagacttctggcttgtcattgagcctaaattccttgacaatttccccaaaattactcaaagacttcgtcgtcctgctgttgctcttgtttccaccaatggcacctggatcacgtttatgaagttaagattggatcgtgttctgtatgattcctttgaagctacctctcttgatgaagctttggcctccaatcctaccactcttgagttcgataagcctaaaaattgggtggcgccataccccaagtatgaacctggatggtgggataccttcttgcctaaagtaacccaagaatctgcagtatagaactttgctttttgtcttgtttttgcattctccaatctcagctttgtcttagtgcttcaaagttttgtactactgagctcattatccaagtctatatctttcctagtgtagcttctattactcaaagttgcctgtttgatacgtcactgactcaaggttaagcatagaactagacaacaaaaagcatcctcacatttagctccatcaaagtcttaagggtgaccatatttgttgatttctcacgagaatattggcaagaaccttcagttaaagctctaggtattaagttgtctagtcacaggagggcaatatgcctactcgctgaagaactttgcaaaagatctgaattttttggttttcaaaacgatttgtggactcggaacatgttgttactcgttaggtctagtgactggagttgatcaaagtaagttgcacatgtttctgctgaatcaagtgttctatgttgtacttctg

SEQ ID NO: 28841 - protein, 227 aa, Arabidopsis thaliana
  peptide (1)..(227): Ceres Seq. ID no. 12335059
RFLQILPRSTDSNQQQMWSVTGALTVAVPPTAAACRTKPFLISSSFPKQTKKLHLSSPSLSLPSSHFSSSFKTAATSIEQQSSVNKGESTKYHFLVANAKFMLDEEEHFQEQLFERLRYFGERELVQDFWLVIEPKFLDNFPKITQRLRRPAVALVSTNGTWITFMKLRLDRVLYDSFEATSLDEALASNPTTLEFDKPKNWVAPYPKYEPGWWDTFLPKVTQESAV

SEQ ID NO: 28842 - protein, 211 aa, Arabidopsis thaliana
  peptide (1)..(211): Ceres Seq. ID no. 12335060
MWSVTGALTVAVPPTAAACRTKPFLISSSFPKQTKKLHLSSPSLSLPSSHFSSSFKTAATSIEQQSSVNKGESTKYHFLVANAKFMLDEEEHFQEQLFERLRYFGERELVQDFWLVIEPKFLDNFPKITQRLRRPAVALVSTNGTWITFMKLRLDRVLYDSFEATSLDEALASNPTTLEFDKPKNWVAPYPKYEPGWWDTFLPKVTQESAV

SEQ ID NO: 28843 - protein, 126 aa, Arabidopsis thaliana
  peptide (1)..(126): Ceres Seq. ID no. 12335061
MLDEEEHFQEQLFERLRYFGERELVQDFWLVIEPKFLDNFPKITQRLRRPAVALVSTNGTWITFMKLRLDRVLYDSFEATSLDEALASNPTTLEFDKPKNWVAPYPKYEPGWWDTFLPKVTQESAV

SEQ ID NO: 28844 - DNA, 1387 bp, Arabidopsis thaliana
  misc_feature (1)..(1387): Ceres Seq. ID no. 12439771
  misc_feature (1)..(1387): Ortholog of  Ceres SEQ ID NO 14314567 as cited in SEQ ID NO 52335
  misc_feature (1)..(1387): Ortholog of  Ceres SEQ ID NO 13595437 as cited in SEQ ID NO 56562
  misc_feature (1)..(1387): Ortholog of  Ceres SEQ ID NO 14315985 as cited in SEQ ID NO 57720
ctcaaacatttcctaattccatcctaataattttcaaagctttaattctaagaaataatatctacaagaaaatattatctcatgtatttcttcttcctccttgatttttaatctgatttttaacctttggatttggaaaattatatcttcttctgtcccaaatctatttttaggtttgtcaaaacgattattttgtttaataatcgtaataggtatggagactaccggagaagttgttaaaacaaccaccgggagcgacggaggcgttacggtggtgagatccaacgcgccgtcagacttccacatggctccgaggtcagaaacttcaaacacacctcccaactccgtcgctcctcctcctcctccaccgccgcaaaactcctttactccgtcggcggctatggatggtttctcaagcggaccgataaagaagagacgtgggcgccctaggaagtacggacacgacggagcagcggtgacgctatctccgaatccgatatcatcagccgcaccaacgacttctcacgtcatcgatttctcgacgacatcggagaaacgtggcaaaatgaaaccagcaactccaactccaagctcattcatcaggccaaagtaccaggtcgagaatttaggtgaatggtctccttcctctgccgccgctaatttcacgccgcatattattacggtgaatgcaggcgaggacgttacgaagaggataatatcattttctcaacaagggtctctagctatttgcgttttatgcgcaaacggtgtcgtttcgagcgttacacttcgtcagcctgattcatctggtggtacattgacctatgagggtcggtttgagatattgtcactatctggaacattcatgcctagtgactcagacgggacacgaagcagaacaggcgggatgagcgtgtcgcttgctagccctgatggacgtgtagtaggtggtggtgttgctggcttgctggttgcagccactcctattcaagtggttgtaggaactttcttaggtggaacaaaccagcaagaacagacaccgaagccgcataaccacaacttcatgtcttctccattaatgccaacttcttcgaatgtagctgatcatcgaaccatccgtcccatgacatctagtctcccgatcagtacatggacaccgtcttttccttctgattcacgacacaagcattctcatgactttaatatcactttgacgtgatttcttccttgaagaactcgtagatcctctgtattttggtttccagtttagggctctacatgttagactctcaaagtctaggtgttatgttggtctgtcacttaggattgtcacttaggattgttagaccatctccatcaatggtttctcattgagaaactgttcaat

SEQ ID NO: 28845 - protein, 334 aa, Arabidopsis thaliana
  peptide (1)..(334): Ceres Seq. ID no. 12439772
METTGEVVKTTTGSDGGVTVVRSNAPSDFHMAPRSETSNTPPNSVAPPPPPPPQNSFTPSAAMDGFSSGPIKKRRGRPRKYGHDGAAVTLSPNPISSAAPTTSHVIDFSTTSEKRGKMKPATPTPSSFIRPKYQVENLGEWSPSSAAANFTPHIITVNAGEDVTKRIISFSQQGSLAICVLCANGVVSSVTLRQPDSSGGTLTYEGRFEILSLSGTFMPSDSDGTRSRTGGMSVSLASPDGRVVGGGVAGLLVAATPIQVVVGTFLGGTNQQEQTPKPHNHNFMSSPLMPTSSNVADHRTIRPMTSSLPISTWTPSFPSDSRHKHSHDFNITLT

SEQ ID NO: 28846 - protein, 304 aa, Arabidopsis thaliana
  peptide (1)..(304): Ceres Seq. ID no. 12439773
MAPRSETSNTPPNSVAPPPPPPPQNSFTPSAAMDGFSSGPIKKRRGRPRKYGHDGAAVTLSPNPISSAAPTTSHVIDFSTTSEKRGKMKPATPTPSSFIRPKYQVENLGEWSPSSAAANFTPHIITVNAGEDVTKRIISFSQQGSLAICVLCANGVVSSVTLRQPDSSGGTLTYEGRFEILSLSGTFMPSDSDGTRSRTGGMSVSLASPDGRVVGGGVAGLLVAATPIQVVVGTFLGGTNQQEQTPKPHNHNFMSSPLMPTSSNVADHRTIRPMTSSLPISTWTPSFPSDSRHKHSHDFNITLT

SEQ ID NO: 28847 - protein, 272 aa, Arabidopsis thaliana
  peptide (1)..(272): Ceres Seq. ID no. 12439774
MDGFSSGPIKKRRGRPRKYGHDGAAVTLSPNPISSAAPTTSHVIDFSTTSEKRGKMKPATPTPSSFIRPKYQVENLGEWSPSSAAANFTPHIITVNAGEDVTKRIISFSQQGSLAICVLCANGVVSSVTLRQPDSSGGTLTYEGRFEILSLSGTFMPSDSDGTRSRTGGMSVSLASPDGRVVGGGVAGLLVAATPIQVVVGTFLGGTNQQEQTPKPHNHNFMSSPLMPTSSNVADHRTIRPMTSSLPISTWTPSFPSDSRHKHSHDFNITLT

SEQ ID NO: 28848 - DNA, 1455 bp, Arabidopsis thaliana
  misc_feature (1)..(1455): Ceres Seq. ID no. 13490626
  misc_feature (1)..(1455): Ortholog of  Ceres SEQ ID NO 14302314 as cited in SEQ ID NO 62543
  misc_feature (1)..(1455): Ortholog of  Ceres SEQ ID NO 13598391 as cited in SEQ ID NO 62769
taaaaaaaaaaaaataaaaatctaggaaggagaaggagagaggagaagtgattcgatcgattctctttttggtgatcgaagctaaatctataaggaatttgaatctttgtatgtgtttttttcgtggagatgagaagcggcggcttggaaatgatgtcatcttcagcaatcgtagcgtttaatttgaaggagggtaagaattggtggtgggatgtgaatgaatctccggtgtggcaggatcgtatcttccatgttcttgctgttctatatggaatcgtttccgtcattgctgtgattcaattggtaagaatacaattgagagttccagaatatggctggacgacgcagaaggtctttcattttctcaatttcatggttaacggagttcgagctctggtttttctcttccggcgagatgcacagaacatgcagccagagattctgcaacatatcttacttgatattccaagtcttgctttcttcactacatatgcgcttctggttctcttttgggcagagatttactaccaggcacgtgctgtatcgactgatggactgaggccaagtttcttcacaattaatgcagttgtatacgtaattcagattgctctttggttggttttgtggtggaagcctgttcaccttatggtaatcatttctaagatgttctttgcaggtgtctcattgtttgcggcccttggctttttattatatggaggaaggcttttcctgatgctgcaacgatttccagtagagtctaaagggcggcgcaagaagctacaagaggttggctacgtgacaaccatatgctttacatgtttcctcatcagatgtatcatgatgtgctttgatgcgtttgacgatgcagcagatcttgatgtcttagatcatccaatcctaaacttcatatattacttgttggtggagatattgccatcgtctctggtcctctttatcctaagaaagcttccgccaaaacgcggtatcacacagtaccatcaaatccaatgaacatgttcagagaatcgaaacactgaggtaccggtaaaccgaggggttcatgtttctttcatagacaaaagtgtaaattgtaaggggtttcagaacaatggattgtgatttctctctaactaattcaatgcggttgattagtataagtctctcttgtttatactgattcaaagtagtttggtgtgagaatgatagaatcatagttactgagatatccagcttctggttctgacttctgagacggaagaacaattggtattttgatgatatattatggacattggcttgttgtcagttcatacgaagtagttttttaagaaatgcaaatagtcatttgttgactggttggtcttttctctaccggtcttttccacttggttaattgaaagttaggtgatatctgcacgtactaatttcggttattattaattaattacaatcggc

SEQ ID NO: 28849 - protein, 293 aa, Arabidopsis thaliana
  peptide (1)..(293): Ceres Seq. ID no. 13490627
MRSGGLEMMSSSAIVAFNLKEGKNWWWDVNESPVWQDRIFHVLAVLYGIVSVIAVIQLVRIQLRVPEYGWTTQKVFHFLNFMVNGVRALVFLFRRDAQNMQPEILQHILLDIPSLAFFTTYALLVLFWAEIYYQARAVSTDGLRPSFFTINAVVYVIQIALWLVLWWKPVHLMVIISKMFFAGVSLFAALGFLLYGGRLFLMLQRFPVESKGRRKKLQEVGYVTTICFTCFLIRCIMMCFDAFDDAADLDVLDHPILNFIYYLLVEILPSSLVLFILRKLPPKRGITQYHQIQ

SEQ ID NO: 28850 - protein, 286 aa, Arabidopsis thaliana
  peptide (1)..(286): Ceres Seq. ID no. 13490628
MMSSSAIVAFNLKEGKNWWWDVNESPVWQDRIFHVLAVLYGIVSVIAVIQLVRIQLRVPEYGWTTQKVFHFLNFMVNGVRALVFLFRRDAQNMQPEILQHILLDIPSLAFFTTYALLVLFWAEIYYQARAVSTDGLRPSFFTINAVVYVIQIALWLVLWWKPVHLMVIISKMFFAGVSLFAALGFLLYGGRLFLMLQRFPVESKGRRKKLQEVGYVTTICFTCFLIRCIMMCFDAFDDAADLDVLDHPILNFIYYLLVEILPSSLVLFILRKLPPKRGITQYHQIQ

SEQ ID NO: 28851 - protein, 285 aa, Arabidopsis thaliana
  peptide (1)..(285): Ceres Seq. ID no. 13490629
MSSSAIVAFNLKEGKNWWWDVNESPVWQDRIFHVLAVLYGIVSVIAVIQLVRIQLRVPEYGWTTQKVFHFLNFMVNGVRALVFLFRRDAQNMQPEILQHILLDIPSLAFFTTYALLVLFWAEIYYQARAVSTDGLRPSFFTINAVVYVIQIALWLVLWWKPVHLMVIISKMFFAGVSLFAALGFLLYGGRLFLMLQRFPVESKGRRKKLQEVGYVTTICFTCFLIRCIMMCFDAFDDAADLDVLDHPILNFIYYLLVEILPSSLVLFILRKLPPKRGITQYHQIQ

SEQ ID NO: 28852 - DNA, 803 bp, Arabidopsis thaliana
  misc_feature (1)..(803): Ceres Seq. ID no. 13489786
  misc_feature (1)..(803): Ortholog of  Ceres SEQ ID NO 12624558 as cited in SEQ ID NO 61726
  misc_feature (1)..(803): Ortholog of  Ceres SEQ ID NO 12635763 as cited in SEQ ID NO 0
gttgcttaacctattagagtttccttcctccaacaaaccatctttataagactccaaaatggagggtaagagatcacaaggacaaggttacatgaaaaagaagtcttaccttgtggaagaagatatggagactgatacggatgaagaagaggaagtaggtagggatagagttagagggtctagaggtagcatcaatcgtggtggctcgttgcggctttgccaagtagatagatgcacagctgatatgaaagaggcaaaactgtatcaccggagacacaaagtgtgtgaagttcatgcaaaggcatcttctgtctttctctcaggacttaaccaacgcttttgtcaacaatgcagtaggtttcatgacctccaagagtttgatgaagctaagagaagttgcaggaggcgcttagctggacacaatgagcgaagaaggaagagctctggtgagagtacttatggagaaggatcaggtcggagaggaatcaatggtcaggtggtgatgcagaatcaagaaagatcaagggtagagatgacacttcctatgccaaactcatcattcaagcgaccacagattagatagagaagctgtctgctctctctcttctgtcatctaaacttctctcttagaatcctaaaattgtggtatctaacaatgttatagagaaataaataactaccactctctctagtactctctaatgttatcagctatatgcaaacgctaagactatacttgaaccttgagtgttatcttgtatgtttcaaagatatggctaatgatatgtgtaatacttctacct

SEQ ID NO: 28853 - protein, 174 aa, Arabidopsis thaliana
  peptide (1)..(174): Ceres Seq. ID no. 13489787
MEGKRSQGQGYMKKKSYLVEEDMETDTDEEEEVGRDRVRGSRGSINRGGSLRLCQVDRCTADMKEAKLYHRRHKVCEVHAKASSVFLSGLNQRFCQQCSRFHDLQEFDEAKRSCRRRLAGHNERRRKSSGESTYGEGSGRRGINGQVVMQNQERSRVEMTLPMPNSSFKRPQIR

SEQ ID NO: 28854 - protein, 163 aa, Arabidopsis thaliana
  peptide (1)..(163): Ceres Seq. ID no. 13489788
MKKKSYLVEEDMETDTDEEEEVGRDRVRGSRGSINRGGSLRLCQVDRCTADMKEAKLYHRRHKVCEVHAKASSVFLSGLNQRFCQQCSRFHDLQEFDEAKRSCRRRLAGHNERRRKSSGESTYGEGSGRRGINGQVVMQNQERSRVEMTLPMPNSSFKRPQIR

SEQ ID NO: 28855 - protein, 152 aa, Arabidopsis thaliana
  peptide (1)..(152): Ceres Seq. ID no. 13489789
METDTDEEEEVGRDRVRGSRGSINRGGSLRLCQVDRCTADMKEAKLYHRRHKVCEVHAKASSVFLSGLNQRFCQQCSRFHDLQEFDEAKRSCRRRLAGHNERRRKSSGESTYGEGSGRRGINGQVVMQNQERSRVEMTLPMPNSSFKRPQIR

SEQ ID NO: 28856 - DNA, 773 bp, Arabidopsis thaliana
  misc_feature (1)..(773): Ceres Seq. ID no. 13646075
  misc_feature (1)..(773): Ortholog of  Ceres SEQ ID NO 13598935 as cited in SEQ ID NO 1239
  misc_feature (1)..(773): Ortholog of  Ceres SEQ ID NO 14316515 as cited in SEQ ID NO 57228
  misc_feature (1)..(773): Ortholog of  Ceres SEQ ID NO 13598171 as cited in SEQ ID NO 61357
  misc_feature (1)..(773): Ortholog of  Ceres SEQ ID NO 13664149 as cited in SEQ ID NO 61490
ggctcgaataatacgacgacttgtaataataataccgcccatgttttcgtggcacaaatatttaatatttcggtacctacgccatcgtcttcttctactatatatagtctagacatagacaccatcaagaagaagaaaaaaaacacataccacattctccactcatggcaaaactcatcctcatcatcgtcacccaaatcctcctcatcgcagccgttgtttccgcccgtaaaggcgaaaactttgcaaaaaccattgacaaaaaacattttggcctccgtaaggagaaactcactcatttccgtgtctactggcacgacattttaagcggctcaaaccctagttcggtcgtgatcaaccctcctatctccaactcttccttcttcggatcggtcactgtgatcgataaccgattaactacggaggtcgcggtgaattcgactttagtgggacaagcgcaagggatctacgctgctactggtcaacgtgatgcatctgcgcttatggtgatgaactttgcgttcaagacagggaagtataacggaagttcgatcgcgattcttggccggaacgctgtgttgaccaaggttagggagatgccggtgattggaggaagtggactcttccggtttgctagaggttatgtcgaggctcggaccatgtggtttgatcaaaagtcaggagatgctactgttgagtacagctgttatgtcttgcattattgatgatagtgatgaattattatgcctctcttttttaatgtttgataaaat

SEQ ID NO: 28857 - protein, 186 aa, Arabidopsis thaliana
  peptide (1)..(186): Ceres Seq. ID no. 13646076
MAKLILIIVTQILLIAAVVSARKGENFAKTIDKKHFGLRKEKLTHFRVYWHDILSGSNPSSVVINPPISNSSFFGSVTVIDNRLTTEVAVNSTLVGQAQGIYAATGQRDASALMVMNFAFKTGKYNGSSIAILGRNAVLTKVREMPVIGGSGLFRFARGYVEARTMWFDQKSGDATVEYSCYVLHY

SEQ ID NO: 28858 - protein, 108 aa, Arabidopsis thaliana
  peptide (1)..(108): Ceres Seq. ID no. 13646077
GSNNTTTCNNNTAHVFVAQIFNISVPTPSSSSTIYSLDIDTIKKKKKNTYHILHSWQNSSSSSSPKSSSSQPLFPPVKAKTLQKPLTKNILASVRRNSLISVSTGTTF

SEQ ID NO: 28859 - DNA, 2068 bp, Arabidopsis thaliana
  misc_feature (1)..(2068): Ceres Seq. ID no. 12397174
  misc_feature (1)..(2068): Ortholog of  Ceres SEQ ID NO 15168366 as cited in SEQ ID NO 60199
atgatgcaactgggtggtggtactccgaccactacagcggcggctacaaccgtcacaactgctacagcaccaccgccacaatcaaacaacaacgattcagcggcaacagaagcagcggcagcagcggttggggcgtttgaggtgtcggaagagatgcacgaccgtgggtttggaggaaatcgttggccgcggcaggaaacgctagcgttgttgaaaatacgatctgacatgggaatagcgtttcgagacgctagcgttaaaggtcccttatgggaagaggtttctaggaaaatggcggagcatggttacataagaaacgcaaagaaatgcaaagagaaattcgagaacgtttacaaataccacaaacgaaccaaagaaggtcgtaccggaaaatccgaaggcaaaacttatcgcttctttgatcaattagaagctctcgagtctcaatctacaacctcactccaccatcatcaacaacaaacgcctcttcgaccacagcaaaacaacaacaacaacaacaacaacaacaacaacagctccatattttcaactcctcctccggtaacgacagttatgccgacgcttccttcttcatcaattcctccgtatactcagcagattaatgtaccttcgtttccaaacatctccggtgattttctatcggataattctacatcgtcttcgtcttcttattcgacttcttctgacatggagatgggtggtggaactgcgactacaaggaagaaaaggaagaggaaatggaaggtgtttttcgagcggttgatgaaacaagtagttgataaacaggaagagcttcaacgcaaattcttggaagctgttgaaaagcgagaacacgagagattggttagagaagagtcttggagagttcaagagattgccagaatcaaccgcgagcacgagatcttagctcaagaacgctctatgtccgctgcaaaagacgctgctgttatggcctttcttcaaaaactgtcagagaaacaaccgaatcagccacaaccgcagcctcagccgcaacaagttcgaccatcaatgcagcttaataacaacaatcagcagcaaccgcctcaacggtctcctccaccgcaacctcctgctccgcttccgcagccaattcaagcggttgtgtcgacgttagacacaacgaaaacggacaatggtggtgatcagaatatgactcctgcagcttcagcgagctcgtcgcggtggccgaaagtggagatagaagcattgataaagctgaggacgaatcttgattcgaaatatcaagaaaacggaccaaaaggaccattgtgggaagagatatcagcgggaatgagaaggttaggattcaacaggaactcaaagagatgcaaagagaaatgggaaaacataaacaaatacttcaagaaagtcaaagagagcaacaagaaacgtcccgaagattccaagacttgcccttactttcaccagcttgatgctttatatagagagaggaacaaattccacagcaacaacaacattgcagcttcttcttcatcttccggtcttgttaaaccggataattctgttcccttgatggtccaaccagagcagcaatggcctccggctgtaacgactgcgacaactactcccgcagcggctcagcctgatcagcaatctcagccgtcggagcagaactttgatgatgaagaaggtacagatgaagagtacgacgatgaagatgaggaagaggagaatgaagaagaggaaggaggtgagttcgagcttgtgcctagcaataacaacaacaacaagacgacgaataatctgtaatgatgatgattcgagttcgaaccggtttggtggtgaaagattagtaatctttttttaagttttgatacagaacatgagaatttaaatattggagggtttttttttttttttttttttcatctttgatttttaagttatactgaagagagatttaatatgttaaaacaaaattaaaataaactgtgatttaattattttttccttgggatatataaataaaaaatgttaagatagggggacaatgtggggttttcat

SEQ ID NO: 28860 - protein, 603 aa, Arabidopsis thaliana
  peptide (1)..(603): Ceres Seq. ID no. 12397175
MMQLGGGTPTTTAAATTVTTATAPPPQSNNNDSAATEAAAAAVGAFEVSEEMHDRGFGGNRWPRQETLALLKIRSDMGIAFRDASVKGPLWEEVSRKMAEHGYIRNAKKCKEKFENVYKYHKRTKEGRTGKSEGKTYRFFDQLEALESQSTTSLHHHQQQTPLRPQQNNNNNNNNNNNSSIFSTPPPVTTVMPTLPSSSIPPYTQQINVPSFPNISGDFLSDNSTSSSSSYSTSSDMEMGGGTATTRKKRKRKWKVFFERLMKQVVDKQEELQRKFLEAVEKREHERLVREESWRVQEIARINREHEILAQERSMSAAKDAAVMAFLQKLSEKQPNQPQPQPQPQQVRPSMQLNNNNQQQPPQRSPPPQPPAPLPQPIQAVVSTLDTTKTDNGGDQNMTPAASASSSRWPKVEIEALIKLRTNLDSKYQENGPKGPLWEEISAGMRRLGFNRNSKRCKEKWENINKYFKKVKESNKKRPEDSKTCPYFHQLDALYRERNKFHSNNNIAASSSSSGLVKPDNSVPLMVQPEQQWPPAVTTATTTPAAAQPDQQSQPSEQNFDDEEGTDEEYDDEDEEEENEEEEGGEFELVPSNNNNNKTTNNL

SEQ ID NO: 28861 - protein, 602 aa, Arabidopsis thaliana
  peptide (1)..(602): Ceres Seq. ID no. 12397176
MQLGGGTPTTTAAATTVTTATAPPPQSNNNDSAATEAAAAAVGAFEVSEEMHDRGFGGNRWPRQETLALLKIRSDMGIAFRDASVKGPLWEEVSRKMAEHGYIRNAKKCKEKFENVYKYHKRTKEGRTGKSEGKTYRFFDQLEALESQSTTSLHHHQQQTPLRPQQNNNNNNNNNNNSSIFSTPPPVTTVMPTLPSSSIPPYTQQINVPSFPNISGDFLSDNSTSSSSSYSTSSDMEMGGGTATTRKKRKRKWKVFFERLMKQVVDKQEELQRKFLEAVEKREHERLVREESWRVQEIARINREHEILAQERSMSAAKDAAVMAFLQKLSEKQPNQPQPQPQPQQVRPSMQLNNNNQQQPPQRSPPPQPPAPLPQPIQAVVSTLDTTKTDNGGDQNMTPAASASSSRWPKVEIEALIKLRTNLDSKYQENGPKGPLWEEISAGMRRLGFNRNSKRCKEKWENINKYFKKVKESNKKRPEDSKTCPYFHQLDALYRERNKFHSNNNIAASSSSSGLVKPDNSVPLMVQPEQQWPPAVTTATTTPAAAQPDQQSQPSEQNFDDEEGTDEEYDDEDEEEENEEEEGGEFELVPSNNNNNKTTNNL

SEQ ID NO: 28862 - protein, 552 aa, Arabidopsis thaliana
  peptide (1)..(552): Ceres Seq. ID no. 12397177
MHDRGFGGNRWPRQETLALLKIRSDMGIAFRDASVKGPLWEEVSRKMAEHGYIRNAKKCKEKFENVYKYHKRTKEGRTGKSEGKTYRFFDQLEALESQSTTSLHHHQQQTPLRPQQNNNNNNNNNNNSSIFSTPPPVTTVMPTLPSSSIPPYTQQINVPSFPNISGDFLSDNSTSSSSSYSTSSDMEMGGGTATTRKKRKRKWKVFFERLMKQVVDKQEELQRKFLEAVEKREHERLVREESWRVQEIARINREHEILAQERSMSAAKDAAVMAFLQKLSEKQPNQPQPQPQPQQVRPSMQLNNNNQQQPPQRSPPPQPPAPLPQPIQAVVSTLDTTKTDNGGDQNMTPAASASSSRWPKVEIEALIKLRTNLDSKYQENGPKGPLWEEISAGMRRLGFNRNSKRCKEKWENINKYFKKVKESNKKRPEDSKTCPYFHQLDALYRERNKFHSNNNIAASSSSSGLVKPDNSVPLMVQPEQQWPPAVTTATTTPAAAQPDQQSQPSEQNFDDEEGTDEEYDDEDEEEENEEEEGGEFELVPSNNNNNKTTNNL

SEQ ID NO: 28863 - DNA, 845 bp, Arabidopsis thaliana
  misc_feature (1)..(845): Ceres Seq. ID no. 12332612
  misc_feature (1)..(845): Ortholog of  Ceres SEQ ID NO 15174142 as cited in SEQ ID NO 64367
ataagtagggttcttgcttgttttctctcatcgtgtgttctgctgctagctcctcttgagttgaagaaatgaagcacaacaatgttatccccaatggtcacttcaaaaagcactggcagaattatgtcaagacatggttcaaccagcctgccaggaaaaccagaagaagaattgcgaggcaaaagaaggctgtgaagatcttccctcgtccaacttctggacctctccgccctgttgtgcatggtcagactcttaagtacaacatgaaggtcagaaccggtaaaggattcactcttgaagagctcaaggctgctggtatcccaaagaagttggcgcctacaattggtattgctgttgaccatcgtcgcaagaaccgatctttggagggtcttcaaacaaatgtccagaggctgaaaacctacaagaccaagttagtcattttcccgcgtcgtgcccgcaaggtcaaggctggtgactctacaccagaagagttggctaatgctacccaagttcaaggagactacttgcctattgtacgtgagaagcctaccatggaactcgtcaagctgacttcagaaatgaagtctttcaaggcttttgacaagatacgccttgagcgcactaacaagaggcatgccggagctagagccaagagagccgcagaggctgagaaagaagagaagaagtgaggtcgttcttcttaggtagaagaaacttttatcttatcaacttttggaactgaattttgtgtatcagactgtcttttctttcatcagtttttatccttaaatctttgattttgctgctaccttgcttctcttgatttatggaaaagaccgtatctc

SEQ ID NO: 28864 - protein, 206 aa, Arabidopsis thaliana [sequence omitted]

SEQ ID NO: 28865 - protein, 141 aa, Arabidopsis thaliana; identical to SEQ ID NO: 25776
  peptide (1)..(141): Ceres Seq. ID no. 12332614

SEQ ID NO: 28866 - DNA, 1480 bp, Arabidopsis thaliana
  misc_feature (1)..(1480): Ceres Seq. ID no. 12385338
  misc_feature (1)..(1480): Ortholog of  Ceres SEQ ID NO 14313264 as cited in SEQ ID NO 67300
  misc_feature (1)..(1480): Ortholog of  Ceres SEQ ID NO 14302824 as cited in SEQ ID NO 67794
gtccgcctccagctcccaaaagccaaagggcgaatcttcttcttctctttcgatcaaatcttttcagattcaacccaaaattgaagacaaaaatgtctcgcagatcgctaactctcctcaagaatctagctagaaacgcgaatggatcaggtattcaaacccgatccgtgacttacatgcccagacccggtgacggagcaccacgcgcagtgacgctgatccccggagatggaatcggtcctctggtgacgaacgccgtggaacaggtgatggaagcgatgcacgctccgatcttcttcgagaagtacgatgttcacggagaaatgagccgtgtgccgccggaagtgatggagtcgataaggaagaataaggtttgtttgaaaggtgggcttaagactcctgttggtggtggtgttagttctcttaacgtccagcttaggaaagagcttgacctctttgcttctctggtcaactgttttaatttgcctggtttacctactcgccatgagaatgttgacatcgttgtcatcagagagaacactgaaggtgagtacgcggggcttgagcacgaggttgttcctggtgtcgttgagagtctgaaggtgatcacgaagttctgttcggagcgtattgcaaagtatgcttttgagtatgcctacctgaacaacaggaagaaagttacagcggtgcataaggctaacatcatgaaacttgcggatggtttgttcttggaatcttgtcgcgaggttgcgaaaaagtatcccagcatcacctacaatgaaatcattgttgataactgctgtatgcaacttgtagccaaaccagagcaattcgatgtcatggtaacgccgaatctctatgggaatttagttgcaaacactgctgctggtattgctggaggcacaggagtcatgcctggaggaaatgttggggctgaccatgcggtattcgagcaaggtgcatcagcaggaaatgttgggaaagacaagatagtattggaaaacaaagcaaacccagtggcattgcttctctcatcagcgatgatgcttagacaccttcagtttccttcatttgctgaccggctcgaaacagcagtgaagaaagtcatcgctgaaggaaagtgccggacgaaagatcttggtggaacaagcacgactcaagaggtcgttgatgcggtcattgcaaaactagactgactttgacaaattacgtgttcccgctctgcataaatcatcaaattcctgatacagattttgtgttgccaaaatatggggtatgatccaagcacaacggttatctggttttgtacctcgagttttattatattctttagccgtggaatatttcgataagaaaaaaaaacatgttccaaataattcatgttgctacgtttgttggcgccttttgtcatgtcaaagtttcttaaacacttgttcgtggaatatgcaaacttttatggattcgtaatttcaagaatatg

SEQ ID NO: 28867 - protein, 397 aa, Arabidopsis thaliana
  peptide (1)..(397): Ceres Seq. ID no. 12385339
PPPAPKSQRANLLLLFRSNLFRFNPKLKTKMSRRSLTLLKNLARNANGSGIQTRSVTYMPRPGDGAPRAVTLIPGDGIGPLVTNAVEQVMEAMHAPIFFEKYDVHGEMSRVPPEVMESIRKNKVCLKGGLKTPVGGGVSSLNVQLRKELDLFASLVNCFNLPGLPTRHENVDIVVIRENTEGEYAGLEHEVVPGVVESLKVITKFCSERIAKYAFEYAYLNNRKKVTAVHKANIMKLADGLFLESCREVAKKYPSITYNEIIVDNCCMQLVAKPEQFDVMVTPNLYGNLVANTAAGIAGGTGVMPGGNVGADHAVFEQGASAGNVGKDKIVLENKANPVALLLSSAMMLRHLQFPSFADRLETAVKKVIAEGKCRTKDLGGTSTTQEVVDAVIAKLD

SEQ ID NO: 28868 - protein, 367 aa, Arabidopsis thaliana
  peptide (1)..(367): Ceres Seq. ID no. 12385340
MSRRSLTLLKNLARNANGSGIQTRSVTYMPRPGDGAPRAVTLIPGDGIGPLVTNAVEQVMEAMHAPIFFEKYDVHGEMSRVPPEVMESIRKNKVCLKGGLKTPVGGGVSSLNVQLRKELDLFASLVNCFNLPGLPTRHENVDIVVIRENTEGEYAGLEHEVVPGVVESLKVITKFCSERIAKYAFEYAYLNNRKKVTAVHKANIMKLADGLFLESCREVAKKYPSITYNEIIVDNCCMQLVAKPEQFDVMVTPNLYGNLVANTAAGIAGGTGVMPGGNVGADHAVFEQGASAGNVGKDKIVLENKANPVALLLSSAMMLRHLQFPSFADRLETAVKKVIAEGKCRTKDLGGTSTTQEVVDAVIAKLD

SEQ ID NO: 28869 - protein, 339 aa, Arabidopsis thaliana
  peptide (1)..(339): Ceres Seq. ID no. 12385341
MPRPGDGAPRAVTLIPGDGIGPLVTNAVEQVMEAMHAPIFFEKYDVHGEMSRVPPEVMESIRKNKVCLKGGLKTPVGGGVSSLNVQLRKELDLFASLVNCFNLPGLPTRHENVDIVVIRENTEGEYAGLEHEVVPGVVESLKVITKFCSERIAKYAFEYAYLNNRKKVTAVHKANIMKLADGLFLESCREVAKKYPSITYNEIIVDNCCMQLVAKPEQFDVMVTPNLYGNLVANTAAGIAGGTGVMPGGNVGADHAVFEQGASAGNVGKDKIVLENKANPVALLLSSAMMLRHLQFPSFADRLETAVKKVIAEGKCRTKDLGGTSTTQEVVDAVIAKLD

SEQ ID NO: 28870 - DNA, 1454 bp, Arabidopsis thaliana
  misc_feature (1)..(1454): Ceres Seq. ID no. 12393086
  misc_feature (1)..(1454): Ortholog of  Ceres SEQ ID NO 14315418 as cited in SEQ ID NO 57506
aaaaagtaaaaccctaaaatctcaacgaaagggacgaccaattgttcgacgattggtcatggggaaaaccggaatccaattgttcgacgattcgaggaatgggtttttctccgtttccgatttaggattcgattcgagcctaaacagctctaattaccacccaattggtgggttattcgccagcgttaatcagactaatccattcgcatccctctcgtcctcggatctttccaacagaggcaacaacagcttctctacccagctcaatgatctctacaccaagtatatgccgggaaaagaggaggaggaagaagtagttaatggcgagaagaggaagaggaagaagaaaggtgggctcacactgaagattaagatcgctaatccttcgttgcggcggctattaagcggagcagtagctggagcggtgtcgagaacggtggttgcgccgttggagacaatcaggacgcatctaatggtgggaagtggaggaaactccagcactgaagtgttcagtgatatcatgaagcatgaaggttggactggtctcttcaggggcaatttggtcaatgtcattcgtgttgcacctgctcgagccgtcgagctttttgtattcgagaccgtaaacaagaaattgtcgccgccacatggacaagaatcgaaaatcccaattccagcttctttactggctggtgcctgtgctggagttagccagacactcttgacataccctcttgaactagtcaagactcgccttacaattcagagaggtgtttacaaagggatttttgatgcgtttctcaaaatcatacgcgaggaaggacccacagaactctacaggggtcttgctcctagccttattggagttgttccatacgcagctacaaattactttgcatatgattctttgagaaaagcataccggagtttttcaaagcaggagaagattggaaacattgagactcttttgataggttctttagcaggtgcactatcgagcactgcaactttccctcttgaagtggcccggaagcatatgcaggtgggagctgttagcgggagggttgtgtacaagaacatgttgcacgctctggtgaccatacttgagcatgaaggtattctcggttggtacaaagggcttggaccgagttgcttgaagttggttcctgctgctggaatctccttcatgtgttatgaagcttgcaagaagatactcatcgagaacaaccaagaagcttgattttggaattgtatggattcgtggcaaattttaaggattgatcagagaaacacattgtggatactaattgggttcattttacaccacttgagatttcacaaattagtattgaggggggattaaaagattcactctacctttttgtttgaactttacgttttcaatttttgattgatctgattctgattcaaataagagtttacacaatatctcaaag

SEQ ID NO: 28871 - protein, 411 aa, Arabidopsis thaliana
  peptide (1)..(411): Ceres Seq. ID no. 12393087
KSKTLKSQRKGRPIVRRLVMGKTGIQLFDDSRNGFFSVSDLGFDSSLNSSNYHPIGGLFASVNQTNPFASLSSSDLSNRGNNSFSTQLNDLYTKYMPGKEEEEEVVNGEKRKRKKKGGLTLKIKIANPSLRRLLSGAVAGAVSRTVVAPLETIRTHLMVGSGGNSSTEVFSDIMKHEGWTGLFRGNLVNVIRVAPARAVELFVFETVNKKLSPPHGQESKIPIPASLLAGACAGVSQTLLTYPLELVKTRLTIQRGVYKGIFDAFLKIIREEGPTELYRGLAPSLIGVVPYAATNYFAYDSLRKAYRSFSKQEKIGNIETLLIGSLAGALSSTATFPLEVARKHMQVGAVSGRVVYKNMLHALVTILEHEGILGWYKGLGPSCLKLVPAAGISFMCYEACKKILIENNQEA

SEQ ID NO: 28872 - protein, 392 aa, Arabidopsis thaliana
  peptide (1)..(392): Ceres Seq. ID no. 12393088
MGKTGIQLFDDSRNGFFSVSDLGFDSSLNSSNYHPIGGLFASVNQTNPFASLSSSDLSNRGNNSFSTQLNDLYTKYMPGKEEEEEVVNGEKRKRKKKGGLTLKIKIANPSLRRLLSGAVAGAVSRTVVAPLETIRTHLMVGSGGNSSTEVFSDIMKHEGWTGLFRGNLVNVIRVAPARAVELFVFETVNKKLSPPHGQESKIPIPASLLAGACAGVSQTLLTYPLELVKTRLTIQRGVYKGIFDAFLKIIREEGPTELYRGLAPSLIGVVPYAATNYFAYDSLRKAYRSFSKQEKIGNIETLLIGSLAGALSSTATFPLEVARKHMQVGAVSGRVVYKNMLHALVTILEHEGILGWYKGLGPSCLKLVPAAGISFMCYEACKKILIENNQEA

SEQ ID NO: 28873 - protein, 316 aa, Arabidopsis thaliana
  peptide (1)..(316): Ceres Seq. ID no. 12393089
MPGKEEEEEVVNGEKRKRKKKGGLTLKIKIANPSLRRLLSGAVAGAVSRTVVAPLETIRTHLMVGSGGNSSTEVFSDIMKHEGWTGLFRGNLVNVIRVAPARAVELFVFETVNKKLSPPHGQESKIPIPASLLAGACAGVSQTLLTYPLELVKTRLTIQRGVYKGIFDAFLKIIREEGPTELYRGLAPSLIGVVPYAATNYFAYDSLRKAYRSFSKQEKIGNIETLLIGSLAGALSSTATFPLEVARKHMQVGAVSGRVVYKNMLHALVTILEHEGILGWYKGLGPSCLKLVPAAGISFMCYEACKKILIENNQEA

SEQ ID NO: 28874 - DNA, 1411 bp, Arabidopsis thaliana
  misc_feature (1)..(1411): Ceres Seq. ID no. 12321215
  misc_feature (1)..(1411): Ortholog of  Ceres SEQ ID NO 15177298 as cited in SEQ ID NO 52711
atctgaccaccagaagaagagccacacactcacaaattaaaaagagagagagagagagagagacagagagagagagagattctgcggaggagcttcttcttcgtagggtgttcatcgttattaacgttatcgcccctacgtcagctccatctccagaaacatgggtgcaggtggaagaatgccggttcctacttcttccaagaaatcggaaaccgacaccacaaagcgtgtgccgtgcgagaaaccgcctttctcggtgggagatctgaagaaagcaatcccgccgcattgtttcaaacgctcaatccctcgctctttctcctaccttatcagtgacatcattatagcctcatgcttctactacgtcgccaccaattacttctctctcctccctcagcctctctcttacttggcttggccactctattgggcctgtcaaggctgtgtcctaactggtatctgggtcatagcccacgaatgcggtcaccacgcattcagcgactaccaatggctggatgacacagttggtcttatcttccattccttcctcctcgtcccttacttctcctggaagtatagtcatcgccgtcaccattccaacactggatccctcgaaagagatgaagtatttgtcccaaagcagaaatcagcaatcaagtggtacgggaaatacctcaacaaccctcttggacgcatcatgatgttaaccgtccagtttgtcctcgggtggcccttgtacttagcctttaacgtctctggcagaccgtatgacgggttcgcttgccatttcttccccaacgctcccatctacaatgaccgagaacgcctccagatatacctctctgatgcgggtattctagccgtctgttttggtctttaccgttacgctgctgcacaagggatggcctcgatgatctgcctctacggagtaccgcttctgatagtgaatgcgttcctcgtcttgatcacttacttgcagcacactcatccctcgttgcctcactacgattcatcagagtgggactggctcaggggagctttggctaccgtagacagagactacggaatcttgaacaaggtgttccacaacattacagacacacacgtggctcatcacctgttctcgacaatgccgcattataacgcaatggaagctacaaatgcgataaagccaattctgggagactattaccagttcgatggaacaccgtggtatgtggcgatgtatagggaggcaaaggagtgtatctatgtagaaccggacagggaaggtgacaagaaaggtgtgtactggtacaacaataagttatgaggatgatggtgaagaaattgtcgacttttctcttgtctgtttgtcttttgttaaagaagctatgcttcgttttaataatcttattgtccattttgttgc

SEQ ID NO: 28875 - protein, 383 aa, Arabidopsis thaliana
  peptide (1)..(383): Ceres Seq. ID no. 12321216
MGAGGRMPVPTSSKKSETDTTKRVPCEKPPFSVGDLKKAIPPHCFKRSIPRSFSYLISDIIIASCFYYVATNYFSLLPQPLSYLAWPLYWACQGCVLTGIWVIAHECGHHAFSDYQWLDDTVGLIFHSFLLVPYFSWKYSHRRHHSNTGSLERDEVFVPKQKSAIKWYGKYLNNPLGRIMMLTVQFVLGWPLYLAFNVSGRPYDGFACHFFPNAPIYNDRERLQIYLSDAGILAVCFGLYRYAAAQGMASMICLYGVPLLIVNAFLVLITYLQHTHPSLPHYDSSEWDWLRGALATVDRDYGILNKVFHNITDTHVAHHLFSTMPHYNAMEATNAIKPILGDYYQFDGTPWYVAMYREAKECIYVEPDREGDKKGVYWYNNKL

SEQ ID NO: 28876 - protein, 377 aa, Arabidopsis thaliana
  peptide (1)..(377): Ceres Seq. ID no. 12321217
MPVPTSSKKSETDTTKRVPCEKPPFSVGDLKKAIPPHCFKRSIPRSFSYLISDIIIASCFYYVATNYFSLLPQPLSYLAWPLYWACQGCVLTGIWVIAHECGHHAFSDYQWLDDTVGLIFHSFLLVPYFSWKYSHRRHHSNTGSLERDEVFVPKQKSAIKWYGKYLNNPLGRIMMLTVQFVLGWPLYLAFNVSGRPYDGFACHFFPNAPIYNDRERLQIYLSDAGILAVCFGLYRYAAAQGMASMICLYGVPLLIVNAFLVLITYLQHTHPSLPHYDSSEWDWLRGALATVDRDYGILNKVFHNITDTHVAHHLFSTMPHYNAMEATNAIKPILGDYYQFDGTPWYVAMYREAKECIYVEPDREGDKKGVYWYNNKL

SEQ ID NO: 28877 - protein, 204 aa, Arabidopsis thaliana
  peptide (1)..(204): Ceres Seq. ID no. 12321218
MMLTVQFVLGWPLYLAFNVSGRPYDGFACHFFPNAPIYNDRERLQIYLSDAGILAVCFGLYRYAAAQGMASMICLYGVPLLIVNAFLVLITYLQHTHPSLPHYDSSEWDWLRGALATVDRDYGILNKVFHNITDTHVAHHLFSTMPHYNAMEATNAIKPILGDYYQFDGTPWYVAMYREAKECIYVEPDREGDKKGVYWYNNKL

SEQ ID NO: 28878 - DNA, 2073 bp, Arabidopsis thaliana
  misc_feature (1)..(2073): Ceres Seq. ID no. 13487538
  misc_feature (1)..(2073): Ortholog of  Ceres SEQ ID NO 13596244 as cited in SEQ ID NO 69307
atgaacgtcagatatgattccgatataacccaaaaagtctacgctacaacagagcagcggtctagtctaacgcaaaatccgtttcgtcgtcttcctcgctttacttttcaatctcctccttctccattaatcatctctttctctctctcacggattcgtaagttaatctcagtgcttctccgtcatcttcgcattattggttcttcctttttccctgtaagctcgacacgtggattattcctctgctttttttgttttcccttttcgtgaagattcgtttcctgtatctccgtgaagacttgatggagttagtttcttaaagtagctccttcttagatccgagtttcgatttgcttcactggtgaagaattagtgattgattcaactagatactatcgatttcgttggatttgtactgaaaacttggctgattttgttgattctgtcttgctggtgaagtctcaagctacttcgtgattagaggaggagatctggatttctagttttagcaattcatttgacttccgagttttccagaatcattgaagtgttaggcttacttgattcagattcagaacatagctttagataacgttagaagcagaatcagaatctgcaaatcggctctttagattgctgctactagaaatttgaaattagcttttggtagtgttaaggatgcagaataggattgtacagttggaagaaggaaaagaaaatggaatcacagttcgatcagggcattataaaggatttccatcgaaactgctacttctgctagggttgtttcttacattttctgttactgtcttcatcattagtgtatctactatcaagtatactggaatacaaagtgtagtaaccacagtcacttcaagctttgtgccatgccgtgagggggaaccgaatagtttgagtaaatggatacaacctcctgcggttttgatgcataacatgagcgatgaagagcttctttggcgtgcttctttttggcctcgtagaaaagaatatccgtttaaacgggttccaaaggttgcgtttatgttcttgactaaaggccccttaccgcttgcttcgctttgggagaggttcttgaagggtcacaaagggctttactcggtttaccttcatccacacccttcttttacagccaagtttccagctagctctgttttccaccggaggcaaattccaagccaggttgcagaatgggggagaatgtccatgtgcgatgcagagaagcggcttcttgccaacgccctgcttgatgtgtccaacgaatggtttgttctcgtctcagagtcatgcattccactctacaacttcacaaccatttacagctacttaagccgatcaaaacacagcttcatgggtgcttttgatgaccctggaccgtttgggcgtggccgctacaacgggaacatggaacctgaagttccccttaccaaatggcgaaaagggtctcaatggtttgaggttaaccgggacctggcagctaccattgtcaaagacacattgtattacccgaaattcaaagagttctgcaggcctgcttgctatgtggacgagcattacttcccaacaatgttgacgattgagaaaccaacagtcttggctaaccggagcttgacatgggtggactggtcgaggggcggtccccacccagctacgtttgggcgatcggacattacagaaaacttctttggaaaaatctttgatggaagaaactgcagttacaatggtcgcaacacttccatgtgttatctctttgcgaggaagtttgctccgagtgctttggagcctttgcttcacattgctcccaagattcttggattttgagtagtttagttatgtctctgaagtctgaacctcttgacatcaaatattttattttgtttgttgtgatactagtttggaagaaatgagattttagtagagagaactaggttgcacgacaggatagtcatatgtaaactttatatttcaaagaattactatgcatagatcaaatagtcttctactctttgggactatcttttcagatgcattattgaatcacaaatttgttttctc

SEQ ID NO: 28879 - protein, 386 aa, Arabidopsis thaliana
  peptide (1)..(386): Ceres Seq. ID no. 13487539
MQNRIVQLEEGKENGITVRSGHYKGFPSKLLLLLGLFLTFSVTVFIISVSTIKYTGIQSVVTTVTSSFVPCREGEPNSLSKWIQPPAVLMHNMSDEELLWRASFWPRRKEYPFKRVPKVAFMFLTKGPLPLASLWERFLKGHKGLYSVYLHPHPSFTAKFPASSVFHRRQIPSQVAEWGRMSMCDAEKRLLANALLDVSNEWFVLVSESCIPLYNFTTIYSYLSRSKHSFMGAFDDPGPFGRGRYNGNMEPEVPLTKWRKGSQWFEVNRDLAATIVKDTLYYPKFKEFCRPACYVDEHYFPTMLTIEKPTVLANRSLTWVDWSRGGPHPATFGRSDITENFFGKIFDGRNCSYNGRNTSMCYLFARKFAPSALEPLLHIAPKILGF

SEQ ID NO: 28880 - protein, 297 aa, Arabidopsis thaliana
  peptide (1)..(297): Ceres Seq. ID no. 13487540
MHNMSDEELLWRASFWPRRKEYPFKRVPKVAFMFLTKGPLPLASLWERFLKGHKGLYSVYLHPHPSFTAKFPASSVFHRRQIPSQVAEWGRMSMCDAEKRLLANALLDVSNEWFVLVSESCIPLYNFTTIYSYLSRSKHSFMGAFDDPGPFGRGRYNGNMEPEVPLTKWRKGSQWFEVNRDLAATIVKDTLYYPKFKEFCRPACYVDEHYFPTMLTIEKPTVLANRSLTWVDWSRGGPHPATFGRSDITENFFGKIFDGRNCSYNGRNTSMCYLFARKFAPSALEPLLHIAPKILGF

SEQ ID NO: 28881 - protein, 294 aa, Arabidopsis thaliana
  peptide (1)..(294): Ceres Seq. ID no. 13487541
MSDEELLWRASFWPRRKEYPFKRVPKVAFMFLTKGPLPLASLWERFLKGHKGLYSVYLHPHPSFTAKFPASSVFHRRQIPSQVAEWGRMSMCDAEKRLLANALLDVSNEWFVLVSESCIPLYNFTTIYSYLSRSKHSFMGAFDDPGPFGRGRYNGNMEPEVPLTKWRKGSQWFEVNRDLAATIVKDTLYYPKFKEFCRPACYVDEHYFPTMLTIEKPTVLANRSLTWVDWSRGGPHPATFGRSDITENFFGKIFDGRNCSYNGRNTSMCYLFARKFAPSALEPLLHIAPKILGF

SEQ ID NO: 28882 - DNA, 1140 bp, Arabidopsis thaliana
  misc_feature (1)..(1140): Ceres Seq. ID no. 12321188
  misc_feature (1)..(1140): Ortholog of  Ceres SEQ ID NO 14305357 as cited in SEQ ID NO 60046
  misc_feature (1)..(1140): Ortholog of  Ceres SEQ ID NO 14313511 as cited in SEQ ID NO 64459
  misc_feature (1)..(1140): Ortholog of  Ceres SEQ ID NO 14303006 as cited in SEQ ID NO 67498
  misc_feature (1)..(1140): Ortholog of  Ceres SEQ ID NO 13599627 as cited in SEQ ID NO 0
  misc_feature (1)..(1140): Ortholog of  Ceres SEQ ID NO 14305069 as cited in SEQ ID NO 0
atgatttgtttacattttttcgtggtgttcttgatttttttctttgatcaaaactagtagaaattttccaatttcgtcctgccttgtgattagtagtagatattttggaatttgattagtaggtagaagaagatggggacgacgttagatgtatcaagagcagagctagcacttgtggtaatgtatttgaacaaagcagaggcaagagataagttatgcagagctatacagtatggttccaagttcttgagtggtggacaacctggtactgctcaaaatgttgacaaatctactagcttagcaagaaaagtcttccgtcttttcaagtttgtgaatgacttgcatggtcttatcagtcctgtgcctaaaggaactcctcttcctcttgttttacttggaaagtcgaagaacgcacttttatctacattcttgttcctggatcaaattgtctggcttgggagatcaggaatatataagaacaaagaacgagctgagttacttggacgtatatctctcttctgctggatgggatcttctgtctgcacaactttagtcgaggttggtgagatgggaaggctttcttcatcaatgaagaagatcgaaaagggactcaagaatggaaacaagtatcaggatgaggattatcgtgctaagctaaaaaaatcaaacgagaggtcacttgctttgatcaaatcagctatggacattgttgtagcagctggtcttcttcagttagctccaacgaagatcactcctcgtgtcaccggagcttttggattcatcacctccatcatttcttgttaccagttgcttccgacacgccccaagatcaaaacaccctgaagtcaatcgaggaagctggtgttaaggagaaagtcatttcagaaagtttctgttcttcttattattaaggaaattcactgctgttataaaacatcgtataaaatacttatttgcaggaattacggttattataaatttatgcctcagattcttgatacacaagtttcaatactcaatagtattgcattattatgagatgttgtttctgctacgcaataactagaggcaaaatccaactacatatatgttttgatctgattattataatagactttgggcttcattccgcctaaagct

SEQ ID NO: 28883 - protein, 236 aa, Arabidopsis thaliana
  peptide (1)..(236): Ceres Seq. ID no. 12321189
MGTTLDVSRAELALVVMYLNKAEARDKLCRAIQYGSKFLSGGQPGTAQNVDKSTSLARKVFRLFKFVNDLHGLISPVPKGTPLPLVLLGKSKNALLSTFLFLDQIVWLGRSGIYKNKERAELLGRISLFCWMGSSVCTTLVEVGEMGRLSSSMKKIEKGLKNGNKYQDEDYRAKLKKSNERSLALIKSAMDIVVAAGLLQLAPTKITPRVTGAFGFITSIISCYQLLPTRPKIKTP

SEQ ID NO: 28884 - protein, 220 aa, Arabidopsis thaliana
  peptide (1)..(220): Ceres Seq. ID no. 12321190
MYLNKAEARDKLCRAIQYGSKFLSGGQPGTAQNVDKSTSLARKVFRLFKFVNDLHGLISPVPKGTPLPLVLLGKSKNALLSTFLFLDQIVWLGRSGIYKNKERAELLGRISLFCWMGSSVCTTLVEVGEMGRLSSSMKKIEKGLKNGNKYQDEDYRAKLKKSNERSLALIKSAMDIVVAAGLLQLAPTKITPRVTGAFGFITSIISCYQLLPTRPKIKTP

SEQ ID NO: 28885 - DNA, 1136 bp, Arabidopsis thaliana
  misc_feature (1)..(1136): Ceres Seq. ID no. 12337739
  misc_feature (1)..(1136): Ortholog of  Ceres SEQ ID NO 14310687 as cited in SEQ ID NO 52933
acctctaattcttctcactaaaaatatcaaaagctttcacattacaatatctccctctctctacacaaagctctctatgccacaagtcgatatagaagcctttgtttcttcagtatgcatcggtggctccgaccaccgcaagatcgtatgcgaaaccctcgccgacgactcaacgatcccaccttattacaacaactccgccgttagtccgagtgatttcccaccggaatcttatttcttgtcaaacgatgctcagctagagtggctcagcgacaacgccttctttgatcgtaaagactcacaaaaaggaaactctgggattctcaattctaatcccaactcgaatccaagctcgcaacggttcttactaaaatccaaagcgtcgatcatcggtttgcctaaaccgcagaaaacgtgtttcaacgaggcaaagcaacggagacacgcgggcaagaaccgggtcatcttgaaacgggtcgggtcaaggataaagacggatatttcgcttctggaaccttcttctcctaaagtctcttgcatcggtagagtgagatccagaagagaacgcagccgccgtatgcaccgtcaaaaatcaagtcgggtcgaaccggtaaaccgggttaagaaacccgggtttatggcgagtttcagagctattttcaggatcaaaggcggctgcaaagacgtgtcagcgcgtgagactcacacgtcgacgagaaacacacacgacatcaggagccgacttcctgcggaagctgatgagaagtcggtattcgacggcggagaaccggtggtacccggtttgggtgggatgacgcgtttcgcatctggtagaagagcggatttgttgggtggtggaggatgttgacgcggcggatgacaagtgtaatacatgtggggtccagttatatagtgttttaagtcccagggggaaagtagaagaaatagtactttagttgtcttgtctgatttttttgagtggaactcgttttgaaaagtcgttggtgatgacgtggcagctgatcaacgtttttattcagaaagaaacacggcaacgcgaaagcggtgatttcacacccaccgcactgtttttgtattcttctagtttccgttgtaaatagttcagtttaaatgtt

SEQ ID NO: 28886 - protein, 288 aa, Arabidopsis thaliana
  peptide (1)..(288): Ceres Seq. ID no. 12337740
PLILLTKNIKSFHITISPSLYTKLSMPQVDIEAFVSSVCIGGSDHRKIVCETLADDSTIPPYYNNSAVSPSDFPPESYFLSNDAQLEWLSDNAFFDRKDSQKGNSGILNSNPNSNPSSQRFLLKSKASIIGLPKPQKTCFNEAKQRRHAGKNRVILKRVGSRIKTDISLLEPSSPKVSCIGRVRSRRERSRRMHRQKSSRVEPVNRVKKPGFMASFRAIFRIKGGCKDVSARETHTSTRNTHDIRSRLPAEADEKSVFDGGEPVVPGLGGMTRFASGRRADLLGGGGC

SEQ ID NO: 28887 - protein, 263 aa, Arabidopsis thaliana
  peptide (1)..(263): Ceres Seq. ID no. 12337741
MPQVDIEAFVSSVCIGGSDHRKIVCETLADDSTIPPYYNNSAVSPSDFPPESYFLSNDAQLEWLSDNAFFDRKDSQKGNSGILNSNPNSNPSSQRFLLKSKASIIGLPKPQKTCFNEAKQRRHAGKNRVILKRVGSRIKTDISLLEPSSPKVSCIGRVRSRRERSRRMHRQKSSRVEPVNRVKKPGFMASFRAIFRIKGGCKDVSARETHTSTRNTHDIRSRLPAEADEKSVFDGGEPVVPGLGGMTRFASGRRADLLGGGGC

SEQ ID NO: 28888 - DNA, 4277 bp, Arabidopsis thaliana
  misc_feature (1)..(4277): Ceres Seq. ID no. 13491805
  misc_feature (1)..(4277): Ortholog of  Ceres SEQ ID NO 15179695 as cited in SEQ ID NO 193
gtcccaacaatctgatcagaaaaaagtagacgaagaagaagaaattaagtcacttgaacaatggcgttggtccgaaatgcaaggccttgagcttctccctcataacaccaacaacaactcacgaagctccagagaaactcaccggaaatggataatgacggtggtgctcctcctcctccgccgacactagtggtggaagagcctaagaaagcagagattcgtggagttgcttttaaagagctattcagattcgccgacggattagattatgtattgatgggaattggctctgttggtgcttttgtccatggctgctctttacctctgtttcttcgattcttcgccgatcttgttaattcctttggttctaattctaataacgttgaaaagatgatggaagaagttctcaagtatgcgctttactttttagtggttggtgctgcaatctgggcttcctcttgggcagagatttcgtgttggatgtggagtggagagagacaaacaacgaagatgaggattaagtatttagaagcagctttgaatcaagacattcagttctttgatacagaagttcgaacttcagatgttgtcttcgccattaacaccgacgctgttatggttcaagacgccattagtgagaaacttggtaatttcatccattacatggcgacttttgtttctggattcatcgtgggtttcactgcggtgtggcaactagctttagtgactctcgcggtggttccgttgattgctgtgatcggaggaattcacaccactactctctctaaactatctaataagagtcaagagtctctttcacaagctggtaatatcgtcgaacagacagtggtacaaatcagggtagtgatggctttcgttggagaatcaagagcttcacaagcttattcatcagctttgaagattgctcagaagcttggttacaaaacaggtttagctaaaggaatgggacttggtgctacatacttcgttgtcttttgttgttacgctctcttgctttggtacgatggttatctagttcgccaccatttgaccaacggtggtctcgctattgccacaatgttcgccgttatgattggtggattggcattgggacaatcagcaccgagcatggctgcatttgccaaagcaaaggttgctgctgcaaagatctttagaatcattgatcacaaaccaacgatagagcgtaacagcgagtccggtgtggagttagactcagtcacgggtcttgtcgagcttaaaaatgtggacttttcgtatccgtcaaggccagatgttaagattcttaacaacttctgcctctctgttcctgctgggaagaccattgctttggttgggagcagtggttcaggaaaaagcacagtcgtttcgcttatagagcggttttacgacccgaactcaggacaagttttactagatgggcaagacctgaagacgctgaaactgagatggttaaggcaacagatagggctagtgagtcaagaacctgcattattcgccacttctatcaaggagaatatactcttaggccgtcctgacgcagatcaagtcgagatagaggaggctgctcgagtcgcaaatgctcattcctttatcatcaaactacctgatggcttcgacacacaggttggggagagaggattgcagctgtctggtgggcagaagcaaagaatagcgatagcaagagcgatgttgaagaacccggcgatacttctattagatgaggcgacgagtgcattggattctgaatcagagaagcttgtacaagaggctttggatcgtttcatgattggaaggactactctcatcattgctcatcgcctttctaccattcgaaaagctgaccttgttgctgtgctacagcaaggaagtgtctctgagattggaacgcatgatgagcttttttccaagggagaaaatggagtctatgctaagctaattaaaatgcaagaagcagctcacgaaaccgccatgagcaatgcaagaaagagtagcgcaagaccgtcgagtgctagaaactcggttagctcgccaataatgactcggaattcgtcgtatggaagatcaccttattcacggagactatccgatttctcaacttctgattttagcctctccattgacgcttcgtcctacccaaactatagaaacgagaagctggccttcaaggatcaagccaattcattctggcgactagctaaaatgaactctccagagtggaaatacgctttgctcggttcagtaggctctgtcatttgtggctcccttagtgcattcttcgcatatgtcctcagtgcagtcttaagcgtctactacaacccggaccacgaatacatgatcaaacagattgataagtactgttatctcttaatcggtctctcttccgcagcacttgtcttcaacacgctccagcattctttctgggacattgtgggtgagaatctgaccaagagagtccgtgagaagatgctgagcgctgtactcaagaatgagatggcttggtttgatcaagaggagaacgaaagtgcgagaatcgcagcaagattagctcttgatgctaataatgtgagatctgcgataggagatagaatatcggttattgtgcagaacacagcactgatgcttgttgcttgcactgccgggtttgttctacaatggagactcgcacttgtccttgtcgcagtcttccccgtagttgttgctgcaactgtcttacagaaaatgttcatgactggtttctcgggagacctggaagcggcacatgccaagggaacgcagcttgctggtgaagccatagctaatgtcaggacagttgctgcatttaactcggaggcaaagattgtccgtctctacactgcaaacctcgaaccaccattgaaacgatgcttctggaaaggacagatcgctggaagtggttatggtgtagctcagttctgtctttatgcatcttatgctctcgggctatggtacgcatcatggcttgtgaaacacggcatctctgacttctccaaaaccataagagtcttcatggttctgatggtctcagccaatggtgcagcagagacactcacactggctcctgatttcatcaaaggtggtcaagctatgcggtctgttttcgaacttcttgaccggaaaaccgagattgaacctgatgatcctgataccaccccggtcccagaccggttacgtggtgaagtcgagctcaaacatatcgatttctcttacccttcaaggccagacatccagattttccgtgaccttagccttcgtgctagagctggcaaaaccctagctcttgtgggtccaagcgggtgcggaaaaagctcagttatctccctcatccagagattctacgaaccttcctcaggccgagtcatgatcgacgggaaagacataaggaaatacaacctgaaagccataaggaaacacatagccatagtccctcaagagccgtgcttgttcggaactaccatttacgaaaacattgcatatggacatgaatgtgcgaccgaagcagagatcatacaagccgcgactctagccagtgcgcacaaattcatatccgcgctaccagaaggttacaaaacgtatgttggcgagagaggcgttcagctctcgggaggacagaaacagaggatcgcgatcgcacgtgccctcgtgaggaaagcagagatcatgctgcttgacggggctacaagcgctcttgatgcagagtccgagagatcagtccaagaagcattagaccaggcttgctctggtagaacatcaatagtcgtggctcataggctatctacaatcaggaacgcacacgtgatcgctgtcatcgatgatggaaaagtggctgaacaaggatcgcattcgcatcttctcaagaaccatcctgatggaatctacgcgcgaatgatacagttgcaaagatttacgcatacacaagtgattggtatgacgtcaggttcaagttctagggttaaggaagatgatgcttagtacttactactttggtcatatagaagaaaaaagaaggagagtaaaaaacaacaaacaccagaagatgtttctgataaaaaactctacgaactcatcattttctctttttttctttctgttttgattttggggttacttatttttggaactacgtttcagatttgatggtatagtattattattgtgtattatcataattaatctaatttttcacctctgtaatatccatttatatgccatatcaatctatgagcctctgcctttctagc

SEQ ID NO: 28889 - protein, 1286 aa, Arabidopsis thaliana
  peptide (1)..(1286): Ceres Seq. ID no. 13491806
MDNDGGAPPPPPTLVVEEPKKAEIRGVAFKELFRFADGLDYVLMGIGSVGAFVHGCSLPLFLRFFADLVNSFGSNSNNVEKMMEEVLKYALYFLVVGAAIWASSWAEISCWMWSGERQTTKMRIKYLEAALNQDIQFFDTEVRTSDVVFAINTDAVMVQDAISEKLGNFIHYMATFVSGFIVGFTAVWQLALVTLAVVPLIAVIGGIHTTTLSKLSNKSQESLSQAGNIVEQTVVQIRVVMAFVGESRASQAYSSALKIAQKLGYKTGLAKGMGLGATYFVVFCCYALLLWYDGYLVRHHLTNGGLAIATMFAVMIGGLALGQSAPSMAAFAKAKVAAAKIFRIIDHKPTIERNSESGVELDSVTGLVELKNVDFSYPSRPDVKILNNFCLSVPAGKTIALVGSSGSGKSTVVSLIERFYDPNSGQVLLDGQDLKTLKLRWLRQQIGLVSQEPALFATSIKENILLGRPDADQVEIEEAARVANAHSFIIKLPDGFDTQVGERGLQLSGGQKQRIAIARAMLKNPAILLLDEATSALDSESEKLVQEALDRFMIGRTTLIIAHRLSTIRKADLVAVLQQGSVSEIGTHDELFSKGENGVYAKLIKMQEAAHETAMSNARKSSARPSSARNSVSSPIMTRNSSYGRSPYSRRLSDFSTSDFSLSIDASSYPNYRNEKLAFKDQANSFWRLAKMNSPEWKYALLGSVGSVICGSLSAFFAYVLSAVLSVYYNPDHEYMIKQIDKYCYLLIGLSSAALVFNTLQHSFWDIVGENLTKRVREKMLSAVLKNEMAWFDQEENESARIAARLALDANNVRSAIGDRISVIVQNTALMLVACTAGFVLQWRLALVLVAVFPVVVAATVLQKMFMTGFSGDLEAAHAKGTQLAGEAIANVRTVAAFNSEAKIVRLYTANLEPPLKRCFWKGQIAGSGYGVAQFCLYASYALGLWYASWLVKHGISDFSKTIRVFMVLMVSANGAAETLTLAPDFIKGGQAMRSVFELLDRKTEIEPDDPDTTPVPDRLRGEVELKHIDFSYPSRPDIQIFRDLSLRARAGKTLALVGPSGCGKSSVISLIQRFYEPSSGRVMIDGKDIRKYNLKAIRKHIAIVPQEPCLFGTTIYENIAYGHECATEAEIIQAATLASAHKFISALPEGYKTYVGERGVQLSGGQKQRIAIARALVRKAEIMLLDGATSALDAESERSVQEALDQACSGRTSIVVAHRLSTIRNAHVIAVIDDGKVAEQGSHSHLLKNHPDGIYARMIQLQRFTHTQVIGMTSGSSSRVKEDDA

SEQ ID NO: 28890 - protein, 1243 aa, Arabidopsis thaliana
  peptide (1)..(1243): Ceres Seq. ID no. 13491807
MGIGSVGAFVHGCSLPLFLRFFADLVNSFGSNSNNVEKMMEEVLKYALYFLVVGAAIWASSWAEISCWMWSGERQTTKMRIKYLEAALNQDIQFFDTEVRTSDVVFAINTDAVMVQDAISEKLGNFIHYMATFVSGFIVGFTAVWQLALVTLAVVPLIAVIGGIHTTTLSKLSNKSQESLSQAGNIVEQTVVQIRVVMAFVGESRASQAYSSALKIAQKLGYKTGLAKGMGLGATYFVVFCCYALLLWYDGYLVRHHLTNGGLAIATMFAVMIGGLALGQSAPSMAAFAKAKVAAAKIFRIIDHKPTIERNSESGVELDSVTGLVELKNVDFSYPSRPDVKILNNFCLSVPAGKTIALVGSSGSGKSTVVSLIERFYDPNSGQVLLDGQDLKTLKLRWLRQQIGLVSQEPALFATSIKENILLGRPDADQVEIEEAARVANAHSFIIKLPDGFDTQVGERGLQLSGGQKQRIAIARAMLKNPAILLLDEATSALDSESEKLVQEALDRFMIGRTTLIIAHRLSTIRKADLVAVLQQGSVSEIGTHDELFSKGENGVYAKLIKMQEAAHETAMSNARKSSARPSSARNSVSSPIMTRNSSYGRSPYSRRLSDFSTSDFSLSIDASSYPNYRNEKLAFKDQANSFWRLAKMNSPEWKYALLGSVGSVICGSLSAFFAYVLSAVLSVYYNPDHEYMIKQIDKYCYLLIGLSSAALVFNTLQHSFWDIVGENLTKRVREKMLSAVLKNEMAWFDQEENESARIAARLALDANNVRSAIGDRISVIVQNTALMLVACTAGFVLQWRLALVLVAVFPVVVAATVLQKMFMTGFSGDLEAAHAKGTQLAGEAIANVRTVAAFNSEAKIVRLYTANLEPPLKRCFWKGQIAGSGYGVAQFCLYASYALGLWYASWLVKHGISDFSKTIRVFMVLMVSANGAAETLTLAPDFIKGGQAMRSVFELLDRKTEIEPDDPDTTPVPDRLRGEVELKHIDFSYPSRPDIQIFRDLSLRARAGKTLALVGPSGCGKSSVISLIQRFYEPSSGRVMIDGKDIRKYNLKAIRKHIAIVPQEPCLFGTTIYENIAYGHECATEAEIIQAATLASAHKFISALPEGYKTYVGERGVQLSGGQKQRIAIARALVRKAEIMLLDGATSALDAESERSVQEALDQACSGRTSIVVAHRLSTIRNAHVIAVIDDGKVAEQGSHSHLLKNHPDGIYARMIQLQRFTHTQVIGMTSGSSSRVKEDDA

SEQ ID NO: 28891 - protein, 1205 aa, Arabidopsis thaliana
  peptide (1)..(1205): Ceres Seq. ID no. 13491808
MMEEVLKYALYFLVVGAAIWASSWAEISCWMWSGERQTTKMRIKYLEAALNQDIQFFDTEVRTSDVVFAINTDAVMVQDAISEKLGNFIHYMATFVSGFIVGFTAVWQLALVTLAVVPLIAVIGGIHTTTLSKLSNKSQESLSQAGNIVEQTVVQIRVVMAFVGESRASQAYSSALKIAQKLGYKTGLAKGMGLGATYFVVFCCYALLLWYDGYLVRHHLTNGGLAIATMFAVMIGGLALGQSAPSMAAFAKAKVAAAKIFRIIDHKPTIERNSESGVELDSVTGLVELKNVDFSYPSRPDVKILNNFCLSVPAGKTIALVGSSGSGKSTVVSLIERFYDPNSGQVLLDGQDLKTLKLRWLRQQIGLVSQEPALFATSIKENILLGRPDADQVEIEEAARVANAHSFIIKLPDGFDTQVGERGLQLSGGQKQRIAIARAMLKNPAILLLDEATSALDSESEKLVQEALDRFMIGRTTLIIAHRLSTIRKADLVAVLQQGSVSEIGTHDELFSKGENGVYAKLIKMQEAAHETAMSNARKSSARPSSARNSVSSPIMTRNSSYGRSPYSRRLSDFSTSDFSLSIDASSYPNYRNEKLAFKDQANSFWRLAKMNSPEWKYALLGSVGSVICGSLSAFFAYVLSAVLSVYYNPDHEYMIKQIDKYCYLLIGLSSAALVFNTLQHSFWDIVGENLTKRVREKMLSAVLKNEMAWFDQEENESARIAARLALDANNVRSAIGDRISVIVQNTALMLVACTAGFVLQWRLALVLVAVFPVVVAATVLQKMFMTGFSGDLEAAHAKGTQLAGEAIANVRTVAAFNSEAKIVRLYTANLEPPLKRCFWKGQIAGSGYGVAQFCLYASYALGLWYASWLVKHGISDFSKTIRVFMVLMVSANGAAETLTLAPDFIKGGQAMRSVFELLDRKTEIEPDDPDTTPVPDRLRGEVELKHIDFSYPSRPDIQIFRDLSLRARAGKTLALVGPSGCGKSSVISLIQRFYEPSSGRVMIDGKDIRKYNLKAIRKHIAIVPQEPCLFGTTIYENIAYGHECATEAEIIQAATLASAHKFISALPEGYKTYVGERGVQLSGGQKQRIAIARALVRKAEIMLLDGATSALDAESERSVQEALDQACSGRTSIVVAHRLSTIRNAHVIAVIDDGKVAEQGSHSHLLKNHPDGIYARMIQLQRFTHTQVIGMTSGSSSRVKEDDA

SEQ ID NO: 28892 - DNA, 1657 bp, Arabidopsis thaliana
  misc_feature (1)..(1657): Ceres Seq. ID no. 12339523
  misc_feature (1)..(1657): Ortholog of  Ceres SEQ ID NO 14311857 as cited in SEQ ID NO 51473
  misc_feature (1)..(1657): Ortholog of  Ceres SEQ ID NO 14303094 as cited in SEQ ID NO 66388
ctttttgtcgatttagccctaacctatacggctgctacatccagatttcctcatcctctattagggaagaagaaccaaaaccctaatcctatcttctcctcttataaatcgcttcaacaacagtttctttctcttctgatttgatccatgatttctcatctggaaccctagtttatacatccatcgggtgttactgttctttatctgggcaatcagtggtgtttttgttccttttgtatatctgtcgagacttctaggtgtgaaatcaaagcttgtttggtttatattgatcttggttttagctgaatcgttgttaagatggctggaggtggaaacaggagagatgaaggatcgatcacgatccagagcactaatttgtttgcagcattggacactcgtaagaagaagaagaagtctgacaaggcagggaagagcaaagggtcttctaagtcacgagagccagagaaggagcctgagcctcaggtctattgggctcctacgcctttgaaagttaagtcttgggctgatattgatgatgaagacgacgatgatgactattatgcaaccactgctcctcctcagtctggttggagtacttctctgccttcccatactgattccaaagacgttcatgttgaggaaagtgaaagtgaggaagatattcttgatgaaggtgatgatgatgtggaggaagagcaggaacaggaaacagaggtacaggttcatccagagcctgaggtgaagaaagctcctgaagttcctgcacctcctaaagaggcagagaggcaactttccaagaaagagaggaaaaagaaggaacttgctgagcttgaagctttgttggctgattttggagttgcccccaaggagaacaatggcctagaggaatctcaagaggctggacaagaaaagaaagaagatgtcaatggagagggagagaagaaggagaatgcagcaggtggggagtcaaaggcatcaaaaaagaagaaaaagaaggataagcagaaggaggtaaaagaatctcaagagcaacaagcaaacaacaatgccgatgctgtagatgaagctgctgggtctgaaccaactgaggaagaatctccaattgacgtcaaggaaaggataaagaagcttgcatccatgaagaagaagaagtcaggcaaagaggtggatgctgcagctaaagctgctgcggaggaggcagctgcaagacgtaagaagctggccgcggcaaagaagaaggagaagaatcactataaccaacagcctgtgcggtaaaatcctgaatcaccaccattttgatcttgatggaaatgcaaatatgaacatgtatttcgccgtatattgttcatatgagtctctgtcctaataaatcttttgaagggtctggttcttagagttaaagacattgaatcctttttctagtcttattacaatgaacaggctaaagacaaaactactctctggagattttcatttctttttgaacacctttgttttcttaatatcagaccttttttaggttcattatgtcttcaatcagcttcttatgtatggttcgatggtgttattttcttctttttttcgttcagttgcctgtgttttgattcatgccttgtcacaaaatcttttttggttatatgttccaaagtgattcccc

SEQ ID NO: 28893 - protein, 318 aa, Arabidopsis thaliana
  peptide (1)..(318): Ceres Seq. ID no. 12339524
MAGGGNRRDEGSITIQSTNLFAALDTRKKKKKSDKAGKSKGSSKSREPEKEPEPQVYWAPTPLKVKSWADIDDEDDDDDYYATTAPPQSGWSTSLPSHTDSKDVHVEESESEEDILDEGDDDVEEEQEQETEVQVHPEPEVKKAPEVPAPPKEAERQLSKKERKKKELAELEALLADFGVAPKENNGLEESQEAGQEKKEDVNGEGEKKENAAGGESKASKKKKKKDKQKEVKESQEQQANNNADAVDEAAGSEPTEEESPIDVKERIKKLASMKKKKSGKEVDAAAKAAAEEAAARRKKLAAAKKKEKNHYNQQPVR

SEQ ID NO: 28894 - DNA, 883 bp, Arabidopsis thaliana
  misc_feature (1)..(883): Ceres Seq. ID no. 13490436
  misc_feature (1)..(883): Ortholog of  Ceres SEQ ID NO 14304110 as cited in SEQ ID NO 56394
actctacttattagcaaactactctctctttttcctctttctcagatctctctgtgatcacttatttcagagtctcaacgtttctctgttctctgtttttcctctgtttcatactgtgttttgagtagatcgattggaaacacaagaacaaacaaagagttcctttttctaagtatccaagaaggaaaaaaagaaactttatactgtttggttcttaggagtgattggttcatgtgtcggagattctgatgattgggtattagctccacataggttataagctgtgtagtattttttgaggtttatagacactatgagaagaggtagagggaaagggaagaagcagaatgcatctgctcgggaagatcgtggaagcggtgatgaagaaaagattccagcttacaggagaagaggaagaccacagaagccgatgaaagatgatttcgaagaggaagaagaagaagatgatgaagagatggtagagaaaatggaagtagaagatgaagatgaagagattgatgatggttcagtaacaagtaaagatttgaaggagagaaagaggaagatgtctaatggaagcaatactgatctgactgaagaagagaatggtttaggatcgaaaccaaacaccgatgattccacgagatcgacatctattgggtttagacaaaatggaagccggaggaaaagcaagccgagacgagctgctgaagctgtcgtggaatgtaacggagtttgagaaaccttcctgtgaagaactcccaagaaacagaatgacaaattgacctgaggcttgtttttttgcttttttctttcaagtttttgaagttgacaacttaggatctcttatggtgattcatgaaatcaatctgcattctctttc

SEQ ID NO: 28895 - protein, 141 aa, Arabidopsis thaliana
  peptide (1)..(141): Ceres Seq. ID no. 13490437
MRRGRGKGKKQNASAREDRGSGDEEKIPAYRRRGRPQKPMKDDFEEEEEEDDEEMVEKMEVEDEDEEIDDGSVTSKDLKERKRKMSNGSNTDLTEEENGLGSKPNTDDSTRSTSIGFRQNGSRRKSKPRRAAEAVVECNGV

SEQ ID NO: 28896 - protein, 102 aa, Arabidopsis thaliana
  peptide (1)..(102): Ceres Seq. ID no. 13490438
MKDDFEEEEEEDDEEMVEKMEVEDEDEEIDDGSVTSKDLKERKRKMSNGSNTDLTEEENGLGSKPNTDDSTRSTSIGFRQNGSRRKSKPRRAAEAVVECNGV

SEQ ID NO: 28897 - protein, 87 aa, Arabidopsis thaliana
  peptide (1)..(87): Ceres Seq. ID no. 13490439
MVEKMEVEDEDEEIDDGSVTSKDLKERKRKMSNGSNTDLTEEENGLGSKPNTDDSTRSTSIGFRQNGSRRKSKPRRAAEAVVECNGV

SEQ ID NO: 28898 - DNA, 1559 bp, Arabidopsis thaliana
  misc_feature (1)..(1559): Ceres Seq. ID no. 13487605
  misc_feature (1)..(1559): Ortholog of  Ceres SEQ ID NO 15176437 as cited in SEQ ID NO 54861
  misc_feature (1)..(1559): Ortholog of  Ceres SEQ ID NO 15176748 as cited in SEQ ID NO 55581
tgatgaaaaaaaaagctttgaaattctctctcgacaatggtgtcggaccaggatctagcgaaaggagtcgagactttgcttcgacaatccgaccctagctctctcacatcgttaagcagtattgttcagcagcttgaagctaagttagggttagacctcacggagaagacgactttcatcagagatcagatcaatatcctcctccgtgctcaccaaaacccttctgcctccgtcgcctccgcttcatccgtacaacaatctcaccctcctcctccgccgtcttctcaccagcagcagaatttgcattccggcgtcaatgttcctccgatggcgaaagggcatttcacacttagccatccttcgcaattctctgtttcttctcaatcacaacaatatccttcacatttcgctcttcagcctccttatcactcttatgacctaaatttccggcagccttatccggtttacatgccgccgcaacagcaccagcatcagcagcagtctccgcgacaacaacaatcctctgtgatgctctcacatggcgggaatgcttctctatctgttaatcaagccccaaaagaaagtgctccggctggaactaaaagaaagggtggtcctggaggactaaacaaagtctgtagggtttctccagaacttgaagtagttgttggtgaacctgctcttcctagaactgagattgtgaggcaattgtgggcttatataaggaagaataaccttcaagacccgagtaacaagcggaagatcatctgtgatgatgcgttgcgtgtggtttttgagactgattgcactgacatgttcaagatgaataagttgcttgctaagcatattctcccgcttgatccatcaaaggactctggtcaagcaaaaaaggcaaaaactgaggtggagactaagactgagaccaccgagcctattagttcaactgctattagttcaactgttacattatctgagccacttggtaagttctttggcactggtgagacggagatggcagacgaagagattattcgccgtgtttgggaatacataaaactcaacaatttagaggacccagtaaatccaatggctattcagtgtgatgaaaagctccgagatcttcttggatgtgaaagcatttcagctgtggggataaatgagatgctgaggcgccatatgtacaagcagtcgtgatatcttctggtctgacttaattaactaggaactactagtgtgtgtatctagggaacctacttatgactccttgctgtagaactctgatagggaagaaaagatccttttcacttttaacttcctttaatgctattttaatcttccgttgggttctttgttttagttggttgtgtatcgacatgcttaggttgatgttgtatttagtattgtaccgaaactctagtgttaagggtgaaacggcgcagatgttttgtattaaacgccattcacccatgaatgtcttaggaaaaaaaaactcatgtgtttaactatgttttccctgttggaaatatttgcatcctactgatagaaaaatcttattccct

SEQ ID NO: 28899 - protein, 385 aa, Arabidopsis thaliana
  peptide (1)..(385): Ceres Seq. ID no. 13487606
MVSDQDLAKGVETLLRQSDPSSLTSLSSIVQQLEAKLGLDLTEKTTFIRDQINILLRAHQNPSASVASASSVQQSHPPPPPSSHQQQNLHSGVNVPPMAKGHFTLSHPSQFSVSSQSQQYPSHFALQPPYHSYDLNFRQPYPVYMPPQQHQHQQQSPRQQQSSVMLSHGGNASLSVNQAPKESAPAGTKRKGGPGGLNKVCRVSPELEVVVGEPALPRTEIVRQLWAYIRKNNLQDPSNKRKIICDDALRVVFETDCTDMFKMNKLLAKHILPLDPSKDSGQAKKAKTEVETKTETTEPISSTAISSTVTLSEPLGKFFGTGETEMADEEIIRRVWEYIKLNNLEDPVNPMAIQCDEKLRDLLGCESISAVGINEMLRRHMYKQS

SEQ ID NO: 28900 - protein, 288 aa, Arabidopsis thaliana
  peptide (1)..(288): Ceres Seq. ID no. 13487607
MAKGHFTLSHPSQFSVSSQSQQYPSHFALQPPYHSYDLNFRQPYPVYMPPQQHQHQQQSPRQQQSSVMLSHGGNASLSVNQAPKESAPAGTKRKGGPGGLNKVCRVSPELEVVVGEPALPRTEIVRQLWAYIRKNNLQDPSNKRKIICDDALRVVFETDCTDMFKMNKLLAKHILPLDPSKDSGQAKKAKTEVETKTETTEPISSTAISSTVTLSEPLGKFFGTGETEMADEEIIRRVWEYIKLNNLEDPVNPMAIQCDEKLRDLLGCESISAVGINEMLRRHMYKQS

SEQ ID NO: 28901 - protein, 241 aa, Arabidopsis thaliana
  peptide (1)..(241): Ceres Seq. ID no. 13487608
MPPQQHQHQQQSPRQQQSSVMLSHGGNASLSVNQAPKESAPAGTKRKGGPGGLNKVCRVSPELEVVVGEPALPRTEIVRQLWAYIRKNNLQDPSNKRKIICDDALRVVFETDCTDMFKMNKLLAKHILPLDPSKDSGQAKKAKTEVETKTETTEPISSTAISSTVTLSEPLGKFFGTGETEMADEEIIRRVWEYIKLNNLEDPVNPMAIQCDEKLRDLLGCESISAVGINEMLRRHMYKQS

SEQ ID NO: 28902 - DNA, 876 bp, Arabidopsis thaliana
  misc_feature (1)..(876): Ceres Seq. ID no. 12372150
  misc_feature (1)..(876): Ortholog of  Ceres SEQ ID NO 13599586 as cited in SEQ ID NO 0
aatcattttgaagcagaaatcgatttccaaaatggctcttgttcaatccagaacttttccacacctcaacactccgttatcgccgattctatcctccctccatgctccgtcttctctctttatccggagggaaatccgaccggtagccgcgccgttctcctcctccaccgccggaaacttgcccttctcgccgttgacgcgtccgcgaaagcttctctgtcctccgcctcgcggcaagtttgtcagagaagattatcttgtgaagaaattgtcagctcaagaacttcaggaactggtgaaaggagataggaaggtgccgttgattgttgatttttatgcgacatggtgtggaccttgtatcttgatggcccaggaactagaaatgcttgcagtagagtatgagagcaatgcaataatcgtgaaagttgatacagatgatgagtacgagtttgcacgcgacatgcaggttcgagggttacctacattattcttcatcagtcctgacccaagcaaagatgcaatcaggacagaagggctaattccgttacagatgatgcacgatatcattgacaacgagatgtgaagtttttactgagaaaacacttttgtactctatgatttgaaaagaatcgtcgtaatttaggactggtaccgagttgtttgcatttgagatgtggtaagaatgtcatctaggtttcatagttgaagaatgtagtcttaagacatttgtttgtatgcactgttagtttccatacctaagtgaaaaggttagagctgttgatctggtcagatccaagttatgaggcacaactaaatctcggtccggtccatgtaatactgtagcttaaacttgaatgagagagatatgacgtcttt

SEQ ID NO: 28903 - protein, 193 aa, Arabidopsis thaliana
  peptide (1)..(193): Ceres Seq. ID no. 12372151
IILKQKSISKMALVQSRTFPHLNTPLSPILSSLHAPSSLFIRREIRPVAAPFSSSTAGNLPFSPLTRPRKLLCPPPRGKFVREDYLVKKLSAQELQELVKGDRKVPLIVDFYATWCGPCILMAQELEMLAVEYESNAIIVKVDTDDEYEFARDMQVRGLPTLFFISPDPSKDAIRTEGLIPLQMMHDIIDNEM

SEQ ID NO: 28904 - protein, 183 aa, Arabidopsis thaliana
  peptide (1)..(183): Ceres Seq. ID no. 12372152
MALVQSRTFPHLNTPLSPILSSLHAPSSLFIRREIRPVAAPFSSSTAGNLPFSPLTRPRKLLCPPPRGKFVREDYLVKKLSAQELQELVKGDRKVPLIVDFYATWCGPCILMAQELEMLAVEYESNAIIVKVDTDDEYEFARDMQVRGLPTLFFISPDPSKDAIRTEGLIPLQMMHDIIDNEM

SEQ ID NO: 28905 - protein, 102 aa, Arabidopsis thaliana
  peptide (1)..(102): Ceres Seq. ID no. 12372153
NHFEAEIDFQNGSCSIQNFSTPQHSVIADSILPPCSVFSLYPEGNPTGSRAVLLLHRRKLALLAVDASAKASLSSASRQVCQRRLSCEEIVSSRTSGTGERR

SEQ ID NO: 28906 - DNA, 1171 bp, Arabidopsis thaliana
  misc_feature (1)..(1171): Ceres Seq. ID no. 12397135
  misc_feature (1)..(1171): Ortholog of  Ceres SEQ ID NO 13654583 as cited in SEQ ID NO 68599
aagaagaaaaaacttgttcgaggcttcgaagaatgtcgatgttaatggctgtcaaaacaacttcactctgttgtagcagcttaaaccttacagcttcaccaacattccgacggaacccacgcgcggcgagattggtgaatccgacagcgagaatccaaacacgttttcatcgcctgattgaagaacaaggcattgtgcttatgcctggatgctacgatgccttatccgcggctattgtgcagcaaaccggattctccgctggttttatatccggttacgccttatccgcttctctcctgggaaaacccgatttcggtttgctaacaccaccggagatggctgcgacggcaaggtcggtgtgtgcgtcagctcctaatatacccatcattgcagatgctgataccggtggaggaaatgcgctaaacattcaaagaaccgtaaaggatttgattgcagctggtgctgctggttgcttccttgaggaccaagcatggccaaagaagtgtggtcatatgcgtggtaaacaggtgataccagcagaagaacatgccgcaaaaatagcatcagctcgagatgctattggagactctgacttcttccttgtcgcaagaacagacgtgcgtgctacttctgcaaaatcagggcttgaagacgccattgcacgtgttaatctatacatggaggcaggagctgatgcttcctttgtagaggcaccaagagacgacgatgagctcaaggaaattggaaaacgcacaaaaggttatagagtttgcaacatgattgaaggaggagtcacaccattacacacgcctgatgagcttaaagaaatgggattccacttgatagttcacccccttaccgcactctatgcatcgactcgagctctggtcgatgttctcaagactcttaaagaaaacggtagcactcgagatcacttgcaaaagatggctacttttgaggaattcaatagtttggtggatttagattcgtggtttgagcttgaagctcgctattcaaacctcagaaacgctcttgggacaaccaaatcatgaagatagggacatttttttttttttttggaactctctcaagcaatggtctcatcaataatgtaactattgccgttgttagaaaaacgtatttaagtatattaatgggccttaatggtgtt

SEQ ID NO: 28907 - protein, 349 aa, Arabidopsis thaliana
  peptide (1)..(349): Ceres Seq. ID no. 12397136
EEKTCSRLRRMSMLMAVKTTSLCCSSLNLTASPTFRRNPRAARLVNPTARIQTRFHRLIEEQGIVLMPGCYDALSAAIVQQTGFSAGFISGYALSASLLGKPDFGLLTPPEMAATARSVCASAPNIPIIADADTGGGNALNIQRTVKDLIAAGAAGCFLEDQAWPKKCGHMRGKQVIPAEEHAAKIASARDAIGDSDFFLVARTDVRATSAKSGLEDAIARVNLYMEAGADASFVEAPRDDDELKEIGKRTKGYRVCNMIEGGVTPLHTPDELKEMGFHLIVHPLTALYASTRALVDVLKTLKENGSTRDHLQKMATFEEFNSLVDLDSWFELEARYSNLRNALGTTKS

SEQ ID NO: 28908 - protein, 339 aa, Arabidopsis thaliana
  peptide (1)..(339): Ceres Seq. ID no. 12397137
MSMLMAVKTTSLCCSSLNLTASPTFRRNPRAARLVNPTARIQTRFHRLIEEQGIVLMPGCYDALSAAIVQQTGFSAGFISGYALSASLLGKPDFGLLTPPEMAATARSVCASAPNIPIIADADTGGGNALNIQRTVKDLIAAGAAGCFLEDQAWPKKCGHMRGKQVIPAEEHAAKIASARDAIGDSDFFLVARTDVRATSAKSGLEDAIARVNLYMEAGADASFVEAPRDDDELKEIGKRTKGYRVCNMIEGGVTPLHTPDELKEMGFHLIVHPLTALYASTRALVDVLKTLKENGSTRDHLQKMATFEEFNSLVDLDSWFELEARYSNLRNALGTTKS

SEQ ID NO: 28909 - protein, 337 aa, Arabidopsis thaliana
  peptide (1)..(337): Ceres Seq. ID no. 12397138
MLMAVKTTSLCCSSLNLTASPTFRRNPRAARLVNPTARIQTRFHRLIEEQGIVLMPGCYDALSAAIVQQTGFSAGFISGYALSASLLGKPDFGLLTPPEMAATARSVCASAPNIPIIADADTGGGNALNIQRTVKDLIAAGAAGCFLEDQAWPKKCGHMRGKQVIPAEEHAAKIASARDAIGDSDFFLVARTDVRATSAKSGLEDAIARVNLYMEAGADASFVEAPRDDDELKEIGKRTKGYRVCNMIEGGVTPLHTPDELKEMGFHLIVHPLTALYASTRALVDVLKTLKENGSTRDHLQKMATFEEFNSLVDLDSWFELEARYSNLRNALGTTKS

SEQ ID NO: 28910 - DNA, 1982 bp, Arabidopsis thaliana
  misc_feature (1)..(1982): Ceres Seq. ID no. 13494341
  misc_feature (1)..(1982): Ortholog of  Ceres SEQ ID NO 14315146 as cited in SEQ ID NO 52929
  misc_feature (1)..(1982): Ortholog of  Ceres SEQ ID NO 13584538 as cited in SEQ ID NO 64739
  misc_feature (1)..(1982): Ortholog of  Ceres SEQ ID NO 15169643 as cited in SEQ ID NO 64826
  misc_feature (1)..(1982): Ortholog of  Ceres SEQ ID NO 15169647 as cited in SEQ ID NO 64930
gtcttccgttgcgtgagatattattgaacggtgtttgttattcggagaagaagaagaagaagaactgaagaagcatattcgacggtcaccaccaaacctcttccgtcggattttcactctccgtttatcgaacatctgagatctctctccacttccgtcaccgaagatgcattccagtcatcttcttctcgaggagccgatcaggatggcttcaatcctcgagccttccaaatctagtttcttcccggcattgactaagatcgtcggaactctaggtcctaaatcccgatccgtcgaggctctctccggctgtctcaaagccggcatgtctgtggctcgatttgatttctcgtggggagatgctgattatcaccaggagacacttgataatttgaaagttgctgtgaggagcactaagaagctttgtgctgttatgcttgatactgttggacctgagctacaagttattaacaaatctgagaaagctattactttgaaagctgatggccttgtaactttgacaccgaatcaagatcaagaagcttcttctgaagttcttcccattaatttcaatggacttgccaaggcagtgaagaaaggagacaccatcttcgttgggcaatacctattcactggtagtgaaacaacttcagtttggctcgaggttgatgaagttaaaggagatgatgtcatttgcctttcaaggaatgctgctactctggctggttctttgttcactttacactcctctcaagttcacattgatctcccaacgcttacagagaaggataaggaggttataagcacatggggagttcaaaataaaatcgattttctctcattgtcttattgtcgtcatgctgaggatgttcgccagacccgtgaaatgcttaaaaagttgggcgacctctctcaaacacaaatatttgctaagattgagaacgtagagggactaacccacttcgatgagattctacaagaagctgatggcattattctttctcgtgggaatttgggtatagatttacccccggaaaaggtgtttttgtttcaaaaggctgctctttacaagtgcaacatggctggaaagccagctgttcttacccgtgttgttgacagtatgactgacaacttgcgaccaactcgtgctgaggccacggatgttgctaatgctgttttagatggaagtgatgcaattcttcttggtgctgagacccttcgtggattgtaccctgttgagacaatatcaactgttggtaggatctgtgctgaggcagaaaaggttttcaatcaagatttgtactttaagaagactgtcaagtatgttggagaaccaatgactcacttggaatcgattgcttcttcagctgtacgggcagccattaaggttaaggcatccgtaattatatgcttcacctcttctggaagagcagccagattgattgccaaatacaggccaacgatgccggttatttctgttgtcattccccgggttaagacaaatcaactgaaatggagctttagtggagcttttgaggcgaggcagtcacttattgtcagaggcctcttccctatgcttgctgaccctcgtcaccctgcggaatctacaagtgcgacaaacgagtcagtcctgaaggttgctctagaccatgggaagcatgctggagtaatcaagtcgcatgacagagtagtggtgtgtcagaaagttggtgatgcatctgtggttaagatcattgagcttgaggattaacttttgcctcgcaaaaacattatataattggctgcattttgggttgccttgaattgatgataactcccaatgccggagtgaaaatattatctccgggacttctggtttctttttgtatacttaggagatttgatgtctctaaggtttcagctatatttgattaccttcaaatgtacgcatatgataaaagtatacaatgcctagcaattttataataagctgttacattccc

SEQ ID NO: 28911 - protein, 527 aa, Arabidopsis thaliana
  peptide (1)..(527): Ceres Seq. ID no. 13494342
MHSSHLLLEEPIRMASILEPSKSSFFPALTKIVGTLGPKSRSVEALSGCLKAGMSVARFDFSWGDADYHQETLDNLKVAVRSTKKLCAVMLDTVGPELQVINKSEKAITLKADGLVTLTPNQDQEASSEVLPINFNGLAKAVKKGDTIFVGQYLFTGSETTSVWLEVDEVKGDDVICLSRNAATLAGSLFTLHSSQVHIDLPTLTEKDKEVISTWGVQNKIDFLSLSYCRHAEDVRQTREMLKKLGDLSQTQIFAKIENVEGLTHFDEILQEADGIILSRGNLGIDLPPEKVFLFQKAALYKCNMAGKPAVLTRVVDSMTDNLRPTRAEATDVANAVLDGSDAILLGAETLRGLYPVETISTVGRICAEAEKVFNQDLYFKKTVKYVGEPMTHLESIASSAVRAAIKVKASVIICFTSSGRAARLIAKYRPTMPVISVVIPRVKTNQLKWSFSGAFEARQSLIVRGLFPMLADPRHPAESTSATNESVLKVALDHGKHAGVIKSHDRVVVCQKVGDASVVKIIELED

SEQ ID NO: 28912 - protein, 514 aa, Arabidopsis thaliana
  peptide (1)..(514): Ceres Seq. ID no. 13494343
MASILEPSKSSFFPALTKIVGTLGPKSRSVEALSGCLKAGMSVARFDFSWGDADYHQETLDNLKVAVRSTKKLCAVMLDTVGPELQVINKSEKAITLKADGLVTLTPNQDQEASSEVLPINFNGLAKAVKKGDTIFVGQYLFTGSETTSVWLEVDEVKGDDVICLSRNAATLAGSLFTLHSSQVHIDLPTLTEKDKEVISTWGVQNKIDFLSLSYCRHAEDVRQTREMLKKLGDLSQTQIFAKIENVEGLTHFDEILQEADGIILSRGNLGIDLPPEKVFLFQKAALYKCNMAGKPAVLTRVVDSMTDNLRPTRAEATDVANAVLDGSDAILLGAETLRGLYPVETISTVGRICAEAEKVFNQDLYFKKTVKYVGEPMTHLESIASSAVRAAIKVKASVIICFTSSGRAARLIAKYRPTMPVISVVIPRVKTNQLKWSFSGAFEARQSLIVRGLFPMLADPRHPAESTSATNESVLKVALDHGKHAGVIKSHDRVVVCQKVGDASVVKIIELED

SEQ ID NO: 28913 - protein, 474 aa, Arabidopsis thaliana
  peptide (1)..(474): Ceres Seq. ID no. 13494344
MSVARFDFSWGDADYHQETLDNLKVAVRSTKKLCAVMLDTVGPELQVINKSEKAITLKADGLVTLTPNQDQEASSEVLPINFNGLAKAVKKGDTIFVGQYLFTGSETTSVWLEVDEVKGDDVICLSRNAATLAGSLFTLHSSQVHIDLPTLTEKDKEVISTWGVQNKIDFLSLSYCRHAEDVRQTREMLKKLGDLSQTQIFAKIENVEGLTHFDEILQEADGIILSRGNLGIDLPPEKVFLFQKAALYKCNMAGKPAVLTRVVDSMTDNLRPTRAEATDVANAVLDGSDAILLGAETLRGLYPVETISTVGRICAEAEKVFNQDLYFKKTVKYVGEPMTHLESIASSAVRAAIKVKASVIICFTSSGRAARLIAKYRPTMPVISVVIPRVKTNQLKWSFSGAFEARQSLIVRGLFPMLADPRHPAESTSATNESVLKVALDHGKHAGVIKSHDRVVVCQKVGDASVVKIIELED

SEQ ID NO: 28914 - DNA, 1106 bp, Arabidopsis thaliana
  misc_feature (1)..(1106): Ceres Seq. ID no. 12396876
  misc_feature (1)..(1106): Ortholog of  Ceres SEQ ID NO 13581092 as cited in SEQ ID NO 54771
  misc_feature (1)..(1106): Ortholog of  Ceres SEQ ID NO 13594298 as cited in SEQ ID NO 57803
  misc_feature (1)..(1106): Ortholog of  Ceres SEQ ID NO 13503476 as cited in SEQ ID NO 61978
  misc_feature (1)..(1106): Ortholog of  Ceres SEQ ID NO 12578438 as cited in SEQ ID NO 62201
  misc_feature (1)..(1106): Ortholog of  Ceres SEQ ID NO 12617675 as cited in SEQ ID NO 64656
acttttacaactaactcataagtaaaacacagacagtttttagatggctaagatatattccccttcttttcccggtactctctgtctttgcatttttactctcttgacgctaatgttcattcgggtttccgctcgacccgcgacattcgtcgaggatttcaaagccgcctggtcggaatctcacatccgtcaaatggaagacggaaaagctatccagctcgtccttgatcagagcactggatgtggatttgcttccaaaagaaaatatctattcggacgagtgagcatgaagatcaaactcattcccggagactctgccggtacggtcaccgctttctacatgaactccgatacggccacggtgagagacgagctagattttgagttcttgggaaacagaagtggtcaaccttactcagtgcaaacaaacatatttgctcatggcaaaggagatagagaacaaagagttaatctttggttcgacccatctatggattaccacacttacactatcttatggtcacacaaacacattgttttttacgtagacgatgtgccaataagagaatacaaaaacaacgaagccaagaacatagcttacccaacatcacaacctatgggagtatactcaacattatgggaagcagatgactgggcaacacgtggtggattagagaaaattgattggagcaaagctccattttatgcttattacaaagatttcgacatcgaaggttgtcctgttcctggaccaaccttttgtccatcgaaccctcataattggtgggaaggttatgcctatcagtctcttaacgccgttgaagctcgacgttaccggtgggttagagtaaaccatatggtttatgattattgtactgaccggtctaggtttcctgtcccaccacccgagtgtcgtgcttgaaaataattgcatacgtacgttgcaatgatcatgtttcgtcttgtacgagattttatatataaattgtgggaaaatgtggattgtattgtcctcttacgcaattgtgcagacgtacgtgagtgtgtatagatataattgtgatttgtggttatttgaaatttttataaacatagatgaattctgc

SEQ ID NO: 28915 - protein, 292 aa, Arabidopsis thaliana
  peptide (1)..(292): Ceres Seq. ID no. 12396877
MAKIYSPSFPGTLCLCIFTLLTLMFIRVSARPATFVEDFKAAWSESHIRQMEDGKAIQLVLDQSTGCGFASKRKYLFGRVSMKIKLIPGDSAGTVTAFYMNSDTATVRDELDFEFLGNRSGQPYSVQTNIFAHGKGDREQRVNLWFDPSMDYHTYTILWSHKHIVFYVDDVPIREYKNNEAKNIAYPTSQPMGVYSTLWEADDWATRGGLEKIDWSKAPFYAYYKDFDIEGCPVPGPTFCPSNPHNWWEGYAYQSLNAVEARRYRWVRVNHMVYDYCTDRSRFPVPPPECRA

SEQ ID NO: 28916 - protein, 269 aa, Arabidopsis thaliana
  peptide (1)..(269): Ceres Seq. ID no. 12396878
MFIRVSARPATFVEDFKAAWSESHIRQMEDGKAIQLVLDQSTGCGFASKRKYLFGRVSMKIKLIPGDSAGTVTAFYMNSDTATVRDELDFEFLGNRSGQPYSVQTNIFAHGKGDREQRVNLWFDPSMDYHTYTILWSHKHIVFYVDDVPIREYKNNEAKNIAYPTSQPMGVYSTLWEADDWATRGGLEKIDWSKAPFYAYYKDFDIEGCPVPGPTFCPSNPHNWWEGYAYQSLNAVEARRYRWVRVNHMVYDYCTDRSRFPVPPPECRA

SEQ ID NO: 28917 - protein, 242 aa, Arabidopsis thaliana
  peptide (1)..(242): Ceres Seq. ID no. 12396879
MEDGKAIQLVLDQSTGCGFASKRKYLFGRVSMKIKLIPGDSAGTVTAFYMNSDTATVRDELDFEFLGNRSGQPYSVQTNIFAHGKGDREQRVNLWFDPSMDYHTYTILWSHKHIVFYVDDVPIREYKNNEAKNIAYPTSQPMGVYSTLWEADDWATRGGLEKIDWSKAPFYAYYKDFDIEGCPVPGPTFCPSNPHNWWEGYAYQSLNAVEARRYRWVRVNHMVYDYCTDRSRFPVPPPECRA

SEQ ID NO: 28918 - DNA, 643 bp, Arabidopsis thaliana; identical to SEQ ID NO: 24196
  misc_feature (1)..(643): Ceres Seq. ID no. 13645876
  misc_feature (1)..(643): Ortholog of  Ceres SEQ ID NO 13584968 as cited in SEQ ID NO 64327

SEQ ID NO: 28919 - protein, 144 aa, Arabidopsis thaliana; identical to SEQ ID NO: 24197
  peptide (1)..(144): Ceres Seq. ID no. 13645877

SEQ ID NO: 28920 - protein, 119 aa, Arabidopsis thaliana; identical to SEQ ID NO: 24198
  peptide (1)..(119): Ceres Seq. ID no. 13645878

SEQ ID NO: 28921 - protein, 74 aa, Arabidopsis thaliana; identical to SEQ ID NO: 24199
  peptide (1)..(74): Ceres Seq. ID no. 13645879

SEQ ID NO: 28922 - DNA, 997 bp, Arabidopsis thaliana
  misc_feature (1)..(997): Ceres Seq. ID no. 13488106
  misc_feature (1)..(997): Ortholog of  Ceres SEQ ID NO 14307245 as cited in SEQ ID NO 54025
aatggaaatacactccgatgactacttcttccttcctcctccctgcttctcctccctcagccgcctttctccggcggcgcttcttccgccactcctggctttcctctaagatccaccaccgtcttccccaagttatgaatgattccacgaggactgaagtatccattgataaatcagaagtagacaagcttgttgacaagattgattttggggaattatgcaacgattttgagtgcacaagtagtccgcaggtggaatccacagctagacaacttgttcgcgacattcttgaaatcagagaaggaaatcgtgcctttgcatgctatgcagtttccgttaaatataaggatccggttagaagttttacaggtcgtgagaagtacaaaagaccaatgtggataactagtggattagagaatcctaccgtgacggtacaagagatggtaatgttatcgaccagcgtcttgcgaattaaatggacagtgaaaggaaaaccaaaatctattcttgctgctgtaagtggagatttgatagtaaaagtcaaatctgaatttactcttaaccagattagtgggcaagtgtttgagcatgaagagtcttgggacttatcttcatcatcccctattgctcaagcctatttctggacatcccgccgcctctttgctgcttctgaatccgcaaaagatgtcgccgatgtcacaaaagacttgaccgccaatttgacaactcgaaaagaggacacagatatatatcgcgatccaaccgatccaaataagtttttccaaagagacaacagctttgagagagatgtgtatcaaattgcactgtttctagccattgtctattttgttgtacagttcttgaagaacacaatctagttaccttctctcccatcctctataacagatatgtaaatgcctatatattgttgtatatgatctgtaaaaaaaaactgaacaagaaaagagatgtgtttgtttgtgttggaagaaagact

SEQ ID NO: 28923 - protein, 291 aa, Arabidopsis thaliana
  peptide (1)..(291): Ceres Seq. ID no. 13488107
WKYTPMTTSSFLLPASPPSAAFLRRRFFRHSWLSSKIHHRLPQVMNDSTRTEVSIDKSEVDKLVDKIDFGELCNDFECTSSPQVESTARQLVRDILEIREGNRAFACYAVSVKYKDPVRSFTGREKYKRPMWITSGLENPTVTVQEMVMLSTSVLRIKWTVKGKPKSILAAVSGDLIVKVKSEFTLNQISGQVFEHEESWDLSSSSPIAQAYFWTSRRLFAASESAKDVADVTKDLTANLTTRKEDTDIYRDPTDPNKFFQRDNSFERDVYQIALFLAIVYFVVQFLKNTI

SEQ ID NO: 28924 - protein, 286 aa, Arabidopsis thaliana
  peptide (1)..(286): Ceres Seq. ID no. 13488108
MTTSSFLLPASPPSAAFLRRRFFRHSWLSSKIHHRLPQVMNDSTRTEVSIDKSEVDKLVDKIDFGELCNDFECTSSPQVESTARQLVRDILEIREGNRAFACYAVSVKYKDPVRSFTGREKYKRPMWITSGLENPTVTVQEMVMLSTSVLRIKWTVKGKPKSILAAVSGDLIVKVKSEFTLNQISGQVFEHEESWDLSSSSPIAQAYFWTSRRLFAASESAKDVADVTKDLTANLTTRKEDTDIYRDPTDPNKFFQRDNSFERDVYQIALFLAIVYFVVQFLKNTI

SEQ ID NO: 28925 - protein, 247 aa, Arabidopsis thaliana
  peptide (1)..(247): Ceres Seq. ID no. 13488109
MNDSTRTEVSIDKSEVDKLVDKIDFGELCNDFECTSSPQVESTARQLVRDILEIREGNRAFACYAVSVKYKDPVRSFTGREKYKRPMWITSGLENPTVTVQEMVMLSTSVLRIKWTVKGKPKSILAAVSGDLIVKVKSEFTLNQISGQVFEHEESWDLSSSSPIAQAYFWTSRRLFAASESAKDVADVTKDLTANLTTRKEDTDIYRDPTDPNKFFQRDNSFERDVYQIALFLAIVYFVVQFLKNTI

SEQ ID NO: 28926 - DNA, 1486 bp, Arabidopsis thaliana
  misc_feature (1)..(1486): Ceres Seq. ID no. 13499724
  misc_feature (1)..(1486): Ortholog of  Ceres SEQ ID NO 15177676 as cited in SEQ ID NO 52631
  misc_feature (1)..(1486): Ortholog of  Ceres SEQ ID NO 14314212 as cited in SEQ ID NO 57401
  misc_feature (1)..(1486): Ortholog of  Ceres SEQ ID NO 13596376 as cited in SEQ ID NO 68056
tgaacatcgtcatctctaacaatggcgccttctccgatcatcttctccgttcttcttctcttcatcttctcactctcatcatctgctcaaacacctttccgtcccaaagctctccttctcccagtaacaaaagaccaatctaccctccagtacacaaccgtcatcaaccaacgcacacctctcgtccccgcttccgtcgtcttcgacctcggtggtcgagaactctgggtcgactgcgacaaaggctacgtctcctccacttaccagtctcctcgctgcaactccgccgtctgctcacgtgccggctccacaagctgcggcacatgcttctcccctccgagacctggctgtagtaacaacacttgcggcggcattccggataacaccgttaccggtaccgcaacttccggcgaatttgctttagacgttgtgtctatccagtccactaacggatccaatccgggcagggtcgttaaaatcccaaatttgatcttcgattgtggagcaacgtttcttcttaaaggactcgctaaaggaaccgttggtatggcgggaatgggacgtcacaacatcggtttaccgtcgcaattcgccgccgcgtttagcttccaccgtaaattcgccgtctgtctaacttccggtaaaggcgtcgccttcttcggcaacggaccttacgttttccttcccggaatccagatctcaagtctccaaacgacgccccttctcatcaatccggtcagcactgcttctgcgttttcacaaggtgagaaatcctcagagtactttatcggcgtgacggcgattcaaatcgtcgagaaaacagttccgatcaatccaacgctattgaagattaacgcaagtaccggtatcggaggaaccaaaatcagctccgtcaatccttacacggtgttggagtcatcgatctacaatgcttttacgtcggagttcgttaaacaagcagcggcgaggagcatcaagagagtagcgtcggtgaaaccgttcggcgcgtgtttcagcacgaagaacgtcggcgtgacgcgcctaggatacgccgtgccggagattgagcttgtgcttcatagcaaagacgtcgtttggaggatatttggagccaactcgatggtgagtgtcagtgatgacgtcatctgtttgggtttcgttgacggaggagtcaacgcaagaacctctgttgtgattggagggtttcagttggaggataatttgatcgaatttgatttggcgagtaacaaatttgggtttagttccacgttattgggccgtcaaactaactgcgccaacttcaatttcacttccactgcttgattaaattagttgatccgttttctttttttaaaactgttttttagtggttattatattatgtttgatgtgattaataaagagccaatggaatcattatttggcatttttttaatcaatttatttgaataaattatgtaatgagtgaattttatttgatacatct

SEQ ID NO: 28927 - protein, 433 aa, Arabidopsis thaliana
  peptide (1)..(433): Ceres Seq. ID no. 13499725
MAPSPIIFSVLLLFIFSLSSSAQTPFRPKALLLPVTKDQSTLQYTTVINQRTPLVPASVVFDLGGRELWVDCDKGYVSSTYQSPRCNSAVCSRAGSTSCGTCFSPPRPGCSNNTCGGIPDNTVTGTATSGEFALDVVSIQSTNGSNPGRVVKIPNLIFDCGATFLLKGLAKGTVGMAGMGRHNIGLPSQFAAAFSFHRKFAVCLTSGKGVAFFGNGPYVFLPGIQISSLQTTPLLINPVSTASAFSQGEKSSEYFIGVTAIQIVEKTVPINPTLLKINASTGIGGTKISSVNPYTVLESSIYNAFTSEFVKQAAARSIKRVASVKPFGACFSTKNVGVTRLGYAVPEIELVLHSKDVVWRIFGANSMVSVSDDVICLGFVDGGVNARTSVVIGGFQLEDNLIEFDLASNKFGFSSTLLGRQTNCANFNFTSTA

SEQ ID NO: 28928 - protein, 258 aa, Arabidopsis thaliana
  peptide (1)..(258): Ceres Seq. ID no. 13499726
MAGMGRHNIGLPSQFAAAFSFHRKFAVCLTSGKGVAFFGNGPYVFLPGIQISSLQTTPLLINPVSTASAFSQGEKSSEYFIGVTAIQIVEKTVPINPTLLKINASTGIGGTKISSVNPYTVLESSIYNAFTSEFVKQAAARSIKRVASVKPFGACFSTKNVGVTRLGYAVPEIELVLHSKDVVWRIFGANSMVSVSDDVICLGFVDGGVNARTSVVIGGFQLEDNLIEFDLASNKFGFSSTLLGRQTNCANFNFTSTA

SEQ ID NO: 28929 - protein, 255 aa, Arabidopsis thaliana
  peptide (1)..(255): Ceres Seq. ID no. 13499727
MGRHNIGLPSQFAAAFSFHRKFAVCLTSGKGVAFFGNGPYVFLPGIQISSLQTTPLLINPVSTASAFSQGEKSSEYFIGVTAIQIVEKTVPINPTLLKINASTGIGGTKISSVNPYTVLESSIYNAFTSEFVKQAAARSIKRVASVKPFGACFSTKNVGVTRLGYAVPEIELVLHSKDVVWRIFGANSMVSVSDDVICLGFVDGGVNARTSVVIGGFQLEDNLIEFDLASNKFGFSSTLLGRQTNCANFNFTSTA

SEQ ID NO: 28930 - DNA, 1084 bp, Arabidopsis thaliana
  misc_feature (1)..(1084): Ceres Seq. ID no. 13490650
  misc_feature (1)..(1084): Ortholog of  Ceres SEQ ID NO 12557432 as cited in SEQ ID NO 92
  misc_feature (1)..(1084): Ortholog of  Ceres SEQ ID NO 14305097 as cited in SEQ ID NO 0
ggcttgaaggaaaagaaaagttttgtttctgaactttcgtctctataaaccctttcgacgacgagtgaagaagaaagcgagacgaagaagcaaagatgttcagaaaccaatacgacacagatgttacgacatggagtccaacaggtcgtttattccaagtggaatacgccatggaagcagtgaagcaaggatctgcagcaattggactcagatctcgttctcatgtcgttctcgcttgtgttaacaaagctcaatcggagctttcttcgcatcagaggaagatctttaaagtcgatgaccatatcggtgttgcaatcgctggtctcacagccgacggtcgtgtattgtctcggtatatgagatcggaatcgattaatcactcttttacttatgagtctcctcttcctgttggtcgtctcgttgttcatcttgctgataaagctcaggtctgtacccaacgatcatggaaacgaccctatggtgttggtttgctggtaggtggattggatgagtctggagcccacctttactacaactgtcccagcggaaactactttgagtaccaagcttttgctattggatcccgttcccaagcagcaaagacctatctggaacgcaggtttgagagctttggggattcttctagagaagatctgatcaaagatgctattttggctgttagggagacattgcaaggggaaacactgaagagttctctctgcacagttgctattctaggagtcgatgaaccgttccacttcctggaccaggaagcaatacagaaagtgatcgacacatttgagaaagtgccagaggaagaggaagcagaaggcgaggctggtgagggtgaggccgaagctgccggggctgcaccagcagaacaaggtggtggtggtgcaggtgaccaagacgtggctccaatggaaatgtaaggcttgtgtgtgtaacgctggatggaactattttatttcgatgttagttggatttttactttgcaaaatggctgcgggtttagattatatgcttgagaagttgaaaccatttcgtcattttaactcaatagctgccatcaagactttctctc

SEQ ID NO: 28931 - protein, 278 aa, Arabidopsis thaliana
  peptide (1)..(278): Ceres Seq. ID no. 15219202
MFRNQYDTDVTTWSPTGRLFQVEYAMEAVKQGSAAIGLRSRSHVVLACVNKAQSELSSHQRKIFKVDDHIGVAIAGLTADGRVLSRYMRSESINHSFTYESPLPVGRLVVHLADKAQVCTQRSWKRPYGVGLLVGGLDESGAHLYYNCPSGNYFEYQAFAIGSRSQAAKTYLERRFESFGDSSREDLIKDAILAVRETLQGETLKSSLCTVAILGVDEPFHFLDQEAIQKVIDTFEKVPEEEEAEGEAGEGEAEAAGAAPAEQGGGGAGDQDVAPMEM

SEQ ID NO: 28932 - protein, 253 aa, Arabidopsis thaliana
  peptide (1)..(253): Ceres Seq. ID no. 15219203
MEAVKQGSAAIGLRSRSHVVLACVNKAQSELSSHQRKIFKVDDHIGVAIAGLTADGRVLSRYMRSESINHSFTYESPLPVGRLVVHLADKAQVCTQRSWKRPYGVGLLVGGLDESGAHLYYNCPSGNYFEYQAFAIGSRSQAAKTYLERRFESFGDSSREDLIKDAILAVRETLQGETLKSSLCTVAILGVDEPFHFLDQEAIQKVIDTFEKVPEEEEAEGEAGEGEAEAAGAAPAEQGGGGAGDQDVAPMEM

SEQ ID NO: 28933 - protein, 191 aa, Arabidopsis thaliana
  peptide (1)..(191): Ceres Seq. ID no. 15219204
MRSESINHSFTYESPLPVGRLVVHLADKAQVCTQRSWKRPYGVGLLVGGLDESGAHLYYNCPSGNYFEYQAFAIGSRSQAAKTYLERRFESFGDSSREDLIKDAILAVRETLQGETLKSSLCTVAILGVDEPFHFLDQEAIQKVIDTFEKVPEEEEAEGEAGEGEAEAAGAAPAEQGGGGAGDQDVAPMEM

SEQ ID NO: 28934 - DNA, 570 bp, Arabidopsis thaliana
  misc_feature (1)..(570): Ceres Seq. ID no. 12359958
  misc_feature (1)..(570): Ortholog of  Ceres SEQ ID NO 14304353 as cited in SEQ ID NO 20380
aaactcatcacttacttaacatactaagagagttattagatcttgaaaaacatggcttccaaggctttgattctgttgggtctcttcgcaattcttctggtggtctccgaagtttctgccgcaaggcagtcgggcatggtgaagccagagagtgaggaaactgtgcaacctgaaggttatcacggaggacatggtggtcacggagggggaggccactacggaggaggaggccacgggcatggaggacacaacggaggagggggccacggacttgacggatacggaggaggacatggaggacactacggaggaggaggaggacactacggaggaggaggaggccacggtggtggtggacactatggaggtggaggacaccatggaggaggaggtcacgggctgaacgaacctgttcagacgaagccgggtgtttaaaagttataactatcaaataaattcaccatgcataattgcatctctatatacacttatgtcttatatgtatccatcaaaataaaccatggtgagtttgtaatgcagttccttcagaaatgtgtggaataatgtttc

SEQ ID NO: 28935 - protein, 127 aa, Arabidopsis thaliana
  peptide (1)..(127): Ceres Seq. ID no. 12359959
MASKALILLGLFAILLVVSEVSAARQSGMVKPESEETVQPEGYHGGHGGHGGGGHYGGGGHGHGGHNGGGGHGLDGYGGGHGGHYGGGGGHYGGGGGHGGGGHYGGGGHHGGGGHGLNEPVQTKPGV

SEQ ID NO: 28936 - protein, 99 aa, Arabidopsis thaliana
  peptide (1)..(99): Ceres Seq. ID no. 12359960
MVKPESEETVQPEGYHGGHGGHGGGGHYGGGGHGHGGHNGGGGHGLDGYGGGHGGHYGGGGGHYGGGGGHGGGGHYGGGGHHGGGGHGLNEPVQTKPGV

SEQ ID NO: 28937 - protein, 70 aa, Arabidopsis thaliana
  peptide (1)..(70): Ceres Seq. ID no. 12359961
MVVTEGEATTEEEATGMEDTTEEGATDLTDTEEDMEDTTEEEEDTTEEEEATVVVDTMEVEDTMEEEVTG

SEQ ID NO: 28938 - DNA, 1160 bp, Arabidopsis thaliana
  misc_feature (1)..(1160): Ceres Seq. ID no. 13490472
  misc_feature (1)..(1160): Ortholog of  Ceres SEQ ID NO 15171450 as cited in SEQ ID NO 51602
aaaaattctctctttctctcttcttcgaaattcttcctcctctttttctgcagaaactatccaaaaatctcttcgttttcacaatttctcattattaaaaaaaaaactttaaattcttcttcttcaagaaaaaatggcggtggatcttttatcggaaaattctaatatgagtccaagaatctcattttcacgtgacttttgtcaatcagacgcaataccaatcgagaaacgtcccttaagatcatcaaactcgaaaccatcaagcctcaattcaagcatagatttcgatttctgcattcccggcggcgtaaattccggcgaaagcttcgatcaaggttcttggtccgccgatgaactcttctctaacggcaaaatcttaccaacggaaatcaagaaaaaaccagaaccgggtaaaaaagaaccagaaccaaaaccggttaaatctaaaccggattcaagaaaacagaggaaacaaccaaacgaagaacaacaagaagacgacgtgataatcacgacggaggagaaaaccaatacgaagtcgttttgggggtttaagagaagcagtagtttaaactgtggaagtacttatggacggagtttatgtccgttaccattactaaaccggagtaattcaaccggttcaacgtcgagtaaacagaaacagagcagctcaaggaaacataacgagcatgttaagttacaacaatcttcatcgttgtcttcttcttcttctgcttcgtcttctttgagtaataatggtttttcgaaaccaccattgaagaaaagctatggaggttatagttatggtagccatggtggtggtgggattagagtgagtccggttataaacgttgttccttctgggaatttgtttggttttggttcaatgttttctggtaatggaagagacaagaacaagaaaagataaaaaaaatgtaagaatagatatgtttctggttttactgttttattcttctgatttgttcttcttcttgttctctgaactctgaagattttctgacagtgtgttttgtggatcccatgccagtattattttttagactattgtggtgtaattgtgttttgtttgatttgttagtttgtgttctattcatgtttaaatctagattttttttttaataagaggctgctaatttcag

SEQ ID NO: 28939 - protein, 264 aa, Arabidopsis thaliana
  peptide (1)..(264): Ceres Seq. ID no. 13490473
MAVDLLSENSNMSPRISFSRDFCQSDAIPIEKRPLRSSNSKPSSLNSSIDFDFCIPGGVNSGESFDQGSWSADELFSNGKILPTEIKKKPEPGKKEPEPKPVKSKPDSRKQRKQPNEEQQEDDVIITTEEKTNTKSFWGFKRSSSLNCGSTYGRSLCPLPLLNRSNSTGSTSSKQKQSSSRKHNEHVKLQQSSSLSSSSSASSSLSNNGFSKPPLKKSYGGYSYGSHGGGGIRVSPVINVVPSGNLFGFGSMFSGNGRDKNKKR

SEQ ID NO: 28940 - protein, 253 aa, Arabidopsis thaliana
  peptide (1)..(253): Ceres Seq. ID no. 13490474
MSPRISFSRDFCQSDAIPIEKRPLRSSNSKPSSLNSSIDFDFCIPGGVNSGESFDQGSWSADELFSNGKILPTEIKKKPEPGKKEPEPKPVKSKPDSRKQRKQPNEEQQEDDVIITTEEKTNTKSFWGFKRSSSLNCGSTYGRSLCPLPLLNRSNSTGSTSSKQKQSSSRKHNEHVKLQQSSSLSSSSSASSSLSNNGFSKPPLKKSYGGYSYGSHGGGGIRVSPVINVVPSGNLFGFGSMFSGNGRDKNKKR

SEQ ID NO: 28941 - DNA, 2064 bp, Arabidopsis thaliana
  misc_feature (1)..(2064): Ceres Seq. ID no. 13490559
  misc_feature (1)..(2064): Ortholog of  Ceres SEQ ID NO 13662301 as cited in SEQ ID NO 68114
gttctaacactttgattgattctgaaatctggattcgtctcctccattaaacatctctcgtctgataacaccgatccatctctttctttctctctccgtcgactctcgttcttaaagatgaaagctttctacgtattcgttgttgctcttcttctcaccttgaattataggggagaagcaagtggttctgttttcttcattgatggatccaacaatcaatatcttcgtccacgatcatccagtgaggcacttcccatgtcgcctgttgaaatatctgcagcagtgtctgccttgttgggttttgcaccttcagcaactttgacagctgatggctcatccaagttgaacaagattctaaaacctaatccatttgagaggcctcgcgctgcttttgtgctagaaatcgctggagctgatgatatgcttttggaaacctcccctagtcattctttcttgggcaatgccataaggagcagtattaagtctgattcgtacaaagctgatactgaacttccagacaatgaagtggttgttgtgtctgtcaatgaaccctcctctgatgtgactgacaaggacattaatgattttgcatcttggttgggtggatcatatgttgctggagctgaaccatcgtctggattgttgagtatccctctggctgggggtgctaatgtggagttcaatttggaaaaggaagcagagaggaaatttgcattgaaccttttgggtctatatcagaatatcagacaggcagtcagcgtttatgacgatttatctcatggtattgacagaactgccgaattaacggttggacgctttggtggtatcgatgctttagcacaggagtatggacaaggtatggctaagcaagggatggatgtattactttccacattatcaaagctattcaatctgttggagacatctcataaaggccaaattgttggggttatcgtccttgatgagagagtaaaccaagaatcagaaaatcttttgaactttgggtcttcccgttcatctgcacgctcaatggtggaagtggagggaattccaagtgcagccattatcgctgaggttatacttgttaggctgactcttgcatggttgactggaatcattcttctcattgcaactatccttggggtatacttccttatgaacatgcctttgacgaaggatactcttctatattcaaatgtaaagctcgactaagaaatgaaacagagcttcaaaacggcaaaaggacactgattttctctacaggtcgttcgtttacatatttttgtgtgtatcaagccgtgtttctcaactggccgcctttgaaaccggtgtcatttgaatgtttaaagagaaggatgaaacttttggtggtcagagcagttgatgtgttatgtgtatattgccatattggttgcattctcgacttataattattttctttcttacatacattttgagtctcagtcctaataataaaagaccactttggacacttgatgtgtatcttctgtctctgtaagagcttttgatcatgaatctgaatatattattgcaaccaaaaaaaaaaaaaaaaactaaaaaaaaaaaaaaattagtttcttagaagttacaaaatcaaagatcagaaccaaagagcctaaagatgatgaagggaagcaagtcttacacggagtattcgtcatctttctcaacagatgaatttggttatgatcagaaccgttcaaactcctataacttcaatgggccttgtatcaacacagatccggagatgaaaagaaagaagagagttgcttcttataatctttttgccacggaggaaaagctcaagagtactctcaagaacagtttcaaatggatcaagaacaaattctcaggcgatgataatagtatccggtacaacgtctagattagtccactttgctcctgatctttttatttcttcctttttattacactaagatcttagtgaaacttaacatgtaaataaagtgtgtgagattgtgtatgtgtgtgtgtgtgtctaaagttttgtatgttactcaaatggaaatgtcaatttgcttt

SEQ ID NO: 28942 - protein, 364 aa, Arabidopsis thaliana
  peptide (1)..(364): Ceres Seq. ID no. 13490560
MKAFYVFVVALLLTLNYRGEASGSVFFIDGSNNQYLRPRSSSEALPMSPVEISAAVSALLGFAPSATLTADGSSKLNKILKPNPFERPRAAFVLEIAGADDMLLETSPSHSFLGNAIRSSIKSDSYKADTELPDNEVVVVSVNEPSSDVTDKDINDFASWLGGSYVAGAEPSSGLLSIPLAGGANVEFNLEKEAERKFALNLLGLYQNIRQAVSVYDDLSHGIDRTAELTVGRFGGIDALAQEYGQGMAKQGMDVLLSTLSKLFNLLETSHKGQIVGVIVLDERVNQESENLLNFGSSRSSARSMVEVEGIPSAAIIAEVILVRLTLAWLTGIILLIATILGVYFLMNMPLTKDTLLYSNVKLD

SEQ ID NO: 28943 - protein, 318 aa, Arabidopsis thaliana
  peptide (1)..(318): Ceres Seq. ID no. 13490561
MSPVEISAAVSALLGFAPSATLTADGSSKLNKILKPNPFERPRAAFVLEIAGADDMLLETSPSHSFLGNAIRSSIKSDSYKADTELPDNEVVVVSVNEPSSDVTDKDINDFASWLGGSYVAGAEPSSGLLSIPLAGGANVEFNLEKEAERKFALNLLGLYQNIRQAVSVYDDLSHGIDRTAELTVGRFGGIDALAQEYGQGMAKQGMDVLLSTLSKLFNLLETSHKGQIVGVIVLDERVNQESENLLNFGSSRSSARSMVEVEGIPSAAIIAEVILVRLTLAWLTGIILLIATILGVYFLMNMPLTKDTLLYSNVKLD

SEQ ID NO: 28944 - protein, 263 aa, Arabidopsis thaliana
  peptide (1)..(263): Ceres Seq. ID no. 13490562
MLLETSPSHSFLGNAIRSSIKSDSYKADTELPDNEVVVVSVNEPSSDVTDKDINDFASWLGGSYVAGAEPSSGLLSIPLAGGANVEFNLEKEAERKFALNLLGLYQNIRQAVSVYDDLSHGIDRTAELTVGRFGGIDALAQEYGQGMAKQGMDVLLSTLSKLFNLLETSHKGQIVGVIVLDERVNQESENLLNFGSSRSSARSMVEVEGIPSAAIIAEVILVRLTLAWLTGIILLIATILGVYFLMNMPLTKDTLLYSNVKLD

SEQ ID NO: 28945 - DNA, 1337 bp, Arabidopsis thaliana
  misc_feature (1)..(1337): Ceres Seq. ID no. 12325072
  misc_feature (1)..(1337): Ortholog of  Ceres SEQ ID NO 13590233 as cited in SEQ ID NO 64652
atatattaaaccactgtaactgtaatttattgtttcgccgtcccggaatgttcctgttgaaatccattttcgctgattttttttcttccgtctcttcttcagcttcgaccattttcgtcttcttcattcagtgttgagtcctcgtttacctgtgagctcgaagaaagtgacgatcaatgggaaccctaggcagagcattttactcggtcggtttttggatccgtgagactggtcaagctcttgatcgcctcggttgtcgccttcaaggcaaaaattacttccgagaacaactgtcaaggcatcggacattgatgaatgtatttgataaggctccgattgtggacaaggacgcttttgtggcaccaagcgcctcagttattggggacgttcacattggaagaggatcgtccatttggtatggatgcgtattacgaggcgatgtgaacaccgtaagtgttgggtcaggaactaatattcaggacaactcacttgtgcatgtagcaaaatcaaacttaagcgggaaggtgcacccaaccataattggagacaatgtaaccattggtcatagtgctgttttacatggatgtactgttgaggatgagacctttattgggatgggtgcgacacttcttgatggggtcgttgttgaaaagcatgggatggttgctgctggtgcgcttgtacgacaaaacaccagaattccttctggagaggtatggggaggaaacccagcaaggttcctcaggaagctcactgatgaggaaattgcttttatctctcagtcagcaacaaactactcaaacctcgcacaggctcacgctgcagagaatgcaaagccattaaatgtgattgagttcgagaaggttctacgcaagaagcatgctctaaaggacgaggagtatgactcaatgctcggaatagtgagagaaactccaccagagcttaacctccctaacaacatactgcctgataaagaaaccaagcgtccttctaatctgaactgatttttcaggggtatgttttctggccgaagccctacagtatgagatactcaaggggattatgtttcggtctctggtttgaataatggcaggtagagtacattagggtagacggatttacagcttttggagaagctctgttcaacattttttcatggtttcttagggagtattattgtctaatcaaacttcgtatgttatcacttcggtcttttgaacgtaagaatcaagttcatgaaacatgagtgaatattagtctgatgcatgtgcgtatgcaaaaatccatgtgcgccgatgttgctaggcaagcatgaagaataaagatccaaactggat

SEQ ID NO: 28946 - protein, 275 aa, Arabidopsis thaliana
  peptide (1)..(275): Ceres Seq. ID no. 12325073
MGTLGRAFYSVGFWIRETGQALDRLGCRLQGKNYFREQLSRHRTLMNVFDKAPIVDKDAFVAPSASVIGDVHIGRGSSIWYGCVLRGDVNTVSVGSGTNIQDNSLVHVAKSNLSGKVHPTIIGDNVTIGHSAVLHGCTVEDETFIGMGATLLDGVVVEKHGMVAAGALVRQNTRIPSGEVWGGNPARFLRKLTDEEIAFISQSATNYSNLAQAHAAENAKPLNVIEFEKVLRKKHALKDEEYDSMLGIVRETPPELNLPNNILPDKETKRPSNLN

SEQ ID NO: 28947 - protein, 230 aa, Arabidopsis thaliana
  peptide (1)..(230): Ceres Seq. ID no. 12325074
MNVFDKAPIVDKDAFVAPSASVIGDVHIGRGSSIWYGCVLRGDVNTVSVGSGTNIQDNSLVHVAKSNLSGKVHPTIIGDNVTIGHSAVLHGCTVEDETFIGMGATLLDGVVVEKHGMVAAGALVRQNTRIPSGEVWGGNPARFLRKLTDEEIAFISQSATNYSNLAQAHAAENAKPLNVIEFEKVLRKKHALKDEEYDSMLGIVRETPPELNLPNNILPDKETKRPSNLN

SEQ ID NO: 28948 - DNA, 1088 bp, Arabidopsis thaliana
  misc_feature (1)..(1088): Ceres Seq. ID no. 13490620
  misc_feature (1)..(1088): Ortholog of  Ceres SEQ ID NO 14314442 as cited in SEQ ID NO 52358
  misc_feature (1)..(1088): Ortholog of  Ceres SEQ ID NO 12610442 as cited in SEQ ID NO 56281
  misc_feature (1)..(1088): Ortholog of  Ceres SEQ ID NO 12610713 as cited in SEQ ID NO 56591
  misc_feature (1)..(1088): Ortholog of  Ceres SEQ ID NO 12587345 as cited in SEQ ID NO 62844
  misc_feature (1)..(1088): Ortholog of  Ceres SEQ ID NO 13597357 as cited in SEQ ID NO 68961
  misc_feature (1)..(1088): Ortholog of  Ceres SEQ ID NO 13587656 as cited in SEQ ID NO 0
  misc_feature (1)..(1088): Ortholog of  Ceres SEQ ID NO 14309353 as cited in SEQ ID NO 0
  misc_feature (1)..(1088): Ortholog of  Ceres SEQ ID NO 15177686 as cited in SEQ ID NO 0
ctcatcattttctcgtttgctccatttttttcttctttctgcaaattttattttcccgagaaaatcatcactgagaaaaatgctcgctgtgtttgagaagacggtggcgaatagccctgaagctttacagagtccacactcgtctgagtctgctttcgcgttgaaagatggatctctcgctactcatttcgcttccgtgaatcccaactccgtcacgcttaacttcggatcttctggatttgttgcttactctcttgataatcctgatcctcgtgttcctagattatttgctgtggtggatgatattttctgtctcttccaaggacacattgagaacctaccgtttctgaagcagcagtatggactgaacaaaatcacaaacgaggccatcattgtgattgaggcttacaggacactacgtgatcgaggtccttaccctgtggacaaagttgttagagatttccatggaaagtttgcgtttatactcttcgatagcgtcaagaaaactgtctttgctgctgctgacgccgatgggagtgtgccgttcttctggggaaccgatgctgaagggcaccttgtgttttctgataacaccgagatggtgaagaaaggttgcgccaaatcttatggtcctttccctaaaggttgtttctttacgtcgtcgggtggattgaggagctttgagcacccaaagaacgagttgaagccagtgccgagagtggacagctcaggtgacgtgtgtggtgcaaccttcaaggttgacgctgagactaagagagagggtaccaaaatgcctagagtcgatagctcccaaaattgggccggtcatatctaaaccggaaatcatacacaaatcacaagctcagcatcttctccctcttgtcttgtcccctctctttcgttacatgtttgagttacattgagaaaataatttcaaaccacaatgttctaaacgcgtttatgtacatgtttgaggtgggatttggaaaggatgtcgagttttgtgaaactttggaattacgagactactagacttttgtttctctgtttacgtttcttaaatcaataaataaataagtttttattcc

SEQ ID NO: 28949 - protein, 277 aa, Arabidopsis thaliana
  peptide (1)..(277): Ceres Seq. ID no. 13490621
SSFSRLLHFFLLSANFIFPRKSSLRKMLAVFEKTVANSPEALQSPHSSESAFALKDGSLATHFASVNPNSVTLNFGSSGFVAYSLDNPDPRVPRLFAVVDDIFCLFQGHIENLPFLKQQYGLNKITNEAIIVIEAYRTLRDRGPYPVDKVVRDFHGKFAFILFDSVKKTVFAAADADGSVPFFWGTDAEGHLVFSDNTEMVKKGCAKSYGPFPKGCFFTSSGGLRSFEHPKNELKPVPRVDSSGDVCGATFKVDAETKREGTKMPRVDSSQNWAGHI

SEQ ID NO: 28950 - protein, 251 aa, Arabidopsis thaliana
  peptide (1)..(251): Ceres Seq. ID no. 13490622
MLAVFEKTVANSPEALQSPHSSESAFALKDGSLATHFASVNPNSVTLNFGSSGFVAYSLDNPDPRVPRLFAVVDDIFCLFQGHIENLPFLKQQYGLNKITNEAIIVIEAYRTLRDRGPYPVDKVVRDFHGKFAFILFDSVKKTVFAAADADGSVPFFWGTDAEGHLVFSDNTEMVKKGCAKSYGPFPKGCFFTSSGGLRSFEHPKNELKPVPRVDSSGDVCGATFKVDAETKREGTKMPRVDSSQNWAGHI

SEQ ID NO: 28951 - DNA, 944 bp, Arabidopsis thaliana
  misc_feature (1)..(944): Ceres Seq. ID no. 12334417
  misc_feature (1)..(944): Ortholog of  Ceres SEQ ID NO 14305357 as cited in SEQ ID NO 60046
  misc_feature (1)..(944): Ortholog of  Ceres SEQ ID NO 14313511 as cited in SEQ ID NO 64459
  misc_feature (1)..(944): Ortholog of  Ceres SEQ ID NO 14303006 as cited in SEQ ID NO 67498
  misc_feature (1)..(944): Ortholog of  Ceres SEQ ID NO 13599627 as cited in SEQ ID NO 0
  misc_feature (1)..(944): Ortholog of  Ceres SEQ ID NO 14305069 as cited in SEQ ID NO 0
attgcgaattttaattgatcactctctctctctatctctgttcaaacatctctcccaaagtaggtagaagaagatggggacgacgttagatgtatcaagagcagagctagcacttgtggtaatgtatttgaacaaagcagaggcaagagataagttatgcagagctatacagtatggttccaagttcttgagtggtggacaacctggtactgctcaaaatgttgacaaatctactagcttagcaagaaaagtcttccgtcttttcaagtttgtgaatgacttgcatggtcttatcagtcctgtgcctaaaggaactcctcttcctcttgttttacttggaaagtcgaagaacgcacttttatctacattcttgttcctggatcaaattgtctggcttgggagatcaggaatatataagaacaaagaacgagctgagttacttggacgtatatctctcttctgctggatgggatcttctgtctgcacaactttagtcgaggttggtgagatgggaaggctttcttcatcaatgaagaagatcgaaaagggactcaagaatggaaacaagtatcaggatgaggattatcgtgctaagctaaaaaaatcaaacgagaggtcacttgctttgatcaaatcagctatggacattgttgtagcagctggtcttcttcagttagctccaacgaagatcactcctcgtgtcaccggagcttttggattcatcacctccatcatttcttgttaccagttgcttccgacacgccccaagatcaaaacaccctgaagtcaatcgaggaagctggtgttaaggagaaagtcatttcagaaagtttctgttcttcttattattaaggaaattcactgctgttataaaacatcgtataaaatacttatttgcaggaattacggttattataaatttatgcctcagattcttgatacgc

SEQ ID NO: 28952 - protein, 236 aa, Arabidopsis thaliana; identical to SEQ ID NO: 28883
  peptide (1)..(236): Ceres Seq. ID no. 12334418

SEQ ID NO: 28953 - protein, 220 aa, Arabidopsis thaliana; identical to SEQ ID NO: 28884
  peptide (1)..(220): Ceres Seq. ID no. 12334419

SEQ ID NO: 28954 - DNA, 1212 bp, Arabidopsis thaliana
  misc_feature (1)..(1212): Ceres Seq. ID no. 12422769
  misc_feature (1)..(1212): Ortholog of  Ceres SEQ ID NO 15178596 as cited in SEQ ID NO 53922
  misc_feature (1)..(1212): Ortholog of  Ceres SEQ ID NO 12780542 as cited in SEQ ID NO 65674
gaagctcttgaaatttcctctcttcttcttttgcttgagctttaggttttgagagcaaagaaaaacgaagacgcgtcaaaggtactgaaatgtgtctattgcttcttgcttctggtttatgggtccctgcgacattttgagagtgttgtttggtttaggtgtctggtgtattgcttatataactgttgcaatctttgcgtcttttagaatctttcactgtatttgttaatttcaagagcttttgtggagaggttctgcttgcttgctacaatgggttacgcccagctagttattggtccagcaggcagtggaaagtcaacttattgctcgtctttgtatgaacattgtgaaactatcggtcgaacaatgcatgttgttaaccttgatcctgctgcggagatcttcaactatcctgtggctatggatatcagagaacttatttctttggaagatgtgatggaggatctaaagcttggtcctaatggtgcccttatgtattgcatggagtatcttgaggatagcttacatgattgggtggatgaagaattggagaactacagggatgacgattaccttatctttgattgtccaggccagatagagctgtttacacatgttcctgtgctcaagaactttgtggagcatttgaagcagaagaacttcaacgtctgtgttgtttatctgcttgattcacagttcatcacagatgtaaccaagtttatcagtggttgcatgtcatctctcgctgcaatgatccagcttgaattaccacatgtcaacatcctctcaaaaatggacctcttgcaggacaaaagcaacattgatgattacttgaatccggagcctcgcacattgctagcagagttaaacaaaaggatgggtcctcaatatgcaaaactaaacaaagccttgattgagatggtgggagagtatgggatggtgaatttcatacccattaacttgaggaaagaaaagagcattcaatatgttctgtcgcaaatcgacgtctgtattcagtttggagaagatgctgatgtgaacatcaaagatgatgacgattttagtgacgatggtcctgacctataattgttatattcggtttctacaacttttgttaaaagtctaaacaagcttggtctcattgttcttgtcagttaccaatggcgtttgtgagaacttttgttgaatatcaaaagccttcaatgtgagacg

SEQ ID NO: 28955 - protein, 271 aa, Arabidopsis thaliana
  peptide (1)..(271): Ceres Seq. ID no. 12422770
MGYAQLVIGPAGSGKSTYCSSLYEHCETIGRTMHVVNLDPAAEIFNYPVAMDIRELISLEDVMEDLKLGPNGALMYCMEYLEDSLHDWVDEELENYRDDDYLIFDCPGQIELFTHVPVLKNFVEHLKQKNFNVCVVYLLDSQFITDVTKFISGCMSSLAAMIQLELPHVNILSKMDLLQDKSNIDDYLNPEPRTLLAELNKRMGPQYAKLNKALIEMVGEYGMVNFIPINLRKEKSIQYVLSQIDVCIQFGEDADVNIKDDDDFSDDGPDL

SEQ ID NO: 28956 - protein, 239 aa, Arabidopsis thaliana
  peptide (1)..(239): Ceres Seq. ID no. 12422771
MHVVNLDPAAEIFNYPVAMDIRELISLEDVMEDLKLGPNGALMYCMEYLEDSLHDWVDEELENYRDDDYLIFDCPGQIELFTHVPVLKNFVEHLKQKNFNVCVVYLLDSQFITDVTKFISGCMSSLAAMIQLELPHVNILSKMDLLQDKSNIDDYLNPEPRTLLAELNKRMGPQYAKLNKALIEMVGEYGMVNFIPINLRKEKSIQYVLSQIDVCIQFGEDADVNIKDDDDFSDDGPDL

SEQ ID NO: 28957 - protein, 221 aa, Arabidopsis thaliana
  peptide (1)..(221): Ceres Seq. ID no. 12422772
MDIRELISLEDVMEDLKLGPNGALMYCMEYLEDSLHDWVDEELENYRDDDYLIFDCPGQIELFTHVPVLKNFVEHLKQKNFNVCVVYLLDSQFITDVTKFISGCMSSLAAMIQLELPHVNILSKMDLLQDKSNIDDYLNPEPRTLLAELNKRMGPQYAKLNKALIEMVGEYGMVNFIPINLRKEKSIQYVLSQIDVCIQFGEDADVNIKDDDDFSDDGPDL

SEQ ID NO: 28958 - DNA, 1363 bp, Arabidopsis thaliana
  misc_feature (1)..(1363): Ceres Seq. ID no. 13486775
  misc_feature (1)..(1363): Ortholog of  Ceres SEQ ID NO 12636774 as cited in SEQ ID NO 372
  misc_feature (1)..(1363): Ortholog of  Ceres SEQ ID NO 12578315 as cited in SEQ ID NO 62451
  misc_feature (1)..(1363): Ortholog of  Ceres SEQ ID NO 12615466 as cited in SEQ ID NO 62761
  misc_feature (1)..(1363): Ortholog of  Ceres SEQ ID NO 13597295 as cited in SEQ ID NO 63743
  misc_feature (1)..(1363): Ortholog of  Ceres SEQ ID NO 12617090 as cited in SEQ ID NO 64005
  misc_feature (1)..(1363): Ortholog of  Ceres SEQ ID NO 13597439 as cited in SEQ ID NO 64081
  misc_feature (1)..(1363): Ortholog of  Ceres SEQ ID NO 13597233 as cited in SEQ ID NO 64370
  misc_feature (1)..(1363): Ortholog of  Ceres SEQ ID NO 13584577 as cited in SEQ ID NO 65298
  misc_feature (1)..(1363): Ortholog of  Ceres SEQ ID NO 13598327 as cited in SEQ ID NO 68040
aaaattgaatcttcctcttcttcttgagtcttcagaacaacaacaaaaaacagaatcttgaaagaaagaaaaaaagaaaaaaacatgacagagaattctgaaaaaatcgatcgtttaaacgatctcacgacttttatctcgacgaagacaggagtgaaaggactcgtcgatgccgaaataaccgaagttcctagcatgtttcatgtcccttcttctattttatcaaacaacagaccttctgatatctccggcttaaacctcaccgtcccaatcatcgacctaggagatcgtaacacatcttcaagaaacgttgtcatttcgaagatcaaagacgcagctgagaattggggatttttccaagtgatcaatcatgatgttcctttaactgttcttgaagagatcaaagagagtgttcgaaggtttcatgaacaagatccagttgtcaagaaccaatatcttcctaccgataacaacaagagatttgtttataacaatgatttcgatctctatcattcttctcctttgaattggagagactctttcacttgttatattgctccagatcctccgaatccagaggaaatcccactagcttgcaggagtgcggcgatcgaatacacgaagcatgtaatggaattaggagctgtgctcttccaacttctctcagaagctttaggtttagactctgaggcacttaagaggattgattgtcttaagggtttgtttatgctctgccattactatccaccttgcccacaacctgacctaactttaggtataagtaaacacaccgacaactctttcctcacgcttcttcttcaagaccaaatcggtggtcttcaagttcttcatgaagattattgggtcgatgtccctcctgtacctggagctcttgttgtcaacattggtgatttcatgcagctgataacgaacgataagttcttgagcgtggagcatagggtacgaccgaacaaagatagaccgcggatttcagttgcgtgcttctttagctcgagtctttctccaaattccacggtttatggaccgattaaagatcttttgtctgatgaaaaccctgctaagtacaaagatatcaccataccagagtacactgcaggatttcttgcgagcatttttgatgaaaagtcgtatttgactaattacatgatatgaagaaaatacttgtccgagtgcaaaatatatatttgtgcgttttgcatatgttacgctacattttctttgtacccgctatagagttcctcaaccattgtaccaataagaaaaaatgttttctacttcatgcttaaaacagcattctaggcttgtagctaacaagtcaaactataagttatctttttcaaac

SEQ ID NO: 28959 - protein, 362 aa, Arabidopsis thaliana
  peptide (1)..(362): Ceres Seq. ID no. 13486776
MTENSEKIDRLNDLTTFISTKTGVKGLVDAEITEVPSMFHVPSSILSNNRPSDISGLNLTVPIIDLGDRNTSSRNVVISKIKDAAENWGFFQVINHDVPLTVLEEIKESVRRFHEQDPVVKNQYLPTDNNKRFVYNNDFDLYHSSPLNWRDSFTCYIAPDPPNPEEIPLACRSAAIEYTKHVMELGAVLFQLLSEALGLDSEALKRIDCLKGLFMLCHYYPPCPQPDLTLGISKHTDNSFLTLLLQDQIGGLQVLHEDYWVDVPPVPGALVVNIGDFMQLITNDKFLSVEHRVRPNKDRPRISVACFFSSSLSPNSTVYGPIKDLLSDENPAKYKDITIPEYTAGFLASIFDEKSYLTNYMI

SEQ ID NO: 28960 - protein, 325 aa, Arabidopsis thaliana
  peptide (1)..(325): Ceres Seq. ID no. 13486777
MFHVPSSILSNNRPSDISGLNLTVPIIDLGDRNTSSRNVVISKIKDAAENWGFFQVINHDVPLTVLEEIKESVRRFHEQDPVVKNQYLPTDNNKRFVYNNDFDLYHSSPLNWRDSFTCYIAPDPPNPEEIPLACRSAAIEYTKHVMELGAVLFQLLSEALGLDSEALKRIDCLKGLFMLCHYYPPCPQPDLTLGISKHTDNSFLTLLLQDQIGGLQVLHEDYWVDVPPVPGALVVNIGDFMQLITNDKFLSVEHRVRPNKDRPRISVACFFSSSLSPNSTVYGPIKDLLSDENPAKYKDITIPEYTAGFLASIFDEKSYLTNYMI

SEQ ID NO: 28961 - DNA, 747 bp, Arabidopsis thaliana
  misc_feature (1)..(747): Ceres Seq. ID no. 12738788
  misc_feature (1)..(747): Ortholog of  Ceres SEQ ID NO 12584790 as cited in SEQ ID NO 62648
aaaacaaccccttgagatttccgaagatcatcaaatccaaaaccctagaaaccgaacaaaagaagctaggactattcaatggcgtcgaaaagaattaacaaagagcttagggacttgcaaagagatcctcctgtgtcctgcagtgcaggtcctacgggagatgatatgttccaatggcaagcaactatcatgggtccagcagatagcccgtttgccggaggtgtgtttcttgttaccattcacttcccaccagattaccctttcaagccaccaaaggttgccttccggaccaaggtttatcacccaaacatcaacagtaatggaagtatctgtcttgacattctgaaagagcagtggagccctgcacttaccgtatccaaggttcttctgtcgatatgctcattgctgacggatccaaaccctgacgatcctttggttcctgaaatagcgcacatctacaagacagaccgagtcaagtacgagtccacagctcaatcctggactcagaagtatgcaatgggatgataacaagcaataatacccaccaccagtacattgcgtattaaacaggagaaataagaaagaaagaaaaaaactcagtttggcttttactttggctacttttgcttattagttttttttttttaattatatcttgaaactgtgtgttgggtgtgtacatgagctttatgccttatttgaaacattgagatcttgcaaatgcttttaagccaataatccgctacc

SEQ ID NO: 28962 - protein, 148 aa, Arabidopsis thaliana; identical to SEQ ID NO: 28390
  peptide (1)..(148): Ceres Seq. ID no. 12738789

SEQ ID NO: 28963 - protein, 119 aa, Arabidopsis thaliana; identical to SEQ ID NO: 28391
  peptide (1)..(119): Ceres Seq. ID no. 12738790

SEQ ID NO: 28964 - protein, 114 aa, Arabidopsis thaliana
  peptide (1)..(114): Ceres Seq. ID no. 12738791
KQPLEISEDHQIQNPRNRTKEARTIQWRRKELTKSLGTCKEILLCPAVQVLREMICSNGKQLSWVQQIARLPEVCFLLPFTSHQITLSSHQRLPSGPRFITQTSTVMEVSVLTF

SEQ ID NO: 28965 - DNA, 1653 bp, Arabidopsis thaliana
  misc_feature (1)..(1653): Ceres Seq. ID no. 12422791
  misc_feature (1)..(1653): Ortholog of  Ceres SEQ ID NO 15227226 as cited in SEQ ID NO 54691
  misc_feature (1)..(1653): Ortholog of  Ceres SEQ ID NO 14303169 as cited in SEQ ID NO 65741
agctactactgttgaagcgattctcactaaaaccctcgaacacatcgcctttatctctttctctagatctactcgctatggctactatcaccgttgttaaggctagacagatcttcgacagtcgtggtaatcccaccgttgaggttgatatccacacgtcaaatggtattaaggttacagcagctgttccaagtggagcttccactggtatctatgaggctcttgagctgagggatggaggatctgactaccttggaaagggtgtatctaaggctgttggcaatgtgaacaacatcatcgggccagcacttattggaaaggacccaactcagcagactgctattgacaacttcatggtccatgaacttgacggaacccaaaacgagtgggggtggtgcaagcaaaagcttggagccaatgcgattcttgctgtgtctcttgctgtctgcaaagctggggctgttgtcagcggcattcctctatacaagcacattgccaaccttgctggtaaccccaagattgtgctaccagttcctgccttcaacgtcatcaatggtggatcccatgccggaaacaagcttgctatgcaggagtttatgatcctccctgttggagctgcttctttcaaggaagccatgaagatgggtgtggaagtttaccaccacttgaagtctgtgattaagaagaagtacggccaggatgccacaaatgttggtgatgaaggtgggtttgcaccaaacattcaggagaacaaggagggtcttgaattgctcaagactgctatcgagaaggctggatacactggaaaggttgtcattggaatggatgttgccgcttcagagttctactcagaagacaagacctacgacttgaacttcaaagaagagaacaacaatggctctcagaagatttctggtgatgctctaaaggacctgtacaagtcctttgtcgctgagtacccaatcgtgtccattgaggacccatttgaccaagatgactgggagcactatgctaagatgaccactgagtgtggaaccgaggttcagattgtcggtgatgatttgttggtcactaaccccaagagagttgctaaggcaatcgcagagaagtcttgcaatgctcttcttttgaaggttaaccaaatcggatctgtaaccgagagtatcgaggcagttaagatgtcgaagaaagcaggttggggagtgatgaccagccacagaagtggtgaaaccgaggacacattcattgctgacttagccgttggcttgtccactggacaaatcaaaaccggtgctccttgcagatccgagcgtcttgccaagtacaaccagcttttgcgtattgaggaggagttgggatcagaggcaatttacgctggagtcaacttccgcaaacctgtggaaccctactaaatggagcttttagaagcaaagtggtcttctttgtgacgaggagaagatgacctgagtttgatcatttgctttaattaaataaaacgttctgtttttgtttcttctttgtttggtttcttacgtcttttgttgaaccctttttgggaaaagttactcatttttgtaagggaaacatgagaatgctctgcctttgtcgaggacggtagccccttatttcaatctaatttcggctttactctct

SEQ ID NO: 28966 - protein, 469 aa, Arabidopsis thaliana
  peptide (1)..(469): Ceres Seq. ID no. 12422792
LLLLKRFSLKPSNTSPLSLSLDLLAMATITVVKARQIFDSRGNPTVEVDIHTSNGIKVTAAVPSGASTGIYEALELRDGGSDYLGKGVSKAVGNVNNIIGPALIGKDPTQQTAIDNFMVHELDGTQNEWGWCKQKLGANAILAVSLAVCKAGAVVSGIPLYKHIANLAGNPKIVLPVPAFNVINGGSHAGNKLAMQEFMILPVGAASFKEAMKMGVEVYHHLKSVIKKKYGQDATNVGDEGGFAPNIQENKEGLELLKTAIEKAGYTGKVVIGMDVAASEFYSEDKTYDLNFKEENNNGSQKISGDALKDLYKSFVAEYPIVSIEDPFDQDDWEHYAKMTTECGTEVQIVGDDLLVTNPKRVAKAIAEKSCNALLLKVNQIGSVTESIEAVKMSKKAGWGVMTSHRSGETEDTFIADLAVGLSTGQIKTGAPCRSERLAKYNQLLRIEEELGSEAIYAGVNFRKPVEPY

SEQ ID NO: 28967 - protein, 444 aa, Arabidopsis thaliana
  peptide (1)..(444): Ceres Seq. ID no. 12422793
MATITVVKARQIFDSRGNPTVEVDIHTSNGIKVTAAVPSGASTGIYEALELRDGGSDYLGKGVSKAVGNVNNIIGPALIGKDPTQQTAIDNFMVHELDGTQNEWGWCKQKLGANAILAVSLAVCKAGAVVSGIPLYKHIANLAGNPKIVLPVPAFNVINGGSHAGNKLAMQEFMILPVGAASFKEAMKMGVEVYHHLKSVIKKKYGQDATNVGDEGGFAPNIQENKEGLELLKTAIEKAGYTGKVVIGMDVAASEFYSEDKTYDLNFKEENNNGSQKISGDALKDLYKSFVAEYPIVSIEDPFDQDDWEHYAKMTTECGTEVQIVGDDLLVTNPKRVAKAIAEKSCNALLLKVNQIGSVTESIEAVKMSKKAGWGVMTSHRSGETEDTFIADLAVGLSTGQIKTGAPCRSERLAKYNQLLRIEEELGSEAIYAGVNFRKPVEPY

SEQ ID NO: 28968 - protein, 352 aa, Arabidopsis thaliana; identical to SEQ ID NO: 15479
  peptide (1)..(352): Ceres Seq. ID no. 12422794

SEQ ID NO: 28969 - DNA, 4277 bp, Arabidopsis thaliana; identical to SEQ ID NO: 28888
  misc_feature (1)..(4277): Ceres Seq. ID no. 13491805
  misc_feature (1)..(4277): Ortholog of  Ceres SEQ ID NO 15179695 as cited in SEQ ID NO 193

SEQ ID NO: 28970 - protein, 1286 aa, Arabidopsis thaliana; identical to SEQ ID NO: 28889
  peptide (1)..(1286): Ceres Seq. ID no. 13491806

SEQ ID NO: 28971 - protein, 1243 aa, Arabidopsis thaliana; identical to SEQ ID NO: 28890
  peptide (1)..(1243): Ceres Seq. ID no. 13491807

SEQ ID NO: 28972 - protein, 1205 aa, Arabidopsis thaliana; identical to SEQ ID NO: 28891
  peptide (1)..(1205): Ceres Seq. ID no. 13491808

SEQ ID NO: 28973 - DNA, 1416 bp, Arabidopsis thaliana
  misc_feature (1)..(1416): Ceres Seq. ID no. 12322287
  misc_feature (1)..(1416): Ortholog of  Ceres SEQ ID NO 13657915 as cited in SEQ ID NO 66051
aatggataccgttctcatggctacaacaccaccaatcagatgtcttcatgcttcaattcctacggtgttccgttcgccggcgatttatcaggtcagctgccggagctcccaactgttttcctaccgttcgacgactatgatgagcatgtgttttctcagacggtccgatttgagatctcgctttcttagtactccgaaaaccacttctccgatgagacgacctcgcttttccgtcggtgcttctacggaggagtcttcaattccttctaatcggaaccttatcgtggctaactccgtcgtaatcgtagctttagctgtagctaatcgcgtgctctacaaactcgctttggttcccatgaaacagtacccttttttcatggctcagctcaccactttcggctacgtcttgatttatttcaccattctgtatacgaggcgccgtctaggcattgtgacgaatgaaatgatggatgtacccaaatggagattcgcaatcattggttttctcgaagctcttggtgttgccactggcatggctgcagcagcaatgcttcctggaccagttatacccattttgaatcagacatatttggtgtggcagctgctttttgctcttcttattttaggcaggaggtttttgcttaaccaaattgctggttgtctccttgtggctgtgggggttgtggtggctgtttcaagtggatctggtgcagatactacgctatctggaatcggtttcttatggcctgctgtattggtagcatccgctgcttttcaagctggtgcatctatcataaaggaatttgttttcaatgatgctgcaaagcgtcttgagggaaagtcactggatatatttgtggtaaattcatttggatctggatttcaggctctttttgtgttcctgttgttgccttttctctcaaacttgaaaggcattccattcgccagccttccttcatatctaaaagatggtgccggatgcttcttcaacactggagctaagatttctggctgtgatggtgcccctatactcccactgctctatatatccaccaatctcgctttcaacatctcattgctccatctggtgaaaatatcttcagcaatcgtttcctctcttaccatgatgctctcagtgccattagcggtgtacataatgtcaaaaccattgccgtatctaccgggaggatcaagcttgagctcaaattttacgatggggtgtatagttcttgtcctaggtcttcttctctacaacattcccactactccaactaaacaacacaccaagacctcctaacacactcactcaccattcatcctttttgtgcattactttttttttttgttgataaaccaaattcgtgtaatttcccaattttttttcctttgaccatcaaagatacatagaatattctc

SEQ ID NO: 28974 - protein, 431 aa, Arabidopsis thaliana
  peptide (1)..(431): Ceres Seq. ID no. 12322288
MDTVLMATTPPIRCLHASIPTVFRSPAIYQVSCRSSQLFSYRSTTMMSMCFLRRSDLRSRFLSTPKTTSPMRRPRFSVGASTEESSIPSNRNLIVANSVVIVALAVANRVLYKLALVPMKQYPFFMAQLTTFGYVLIYFTILYTRRRLGIVTNEMMDVPKWRFAIIGFLEALGVATGMAAAAMLPGPVIPILNQTYLVWQLLFALLILGRRFLLNQIAGCLLVAVGVVVAVSSGSGADTTLSGIGFLWPAVLVASAAFQAGASIIKEFVFNDAAKRLEGKSLDIFVVNSFGSGFQALFVFLLLPFLSNLKGIPFASLPSYLKDGAGCFFNTGAKISGCDGAPILPLLYISTNLAFNISLLHLVKISSAIVSSLTMMLSVPLAVYIMSKPLPYLPGGSSLSSNFTMGCIVLVLGLLLYNIPTTPTKQHTKTS

SEQ ID NO: 28975 - protein, 426 aa, Arabidopsis thaliana
  peptide (1)..(426): Ceres Seq. ID no. 12322289
MATTPPIRCLHASIPTVFRSPAIYQVSCRSSQLFSYRSTTMMSMCFLRRSDLRSRFLSTPKTTSPMRRPRFSVGASTEESSIPSNRNLIVANSVVIVALAVANRVLYKLALVPMKQYPFFMAQLTTFGYVLIYFTILYTRRRLGIVTNEMMDVPKWRFAIIGFLEALGVATGMAAAAMLPGPVIPILNQTYLVWQLLFALLILGRRFLLNQIAGCLLVAVGVVVAVSSGSGADTTLSGIGFLWPAVLVASAAFQAGASIIKEFVFNDAAKRLEGKSLDIFVVNSFGSGFQALFVFLLLPFLSNLKGIPFASLPSYLKDGAGCFFNTGAKISGCDGAPILPLLYISTNLAFNISLLHLVKISSAIVSSLTMMLSVPLAVYIMSKPLPYLPGGSSLSSNFTMGCIVLVLGLLLYNIPTTPTKQHTKTS

SEQ ID NO: 28976 - protein, 386 aa, Arabidopsis thaliana
  peptide (1)..(386): Ceres Seq. ID no. 12322290
MMSMCFLRRSDLRSRFLSTPKTTSPMRRPRFSVGASTEESSIPSNRNLIVANSVVIVALAVANRVLYKLALVPMKQYPFFMAQLTTFGYVLIYFTILYTRRRLGIVTNEMMDVPKWRFAIIGFLEALGVATGMAAAAMLPGPVIPILNQTYLVWQLLFALLILGRRFLLNQIAGCLLVAVGVVVAVSSGSGADTTLSGIGFLWPAVLVASAAFQAGASIIKEFVFNDAAKRLEGKSLDIFVVNSFGSGFQALFVFLLLPFLSNLKGIPFASLPSYLKDGAGCFFNTGAKISGCDGAPILPLLYISTNLAFNISLLHLVKISSAIVSSLTMMLSVPLAVYIMSKPLPYLPGGSSLSSNFTMGCIVLVLGLLLYNIPTTPTKQHTKTS

SEQ ID NO: 28977 - DNA, 1199 bp, Arabidopsis thaliana
  misc_feature (1)..(1199): Ceres Seq. ID no. 12396266
  misc_feature (1)..(1199): Ortholog of  Ceres SEQ ID NO 13598539 as cited in SEQ ID NO 65041
gaactgaatcttcgtcgtcaacagattctccgccactggaagaaatggaaacgtcgccgcaattcagacttatcttcgccgtaatcatttcttctctcatcgctttccgatcgtacaagcggaagtcgctcgatctctccggtggaattgctggattcctcgttatgaccattcacttcaccgccggtttcaggtacggagctctgctgcttgtattctttcttacttcctcgaaacttaccaaagttggcgaagataaaaaaagacgcgttgatgttgagttcaaagaaggtggacaaaggaactgggtacaagtgctatgcaatagtggaattgcttcagttctagttgtaattgcttgtactttaacgggttggaaggacaagtgtttggactcgaagcagtcagaaattgtaacagctcttattggtgggatcattggtcattacgcctgctgtaatggagacacttggtcctcagagcttggggttcttagtgatgcccagcctcgactaatcacaacgtttaagccggtgaagaagggcacaaatggtggagttacaaaggcaggactcttagctgccttggcagcaggcaccactgttggattaacattccttatcttcggactctttaccgcgagttgtgcaagtgatgtagctctaaagcaactcttagtcataccactctttgcactagctggactatgtgggagtcttattgattctatactaggagcaaccattcaattcagtggtttctgctctgtccggaacaaggttgtagggaaaccgggtccaaccgtaaagaagatttcaggtgtggacattcttgacaacaatggtgtgaactttgtctccatactcttgacatcttttctgacttccattgcttctgtgtacattttctgaatgatgaagctaccaacctgttttcttgactagactgttttagattttcaccttttgcatgccaaatttggtatacaaacatactttgattttatttcttaaattgttcattttgttgtatgctgaaatgagagttttaagttcatagaaaactttgatcagaaaaaaaaaaaaaaaaagttcatagaacacagtctcttttatgttcagtacaataatcacagctaccaatgtaactgaacatgtatttgttgttttgtttaagagatgtatcactgtgcttccgcc

SEQ ID NO: 28978 - protein, 302 aa, Arabidopsis thaliana
  peptide (1)..(302): Ceres Seq. ID no. 12396267
TESSSSTDSPPLEEMETSPQFRLIFAVIISSLIAFRSYKRKSLDLSGGIAGFLVMTIHFTAGFRYGALLLVFFLTSSKLTKVGEDKKRRVDVEFKEGGQRNWVQVLCNSGIASVLVVIACTLTGWKDKCLDSKQSEIVTALIGGIIGHYACCNGDTWSSELGVLSDAQPRLITTFKPVKKGTNGGVTKAGLLAALAAGTTVGLTFLIFGLFTASCASDVALKQLLVIPLFALAGLCGSLIDSILGATIQFSGFCSVRNKVVGKPGPTVKKISGVDILDNNGVNFVSILLTSFLTSIASVYIF

SEQ ID NO: 28979 - protein, 288 aa, Arabidopsis thaliana
  peptide (1)..(288): Ceres Seq. ID no. 12396268
METSPQFRLIFAVIISSLIAFRSYKRKSLDLSGGIAGFLVMTIHFTAGFRYGALLLVFFLTSSKLTKVGEDKKRRVDVEFKEGGQRNWVQVLCNSGIASVLVVIACTLTGWKDKCLDSKQSEIVTALIGGIIGHYACCNGDTWSSELGVLSDAQPRLITTFKPVKKGTNGGVTKAGLLAALAAGTTVGLTFLIFGLFTASCASDVALKQLLVIPLFALAGLCGSLIDSILGATIQFSGFCSVRNKVVGKPGPTVKKISGVDILDNNGVNFVSILLTSFLTSIASVYIF

SEQ ID NO: 28980 - protein, 248 aa, Arabidopsis thaliana
  peptide (1)..(248): Ceres Seq. ID no. 12396269
MTIHFTAGFRYGALLLVFFLTSSKLTKVGEDKKRRVDVEFKEGGQRNWVQVLCNSGIASVLVVIACTLTGWKDKCLDSKQSEIVTALIGGIIGHYACCNGDTWSSELGVLSDAQPRLITTFKPVKKGTNGGVTKAGLLAALAAGTTVGLTFLIFGLFTASCASDVALKQLLVIPLFALAGLCGSLIDSILGATIQFSGFCSVRNKVVGKPGPTVKKISGVDILDNNGVNFVSILLTSFLTSIASVYIF

SEQ ID NO: 28981 - DNA, 1322 bp, Arabidopsis thaliana
  misc_feature (1)..(1322): Ceres Seq. ID no. 12324249
  misc_feature (1)..(1322): Ortholog of  Ceres SEQ ID NO 14302314 as cited in SEQ ID NO 62543
  misc_feature (1)..(1322): Ortholog of  Ceres SEQ ID NO 13598391 as cited in SEQ ID NO 62769
atttcgggaaaataacaaaaaaaagaaagaaataaaaagaggtgattcaaatccagagagttctcattatgtatattcaaaatctgaatcgagaaggaatctgactcgtgtagatgagaatcggcggcgtcgaggttacgaaatttgcgtcggagatgatgtcgtcgtcgtcttcgtcggcggtggagatgttgaatctcaaagaagcttcgaattggtggtcagacgtaaacgaatctccgatttggcaggatcgtatcttccatgttctcgctgttctctacggaatcgtttccctcgttgctgtgattcaacttgtgagaatacaattgagagttcctgaatatggttggacgacgcaaaaggtctttcactttctcaatttcgttgttaatggagttcgtgctgtggtgtttgtcttcaggcgaaatgttcagtttatgcaaccagagattctgcaacatatcttgcttgatattccaagtcttgctttcttcaccacctatgctcttctggttcttttctgggctgaaatttattatcaggcgcgtgcagtatcgactgatggactcaggccaagcttcttcacaattaatgcagttgtatatgtagttcagattgctctatggttggttttgtggtggaagcctgttcgagttatggtaatcctatctaagatgttctttgcaggtgtttcattgttcgctgcccttggatttttactttatggtggaaggcttttcctaatgttgcaacggtttccagtagaatctaaagggcggcgcaaaaagctgcaagaggttggttacgtgacaaccatatgctttacgtgtttcctcatcagatgtatcatgatgtgctttgctgctttcgatgagggggcaaaccttgatgtgttagatcaccccatccttaacttcatatattacctgttggtagagatattaccctcctctctggtcctcttcatcttgagaaagctaccaccaaaacgaggcattacacaataccatcagattcgctgaaatgtaaaggcacgacaactaatgatcagatgaagaagacaagactatggttgtttatgcttttctgtaatcaatagagagaaaagcataagatggaaatgaaatagatctaaagctgataaggccttttggttgatgatgggaatggattctacttgatttttggtaaacggtaaactggggtttgttccctttatataaaggttatgttgtaaaaaatttattataaagtacatgtaagaattgtgtaaatttatgttgaatcatgtggtaaaaaaaaaaaaaaagtttcttttt

SEQ ID NO: 28982 - protein, 303 aa, Arabidopsis thaliana
  peptide (1)..(303): Ceres Seq. ID no. 12324250
MRIGGVEVTKFASEMMSSSSSSAVEMLNLKEASNWWSDVNESPIWQDRIFHVLAVLYGIVSLVAVIQLVRIQLRVPEYGWTTQKVFHFLNFVVNGVRAVVFVFRRNVQFMQPEILQHILLDIPSLAFFTTYALLVLFWAEIYYQARAVSTDGLRPSFFTINAVVYVVQIALWLVLWWKPVRVMVILSKMFFAGVSLFAALGFLLYGGRLFLMLQRFPVESKGRRKKLQEVGYVTTICFTCFLIRCIMMCFAAFDEGANLDVLDHPILNFIYYLLVEILPSSLVLFILRKLPPKRGITQYHQIR

SEQ ID NO: 28983 - protein, 289 aa, Arabidopsis thaliana
  peptide (1)..(289): Ceres Seq. ID no. 12324251
MMSSSSSSAVEMLNLKEASNWWSDVNESPIWQDRIFHVLAVLYGIVSLVAVIQLVRIQLRVPEYGWTTQKVFHFLNFVVNGVRAVVFVFRRNVQFMQPEILQHILLDIPSLAFFTTYALLVLFWAEIYYQARAVSTDGLRPSFFTINAVVYVVQIALWLVLWWKPVRVMVILSKMFFAGVSLFAALGFLLYGGRLFLMLQRFPVESKGRRKKLQEVGYVTTICFTCFLIRCIMMCFAAFDEGANLDVLDHPILNFIYYLLVEILPSSLVLFILRKLPPKRGITQYHQIR

SEQ ID NO: 28984 - protein, 288 aa, Arabidopsis thaliana
  peptide (1)..(288): Ceres Seq. ID no. 12324252
MSSSSSSAVEMLNLKEASNWWSDVNESPIWQDRIFHVLAVLYGIVSLVAVIQLVRIQLRVPEYGWTTQKVFHFLNFVVNGVRAVVFVFRRNVQFMQPEILQHILLDIPSLAFFTTYALLVLFWAEIYYQARAVSTDGLRPSFFTINAVVYVVQIALWLVLWWKPVRVMVILSKMFFAGVSLFAALGFLLYGGRLFLMLQRFPVESKGRRKKLQEVGYVTTICFTCFLIRCIMMCFAAFDEGANLDVLDHPILNFIYYLLVEILPSSLVLFILRKLPPKRGITQYHQIR

SEQ ID NO: 28985 - DNA, 665 bp, Arabidopsis thaliana
  misc_feature (1)..(665): Ceres Seq. ID no. 12329989
  misc_feature (1)..(665): Ortholog of  Ceres SEQ ID NO 13639278 as cited in SEQ ID NO 59801
  misc_feature (1)..(665): Ortholog of  Ceres SEQ ID NO 12598299 as cited in SEQ ID NO 68409
ccgtcgtgtttaacaatctcttcttcgcggccaaaatttctctcttcccgtagtaagcagttctctctcgaccattttcctcagatctcacgtccgatcaaagtcatcgcgagaagcgccatggagacgacggcggagacaattaccggcggtgttcccaacaacacgatgaagttattgttcgttgagatgggtgtcggttacgatcagcacgggcaagatgtgacatctgcggcgatgaaggcttgttcgattcctggagtttcatttggagaaatgaagttgcagattaagcttggagtgcctcattctcttcaccagcagctggatttggacaaggttaagtctatcttcccatatgggaagattgtgaatgtagaggtggtggatggaggactgatttgctcaagcggtgttctagtcgaagaaatgggtgatacaaatgaagattgctacatagtgaatgtcgcagtctatgtcggttactagtctatcgttcttgtatggtcgactcgacgccgggtttaacaatgtcaccctcgtcgatagaagagaaaaacaaaaacaaatgcagtcacttttagttgtatattttgatttcagaaccattttggtttgtaggcgtgcagcgtttggtgcggtctagaaataatcacgtttgcctc

SEQ ID NO: 28986 - protein, 162 aa, Arabidopsis thaliana
  peptide (1)..(162): Ceres Seq. ID no. 12329990
PSCLTISSSRPKFLSSRSKQFSLDHFPQISRPIKVIARSAMETTAETITGGVPNNTMKLLFVEMGVGYDQHGQDVTSAAMKACSIPGVSFGEMKLQIKLGVPHSLHQQLDLDKVKSIFPYGKIVNVEVVDGGLICSSGVLVEEMGDTNEDCYIVNVAVYVGY

SEQ ID NO: 28987 - protein, 122 aa, Arabidopsis thaliana
  peptide (1)..(122): Ceres Seq. ID no. 12329991
METTAETITGGVPNNTMKLLFVEMGVGYDQHGQDVTSAAMKACSIPGVSFGEMKLQIKLGVPHSLHQQLDLDKVKSIFPYGKIVNVEVVDGGLICSSGVLVEEMGDTNEDCYIVNVAVYVGY

SEQ ID NO: 28988 - protein, 106 aa, Arabidopsis thaliana
  peptide (1)..(106): Ceres Seq. ID no. 12329992
MKLLFVEMGVGYDQHGQDVTSAAMKACSIPGVSFGEMKLQIKLGVPHSLHQQLDLDKVKSIFPYGKIVNVEVVDGGLICSSGVLVEEMGDTNEDCYIVNVAVYVGY

SEQ ID NO: 28989 - DNA, 697 bp, Arabidopsis thaliana
  misc_feature (1)..(697): Ceres Seq. ID no. 13499469
  misc_feature (1)..(697): Ortholog of  Ceres SEQ ID NO 12556910 as cited in SEQ ID NO 39
  misc_feature (1)..(697): Ortholog of  Ceres SEQ ID NO 13594970 as cited in SEQ ID NO 56328
  misc_feature (1)..(697): Ortholog of  Ceres SEQ ID NO 12585079 as cited in SEQ ID NO 63137
aacgaatcttgtttagtaaaaagcgcagctgcaaaaaaaatcgagtagagaagaagtaggcagacaaagaagaagaagaagaagttctcggcgtgcttcaatggcgatatcagtagcagcttcgtcctctatggccgtgatggttccacgtgttcccgccgtatccacccgttgctccgccgtcccttatcttcctcctcgctcctttggccgatcctctttcaccgttccgttgaagcttgtttcagggaatggattgcaaaaagttgaattgtagaagacaagagcttcttcagaagagacctcgtccattgataccaacgaactcatcacagatttgaaggaaaagtgggatggtcttgagaacaaatctactgtacttatatatggaggaggagccattgttgctgtttggttatcttccattgttgttggtgccatcaactctgttcctctgcttccgaaagttatggaacttgtcggtctcgggtacactggatggtttgtctacagataccttctcttcaagtcaagcagaaaggaattggctgaggatattgaatccttgaagaagaagatcgcaggaagcgaatagattcattttcaaataaaaccagctttctctctgtatgttttcctgtaatatcgtgttatattatacaatgtctctgtttcaacattgtatctgttgcatctc

SEQ ID NO: 28990 - protein, 71 aa, Arabidopsis thaliana
  peptide (1)..(71): Ceres Seq. ID no. 13499470
MVLRTNLLYLYMEEEPLLLFGYLPLLLVPSTLFLCFRKLWNLSVSGTLDGLSTDTFSSSQAERNWLRILNP

SEQ ID NO: 28991 - protein, 60 aa, Arabidopsis thaliana
  peptide (1)..(60): Ceres Seq. ID no. 13499471
MEEEPLLLFGYLPLLLVPSTLFLCFRKLWNLSVSGTLDGLSTDTFSSSQAERNWLRILNP

SEQ ID NO: 28992 - protein, 58 aa, Arabidopsis thaliana
  peptide (1)..(58): Ceres Seq. ID no. 13499472
MAISVAASSSMAVMVPRVPAVSTRCSAVPYLPPRSFGRSSFTVPLKLVSGNGLQKVEL

SEQ ID NO: 28993 - DNA, 2148 bp, Arabidopsis thaliana
  misc_feature (1)..(2148): Ceres Seq. ID no. 12325293
  misc_feature (1)..(2148): Ortholog of  Ceres SEQ ID NO 15171762 as cited in SEQ ID NO 57846
  misc_feature (1)..(2148): Ortholog of  Ceres SEQ ID NO 12597287 as cited in SEQ ID NO 63982
ctctgtgccttttttcctcttttctcgttcccctctacttcatttagggtttatcatcctctaccaatccgccgattctatacatacacttttcatatatatacatacatcgtctccactctcgttggctcatttttcattcaccgccacgaagcaagaggagattcgtattagccaccatgtctttgagacctaacgctaagactgaggttcgccggaaccgctacaaagtggcggtggatgctgaggaaggaagacggaggagagaggacaacatggtcgagatccgtaagagtaagcgtgaagaaagcttacagaagaagcgtcgtgaaggccttcaagctaatcagctacctcaattcgctccttcttctgttcctgcttcatcaactgttgagaagaagttggagagtttgcctgctatggttggtggtgtttggtcagatgatagaagtttacagcttgaagcgactactcagttccggaaattgctttctattgagcgtagtcctccgattgaagaagtgattgatgctggtgttgtgcctcggtttgtggaatttctcactagagaggattatccacagcttcagtttgaggctgcttgggcattgacaaacattgcttctgggacttcagagaatacaaaggtggtcattgaacatggtgctgttccgatttttgttcaactattggcttctcagagtgatgatgtccgtgagcaggctgtgtgggcattagggaatgttgctggtgattctccacggtgcagagatcttgtccttggtcaaggagctttgataccattactctctcagttgaatgagcatgctaaactctcgatgctgagaaatgctacttggaccctctctaatttctgcaggggcaagccacagcctccctttgaccaggtccgtccagcactcccagcccttgaacgcctgattcattcgactgatgaggaagtgttaacggatgcatgttgggctctctcttacctttccgatggcacaaatgacaaaatccaatctgtcattgaggcaggtgttgttcctcgactcgtcgagcttctccagcatcaatcaccatctgtgcttattcctgcccttcgtagtattggtaacattgtcactggagatgatctgcagacacagtgtgtaattagtcatggtgcacttcttagccttttgagccttctgactcacaatcataagaagagcatcaaaaaggaagcttgctggacaatctcaaatatcactgctggaaacagggaccagattcaggctgtgtgtgaagctggtttgatttgccctcttgtcaatctgcttcaaaatgcggagtttgatataaagaaagaagctgcgtgggcaatatcaaatgccacttcaggtggttctcctgaccaaatcaagtacatggtggaacagggagtcgtgaaaccactgtgtgatcttttggtgtgccctgatccaaggattatcactgtgtgtctggaaggattggagaacattttgaaagttggggaagctgaaaaggtcacaggaaataccggggatgtaaacttttatgcacagctgatcgatgatgctgagggattagaaaagattgagaatctgcagagtcatgacaacagcgaaatctatgagaaggcagtgaagattcttgaaacgtactggttggaagaggaagatgaaactttaccacctggtgatccctctgcacaaggcttccagtttggaggaggtaatgatgcagccgtaccaccaggtggattcaacttccagtgaaggagctgaacatgacgatttgaagagtcgaaggagcttaaagagtttgggggcactggttaaaaagggtatgattagagagtctggtcttctgtgtaaaagtcagatggggtgccttacttagtctggcctggtccggtcagatccagtggttggtgggtttgagtcatggaataagcttgttgggggggagttgggtaggagtcatcaagggatatttatttttgggaaagggtttataagtttttaaagtgtgatctgatgagaatgtgtctctctgggtttttgttacatttgtactacacaacactgcaaagtcaaacataaaaaagttggtcaaactttatttggtcttattggc

SEQ ID NO: 28994 - protein, 535 aa, Arabidopsis thaliana
  peptide (1)..(535): Ceres Seq. ID no. 12325294
MSLRPNAKTEVRRNRYKVAVDAEEGRRRREDNMVEIRKSKREESLQKKRREGLQANQLPQFAPSSVPASSTVEKKLESLPAMVGGVWSDDRSLQLEATTQFRKLLSIERSPPIEEVIDAGVVPRFVEFLTREDYPQLQFEAAWALTNIASGTSENTKVVIEHGAVPIFVQLLASQSDDVREQAVWALGNVAGDSPRCRDLVLGQGALIPLLSQLNEHAKLSMLRNATWTLSNFCRGKPQPPFDQVRPALPALERLIHSTDEEVLTDACWALSYLSDGTNDKIQSVIEAGVVPRLVELLQHQSPSVLIPALRSIGNIVTGDDLQTQCVISHGALLSLLSLLTHNHKKSIKKEACWTISNITAGNRDQIQAVCEAGLICPLVNLLQNAEFDIKKEAAWAISNATSGGSPDQIKYMVEQGVVKPLCDLLVCPDPRIITVCLEGLENILKVGEAEKVTGNTGDVNFYAQLIDDAEGLEKIENLQSHDNSEIYEKAVKILETYWLEEEDETLPPGDPSAQGFQFGGGNDAAVPPGGFNFQ

SEQ ID NO: 28995 - protein, 503 aa, Arabidopsis thaliana
  peptide (1)..(503): Ceres Seq. ID no. 12325295
MVEIRKSKREESLQKKRREGLQANQLPQFAPSSVPASSTVEKKLESLPAMVGGVWSDDRSLQLEATTQFRKLLSIERSPPIEEVIDAGVVPRFVEFLTREDYPQLQFEAAWALTNIASGTSENTKVVIEHGAVPIFVQLLASQSDDVREQAVWALGNVAGDSPRCRDLVLGQGALIPLLSQLNEHAKLSMLRNATWTLSNFCRGKPQPPFDQVRPALPALERLIHSTDEEVLTDACWALSYLSDGTNDKIQSVIEAGVVPRLVELLQHQSPSVLIPALRSIGNIVTGDDLQTQCVISHGALLSLLSLLTHNHKKSIKKEACWTISNITAGNRDQIQAVCEAGLICPLVNLLQNAEFDIKKEAAWAISNATSGGSPDQIKYMVEQGVVKPLCDLLVCPDPRIITVCLEGLENILKVGEAEKVTGNTGDVNFYAQLIDDAEGLEKIENLQSHDNSEIYEKAVKILETYWLEEEDETLPPGDPSAQGFQFGGGNDAAVPPGGFNFQ

SEQ ID NO: 28996 - protein, 454 aa, Arabidopsis thaliana
  peptide (1)..(454): Ceres Seq. ID no. 12325296
MVGGVWSDDRSLQLEATTQFRKLLSIERSPPIEEVIDAGVVPRFVEFLTREDYPQLQFEAAWALTNIASGTSENTKVVIEHGAVPIFVQLLASQSDDVREQAVWALGNVAGDSPRCRDLVLGQGALIPLLSQLNEHAKLSMLRNATWTLSNFCRGKPQPPFDQVRPALPALERLIHSTDEEVLTDACWALSYLSDGTNDKIQSVIEAGVVPRLVELLQHQSPSVLIPALRSIGNIVTGDDLQTQCVISHGALLSLLSLLTHNHKKSIKKEACWTISNITAGNRDQIQAVCEAGLICPLVNLLQNAEFDIKKEAAWAISNATSGGSPDQIKYMVEQGVVKPLCDLLVCPDPRIITVCLEGLENILKVGEAEKVTGNTGDVNFYAQLIDDAEGLEKIENLQSHDNSEIYEKAVKILETYWLEEEDETLPPGDPSAQGFQFGGGNDAAVPPGGFNFQ

SEQ ID NO: 28997 - DNA, 1292 bp, Arabidopsis thaliana
  misc_feature (1)..(1292): Ceres Seq. ID no. 12348332
  misc_feature (1)..(1292): Ortholog of  Ceres SEQ ID NO 14305750 as cited in SEQ ID NO 52458
  misc_feature (1)..(1292): Ortholog of  Ceres SEQ ID NO 12608276 as cited in SEQ ID NO 57871
  misc_feature (1)..(1292): Ortholog of  Ceres SEQ ID NO 13598492 as cited in SEQ ID NO 63882
  misc_feature (1)..(1292): Ortholog of  Ceres SEQ ID NO 13657914 as cited in SEQ ID NO 66230
  misc_feature (1)..(1292): Ortholog of  Ceres SEQ ID NO 13595877 as cited in SEQ ID NO 67702
  misc_feature (1)..(1292): Ortholog of  Ceres SEQ ID NO 13622667 as cited in SEQ ID NO 0
ataaaaatcattatccaaaaaagtgcaacctctttcgccgtagaaaacattccggtaaccatgctccgaagaatcacttgttcttcttcacttgcttcaccctctctcttcctccgcttctttcgccaactccctcgctcttactcctcaccgaccaccatcgccgtctcaggccgcaacattcgccgactatcaactccaaccactcttcgttgcatttgttcacactcttcatctgaaatcatctccgagcatcctccgttcgtcagggtttacaaagacggtcgtatcgaacgtctttccggcaccgaaacagtcccggcttctctaaacccacgaaacgacgtcgtttcaaaagacgttgtctactcaccggggcataacctctccgttcgtctctttctccctcacaaatcaacacaactcgccgccggtaacaaactccctctacttatctacttccacggcggagcttggataaacgaatcccctttctccccaatctaccacaatttcctcacggaggtagttaaatccgctaactgcctcgccgtctcggttcaataccgccgtgcaccggaagatccggttccggctgcgtatgaagatacatggtctgctattcaatggattttctcacattccgatggatctggtgaagaagattggattaacaaatacgctgatttcgaaaaagtttttctcgccggagatagtgccggtggtaatatatctcatcacatggctatgagagctggtaaagagaagcttaagcctagaatcaaagggactgtgattgtgcatccagcgatttgggggaaagatccggtcgatgagcacgatgtgcaagatagagagatcagagacggagttgcagaaatttgggagaaaattgtgagtccgaatagtgttgatggagcggatgatccgtggtttaatgtggttggatccgggtcggatttttccgggatgggatgtgagaaggttttggttgaggtggctgggaaagatgtgttttggcggcaaggattagcttacgcggagaagctaaagaagagtgggtggaaaggagaggtggaggtgattgaggaagaagatgaagaacattgcttccatctcttaaatccaagttctgaaaatgctcccagcttcatgaagagacttgtggagtttatcactggttaacattgttctttgtgtgacacgaataaattttgatgtaacctttgaatttgatttggttagataattatggttaaggaattaaatacaggaataactctgttctgact

SEQ ID NO: 28998 - protein, 394 aa, Arabidopsis thaliana
  peptide (1)..(394): Ceres Seq. ID no. 12348333
IKIIIQKSATSFAVENIPVTMLRRITCSSSLASPSLFLRFFRQLPRSYSSPTTIAVSGRNIRRLSTPTTLRCICSHSSSEIISEHPPFVRVYKDGRIERLSGTETVPASLNPRNDVVSKDVVYSPGHNLSVRLFLPHKSTQLAAGNKLPLLIYFHGGAWINESPFSPIYHNFLTEVVKSANCLAVSVQYRRAPEDPVPAAYEDTWSAIQWIFSHSDGSGEEDWINKYADFEKVFLAGDSAGGNISHHMAMRAGKEKLKPRIKGTVIVHPAIWGKDPVDEHDVQDREIRDGVAEIWEKIVSPNSVDGADDPWFNVVGSGSDFSGMGCEKVLVEVAGKDVFWRQGLAYAEKLKKSGWKGEVEVIEEEDEEHCFHLLNPSSENAPSFMKRLVEFITG

SEQ ID NO: 28999 - protein, 374 aa, Arabidopsis thaliana
  peptide (1)..(374): Ceres Seq. ID no. 12348334
MLRRITCSSSLASPSLFLRFFRQLPRSYSSPTTIAVSGRNIRRLSTPTTLRCICSHSSSEIISEHPPFVRVYKDGRIERLSGTETVPASLNPRNDVVSKDVVYSPGHNLSVRLFLPHKSTQLAAGNKLPLLIYFHGGAWINESPFSPIYHNFLTEVVKSANCLAVSVQYRRAPEDPVPAAYEDTWSAIQWIFSHSDGSGEEDWINKYADFEKVFLAGDSAGGNISHHMAMRAGKEKLKPRIKGTVIVHPAIWGKDPVDEHDVQDREIRDGVAEIWEKIVSPNSVDGADDPWFNVVGSGSDFSGMGCEKVLVEVAGKDVFWRQGLAYAEKLKKSGWKGEVEVIEEEDEEHCFHLLNPSSENAPSFMKRLVEFITG

SEQ ID NO: 29000 - DNA, 1324 bp, Arabidopsis thaliana
  misc_feature (1)..(1324): Ceres Seq. ID no. 12324502
  misc_feature (1)..(1324): Ortholog of  Ceres SEQ ID NO 12612361 as cited in SEQ ID NO 51594
gttatggttagaaagagacattttgaacaagtaaaccctagttgatatcgtgctaagctcttaagcgaagatacaggtcaaaatcgcggcaaagcatcggtggctcgagtgacccaatccactccaccaaacttctttgggaatcccaaaggttgctactttactcctcaaatgattcgcaagctctgttcttcattctctcgctccatcatcttccccaacaaacccatcttcatcccccgctcttttcctcaaccactccgtcactcttctgctctctcgtactcctccttgaaaatgaccgatacccatatcccaggaaaccctaattcgtcccctatccaatctcccaccaaacccgagtcgcttcgttccctcgaatttcaattgggttcttctttcaccgccgatccaatcatcccgccgccgaatcagatcgtcatcgttattagcggtccaagcggagttggtaaagacgcagtgatcaacaagcttcgtgaggttcgtgaaggtcttcattttgttgttaccgccactagtcgtccgatgcgacctggtgaagttgatggtaaagactatttctttgtctcgagagatcagttcttgtcaatggtggagaacgaagagcttcttgaatacgcacttgtttatggagaatacaaagggattccaaagaagcagattcaggaatttatggccaaaggggaagacattgttcttagagttgatattcaaggagctcagacgttaaggaggatacttggtaactctgctgtgtttatattccttgtggcggagagtgagcttgctatggtggagaggttgattgatcggaagacggagagtcaagaggagttgcttgttagagttgctacggcgagagaagaggttaggcatctaaagaactttgattacgttgtggtgaatgccaaagggaggcttgatgatgcggttaaccgcgtggaatcgattatcgatgctgagaaatctaaagttcatcaaaggattgtcaggatttgatgtgcagagatgccattgtctgtaacaacatattggcttgctgtctccagacacggatccatcgaagaccgagacaattttattatcggtatgtgcggcaacccattccaaccaaagatttagatgaatcctggcccctgactacagagaacccttttgattaagcatcgtatctttatacatagctacatggattatgttatcatcatacagtatgtgattcatactcgcattttgaattttgttactttataaatgtttatggagcattgttcataataatttaagtatcatctaacttttc

SEQ ID NO: 29001 - protein, 282 aa, Arabidopsis thaliana
  peptide (1)..(282): Ceres Seq. ID no. 12324503
MIRKLCSSFSRSIIFPNKPIFIPRSFPQPLRHSSALSYSSLKMTDTHIPGNPNSSPIQSPTKPESLRSLEFQLGSSFTADPIIPPPNQIVIVISGPSGVGKDAVINKLREVREGLHFVVTATSRPMRPGEVDGKDYFFVSRDQFLSMVENEELLEYALVYGEYKGIPKKQIQEFMAKGEDIVLRVDIQGAQTLRRILGNSAVFIFLVAESELAMVERLIDRKTESQEELLVRVATAREEVRHLKNFDYVVVNAKGRLDDAVNRVESIIDAEKSKVHQRIVRI

SEQ ID NO: 29002 - protein, 240 aa, Arabidopsis thaliana
  peptide (1)..(240): Ceres Seq. ID no. 12324504
MTDTHIPGNPNSSPIQSPTKPESLRSLEFQLGSSFTADPIIPPPNQIVIVISGPSGVGKDAVINKLREVREGLHFVVTATSRPMRPGEVDGKDYFFVSRDQFLSMVENEELLEYALVYGEYKGIPKKQIQEFMAKGEDIVLRVDIQGAQTLRRILGNSAVFIFLVAESELAMVERLIDRKTESQEELLVRVATAREEVRHLKNFDYVVVNAKGRLDDAVNRVESIIDAEKSKVHQRIVRI

SEQ ID NO: 29003 - protein, 157 aa, Arabidopsis thaliana
  peptide (1)..(157): Ceres Seq. ID no. 12324505
MRPGEVDGKDYFFVSRDQFLSMVENEELLEYALVYGEYKGIPKKQIQEFMAKGEDIVLRVDIQGAQTLRRILGNSAVFIFLVAESELAMVERLIDRKTESQEELLVRVATAREEVRHLKNFDYVVVNAKGRLDDAVNRVESIIDAEKSKVHQRIVRI

SEQ ID NO: 29004 - DNA, 1127 bp, Arabidopsis thaliana
  misc_feature (1)..(1127): Ceres Seq. ID no. 13593807
  misc_feature (1)..(1127): Ortholog of  Ceres SEQ ID NO 13593831 as cited in SEQ ID NO 53828
agctacacacgagaaagaaaaagctcacaactttaacctttctggagagagaagaacaaaagagggagagggagagaaatggaaggcaaagaagaagatgtacgagtgggagctaacaagttcccggagaggcaacccatcggtacatcggctcagtccaccgacaaggactacaaagagccacctcctgcgccactgttcgagcccggcgagctcagctcatggtctttctacagagccggaatagctgagtttatcgctactttcttgtttctctacatcactgttttgactgtaatgggagttaagagagcaccaaacatgtgtgcttctgttggaatccaaggtatcgcttgggcttttggtggcatgatctttgctcttgtctactgtactgctggaatttcaggtggacacatcaaccctgctgtaacatttggtctgttcttggctcggaagttgtctctgaccagagctgtgttctacatgattatgcaatgtcttggagccatctgtggtgccggagtcgtcaaaggtttccagccaacgccgtaccagactctcggtggtggtgctaacaccgttgctcatggctacaccaaaggttctggccttggtgctgaaatcatcggaacattcgttctcgtctacactgtcttctccgccaccgacgccaagagaagcgcccgtgactcacacgtcccgattttggcgccgctcccaatcggatttgcagtgttcttggtacacttggcaacaataccgatcaccgggaccggaatcaacccagctagaagtcttggagccgcaattatctacaacaaggaccactcttgggatgaccattggattttctgggttggaccattcattggagcagctctagcagcactatatcaccagattgtcatcagagcgattcctttcaagagcaagagttagagacacacagaaagattccacggtccagaatttgttctttagtagtttctttgcttatctatctaatgtagcttgtgttttgcaatgtaatgagcctttcaagaatatgtatttgggatttctaatcagcttttgtctatgtaaaaaccatggtttatctttaaatgttgtttgaggttggcctc

SEQ ID NO: 29005 - protein, 287 aa, Arabidopsis thaliana
  peptide (1)..(287): Ceres Seq. ID no. 13593808
MEGKEEDVRVGANKFPERQPIGTSAQSTDKDYKEPPPAPLFEPGELSSWSFYRAGIAEFIATFLFLYITVLTVMGVKRAPNMCASVGIQGIAWAFGGMIFALVYCTAGISGGHINPAVTFGLFLARKLSLTRAVFYMIMQCLGAICGAGVVKGFQPTPYQTLGGGANTVAHGYTKGSGLGAEIIGTFVLVYTVFSATDAKRSARDSHVPILAPLPIGFAVFLVHLATIPITGTGINPARSLGAAIIYNKDHSWDDHWIFWVGPFIGAALAALYHQIVIRAIPFKSKS

SEQ ID NO: 29006 - protein, 214 aa, Arabidopsis thaliana
  peptide (1)..(214): Ceres Seq. ID no. 13593809
MGVKRAPNMCASVGIQGIAWAFGGMIFALVYCTAGISGGHINPAVTFGLFLARKLSLTRAVFYMIMQCLGAICGAGVVKGFQPTPYQTLGGGANTVAHGYTKGSGLGAEIIGTFVLVYTVFSATDAKRSARDSHVPILAPLPIGFAVFLVHLATIPITGTGINPARSLGAAIIYNKDHSWDDHWIFWVGPFIGAALAALYHQIVIRAIPFKSKS

SEQ ID NO: 29007 - protein, 206 aa, Arabidopsis thaliana
  peptide (1)..(206): Ceres Seq. ID no. 13593810
MCASVGIQGIAWAFGGMIFALVYCTAGISGGHINPAVTFGLFLARKLSLTRAVFYMIMQCLGAICGAGVVKGFQPTPYQTLGGGANTVAHGYTKGSGLGAEIIGTFVLVYTVFSATDAKRSARDSHVPILAPLPIGFAVFLVHLATIPITGTGINPARSLGAAIIYNKDHSWDDHWIFWVGPFIGAALAALYHQIVIRAIPFKSKS

SEQ ID NO: 29008 - DNA, 1422 bp, Arabidopsis thaliana
  misc_feature (1)..(1422): Ceres Seq. ID no. 12395753
  misc_feature (1)..(1422): Ortholog of  Ceres SEQ ID NO 13663419 as cited in SEQ ID NO 66561
aaatgattttagaaactaaagtaaaatgagcttgacactagagtttctgcttcttctgattgtacttatcttgagtcaccatgctcattctggctctattgtcaaattccttcctggttttgaaggcccccttccttttgaactcgaaaccgggtacattggtattggtgaggaaggggaagtgcaattattctactatttcatcaaatctgagaagaatccagaagaagaccctcttcttctatggttaagtggaggacctggatgttcctctcttactggccttctttttgagaatggaccggtggctttgaagttcgaggtttacaatggaagtgttccatctttggtctctactacatattcatggacaaaggtaaaaatggcgaacataatattcttggatcagccagttggatctggcttctcctattcaagaactccactttgataaaattagtgacactggtgaagttaagaggatttatgagtttcttcaaaagtggttaagcaaacatcaacaatttttttccaaccctttttacgttggtggagattcttattcaggtatgattgttccacccctagttcaagaaatcggaaaaggaaattatcaaataaatctacagggttatatcctcggaaacccgataacagatactgaatctgaacaaaactatcagattccatatgctcatggaatggcattaatctctgatgaactatacaagtcaatggagagaatctgcaaaggaaattatgtgaaagtggattcacttaacacaaaatgctataaactaatcaaagattatcaaaagtgtattcataaactgaataagtatcatatattattacctgactgcgatataacatctcctgattgctttttatataggtatactctcataaccttttgggccaacaacaagagcgttcgcgaagctctgcaagtcaataagggaagtataggaaaatgggtacaatgtaactataaaaatatttcctacaattacgatatcaagagcagcgtcgcataccatatgaagaatagtattgatggctaccgatctcttatctacaatggtgaccatgatatgatggtgcctttccttgcaactcaagcctggataagatctctcaattattccatcactgatgattggaagccttggatgataaacgatcaaattgctggatacacgagaagttattccaataagatgacatttgctactatcaaaggaagtggacacacagcagagtataaaccaaaagagacctctatcatgttcaaaagatggatcagtgcccagcctttgtaaaagaggatgatggtctttgcgtatgtagaataaaactatgtaacataaaaaatgtttgtatacaatataatcatctacttggtaattaagtactaccgct

SEQ ID NO: 29009 - protein, 250 aa, Arabidopsis thaliana
  peptide (1)..(250): Ceres Seq. ID no. 12395754
MIVPPLVQEIGKGNYQINLQGYILGNPITDTESEQNYQIPYAHGMALISDELYKSMERICKGNYVKVDSLNTKCYKLIKDYQKCIHKLNKYHILLPDCDITSPDCFLYRYTLITFWANNKSVREALQVNKGSIGKWVQCNYKNISYNYDIKSSVAYHMKNSIDGYRSLIYNGDHDMMVPFLATQAWIRSLNYSITDDWKPWMINDQIAGYTRSYSNKMTFATIKGSGHTAEYKPKETSIMFKRWISAQPL

SEQ ID NO: 29010 - protein, 206 aa, Arabidopsis thaliana
  peptide (1)..(206): Ceres Seq. ID no. 12395755
MALISDELYKSMERICKGNYVKVDSLNTKCYKLIKDYQKCIHKLNKYHILLPDCDITSPDCFLYRYTLITFWANNKSVREALQVNKGSIGKWVQCNYKNISYNYDIKSSVAYHMKNSIDGYRSLIYNGDHDMMVPFLATQAWIRSLNYSITDDWKPWMINDQIAGYTRSYSNKMTFATIKGSGHTAEYKPKETSIMFKRWISAQPL

SEQ ID NO: 29011 - protein, 195 aa, Arabidopsis thaliana
  peptide (1)..(195): Ceres Seq. ID no. 12395756
MERICKGNYVKVDSLNTKCYKLIKDYQKCIHKLNKYHILLPDCDITSPDCFLYRYTLITFWANNKSVREALQVNKGSIGKWVQCNYKNISYNYDIKSSVAYHMKNSIDGYRSLIYNGDHDMMVPFLATQAWIRSLNYSITDDWKPWMINDQIAGYTRSYSNKMTFATIKGSGHTAEYKPKETSIMFKRWISAQPL

SEQ ID NO: 29012 - DNA, 881 bp, Arabidopsis thaliana
  misc_feature (1)..(881): Ceres Seq. ID no. 12334398
  misc_feature (1)..(881): Ortholog of  Ceres SEQ ID NO 13582184 as cited in SEQ ID NO 56002
  misc_feature (1)..(881): Ortholog of  Ceres SEQ ID NO 15227042 as cited in SEQ ID NO 0
tctcgcagacgcagccatgggtatcgatcttatcgcaggaggtaagagtaagaagaccaaaaggactgctcctaagtccgatgatgtctacctaaagcttctcgtcaagctttaccggtttttggtgaggagatctaacagcaacttcaatgctgtgattctgaaaaggcttttcatgagcaaagtcaacaaagctcctctttcactctctaggcttgtagagttcatgactggcaaggatgacaagattgctgtgttggttggaactatcactgatgatttgagagttcatgagattcctgccatgaaggttactgccttgaggtttactgagagggctagggctagaattgagaaagctggtggagagtgcttaacctttgaccagcttgctctcagagctccattgggacagaacacagttcttcttagaggaccaaagaactcgcgtgaagcagtgaagcatttcggacctgctcctggtgtgccacacagtaacactaagccatatgttaggcataagggaaggaagtttgagaaagctagaggaaagcgaaagagtcgtggattcaaggtctaagaagatgttttctggtttcgttttgcttggtttaagtatcgaagttttggtagggaacgctggttcctctttaccctgttccagactttgttttaagttctgtttttctattctcaagacaattggatattttgctttgtcttttaatcttactactattagctgcaatgagattttatctagaatttggatttgatcagtatttggagttcatagtatcattatggtctatttcgttttgtatttctcttccttggaaataaaatatctgtacatgagtattaaaatgtgtaaacaaccc

SEQ ID NO: 29013 - protein, 192 aa, Arabidopsis thaliana
  peptide (1)..(192): Ceres Seq. ID no. 12334399
LADAAMGIDLIAGGKSKKTKRTAPKSDDVYLKLLVKLYRFLVRRSNSNFNAVILKRLFMSKVNKAPLSLSRLVEFMTGKDDKIAVLVGTITDDLRVHEIPAMKVTALRFTERARARIEKAGGECLTFDQLALRAPLGQNTVLLRGPKNSREAVKHFGPAPGVPHSNTKPYVRHKGRKFEKARGKRKSRGFKV

SEQ ID NO: 29014 - protein, 187 aa, Arabidopsis thaliana [sequence omitted]

SEQ ID NO: 29015 - protein, 134 aa, Arabidopsis thaliana
  peptide (1)..(134): Ceres Seq. ID no. 12334401
MSKVNKAPLSLSRLVEFMTGKDDKIAVLVGTITDDLRVHEIPAMKVTALRFTERARARIEKAGGECLTFDQLALRAPLGQNTVLLRGPKNSREAVKHFGPAPGVPHSNTKPYVRHKGRKFEKARGKRKSRGFKV

SEQ ID NO: 29016 - DNA, 1561 bp, Arabidopsis thaliana
  misc_feature (1)..(1561): Ceres Seq. ID no. 12371421
  misc_feature (1)..(1561): Ortholog of  Ceres SEQ ID NO 14311934 as cited in SEQ ID NO 51605
  misc_feature (1)..(1561): Ortholog of  Ceres SEQ ID NO 13598313 as cited in SEQ ID NO 68293
atctctatctaaaaatcttctttgaatttgtgtatacacaaatcttattcaacgaatcatttatcaccaaaaggttctctcttttttgtttgtttctgtcttgtgtgaatgactcgtcggtgttcgcattgtagcaacaatgggcacaattcacgcacgtgtccaacgcgtggtggtggcacgtgcggtggaagtggcggaggaggaggaggtggtggtggaggagggtctggttcctcctccgccgtgaagttatttggtgtgaggttaacggatggctcgattattaaaaagagtgcgagtatgggtaatctctcggcattggctgttgcggcggcggcggcaacgcaccaccgtttatctccgtcgtctcctctggcgacgtcaaatcttaatgattcgccgttatcggatcatgcccgatactctaatttgcatcataatgaagggtatttatctgatgatcctgctcatggttctgggtctagtcaccgtcgtggtgagaggaagagaggtgttccttggactgaagaggaacatagactattcttagtcggtcttcagaaactcgggaaaggagattggcgcggtatttcgagaaactatgtaacgtcaagaactcctacacaagtggctagtcatgctcaaaagtattttattcgacatactagttcaagccgcaggaaaagacggtctagcctcttcgacatggttaccgatgagatggtaatcgaatcatcgccaacgcaagaagaccaaaccttaaaccgttcctctccaagcaaggaatctgaaagcaaaagctaccttccttcacttgagctctcactcaataataccacagaatctgaagtggttgtagcaactgcgccaccacaggaagaagctatagaaccatcaaacggtgtttcaccaatgctagtcccgggcggcttctttcctccttgttttccagtcacttacacaatttggctccctgcttcacttcatggaacagagcatgccttaaacgctgacacttcttctcagcagcatcaggtcctaaaaccaaaacctggatttgctaaagaacgtgtgaacatggacgagttggtaggtatgtctcagcttagcataggaatggcgacaagacacgaaaccgaaacttccccttccccgctatctttgagactagagccctcaaggccatcagcgtttcactcgaatggctcggttaatggtgcagatttgagtaaaggcaacagcgcgattcaggctatctaaaaaatctttgttatcgtgttaaagaatgaagaaggaagaccctgaccggattaaaccagaggatgttcctggtttaagacgaaacaaaccaagccataagccattagagagaacaattacttacaaaggaaaaaaaaacagagcaaactgtaacaatagacttaccaaacagtcaaaaacacatttctcagcatcacgtcatacttacataagataagcgtaacttacaattttaccctttcatttcatgtttaaggcaaatcatttattatctagagactaaacaataaagaatgtt

SEQ ID NO: 29017 - protein, 384 aa, Arabidopsis thaliana
  peptide (1)..(384): Ceres Seq. ID no. 12371422
MTRRCSHCSNNGHNSRTCPTRGGGTCGGSGGGGGGGGGGGSGSSSAVKLFGVRLTDGSIIKKSASMGNLSALAVAAAAATHHRLSPSSPLATSNLNDSPLSDHARYSNLHHNEGYLSDDPAHGSGSSHRRGERKRGVPWTEEEHRLFLVGLQKLGKGDWRGISRNYVTSRTPTQVASHAQKYFIRHTSSSRRKRRSSLFDMVTDEMVIESSPTQEDQTLNRSSPSKESESKSYLPSLELSLNNTTESEVVVATAPPQEEAIEPSNGVSPMLVPGGFFPPCFPVTYTIWLPASLHGTEHALNADTSSQQHQVLKPKPGFAKERVNMDELVGMSQLSIGMATRHETETSPSPLSLRLEPSRPSAFHSNGSVNGADLSKGNSAIQAI

SEQ ID NO: 29018 - protein, 319 aa, Arabidopsis thaliana
  peptide (1)..(319): Ceres Seq. ID no. 12371423
MGNLSALAVAAAAATHHRLSPSSPLATSNLNDSPLSDHARYSNLHHNEGYLSDDPAHGSGSSHRRGERKRGVPWTEEEHRLFLVGLQKLGKGDWRGISRNYVTSRTPTQVASHAQKYFIRHTSSSRRKRRSSLFDMVTDEMVIESSPTQEDQTLNRSSPSKESESKSYLPSLELSLNNTTESEVVVATAPPQEEAIEPSNGVSPMLVPGGFFPPCFPVTYTIWLPASLHGTEHALNADTSSQQHQVLKPKPGFAKERVNMDELVGMSQLSIGMATRHETETSPSPLSLRLEPSRPSAFHSNGSVNGADLSKGNSAIQAI

SEQ ID NO: 29019 - DNA, 1219 bp, Arabidopsis thaliana
  misc_feature (1)..(1219): Ceres Seq. ID no. 12334410
  misc_feature (1)..(1219): Ortholog of  Ceres SEQ ID NO 13662054 as cited in SEQ ID NO 61539
  misc_feature (1)..(1219): Ortholog of  Ceres SEQ ID NO 13663665 as cited in SEQ ID NO 67230
  misc_feature (1)..(1219): Ortholog of  Ceres SEQ ID NO 15174315 as cited in SEQ ID NO 0
atccatcatctcagctcacctttagcttcttcttcttcctcttccgatttcgacgttgtgtttatcttcttcttcataattccgacgaatttcaccagagagaatcaaacccccgaagaatcttaattttctctctgtattatcatcttccaattcaagtgaagaaactcgtacgtggtcgtagtggagatgagttcggctctacctttgaagcttttgttgcctcttacaacaacttcattgctaccttctcctttccgatcggataaccctaacttctatcgccgtcgttcctcttcctctacttcgtgttcttctcaatcccaatcgtttcagcttttctctgttagacgacgccgatccagatcctcctctccctctattcccatgtgctttcctgaacaaacgagagatcaagacgacgtggatagttgggtgaacaaagaggacaatgtgacttgtaggtttgactcagatgaagacaccaccaccaccggactccggattccaacacaagctcaagctatcgttgaaggacctggttcacttgctgtgtcggagctacaacgagtccctgatgtagattatatacaagaactgttggctatacagcaacaaggaccaagaacaattggcttctttggaactagaaatatgggtttcatgcatcaagagctcattcagattcttagctatgctatggttataactaaaaaccatatctacacatcaggtgcagctggaaccaatgcagctgttataagaggtgcacttagagcagagagaccagagcttcttacagttatcttacctcaaagtttgaaaaagcaacctcctgaaagccaggaactactgtcaaaagtacaaaacgtgatagaaaagcctcacaacgaccatttaccgttattagaagccagcaggctatgtaacatggatatcatatcacaagtgcaacaaatcatttgctttgcgtttcatgatagtaagcttctcatggagacatgtcaagaagctaaaaatctccggaagattgttaccctcttctacctggattgagtgattcagtgtttcccacttcaaaaaactcttctttgtcttcttagtgttttgttcatcttcctcttcggagaaagacaagttccattgtaattaggaatcgtcgtttacacatgcacaacctattctttggtctttcatttttttatttgctttatagggc

SEQ ID NO: 29020 - protein, 288 aa, Arabidopsis thaliana
  peptide (1)..(288): Ceres Seq. ID no. 12334411
MSSALPLKLLLPLTTTSLLPSPFRSDNPNFYRRRSSSSTSCSSQSQSFQLFSVRRRRSRSSSPSIPMCFPEQTRDQDDVDSWVNKEDNVTCRFDSDEDTTTTGLRIPTQAQAIVEGPGSLAVSELQRVPDVDYIQELLAIQQQGPRTIGFFGTRNMGFMHQELIQILSYAMVITKNHIYTSGAAGTNAAVIRGALRAERPELLTVILPQSLKKQPPESQELLSKVQNVIEKPHNDHLPLLEASRLCNMDIISQVQQIICFAFHDSKLLMETCQEAKNLRKIVTLFYLD

SEQ ID NO: 29021 - protein, 222 aa, Arabidopsis thaliana
  peptide (1)..(222): Ceres Seq. ID no. 12334412
MCFPEQTRDQDDVDSWVNKEDNVTCRFDSDEDTTTTGLRIPTQAQAIVEGPGSLAVSELQRVPDVDYIQELLAIQQQGPRTIGFFGTRNMGFMHQELIQILSYAMVITKNHIYTSGAAGTNAAVIRGALRAERPELLTVILPQSLKKQPPESQELLSKVQNVIEKPHNDHLPLLEASRLCNMDIISQVQQIICFAFHDSKLLMETCQEAKNLRKIVTLFYLD

SEQ ID NO: 29022 - DNA, 1518 bp, Arabidopsis thaliana
  misc_feature (1)..(1518): Ceres Seq. ID no. 12371601
  misc_feature (1)..(1518): Ortholog of  Ceres SEQ ID NO 12625948 as cited in SEQ ID NO 64717
atcagaaaccttcttaaagtttggtctgaaaatcagatcgagatgcgttcgttaaagttactcctttgttggatctcgtttcttacgttatcaatctcaatctctgcatcgtcagatgatcaattcaccctcgacggaacagttttagaactcaccgattcgaatttcgactcggcgatttcaactttcgattgcatctttgttgatttctatgctccttggtgtggtcactgcaagcgtctcaatcccgagttagacgcagctgctccaattcttgctaaattgaagcagcctattgtgattgcaaagctgaatgctgataagtattctcgtctcgctcggaagattgagattgatgcatttccgactctcatgctttataaccatggagttccaatggagtactatggaccaaggaaagcagatttgcttgtgcgttacttgaagaagtttgttgctccagatgttgcggttcttgagtcagactcaactgtcaaggagtttgttgaagatgctgggacattcttccctgtgtttatcgggtttggtttgaacgaatcgataatatcaggattaggtcggaagtataagaagaaggcatggtttgctgtttcaaaggaagtttcagaggatactatggtttcttatgattttgataaggctcctgcattagttgccaatcatccaacttacaatgagcatagcgtgttttacgggccattcgaagatggattcttggaggaatttgtgaaacagagttttcttcctttgattctacctattaaccatgacacattgaagttgttgaaggacgatgagagaaagattgtcttgacgatcgtggaagatgaaacacacgaaagcttggagaaactatacaaagcattgagagcagctgctcatgcgaaccgcgacctcgtttttggctacgtcggtgtgaagcagtttgaagagtttgttgactcgtttcatgtagacaagaagacaaatctgcctaagattgttgtgtgggatggagatgaagagtatgatcaggtgacgggtatagagaccataacccaagaggaagatcatttgacccaagtgtctcggtttctagagggctatagagaaggaagaacagagaagaagaaaatcaacggaccatcgttcatgggatttatcaactcaatgattgggattaggtcagtgtacatccttgtgttcttggttgcggtcattatgatgctacggagcctcggtcaagttgaggagcctactggagtccggaccgccacagcagtccgtgaaagagttgatcaggccactactgtccctgaagatgaaagcagtgagcataagcctagtgacaaaaaagaggactagttttgttacacttgaatgtggtatgttttttttcttcttttatacttgaagctaacttatatagttcatgcttatttatcttctttatggttagtctttttgggttttaaacggatggttgttccattttatttatgaatcattttggctctc

SEQ ID NO: 29023 - protein, 454 aa, Arabidopsis thaliana
  peptide (1)..(454): Ceres Seq. ID no. 12371602
IRNLLKVWSENQIEMRSLKLLLCWISFLTLSISISASSDDQFTLDGTVLELTDSNFDSAISTFDCIFVDFYAPWCGHCKRLNPELDAAAPILAKLKQPIVIAKLNADKYSRLARKIEIDAFPTLMLYNHGVPMEYYGPRKADLLVRYLKKFVAPDVAVLESDSTVKEFVEDAGTFFPVFIGFGLNESIISGLGRKYKKKAWFAVSKEVSEDTMVSYDFDKAPALVANHPTYNEHSVFYGPFEDGFLEEFVKQSFLPLILPINHDTLKLLKDDERKIVLTIVEDETHESLEKLYKALRAAAHANRDLVFGYVGVKQFEEFVDSFHVDKKTNLPKIVVWDGDEEYDQVTGIETITQEEDHLTQVSRFLEGYREGRTEKKKINGPSFMGFINSMIGIRSVYILVFLVAVIMMLRSLGQVEEPTGVRTATAVRERVDQATTVPEDESSEHKPSDKKED

SEQ ID NO: 29024 - protein, 440 aa, Arabidopsis thaliana
  peptide (1)..(440): Ceres Seq. ID no. 12371603
MRSLKLLLCWISFLTLSISISASSDDQFTLDGTVLELTDSNFDSAISTFDCIFVDFYAPWCGHCKRLNPELDAAAPILAKLKQPIVIAKLNADKYSRLARKIEIDAFPTLMLYNHGVPMEYYGPRKADLLVRYLKKFVAPDVAVLESDSTVKEFVEDAGTFFPVFIGFGLNESIISGLGRKYKKKAWFAVSKEVSEDTMVSYDFDKAPALVANHPTYNEHSVFYGPFEDGFLEEFVKQSFLPLILPINHDTLKLLKDDERKIVLTIVEDETHESLEKLYKALRAAAHANRDLVFGYVGVKQFEEFVDSFHVDKKTNLPKIVVWDGDEEYDQVTGIETITQEEDHLTQVSRFLEGYREGRTEKKKINGPSFMGFINSMIGIRSVYILVFLVAVIMMLRSLGQVEEPTGVRTATAVRERVDQATTVPEDESSEHKPSDKKED

SEQ ID NO: 29025 - protein, 330 aa, Arabidopsis thaliana
  peptide (1)..(330): Ceres Seq. ID no. 12371604
MLYNHGVPMEYYGPRKADLLVRYLKKFVAPDVAVLESDSTVKEFVEDAGTFFPVFIGFGLNESIISGLGRKYKKKAWFAVSKEVSEDTMVSYDFDKAPALVANHPTYNEHSVFYGPFEDGFLEEFVKQSFLPLILPINHDTLKLLKDDERKIVLTIVEDETHESLEKLYKALRAAAHANRDLVFGYVGVKQFEEFVDSFHVDKKTNLPKIVVWDGDEEYDQVTGIETITQEEDHLTQVSRFLEGYREGRTEKKKINGPSFMGFINSMIGIRSVYILVFLVAVIMMLRSLGQVEEPTGVRTATAVRERVDQATTVPEDESSEHKPSDKKED

SEQ ID NO: 29026 - DNA, 1429 bp, Arabidopsis thaliana; identical to SEQ ID NO: 26379
  misc_feature (1)..(1429): Ceres Seq. ID no. 13491286
  misc_feature (1)..(1429): Ortholog of  Ceres SEQ ID NO 13594308 as cited in SEQ ID NO 57706

SEQ ID NO: 29027 - protein, 379 aa, Arabidopsis thaliana; identical to SEQ ID NO: 26380
  peptide (1)..(379): Ceres Seq. ID no. 13491287

SEQ ID NO: 29028 - protein, 362 aa, Arabidopsis thaliana; identical to SEQ ID NO: 26381
  peptide (1)..(362): Ceres Seq. ID no. 13491288

SEQ ID NO: 29029 - protein, 309 aa, Arabidopsis thaliana; identical to SEQ ID NO: 26382
  peptide (1)..(309): Ceres Seq. ID no. 13491289

SEQ ID NO: 29030 - DNA, 1779 bp, Arabidopsis thaliana
  misc_feature (1)..(1779): Ceres Seq. ID no. 13600793
  misc_feature (1)..(1779): Ortholog of  Ceres SEQ ID NO 12780298 as cited in SEQ ID NO 65880
  misc_feature (1)..(1779): Ortholog of  Ceres SEQ ID NO 13654539 as cited in SEQ ID NO 68015
cactagtcccccccccccccgactaatccctaaatcacgagagaagtgagagacactgagactttgtagttgaccggatcattctcacttcgccggccgacgttcttccttccgccgtcggtatctatatttacgatccacgatctctcttgctgtttctgtcttcatcgtgacgaacatggctgctcgtatcgggatcttctccgtcttcgtagctgtattgttatctatttctgcattttcctcagctcaggatctccagatcgtaaatgccgagcgaaggattgatttaagctcacatatcgtgaaggccttcttgactctcaaggttgaaaatattgggaaagatcctgctgcagaaatgcttcttgctttcccacctacccagatcaagaatttggctatggtacaagccctggcaattactggcaagaagaagaagaaaacttatttgccattagatgtaaaaccaactgaacaacctgatgcaccgaatgacactggatactaccgtgttacgtttattagccccttaggtccgggtgaaactgtttcacttgaggtgctttacatattgactcattccttggaacctttcccagtggagataacccagtcagaatctcaattggtttactatcatgatagtgcagtgatattgtcaccgtatcatgttaagcaacagacaacttttattaagactcctagtactagagtagagtcgttcactagcattgaacctgctaaccgggctggcaaagagatcaaatatggaccatatgaaaatcgtgcttcatactcttacacacctgtcatcattcacttcgagaataacagtccatttgctgttgttgaggagcttgtgcgtgaaattgagatttcacactggggtagccttcagattacagaaaattataggttgactcatgggggagcgaggcataagggtgttttctcaagggttgattatcaatctaaacgatcggtcagtggtgcatcctctttcaatgcgctccttgcagtactacctcccagagtgaactctgtctactacagggatgagataggaaacatctctacttcacatttgcgtacaggctttagaaagtcagaacttgaatttgaaccccgctacccattatttggagggtggagtgcaacttttatcatcggctatagagttccattggaagactatctctttgaagcatctgatggcagacgttacttgaactttacctttgggtgcccgctcgtcgaaactattgttaacaagttgactatcaaagtcgtgcttcctgaaggatcaaaggacccttctgctgttttgccctttacagtcaatcaagagttgcaggtcaaatactcataccttgacatagtgggaagaaccgtggttgtgttgcaaaaagataacgtagttcccactcacaacgtacccttccaggtgtactatacattcaaaccaatatacatgcttgcggaaccattcatgcttgtatcggctttcttcttagtatttgtggcttcgcttgcgtatgtacacattgacctcaatatcgtcaggaagtagaagtcttatcaacagtcctttgctttcacttatagactcgttaaagaatacacttttgatcatcacttgaagaactaaactttgtaggtgttgctgcttttagtagagttatatctttgacactaaaaaaaaaaaaaaaaaaaactcgagggggggcccggtacccaattcgtgttaaacacaataaagttggaactggagggggg

SEQ ID NO: 29031 - protein, 464 aa, Arabidopsis thaliana
  peptide (1)..(464): Ceres Seq. ID no. 15219006
MAARIGIFSVFVAVLLSISAFSSAQDLQIVNAERRIDLSSHIVKAFLTLKVENIGKDPAAEMLLAFPPTQIKNLAMVQALAITGKKKKKTYLPLDVKPTEQPDAPNDTGYYRVTFISPLGPGETVSLEVLYILTHSLEPFPVEITQSESQLVYYHDSAVILSPYHVKQQTTFIKTPSTRVESFTSIEPANRAGKEIKYGPYENRASYSYTPVIIHFENNSPFAVVEELVREIEISHWGSLQITENYRLTHGGARHKGVFSRVDYQSKRSVSGASSFNALLAVLPPRVNSVYYRDEIGNISTSHLRTGFRKSELEFEPRYPLFGGWSATFIIGYRVPLEDYLFEASDGRRYLNFTFGCPLVETIVNKLTIKVVLPEGSKDPSAVLPFTVNQELQVKYSYLDIVGRTVVVLQKDNVVPTHNVPFQVYYTFKPIYMLAEPFMLVSAFFLVFVASLAYVHIDLNIVRK

SEQ ID NO: 29032 - protein, 403 aa, Arabidopsis thaliana
  peptide (1)..(403): Ceres Seq. ID no. 15219007
MLLAFPPTQIKNLAMVQALAITGKKKKKTYLPLDVKPTEQPDAPNDTGYYRVTFISPLGPGETVSLEVLYILTHSLEPFPVEITQSESQLVYYHDSAVILSPYHVKQQTTFIKTPSTRVESFTSIEPANRAGKEIKYGPYENRASYSYTPVIIHFENNSPFAVVEELVREIEISHWGSLQITENYRLTHGGARHKGVFSRVDYQSKRSVSGASSFNALLAVLPPRVNSVYYRDEIGNISTSHLRTGFRKSELEFEPRYPLFGGWSATFIIGYRVPLEDYLFEASDGRRYLNFTFGCPLVETIVNKLTIKVVLPEGSKDPSAVLPFTVNQELQVKYSYLDIVGRTVVVLQKDNVVPTHNVPFQVYYTFKPIYMLAEPFMLVSAFFLVFVASLAYVHIDLNIVRK

SEQ ID NO: 29033 - protein, 389 aa, Arabidopsis thaliana
  peptide (1)..(389): Ceres Seq. ID no. 15219008
MVQALAITGKKKKKTYLPLDVKPTEQPDAPNDTGYYRVTFISPLGPGETVSLEVLYILTHSLEPFPVEITQSESQLVYYHDSAVILSPYHVKQQTTFIKTPSTRVESFTSIEPANRAGKEIKYGPYENRASYSYTPVIIHFENNSPFAVVEELVREIEISHWGSLQITENYRLTHGGARHKGVFSRVDYQSKRSVSGASSFNALLAVLPPRVNSVYYRDEIGNISTSHLRTGFRKSELEFEPRYPLFGGWSATFIIGYRVPLEDYLFEASDGRRYLNFTFGCPLVETIVNKLTIKVVLPEGSKDPSAVLPFTVNQELQVKYSYLDIVGRTVVVLQKDNVVPTHNVPFQVYYTFKPIYMLAEPFMLVSAFFLVFVASLAYVHIDLNIVRK

SEQ ID NO: 29034 - DNA, 895 bp, Arabidopsis thaliana
  misc_feature (1)..(895): Ceres Seq. ID no. 13492417
  misc_feature (1)..(895): Ortholog of  Ceres SEQ ID NO 15171235 as cited in SEQ ID NO 52469
  misc_feature (1)..(895): Ortholog of  Ceres SEQ ID NO 15178542 as cited in SEQ ID NO 65410
  misc_feature (1)..(895): Ortholog of  Ceres SEQ ID NO 15174852 as cited in SEQ ID NO 67166
  misc_feature (1)..(895): Ortholog of  Ceres SEQ ID NO 12635657 as cited in SEQ ID NO 0
  misc_feature (1)..(895): Ortholog of  Ceres SEQ ID NO 12635879 as cited in SEQ ID NO 0
  misc_feature (1)..(895): Ortholog of  Ceres SEQ ID NO 13599649 as cited in SEQ ID NO 0
cattgagccgttatataaatccttcactcgctccttgagaagacgaatttgagattgcctctgcaaagagtaaaatggcgaatcctaaagtcttcttcgacatcttgattggtaagatgaaggcagggcgtgttgtaatggagttatttgcagatgtgactccgagaacagctaataatttccgtgctttgtgcactggggagaatggtattgggaaagcagggaaggctttacactacaaaggctcagcctttcaccgtataatcccagggttcatgtgtcaaggtggagatttcactcgtgggaatggaactggaggagaatctatttacgggtctaaatttgaagatgagaacttcaagttgaagcacactggtccagggattttgtctatggctaactctggtcccaacactaatggttctcagttcttcatctgcacagagaagacttcgtggcttgatgggaaacatgttgttttcgggaaagttgttgatggatacaatgtggtcaaggcaatggaggatgttggctctgacatgggaaatccttctgaacgagttgtgattgaagattgtggtgagctcaagaacccaagttcataagttcttaaaacattgggtgggttgatcttgacaggttattctatcatatgctgtgaagcagagacagcatcttagcgttaaggtcaatctagtctgtgatgcactactttggttttgactatatcatatgaaccttaggaagtggtccatccttgtaagttgttttcttaaaactcttgtgtgagaataggatggatgataataatggttagtttctttatgaagacatttggttttgtagctttcttattttggtgtagttaatatgaatgaaccaaactcttcttagg

SEQ ID NO: 29035 - protein, 176 aa, Arabidopsis thaliana
  peptide (1)..(176): Ceres Seq. ID no. 13492418
MANPKVFFDILIGKMKAGRVVMELFADVTPRTANNFRALCTGENGIGKAGKALHYKGSAFHRIIPGFMCQGGDFTRGNGTGGESIYGSKFEDENFKLKHTGPGILSMANSGPNTNGSQFFICTEKTSWLDGKHVVFGKVVDGYNVVKAMEDVGSDMGNPSERVVIEDCGELKNPSS

SEQ ID NO: 29036 - protein, 162 aa, Arabidopsis thaliana
  peptide (1)..(162): Ceres Seq. ID no. 13492419
MKAGRVVMELFADVTPRTANNFRALCTGENGIGKAGKALHYKGSAFHRIIPGFMCQGGDFTRGNGTGGESIYGSKFEDENFKLKHTGPGILSMANSGPNTNGSQFFICTEKTSWLDGKHVVFGKVVDGYNVVKAMEDVGSDMGNPSERVVIEDCGELKNPSS

SEQ ID NO: 29037 - protein, 155 aa, Arabidopsis thaliana
  peptide (1)..(155): Ceres Seq. ID no. 13492420
MELFADVTPRTANNFRALCTGENGIGKAGKALHYKGSAFHRIIPGFMCQGGDFTRGNGTGGESIYGSKFEDENFKLKHTGPGILSMANSGPNTNGSQFFICTEKTSWLDGKHVVFGKVVDGYNVVKAMEDVGSDMGNPSERVVIEDCGELKNPSS

SEQ ID NO: 29038 - DNA, 1721 bp, Arabidopsis thaliana
  misc_feature (1)..(1721): Ceres Seq. ID no. 12603478
  misc_feature (1)..(1721): Ortholog of  Ceres SEQ ID NO 13654142 as cited in SEQ ID NO 68310
ctactttgtgaggcgaagaagaagatcgtagtagcccgataatgaagctacgattgagacatcacgagacgagagaaaccctaaaacttgaattggccgatgcagacactctccatgatctccggcgacggatcaaccccacggtgccttcctccgttcatctctcgctcaatcgtaaagacgagctcatcacgccttcgccggaggatacgctccgatctcttggtttaatatccggtgacctaatttacttctctctcgaggctggcgaatcttcgaattggaaattgagagattctgaaaccgtagcttctcaatcggagagtaatcagacgagtgttcatgattcgattgggttcgcagaggttgatgttgtccccgatcaagcgaaatctaatcctaatacctccgtagaagatccagagggagatatttcgggtatggagggtccagagccgatggatgttgagcagcttgacatggagctcgctgcagctggaagcaaaaggctaagtgaaccattcttcttgaaaaatatactgcttgagaaatctggtgatactagtgagttgactactttggctttgtcagtacatgctgttatgttagaatctggattcgtgctgttgaatcatggctctgacaagtttaacttttcaaaggagttacttacagtatccctgaggtatactctacctgagctgattaagtctaaggatacaaatacaatcgagtcagtttctgtgaagtttcagaatttaggccctgtggttgtagtttacggaactgtaggtggatctagtgggcgagtgcatatgaatcttgataagcgtaggtttgttcctgttatcgacttggttatggatacttctacatctgacgaagaaggctcttcgagtatctaccgtgaagtgttcatgttctggagaatggtaaaagatcgccttgttatcccgttgttgattggtatttgcgataaagctggcttggaacctccaccgtgtttgatgcgcttaccaacagagctaaagctgaagatactagagttgcttcctggtgtgagtattggaaatatggcttgtgtttgtacagaaatgcggtatctggcatcagacaatgacttgtggaagcagaagtgcttggaggaagttaataattttgttgtgacagaagcgggtgattcagttaattggaaggcgaggtttgctactttttggaggcaaaaacagcttgctgctgctagtgatactttttggaggcaaaaccagcttggaaggcggaacatttccacgggaagaagcggcatacgattccctcgaatcattggagaccctcctttcacatggtttaatggggatcgcatgcatggatccattggtattcacccgggacaatcagcacgtgggctcggcagacgaacatggggacagctctttactcccagatgcaatcttgggggactcaactagcaaacataccgagtgtaaaaatggaactgttgaatctttctaaaggtaggagaagtagtatatggcttttccgatatcagcaaataaattgggaggacactaatatagtaatatgtttgatctttaaatgtttatttggttttgaatgattttctcttcttcttgccatgatatgttacatggttgctctcttatgagtttctttctttctgtaaagcttttgatcacccgatatatatggcttcttatatt

SEQ ID NO: 29039 - protein, 475 aa, Arabidopsis thaliana
  peptide (1)..(475): Ceres Seq. ID no. 12603479
MKLRLRHHETRETLKLELADADTLHDLRRRINPTVPSSVHLSLNRKDELITPSPEDTLRSLGLISGDLIYFSLEAGESSNWKLRDSETVASQSESNQTSVHDSIGFAEVDVVPDQAKSNPNTSVEDPEGDISGMEGPEPMDVEQLDMELAAAGSKRLSEPFFLKNILLEKSGDTSELTTLALSVHAVMLESGFVLLNHGSDKFNFSKELLTVSLRYTLPELIKSKDTNTIESVSVKFQNLGPVVVVYGTVGGSSGRVHMNLDKRRFVPVIDLVMDTSTSDEEGSSSIYREVFMFWRMVKDRLVIPLLIGICDKAGLEPPPCLMRLPTELKLKILELLPGVSIGNMACVCTEMRYLASDNDLWKQKCLEEVNNFVVTEAGDSVNWKARFATFWRQKQLAAASDTFWRQNQLGRRNISTGRSGIRFPRIIGDPPFTWFNGDRMHGSIGIHPGQSARGLGRRTWGQLFTPRCNLGGLN

SEQ ID NO: 29040 - protein, 342 aa, Arabidopsis thaliana
  peptide (1)..(342): Ceres Seq. ID no. 12603480
MEGPEPMDVEQLDMELAAAGSKRLSEPFFLKNILLEKSGDTSELTTLALSVHAVMLESGFVLLNHGSDKFNFSKELLTVSLRYTLPELIKSKDTNTIESVSVKFQNLGPVVVVYGTVGGSSGRVHMNLDKRRFVPVIDLVMDTSTSDEEGSSSIYREVFMFWRMVKDRLVIPLLIGICDKAGLEPPPCLMRLPTELKLKILELLPGVSIGNMACVCTEMRYLASDNDLWKQKCLEEVNNFVVTEAGDSVNWKARFATFWRQKQLAAASDTFWRQNQLGRRNISTGRSGIRFPRIIGDPPFTWFNGDRMHGSIGIHPGQSARGLGRRTWGQLFTPRCNLGGLN

SEQ ID NO: 29041 - protein, 336 aa, Arabidopsis thaliana
  peptide (1)..(336): Ceres Seq. ID no. 12603481
MDVEQLDMELAAAGSKRLSEPFFLKNILLEKSGDTSELTTLALSVHAVMLESGFVLLNHGSDKFNFSKELLTVSLRYTLPELIKSKDTNTIESVSVKFQNLGPVVVVYGTVGGSSGRVHMNLDKRRFVPVIDLVMDTSTSDEEGSSSIYREVFMFWRMVKDRLVIPLLIGICDKAGLEPPPCLMRLPTELKLKILELLPGVSIGNMACVCTEMRYLASDNDLWKQKCLEEVNNFVVTEAGDSVNWKARFATFWRQKQLAAASDTFWRQNQLGRRNISTGRSGIRFPRIIGDPPFTWFNGDRMHGSIGIHPGQSARGLGRRTWGQLFTPRCNLGGLN

SEQ ID NO: 29042 - DNA, 3259 bp, Arabidopsis thaliana
  misc_feature (1)..(3259): Ceres Seq. ID no. 12323883
  misc_feature (1)..(3259): Ortholog of  Ceres SEQ ID NO 13656286 as cited in SEQ ID NO 69168
  misc_feature (1)..(3259): Ortholog of  Ceres SEQ ID NO 15174351 as cited in SEQ ID NO 0
acttccgtcactcgcttccttcacgtctctctcccaaaattcaaattcctcaggcctaaccaatcctgtgatcgacgtcgtcaaatattcaaaagcagtccgtgatccattgcatgatcctcttcctgtgggattcttactctcatggctaacccagacgttaaagagattctctgcgattgtgtgataaacttgagagagaatccgaagaggcgaagggagacggtttacgtcggatgtggtgctggattcggcggcgataggccactggcggctctcaaactgcttcagagagttgaagagcttaactatcttgtccttgagtgcttagccgaacgaactttggctgatcgatggctttctatggcatctggcggtctcggctacgaccctcgtgtttcagagtggatgcagttgttgctacctttggctgtggagagaggcacttgtataatcactaacatgggtgcaattgatccctctggggctcagaagaaagttctcgaggtagccggtgaattaggtctcaccatttccgtggctgtggctcatgaggtgcattttgaaacaggctcgggatcatcttttggcggtcaatattgctctgcagggggtactagcacttatcttggagcagctcctattgttgaatgcctggagaagtaccaaccaaacgtgataattacttcaagagtggctgatgccgccttatttttagcaccaatggtgaggcgttcttgtcgtttcctgtttcgtgattaaatctgatcattcttgttgtgtcatcaggtctatgaactaggttggaattggaatgacttggagctgctagctcagggaactctcgctggccaccttctggagtgcggttgccagctcactggtggatacttcatgcatccaggtgatcagtatagagacatggctttccctcttctccaggatttgtcacttccttatgcagagattggctatgatggtaaagtatgtgtatcaaaggttgaaggtagtggtggaattttaaataccagtacttgcgccgagcaacttctgtatgaaattgctgaccctagtgcctacattacacctgatgtggtaatcgatattcgaggtgtttctttccttcccctgtcagactgcaaagtacaatgcagtggagcaaaaccatcttctaacacttctgtgcctgagaaactcttgcggttaattccaaaggagtgtggttggaaagggtggggagagatatcttatggaggaaatggttctatacaacgtgctaaagcttcagagtttctggttcgatcttggatggaagaaaccattcctggtgttaaccattgtattctttcttatgtgattggggttgatagcttgaaggcgacaagcaacggcactgaatcttggcagtcatgtggagatattagattacgtatggatggtctttttaaactgaaggaacatgcggtccagttaacaaaagagtttactgctctatatacaaacggaccagctggtggtggtggaattagtaccggacacaagatggaaattgttcttgaaaagcgtttggtcagccgtgaatctgtaatgtggaaaactggacttcagcacaccaacacttcagagccagagacctctgaacatcattctccagagaaaatgccaaagttacctaaggaaaatccaaagaaccttacaatgagaggctatcaatctggatttcatcactctcctgctccatctggccaaaagatcccactctactctgttgcacatagccgggctggcgataaaggaaacgacataaacttctcaataatcccgcattattccccagatgtcgagcgtctgaaactcataattactcctcaatgggtaaagcatgtgatgtcagttctgttatcaacctcttcgtttctggaattggatgcaaaaccaatggatgaaaatgtgtcagtagagatatatgacgttgaaggcattcatgctatgaatgttgtcgtacggaacatattagatggtggagtcaactgttccaggaggatcgaccgacacggaaagacaatctcagatctcatcttgtgtcaacaagttgtgttgatctgactgacatgggttgcaccacctcagagacagttggcttaaagtaacaatcccttattggattgaaattgtcagaaaccacaacccttcttttgctcaactccaatcactttgccacccaattttatctcattcattttgcaaaaaagatcaaagagagagagagagagagagagaaagaaaaaaaggaaaaaaccttcctccgttacaacctcacaattgcaacaaagtttcatataaaagaggacagaaatttcgcaggttcctccgttgtctgaggatcttggagaaggaaggaaacaacaacaaccaaaaaaaaaccaaaaaaaaaaaagataaaacaaaaaaaatgtctttcacaggaactctcgacaaatgcaatgtttgtgataagacagtctatgtggtggacatgttgtccattgaaggaatgccttaccacaagtcttgcttcaggtgtacccattgcaaaggaacccttcagatgagcaactattcctccatggacggagttttgtactgcaagactcattttgagcaactcttcaaggaatctggcaatttcagcaaaaactttcaaccaggaaaaactgagaagccagagctgactaggactcccagcaagatatcttccatcttctgtggaacacaagacaagtgtgccgcttgcgaaaaaactgtttaccctcttgaaaagatacaaatggaaggagaatgcttccacaagacatgtttccggtgcgctcacggtgggtgtacgctgactcactcctcctacgcctccttagatagcgttctctattgccgacatcactttaaccaactcttcatggagaaaggaaactacgctcacgtcctccaagccgccaatcaccgtcgcacagcctcaggcaacactcttccaccggaacctaccgaagacgtcgccgtggaggccaaggaagagaatggcgtttcagagtcttgaatatctcttacatgagtgtttttgagtgaatgattgaatgaatgttgttgcgggggaaagatttgatttcatttgtaatgagttgtttccatatgaagacatgattttttttgttatttttttaattcattcgttatacatttattattacacacgaaaaaaaggcaagaattgatgttttttcactct

SEQ ID NO: 29043 - protein, 403 aa, Arabidopsis thaliana
  peptide (1)..(403): Ceres Seq. ID no. 12323884
MHPGDQYRDMAFPLLQDLSLPYAEIGYDGKVCVSKVEGSGGILNTSTCAEQLLYEIADPSAYITPDVVIDIRGVSFLPLSDCKVQCSGAKPSSNTSVPEKLLRLIPKECGWKGWGEISYGGNGSIQRAKASEFLVRSWMEETIPGVNHCILSYVIGVDSLKATSNGTESWQSCGDIRLRMDGLFKLKEHAVQLTKEFTALYTNGPAGGGGISTGHKMEIVLEKRLVSRESVMWKTGLQHTNTSEPETSEHHSPEKMPKLPKENPKNLTMRGYQSGFHHSPAPSGQKIPLYSVAHSRAGDKGNDINFSIIPHYSPDVERLKLIITPQWVKHVMSVLLSTSSFLELDAKPMDENVSVEIYDVEGIHAMNVVVRNILDGGVNCSRRIDRHGKTISDLILCQQVVLI

SEQ ID NO: 29044 - protein, 394 aa, Arabidopsis thaliana
  peptide (1)..(394): Ceres Seq. ID no. 12323885
MAFPLLQDLSLPYAEIGYDGKVCVSKVEGSGGILNTSTCAEQLLYEIADPSAYITPDVVIDIRGVSFLPLSDCKVQCSGAKPSSNTSVPEKLLRLIPKECGWKGWGEISYGGNGSIQRAKASEFLVRSWMEETIPGVNHCILSYVIGVDSLKATSNGTESWQSCGDIRLRMDGLFKLKEHAVQLTKEFTALYTNGPAGGGGISTGHKMEIVLEKRLVSRESVMWKTGLQHTNTSEPETSEHHSPEKMPKLPKENPKNLTMRGYQSGFHHSPAPSGQKIPLYSVAHSRAGDKGNDINFSIIPHYSPDVERLKLIITPQWVKHVMSVLLSTSSFLELDAKPMDENVSVEIYDVEGIHAMNVVVRNILDGGVNCSRRIDRHGKTISDLILCQQVVLI

SEQ ID NO: 29045 - protein, 265 aa, Arabidopsis thaliana
  peptide (1)..(265): Ceres Seq. ID no. 12323886
MEETIPGVNHCILSYVIGVDSLKATSNGTESWQSCGDIRLRMDGLFKLKEHAVQLTKEFTALYTNGPAGGGGISTGHKMEIVLEKRLVSRESVMWKTGLQHTNTSEPETSEHHSPEKMPKLPKENPKNLTMRGYQSGFHHSPAPSGQKIPLYSVAHSRAGDKGNDINFSIIPHYSPDVERLKLIITPQWVKHVMSVLLSTSSFLELDAKPMDENVSVEIYDVEGIHAMNVVVRNILDGGVNCSRRIDRHGKTISDLILCQQVVLI

SEQ ID NO: 29046 - DNA, 1766 bp, Arabidopsis thaliana
  misc_feature (1)..(1766): Ceres Seq. ID no. 13647205
  misc_feature (1)..(1766): Ortholog of  Ceres SEQ ID NO 13595877 as cited in SEQ ID NO 67702
  misc_feature (1)..(1766): Ortholog of  Ceres SEQ ID NO 13654367 as cited in SEQ ID NO 67993
  misc_feature (1)..(1766): Ortholog of  Ceres SEQ ID NO 13622667 as cited in SEQ ID NO 0
gtttttaatcactcaaccattaaaccccattttgatctctagttttttaaaagcaggagattttccttttcccagaaaagaaatttcccaaatcaaagtttcgagctttcacttctcgacttgcaaattctcgtcctttttactgaattcgatctgggtttttgtttttgattagtaaaataacaaaaaaaaaaaaaggatttatcagaaatggctgcgagcgatgaagttaatcttattgagagcagaacagtggttcctctcaatacatgggttttaatatccaacttcaaagtagcctacaatatccttcgtcgccctgatggaacctttaaccgacacttagctgagtatctagaccgtaaagtcactgcaaacgccaatccggttgatggggttttctcgttcgatgtcttgattgatcgcaggatcaatcttctaagcagagtctatagaccagcttatgcagatcaagagcaacctcctagtattttagatctcgagaagcctgttgatggcgacattgtccctgttatattgttcttccatggaggtagctttgctcattcttctgcaaacagtgccatctacgatactctttgtcgcaggcttgttggtttgtgcaagtgtgttgttgtctctgtgaattatcggcgtgcaccagagaatccatacccttgtgcttatgatgatggttggattgctcttaattgggttaactcgagatcttggcttaaatccaagaaagactcaaaggtccatattttcttggctggtgatagctctggaggtaacatcgcgcataatgtggctttaagagcgggtgaatcgggaatcgatgttttggggaacattctgctgaatcctatgtttggtgggaatgagagaacggagtctgagaaaagtttggatgggaaatactttgtgacggttagagaccgcgattggtactggaaagcgtttttacccgagggagaagatagagagcatccagcgtgtaatccgtttagcccgagagggaaaagcttagaaggagtgagtttccccaagagtcttgtggttgtcgcgggtttggatttgattagagattggcagttggcatacgcggaagggctcaagaaagcgggtcaagaggttaagcttatgcatttagagaaagcaactgttgggttttacctcttgcctaataacaatcatttccataatgttatggatgagatttcggcgtttgtaaacgcggaatgttaacactgggttagagaaagaaggttgttttaacaaagccaagacatctttcaaactaacacacaggtgaatgtattgcctgtggattctctcgtttagttttgtttttgtgtttagtatctaagtgtgtggcggtctgcggcagcctttgtgatggctgtttaaacgctggattctgaaacgctaaagcttgtggaagaacagtgaggcgtttagagacttggaaaggaaccaagcactagtaaaaatttctcctttttttgtctgtaatatttggcatttagcttttacccttgagcctttttactaactaaaagctgattttttcagcatgagagtggtaattagatatctataaatataaatatttcaagaatgtaatgtttatacacaaattttagtgattttggtaaatgtatgtagggtctgcaaaaaaaaaaaaaaaaaaactcgagggggggcccggtacccaattcagttgtttaaacacaataaagttggaacgggaggggggaaaggat

SEQ ID NO: 29047 - protein, 345 aa, Arabidopsis thaliana
  peptide (1)..(345): Ceres Seq. ID no. 15218678
MAASDEVNLIESRTVVPLNTWVLISNFKVAYNILRRPDGTFNRHLAEYLDRKVTANANPVDGVFSFDVLIDRRINLLSRVYRPAYADQEQPPSILDLEKPVDGDIVPVILFFHGGSFAHSSANSAIYDTLCRRLVGLCKCVVVSVNYRRAPENPYPCAYDDGWIALNWVNSRSWLKSKKDSKVHIFLAGDSSGGNIAHNVALRAGESGIDVLGNILLNPMFGGNERTESEKSLDGKYFVTVRDRDWYWKAFLPEGEDREHPACNPFSPRGKSLEGVSFPKSLVVVAGLDLIRDWQLAYAEGLKKAGQEVKLMHLEKATVGFYLLPNNNHFHNVMDEISAFVNAEC

SEQ ID NO: 29048 - DNA, 2322 bp, Arabidopsis thaliana
  misc_feature (1)..(2322): Ceres Seq. ID no. 12385531
  misc_feature (1)..(2322): Ortholog of  Ceres SEQ ID NO 13590691 as cited in SEQ ID NO 66290
gtttttcccattaccgttctctgctccattgggttctttcctcttttctcccagattcatcaatccctcctgctaccgcgagagagtaacaactcaccggacgtttcaaatccatcctccgataactatattcgtttcgttagatctagatctgagcgtcggtgagagattttctggatctgtgatacgttccaggaaacatggcgacgatgaaaagtttgataggtctgataaacaaaatccagagggcgtgtactgtcctcggagatcatggcggtgaaggaatgtcgctttgggaagctctcccaaccgtcgctgtcgttggtggccagagttccggaaaatcttcagttctagaaagtgttgtgggaagagattttctgcctcgtggatctggtatcgttacaaggaggccattggtgttgcaacttcataagactgaagacgggacaactgagtacgctgagtttcttcatgctcctaagaagagatttgctgattttgctgctgtgcggaaagaaattgaggatgaaactgatcgtattactgggaagtcaaaacaaatctcaaacattccaattcagctgagcatatattctcctaatgttgttaatctgacgctcatagatcttccgggtttgaccaaggtcgctgtagatggacaaccggaaagtattgtccaagacattgaaaatatggtccggtcttatgttgaaaagccaaattgcatcatattggctatttctccagcaaatcaagatattgctacctcagatgctataaaacttgctagagaagttgatcctacaggcgaaaggacttttggtgttgcaaccaagcttgatatcatggataaaggaacagattgtctagatgttcttgagggaaggtcataccgtttgcaacatccctgggttggaattgtgaatcgttcacaagctgatattaataagagagtcgatatgattgctgcacgtagaaaagagcaagaatattttgaaacaagccctgaatacgggcacttagccagtagaatgggatcagaatatctagcaaaactcttgtctcagcacttagagactgttatcaggcagaaaatccccagtattgttgctttgatcaacaaaagcatcgatgagataaatgcagaacttgataggattgggagacccattgcagtagattcaggagcccaactttacacaattttggaactctgccgggcatttgatcgtgtctttaaggagcacttggatggaggacgacctggtggagaccgaatttatggagttttcgaccatcaattaccagcagccttaaagaaacttccctttgatcgacatctgtctaccaaaaatgttcagaaggttgtttcagaagcagatggttatcagccgcatcttattgctcctgaacaaggatacagaaggctcattgatggatccataagctatttcaaaggaccagctgaagccactgtcgatgcagtgcatttcgtattgaaggagctggtcagaaagtcaatttcagaaacagaggaactgaagcgtttcccgactctagcaagcgatatagcagctgctgcaaatgaagctcttgaaagattcagagacgaaagcaggaaaacggttttgcgtctggtggatatggaatctagctacctcacggttgagttcttcaggaaactccatcttgaacccgagaaagagaaaccaaacccaaggaatgccccagcaccaaacgcagacccctactccgataatcacttcagaaagatcggatccaacgtgagtgcatacataaacatggtctgcgacacattgagaaactctcttcccaaagctgtcgtttactgccaagttagagaagctaagagatcgcttctcaacttcttctacgctcaagttggcaggaaagagaaggagaagctgggtgctatgttggacgaagacccacagctgatggaacgaagaggaaccttagctaaacggctagagctttacaaacaagctagagacgacatcgatgcagtggcttggaagtaagggggtttgctaagacatattctttatattgttaatttctttgttcgtgtgggcacactgcattataatagatatgtttggagttctaacttccagtctacacaaacatacacgcgactactcatgttttcttgggtcgctaatttctatcacaactttcccacttttttttggtgtgtatcttcgattcttgaatactggtttttagaacagttaagacatattttgaagtcgcactctttacattagacaaaaaggaagctaatctttgattttt

SEQ ID NO: 29049 - protein, 614 aa, Arabidopsis thaliana
  peptide (1)..(614): Ceres Seq. ID no. 12385532
MATMKSLIGLINKIQRACTVLGDHGGEGMSLWEALPTVAVVGGQSSGKSSVLESVVGRDFLPRGSGIVTRRPLVLQLHKTEDGTTEYAEFLHAPKKRFADFAAVRKEIEDETDRITGKSKQISNIPIQLSIYSPNVVNLTLIDLPGLTKVAVDGQPESIVQDIENMVRSYVEKPNCIILAISPANQDIATSDAIKLAREVDPTGERTFGVATKLDIMDKGTDCLDVLEGRSYRLQHPWVGIVNRSQADINKRVDMIAARRKEQEYFETSPEYGHLASRMGSEYLAKLLSQHLETVIRQKIPSIVALINKSIDEINAELDRIGRPIAVDSGAQLYTILELCRAFDRVFKEHLDGGRPGGDRIYGVFDHQLPAALKKLPFDRHLSTKNVQKVVSEADGYQPHLIAPEQGYRRLIDGSISYFKGPAEATVDAVHFVLKELVRKSISETEELKRFPTLASDIAAAANEALERFRDESRKTVLRLVDMESSYLTVEFFRKLHLEPEKEKPNPRNAPAPNADPYSDNHFRKIGSNVSAYINMVCDTLRNSLPKAVVYCQVREAKRSLLNFFYAQVGRKEKEKLGAMLDEDPQLMERRGTLAKRLELYKQARDDIDAVAWK

SEQ ID NO: 29050 - protein, 611 aa, Arabidopsis thaliana
  peptide (1)..(611): Ceres Seq. ID no. 12385533
MKSLIGLINKIQRACTVLGDHGGEGMSLWEALPTVAVVGGQSSGKSSVLESVVGRDFLPRGSGIVTRRPLVLQLHKTEDGTTEYAEFLHAPKKRFADFAAVRKEIEDETDRITGKSKQISNIPIQLSIYSPNVVNLTLIDLPGLTKVAVDGQPESIVQDIENMVRSYVEKPNCIILAISPANQDIATSDAIKLAREVDPTGERTFGVATKLDIMDKGTDCLDVLEGRSYRLQHPWVGIVNRSQADINKRVDMIAARRKEQEYFETSPEYGHLASRMGSEYLAKLLSQHLETVIRQKIPSIVALINKSIDEINAELDRIGRPIAVDSGAQLYTILELCRAFDRVFKEHLDGGRPGGDRIYGVFDHQLPAALKKLPFDRHLSTKNVQKVVSEADGYQPHLIAPEQGYRRLIDGSISYFKGPAEATVDAVHFVLKELVRKSISETEELKRFPTLASDIAAAANEALERFRDESRKTVLRLVDMESSYLTVEFFRKLHLEPEKEKPNPRNAPAPNADPYSDNHFRKIGSNVSAYINMVCDTLRNSLPKAVVYCQVREAKRSLLNFFYAQVGRKEKEKLGAMLDEDPQLMERRGTLAKRLELYKQARDDIDAVAWK

SEQ ID NO: 29051 - protein, 586 aa, Arabidopsis thaliana
  peptide (1)..(586): Ceres Seq. ID no. 12385534
MSLWEALPTVAVVGGQSSGKSSVLESVVGRDFLPRGSGIVTRRPLVLQLHKTEDGTTEYAEFLHAPKKRFADFAAVRKEIEDETDRITGKSKQISNIPIQLSIYSPNVVNLTLIDLPGLTKVAVDGQPESIVQDIENMVRSYVEKPNCIILAISPANQDIATSDAIKLAREVDPTGERTFGVATKLDIMDKGTDCLDVLEGRSYRLQHPWVGIVNRSQADINKRVDMIAARRKEQEYFETSPEYGHLASRMGSEYLAKLLSQHLETVIRQKIPSIVALINKSIDEINAELDRIGRPIAVDSGAQLYTILELCRAFDRVFKEHLDGGRPGGDRIYGVFDHQLPAALKKLPFDRHLSTKNVQKVVSEADGYQPHLIAPEQGYRRLIDGSISYFKGPAEATVDAVHFVLKELVRKSISETEELKRFPTLASDIAAAANEALERFRDESRKTVLRLVDMESSYLTVEFFRKLHLEPEKEKPNPRNAPAPNADPYSDNHFRKIGSNVSAYINMVCDTLRNSLPKAVVYCQVREAKRSLLNFFYAQVGRKEKEKLGAMLDEDPQLMERRGTLAKRLELYKQARDDIDAVAWK

SEQ ID NO: 29052 - DNA, 1400 bp, Arabidopsis thaliana
  misc_feature (1)..(1400): Ceres Seq. ID no. 12423119
  misc_feature (1)..(1400): Ortholog of  Ceres SEQ ID NO 13598368 as cited in SEQ ID NO 62140
aagaacaagaagaaaaaggtttgtgaaaaaaaaacaaaggcaaacatggtggagggcataccaaagagatggaaggtgctaagtggccaaaacaaatggaaaggcctgcttgatccacttgacccggatcttcgccgctacatcattcactacggcgagatgtctcaggttggttacgatgcctttaactgggaccgtaagtccagatacgccggtgattgttattactccaagaaccgactgtttgctcgaaccggcttccttaaagccaaccctttcaggtacaaagtgactaagtacatctacgcaacagcttccataaagttaccaatctctttcatcgtaaagtctttgtcaaaggatgcatctcacgtgcagactaactggatgggttacattgcggtagctacagaccagggaaaagcgatgttagggaggagagacattgttgttgcatggagaggaactctacagccatatgaatgggctaatgatttcgattttccgcttgagccagctatctcggttttcccagtaactgaccccaaagataaccctcgtattggaagtggctggctcgacatctataccgcttctgattctcgctcaccttatgacacgactagtgcacaagaacaggtacaaggagagctcaagaggttgctagaactttacaaggatgaagaaataagcatcaccttcacaggccatagcttgggcgcagttatgtcagttctatcagctgcagatcttgtctatggcaaaaagaataatatcaatataaatcttcaaaaaaagcaagttcctatcacagtttttgctttcgggagtcctcggattggagaccataacttcaaaaacgtagtcgactcactccaaccactaaacattctaagaatagtaaatgttccagatgtcgcaccacattatccactcttactgtactcagaaattggcgaggtgttagagatcaatactttgaactcaacatacctgaaacggtctctgaacttcaggaactaccataacctggagatatacctgcacggcatggcagggatgcaagatacagacggggtattcaagctggagattggccgggatatttcgttggtcaataaaggattggatgctctaaaggacgagtacttagtgccaagtacctggaggtgtctggcaaacaaagggatgcttcaaatggatgatgggacatggaagctggatgtccacaggagagatcatgatgatgatgttgatgctgatgacaatgacgactcctcaactagtaaccaactacaagagctaaatacagattagttacaaaaacttatataagattctgcacaatatgtttgtacacaaaaaaaaattcatttagaagaacaaagaatctgggaacc

SEQ ID NO: 29053 - protein, 438 aa, Arabidopsis thaliana
  peptide (1)..(438): Ceres Seq. ID no. 12423120
KNKKKKVCEKKTKANMVEGIPKRWKVLSGQNKWKGLLDPLDPDLRRYIIHYGEMSQVGYDAFNWDRKSRYAGDCYYSKNRLFARTGFLKANPFRYKVTKYIYATASIKLPISFIVKSLSKDASHVQTNWMGYIAVATDQGKAMLGRRDIVVAWRGTLQPYEWANDFDFPLEPAISVFPVTDPKDNPRIGSGWLDIYTASDSRSPYDTTSAQEQVQGELKRLLELYKDEEISITFTGHSLGAVMSVLSAADLVYGKKNNININLQKKQVPITVFAFGSPRIGDHNFKNVVDSLQPLNILRIVNVPDVAPHYPLLLYSEIGEVLEINTLNSTYLKRSLNFRNYHNLEIYLHGMAGMQDTDGVFKLEIGRDISLVNKGLDALKDEYLVPSTWRCLANKGMLQMDDGTWKLDVHRRDHDDDVDADDNDDSSTSNQLQELNTD

SEQ ID NO: 29054 - protein, 423 aa, Arabidopsis thaliana
  peptide (1)..(423): Ceres Seq. ID no. 12423121
MVEGIPKRWKVLSGQNKWKGLLDPLDPDLRRYIIHYGEMSQVGYDAFNWDRKSRYAGDCYYSKNRLFARTGFLKANPFRYKVTKYIYATASIKLPISFIVKSLSKDASHVQTNWMGYIAVATDQGKAMLGRRDIVVAWRGTLQPYEWANDFDFPLEPAISVFPVTDPKDNPRIGSGWLDIYTASDSRSPYDTTSAQEQVQGELKRLLELYKDEEISITFTGHSLGAVMSVLSAADLVYGKKNNININLQKKQVPITVFAFGSPRIGDHNFKNVVDSLQPLNILRIVNVPDVAPHYPLLLYSEIGEVLEINTLNSTYLKRSLNFRNYHNLEIYLHGMAGMQDTDGVFKLEIGRDISLVNKGLDALKDEYLVPSTWRCLANKGMLQMDDGTWKLDVHRRDHDDDVDADDNDDSSTSNQLQELNTD

SEQ ID NO: 29055 - protein, 385 aa, Arabidopsis thaliana
  peptide (1)..(385): Ceres Seq. ID no. 12423122
MSQVGYDAFNWDRKSRYAGDCYYSKNRLFARTGFLKANPFRYKVTKYIYATASIKLPISFIVKSLSKDASHVQTNWMGYIAVATDQGKAMLGRRDIVVAWRGTLQPYEWANDFDFPLEPAISVFPVTDPKDNPRIGSGWLDIYTASDSRSPYDTTSAQEQVQGELKRLLELYKDEEISITFTGHSLGAVMSVLSAADLVYGKKNNININLQKKQVPITVFAFGSPRIGDHNFKNVVDSLQPLNILRIVNVPDVAPHYPLLLYSEIGEVLEINTLNSTYLKRSLNFRNYHNLEIYLHGMAGMQDTDGVFKLEIGRDISLVNKGLDALKDEYLVPSTWRCLANKGMLQMDDGTWKLDVHRRDHDDDVDADDNDDSSTSNQLQELNTD

SEQ ID NO: 29056 - DNA, 1133 bp, Arabidopsis thaliana
  misc_feature (1)..(1133): Ceres Seq. ID no. 12336045
  misc_feature (1)..(1133): Ortholog of  Ceres SEQ ID NO 14315989 as cited in SEQ ID NO 57571
atgtttcttctccttctatcttctccctccctctcaaattttaatctccagttttttttttttttttttttgactcagagatcaacaaaacctagtttttgaatttgtttcaatttttctcaaattactctgtttttgagatctctgttttcgttaaattatgtctttgaggtcagaatcttcaacggcagagaagataacagaggatccggtgacgtataagacagcacaaagcagcgtgacgtgcatctaccaagcacatatggttggattctggagaaacgttagggttctatggtctaaaaatctcatgaaccattccttaaccgtgatggtcactagcgtacaaggcgatatgaattactgttgcaaggttgatcttaagccatggcacttttggtacaagaaaggttacaaatcgtttgaggtcgaaggaaaccaagtagatgtctattgggattttaggtctgctaaattcaacggcgggcctgagccgagctccgatttttacgtggcgcttgtatccgaggaagaggttgttttgttgttgggtgatcacaagaagaaagcttttaagagaactaaatctagaccttccttggttgacgctgccttgttctacaagaaagagaatgtgtttgggaagaagattttttcgactagggctaagttccatgataggaagagagagcatgagatcgtagtggagagctctaccggggcgaaagaaccagagatgtggattagcgtagatgggatcgttttggttcaggtgagaaatctgcagtggaaatttagagggaaccagactgttttggttgataaagaacctgttcaagtgttttgggatgtgtatgattggttgttcagcacccccggtacggggcacggcttgttcatctttaaaccggagagcggtgaaagcgaaacgagcaacgaaaccaagaattgcagtgcttcttcttcttcttcttcgtcggagttttgtctctttctttatgcttggaaattggagtaagtctaaatgttttcaatccaaaagcttgcattgatttttttgcctgactaaattcacattcaaaaatcaatcttagcgtgtgaccgactcttgataattttgagttgtcaaattc

SEQ ID NO: 29057 - protein, 285 aa, Arabidopsis thaliana
  peptide (1)..(285): Ceres Seq. ID no. 12336046
MSLRSESSTAEKITEDPVTYKTAQSSVTCIYQAHMVGFWRNVRVLWSKNLMNHSLTVMVTSVQGDMNYCCKVDLKPWHFWYKKGYKSFEVEGNQVDVYWDFRSAKFNGGPEPSSDFYVALVSEEEVVLLLGDHKKKAFKRTKSRPSLVDAALFYKKENVFGKKIFSTRAKFHDRKREHEIVVESSTGAKEPEMWISVDGIVLVQVRNLQWKFRGNQTVLVDKEPVQVFWDVYDWLFSTPGTGHGLFIFKPESGESETSNETKNCSASSSSSSSEFCLFLYAWKLE

SEQ ID NO: 29058 - protein, 251 aa, Arabidopsis thaliana
  peptide (1)..(251): Ceres Seq. ID no. 12336047
MVGFWRNVRVLWSKNLMNHSLTVMVTSVQGDMNYCCKVDLKPWHFWYKKGYKSFEVEGNQVDVYWDFRSAKFNGGPEPSSDFYVALVSEEEVVLLLGDHKKKAFKRTKSRPSLVDAALFYKKENVFGKKIFSTRAKFHDRKREHEIVVESSTGAKEPEMWISVDGIVLVQVRNLQWKFRGNQTVLVDKEPVQVFWDVYDWLFSTPGTGHGLFIFKPESGESETSNETKNCSASSSSSSSEFCLFLYAWKLE

SEQ ID NO: 29059 - protein, 235 aa, Arabidopsis thaliana
  peptide (1)..(235): Ceres Seq. ID no. 12336048
MNHSLTVMVTSVQGDMNYCCKVDLKPWHFWYKKGYKSFEVEGNQVDVYWDFRSAKFNGGPEPSSDFYVALVSEEEVVLLLGDHKKKAFKRTKSRPSLVDAALFYKKENVFGKKIFSTRAKFHDRKREHEIVVESSTGAKEPEMWISVDGIVLVQVRNLQWKFRGNQTVLVDKEPVQVFWDVYDWLFSTPGTGHGLFIFKPESGESETSNETKNCSASSSSSSSEFCLFLYAWKLE

SEQ ID NO: 29060 - DNA, 1106 bp, Arabidopsis thaliana
  misc_feature (1)..(1106): Ceres Seq. ID no. 12338629
  misc_feature (1)..(1106): Ortholog of  Ceres SEQ ID NO 12609869 as cited in SEQ ID NO 52065
  misc_feature (1)..(1106): Ortholog of  Ceres SEQ ID NO 14301506 as cited in SEQ ID NO 61159
  misc_feature (1)..(1106): Ortholog of  Ceres SEQ ID NO 13597124 as cited in SEQ ID NO 64173
  misc_feature (1)..(1106): Ortholog of  Ceres SEQ ID NO 12780602 as cited in SEQ ID NO 65695
gtaattcttctatcttgatatcttcaccgcctgccgatctctctcaatctccgatcaaccatgagcaaaggtccaggactcttcaccgatatcggcaagaaagccaaagatctgttgacgagagactacaattccgatcagaagttcagtatctccacttacagtgcctccggcgtggcccttacgtctactgctctgaagaaaggaggagttcatgctgctgatgttgccacccaatacaagtacaagaatgctttgtttgatgttaaaatcgacactgattctagtgttttgacaacagtcacacttaccgagatcctcccatcaacaaaagccattgcctccttcaaagtccctgattataattccgccaagctcgaggtgcaatacttccacgaccacgcaacagttaccgctgctgcagctttgaaacaaaacccactaattgacataacagctactcttggttcgccagtcatctcatttggtgctgaagctggatatgacacaacctccaaaactttcaccaagtacaatgccgggatcagtgtgacaaaaccagatgcttgcctctccataatattgggagacaaaggagactcactcaaagcatcataccttcatcactttgatgaatttaagagaaccgcagcagttggtgaggtttacaggaagttctcgacaaatgaaaacacgataacggttggtggattgtatgcgattgatcattcgactgcagtgaaagctaagctcaacaaccatggcacacttggtgctcttctgcagcacgaggtcctgcccagatcactagtgactgtttccagtgagattgacactaaggctttagaaaagcatccaaggtttggtctctctcttgctctcaaaccttgagaacacacactcacatcagacctgcttgagtcttcctacttttctcgtatgctctcattgttgatttcctctacggcaggacgtgagagttagcgtttttttcctccttttttccttacgtttaattggaatcaataaatagttccgcagtgaaattgacggataattctttttttggatatgctcggttttggttttttttttatctttctttt

SEQ ID NO: 29061 - protein, 276 aa, Arabidopsis thaliana
  peptide (1)..(276): Ceres Seq. ID no. 12338630
MSKGPGLFTDIGKKAKDLLTRDYNSDQKFSISTYSASGVALTSTALKKGGVHAADVATQYKYKNALFDVKIDTDSSVLTTVTLTEILPSTKAIASFKVPDYNSAKLEVQYFHDHATVTAAAALKQNPLIDITATLGSPVISFGAEAGYDTTSKTFTKYNAGISVTKPDACLSIILGDKGDSLKASYLHHFDEFKRTAAVGEVYRKFSTNENTITVGGLYAIDHSTAVKAKLNNHGTLGALLQHEVLPRSLVTVSSEIDTKALEKHPRFGLSLALKP

SEQ ID NO: 29062 - DNA, 1321 bp, Arabidopsis thaliana
  misc_feature (1)..(1321): Ceres Seq. ID no. 12338275
  misc_feature (1)..(1321): Ortholog of  Ceres SEQ ID NO 13582619 as cited in SEQ ID NO 56520
  misc_feature (1)..(1321): Ortholog of  Ceres SEQ ID NO 14314632 as cited in SEQ ID NO 59923
  misc_feature (1)..(1321): Ortholog of  Ceres SEQ ID NO 13660872 as cited in SEQ ID NO 60830
  misc_feature (1)..(1321): Ortholog of  Ceres SEQ ID NO 12616221 as cited in SEQ ID NO 63291
ctaacttctctgttcatctttttctctctttatttataaatttatctgcatagtactctctgaatctatatcttcaaaaaaaaaaaacgtccaagatcaaatcaagaaacccattaaaaaaaaaaatcaggttttggtttcagttttaagggtttaatgtttcttggggaagaaacgatggagactttttgtgggtttcaaaaggaggaagagcagatggatttacctcctgggttcaggtttcatccaacagatgaagaactcataactcactatctccataagaaggttcttgacaccagcttctcagctaaagctatcggtgaagttgatttaaacaaatcagagccatgggagttaccatggatggcaaaaatgggtgagaaagaatggtattttttctgtgtgagagacagaaagtatcccaccggtttaagaactaaccgagcaactgaagccggttattggaaggcgaccgggaaggataaagagatataccgaggcaaatcacttgttgggatgaagaagacacttgttttctatagaggaagagctcctaaaggtcagaaaaccaactgggtgatgcatgagtacaggcttgaaggaaaattctctgcccataacttgccgaaaaccgcaaagaatgaatgggtgatatgcagggtgttccaaaagagtgctggagggaagaagatcccgatttcgagtctaatccgaatcggttcactcggaaccgactttaacccttcgcttttgccctctttaaccgattcttcgccttacaacgataaaaccaaaacagaaccggtctacgtgccctgcttctccaaccaaacggatcaaaaccaaggaaccacactcaattgcttcagcagccctgttcttaactcgatccaagccgacatttttcacaggattccactctatcaaactcagtccctccaggtttctatgaatctacagagcccggttctcacgcaagaacactcagttctacatgctatgatcgagaacaacagaagacaaagtctcaaaacgatgagtgtctcacaagaaaccggagtttcaactgacatgaacactgatatctcatcggattttgaatttggtaagagacggtttgattctcaagaagatccgtcttcctctactggaccggttgatcttgaacctttctggaattactgaagatgattcaagattctcatgtccattaatttactgtggtgtgttaaagtttgtataggctattgtcatatactctcatatcaacttccactatatattataacaatttaaagaaacttaaaaatatgatttg

SEQ ID NO: 29063 - protein, 343 aa, Arabidopsis thaliana
  peptide (1)..(343): Ceres Seq. ID no. 12338276
MFLGEETMETFCGFQKEEEQMDLPPGFRFHPTDEELITHYLHKKVLDTSFSAKAIGEVDLNKSEPWELPWMAKMGEKEWYFFCVRDRKYPTGLRTNRATEAGYWKATGKDKEIYRGKSLVGMKKTLVFYRGRAPKGQKTNWVMHEYRLEGKFSAHNLPKTAKNEWVICRVFQKSAGGKKIPISSLIRIGSLGTDFNPSLLPSLTDSSPYNDKTKTEPVYVPCFSNQTDQNQGTTLNCFSSPVLNSIQADIFHRIPLYQTQSLQVSMNLQSPVLTQEHSVLHAMIENNRRQSLKTMSVSQETGVSTDMNTDISSDFEFGKRRFDSQEDPSSSTGPVDLEPFWNY

SEQ ID NO: 29064 - protein, 336 aa, Arabidopsis thaliana
  peptide (1)..(336): Ceres Seq. ID no. 12338277
METFCGFQKEEEQMDLPPGFRFHPTDEELITHYLHKKVLDTSFSAKAIGEVDLNKSEPWELPWMAKMGEKEWYFFCVRDRKYPTGLRTNRATEAGYWKATGKDKEIYRGKSLVGMKKTLVFYRGRAPKGQKTNWVMHEYRLEGKFSAHNLPKTAKNEWVICRVFQKSAGGKKIPISSLIRIGSLGTDFNPSLLPSLTDSSPYNDKTKTEPVYVPCFSNQTDQNQGTTLNCFSSPVLNSIQADIFHRIPLYQTQSLQVSMNLQSPVLTQEHSVLHAMIENNRRQSLKTMSVSQETGVSTDMNTDISSDFEFGKRRFDSQEDPSSSTGPVDLEPFWNY

SEQ ID NO: 29065 - protein, 323 aa, Arabidopsis thaliana
  peptide (1)..(323): Ceres Seq. ID no. 12338278
MDLPPGFRFHPTDEELITHYLHKKVLDTSFSAKAIGEVDLNKSEPWELPWMAKMGEKEWYFFCVRDRKYPTGLRTNRATEAGYWKATGKDKEIYRGKSLVGMKKTLVFYRGRAPKGQKTNWVMHEYRLEGKFSAHNLPKTAKNEWVICRVFQKSAGGKKIPISSLIRIGSLGTDFNPSLLPSLTDSSPYNDKTKTEPVYVPCFSNQTDQNQGTTLNCFSSPVLNSIQADIFHRIPLYQTQSLQVSMNLQSPVLTQEHSVLHAMIENNRRQSLKTMSVSQETGVSTDMNTDISSDFEFGKRRFDSQEDPSSSTGPVDLEPFWNY

SEQ ID NO: 29066 - DNA, 1227 bp, Arabidopsis thaliana
  misc_feature (1)..(1227): Ceres Seq. ID no. 12338983
  misc_feature (1)..(1227): Ortholog of  Ceres SEQ ID NO 12636774 as cited in SEQ ID NO 372
  misc_feature (1)..(1227): Ortholog of  Ceres SEQ ID NO 13582350 as cited in SEQ ID NO 56734
  misc_feature (1)..(1227): Ortholog of  Ceres SEQ ID NO 12476493 as cited in SEQ ID NO 58163
  misc_feature (1)..(1227): Ortholog of  Ceres SEQ ID NO 12582113 as cited in SEQ ID NO 58349
  misc_feature (1)..(1227): Ortholog of  Ceres SEQ ID NO 12615466 as cited in SEQ ID NO 62761
  misc_feature (1)..(1227): Ortholog of  Ceres SEQ ID NO 14314080 as cited in SEQ ID NO 63105
  misc_feature (1)..(1227): Ortholog of  Ceres SEQ ID NO 13597295 as cited in SEQ ID NO 63743
  misc_feature (1)..(1227): Ortholog of  Ceres SEQ ID NO 12617090 as cited in SEQ ID NO 64005
  misc_feature (1)..(1227): Ortholog of  Ceres SEQ ID NO 13597439 as cited in SEQ ID NO 64081
  misc_feature (1)..(1227): Ortholog of  Ceres SEQ ID NO 13597233 as cited in SEQ ID NO 64370
  misc_feature (1)..(1227): Ortholog of  Ceres SEQ ID NO 13598327 as cited in SEQ ID NO 68040
  misc_feature (1)..(1227): Ortholog of  Ceres SEQ ID NO 13599438 as cited in SEQ ID NO 0
atcagattcaagatcagtagtaacaatggagaagccaaagttcaagactgtccaagaggtggttgcagcaggcgaaggaataccggagagatacctccaaccaccagccgtcgacgacaatggtcaacatcttaacgctgccgtgccggtgatggatattccggccatcgatttgagtcttctcctctctccttctgatgacggtcgagaagagttgagtaaacttcactcggcactctctacatggggagttgttcaggtgataaatcatggaattacaaaagcgttgctcgacaagatttacaagctaaccaaggagttctgtgcacttccgtccgaagagaaacaaaagtacgcgagagagattggtagtatccaaggatatggtaacgatatgattctgtgggatgatcaagttcttgattggatcgaccgtttgtatatcactacttaccctgaagatcagagacaacttaagttctggcctgatgtccctgtcggattcagggaaactttacatgaatacacaatgaagcaacatctagtgtttaatcaagtctttaaagcgatggctatatcgttggaattggaagagaattgctttctagacatgtgtggagaaaatgctacgatggatacaagattcaacatgtatcctccatgtccgaggccggacaaggttattggcgttagaccgcacgctgataagtcggctttcactcttctcttgcctgacaaaaatgtcgaagggcttcagttccttaaagatgggaagtggtataaagctccagttgtcgcttcagatacaattctgatcaatgttggagatcagatggagataatgagcaatgggatatacaagagcccggttcatagagtggtgactaatacagaaaaagaaaggatatctgtggcaacgttttgcattccaggtgcagacaaagagattcagcctgttgatgggcttgtgtctgaggcaagaccaagattgtataagccagtaaaaaactatgtggacctcttaaacaagtactatatacagggtcaaagaccaattgcagcgtcattgatctgatcatatttttcaagtctcctttattggtttcacaaatgaatctgtttctttcgttacttgatcctttataagaataataataatgttgctttgtttgttggaatgtgagaatgtaagactgcattgtgttatttgtgttacaattctgagac

SEQ ID NO: 29067 - protein, 357 aa, Arabidopsis thaliana
  peptide (1)..(357): Ceres Seq. ID no. 12338984
SDSRSVVTMEKPKFKTVQEVVAAGEGIPERYLQPPAVDDNGQHLNAAVPVMDIPAIDLSLLLSPSDDGREELSKLHSALSTWGVVQVINHGITKALLDKIYKLTKEFCALPSEEKQKYAREIGSIQGYGNDMILWDDQVLDWIDRLYITTYPEDQRQLKFWPDVPVGFRETLHEYTMKQHLVFNQVFKAMAISLELEENCFLDMCGENATMDTRFNMYPPCPRPDKVIGVRPHADKSAFTLLLPDKNVEGLQFLKDGKWYKAPVVASDTILINVGDQMEIMSNGIYKSPVHRVVTNTEKERISVATFCIPGADKEIQPVDGLVSEARPRLYKPVKNYVDLLNKYYIQGQRPIAASLI

SEQ ID NO: 29068 - protein, 349 aa, Arabidopsis thaliana
  peptide (1)..(349): Ceres Seq. ID no. 12338985
MEKPKFKTVQEVVAAGEGIPERYLQPPAVDDNGQHLNAAVPVMDIPAIDLSLLLSPSDDGREELSKLHSALSTWGVVQVINHGITKALLDKIYKLTKEFCALPSEEKQKYAREIGSIQGYGNDMILWDDQVLDWIDRLYITTYPEDQRQLKFWPDVPVGFRETLHEYTMKQHLVFNQVFKAMAISLELEENCFLDMCGENATMDTRFNMYPPCPRPDKVIGVRPHADKSAFTLLLPDKNVEGLQFLKDGKWYKAPVVASDTILINVGDQMEIMSNGIYKSPVHRVVTNTEKERISVATFCIPGADKEIQPVDGLVSEARPRLYKPVKNYVDLLNKYYIQGQRPIAASLI

SEQ ID NO: 29069 - protein, 307 aa, Arabidopsis thaliana
  peptide (1)..(307): Ceres Seq. ID no. 12338987
MDIPAIDLSLLLSPSDDGREELSKLHSALSTWGVVQVINHGITKALLDKIYKLTKEFCALPSEEKQKYAREIGSIQGYGNDMILWDDQVLDWIDRLYITTYPEDQRQLKFWPDVPVGFRETLHEYTMKQHLVFNQVFKAMAISLELEENCFLDMCGENATMDTRFNMYPPCPRPDKVIGVRPHADKSAFTLLLPDKNVEGLQFLKDGKWYKAPVVASDTILINVGDQMEIMSNGIYKSPVHRVVTNTEKERISVATFCIPGADKEIQPVDGLVSEARPRLYKPVKNYVDLLNKYYIQGQRPIAASLI

SEQ ID NO: 29070 - DNA, 1976 bp, Arabidopsis thaliana
  misc_feature (1)..(1976): Ceres Seq. ID no. 13497375
  misc_feature (1)..(1976): Ortholog of  Ceres SEQ ID NO 14310841 as cited in SEQ ID NO 53666
  misc_feature (1)..(1976): Ortholog of  Ceres SEQ ID NO 15178736 as cited in SEQ ID NO 56439
  misc_feature (1)..(1976): Ortholog of  Ceres SEQ ID NO 14308493 as cited in SEQ ID NO 60320
ctctcctctcattttctactcttcttcaaaagcacactcaatatttcgagatcctctcggcttgttcgttcttcgtgaacgatcccatctattgtttctcgctagtctcagattcgactaacttggatatctccgatactgaagaagcctccttcttctttttccgctcttcccgatgccgatcgataagatcttcaaagatgatgctagtgaagagaagggagaacgtgcgaggatggcatcatttgttggtgcaatggctatcagtgatctggttaagtctactttagggccaaagggcatggataaaatcttgcaatctactggtagaggtcatgcggtcactgttactaacgatggtgctactattctcaagtcacttcacatagacaaccctgcagctaaagttcttgttgacatctcgaaagttcaagatgatgaggttggtgatggaactacctctgttgttgtcttggccggcgagcttctgagggaagcagaaaagcttgtggcttctaagattcaccctatgaccatcatagcaggttacagaatggcttcggaatgtgctcgtaatgctttactgaaaagagtcattgataacaaggacaatgcagagaagtttaggtcagacttgttgaagattgcgatgactactttatgttccaaaattctctcacaggacaaggaacattttgcagaaatggccgtggatgctgttttcaggctaaagggaagcacaaacttggaagctattcagatcatcaaaaaacctggagggtctctgaaggattcgtttttggatgaagggtttattcttgacaagaaaataggaattgggcagcctaagcgcatagagaatgcaaatatcttagtagctaatactgctatggataccgataaagtgaagatttacggtgcacgtgtccgtgtggattccatgaccaaggttgctgagattgaaggggctgagaaggaaaaaatgaaagacaaggtgaagaagatcataggccacggaatcaactgctttgttaacaggcagttgatctacaatttccctgaggaactctttgctgatgctggtatacttgctattgagcatgctgactttgagggaatagagcgtcttggtttggttactggtggtgaaattgcttcgacctttgacaacccagagtctgttaagcttgggcattgcaagcttatagaagaaatcatgattggtgaagacaagttgattcatttctctggttgtgaaatgggccaggcttgttcaattgtcctaagaggggccagtcaccatgtcctagatgaggctgaaagatcactccatgatgccttatgtgtactctctcaaacagtgaatgatactagagttttgcttggaggtggatggccagagatggtgatggcaaaggaagtagatgagcttgcaaggaaaactgctggcaaaaaatctcatgccattgaagctttctcacgtgctctagttgctataccgacaacaatcgctgacaacgctggtttagacagtgccgaattggttgctcagcttcgtgcagagcaccacactgaagggtgtaacgctgggatcgacgtcatcactggagctgtaggagatatggaagagagaggaatctatgaagcattcaaagtgaagcaagcggttctgctttcagccacagaagcatctgagatgatattgcgagtggatgaaatcattacatgtgctcctaggaggagagaagacaggatgtgaaaaactcaacacaaacacatgaacgtggtgggagcctagagattccatgattgtgttttcgatttggatcagaatacaacttttctaatatgtttaatgttttgctcctccttagaactcatctttttgttttgtttccttttaatcttgttttgagtttgaatttagacgtttgaaaaaagtgttagctccaaagtttttaatttgtttggttgcg

SEQ ID NO: 29071 - protein, 527 aa, Arabidopsis thaliana
  peptide (1)..(527): Ceres Seq. ID no. 13497376
MPIDKIFKDDASEEKGERARMASFVGAMAISDLVKSTLGPKGMDKILQSTGRGHAVTVTNDGATILKSLHIDNPAAKVLVDISKVQDDEVGDGTTSVVVLAGELLREAEKLVASKIHPMTIIAGYRMASECARNALLKRVIDNKDNAEKFRSDLLKIAMTTLCSKILSQDKEHFAEMAVDAVFRLKGSTNLEAIQIIKKPGGSLKDSFLDEGFILDKKIGIGQPKRIENANILVANTAMDTDKVKIYGARVRVDSMTKVAEIEGAEKEKMKDKVKKIIGHGINCFVNRQLIYNFPEELFADAGILAIEHADFEGIERLGLVTGGEIASTFDNPESVKLGHCKLIEEIMIGEDKLIHFSGCEMGQACSIVLRGASHHVLDEAERSLHDALCVLSQTVNDTRVLLGGGWPEMVMAKEVDELARKTAGKKSHAIEAFSRALVAIPTTIADNAGLDSAELVAQLRAEHHTEGCNAGIDVITGAVGDMEERGIYEAFKVKQAVLLSATEASEMILRVDEIITCAPRRREDRM

SEQ ID NO: 29072 - protein, 507 aa, Arabidopsis thaliana
  peptide (1)..(507): Ceres Seq. ID no. 13497377
MASFVGAMAISDLVKSTLGPKGMDKILQSTGRGHAVTVTNDGATILKSLHIDNPAAKVLVDISKVQDDEVGDGTTSVVVLAGELLREAEKLVASKIHPMTIIAGYRMASECARNALLKRVIDNKDNAEKFRSDLLKIAMTTLCSKILSQDKEHFAEMAVDAVFRLKGSTNLEAIQIIKKPGGSLKDSFLDEGFILDKKIGIGQPKRIENANILVANTAMDTDKVKIYGARVRVDSMTKVAEIEGAEKEKMKDKVKKIIGHGINCFVNRQLIYNFPEELFADAGILAIEHADFEGIERLGLVTGGEIASTFDNPESVKLGHCKLIEEIMIGEDKLIHFSGCEMGQACSIVLRGASHHVLDEAERSLHDALCVLSQTVNDTRVLLGGGWPEMVMAKEVDELARKTAGKKSHAIEAFSRALVAIPTTIADNAGLDSAELVAQLRAEHHTEGCNAGIDVITGAVGDMEERGIYEAFKVKQAVLLSATEASEMILRVDEIITCAPRRREDRM

SEQ ID NO: 29073 - protein, 500 aa, Arabidopsis thaliana
  peptide (1)..(500): Ceres Seq. ID no. 13497378
MAISDLVKSTLGPKGMDKILQSTGRGHAVTVTNDGATILKSLHIDNPAAKVLVDISKVQDDEVGDGTTSVVVLAGELLREAEKLVASKIHPMTIIAGYRMASECARNALLKRVIDNKDNAEKFRSDLLKIAMTTLCSKILSQDKEHFAEMAVDAVFRLKGSTNLEAIQIIKKPGGSLKDSFLDEGFILDKKIGIGQPKRIENANILVANTAMDTDKVKIYGARVRVDSMTKVAEIEGAEKEKMKDKVKKIIGHGINCFVNRQLIYNFPEELFADAGILAIEHADFEGIERLGLVTGGEIASTFDNPESVKLGHCKLIEEIMIGEDKLIHFSGCEMGQACSIVLRGASHHVLDEAERSLHDALCVLSQTVNDTRVLLGGGWPEMVMAKEVDELARKTAGKKSHAIEAFSRALVAIPTTIADNAGLDSAELVAQLRAEHHTEGCNAGIDVITGAVGDMEERGIYEAFKVKQAVLLSATEASEMILRVDEIITCAPRRREDRM

SEQ ID NO: 29074 - DNA, 1221 bp, Arabidopsis thaliana
  misc_feature (1)..(1221): Ceres Seq. ID no. 13487581
  misc_feature (1)..(1221): Ortholog of  Ceres SEQ ID NO 14312266 as cited in SEQ ID NO 59225
  misc_feature (1)..(1221): Ortholog of  Ceres SEQ ID NO 13597620 as cited in SEQ ID NO 65383
gtgttaatttgattaattccattacatcttcaaaaccgtacagatctctgtttcggagcagcttcttcacacgctcaagctcaccgatcgattcttccaatgctcttctaattcatctgcaaaactctcagatcactcatgggtttgatttcaaaccctacccgtttgattctcgtcgccaccatcttcttcctcgtttcttcaatctccggtcaggattctgtcgttgagaacaatgagagacaagaatctgaaggatctggtaaagagcttggtcgtcgtggaatggttggtactgaacgaattggagttgatactgttgtagacaatattggtgctcttggtttgaatctagaccttgatgctactgctcctagtgtatttgatgctttgttttcgagtttctcgatgatacttgtcaccgagattggggatgaaacttttataatagcggcattgatggctatgcgacatcctaaagctactgttttatctggtgcactctcagctttgtttgttatgactatactttctactggacttggtaggatagtgccaaacttgatatcgaggaagcacaccaatagtgctgctacagtgctctatgcattttttggtttgcgactactctacattgcttggaggtctactgattcaaagtcaaatcagaagaaagaaatggaggaagttgaagagaagctcgagtcaggtcaagggaagacacccttccgtcgtttattctcaagattttgtaccccaatatttctggagtccttcatcttaacctttctagctgaatggggtgaccgtagccagatcgctacaatagctttggcgactcacaagaacgccataggagtggccattggggcaagtattggacacactgtgtgtacttcactagcagttgttggaggaagcatgctggcttcaaggatctcgcaacgtacggtcgcaactgttggaggcttactcttcctcggcttttcagtctcctcctatttctatcctccattgtagtaaatgtgcttctttcgaaaatgggtgttagagacaatttctaagtaaagtttcaattttttttttgattttaatttaagtttgatattttgtttaatatcaatggccaaaatggccaaaccaaagaatccaacgcctatgcttttacaatttactttcttgaagtgtaacaaatctaattaaataaaattttgcagtatt

SEQ ID NO: 29075 - protein, 293 aa, Arabidopsis thaliana; identical to SEQ ID NO: 25308
  peptide (1)..(293): Ceres Seq. ID no. 13487582

SEQ ID NO: 29076 - protein, 244 aa, Arabidopsis thaliana; identical to SEQ ID NO: 25309
  peptide (1)..(244): Ceres Seq. ID no. 13487583

SEQ ID NO: 29077 - protein, 203 aa, Arabidopsis thaliana; identical to SEQ ID NO: 25310
  peptide (1)..(203): Ceres Seq. ID no. 13487584

SEQ ID NO: 29078 - DNA, 1287 bp, Arabidopsis thaliana
  misc_feature (1)..(1287): Ceres Seq. ID no. 12371833
  misc_feature (1)..(1287): Ortholog of  Ceres SEQ ID NO 14313955 as cited in SEQ ID NO 54407
atcaaaggagcttccttttttcgctctcgtctccgtttacccttttgggatttttccctaaacctttttctctctttgtataatcaaatcctctttatctttcattgtttcgcgtgaattagctctgcaaaggctcttcattcttctcgcttggattcctctgcacaaaagaaaaaagaccatggatgatcttcatggaagaaatggtcgaatgcacattggtgtagcgcaaaatccaatgcatgtgcagtatgaagatcacggtttgcaccatatcgacaatgaaaacggtatgatggatgaccatgctgatggtgggatggatgaaggagtggagacagacattccttctcaccctggaaactcagctgataatcgtggtgaagttgtagaccgtggaattgaaaatggagatcaattgacattgtccttccagggacaagtttatgtttttgaccgtgtctcgcctgagaaggttcaagctgtgcttttgttacttggtggaagggaagtaccacatacactcccaacaaccctaggatcacctcatcagaacaatagggtactgggtctatctggtactcctcaacggcttagcgttccgcagcggttagcttctttgctcaggtttagggagaaacgaaaagggaggaactttgataagactattcgctatacagtcaggaaagaagtagccttgagaatgcagcgtaagaaaggtcagttcacatcggctaaatcaagcaatgatgattctggatccactggatcggattgggggtcaaaccagagctgggccgtagaagggactgagactcagaagccagaggttttatgtcgacactgtggaacaagtgagaagtcaactccaatgatgcgacgtggacctgatgggccaagaacactttgtaatgcgtgtggactgatgtgggcaaacaaggggactcttagagacctatccaaagtccctcctccgcaaacacctcagcatctatctgtgaataagaatgaggacgcaaatcttgaggctgatcaaatgatggaagtaactggtgacattagcaacgcacagtgagaactgagaaaccattggaagcaagaaaggatctcaaacaaaaacagttgttatcatttcatttgatgatggaatcgaatctgagttgtgtttagggtttctctgggttaatctcagtctatgtgggcacattttagtcttctacaaattataagacactcttcacttatttagatctcactcatcagaaaagaaaaaaaaaaactttgccc

SEQ ID NO: 29079 - protein, 297 aa, Arabidopsis thaliana
  peptide (1)..(297): Ceres Seq. ID no. 12371834
MDDLHGRNGRMHIGVAQNPMHVQYEDHGLHHIDNENGMMDDHADGGMDEGVETDIPSHPGNSADNRGEVVDRGIENGDQLTLSFQGQVYVFDRVSPEKVQAVLLLLGGREVPHTLPTTLGSPHQNNRVLGLSGTPQRLSVPQRLASLLRFREKRKGRNFDKTIRYTVRKEVALRMQRKKGQFTSAKSSNDDSGSTGSDWGSNQSWAVEGTETQKPEVLCRHCGTSEKSTPMMRRGPDGPRTLCNACGLMWANKGTLRDLSKVPPPQTPQHLSVNKNEDANLEADQMMEVTGDISNAQ

SEQ ID NO: 29080 - protein, 287 aa, Arabidopsis thaliana
  peptide (1)..(287): Ceres Seq. ID no. 12371835
MHIGVAQNPMHVQYEDHGLHHIDNENGMMDDHADGGMDEGVETDIPSHPGNSADNRGEVVDRGIENGDQLTLSFQGQVYVFDRVSPEKVQAVLLLLGGREVPHTLPTTLGSPHQNNRVLGLSGTPQRLSVPQRLASLLRFREKRKGRNFDKTIRYTVRKEVALRMQRKKGQFTSAKSSNDDSGSTGSDWGSNQSWAVEGTETQKPEVLCRHCGTSEKSTPMMRRGPDGPRTLCNACGLMWANKGTLRDLSKVPPPQTPQHLSVNKNEDANLEADQMMEVTGDISNAQ

SEQ ID NO: 29081 - protein, 278 aa, Arabidopsis thaliana
  peptide (1)..(278): Ceres Seq. ID no. 12371836
MHVQYEDHGLHHIDNENGMMDDHADGGMDEGVETDIPSHPGNSADNRGEVVDRGIENGDQLTLSFQGQVYVFDRVSPEKVQAVLLLLGGREVPHTLPTTLGSPHQNNRVLGLSGTPQRLSVPQRLASLLRFREKRKGRNFDKTIRYTVRKEVALRMQRKKGQFTSAKSSNDDSGSTGSDWGSNQSWAVEGTETQKPEVLCRHCGTSEKSTPMMRRGPDGPRTLCNACGLMWANKGTLRDLSKVPPPQTPQHLSVNKNEDANLEADQMMEVTGDISNAQ

SEQ ID NO: 29082 - DNA, 1529 bp, Arabidopsis thaliana
  misc_feature (1)..(1529): Ceres Seq. ID no. 13645700
  misc_feature (1)..(1529): Ortholog of  Ceres SEQ ID NO 13638402 as cited in SEQ ID NO 60300
  misc_feature (1)..(1529): Ortholog of  Ceres SEQ ID NO 12618349 as cited in SEQ ID NO 64838
aattttcatggcataaagagtgagagagagagagtcatagacaggagacgtttgagattgatgaacagcgaattcgaaacaaatcacatggaagaagagctctctttcgctaccgttaccttctccacttttctccttcattagggttttctctcttatttagctgcgcagctctctctctttcttacggattcacttcttaaaactcgttaatttcttgtgggtttttgtctcttttgcgatctgattccgaaagttgagtgagagtgagagaatcatggaggaaggaagtatgttcagatctctattagcgattcttcagtggtggggtttcaatgttaccgtcatcatcatgaacaaatggatctttcagaaactggattttaagtttccactatcggtttcatgtgttcacttcatatgttcgtcgattggagcttacatcgttatcaaagttctcaagcttaaaccattgattgttgtcgatcctgaagatcgatggaggaggatttttccaatgtctttcgtgttttgtatcaacattgtcttgggaaatgtcagtcttcgttacattccggtttcgtttatgcagacgattaagtctttcactccagctactacagttgtgttacagtggctggtatggaggaaatactttgactggcgtatttgggcgtctctcgtgcctattgttggtggaattcttctgacatctgtgactgaacttagttttaacatgtttggattctgtgctgccctgtttggatgtttagctacttccacaaagaccattctagccgaatctcttcttcatggttacaaatttgacagcataaacaccgtttactatatggcgccttttgccaccatgattctcgggataccagcgttattactggaaggcagtggaattttgagctggtttgaagcacaccctgctccctggtcagccctcatcattatactcagttctggtgttctagccttctgtctcaacttctccatcttctatgtcattcactccacaactgcagtcacattcaacgtggctggaaaccttaaggttgcagtggctgtaatggtctcatggttgatattccgtaacccaatatcatatatgaatgctgttggatgcggaattacgcttgtgggctgcacgttttatggatatgtgaggcatatgctttcacagcaaacaccgggaactcctaggactcctcgtaccccaagaagcaagatggaattacttccacttgttaataatgataaactcgaaggcaaagtctgatcttcttcattccgcagctcagtttagtactcactggttcagggtgctgcagaagagaagcattgacacaaggggtgttgaatttttactaaatatgcattttactcaaaaaccttagtagagaaaagttacatttttttttttcgttttgatttgagctcgtagaagagataatggttcctactactatttatatttctgtgaagtgtagaatcttttaatttatcaaatacattttcgg

SEQ ID NO: 29083 - protein, 336 aa, Arabidopsis thaliana
  peptide (1)..(336): Ceres Seq. ID no. 13645701
MEEGSMFRSLLAILQWWGFNVTVIIMNKWIFQKLDFKFPLSVSCVHFICSSIGAYIVIKVLKLKPLIVVDPEDRWRRIFPMSFVFCINIVLGNVSLRYIPVSFMQTIKSFTPATTVVLQWLVWRKYFDWRIWASLVPIVGGILLTSVTELSFNMFGFCAALFGCLATSTKTILAESLLHGYKFDSINTVYYMAPFATMILGIPALLLEGSGILSWFEAHPAPWSALIIILSSGVLAFCLNFSIFYVIHSTTAVTFNVAGNLKVAVAVMVSWLIFRNPISYMNAVGCGITLVGCTFYGYVRHMLSQQTPGTPRTPRTPRSKMELLPLVNNDKLEGKV

SEQ ID NO: 29084 - protein, 331 aa, Arabidopsis thaliana
  peptide (1)..(331): Ceres Seq. ID no. 13645702
MFRSLLAILQWWGFNVTVIIMNKWIFQKLDFKFPLSVSCVHFICSSIGAYIVIKVLKLKPLIVVDPEDRWRRIFPMSFVFCINIVLGNVSLRYIPVSFMQTIKSFTPATTVVLQWLVWRKYFDWRIWASLVPIVGGILLTSVTELSFNMFGFCAALFGCLATSTKTILAESLLHGYKFDSINTVYYMAPFATMILGIPALLLEGSGILSWFEAHPAPWSALIIILSSGVLAFCLNFSIFYVIHSTTAVTFNVAGNLKVAVAVMVSWLIFRNPISYMNAVGCGITLVGCTFYGYVRHMLSQQTPGTPRTPRTPRSKMELLPLVNNDKLEGKV

SEQ ID NO: 29085 - protein, 311 aa, Arabidopsis thaliana
  peptide (1)..(311): Ceres Seq. ID no. 13645703
MNKWIFQKLDFKFPLSVSCVHFICSSIGAYIVIKVLKLKPLIVVDPEDRWRRIFPMSFVFCINIVLGNVSLRYIPVSFMQTIKSFTPATTVVLQWLVWRKYFDWRIWASLVPIVGGILLTSVTELSFNMFGFCAALFGCLATSTKTILAESLLHGYKFDSINTVYYMAPFATMILGIPALLLEGSGILSWFEAHPAPWSALIIILSSGVLAFCLNFSIFYVIHSTTAVTFNVAGNLKVAVAVMVSWLIFRNPISYMNAVGCGITLVGCTFYGYVRHMLSQQTPGTPRTPRTPRSKMELLPLVNNDKLEGKV

SEQ ID NO: 29086 - DNA, 1152 bp, Arabidopsis thaliana
  misc_feature (1)..(1152): Ceres Seq. ID no. 12324473
  misc_feature (1)..(1152): Ortholog of  Ceres SEQ ID NO 12610385 as cited in SEQ ID NO 55938
  misc_feature (1)..(1152): Ortholog of  Ceres SEQ ID NO 13661939 as cited in SEQ ID NO 61170
  misc_feature (1)..(1152): Ortholog of  Ceres SEQ ID NO 15178805 as cited in SEQ ID NO 0
atcgatcactgaatcttcttcttcttcttcttcttcttcttcttcttcttcttcttccttctctcaagaacaggtaaaactctctcctcttctccttctttttctctcctctctcttctctcttttaacaaaaaaaaaactgtcttttcttcatttctgttcttttttttggttgccgagaaaaacagaggataattttccgatctctgttttttttttctcggtgaccagaatcggttggttctgttttttttttttttttttccttctttgttattgttatcttattaatgaatcttttttgttgttataatttacagattttttttaaacgagcttgatcaataaattctctcaagatctatggcggaagagcatcgatgtcagacaccagaaagcaaccgtctctgtgttaacaactgtggcttcctcggctccgccaccatgaatctctgttctaattgttacggcgatctttgtctcaaacaacaacaacaatcctcctccatcaaatccaccgttgaatcttccctctctgtatctcctccgtcgtcatcatcatcggagatctcttctccgatcatccctcctctccttaaaaatccatcagtcaagctagaggtaccggagaaaaaggcggtgatttcgctgccgacgacggagcagaatcagcaacagaggccgaatcggtgcacgacgtgtaggaaacgggtcgggttaaccggattcaagtgccggtgcggtacgatgttttgcggggttcataggtacccggagatccatggatgcagctacgatttcaaatcggccggacgtgaagagatcgcgaaagcgaatccgttggtgaaagcagcgaagcttcagaagatatgatcagagccgttcgatgcgttgacttttcctctcgtaagtcttcatttctacgcgtatgtgtgtcctccgtcccccgagaaatacggatggtgtcgatttgattgatctcagccgttggatcaaaaatggtttattattgtaaaagattgattatgtatttatcaaagggacacgtgtcacgtggttttaggatggagacgctttcgctttctctccttcattttattttctttttcctttcagaaagaaataagattattcgcgttggctttttctttt

SEQ ID NO: 29087 - protein, 169 aa, Arabidopsis thaliana
  peptide (1)..(169): Ceres Seq. ID no. 12324474
MAEEHRCQTPESNRLCVNNCGFLGSATMNLCSNCYGDLCLKQQQQSSSIKSTVESSLSVSPPSSSSSEISSPIIPPLLKNPSVKLEVPEKKAVISLPTTEQNQQQRPNRCTTCRKRVGLTGFKCRCGTMFCGVHRYPEIHGCSYDFKSAGREEIAKANPLVKAAKLQKI

SEQ ID NO: 29088 - protein, 142 aa, Arabidopsis thaliana
  peptide (1)..(142): Ceres Seq. ID no. 12324475
MNLCSNCYGDLCLKQQQQSSSIKSTVESSLSVSPPSSSSSEISSPIIPPLLKNPSVKLEVPEKKAVISLPTTEQNQQQRPNRCTTCRKRVGLTGFKCRCGTMFCGVHRYPEIHGCSYDFKSAGREEIAKANPLVKAAKLQKI

SEQ ID NO: 29089 - protein, 103 aa, Arabidopsis thaliana
  peptide (1)..(103): Ceres Seq. ID no. 12324476
SITESSSSSSSSSSSSSSSFSQEQVKLSPLLLLFLSSLFSLLTKKKLSFLHFCSFFWLPRKTEDNFPISVFFFSVTRIGWFCFFFFFFLLCYCYLINESFLLL

SEQ ID NO: 29090 - DNA, 1246 bp, Arabidopsis thaliana
  misc_feature (1)..(1246): Ceres Seq. ID no. 12396125
  misc_feature (1)..(1246): Ortholog of  Ceres SEQ ID NO 13590776 as cited in SEQ ID NO 64877
  misc_feature (1)..(1246): Ortholog of  Ceres SEQ ID NO 12780534 as cited in SEQ ID NO 65670
  misc_feature (1)..(1246): Ortholog of  Ceres SEQ ID NO 13598301 as cited in SEQ ID NO 68281
aatacctaaattaaattcgatttttgagacaaagctcgacaagtcgtcggcggcggtgtaaaaatagtcggagctatggcgatgcaggccggagttggcttatccaggatctttctcttagccggagcaggttacactggtacgatcatgatgaagaatggaaaattgtcggatttgttgggtgaattgcagagtttggtgaagggaatggagaaatctggagaagggtctgagggagattctgatgtttctgatgctatagctgcacaggttcgccggttggctatggagattcgacagctagcttcgcagcaacacataacggtcatgaatggagtttctggtgcaaacctacaagcccttgctgttcctgctgcggcattgggagctctcggatatggttatatgtggtggaagggactctcattcactgaccttatgtatgtgacaaaagccaacatggctgctgcagtggctaacttgacaaagaatctggagcaagtttctgagactcttgcggctgcgaaaaggcatttaacacaaaggattcagaatctggatgataaggtagaaaagcagatcgatctctcgaaggaaatcaatagccaggttatttctgctcgtgagaatatcagctcacttgagatggatttggaatcattgcataatttgattactggactggatgggaagttggacacgctggaatacaagcaggatgtcacaaatgttttcatgctaaacttgtataactattttggaggcaagagcacaaagctgcctgaaatggaacagcttcagcttcctgtaaaccagagggctcgtaatttgcttgcagatgttgaaactaagggtctgaaaaacttggctgaagagctgtttaaaagcaatggcacacaggtgacaaccacagtgaaacaaatcagtttgagtaaagtgaatgtgaagtcgaggccattgttatcaagggctgcttcagctaagtgttgatatggaagttttcctgatggcggtttggcttgcgggatgtatataacaaaactcttacttatacaaatggtctcgtgagccgtagaatgctctcttacatctattcgttggtttggcttttttcccccaaaacttgggtcttatgatattttggtttgcactttggaggtttttcctcgaattggagtttgtttattgacatgtgtagtgtccacttttgaactttgacgcaatttaaaataaagtacatgtgggg

SEQ ID NO: 29091 - protein, 304 aa, Arabidopsis thaliana
  peptide (1)..(304): Ceres Seq. ID no. 12396126
MAMQAGVGLSRIFLLAGAGYTGTIMMKNGKLSDLLGELQSLVKGMEKSGEGSEGDSDVSDAIAAQVRRLAMEIRQLASQQHITVMNGVSGANLQALAVPAAALGALGYGYMWWKGLSFTDLMYVTKANMAAAVANLTKNLEQVSETLAAAKRHLTQRIQNLDDKVEKQIDLSKEINSQVISARENISSLEMDLESLHNLITGLDGKLDTLEYKQDVTNVFMLNLYNYFGGKSTKLPEMEQLQLPVNQRARNLLADVETKGLKNLAEELFKSNGTQVTTTVKQISLSKVNVKSRPLLSRAASAKC

SEQ ID NO: 29092 - protein, 302 aa, Arabidopsis thaliana
  peptide (1)..(302): Ceres Seq. ID no. 12396127
MQAGVGLSRIFLLAGAGYTGTIMMKNGKLSDLLGELQSLVKGMEKSGEGSEGDSDVSDAIAAQVRRLAMEIRQLASQQHITVMNGVSGANLQALAVPAAALGALGYGYMWWKGLSFTDLMYVTKANMAAAVANLTKNLEQVSETLAAAKRHLTQRIQNLDDKVEKQIDLSKEINSQVISARENISSLEMDLESLHNLITGLDGKLDTLEYKQDVTNVFMLNLYNYFGGKSTKLPEMEQLQLPVNQRARNLLADVETKGLKNLAEELFKSNGTQVTTTVKQISLSKVNVKSRPLLSRAASAKC

SEQ ID NO: 29093 - protein, 280 aa, Arabidopsis thaliana
  peptide (1)..(280): Ceres Seq. ID no. 12396128
MMKNGKLSDLLGELQSLVKGMEKSGEGSEGDSDVSDAIAAQVRRLAMEIRQLASQQHITVMNGVSGANLQALAVPAAALGALGYGYMWWKGLSFTDLMYVTKANMAAAVANLTKNLEQVSETLAAAKRHLTQRIQNLDDKVEKQIDLSKEINSQVISARENISSLEMDLESLHNLITGLDGKLDTLEYKQDVTNVFMLNLYNYFGGKSTKLPEMEQLQLPVNQRARNLLADVETKGLKNLAEELFKSNGTQVTTTVKQISLSKVNVKSRPLLSRAASAKC

SEQ ID NO: 29094 - DNA, 1385 bp, Arabidopsis thaliana
  misc_feature (1)..(1385): Ceres Seq. ID no. 12396466
  misc_feature (1)..(1385): Ortholog of  Ceres SEQ ID NO 12636774 as cited in SEQ ID NO 372
  misc_feature (1)..(1385): Ortholog of  Ceres SEQ ID NO 15174842 as cited in SEQ ID NO 53054
  misc_feature (1)..(1385): Ortholog of  Ceres SEQ ID NO 14310917 as cited in SEQ ID NO 53231
  misc_feature (1)..(1385): Ortholog of  Ceres SEQ ID NO 15175492 as cited in SEQ ID NO 56277
  misc_feature (1)..(1385): Ortholog of  Ceres SEQ ID NO 13582350 as cited in SEQ ID NO 56734
  misc_feature (1)..(1385): Ortholog of  Ceres SEQ ID NO 12476493 as cited in SEQ ID NO 58163
  misc_feature (1)..(1385): Ortholog of  Ceres SEQ ID NO 14310807 as cited in SEQ ID NO 58696
  misc_feature (1)..(1385): Ortholog of  Ceres SEQ ID NO 15175861 as cited in SEQ ID NO 59381
  misc_feature (1)..(1385): Ortholog of  Ceres SEQ ID NO 12578315 as cited in SEQ ID NO 62451
  misc_feature (1)..(1385): Ortholog of  Ceres SEQ ID NO 12615466 as cited in SEQ ID NO 62761
  misc_feature (1)..(1385): Ortholog of  Ceres SEQ ID NO 13597295 as cited in SEQ ID NO 63743
  misc_feature (1)..(1385): Ortholog of  Ceres SEQ ID NO 12617090 as cited in SEQ ID NO 64005
  misc_feature (1)..(1385): Ortholog of  Ceres SEQ ID NO 15226458 as cited in SEQ ID NO 64042
  misc_feature (1)..(1385): Ortholog of  Ceres SEQ ID NO 13597439 as cited in SEQ ID NO 64081
  misc_feature (1)..(1385): Ortholog of  Ceres SEQ ID NO 13597233 as cited in SEQ ID NO 64370
  misc_feature (1)..(1385): Ortholog of  Ceres SEQ ID NO 13598327 as cited in SEQ ID NO 68040
agccgatttctagattctcctccaccaccattttacccttcttttaaattccttccttcaatcaaaattagaattatttctcaaacctcttctttatatactaaaacgtctcacatgaacaagaagaataaatagaaacaaagaagatgaacaagaacaagattgatgttaagatcgagacgaagaaaggatcgatggatgagtggcctgagccaatcgtccgagtccagtccttagccgagagcaacctctcctctctccccgaccgttacatcaaaccagcgtctctacgccccaccacgaccgaagacgctcctaccgcgaccaacatcccaatcatagaccttgaaggactcttctcggaagaagggttgtctgatgacgtcatcatggctcggatatcggaggcttgccgtgggtgggggttcttccaggtggtgaaccacggggtcaaaccggagctgatggacgcggctagggagaattggagagagtttttccatatgccggttaatgccaaagagacttactcaaactcaccaagaacctacgaaggctatggaagtagactaggtgttgagaaaggagcaagtcttgattggagtgattattactttctccatcttcttcctcatcatttgaaagacttcaacaagtggccttcttttcctcccaccataagagaagtgatcgatgaatacggcgaagagctagtgaagctaagtgggagaattatgagggtattatcgacaaacttgggactaaaagaggataagtttcaagaagcatttggaggtgaaaacattggggcgtgtttgagggttaattattacccaaaatgccctcgaccggagctggctcttggtctctctccacactccgatcctggcggtatgaccattctcttaccggacgatcaagtcttcggtctccaggttcgtaaagatgacacgtggatcaccgtcaagcctcatccccatgctttcatcgtcaatattggtgatcaaatacagatactaagcaactcaacatacaagagtgtggagcatagagtgatagtgaactcggacaaggagagagtttcacttgccttcttctacaatcctaaaagcgatattccgatccaaccattacaagaacttgtatcaactcataatcctcctttataccctcccatgacctttgatcagtatagactctttatcagaactcaaggtccacaaggcaaatcccatgttgaatctcatatttctcctcgttgattgtttttcttttatttcttcccttaaagaaaaattaatgttttgttatttttatgatattacgtctgacttgtatatgtgtacaatcatttatattttgaattttcaaaggatgatttgccg

SEQ ID NO: 29095 - protein, 371 aa, Arabidopsis thaliana
  peptide (1)..(371): Ceres Seq. ID no. 12396467
MNKNKIDVKIETKKGSMDEWPEPIVRVQSLAESNLSSLPDRYIKPASLRPTTTEDAPTATNIPIIDLEGLFSEEGLSDDVIMARISEACRGWGFFQVVNHGVKPELMDAARENWREFFHMPVNAKETYSNSPRTYEGYGSRLGVEKGASLDWSDYYFLHLLPHHLKDFNKWPSFPPTIREVIDEYGEELVKLSGRIMRVLSTNLGLKEDKFQEAFGGENIGACLRVNYYPKCPRPELALGLSPHSDPGGMTILLPDDQVFGLQVRKDDTWITVKPHPHAFIVNIGDQIQILSNSTYKSVEHRVIVNSDKERVSLAFFYNPKSDIPIQPLQELVSTHNPPLYPPMTFDQYRLFIRTQGPQGKSHVESHISPR

SEQ ID NO: 29096 - protein, 355 aa, Arabidopsis thaliana
  peptide (1)..(355): Ceres Seq. ID no. 12396468
MDEWPEPIVRVQSLAESNLSSLPDRYIKPASLRPTTTEDAPTATNIPIIDLEGLFSEEGLSDDVIMARISEACRGWGFFQVVNHGVKPELMDAARENWREFFHMPVNAKETYSNSPRTYEGYGSRLGVEKGASLDWSDYYFLHLLPHHLKDFNKWPSFPPTIREVIDEYGEELVKLSGRIMRVLSTNLGLKEDKFQEAFGGENIGACLRVNYYPKCPRPELALGLSPHSDPGGMTILLPDDQVFGLQVRKDDTWITVKPHPHAFIVNIGDQIQILSNSTYKSVEHRVIVNSDKERVSLAFFYNPKSDIPIQPLQELVSTHNPPLYPPMTFDQYRLFIRTQGPQGKSHVESHISPR

SEQ ID NO: 29097 - protein, 290 aa, Arabidopsis thaliana
  peptide (1)..(290): Ceres Seq. ID no. 12396469
MARISEACRGWGFFQVVNHGVKPELMDAARENWREFFHMPVNAKETYSNSPRTYEGYGSRLGVEKGASLDWSDYYFLHLLPHHLKDFNKWPSFPPTIREVIDEYGEELVKLSGRIMRVLSTNLGLKEDKFQEAFGGENIGACLRVNYYPKCPRPELALGLSPHSDPGGMTILLPDDQVFGLQVRKDDTWITVKPHPHAFIVNIGDQIQILSNSTYKSVEHRVIVNSDKERVSLAFFYNPKSDIPIQPLQELVSTHNPPLYPPMTFDQYRLFIRTQGPQGKSHVESHISPR

SEQ ID NO: 29098 - DNA, 1272 bp, Arabidopsis thaliana
  misc_feature (1)..(1272): Ceres Seq. ID no. 13500081
  misc_feature (1)..(1272): Ortholog of  Ceres SEQ ID NO 14316550 as cited in SEQ ID NO 57662
  misc_feature (1)..(1272): Ortholog of  Ceres SEQ ID NO 14302333 as cited in SEQ ID NO 63121
  misc_feature (1)..(1272): Ortholog of  Ceres SEQ ID NO 13596976 as cited in SEQ ID NO 63125
  misc_feature (1)..(1272): Ortholog of  Ceres SEQ ID NO 15179988 as cited in SEQ ID NO 0
aatttatatatgagtatcgaattccaattgcggaagaaaggagaaaataatctccggtttgagctgcgtcgacgagatctatcgtcaggatctcagatttgttgttacactcttgctcaagtctggagacatgagttctccgggaacgagtatgttcaccaatttcactaagctctgcaaaggacttgccctggtacttgtggtgggacacctcgtggttcagttcattcccgctaccgtcccataccttgctctgattccggcgaggactattccttttgcctggaatctgataacaagcggctattttgaactctcagtatatggggttgtcttcagcaccgtttctctcctttttatgggaaagttcctggaacctgtctggggttccacggagttccttaagttcatctttgtggtgaacttccttacgtatctctgtgttttcgttacagccattgccttatactacataacgaggctggaagtttacctatatatgccctttgctggttttcatggtgtcttggcaggccttcttgtagggataaagcagataatacctgaccaggagatattgctgttaaagataaaagcaaagtggttgccctcaattatgctaattttgtcaatagcctcaagcttcttcacactagattcagcagcatatcttcccactttgatatttggtacatatatgggctggttatacctcaggtacctacagaggagaccagaaacaaagctcagaggtgatccaagtgatgactttgccttctctactttctttcctgaacttctcaggccagtaattgaccccattgccttaatctttcaccggatgctttgtggaagatcaaatgccaccagtgaagaccatgattattctaccagtggtgcaccattgccaggttctgattctgctgaagcatccaggaggagagaaagaggggcaagagctctagaggagagactaggaacggaaagattggttcctgcaaggaacaaagatgaattgcagagtgatggtttagataacgtataagtggagattgcgataagcattttgaagaagctgttgttggttcttacttgtgttcatgtggacagtttttttttgttttttttttttgttaatgaaattggcgtttatacagaatcagcttcgtaaattcctttgacagctcagaaaggtagtacatttccttggacaaaccaccaattagaaacaattttcttggacgagaggatataaaagtagttatacatgtt

SEQ ID NO: 29099 - protein, 304 aa, Arabidopsis thaliana
  peptide (1)..(304): Ceres Seq. ID no. 13500082
MSSPGTSMFTNFTKLCKGLALVLVVGHLVVQFIPATVPYLALIPARTIPFAWNLITSGYFELSVYGVVFSTVSLLFMGKFLEPVWGSTEFLKFIFVVNFLTYLCVFVTAIALYYITRLEVYLYMPFAGFHGVLAGLLVGIKQIIPDQEILLLKIKAKWLPSIMLILSIASSFFTLDSAAYLPTLIFGTYMGWLYLRYLQRRPETKLRGDPSDDFAFSTFFPELLRPVIDPIALIFHRMLCGRSNATSEDHDYSTSGAPLPGSDSAEASRRRERGARALEERLGTERLVPARNKDELQSDGLDNV

SEQ ID NO: 29100 - protein, 297 aa, Arabidopsis thaliana
  peptide (1)..(297): Ceres Seq. ID no. 13500083
MFTNFTKLCKGLALVLVVGHLVVQFIPATVPYLALIPARTIPFAWNLITSGYFELSVYGVVFSTVSLLFMGKFLEPVWGSTEFLKFIFVVNFLTYLCVFVTAIALYYITRLEVYLYMPFAGFHGVLAGLLVGIKQIIPDQEILLLKIKAKWLPSIMLILSIASSFFTLDSAAYLPTLIFGTYMGWLYLRYLQRRPETKLRGDPSDDFAFSTFFPELLRPVIDPIALIFHRMLCGRSNATSEDHDYSTSGAPLPGSDSAEASRRRERGARALEERLGTERLVPARNKDELQSDGLDNV

SEQ ID NO: 29101 - protein, 228 aa, Arabidopsis thaliana
  peptide (1)..(228): Ceres Seq. ID no. 13500084
MGKFLEPVWGSTEFLKFIFVVNFLTYLCVFVTAIALYYITRLEVYLYMPFAGFHGVLAGLLVGIKQIIPDQEILLLKIKAKWLPSIMLILSIASSFFTLDSAAYLPTLIFGTYMGWLYLRYLQRRPETKLRGDPSDDFAFSTFFPELLRPVIDPIALIFHRMLCGRSNATSEDHDYSTSGAPLPGSDSAEASRRRERGARALEERLGTERLVPARNKDELQSDGLDNV

SEQ ID NO: 29102 - DNA, 1362 bp, Arabidopsis thaliana
  misc_feature (1)..(1362): Ceres Seq. ID no. 13486641
  misc_feature (1)..(1362): Ortholog of  Ceres SEQ ID NO 14314037 as cited in SEQ ID NO 52244
  misc_feature (1)..(1362): Ortholog of  Ceres SEQ ID NO 13661419 as cited in SEQ ID NO 61673
acaaattcaattccaattctcaaagtgctctctttttaaaccaatctgctctcttccacttactctctctatctctctcccatctcgtttcttttttggtcattaaaagagaaacctttgctctgaatcttgaaaatggattctttgatcaaactcttcttctgcctctttatcttcttatgtacttcgctcttatttggagaaatcaatggagtggagggttcaaatcaaaatcatcacttgtatccatttaggccaacgaagctctttgtgttcggagattcttatgccgataccggaaacattaaaaaggctttctctagctcttggaaattcccttacggtatcactttccccggaaaacccgctggccgtttctccgatggccgtgtggcaacagattttctagctaaatttgtggggataaaatcaccaatcccatacttttggaaagattacgcgggaaagaaacgattacagtacggaatgaattttgcgtacggaggaacaggagtgttcaacactcaaactccattgcctaacatgacaactcaaatcgacatcttccagaacattctcaccaccggcgacatctactatcctcccgagcttacttcatccgtggctctcgtcagtgtcgctggcaacgactactccaatttcatcgccctaaaccgccctgcctctgaattcccagcattcataaagcaagttgtggatcaaacagaggtgaatttgagacggatccacgctttgggagtgaaaaagattgcagtaccatccctgcaaccgcttggttgtctccctcccttcacattcgtaacctcgttccagcgttgcaacgagacacaaaacgctttagttaacctccacaacaacttattgcagcaagttgtggcaaagctcaataacgagactaaacagtcgactttcatcatccttgatctctacaatgctttcttgactgtgttcaagaacaaaggatctaatccagggagtacaaggtttgagagtccattaaagccgtgttgcgtaggtgtgagccgcgagtataactgtggaagtgtggatgagaagggagtgaagaagtatattgtatgtgataatcctaaaactgctttcttttgggatggacttcaccctacagaagaaggatggagatcggtttactctgttttacgcgaaagtcttaccgcgtctttgattaaagcgtgagaaacaaaagaaacacacattttgcttaggttttttcttatgaagctcaatgtttgagcgctctgttcctgttttcagtatctcttcattcatttgtgtttgtgtgtttaaagattgtgtgactaataaaatctcttaactggttcg

SEQ ID NO: 29103 - protein, 359 aa, Arabidopsis thaliana
  peptide (1)..(359): Ceres Seq. ID no. 13486642
MDSLIKLFFCLFIFLCTSLLFGEINGVEGSNQNHHLYPFRPTKLFVFGDSYADTGNIKKAFSSSWKFPYGITFPGKPAGRFSDGRVATDFLAKFVGIKSPIPYFWKDYAGKKRLQYGMNFAYGGTGVFNTQTPLPNMTTQIDIFQNILTTGDIYYPPELTSSVALVSVAGNDYSNFIALNRPASEFPAFIKQVVDQTEVNLRRIHALGVKKIAVPSLQPLGCLPPFTFVTSFQRCNETQNALVNLHNNLLQQVVAKLNNETKQSTFIILDLYNAFLTVFKNKGSNPGSTRFESPLKPCCVGVSREYNCGSVDEKGVKKYIVCDNPKTAFFWDGLHPTEEGWRSVYSVLRESLTASLIKA

SEQ ID NO: 29104 - protein, 242 aa, Arabidopsis thaliana
  peptide (1)..(242): Ceres Seq. ID no. 13486643
MNFAYGGTGVFNTQTPLPNMTTQIDIFQNILTTGDIYYPPELTSSVALVSVAGNDYSNFIALNRPASEFPAFIKQVVDQTEVNLRRIHALGVKKIAVPSLQPLGCLPPFTFVTSFQRCNETQNALVNLHNNLLQQVVAKLNNETKQSTFIILDLYNAFLTVFKNKGSNPGSTRFESPLKPCCVGVSREYNCGSVDEKGVKKYIVCDNPKTAFFWDGLHPTEEGWRSVYSVLRESLTASLIKA

SEQ ID NO: 29105 - protein, 223 aa, Arabidopsis thaliana
  peptide (1)..(223): Ceres Seq. ID no. 13486644
MTTQIDIFQNILTTGDIYYPPELTSSVALVSVAGNDYSNFIALNRPASEFPAFIKQVVDQTEVNLRRIHALGVKKIAVPSLQPLGCLPPFTFVTSFQRCNETQNALVNLHNNLLQQVVAKLNNETKQSTFIILDLYNAFLTVFKNKGSNPGSTRFESPLKPCCVGVSREYNCGSVDEKGVKKYIVCDNPKTAFFWDGLHPTEEGWRSVYSVLRESLTASLIKA

SEQ ID NO: 29106 - DNA, 1035 bp, Arabidopsis thaliana; identical to SEQ ID NO: 22638
  misc_feature (1)..(1035): Ceres Seq. ID no. 13509220
  misc_feature (1)..(1035): Ortholog of  Ceres SEQ ID NO 13595072 as cited in SEQ ID NO 55971

SEQ ID NO: 29107 - protein, 267 aa, Arabidopsis thaliana; identical to SEQ ID NO: 22639
  peptide (1)..(267): Ceres Seq. ID no. 13509221

SEQ ID NO: 29108 - protein, 262 aa, Arabidopsis thaliana; identical to SEQ ID NO: 22640
  peptide (1)..(262): Ceres Seq. ID no. 13509222

SEQ ID NO: 29109 - protein, 233 aa, Arabidopsis thaliana; identical to SEQ ID NO: 21214
  peptide (1)..(233): Ceres Seq. ID no. 13509223

SEQ ID NO: 29110 - DNA, 745 bp, Arabidopsis thaliana
  misc_feature (1)..(745): Ceres Seq. ID no. 13496771
  misc_feature (1)..(745): Ortholog of  Ceres SEQ ID NO 13599287 as cited in SEQ ID NO 338
ttggacttcaaataattttaattagtttcttctgtgcgatagagatcgatcgagagatgggtgcttcatcatcatcatctgtgtcggagaaatcaatccatcaattcaccgtcaaggatagctccggcaaggaggttgacctaagcgtgtatcaagggaaagtgctgctcgtcgtcaacgtcgcttctaaatgcggattcacggagtccaattacacccagctgacggaactttaccggaaatataaagatcaaggttttgtggtattggcgtttccttgcaaccagtttctgtcccaagagcctggcaccagcgaagaggctcatcaatttgcttgtactcgctttaaggctgaataccctgttttccaaaaggtgcgtgtaaatggacaaaacgctgcaccagtctacaaattcctcaaatctaagaaaccctcttttcttggaagtcgtatcaaatggaacttcaccaagttcttggtcggcaaagatggtcaagtcattgatcgttatggcacaactgtttcacctctatccatccagaaagacatcgagaaagcccttgcacaagaattgtgaacacgcacagagatatttgactcctttggaagaaacttctctcatactctcggtcatgcagtcaagtttctacatttcccattgcaccttccatatgggccttgtattcatcttatgtgtaactctactagccatttcttttgtgaaatttgatcaaaggtgattcc

SEQ ID NO: 29111 - protein, 191 aa, Arabidopsis thaliana
  peptide (1)..(191): Ceres Seq. ID no. 13496772
GLQIILISFFCAIEIDREMGASSSSSVSEKSIHQFTVKDSSGKEVDLSVYQGKVLLVVNVASKCGFTESNYTQLTELYRKYKDQGFVVLAFPCNQFLSQEPGTSEEAHQFACTRFKAEYPVFQKVRVNGQNAAPVYKFLKSKKPSFLGSRIKWNFTKFLVGKDGQVIDRYGTTVSPLSIQKDIEKALAQEL

SEQ ID NO: 29112 - protein, 173 aa, Arabidopsis thaliana
  peptide (1)..(173): Ceres Seq. ID no. 13496773
MGASSSSSVSEKSIHQFTVKDSSGKEVDLSVYQGKVLLVVNVASKCGFTESNYTQLTELYRKYKDQGFVVLAFPCNQFLSQEPGTSEEAHQFACTRFKAEYPVFQKVRVNGQNAAPVYKFLKSKKPSFLGSRIKWNFTKFLVGKDGQVIDRYGTTVSPLSIQKDIEKALAQEL

SEQ ID NO: 29113 - protein, 118 aa, Arabidopsis thaliana
  peptide (1)..(118): Ceres Seq. ID no. 13496774
MDKTLHQSTNSSNLRNPLFLEVVSNGTSPSSWSAKMVKSLIVMAQLFHLYPSRKTSRKPLHKNCEHAQRYLTPLEETSLILSVMQSSFYISHCTFHMGLVFILCVTLLAISFVKFDQR

SEQ ID NO: 29114 - DNA, 648 bp, Arabidopsis thaliana
  misc_feature (1)..(648): Ceres Seq. ID no. 12738718
  misc_feature (1)..(648): Ortholog of  Ceres SEQ ID NO 15172828 as cited in SEQ ID NO 60174
aattttcatttgcattaaaatataataaaaagacgtaagattctctccgcctcctccttctctctataagaaccgacacagagacgaagaagaataatcactcaaaaactcatcaaatcaaaaatcaaacacagagaagagaaaatggccgcagaaggagaagttatcgcttgccacaccgttgaagattggaccgagaagctcaaagccgccaacgaatccaagaaactgattgtgatagacttcactgcaacatggtgcccaccttgccgtttcattgcacccgtctttgctgacttagccaagaagcaccttgacgtagtcttcttcaaggtcgatgttgacgaattgaacactgttgctgaggagtttaaagttcaggcaatgccaacgtttatcttcatgaaagaaggagagatcaaggagactgtggttggtgctgcgaaagaagaaatcattgccaatctcgagaagcacaagacagttgttgctgctgcttgatttgcttttctctcttacctattttgctaaaatatgtttggtgttttaataaatcctttgttcgcccgagtcttttcaccttaaatgtgctcttatgtgtggtggtgaataaatgttgttgcaaacttgattactcgcagctatgct

SEQ ID NO: 29115 - protein, 118 aa, Arabidopsis thaliana
  peptide (1)..(118): Ceres Seq. ID no. 12738719
MAAEGEVIACHTVEDWTEKLKAANESKKLIVIDFTATWCPPCRFIAPVFADLAKKHLDVVFFKVDVDELNTVAEEFKVQAMPTFIFMKEGEIKETVVGAAKEEIIANLEKHKTVVAAA

SEQ ID NO: 29116 - DNA, 888 bp, Arabidopsis thaliana
  misc_feature (1)..(888): Ceres Seq. ID no. 13646051
  misc_feature (1)..(888): Ortholog of  Ceres SEQ ID NO 12610334 as cited in SEQ ID NO 56235
  misc_feature (1)..(888): Ortholog of  Ceres SEQ ID NO 13654825 as cited in SEQ ID NO 62409
tgacacacaatccaatcaaaacacacagagagaagaaaaactcagaagaaaagccaaagagtgaaacaaaaatggcgtcgacgactctctcaatcgcaacaacaatccgttcctcatcttatcctactctcgcttccatcaatcacttcccttcccgaaccaccaccatcgaattcccctctcgcttcggtggtggttcatcatccacattgacccaccgtgcaacccatctccgtccaatcgccgccgtcgaagctccggagaaaatcgagaagatcggatccgaaatctcatccctaaccctcgaagaagctcgtatcctcgtcgactatctccaagacaaattcggtgtctccccactctctttagcccccgcagcagcggcggttgctgctccagccgacggtggcgcggcggctgtagtggaggagcaaacagagttcgatgtggttatcaatgaagttccgagtagttctcgtattgcagtaattaaagctgttagggctttgactagcttggcgttgaaggaagctaaggagctaatcgaaggattaccaaagaagtttaaagaaggtatcactaaagatgaagctgaagaagctaagaagactcttgaagaagctggtgctaaagtctccattgcttaaggtttttataaaaaaaaaaaaagaagttgttatcttttctggaatttgattggtcttttgtgttgtttagtatagtttgcgtctggaattgttgagaaattgttgtaatttgaatcacatttggtttcccattagctgatttcgccattgatgtgagctttttggtagctgcacataacatgtttgttgaaatgcctaaatgaggcaaatcactcgtagttgcttaacatgaaacagagtt

SEQ ID NO: 29117 - protein, 214 aa, Arabidopsis thaliana
  peptide (1)..(214): Ceres Seq. ID no. 13646052
THNPIKTHREKKNSEEKPKSETKMASTTLSIATTIRSSSYPTLASINHFPSRTTTIEFPSRFGGGSSSTLTHRATHLRPIAAVEAPEKIEKIGSEISSLTLEEARILVDYLQDKFGVSPLSLAPAAAAVAAPADGGAAAVVEEQTEFDVVINEVPSSSRIAVIKAVRALTSLALKEAKELIEGLPKKFKEGITKDEAEEAKKTLEEAGAKVSIA

SEQ ID NO: 29118 - protein, 191 aa, Arabidopsis thaliana; identical to SEQ ID NO: 21067
  peptide (1)..(191): Ceres Seq. ID no. 13646053

SEQ ID NO: 29119 - DNA, 1420 bp, Arabidopsis thaliana
  misc_feature (1)..(1420): Ceres Seq. ID no. 12602555
  misc_feature (1)..(1420): Ortholog of  Ceres SEQ ID NO 15175857 as cited in SEQ ID NO 59046
aaacagacaaaacaaaaacacttcttttgttggttccttgtcggtttccaagggtttttgtttagggttttcattttctttttccttatctatctaatcctctgtttctctccacatcaaaaaaaacctcaaaattaagagacgaattcgagataatgggttcgcttaaggaaggtcaaggaagagacatggaagaaggtgaatcagaagagccgcttttgatggctcagaaccagagattcactatgttccccattaggtacaaatctatttgggagatgtataagaaggctgaagccagtttctggactgctgaagaggttgatctttccactgatgtgcaacagtgggaggccttgacggattcagagaaacactttatcagccatattctggcgtttttcgcagcgtcagatggtattgttttggagaatttggctgctagattcttgaatgatgtccaagttccagaggctcgtgctttctatgggtttcaaatagccatggagaacattcattcagagatgtacagcttacttctggagacattcataaaggactcgaaggagaaggatagattgttcaatgctatcgagaccattccttgtatatccaagaaggcaaaatggtgtttagattggattcaaagtcctatgtcgtttgctgtgaggctggtcgcttttgcatgtgtcgaaggaatcttcttctcaggaagcttctgtgccatcttctggctaaagaagaggggtcttatgccgggtttgaccttctcaaacgagcttatatcgagagacgaggggctccactgtgactttgcgtgtctcttgtacagtttgctgcagaagcagcttccattggagaaagtttatcaaattgttcacgaggcagtggaaattgagacagagtttgtctgcaaggctcttccatgtgatctgatcggaatgaactcaaacctcatgagtcaatacatacaatttgtcgctgaccgtcttctggttaccttgggatgtgaaaggacatacaaagcagaaaatccatttgactggatggagttcatatctctgcaaggaaagacaaacttctttgagaagagagtgggagagtatcagaaggcatcagttatgtcgaacctccaaaatggaaatcagaactacgaattcacgactgaagaggacttttgaatgaatccgccatcgaatctggaagggctcatcaaagtttagattctttatgagtcactctcattctttttagcccaaatccattagtagtagtctagtaagactagtagtagtagcaatggatgttatttgtgttctctatttcaccatcacttgtcccttctccattgtgtaataatattactatcttagttaatcaaatctataaaaaaaaaaaacattaatggaacaaaaacatt

SEQ ID NO: 29120 - protein, 341 aa, Arabidopsis thaliana
  peptide (1)..(341): Ceres Seq. ID no. 12602556
MGSLKEGQGRDMEEGESEEPLLMAQNQRFTMFPIRYKSIWEMYKKAEASFWTAEEVDLSTDVQQWEALTDSEKHFISHILAFFAASDGIVLENLAARFLNDVQVPEARAFYGFQIAMENIHSEMYSLLLETFIKDSKEKDRLFNAIETIPCISKKAKWCLDWIQSPMSFAVRLVAFACVEGIFFSGSFCAIFWLKKRGLMPGLTFSNELISRDEGLHCDFACLLYSLLQKQLPLEKVYQIVHEAVEIETEFVCKALPCDLIGMNSNLMSQYIQFVADRLLVTLGCERTYKAENPFDWMEFISLQGKTNFFEKRVGEYQKASVMSNLQNGNQNYEFTTEEDF

SEQ ID NO: 29121 - protein, 330 aa, Arabidopsis thaliana
  peptide (1)..(330): Ceres Seq. ID no. 12602557
MEEGESEEPLLMAQNQRFTMFPIRYKSIWEMYKKAEASFWTAEEVDLSTDVQQWEALTDSEKHFISHILAFFAASDGIVLENLAARFLNDVQVPEARAFYGFQIAMENIHSEMYSLLLETFIKDSKEKDRLFNAIETIPCISKKAKWCLDWIQSPMSFAVRLVAFACVEGIFFSGSFCAIFWLKKRGLMPGLTFSNELISRDEGLHCDFACLLYSLLQKQLPLEKVYQIVHEAVEIETEFVCKALPCDLIGMNSNLMSQYIQFVADRLLVTLGCERTYKAENPFDWMEFISLQGKTNFFEKRVGEYQKASVMSNLQNGNQNYEFTTEEDF

SEQ ID NO: 29122 - protein, 319 aa, Arabidopsis thaliana
  peptide (1)..(319): Ceres Seq. ID no. 12602558
MAQNQRFTMFPIRYKSIWEMYKKAEASFWTAEEVDLSTDVQQWEALTDSEKHFISHILAFFAASDGIVLENLAARFLNDVQVPEARAFYGFQIAMENIHSEMYSLLLETFIKDSKEKDRLFNAIETIPCISKKAKWCLDWIQSPMSFAVRLVAFACVEGIFFSGSFCAIFWLKKRGLMPGLTFSNELISRDEGLHCDFACLLYSLLQKQLPLEKVYQIVHEAVEIETEFVCKALPCDLIGMNSNLMSQYIQFVADRLLVTLGCERTYKAENPFDWMEFISLQGKTNFFEKRVGEYQKASVMSNLQNGNQNYEFTTEEDF

SEQ ID NO: 29123 - DNA, 748 bp, Arabidopsis thaliana
  misc_feature (1)..(748): Ceres Seq. ID no. 12580430
  misc_feature (1)..(748): Ortholog of  Ceres SEQ ID NO 15174048 as cited in SEQ ID NO 61892
attagtcattactcctcccggcgtctccatcgccgtctctatctaatttcgtcctgcgtcgaccttgtgagctacttcagtttccggccatcacgcagctccagttgtatgttttgtgggttatacaaagatgacaacaatcgaaaccggtcagaaaactcaaaagtcttctccttccggttctgctactaccgctactggtacactcaagcagtcatcagcatcgtttaaaaggtggggagggagacacccgtttgtaagatatggacttccgatgatatctctcactgtatttggagccctaggactcggccaactacttcaaggcagtaaggatattgcaaaggtaaaagatgaccaagaatgggagattatagaaacaagaaaggcactttcgagaacaggacctgtcgatgcctataaacctaaaaacacatccattgaagatgagctcaaggctatgcaagagaaggtggacataaacacgtacgagtacaagaaaattccaaagctaaacgaaagcaagtcgagttaagaagagtctttgtataagattagtctttctagatgtgtttcagttttaaatgactcttcagttcacataatcgcccaagtacaaattccagtaagttctgtctgggcttcctaaaaccaagaacaacgagggacttgccaattgttgataatacatgttgtcgtgttgatttacgacgtccaaatagatctgaaagaggctttataaccagtt

SEQ ID NO: 29124 - protein, 134 aa, Arabidopsis thaliana
  peptide (1)..(134): Ceres Seq. ID no. 12580431
MTTIETGQKTQKSSPSGSATTATGTLKQSSASFKRWGGRHPFVRYGLPMISLTVFGALGLGQLLQGSKDIAKVKDDQEWEIIETRKALSRTGPVDAYKPKNTSIEDELKAMQEKVDINTYEYKKIPKLNESKSS

SEQ ID NO: 29125 - protein, 86 aa, Arabidopsis thaliana
  peptide (1)..(86): Ceres Seq. ID no. 12580432
MISLTVFGALGLGQLLQGSKDIAKVKDDQEWEIIETRKALSRTGPVDAYKPKNTSIEDELKAMQEKVDINTYEYKKIPKLNESKSS

SEQ ID NO: 29126 - protein, 76 aa, Arabidopsis thaliana
  peptide (1)..(76): Ceres Seq. ID no. 12580433
ISHYSSRRLHRRLYLISSCVDLVSYFSFRPSRSSSCMFCGLYKDDNNRNRSENSKVFSFRFCYYRYWYTQAVISIV

SEQ ID NO: 29127 - DNA, 1016 bp, Arabidopsis thaliana
  misc_feature (1)..(1016): Ceres Seq. ID no. 12337966
  misc_feature (1)..(1016): Ortholog of  Ceres SEQ ID NO 13582893 as cited in SEQ ID NO 62081
ggttagagactcgtttggttatcacaactccacgacgagaggaaaaaaaaaaactcagagagacaaatctaaatggcgatgattacgcgcaacaccgccacgcgcctccctctcctcctccaatctcaacgcgccgtcgccgctgcctcggtctctcacctccacacatcccttcccgctctctctccctccacatcaccgacttcctacaccagacctggtcctccttcgacctcccctcctcctcctggtctctctaaagcggccgaatttgtgatctccaaggtcgatgatctcatgaactgggctcgtaccggatcgatctggcctatgacctttggtctcgcttgctgcgccgtcgaaatgatgcataccggtgctgctcgctacgatctcgatcgattcggtatcatcttcaggcctagtcctcgccagtctgattgtatgattgtcgccggtactcttaccaataagatggctccggctcttcgcaaggtttatgaccagatgcctgagccaaggtgggtgatttcaatgggaagttgtgccaatggaggtggatactatcactactcctactcggtggttcgaggatgtgacagaattgtcccagtcgacatatacgtcccggggtgcccaccaaccgctgaggctttgctctatggactactccagcttcagaagaaaatcaacaggcgcaaggatttcttgcattggtggaacaagtgagcttcgaacccgtcctccaatcgtgaaagggacttttttcagacatttttaccaaagtttggggataataaatcgtggacgtttcattgcatatttctttgtggtggagatgccatgtaaaggagtgtgtttctaagtttgttgtggaaacttaataaacttaagatgtttgttgtctgagttcttttatgggctcttttattatatatctctctctaccagttttcagctacatgctgactattgctaaatacctacatatatttatacatacgagtgtgttttgt

SEQ ID NO: 29128 - protein, 218 aa, Arabidopsis thaliana
  peptide (1)..(218): Ceres Seq. ID no. 12337967
MAMITRNTATRLPLLLQSQRAVAAASVSHLHTSLPALSPSTSPTSYTRPGPPSTSPPPPGLSKAAEFVISKVDDLMNWARTGSIWPMTFGLACCAVEMMHTGAARYDLDRFGIIFRPSPRQSDCMIVAGTLTNKMAPALRKVYDQMPEPRWVISMGSCANGGGYYHYSYSVVRGCDRIVPVDIYVPGCPPTAEALLYGLLQLQKKINRRKDFLHWWNK

SEQ ID NO: 29129 - protein, 216 aa, Arabidopsis thaliana
  peptide (1)..(216): Ceres Seq. ID no. 12337968
MITRNTATRLPLLLQSQRAVAAASVSHLHTSLPALSPSTSPTSYTRPGPPSTSPPPPGLSKAAEFVISKVDDLMNWARTGSIWPMTFGLACCAVEMMHTGAARYDLDRFGIIFRPSPRQSDCMIVAGTLTNKMAPALRKVYDQMPEPRWVISMGSCANGGGYYHYSYSVVRGCDRIVPVDIYVPGCPPTAEALLYGLLQLQKKINRRKDFLHWWNK

SEQ ID NO: 29130 - protein, 143 aa, Arabidopsis thaliana
  peptide (1)..(143): Ceres Seq. ID no. 12337969
MNWARTGSIWPMTFGLACCAVEMMHTGAARYDLDRFGIIFRPSPRQSDCMIVAGTLTNKMAPALRKVYDQMPEPRWVISMGSCANGGGYYHYSYSVVRGCDRIVPVDIYVPGCPPTAEALLYGLLQLQKKINRRKDFLHWWNK

SEQ ID NO: 29131 - DNA, 1273 bp, Arabidopsis thaliana
  misc_feature (1)..(1273): Ceres Seq. ID no. 12334392
  misc_feature (1)..(1273): Ortholog of  Ceres SEQ ID NO 15177055 as cited in SEQ ID NO 57450
  misc_feature (1)..(1273): Ortholog of  Ceres SEQ ID NO 12615854 as cited in SEQ ID NO 62880
agtttgggattttttcgaaaacgcttttcaatcttcgtctatctgtctccacgatccacgccttgaccttcgttttttttttctcagagattagagaaaactccgataaccaatttctcaatctttttgtagatccaatttttccaggaaaaaaagaggtttcgcgaagaagatgagttttcaagatttagaatcaggaagaggaagatcaacgaggaaattcaatggtggtcgacaagattcgacacaagccgttgcttctggaatattccagatcaataccggagtctccacgtttcagcgactcgttaacacacttggtactcccaaagatacaccggagctccgggagaagctgcacaagacaaggttgcatattggacagcttgtgaaggatacttcagctaaacttaaagaagctagtgaaactgatcatcaaagcggtgtcaatccaagtaagaagattgcagatgctaagcttgcaagggactttcaagctgttttaaaagagtttcagaaagctcaacaaactgctgctgaaagagaaaccacttatactcctttcgtgcctcaatctgctcttccctctagctatacggcgggtgaggtggataaggtaccggaacagcgggcacaacttcaggagtcgaaaagacaagaacttgtattgttagacaacgagattgcattcaacgaggctgtgattgaagaaagagagcaaggaatacaagaaatccatcagcaaattggtgaggttaacgagatattcaaagatcttgcggttctggttaacgatcaaggagtcatgatagatgatattggtactcacattgacaactcccgtgctgcaacttcacaaggaaaatctcagcttgtgcaagccgcgaaaacacaaaaatcaaactcctctctgacatgcttgctcttggtgatatttggcattgttctcctgatcgtgattatagtactcgcagcttgatttcgaacagcaagaacatttcgtttgtgtgtgttcattgatcttaaggcatcaatgactggaactacttggtatatattatatgttgaagagaacacttagaagttggttttgtgtttgtttgggttggttcagttcggtttgaggttctattggttaatgtaatagtgtgtgcgtgtgtggcttttttgttgtgcaaacattttgttggagatgacagaaactctgttttgtttgtgattctcctatgttctcctaaatctttgttgagaggaaacaaaaactatttgctcg

SEQ ID NO: 29132 - protein, 268 aa, Arabidopsis thaliana
  peptide (1)..(268): Ceres Seq. ID no. 12334393
MSFQDLESGRGRSTRKFNGGRQDSTQAVASGIFQINTGVSTFQRLVNTLGTPKDTPELREKLHKTRLHIGQLVKDTSAKLKEASETDHQSGVNPSKKIADAKLARDFQAVLKEFQKAQQTAAERETTYTPFVPQSALPSSYTAGEVDKVPEQRAQLQESKRQELVLLDNEIAFNEAVIEEREQGIQEIHQQIGEVNEIFKDLAVLVNDQGVMIDDIGTHIDNSRAATSQGKSQLVQAAKTQKSNSSLTCLLLVIFGIVLLIVIIVLAA

SEQ ID NO: 29133 - DNA, 1381 bp, Arabidopsis thaliana
  misc_feature (1)..(1381): Ceres Seq. ID no. 12333866
  misc_feature (1)..(1381): Ortholog of  Ceres SEQ ID NO 15178260 as cited in SEQ ID NO 59907
  misc_feature (1)..(1381): Ortholog of  Ceres SEQ ID NO 14313548 as cited in SEQ ID NO 68496
aattccctctagtaccaaatcctattactattgaaggtatactctatagttatttatttagttaagtatatatattaaaaataaataacattaattagtactagtcttatcatatttattagctcattttcttataaaatactaatataataggaaatttaagcacaagatgagctttgcccatcgagagcctcaaaacccaaaagtctcttcttcttcacgagatccaatcttttgctttttagtaattaattacatcttcttccttctcttctctcttcttcttccctctctcatacctacctataagcaacacaaagaacaccattgatcccatctgttttgttccctatatttcgttaatccatccatacgcattccaactacacgctttttgtatgcaaccccaaatagcagcttaaagaaagcagagaggatcttcttttatttcccctctgagcaacagaagccattattcaaagaaaggcttctttaatttactcgcagggagagggaaaagagaaaaaattgaaaaactccattttcaagtcattaaaatggcatcttcttcaacaaactcaccatgcgccgcttgcaaattcctccggcgaaaatgtcaaccggaatgtgtattcgcgccctatttcccaccggaccagccacaaaaattcgcaaacgttcacaaagtgtttggagcaagtaacgtgacaaagctcctcaacgagcttcacccttcacaacgtgaagacgcagtgaactctttggcctatgaagccgacatgcgcctccgtgaccctgtctacggctgcgtcggcgtcatctctctcctccaacatcagcttcgtcagcttcagatagatctcagctgtgctaaatctgagctctctaagtaccaaagcctcggtatcctcgccgccactcatcagagtcttggcatcaacttactcgccggagcagcagatggaacagccaccgccgtgagagaccactatcaccaccaccagttttttcctagagaacaaatgtttggtggcttggatgttccggccggtaacaactacgacggtgggattcttgccattggacagatcactcagtttcagcagccgagagccgccgctggagatgatggtcgccgtactgttgatccgtcttgagattttagggttttggtggtgttcatcttcgtcgatcgcttggtgatgagaaaactataattttaagaaaatatttgatgtggaaaaccaaaatattttaaacgtatggtacgtctctcttaatgacattaatttcggtttttattattattattacttagatatattatgatagtcacttttgtatttctttcaaattttatggacttgctctcttaattgat

SEQ ID NO: 29134 - protein, 199 aa, Arabidopsis thaliana
  peptide (1)..(199): Ceres Seq. ID no. 12333867
MASSSTNSPCAACKFLRRKCQPECVFAPYFPPDQPQKFANVHKVFGASNVTKLLNELHPSQREDAVNSLAYEADMRLRDPVYGCVGVISLLQHQLRQLQIDLSCAKSELSKYQSLGILAATHQSLGINLLAGAADGTATAVRDHYHHHQFFPREQMFGGLDVPAGNNYDGGILAIGQITQFQQPRAAAGDDGRRTVDPS

SEQ ID NO: 29135 - protein, 125 aa, Arabidopsis thaliana
  peptide (1)..(125): Ceres Seq. ID no. 12333868
MRLRDPVYGCVGVISLLQHQLRQLQIDLSCAKSELSKYQSLGILAATHQSLGINLLAGAADGTATAVRDHYHHHQFFPREQMFGGLDVPAGNNYDGGILAIGQITQFQQPRAAAGDDGRRTVDPS

SEQ ID NO: 29136 - DNA, 1026 bp, Arabidopsis thaliana; identical to SEQ ID NO: 26128
  misc_feature (1)..(1026): Ceres Seq. ID no. 13488738
  misc_feature (1)..(1026): Ortholog of  Ceres SEQ ID NO 14308727 as cited in SEQ ID NO 58726
  misc_feature (1)..(1026): Ortholog of  Ceres SEQ ID NO 13663517 as cited in SEQ ID NO 66850

SEQ ID NO: 29137 - protein, 231 aa, Arabidopsis thaliana; identical to SEQ ID NO: 26129
  peptide (1)..(231): Ceres Seq. ID no. 13488739

SEQ ID NO: 29138 - protein, 220 aa, Arabidopsis thaliana; identical to SEQ ID NO: 26130
  peptide (1)..(220): Ceres Seq. ID no. 13488740

SEQ ID NO: 29139 - protein, 208 aa, Arabidopsis thaliana; identical to SEQ ID NO: 26131
  peptide (1)..(208): Ceres Seq. ID no. 13488741

SEQ ID NO: 29140 - DNA, 992 bp, Arabidopsis thaliana
  misc_feature (1)..(992): Ceres Seq. ID no. 12394136
  misc_feature (1)..(992): Ortholog of  Ceres SEQ ID NO 13594655 as cited in SEQ ID NO 51843
  misc_feature (1)..(992): Ortholog of  Ceres SEQ ID NO 13637562 as cited in SEQ ID NO 53674
  misc_feature (1)..(992): Ortholog of  Ceres SEQ ID NO 13595851 as cited in SEQ ID NO 56559
  misc_feature (1)..(992): Ortholog of  Ceres SEQ ID NO 15173454 as cited in SEQ ID NO 57898
  misc_feature (1)..(992): Ortholog of  Ceres SEQ ID NO 13598755 as cited in SEQ ID NO 69032
aaaaaaaaatccgtagtttcttctacagaatcagatctttgtatcgtcaatggctccttcttttatttttgtagaagatcgtccagctccgcttgatgctacttctgatccaccgtctctcttcgacggaaccacaaggttgtacacaagctacgtttgcccatttgctcaacgagtttggatcactcgaaacttcaagggtttgcaagaaaagattaaacttgttcctttggatcttgggaataggcctgcttggtacaaggagaaagtatatccagagaacaaggtgccagcgcttgagcacaatggaaaaatcattggggagagtctggatttgattaaatatcttgataacacttttgaagggccttctctttaccccgaggatcatgcaaaaagagagtttggcgacgagttgctcaagtatactgatactttcgttaaaactatgtatgtgtcactcaaaggagacccctctaaagaaaccgcacctgtgttagattatctggaaaacgctctgtataagttcgatgacgggccgttcttcctcggtcagttaagcttggttgatatcgcctatatcccgttcattgaaaggttccaaactgtactcaatgaattatttaagtgcgacattactgccgaacgtcccaaactatcagcatggattgaggaaattaacaagagcgatggctatgcacagacgaaaatggatcctaaggagattgtggaggttttcaagaaaaaattcatgtaactgtaagcaagcacgaagcagtaaagtgtatgagaccaaaccaccttgtacgaacaggtggtctttggatatgaagaaataagatgtgtacttgaacctgatgatgcaataagatttgtactttacatgatgcagcaacagcttaatctgtattctagtgttgatcaaattatcaaccattgacattgttaatatattactgtatgatagtaatactatcaaaatctcacacatt

SEQ ID NO: 29141 - protein, 235 aa, Arabidopsis thaliana
  peptide (1)..(235): Ceres Seq. ID no. 12394137
MAPSFIFVEDRPAPLDATSDPPSLFDGTTRLYTSYVCPFAQRVWITRNFKGLQEKIKLVPLDLGNRPAWYKEKVYPENKVPALEHNGKIIGESLDLIKYLDNTFEGPSLYPEDHAKREFGDELLKYTDTFVKTMYVSLKGDPSKETAPVLDYLENALYKFDDGPFFLGQLSLVDIAYIPFIERFQTVLNELFKCDITAERPKLSAWIEEINKSDGYAQTKMDPKEIVEVFKKKFM

SEQ ID NO: 29142 - DNA, 1247 bp, Arabidopsis thaliana
  misc_feature (1)..(1247): Ceres Seq. ID no. 13489989
  misc_feature (1)..(1247): Ortholog of  Ceres SEQ ID NO 12557420 as cited in SEQ ID NO 15
  misc_feature (1)..(1247): Ortholog of  Ceres SEQ ID NO 12781963 as cited in SEQ ID NO 56339
  misc_feature (1)..(1247): Ortholog of  Ceres SEQ ID NO 15179365 as cited in SEQ ID NO 0
  misc_feature (1)..(1247): Ortholog of  Ceres SEQ ID NO 15224673 as cited in SEQ ID NO 0
  misc_feature (1)..(1247): Ortholog of  Ceres SEQ ID NO 15227157 as cited in SEQ ID NO 0
atggtgggatttaagaacagatacatgttaatggaagtttttctggatccggacaaggatcttctcggagaaggaacaccgatcattcttacacaattcaatctctcgaaagcaatcaaagacagtatcctcgtcaatttcggcgagtgtggtctaggttcgtctctcggttccttccaagtgaaatatgtgaatccaatcacgaagctatgcattgtaagatcatcaagagaagaacacagacaagtttggttagcaatcacattggtcaaaagcatcggaaactgtccggtgatcttaaacttgctcgatattagcggttgcatcagagcgtgtagagacacacttttaataaatccaaaatttctaatctggagagaacctatctctgaggtccaaactcttcggtggaggagaagaactgaaacggaaatgagatcccctagaaccttggaggtttggaagctaggcactgtcaactatttgaaatcccttaaactgcaggagaaattagtttcagagagaaaagctcatcagattccagataccctcctctcgcttcagcatccaccaacttatacgctcggaaagcgtagaaccgatcacaatctacttatccctgaatctgaacttacaaaaatcggagctgaacttcattatactcaaagaggaggagacatcaccttccatggccctcatcaagccatcttatatcccatcatttccttacgcagcattggttttggtgctaggaactacgtggagacattggagcggtcaatgatcgagtttgcttcgatttatggcgtgaaagctcgagcaggaaacaaatgtgagactggggtttgggttggggataggaagatcggtgctattggggttaggatatcttctggaatcactagtcatggtttggccttaaatatagatcctgatatgaagtactttgagcacattgtgccttgtgggattgctgataaagaagttacatctttgcgaagagagacggatactctgcttccttcagaagaagtgattcatgaacagttggtttcttgtttagccaaagcgttttcttatgatgatgttgtctggaaggaagatccttcactcattttggacacccaagataaagaataatccggtttgatccggttttgatttattgtctacaaaaaatgttattattttttgacgtgatgtggatttctgatattgtcttattcattctcaaattttcattaaaa

SEQ ID NO: 29143 - protein, 379 aa, Arabidopsis thaliana
  peptide (1)..(379): Ceres Seq. ID no. 13489990
MVGFKNRYMLMEVFLDPDKDLLGEGTPIILTQFNLSKAIKDSILVNFGECGLGSSLGSFQVKYVNPITKLCIVRSSREEHRQVWLAITLVKSIGNCPVILNLLDISGCIRACRDTLLINPKFLIWREPISEVQTLRWRRRTETEMRSPRTLEVWKLGTVNYLKSLKLQEKLVSERKAHQIPDTLLSLQHPPTYTLGKRRTDHNLLIPESELTKIGAELHYTQRGGDITFHGPHQAILYPIISLRSIGFGARNYVETLERSMIEFASIYGVKARAGNKCETGVWVGDRKIGAIGVRISSGITSHGLALNIDPDMKYFEHIVPCGIADKEVTSLRRETDTLLPSEEVIHEQLVSCLAKAFSYDDVVWKEDPSLILDTQDKE

SEQ ID NO: 29144 - protein, 371 aa, Arabidopsis thaliana
  peptide (1)..(371): Ceres Seq. ID no. 13489991
MLMEVFLDPDKDLLGEGTPIILTQFNLSKAIKDSILVNFGECGLGSSLGSFQVKYVNPITKLCIVRSSREEHRQVWLAITLVKSIGNCPVILNLLDISGCIRACRDTLLINPKFLIWREPISEVQTLRWRRRTETEMRSPRTLEVWKLGTVNYLKSLKLQEKLVSERKAHQIPDTLLSLQHPPTYTLGKRRTDHNLLIPESELTKIGAELHYTQRGGDITFHGPHQAILYPIISLRSIGFGARNYVETLERSMIEFASIYGVKARAGNKCETGVWVGDRKIGAIGVRISSGITSHGLALNIDPDMKYFEHIVPCGIADKEVTSLRRETDTLLPSEEVIHEQLVSCLAKAFSYDDVVWKEDPSLILDTQDKE

SEQ ID NO: 29145 - protein, 369 aa, Arabidopsis thaliana
  peptide (1)..(369): Ceres Seq. ID no. 13489992
MEVFLDPDKDLLGEGTPIILTQFNLSKAIKDSILVNFGECGLGSSLGSFQVKYVNPITKLCIVRSSREEHRQVWLAITLVKSIGNCPVILNLLDISGCIRACRDTLLINPKFLIWREPISEVQTLRWRRRTETEMRSPRTLEVWKLGTVNYLKSLKLQEKLVSERKAHQIPDTLLSLQHPPTYTLGKRRTDHNLLIPESELTKIGAELHYTQRGGDITFHGPHQAILYPIISLRSIGFGARNYVETLERSMIEFASIYGVKARAGNKCETGVWVGDRKIGAIGVRISSGITSHGLALNIDPDMKYFEHIVPCGIADKEVTSLRRETDTLLPSEEVIHEQLVSCLAKAFSYDDVVWKEDPSLILDTQDKE

SEQ ID NO: 29146 - DNA, 709 bp, Arabidopsis thaliana
  misc_feature (1)..(709): Ceres Seq. ID no. 12331898
  misc_feature (1)..(709): Ortholog of  Ceres SEQ ID NO 13582188 as cited in SEQ ID NO 55950
  misc_feature (1)..(709): Ortholog of  Ceres SEQ ID NO 12611286 as cited in SEQ ID NO 56182
  misc_feature (1)..(709): Ortholog of  Ceres SEQ ID NO 15173288 as cited in SEQ ID NO 58150
  misc_feature (1)..(709): Ortholog of  Ceres SEQ ID NO 13663461 as cited in SEQ ID NO 66601
atccaacaaacttatatgtgtatcggacacagaagaatactttcgacgatcatcagcttctggaaatctcttctgggaatcgagcttcactgttaaagattttccttcaatcggctaaaaatgatacatttcgtgttactagtcagtcgacaagggaaagtaaggctcaccaagtggtattcgccgtatacgcagaaggaaagatctaaggtcatacgtgaactcagcggagtgattctgaaccgaggtcccaagctctgcaattttattgaatggagaggatacaaggttgtctacaaaagatatgcaaggcttgtacttctgcatgtgcattgatgaggcggataacgagttagaggtactggagataattcatcactacgtcgagattcttgaccgctactttggcagtgtgtgtgaactcgatttgatttttaacttccacaaggcgtattatatactcgatgagctgttgatcgccggagaacttcaagagtcaagcaagaaaacagttgcaaggataatatcagcccaggatcaattggtggaagttgcgaaagaggaggcgagttccataagtaatataattgctcaggctaccaagtagtccttttctgaacttttcttatgcagctgaaacaatcgtaaatgagttaatattttccttaaactctgagatattctcttctgaatcacacttttgtttgtc

SEQ ID NO: 29147 - protein, 93 aa, Arabidopsis thaliana
  peptide (1)..(93): Ceres Seq. ID no. 12331899
MCIDEADNELEVLEIIHHYVEILDRYFGSVCELDLIFNFHKAYYILDELLIAGELQESSKKTVARIISAQDQLVEVAKEEASSISNIIAQATK

SEQ ID NO: 29148 - protein, 71 aa, Arabidopsis thaliana
  peptide (1)..(71): Ceres Seq. ID no. 12331900
MIHFVLLVSRQGKVRLTKWYSPYTQKERSKVIRELSGVILNRGPKLCNFIEWRGYKVVYKRYARLVLLHVH

SEQ ID NO: 29149 - protein, 100 aa, Arabidopsis thaliana
  peptide (1)..(100): Ceres Seq. ID no. 12331901
MQGLYFCMCIDEADNELEVLEIIHHYVEILDRYFGSVCELDLIFNFHKAYYILDELLIAGELQESSKKTVARIISAQDQLVEVAKEEASSISNIIAQATK

SEQ ID NO: 29150 - DNA, 1087 bp, Arabidopsis thaliana
  misc_feature (1)..(1087): Ceres Seq. ID no. 12334939
  misc_feature (1)..(1087): Ortholog of  Ceres SEQ ID NO 14311467 as cited in SEQ ID NO 51230
tttttcccaaaattggattcaaagttctttctttttgtcttcctcgtacatcacagcatcaagggttttcgacattaccagctattatgcttgaatttgaggacgcaaggagttaaaagagcaagtcttttgagttgaggaagcttctgtagaggattattatttcaggggaaatttaagggtttgatcagcttttgtgtgttgtgcgggatggatcaaattgtttcaggagaagaagaagatcttgatgtagatattgaagatggtagattcaatgagacacaagagataacgacgaatcttgtttcagcggaaggggattcagagaatgttttgaatcatgtttggagtggacgtttgagttttgatgggtctgaaaagagtgctgatgatctagtagaccctttaatgggagagggaaagcggagagaaagaagcagtcaaagtttggatctttcggatatgaagtttgataatgataagtttaagaagacgagaaaaccttcaaagccaccgaggcctccaaaaggtccgttactgagtgctaatgaccagaagttgatgagggaaatcacggagcttgctatgagaaagcgtgctcggattgaacggatgaaaacactcagaagattgaaagcagcaaagtcctcgtctccctgcagtagcattttcgccatgatagtgacggttatattcttcgtcttcttaatctttcaagggttcttcacaagcaatgcgagtttgaattctgacaattcacctgcaccaaataattcagctaataaccgtatggtctctgttcagttctacaatgagtttgctcctcgtgagagaatcgatcccagccctactacttctttcaggtataagagagtctcaggtgcagacaatgaagaaaacacaagagaagttaccagatgagtttcttctctttggattcttgtaaaatgtaaccaaaaacactacttatgtttttgtttgttcgtaaattcttgacatcactctattgttcctttgatctgtttgtgttcacatgtttgtctctctgttactcttcttgtaaatattcttatggatgaatctgctc

SEQ ID NO: 29151 - protein, 236 aa, Arabidopsis thaliana
  peptide (1)..(236): Ceres Seq. ID no. 12334940
MDQIVSGEEEDLDVDIEDGRFNETQEITTNLVSAEGDSENVLNHVWSGRLSFDGSEKSADDLVDPLMGEGKRRERSSQSLDLSDMKFDNDKFKKTRKPSKPPRPPKGPLLSANDQKLMREITELAMRKRARIERMKTLRRLKAAKSSSPCSSIFAMIVTVIFFVFLIFQGFFTSNASLNSDNSPAPNNSANNRMVSVQFYNEFAPRERIDPSPTTSFRYKRVSGADNEENTREVTR

SEQ ID NO: 29152 - protein, 170 aa, Arabidopsis thaliana
  peptide (1)..(170): Ceres Seq. ID no. 12334941
MGEGKRRERSSQSLDLSDMKFDNDKFKKTRKPSKPPRPPKGPLLSANDQKLMREITELAMRKRARIERMKTLRRLKAAKSSSPCSSIFAMIVTVIFFVFLIFQGFFTSNASLNSDNSPAPNNSANNRMVSVQFYNEFAPRERIDPSPTTSFRYKRVSGADNEENTREVTR

SEQ ID NO: 29153 - protein, 152 aa, Arabidopsis thaliana
  peptide (1)..(152): Ceres Seq. ID no. 12334942
MKFDNDKFKKTRKPSKPPRPPKGPLLSANDQKLMREITELAMRKRARIERMKTLRRLKAAKSSSPCSSIFAMIVTVIFFVFLIFQGFFTSNASLNSDNSPAPNNSANNRMVSVQFYNEFAPRERIDPSPTTSFRYKRVSGADNEENTREVTR

SEQ ID NO: 29154 - DNA, 1856 bp, Arabidopsis thaliana
  misc_feature (1)..(1856): Ceres Seq. ID no. 13490623
  misc_feature (1)..(1856): Ortholog of  Ceres SEQ ID NO 15172476 as cited in SEQ ID NO 54945
  misc_feature (1)..(1856): Ortholog of  Ceres SEQ ID NO 13654989 as cited in SEQ ID NO 63117
  misc_feature (1)..(1856): Ortholog of  Ceres SEQ ID NO 13584744 as cited in SEQ ID NO 69137
atgactcagtcttctctctctcttctctcaatgcccatgataacaccaaaccacttgcttctgcttctcacaccacaaaattctctattcaataaataaatctctcagaagaaatttcttcgaattggagaagataaaaaaagttttatcttttcttgattttttttcttttttttctaatcattcacacccaatttaaacgagacttgtccaatctctatccatcaatattgtatcatttcttgtaaagtactctgttttagcttcacacgccattttttgtttttccatttgacttctgtaaaatcctgacaaagaattgtttaagacatacatatacgtgttatatatttgtaaaggaagcaaaaagtgtttggcttttaatttctctctgttgggatgggtctttgttggggatctccatctgattctcctccaacaacaacaccttcctctactggtaacatcagttcagtagggacttttaagtcatcaaacaacacgacgactacaggaacatcaaggggaagtaacatatctagcaatagtgggttctctgtggcaagtggtgaagatgcttaccccgatggtcagatacttcccattccgaatttgaggatattcagcttagcagaacttagagcttcaacaaggaatttcaggtctgagaatgttcttggagagggaggatttgggaaagtctttaaaggctggcttgaagacaagactccagggaaacaaagcaacggaactgtgattgctgttaagaaactgaatgcagaaagcttccaaggattcgaagaatggcaatgtgaagtgaattttcttgggagggtttctcatccaaacctcgtgaagctgttgggatactgcttggaaggtgaagagttgcttcttgtgtatgagtatatgcaaaaagggagcttagagaatcatctcttccgaaaggggtctgccgttcagccactctcatgggagataaggcttaagattgcaataggagcagctaaaggcttagcattcttacacgcttcagagaagcaagtaatttatcgagacttcaaagcgtcaaacattctacttgatgggtcatataacgcaaagatatcagattttggattggcgaaattaggaccttccgctagtcaatctcacatcacaacacgggttatgggtacacacggttacgcagctccagagtatgttgctacaggtcacttgtatgtaaagagcgatgtttacgggtttggcgttgttttggctgagatcttaactggtttacatgcgcttgatcctactcgtcctaccgggcaacacaatctaaccgaatggatcaaacctcatctatccgaaagaagaaagctaagaagcataatggaccctcgtctagaaggaaaataccctttcaaatctgctttccgagtagctcaactggctctgaaatgccttggacccgaacccaaaaaccgtccatcgatgaaagaagtggtggaatcgctcgaactcatcgaagctgccaatgagaaaccgttagaacgaaggaccactagagcttccccatccatccgtcaacaacaaggccattatcgcccgcaacaactctcttcgtttcgtcctagacaaaacgtgtctcgagctcactagtgttgtttgaagacactgagattcttttcttagttttgtatttgttaagattatcaaaacccattcgtatgtatactacatgaaagagaaaacaaatgttgtacctgtattagtatgtagtgtttggtgtgtgtaatataactacttaaacggttaaaccagattatgaaaaggtttaactaatggtcatcaatatataagccattgttcac

SEQ ID NO: 29155 - protein, 414 aa, Arabidopsis thaliana
  peptide (1)..(414): Ceres Seq. ID no. 13490624
MGLCWGSPSDSPPTTTPSSTGNISSVGTFKSSNNTTTTGTSRGSNISSNSGFSVASGEDAYPDGQILPIPNLRIFSLAELRASTRNFRSENVLGEGGFGKVFKGWLEDKTPGKQSNGTVIAVKKLNAESFQGFEEWQCEVNFLGRVSHPNLVKLLGYCLEGEELLLVYEYMQKGSLENHLFRKGSAVQPLSWEIRLKIAIGAAKGLAFLHASEKQVIYRDFKASNILLDGSYNAKISDFGLAKLGPSASQSHITTRVMGTHGYAAPEYVATGHLYVKSDVYGFGVVLAEILTGLHALDPTRPTGQHNLTEWIKPHLSERRKLRSIMDPRLEGKYPFKSAFRVAQLALKCLGPEPKNRPSMKEVVESLELIEAANEKPLERRTTRASPSIRQQQGHYRPQQLSSFRPRQNVSRAH

SEQ ID NO: 29156 - protein, 244 aa, Arabidopsis thaliana
  peptide (1)..(244): Ceres Seq. ID no. 13490625
MQKGSLENHLFRKGSAVQPLSWEIRLKIAIGAAKGLAFLHASEKQVIYRDFKASNILLDGSYNAKISDFGLAKLGPSASQSHITTRVMGTHGYAAPEYVATGHLYVKSDVYGFGVVLAEILTGLHALDPTRPTGQHNLTEWIKPHLSERRKLRSIMDPRLEGKYPFKSAFRVAQLALKCLGPEPKNRPSMKEVVESLELIEAANEKPLERRTTRASPSIRQQQGHYRPQQLSSFRPRQNVSRAH

SEQ ID NO: 29157 - DNA, 2034 bp, Arabidopsis thaliana
  misc_feature (1)..(2034): Ceres Seq. ID no. 12324566
  misc_feature (1)..(2034): Ortholog of  Ceres SEQ ID NO 13594037 as cited in SEQ ID NO 55666
  misc_feature (1)..(2034): Ortholog of  Ceres SEQ ID NO 13657707 as cited in SEQ ID NO 66407
atcatcactcactagtgtcgaacaatggcaccatcaatgaaagaaattttttctaaagataatttcaagaaaaacaagaaacttgttttgctatccgccgccgtagctttgctcttcgtagccgccgtcgccggaatctctgccggagcttcaaaagccaacgaaaaacgaactctatccccgtcgtctcacgccgtgctaagatcctcatgcagctccacgcgttaccctgagctctgtatctctgccgtggtaactgccggcggcgtcgagctaacgtcgcaaaaagatgtcatcgaggcatcggtgaacctaacaataaccgccgtggagcacaattacttcaccgtgaagaagctgatcaagaagaggaaaggactgacgccgcgcgagaagacggcgcttcatgactgtttggagactattgatgagacgctggacgagctccatgaaacggtggaagatctccatttgtatccaaccaaaaaaactctccgggaacacgccggagatctcaaaacactaattagctccgccattaccaaccaggagacttgtctcgacggcttctctcatgacgacgccgataagcaagttcgtaaagccttgttgaaggggcagatacacgtagagcacatgtgcagcaacgctctagcaatgatcaagaacatgactgatactgacatagccaacttcgagcaaaaagctaaaataacctcaaacaaccgtaagctcaaggaggagaatcaggaaactacggtggctgtagatatcgccggagccggagaactagactcggagggatggccaacttggttatccgctggagataggaggcttcttcagggttcaggtgtgaaagctgacgccaccgtggcagctgacggtagcggtacatttaaaactgtggctgctgcggttgccgcggcccctgaaaatagtaataagaggtatgtgatacatataaaagccggagtttacagagagaatgtggaggttgctaagaagaaaaagaatataatgtttatgggagatggtcggacgagaactattatcaccggaagtcgaaacgttgtagacggtagcaccactttccactccgccaccgttgctgctgtcggcgagagattcttagctcgtgacatcactttccaaaacacggcgggtccgtcgaagcaccaagcggtggctctccgtgtgggttctgatttctccgccttctacaattgcgacatgttagcttatcaagacactctatacgtccactctaaccgtcaattcttcgtcaaatgtctcatcgccggaaccgttgacttcatcttcggaaacgccgccgtcgtgctccaagactgtgacatccacgctcgccgccctaattccggtcagaaaaacatggtcacagctcagggaagaacggatcctaaccagaacacagggatcgttatccagaaatgtaggatcggtgccacgtcggatttacagtcggtgaaaggtagttttccgacgtacttgggtcggccatggaaggaatattcacaaacggtgataatgcagtcggctatctccgacgtgatccgacccgaagggtggtccgagtggaccgggacttttgcgttgaacactctgacttacagagagtattcgaacacaggagcaggggctggaactgcaaatagagtgaagtggaggggctttaaggtaattacggctgctgctgaagctcaaaaatatacggctggtcagtttattggtggtggaggctggttatcgtcgaccggtttccccttctcgctcggtctttgagagattgttgtgtaatgtgttcctacgtattgttggctacaaaaattattgattaatattgtatgaagcaaatcgtgttgtcctctttgttttgtttgggttgtgtactttctctagatcatcgtagtattagaaacgagatgaaataatgcgggtttttgcgccttgagaatatggatttgagaaaggagggatgttgcctatttgatgatgatgcatgatggatgtcat

SEQ ID NO: 29158 - protein, 592 aa, Arabidopsis thaliana
  peptide (1)..(592): Ceres Seq. ID no. 12324567
MAPSMKEIFSKDNFKKNKKLVLLSAAVALLFVAAVAGISAGASKANEKRTLSPSSHAVLRSSCSSTRYPELCISAVVTAGGVELTSQKDVIEASVNLTITAVEHNYFTVKKLIKKRKGLTPREKTALHDCLETIDETLDELHETVEDLHLYPTKKTLREHAGDLKTLISSAITNQETCLDGFSHDDADKQVRKALLKGQIHVEHMCSNALAMIKNMTDTDIANFEQKAKITSNNRKLKEENQETTVAVDIAGAGELDSEGWPTWLSAGDRRLLQGSGVKADATVAADGSGTFKTVAAAVAAAPENSNKRYVIHIKAGVYRENVEVAKKKKNIMFMGDGRTRTIITGSRNVVDGSTTFHSATVAAVGERFLARDITFQNTAGPSKHQAVALRVGSDFSAFYNCDMLAYQDTLYVHSNRQFFVKCLIAGTVDFIFGNAAVVLQDCDIHARRPNSGQKNMVTAQGRTDPNQNTGIVIQKCRIGATSDLQSVKGSFPTYLGRPWKEYSQTVIMQSAISDVIRPEGWSEWTGTFALNTLTYREYSNTGAGAGTANRVKWRGFKVITAAAEAQKYTAGQFIGGGGWLSSTGFPFSLGL

SEQ ID NO: 29159 - protein, 588 aa, Arabidopsis thaliana
  peptide (1)..(588): Ceres Seq. ID no. 12324568
MKEIFSKDNFKKNKKLVLLSAAVALLFVAAVAGISAGASKANEKRTLSPSSHAVLRSSCSSTRYPELCISAVVTAGGVELTSQKDVIEASVNLTITAVEHNYFTVKKLIKKRKGLTPREKTALHDCLETIDETLDELHETVEDLHLYPTKKTLREHAGDLKTLISSAITNQETCLDGFSHDDADKQVRKALLKGQIHVEHMCSNALAMIKNMTDTDIANFEQKAKITSNNRKLKEENQETTVAVDIAGAGELDSEGWPTWLSAGDRRLLQGSGVKADATVAADGSGTFKTVAAAVAAAPENSNKRYVIHIKAGVYRENVEVAKKKKNIMFMGDGRTRTIITGSRNVVDGSTTFHSATVAAVGERFLARDITFQNTAGPSKHQAVALRVGSDFSAFYNCDMLAYQDTLYVHSNRQFFVKCLIAGTVDFIFGNAAVVLQDCDIHARRPNSGQKNMVTAQGRTDPNQNTGIVIQKCRIGATSDLQSVKGSFPTYLGRPWKEYSQTVIMQSAISDVIRPEGWSEWTGTFALNTLTYREYSNTGAGAGTANRVKWRGFKVITAAAEAQKYTAGQFIGGGGWLSSTGFPFSLGL

SEQ ID NO: 29160 - protein, 388 aa, Arabidopsis thaliana
  peptide (1)..(388): Ceres Seq. ID no. 12324569
MCSNALAMIKNMTDTDIANFEQKAKITSNNRKLKEENQETTVAVDIAGAGELDSEGWPTWLSAGDRRLLQGSGVKADATVAADGSGTFKTVAAAVAAAPENSNKRYVIHIKAGVYRENVEVAKKKKNIMFMGDGRTRTIITGSRNVVDGSTTFHSATVAAVGERFLARDITFQNTAGPSKHQAVALRVGSDFSAFYNCDMLAYQDTLYVHSNRQFFVKCLIAGTVDFIFGNAAVVLQDCDIHARRPNSGQKNMVTAQGRTDPNQNTGIVIQKCRIGATSDLQSVKGSFPTYLGRPWKEYSQTVIMQSAISDVIRPEGWSEWTGTFALNTLTYREYSNTGAGAGTANRVKWRGFKVITAAAEAQKYTAGQFIGGGGWLSSTGFPFSLGL

SEQ ID NO: 29161 - DNA, 1203 bp, Arabidopsis thaliana
  misc_feature (1)..(1203): Ceres Seq. ID no. 12334431
  misc_feature (1)..(1203): Ortholog of  Ceres SEQ ID NO 14314823 as cited in SEQ ID NO 52565
  misc_feature (1)..(1203): Ortholog of  Ceres SEQ ID NO 14307324 as cited in SEQ ID NO 54131
  misc_feature (1)..(1203): Ortholog of  Ceres SEQ ID NO 13594940 as cited in SEQ ID NO 55819
agtgtctcttcatatttacataaatagatatctctctctctctctctctctaaaccacatcttcctctccaccgttctttctcttccttctctctctggacttcaacttctggagaagtacaagacatttataaagtactgctcatcacccaacactaaacacaattgtcaaaagggtgtggtggaaggagaatctacttctatctgaacatcgatcagtcatatcttttcaatcaaatcaaagccctcctctctctcttactccttttttgttttaaatcaagaaaaagactccatgtcgagcatgtccatgtcgtcctcctcagctccagcttttccaccggaccacttctcatctacggaccagctctgttacgtccattgcagcttctgcgacactgtccttgctgtgagtgttcctccgagtagtttgttcaagacggtgacggtcagatgcggccactgttcgaaccttttgtcggtgaccgtgagcatgagagctcttcttcttccatccgtttccaaccttggccattcctttttacctccccctcctcctcctcctcctccaaatcttttggaggaaatgcgaagcggagggcagaatataaacatgaacatgatgatgagccatcacgcttcagctcaccacccgaacgagcatttggttatggcgactcgcaacggaagatcagtggatcatctacaagagatgcctcggccaccaccagccaatagacccccagagaagcgacaaagagtaccatctgcatacaaccgattcatcaaagaggagatccaacgtataaaggcaggcaaccctgatatcagccacagagaagccttcagtgctgctgccaaaaactgggctcatttccctcacatacactttggactcatggctgaccatcctcccacgaagaaggctaacgtgcgccaacaggaaggagaggatgggatgatgggaagagaagggttttacggttcagctgccaacgttggggtggcccataactagctacgaagactttcccaatcttttgtaatcttcaaaatgtggttactttcagctcaaacttaactttcttattactattttatgatatttgataatcgatcaggagaccttttttttttttcttaaagaaattttcggaactactagaattttctcttggaattgaaaatatattgttttctcag

SEQ ID NO: 29162 - protein, 240 aa, Arabidopsis thaliana
  peptide (1)..(240): Ceres Seq. ID no. 12334432
MSSMSMSSSSAPAFPPDHFSSTDQLCYVHCSFCDTVLAVSVPPSSLFKTVTVRCGHCSNLLSVTVSMRALLLPSVSNLGHSFLPPPPPPPPPNLLEEMRSGGQNINMNMMMSHHASAHHPNEHLVMATRNGRSVDHLQEMPRPPPANRPPEKRQRVPSAYNRFIKEEIQRIKAGNPDISHREAFSAAAKNWAHFPHIHFGLMADHPPTKKANVRQQEGEDGMMGREGFYGSAANVGVAHN

SEQ ID NO: 29163 - protein, 237 aa, Arabidopsis thaliana
  peptide (1)..(237): Ceres Seq. ID no. 12334433
MSMSSSSAPAFPPDHFSSTDQLCYVHCSFCDTVLAVSVPPSSLFKTVTVRCGHCSNLLSVTVSMRALLLPSVSNLGHSFLPPPPPPPPPNLLEEMRSGGQNINMNMMMSHHASAHHPNEHLVMATRNGRSVDHLQEMPRPPPANRPPEKRQRVPSAYNRFIKEEIQRIKAGNPDISHREAFSAAAKNWAHFPHIHFGLMADHPPTKKANVRQQEGEDGMMGREGFYGSAANVGVAHN

SEQ ID NO: 29164 - protein, 235 aa, Arabidopsis thaliana
  peptide (1)..(235): Ceres Seq. ID no. 12334434
MSSSSAPAFPPDHFSSTDQLCYVHCSFCDTVLAVSVPPSSLFKTVTVRCGHCSNLLSVTVSMRALLLPSVSNLGHSFLPPPPPPPPPNLLEEMRSGGQNINMNMMMSHHASAHHPNEHLVMATRNGRSVDHLQEMPRPPPANRPPEKRQRVPSAYNRFIKEEIQRIKAGNPDISHREAFSAAAKNWAHFPHIHFGLMADHPPTKKANVRQQEGEDGMMGREGFYGSAANVGVAHN

SEQ ID NO: 29165 - DNA, 1384 bp, Arabidopsis thaliana
  misc_feature (1)..(1384): Ceres Seq. ID no. 13487636
  misc_feature (1)..(1384): Ortholog of  Ceres SEQ ID NO 14312981 as cited in SEQ ID NO 59119
  misc_feature (1)..(1384): Ortholog of  Ceres SEQ ID NO 13596962 as cited in SEQ ID NO 63323
cctttcttgtcgtcgtttcgaagagactaaaggcgacggagagaatcggagaagaagatgggaacggcggtgggacagtggctagaggaagcgcttgttgacctctgccgcaaaccagagaccggtttgaatttcgatcgtgatgtcatctccggtttagtctcctattgcgatcttgctcagcctgtcgatgccaaggaatatctcgacaatattattggaaaagaaggcaaaagcatcattgcagaatatctacagcgaagaggatacaaagatccatctagccatgtagcagccagttcaggtccagaactgcaaatgtatgttaagccaaaagtggataatggtgcttctagtggaaccaagaaaccgtttaaaacaccaaaagagggaacatcttctaatcagcaagctggaactgggaaattaacagctcccgcccagcaagttaatcctaagaagaaaaaaggtggaaaggtgatttctcttgccgaagcagctaaaggatcaatagtgtttcagcaaggaaaaccgtgtgcatgccaagctcgtagacaccacttagtgagcaactgcttgtcgtgtgggaaaatagtgtgcgaacaagaaggagaagggccttgcagtttttgcggagcacttgtgctgaaagaaggaagtacatatgctgggctagaggtagggtatactccagtatctgatgctgatgtggcagctgaagcatatgcgaaaaggcttgtagagtatgatagaaattcggccgcacgtacaacggttattgatgaccaaagcgattactatgaatctgagagcagtacttggctctctgcggaggaaaaagagctagtgaggaagaagcgagaggagattgaagaagctgaacgagtaaaaaagagcaaagtggttatgacatttgatttaatcggccgtaaggttctgttaaatgaagatgatatctcagaactagaatcagggaacaggattctgggaccacctgagactaaaaacgtgaacagaataaaaccgaacccgactgcaagactcgttccaatcttcttagacccaggaccaaccgagaagaagccaaacagcaccaccaccaagaaagacaacaagaaaaaccgaaacggtttgtgtctagagatcacaggaagggtgcaacatgacagaagtgaactcaaatacttacaagccgatccaaaatcggacggtaaatcttggccatcaggaaacgatggacttcatgtagaagatggtggtgaatgttccttagattacgactaaatatttttcagtaaccaaacccggttcaatgttttcggtttaccgaacctgatactatttgttcagtttaaaagtcaacaacttttctcttgttgagtcc

SEQ ID NO: 29166 - protein, 408 aa, Arabidopsis thaliana
  peptide (1)..(408): Ceres Seq. ID no. 13487637
MGTAVGQWLEEALVDLCRKPETGLNFDRDVISGLVSYCDLAQPVDAKEYLDNIIGKEGKSIIAEYLQRRGYKDPSSHVAASSGPELQMYVKPKVDNGASSGTKKPFKTPKEGTSSNQQAGTGKLTAPAQQVNPKKKKGGKVISLAEAAKGSIVFQQGKPCACQARRHHLVSNCLSCGKIVCEQEGEGPCSFCGALVLKEGSTYAGLEVGYTPVSDADVAAEAYAKRLVEYDRNSAARTTVIDDQSDYYESESSTWLSAEEKELVRKKREEIEEAERVKKSKVVMTFDLIGRKVLLNEDDISELESGNRILGPPETKNVNRIKPNPTARLVPIFLDPGPTEKKPNSTTTKKDNKKNRNGLCLEITGRVQHDRSELKYLQADPKSDGKSWPSGNDGLHVEDGGECSLDYD

SEQ ID NO: 29167 - protein, 321 aa, Arabidopsis thaliana
  peptide (1)..(321): Ceres Seq. ID no. 13487638
MYVKPKVDNGASSGTKKPFKTPKEGTSSNQQAGTGKLTAPAQQVNPKKKKGGKVISLAEAAKGSIVFQQGKPCACQARRHHLVSNCLSCGKIVCEQEGEGPCSFCGALVLKEGSTYAGLEVGYTPVSDADVAAEAYAKRLVEYDRNSAARTTVIDDQSDYYESESSTWLSAEEKELVRKKREEIEEAERVKKSKVVMTFDLIGRKVLLNEDDISELESGNRILGPPETKNVNRIKPNPTARLVPIFLDPGPTEKKPNSTTTKKDNKKNRNGLCLEITGRVQHDRSELKYLQADPKSDGKSWPSGNDGLHVEDGGECSLDYD

SEQ ID NO: 29168 - DNA, 1301 bp, Arabidopsis thaliana
  misc_feature (1)..(1301): Ceres Seq. ID no. 12334435
  misc_feature (1)..(1301): Ortholog of  Ceres SEQ ID NO 15169045 as cited in SEQ ID NO 58372
  misc_feature (1)..(1301): Ortholog of  Ceres SEQ ID NO 13597361 as cited in SEQ ID NO 63638
  misc_feature (1)..(1301): Ortholog of  Ceres SEQ ID NO 13595945 as cited in SEQ ID NO 68157
tcacacacacacacacacactctgttttcttcgtccattctattaccagaaaacagagtttgatagagagaaaagaatggaactgtcgactcaaatgaatgtgttcgaagagcttcttgttccgacaaagcaagaaacaaccgacaacaacatcaacaatctgagctttaatggcggatttgatcatcatcatcatcaattcttcccaaatggatataatattgattacctctgtttcaacaatgaagaagaagacgaaaatacccttttgtatccttcttctttcatggatctaatctctcaacctcctccattgcttcttcaccaaccgccaccgttacaaccactgtcgccgccgttatcctcctccgcgaccgccggagcaacatttgactacccttttcttgaggctttgcaagagataattgactcttcttcctcatcgcctccattgatccttcaaaatggtcaagaagagaactttaataatccgatgtcgtatccctctccattgatggagtctgatcagagcaagagcttcagtgttggttactgtggagggagagacgaacaagaagaagagcaaaaagcttgaaggccaaccttctaagaatctcatggcggagagacgcccggagaaaaccgacttaacgatcgtctttctaatggctccggatcccatcgtccccaaaaatcagtaagatggacaggacatcgatattaggagatgccatagattacatgaaagagcttttagacaaaatcaacaaattacaagatgaggaacaagaacttggaaatagcaacaattcacatcactctaagctcttcggtgatctcaaggatcttaatgcgaacgaacctctggtcagaaactcaccaaagtttgaaatagatcgtagagacgaggatactcgagttgatatatgctgctcgccaaaaccgggattgctactatctactgtgaatacattagagactctaggcttggagattgaacaatgtgttataagctgctttagtgatttctctttgcaggcttcttgttctgagggagctgagcagagagatttcataacatcagaagagataaaacaagcattattcagaaacgcaggttatggtggaagctgcttgtaatgagtcatgattgaaactaataaaccaaaactattgtttatttctaataatactagcgcttataaactttagatgttgttttaattcccttgtgagtttggtttttttttcctaggggaaaacattatgagttcagttgtataaacaaaagaaggaaattt

SEQ ID NO: 29169 - protein, 197 aa, Arabidopsis thaliana
  peptide (1)..(197): Ceres Seq. ID no. 12334436
HTHTHTLCFLRPFYYQKTEFDREKRMELSTQMNVFEELLVPTKQETTDNNINNLSFNGGFDHHHHQFFPNGYNIDYLCFNNEEEDENTLLYPSSFMDLISQPPPLLLHQPPPLQPLSPPLSSSATAGATFDYPFLEALQEIIDSSSSSPPLILQNGQEENFNNPMSYPSPLMESDQSKSFSVGYCGGRDEQEEEQKA

SEQ ID NO: 29170 - protein, 172 aa, Arabidopsis thaliana
  peptide (1)..(172): Ceres Seq. ID no. 12334437
MELSTQMNVFEELLVPTKQETTDNNINNLSFNGGFDHHHHQFFPNGYNIDYLCFNNEEEDENTLLYPSSFMDLISQPPPLLLHQPPPLQPLSPPLSSSATAGATFDYPFLEALQEIIDSSSSSPPLILQNGQEENFNNPMSYPSPLMESDQSKSFSVGYCGGRDEQEEEQKA

SEQ ID NO: 29171 - protein, 166 aa, Arabidopsis thaliana
  peptide (1)..(166): Ceres Seq. ID no. 12334438
MNVFEELLVPTKQETTDNNINNLSFNGGFDHHHHQFFPNGYNIDYLCFNNEEEDENTLLYPSSFMDLISQPPPLLLHQPPPLQPLSPPLSSSATAGATFDYPFLEALQEIIDSSSSSPPLILQNGQEENFNNPMSYPSPLMESDQSKSFSVGYCGGRDEQEEEQKA

SEQ ID NO: 29172 - DNA, 1049 bp, Arabidopsis thaliana
  misc_feature (1)..(1049): Ceres Seq. ID no. 12334427
  misc_feature (1)..(1049): Ortholog of  Ceres SEQ ID NO 14303051 as cited in SEQ ID NO 66608
agttcttcttcttctcgtcacaggaagaaaaatgttctgttcctcgcagctctcacagccaatgaatggcctcaaagacatagttgagacgagaaattttaaggcttggctcttagatcagtatggagttcttcatgatggcaaaaaaccttaccccggtgctatctcaacattgaaaaatcttgcaacagcgggtgccaaaattgtgatcattagtaattcttctagacgtgcttcaactacaatggaaaagttgaaaggccttggctttgatccttctttcttcaccggagctataactagtggtgaactaactcatcaatctttgcagaggagagatgatccttggtttgctgcactgggaaggaggtgcattcacattacttggaatgaccgaggagcaatctctttggagggtctagatctaaatgttgtggagaatgtggaagaagctgactttgttttagcgcacggcactgaagccctaggacttccttcaggcagtgtatctccaaggactattgatgagctagagaagattttggagaaatctgcagctcgaggacttcccatgatcgtagctaatccagattacgtgactgttgaagcaaatgtttttcatatcatgccaggtacactagcttccaagtatgaagaactgggaggagaagtgaagtcgatgggaaaacctcataagatgatctatgagtctgctatagcaattgcgggagtcaatccgtctgagtctatcgcagtaggagattcgctacatcatgatataaggggagcaaatgtttcaggaattgaatcaatattcatcactggagggattcatggtaatgagcttggtctcacttcttttgatgaaactgcaagtctagactcagtcaagacccttactgctaaacacaatgcattcccaacttatgtattatcagcctttaaatggtagttttcgttttgttgtacaaatcatattattgcttcttgaactacattttgccttcatttaacactcagagagagtaatttaaaaagctcatttgccg

SEQ ID NO: 29173 - protein, 316 aa, Arabidopsis thaliana
  peptide (1)..(316): Ceres Seq. ID no. 12334428
VLLLLVTGRKMFCSSQLSQPMNGLKDIVETRNFKAWLLDQYGVLHDGKKPYPGAISTLKNLATAGAKIVIISNSSRRASTTMEKLKGLGFDPSFFTGAITSGELTHQSLQRRDDPWFAALGRRCIHITWNDRGAISLEGLDLNVVENVEEADFVLAHGTEALGLPSGSVSPRTIDELEKILEKSAARGLPMIVANPDYVTVEANVFHIMPGTLASKYEELGGEVKSMGKPHKMIYESAIAIAGVNPSESIAVGDSLHHDIRGANVSGIESIFITGGIHGNELGLTSFDETASLDSVKTLTAKHNAFPTYVLSAFKW

SEQ ID NO: 29174 - protein, 306 aa, Arabidopsis thaliana
  peptide (1)..(306): Ceres Seq. ID no. 12334429
MFCSSQLSQPMNGLKDIVETRNFKAWLLDQYGVLHDGKKPYPGAISTLKNLATAGAKIVIISNSSRRASTTMEKLKGLGFDPSFFTGAITSGELTHQSLQRRDDPWFAALGRRCIHITWNDRGAISLEGLDLNVVENVEEADFVLAHGTEALGLPSGSVSPRTIDELEKILEKSAARGLPMIVANPDYVTVEANVFHIMPGTLASKYEELGGEVKSMGKPHKMIYESAIAIAGVNPSESIAVGDSLHHDIRGANVSGIESIFITGGIHGNELGLTSFDETASLDSVKTLTAKHNAFPTYVLSAFKW

SEQ ID NO: 29175 - protein, 296 aa, Arabidopsis thaliana
  peptide (1)..(296): Ceres Seq. ID no. 12334430
MNGLKDIVETRNFKAWLLDQYGVLHDGKKPYPGAISTLKNLATAGAKIVIISNSSRRASTTMEKLKGLGFDPSFFTGAITSGELTHQSLQRRDDPWFAALGRRCIHITWNDRGAISLEGLDLNVVENVEEADFVLAHGTEALGLPSGSVSPRTIDELEKILEKSAARGLPMIVANPDYVTVEANVFHIMPGTLASKYEELGGEVKSMGKPHKMIYESAIAIAGVNPSESIAVGDSLHHDIRGANVSGIESIFITGGIHGNELGLTSFDETASLDSVKTLTAKHNAFPTYVLSAFKW

SEQ ID NO: 29176 - DNA, 1168 bp, Arabidopsis thaliana
  misc_feature (1)..(1168): Ceres Seq. ID no. 12334928
  misc_feature (1)..(1168): Ortholog of  Ceres SEQ ID NO 12611829 as cited in SEQ ID NO 56771
  misc_feature (1)..(1168): Ortholog of  Ceres SEQ ID NO 15171735 as cited in SEQ ID NO 57234
  misc_feature (1)..(1168): Ortholog of  Ceres SEQ ID NO 13597018 as cited in SEQ ID NO 64288
  misc_feature (1)..(1168): Ortholog of  Ceres SEQ ID NO 14305124 as cited in SEQ ID NO 0
atctctctcctctctttgtctctctcgcttctgtgatttgggctttttcagatgggaaatgcgaacggcaaagacgaagacgccgccgccggtagcggtggtgcagatgttacctcgtcctcggcgagatctaatggcggcgatccttctgcacgcagtcgtcaccgtcgtccttcttcagactctatgagcagttctcctcccggaagtcctgctcgatctccatctcctttcttattcgctcctcagcccacattgttattccacgttacatcttacaacatttgctcacctatgcgtcacctcttccattgtttaggcttaacatgtgtacctaatggctgcatttcgtgtcggatggttcccgtggctccattgcagagagcaaacgcccctccttctcctaataacatccaatggaaccaatcacagagagtttttgataatcccccagagcaaggaatccctaccatcattacatggaaccaaggaggtaatgatgtggcggtggaaggatcatgggacaattggagatcaaggaagaagctgcagaaatcagggaaagaccactcgattctctttgtccttccatctggcatataccactacaaggtgattgtggacggtgaatccaaatacatcccagatttaccctttgtagcagacgaagttggcaatgtctgtaacattctcgatgttcataactttgtgccagaaaacccagaaagcatagtggagtttgaggcgccaccatcacctgatcatagctacggtcaaaccctaccagccgcagaagattacgcgaaagagccactggcggtgccacctcagcttcatctaacacttcttggcactactgaagagacagcgatagccacaaagcctcaacatgtggtgcttaaccatgtgttcatagagcaaggatggactcctcaatccatagtagctttgggtttaacccacaggttcgagtctaagtacataactgttgtcctctacaaaccgctcacacggtaaccctaaaaattcagtgccacattgttctctctctttctttctttttcatctctcaattatgtgaaaacatgttctttgttcatagtgactagtgagtgcccaacatttgagtttattaacctctttcttacctggtttgtggtgcttgtgc

SEQ ID NO: 29177 - protein, 321 aa, Arabidopsis thaliana
  peptide (1)..(321): Ceres Seq. ID no. 12334929
MGNANGKDEDAAAGSGGADVTSSSARSNGGDPSARSRHRRPSSDSMSSSPPGSPARSPSPFLFAPQPTLLFHVTSYNICSPMRHLFHCLGLTCVPNGCISCRMVPVAPLQRANAPPSPNNIQWNQSQRVFDNPPEQGIPTIITWNQGGNDVAVEGSWDNWRSRKKLQKSGKDHSILFVLPSGIYHYKVIVDGESKYIPDLPFVADEVGNVCNILDVHNFVPENPESIVEFEAPPSPDHSYGQTLPAAEDYAKEPLAVPPQLHLTLLGTTEETAIATKPQHVVLNHVFIEQGWTPQSIVALGLTHRFESKYITVVLYKPLTR

SEQ ID NO: 29178 - protein, 276 aa, Arabidopsis thaliana
  peptide (1)..(276): Ceres Seq. ID no. 12334930
MSSSPPGSPARSPSPFLFAPQPTLLFHVTSYNICSPMRHLFHCLGLTCVPNGCISCRMVPVAPLQRANAPPSPNNIQWNQSQRVFDNPPEQGIPTIITWNQGGNDVAVEGSWDNWRSRKKLQKSGKDHSILFVLPSGIYHYKVIVDGESKYIPDLPFVADEVGNVCNILDVHNFVPENPESIVEFEAPPSPDHSYGQTLPAAEDYAKEPLAVPPQLHLTLLGTTEETAIATKPQHVVLNHVFIEQGWTPQSIVALGLTHRFESKYITVVLYKPLTR

SEQ ID NO: 29179 - protein, 240 aa, Arabidopsis thaliana
  peptide (1)..(240): Ceres Seq. ID no. 12334931
MRHLFHCLGLTCVPNGCISCRMVPVAPLQRANAPPSPNNIQWNQSQRVFDNPPEQGIPTIITWNQGGNDVAVEGSWDNWRSRKKLQKSGKDHSILFVLPSGIYHYKVIVDGESKYIPDLPFVADEVGNVCNILDVHNFVPENPESIVEFEAPPSPDHSYGQTLPAAEDYAKEPLAVPPQLHLTLLGTTEETAIATKPQHVVLNHVFIEQGWTPQSIVALGLTHRFESKYITVVLYKPLTR

SEQ ID NO: 29180 - DNA, 1255 bp, Arabidopsis thaliana
  misc_feature (1)..(1255): Ceres Seq. ID no. 12329816
  misc_feature (1)..(1255): Ortholog of  Ceres SEQ ID NO 14313391 as cited in SEQ ID NO 58556
  misc_feature (1)..(1255): Ortholog of  Ceres SEQ ID NO 14307540 as cited in SEQ ID NO 59670
  misc_feature (1)..(1255): Ortholog of  Ceres SEQ ID NO 15179235 as cited in SEQ ID NO 0
cttatttttcttctccttcttgttccgtctgcttctctccatctccttccatatctattgttctctctctcttcatgcccgaacgcatcgggtctcaaaaaccattgatacagacatcgatccttgtcaactagtactgatctataaatcttataaaaatctgtagagatatggccgccgcagccgtttcctctaaccctcgcaccgttgaagagatcttcaaagattattccgctcgtcgtgccgctcttcttcgtgctctcactaaagatgttgatgatttttactctcaatgcgatccggaaaaggagaatttgtgtttgtacggacaccctaatgagtcatgggaagtgaatctaccagcagaggaagtgcctccggagctacctgagcctgctcttggtatcaatttcgctagagatggtatgcagaggaaagattggctttctcttgttgctgttcacagtgattgttggttgctctctgtttctttctactttggagcccgtcttaatcgcaatgagaggaagcggttattcagtctgatcaacgatctcccaactctcttcgatgtagtgactggtaggaaagccatgaaagacaacaagccaagctcggactcaggaagcaaatccagaaatggcactaagagatcaatagacgggcagacaaagagctcaacaccgaaactaatggaagagagctatgaggaggaggaagaagaagacgagcatggagacactctctgtggaagctgtggaggtcattacacaaatgaggagttctggatttgctgtgatgtttgtgaacgttggtaccatggaaaatgcgtcaagataactccggctaaagcagagagcatcaagcagtataaatgcccgccttgctgtgcaaagaaaggaagacagtgatgctgatcaattgatgatgatgatgatgatgatctctcagagagactctggttctcatgttttaatcaatatgttaatcaactttttttcttttcttctctttttttctttaaccttcttaattttaaagcatacaaaactctctctttagatctcaagaaagggatttcaagaagttgagggagagagtagcaaactgtttgaataatattattattattcatattaaaaaaaaaaaaactgggttgtgtcatcaattgtgttgtgtcatggggtttgtatatgttagacttagtcaaatctttaagcttcgaaccgaattttgaacaaatatgtttttaatc

SEQ ID NO: 29181 - protein, 246 aa, Arabidopsis thaliana
  peptide (1)..(246): Ceres Seq. ID no. 12329817
MAAAAVSSNPRTVEEIFKDYSARRAALLRALTKDVDDFYSQCDPEKENLCLYGHPNESWEVNLPAEEVPPELPEPALGINFARDGMQRKDWLSLVAVHSDCWLLSVSFYFGARLNRNERKRLFSLINDLPTLFDVVTGRKAMKDNKPSSDSGSKSRNGTKRSIDGQTKSSTPKLMEESYEEEEEEDEHGDTLCGSCGGHYTNEEFWICCDVCERWYHGKCVKITPAKAESIKQYKCPPCCAKKGRQ

SEQ ID NO: 29182 - protein, 161 aa, Arabidopsis thaliana
  peptide (1)..(161): Ceres Seq. ID no. 12329818
MQRKDWLSLVAVHSDCWLLSVSFYFGARLNRNERKRLFSLINDLPTLFDVVTGRKAMKDNKPSSDSGSKSRNGTKRSIDGQTKSSTPKLMEESYEEEEEEDEHGDTLCGSCGGHYTNEEFWICCDVCERWYHGKCVKITPAKAESIKQYKCPPCCAKKGRQ

SEQ ID NO: 29183 - DNA, 999 bp, Arabidopsis thaliana
  misc_feature (1)..(999): Ceres Seq. ID no. 12330335
  misc_feature (1)..(999): Ortholog of  Ceres SEQ ID NO 13583408 as cited in SEQ ID NO 62616
  misc_feature (1)..(999): Ortholog of  Ceres SEQ ID NO 15179752 as cited in SEQ ID NO 63074
ataaaactcacatcgccgctgataattccgcctctgagaaattgcgttcgattacagctccacagaggattcggaaatggttgagtcaaaggttgtagttccagagtcggtgttgaagaagaggaagagagaggaggaatgggctttggagaagaagcagaatgttgaagccgccaagaagaagaacgccgagaacaggaagcttatcttcaaaagagccgagcaatactccaaggaatatgccgagaaggagaaggagttgatctcgttgaaacgcgaggccaagcttaagggaggtttctatgttgaccctgaagctaagctcttgttcatcatccgtatccgtggtatcaatgccattgaccctaagactaagaagattctccagctcttgcgtttgagacagattttcaatggtgttttccttaaagtcaacaaggctacgatgaacatgcttcgccgtgttgagccctatgtcacttacggattccctaacttgaagagtgtcaaggaattgatctacaagagaggttacggaaagcttaaccaccagaggatagctttgactgacaactctattgtagagcaggctcttggaaagcatggtatcatttgcactgaggatttgatccacgagattctaacagtaggacctcatttcaaggaagccaacaacttcctttggccattccagcttaaggcaccactaggtggcctcaagaagaagagaaatcactacgtggaaggtggtgatgccggaaaccgtgagaacttcatcaatgagcttatcaggaggatgaattagaatgttatcgttttcaatgtcaaacttctctgcgttttcattatgtgcctcctcctggattttgatcttctttctcaagttaaaagacattttgaatcttctcttttgttctctttggatcttaatttgtgctttgattactgcaagtgattctacatttctctttaataggattattaagaaactgtttctcc

SEQ ID NO: 29184 - protein, 242 aa, Arabidopsis thaliana
  peptide (1)..(242): Ceres Seq. ID no. 12330336
MVESKVVVPESVLKKRKREEEWALEKKQNVEAAKKKNAENRKLIFKRAEQYSKEYAEKEKELISLKREAKLKGGFYVDPEAKLLFIIRIRGINAIDPKTKKILQLLRLRQIFNGVFLKVNKATMNMLRRVEPYVTYGFPNLKSVKELIYKRGYGKLNHQRIALTDNSIVEQALGKHGIICTEDLIHEILTVGPHFKEANNFLWPFQLKAPLGGLKKKRNHYVEGGDAGNRENFINELIRRMN

SEQ ID NO: 29185 - DNA, 1060 bp, Arabidopsis thaliana
  misc_feature (1)..(1060): Ceres Seq. ID no. 13497491
  misc_feature (1)..(1060): Ortholog of  Ceres SEQ ID NO 12616439 as cited in SEQ ID NO 63634
atcaccattgctttgttttgttcgtcaaatataatcaattttaaatttcttctcttctcttcaaacgaatcgcctttttcgataatctctttgcatcgatttcatcatggctactcaaacggatctcgctcagcccaagcttgatatgaccaaggaggagaaagagaggttgaagtatttgcaattcgtgcaagctgctgctgtggaagctctgcttcgctttgctcttatttacgctaaggcaaaggacaagtctggtcctttgaaacctggtgttgaatctgttgaaggagctgtcaagactgtcgttggtcctgtctacgagaaataccacgacgtccctgttgaggtccttaaatacatggaccagaaggttgatatgtctgtgactgagcttgaccgtcgtgtcccaccagtcgtcaagcaagtgtctgcccaagccatctccgctgctcagatagcacccattgtggcacgtgcgttggcctctgaggttcgacgtgctggtgttgttgaaaccgcttctggaatggctaaatccgtctactccaagtacgagcctgctgctaaggagttgtatgcaaactatgagccaaaagcagagcagtgtgccgtttcagcttggaagaagcttaaccagcttcctctattcccaaggctggctcaagttgctgtaccaacagctgctttctgctctgagaagtacaatgatactgtggttaaggctgcagagaaagggtacagagtcacatcgtacatgccattggttccaacagagaggatctcaaaaatcttcgctgaggagaaagctgagaccgagcctttggagttccatccacttgattgatatgggtgttttgttagtgtgattttttgttttgttgggattaaggtgaaccggatcttggttagcgattgatctctggttctcgttcttttttttctttgtcatgaacttttgttgtttcgtttaataatcaaaagttgtataatctaagtttgggattaccaccctattgagtattgagtgataaaaaaaaagttgcgtgaattatcgccc

SEQ ID NO: 29186 - protein, 246 aa, Arabidopsis thaliana
  peptide (1)..(246): Ceres Seq. ID no. 13497492
MATQTDLAQPKLDMTKEEKERLKYLQFVQAAAVEALLRFALIYAKAKDKSGPLKPGVESVEGAVKTVVGPVYEKYHDVPVEVLKYMDQKVDMSVTELDRRVPPVVKQVSAQAISAAQIAPIVARALASEVRRAGVVETASGMAKSVYSKYEPAAKELYANYEPKAEQCAVSAWKKLNQLPLFPRLAQVAVPTAAFCSEKYNDTVVKAAEKGYRVTSYMPLVPTERISKIFAEEKAETEPLEFHPLD

SEQ ID NO: 29187 - protein, 233 aa, Arabidopsis thaliana
  peptide (1)..(233): Ceres Seq. ID no. 13497493
MTKEEKERLKYLQFVQAAAVEALLRFALIYAKAKDKSGPLKPGVESVEGAVKTVVGPVYEKYHDVPVEVLKYMDQKVDMSVTELDRRVPPVVKQVSAQAISAAQIAPIVARALASEVRRAGVVETASGMAKSVYSKYEPAAKELYANYEPKAEQCAVSAWKKLNQLPLFPRLAQVAVPTAAFCSEKYNDTVVKAAEKGYRVTSYMPLVPTERISKIFAEEKAETEPLEFHPLD

SEQ ID NO: 29188 - protein, 161 aa, Arabidopsis thaliana
  peptide (1)..(161): Ceres Seq. ID no. 13497494
MDQKVDMSVTELDRRVPPVVKQVSAQAISAAQIAPIVARALASEVRRAGVVETASGMAKSVYSKYEPAAKELYANYEPKAEQCAVSAWKKLNQLPLFPRLAQVAVPTAAFCSEKYNDTVVKAAEKGYRVTSYMPLVPTERISKIFAEEKAETEPLEFHPLD

SEQ ID NO: 29189 - DNA, 1143 bp, Arabidopsis thaliana
  misc_feature (1)..(1143): Ceres Seq. ID no. 12738570
  misc_feature (1)..(1143): Ortholog of  Ceres SEQ ID NO 14314585 as cited in SEQ ID NO 59345
tttgggacctgctcagaacgtcaaatcgatcaccagagaggatctacagaactacattaagactcactacactgcttccaggatggtgattgctgctgcaggagctgttaagcatgaggaagttgttgagcaagtgaagaagctatttaccaagttgtcgtctgatccaacaactacttctcaactggttgccaatgaacctgctagttttactggttctgaggtccgaatgattgatgacgacctaccccttgcacaatttgctgttgcctttgagggagcatcttggactgatccagattccgttgctcttatggttatgcaaactatgttgggttcgtggaacaaaaatgttggtggtggaaaacacgtgggttctgacctgacccagagggttgccattaatgaaatagcagaaagcataatggcattcaacactaactacaaggatactggactgttcggcgtttatgcagttgccaaggccgattgcttggatgatttatcatatgccattatgtatgaggtaaccaagctggcctaccgagtttcagacgctgatgtgacacgtgcacgaaatcagctgaaatcatcattgttacttcacatggatggaaccagcccaattgctgaagatattggtcgtcagctgctgacctatgggcgtagaatcccaaccgctgaactctttgctaggatcgatgctgttgatgccagcacggtaaaacgtgttgccaacaaatatatctatgacaaagacattgcaatctcagctattggtccaatccaagatttgccagactacaacaaattcagacgcagaacctactggaaccggtactaaggctctgaaataaaggtcactgaatcgcaaggttcgcccacggggagattccgtaggcggagagagcagaacgaggtgatgatggattcattatttttgagtttttcttactgtatcttcataatttaccatcatcgctggtaaaataagtgtaccatttactctttgtcctctactggaaaaatgctagagatcctctgtgtgtgttttttttgttctcttcataattttcccatacacatactaataagttctttgatgtttggttgaaaacttgaattggatacatttcatttctc

SEQ ID NO: 29190 - protein, 280 aa, Arabidopsis thaliana
  peptide (1)..(280): Ceres Seq. ID no. 12738571
LGPAQNVKSITREDLQNYIKTHYTASRMVIAAAGAVKHEEVVEQVKKLFTKLSSDPTTTSQLVANEPASFTGSEVRMIDDDLPLAQFAVAFEGASWTDPDSVALMVMQTMLGSWNKNVGGGKHVGSDLTQRVAINEIAESIMAFNTNYKDTGLFGVYAVAKADCLDDLSYAIMYEVTKLAYRVSDADVTRARNQLKSSLLLHMDGTSPIAEDIGRQLLTYGRRIPTAELFARIDAVDASTVKRVANKYIYDKDIAISAIGPIQDLPDYNKFRRRTYWNRY

SEQ ID NO: 29191 - protein, 253 aa, Arabidopsis thaliana
  peptide (1)..(253): Ceres Seq. ID no. 12738572
MVIAAAGAVKHEEVVEQVKKLFTKLSSDPTTTSQLVANEPASFTGSEVRMIDDDLPLAQFAVAFEGASWTDPDSVALMVMQTMLGSWNKNVGGGKHVGSDLTQRVAINEIAESIMAFNTNYKDTGLFGVYAVAKADCLDDLSYAIMYEVTKLAYRVSDADVTRARNQLKSSLLLHMDGTSPIAEDIGRQLLTYGRRIPTAELFARIDAVDASTVKRVANKYIYDKDIAISAIGPIQDLPDYNKFRRRTYWNRY

SEQ ID NO: 29192 - protein, 204 aa, Arabidopsis thaliana
  peptide (1)..(204): Ceres Seq. ID no. 12738573
MIDDDLPLAQFAVAFEGASWTDPDSVALMVMQTMLGSWNKNVGGGKHVGSDLTQRVAINEIAESIMAFNTNYKDTGLFGVYAVAKADCLDDLSYAIMYEVTKLAYRVSDADVTRARNQLKSSLLLHMDGTSPIAEDIGRQLLTYGRRIPTAELFARIDAVDASTVKRVANKYIYDKDIAISAIGPIQDLPDYNKFRRRTYWNRY

SEQ ID NO: 29193 - DNA, 1636 bp, Arabidopsis thaliana
  misc_feature (1)..(1636): Ceres Seq. ID no. 12357517
  misc_feature (1)..(1636): Ortholog of  Ceres SEQ ID NO 15171669 as cited in SEQ ID NO 51370
aaactgggaaactactttgttcgaatctcagagctttttcgtttcccatcggaagaagaaactcatatataccttccaaaaaatccatacgtcaagtatttgttctctatcctctctttgttgtcttataaattcttcaagcaggtttcgagatttcctcgaatctgttttgttcttgttcctcaaaaatgctgggtttttgaacgaacgaggatgacgatgctcagagtccgaagcagagatggattggagagagtgagtgtagatggacctcatatcacagtctcccaactcaaaaccctaatccaagatcagcttcagatccctatccacaaccaaaccttatccaccaatagaaaccttctcctcgctaagagcccttctgatttcctagcgttcaccgacatggccgatcctaacctccgaatctcgtctctcaatctagctcacggctctatggtctaccttgcttacgaaggtgagcgtacgattcgtggtggtcctgctgtaacgcctgctggttccttcgggaggaagatgaccgtcgaagatctaatcgctcgacagatgcgcgtcggtcgccaggagaaggctcactgcgattccgtctcgttcgatcgcgattgcgccaatgcgtttcagcatttcgtcaacgagtcgcttgccttcgctgtcaaacgcggtggattcatgtacgggaacgtctctgaggatggtcaggttgaggtgaatttcatctacgagccaccgcagcaagggatggaggataatctgattctgatgagagactctgaggaagagaaacgtgttgatgctattgctttagggttagggatgaggagagttgggtttatattcaaccagactgtgactcaggacaagaaggagtacactttgtctaacgttgaggtgttgcttgcggctcagcttcacgctgagagcgaattgaaggagtgggtcactgctgttgtgaagcttgagatcaatgaggatggtggtgctgatgttcactttgagccgtttcagatgagtgatatgtgcgttaggttgtttaaggaaggatggttcgagactgagattggacctgaggatgatcccaagctctccaagttgaagaaagaggttgttgttggagtcaaggatgttaaagaagtcgataatgatttcttccttgttctcgtcaagatcttggatcatcagggaccgttgtcgtgtaccttcccgatagagaacaggaacactcaaacaacaatgcgggctttgaaaacgcatatggagcgagcaaggagcctcccattcgtgaagaggatctctgattttcatctgcttctctttgtggctcagtttctagacgtatcatccgacgtccctgcgttggctgaatgcgtccgtctacagtctcatgtccctgagggatatgagttgctcatcgactccatggccaatacttcttaagttttacaagtctgtgtgttcatattctctcctttagatttgtgtacagctgttacttcttcctttaaattatctttgcatatggaagaataaaaagaagaaatatttcagagaagttaaggtcttaaatgatagtttttattggattatcctgttcaagttcaatgaaacatttactagt

SEQ ID NO: 29194 - protein, 484 aa, Arabidopsis thaliana
  peptide (1)..(484): Ceres Seq. ID no. 12357518
KLGNYFVRISELFRFPSEEETHIYLPKNPYVKYLFSILSLLSYKFFKQVSRFPRICFVLVPQKCWVFERTRMTMLRVRSRDGLERVSVDGPHITVSQLKTLIQDQLQIPIHNQTLSTNRNLLLAKSPSDFLAFTDMADPNLRISSLNLAHGSMVYLAYEGERTIRGGPAVTPAGSFGRKMTVEDLIARQMRVGRQEKAHCDSVSFDRDCANAFQHFVNESLAFAVKRGGFMYGNVSEDGQVEVNFIYEPPQQGMEDNLILMRDSEEEKRVDAIALGLGMRRVGFIFNQTVTQDKKEYTLSNVEVLLAAQLHAESELKEWVTAVVKLEINEDGGADVHFEPFQMSDMCVRLFKEGWFETEIGPEDDPKLSKLKKEVVVGVKDVKEVDNDFFLVLVKILDHQGPLSCTFPIENRNTQTTMRALKTHMERARSLPFVKRISDFHLLLFVAQFLDVSSDVPALAECVRLQSHVPEGYELLIDSMANTS

SEQ ID NO: 29195 - protein, 413 aa, Arabidopsis thaliana
  peptide (1)..(413): Ceres Seq. ID no. 12357519
MTMLRVRSRDGLERVSVDGPHITVSQLKTLIQDQLQIPIHNQTLSTNRNLLLAKSPSDFLAFTDMADPNLRISSLNLAHGSMVYLAYEGERTIRGGPAVTPAGSFGRKMTVEDLIARQMRVGRQEKAHCDSVSFDRDCANAFQHFVNESLAFAVKRGGFMYGNVSEDGQVEVNFIYEPPQQGMEDNLILMRDSEEEKRVDAIALGLGMRRVGFIFNQTVTQDKKEYTLSNVEVLLAAQLHAESELKEWVTAVVKLEINEDGGADVHFEPFQMSDMCVRLFKEGWFETEIGPEDDPKLSKLKKEVVVGVKDVKEVDNDFFLVLVKILDHQGPLSCTFPIENRNTQTTMRALKTHMERARSLPFVKRISDFHLLLFVAQFLDVSSDVPALAECVRLQSHVPEGYELLIDSMANTS

SEQ ID NO: 29196 - protein, 411 aa, Arabidopsis thaliana
  peptide (1)..(411): Ceres Seq. ID no. 12357520
MLRVRSRDGLERVSVDGPHITVSQLKTLIQDQLQIPIHNQTLSTNRNLLLAKSPSDFLAFTDMADPNLRISSLNLAHGSMVYLAYEGERTIRGGPAVTPAGSFGRKMTVEDLIARQMRVGRQEKAHCDSVSFDRDCANAFQHFVNESLAFAVKRGGFMYGNVSEDGQVEVNFIYEPPQQGMEDNLILMRDSEEEKRVDAIALGLGMRRVGFIFNQTVTQDKKEYTLSNVEVLLAAQLHAESELKEWVTAVVKLEINEDGGADVHFEPFQMSDMCVRLFKEGWFETEIGPEDDPKLSKLKKEVVVGVKDVKEVDNDFFLVLVKILDHQGPLSCTFPIENRNTQTTMRALKTHMERARSLPFVKRISDFHLLLFVAQFLDVSSDVPALAECVRLQSHVPEGYELLIDSMANTS

SEQ ID NO: 29197 - DNA, 1317 bp, Arabidopsis thaliana
  misc_feature (1)..(1317): Ceres Seq. ID no. 13490406
  misc_feature (1)..(1317): Ortholog of  Ceres SEQ ID NO 15177842 as cited in SEQ ID NO 51547
  misc_feature (1)..(1317): Ortholog of  Ceres SEQ ID NO 13594859 as cited in SEQ ID NO 51974
  misc_feature (1)..(1317): Ortholog of  Ceres SEQ ID NO 13597887 as cited in SEQ ID NO 64295
gtattccaattttagaacttacgcgtcttcataatcttcctctttttttctttgtctttgatattcgaagtttttgtttattttttctttgcttaacccggagagacaccctctccataaatttagttttgatccctctgggttccttgaagaaaaaaacaccaattccattcatattcttcttcatacgttcaataattcttacgaggacgagatcttcctaacgtctttgatcttcttcattaggagataagtctaaactggtcgaagatgttgggagatttcatcatcagactccttgtattgatattagggtacacatacccagcattcgaatgctttaaaacggtggagaagaacaaagttgatatcgaggaactcagattttggtgccaatactggatacttttggcgctaatttcatcattcgagagggttggcgatttttttatctcatggttaccgttatacggagagatgaaagtagtcttcttcgtatatctctggtaccctaaaacaaagggaacgagacatgtgtatgaaacattgttgaagccatacatggctcgacacgagacagagattgacagaaagatcatggagttgcgagctcgagcttgggactttttcatcttttacttcaacaacttcgcccaggccggtcaatccaccttgatccagggttttcagtacgtactcgcccaatcggtccggttctctgccgctgcagctaaccaaccgccaacggagaggaacgtgaacatgaacgcgcagtcaccggtggagatggacaatgatcctccatcaccgcgcgctccaagaccgctgaacaaatcactatctgcgttgcgatcgctagagaagcaaacaagcagagggaggaagtggccgccaccaacaccaccaccaacaccaggccgagactccgccggaacatttaacggtgatgatggagtcaacattcctgatacaattccgggatcacccctcactgatgctcgagctaagctgcgacgttctaactccagaactcagccagcggcatagtaacgcaaacgtacatatacgtgactcgacaaagaaacccttttcgtttgtttaaagatatatagggaaagaaaagtgaatgaaagttttgaattgaaacaaaacagatttttttttttttttcatgttttctgtaaattgaagcagtaagtattaatacagcgagaatatttgtgtttgttttcgtttaaacttcccgctttaatccggatattgatttgagtttggatttcttcatatagctgattataaagatgcatttgagtggac

SEQ ID NO: 29198 - protein, 258 aa, Arabidopsis thaliana
  peptide (1)..(258): Ceres Seq. ID no. 13490407
MLGDFIIRLLVLILGYTYPAFECFKTVEKNKVDIEELRFWCQYWILLALISSFERVGDFFISWLPLYGEMKVVFFVYLWYPKTKGTRHVYETLLKPYMARHETEIDRKIMELRARAWDFFIFYFNNFAQAGQSTLIQGFQYVLAQSVRFSAAAANQPPTERNVNMNAQSPVEMDNDPPSPRAPRPLNKSLSALRSLEKQTSRGRKWPPPTPPPTPGRDSAGTFNGDDGVNIPDTIPGSPLTDARAKLRRSNSRTQPAA

SEQ ID NO: 29199 - protein, 189 aa, Arabidopsis thaliana
  peptide (1)..(189): Ceres Seq. ID no. 13490408
MKVVFFVYLWYPKTKGTRHVYETLLKPYMARHETEIDRKIMELRARAWDFFIFYFNNFAQAGQSTLIQGFQYVLAQSVRFSAAAANQPPTERNVNMNAQSPVEMDNDPPSPRAPRPLNKSLSALRSLEKQTSRGRKWPPPTPPPTPGRDSAGTFNGDDGVNIPDTIPGSPLTDARAKLRRSNSRTQPAA

SEQ ID NO: 29200 - protein, 161 aa, Arabidopsis thaliana
  peptide (1)..(161): Ceres Seq. ID no. 13490409
MARHETEIDRKIMELRARAWDFFIFYFNNFAQAGQSTLIQGFQYVLAQSVRFSAAAANQPPTERNVNMNAQSPVEMDNDPPSPRAPRPLNKSLSALRSLEKQTSRGRKWPPPTPPPTPGRDSAGTFNGDDGVNIPDTIPGSPLTDARAKLRRSNSRTQPAA

SEQ ID NO: 29201 - DNA, 1224 bp, Arabidopsis thaliana
  misc_feature (1)..(1224): Ceres Seq. ID no. 13490655
  misc_feature (1)..(1224): Ortholog of  Ceres SEQ ID NO 13596891 as cited in SEQ ID NO 62868
  misc_feature (1)..(1224): Ortholog of  Ceres SEQ ID NO 12617235 as cited in SEQ ID NO 63990
  misc_feature (1)..(1224): Ortholog of  Ceres SEQ ID NO 13655371 as cited in SEQ ID NO 68945
attgaatcggaaaaaaatggcgaacatctgcatagcgacgacggcaactaacaatcaggtgattctccgtgactacgtgagtggattccctaaacaatccgacctctacattgccacaaccaccattgacttacgtgtacctcccggatccatggcggttctagtcaagaatctctacttatcttgcgatcctcatagccgcactcgcatggggaagcctgatccctcatcccaggcttccatggctcatgctttcactatcggcaagccaatctctgggtttggagtggctaaagcaatagattcagggcacccaaattacaaaacaggagatttactttggggaagagttggttgggaagagtatagtgttattactccaactccttcttcacatttcaagattcatcacaccgatgttccattatctttctacactggacttcttggtattccgggtctcactgcgtatgttgggttttacgagatatgttctccgaagaaaggagagactgtatttgtatcagctgcatctggcgcagtaggtcaacttgtgggacagtttgcgaagatggcgggatgctatgtcgttggaagcgctagcagtaaagagaaggttgatcttctcaagactaagtttgggtatgatgacgctttcaattataaggaagaaaaggatcttagtgctgccctaaagaggtgtttcccagaaggaatagacatatactttgagaacgtgggaggcaaaatgttagacgcagtgctccaaaacatgaggacacatggccgaatcgcagcgtgtggaatgatttcacaatacaatctaaaggaaccagaaggtttacataacacagccaccattgtccacaaacgcatccgtgttcaagattttgcagctgtcgaattttttgatagatactccaagtttttggacttcatacttccacacgtaagagaagggaagataacatatgttgaggatatagcccaaggacttgagaatggaccttctgctttgatcggactcttccacggtaagaacgtcgggaaacaacttgtcgaagttgctcgcgagtgagattaaaattaacaaatgttttattaccgtttggttttagttgttgctggaaataagatcggtttgtacaagctgtgacaatgttttgtttgttggtcagaaataaatggactttgtttgtctatataagcattgtttctgacatg

SEQ ID NO: 29202 - protein, 358 aa, Arabidopsis thaliana
  peptide (1)..(358): Ceres Seq. ID no. 13490656
LNRKKMANICIATTATNNQVILRDYVSGFPKQSDLYIATTTIDLRVPPGSMAVLVKNLYLSCDPHSRTRMGKPDPSSQASMAHAFTIGKPISGFGVAKAIDSGHPNYKTGDLLWGRVGWEEYSVITPTPSSHFKIHHTDVPLSFYTGLLGIPGLTAYVGFYEICSPKKGETVFVSAASGAVGQLVGQFAKMAGCYVVGSASSKEKVDLLKTKFGYDDAFNYKEEKDLSAALKRCFPEGIDIYFENVGGKMLDAVLQNMRTHGRIAACGMISQYNLKEPEGLHNTATIVHKRIRVQDFAAVEFFDRYSKFLDFILPHVREGKITYVEDIAQGLENGPSALIGLFHGKNVGKQLVEVARE

SEQ ID NO: 29203 - protein, 353 aa, Arabidopsis thaliana
  peptide (1)..(353): Ceres Seq. ID no. 13490657
MANICIATTATNNQVILRDYVSGFPKQSDLYIATTTIDLRVPPGSMAVLVKNLYLSCDPHSRTRMGKPDPSSQASMAHAFTIGKPISGFGVAKAIDSGHPNYKTGDLLWGRVGWEEYSVITPTPSSHFKIHHTDVPLSFYTGLLGIPGLTAYVGFYEICSPKKGETVFVSAASGAVGQLVGQFAKMAGCYVVGSASSKEKVDLLKTKFGYDDAFNYKEEKDLSAALKRCFPEGIDIYFENVGGKMLDAVLQNMRTHGRIAACGMISQYNLKEPEGLHNTATIVHKRIRVQDFAAVEFFDRYSKFLDFILPHVREGKITYVEDIAQGLENGPSALIGLFHGKNVGKQLVEVARE

SEQ ID NO: 29204 - protein, 308 aa, Arabidopsis thaliana
  peptide (1)..(308): Ceres Seq. ID no. 13490658
MAVLVKNLYLSCDPHSRTRMGKPDPSSQASMAHAFTIGKPISGFGVAKAIDSGHPNYKTGDLLWGRVGWEEYSVITPTPSSHFKIHHTDVPLSFYTGLLGIPGLTAYVGFYEICSPKKGETVFVSAASGAVGQLVGQFAKMAGCYVVGSASSKEKVDLLKTKFGYDDAFNYKEEKDLSAALKRCFPEGIDIYFENVGGKMLDAVLQNMRTHGRIAACGMISQYNLKEPEGLHNTATIVHKRIRVQDFAAVEFFDRYSKFLDFILPHVREGKITYVEDIAQGLENGPSALIGLFHGKNVGKQLVEVARE

SEQ ID NO: 29205 - DNA, 1273 bp, Arabidopsis thaliana
  misc_feature (1)..(1273): Ceres Seq. ID no. 13490651
  misc_feature (1)..(1273): Ortholog of  Ceres SEQ ID NO 15178027 as cited in SEQ ID NO 55634
  misc_feature (1)..(1273): Ortholog of  Ceres SEQ ID NO 14314739 as cited in SEQ ID NO 59911
ctttggatttggaatcgcttctacttcactctcaccttcctcctattctctctctctttctatgtcaagttagcttagccgtctcaccagaaagctaaccttacctcacaaacattgattgtgttacactaatctcttaaatagagagccgtaatttctacacactctgatcgctagatggaaacggagatatcaggaatggataatccagctatgaccttggacgaggtttccatggaacgcaacaagagcttcgttaaggcattgcaggagctcaagaacttgaggcctcaactttattcagctgctgattactgtgaaaagtcttatcttcatagcgagcaaaagcaaatggtattggacaatttgaaagactacactgtgaaggctctagttaatgctgttgatcaccttggaactgtagcttccaagcttactgatctttttgatcaccaaaattcagacatatcaactatggaaatgagagcttcttgtgttagccagcaactgcttacatgccggacatatatcgacaaagaaggtcttagacagcaacagctattagcagttatcccattgcatcacaagcattacattcttcccaattctgttaacaagcgggtacactttagtcctctcagacgaactgacacaagacagaatcattaccaagctatatcccgtcttcaaccttcagatgcccctgcatcgaaatcactctcctggcatttaggctcagagaccaagtctaccctcaaaggaacatccacagttgcaccaagctccaaagattcaaaagctttctcaaagacatctggagtgttccatctcttaggtgatgatgaaaacatagcaaacaagaagcctttggctggttctcaggtctcaggtgttcctgctgcatccactgcccataaggatttggaggttccgaaacttctaactgcacacaggtcacttgataacaacccgcgacgagagatcattcaagctcctgtccggacaaagagtgttctttctgcgttctttgttaaacagaaaactccaaagctcaaagctggctatgtctcgtgaaaacaccaactctttgtactgagaaggaaatttcaatctcataccacgtttcttttaccttatataataacatgttgattttcatgtaattatcttaatcaccacatcaacgtacgaagtccagtaagacatgattttggtctatcattaacaaaactgtgtaatagattaagaatgtgtttttagaatgtaaaagctt

SEQ ID NO: 29206 - protein, 298 aa, Arabidopsis thaliana
  peptide (1)..(298): Ceres Seq. ID no. 13490652
METEISGMDNPAMTLDEVSMERNKSFVKALQELKNLRPQLYSAADYCEKSYLHSEQKQMVLDNLKDYTVKALVNAVDHLGTVASKLTDLFDHQNSDISTMEMRASCVSQQLLTCRTYIDKEGLRQQQLLAVIPLHHKHYILPNSVNKRVHFSPLRRTDTRQNHYQAISRLQPSDAPASKSLSWHLGSETKSTLKGTSTVAPSSKDSKAFSKTSGVFHLLGDDENIANKKPLAGSQVSGVPAASTAHKDLEVPKLLTAHRSLDNNPRREIIQAPVRTKSVLSAFFVKQKTPKLKAGYVS

SEQ ID NO: 29207 - protein, 291 aa, Arabidopsis thaliana
  peptide (1)..(291): Ceres Seq. ID no. 13490653
MDNPAMTLDEVSMERNKSFVKALQELKNLRPQLYSAADYCEKSYLHSEQKQMVLDNLKDYTVKALVNAVDHLGTVASKLTDLFDHQNSDISTMEMRASCVSQQLLTCRTYIDKEGLRQQQLLAVIPLHHKHYILPNSVNKRVHFSPLRRTDTRQNHYQAISRLQPSDAPASKSLSWHLGSETKSTLKGTSTVAPSSKDSKAFSKTSGVFHLLGDDENIANKKPLAGSQVSGVPAASTAHKDLEVPKLLTAHRSLDNNPRREIIQAPVRTKSVLSAFFVKQKTPKLKAGYVS

SEQ ID NO: 29208 - protein, 286 aa, Arabidopsis thaliana
  peptide (1)..(286): Ceres Seq. ID no. 13490654
MTLDEVSMERNKSFVKALQELKNLRPQLYSAADYCEKSYLHSEQKQMVLDNLKDYTVKALVNAVDHLGTVASKLTDLFDHQNSDISTMEMRASCVSQQLLTCRTYIDKEGLRQQQLLAVIPLHHKHYILPNSVNKRVHFSPLRRTDTRQNHYQAISRLQPSDAPASKSLSWHLGSETKSTLKGTSTVAPSSKDSKAFSKTSGVFHLLGDDENIANKKPLAGSQVSGVPAASTAHKDLEVPKLLTAHRSLDNNPRREIIQAPVRTKSVLSAFFVKQKTPKLKAGYVS

SEQ ID NO: 29209 - DNA, 1665 bp, Arabidopsis thaliana
  misc_feature (1)..(1665): Ceres Seq. ID no. 13575417
  misc_feature (1)..(1665): Ortholog of  Ceres SEQ ID NO 14314559 as cited in SEQ ID NO 52317
  misc_feature (1)..(1665): Ortholog of  Ceres SEQ ID NO 15174571 as cited in SEQ ID NO 53570
  misc_feature (1)..(1665): Ortholog of  Ceres SEQ ID NO 14314367 as cited in SEQ ID NO 57446
aagagcgggcaaaacaaacagagagcgagtcacgcgccgagttttcctcacttgttctcaataaatctctctctctttcttctctatcgctttcatttttctcctccagatctcgattccaatctctctccctctctacttccttcaacagaaatggaaacgttcctatttacctctgaatccgtcaatgaaggacacccagacaagctttgtgaccagatttctgatgcgatccttgatgcttgcttagagcaagatcctgaaagcaaagtggcgtgtgagacatgcaccaagaccaacatggtgatggtgtttggtgagatcactaccgctgcgaaagttgactatgagaagattgttagatccacttgcagggagattggttttatctctgctgatgttggtcttgacgctgacaaatgcaatgttttggttaacattgagcaacagagccctgacattgctcagggtgttcatggtcatttgaccaagaagcctgaagatattggtgctggtgatcagggacatatgtttgggtatgctactgatgagactcctgagctcatgccgttgactcatgtcctagccaccaagcttggtgctaagcttactgaagtgaggaagaacaagacttgcccatggttgaggcctgatggtaagacacaagtcacagtggagtacaagaacgatggtggagctatgattccgattagagtccacactgttcttatctcaactcaacatgacgaaactgtcaccaatgatgagattgctgctgacttgaaggagcatgtgatcaagcctgttatccctgctaagtaccttgacgataacaccatctttcacttgaacccatctggtcgttttgtcatcggagggcctcatggtgatgctggacttacagggaggaagatcatcattgacacttatggtggttggggtgctcatggtggaggtgccttctcaggaaaggacccaaccaaggttgacagaagcggtgcctatatcgtgaggcaggctgcaaagagcgtggtagcagcaggactcgcacgccgttgtatcgtgcaggtatcatacgccattggtgtccctgagccgctctcagtgtttgttgacacctacaagaccgggaccatcccagacaaggatatccttgtgttgatcaaggaagcatttgacttcaggccgggaatgatggccattaaccttgaccttaagaggggaggtaacttcaggttccagaaaaccgctgcgtatggccatttcgggcgtgatgaccctgacttcacttgggaggttgtcaagccgctcaagccaaaggcctagacagaaacaaagctggcaattgcaagaactgagttgagtcactccccaactactgggaacttatcattataccattattattgcaaatgactgaataaagaaagcttctgcattgtcaccattcacatttgttttcgcgaacacaggccagcggttcatatatctggtaatcgaagattgcaaatgaaagatttgagttttatgttttgaatttttgcctcttttttatttttctttttcttttccctcttaatctcttgtattgtaattttgattgtgtaaccaagaaatccatcctcgtgatgttttttttttataagaaaatatcatgcaagttag

SEQ ID NO: 29210 - protein, 441 aa, Arabidopsis thaliana
  peptide (1)..(441): Ceres Seq. ID no. 13575418
KSGQNKQRASHAPSFPHLFSINLSLFLLYRFHFSPPDLDSNLSPSLLPSTEMETFLFTSESVNEGHPDKLCDQISDAILDACLEQDPESKVACETCTKTNMVMVFGEITTAAKVDYEKIVRSTCREIGFISADVGLDADKCNVLVNIEQQSPDIAQGVHGHLTKKPEDIGAGDQGHMFGYATDETPELMPLTHVLATKLGAKLTEVRKNKTCPWLRPDGKTQVTVEYKNDGGAMIPIRVHTVLISTQHDETVTNDEIAADLKEHVIKPVIPAKYLDDNTIFHLNPSGRFVIGGPHGDAGLTGRKIIIDTYGGWGAHGGGAFSGKDPTKVDRSGAYIVRQAAKSVVAAGLARRCIVQVSYAIGVPEPLSVFVDTYKTGTIPDKDILVLIKEAFDFRPGMMAINLDLKRGGNFRFQKTAAYGHFGRDDPDFTWEVVKPLKPKA

SEQ ID NO: 29211 - protein, 390 aa, Arabidopsis thaliana
  peptide (1)..(390): Ceres Seq. ID no. 13575419
METFLFTSESVNEGHPDKLCDQISDAILDACLEQDPESKVACETCTKTNMVMVFGEITTAAKVDYEKIVRSTCREIGFISADVGLDADKCNVLVNIEQQSPDIAQGVHGHLTKKPEDIGAGDQGHMFGYATDETPELMPLTHVLATKLGAKLTEVRKNKTCPWLRPDGKTQVTVEYKNDGGAMIPIRVHTVLISTQHDETVTNDEIAADLKEHVIKPVIPAKYLDDNTIFHLNPSGRFVIGGPHGDAGLTGRKIIIDTYGGWGAHGGGAFSGKDPTKVDRSGAYIVRQAAKSVVAAGLARRCIVQVSYAIGVPEPLSVFVDTYKTGTIPDKDILVLIKEAFDFRPGMMAINLDLKRGGNFRFQKTAAYGHFGRDDPDFTWEVVKPLKPKA

SEQ ID NO: 29212 - protein, 341 aa, Arabidopsis thaliana
  peptide (1)..(341): Ceres Seq. ID no. 13575420
MVMVFGEITTAAKVDYEKIVRSTCREIGFISADVGLDADKCNVLVNIEQQSPDIAQGVHGHLTKKPEDIGAGDQGHMFGYATDETPELMPLTHVLATKLGAKLTEVRKNKTCPWLRPDGKTQVTVEYKNDGGAMIPIRVHTVLISTQHDETVTNDEIAADLKEHVIKPVIPAKYLDDNTIFHLNPSGRFVIGGPHGDAGLTGRKIIIDTYGGWGAHGGGAFSGKDPTKVDRSGAYIVRQAAKSVVAAGLARRCIVQVSYAIGVPEPLSVFVDTYKTGTIPDKDILVLIKEAFDFRPGMMAINLDLKRGGNFRFQKTAAYGHFGRDDPDFTWEVVKPLKPKA

SEQ ID NO: 29213 - DNA, 1192 bp, Arabidopsis thaliana
  misc_feature (1)..(1192): Ceres Seq. ID no. 12324345
  misc_feature (1)..(1192): Ortholog of  Ceres SEQ ID NO 14313796 as cited in SEQ ID NO 54544
agaaaggataacgaatcgtttctcttcgatcgaaagaatatatatttggaagttttctctgcttttttgttttcgtttgatagaatgggaacagttctcgattcgcattttctggctctcactgctattgtcactgtggtttaccagttcatattcttcgtaatcacggctcttttcaaatttgatcaagtcactgactttgctggtagcacaaacttcgttatacttgctgtgttaacacttgttctcaaagcctcttggcattttcgacagatagtattgactttgctagttgtggtatggggtcttcgcttggggattttccttctaatgaggatcttgcaatggggggaagatcgtcgctttgatgaacagcgtggaaatatagtgagactaatcattttctggactcttcaggctgtgtgggtttggacggttagcttacctttaacacttgttaatgcaagtgatggtgggtggatctcttaaacccgcagatgttatcggttggactatgtgggttttcggtttcttgattgaagctgcagctgatcaacagaagctatcattcaaaaactctcctgaaaacagaggaaaatggtgtgatgttggagtctggaagtattcaagacatccaaactacttcggtgagatgttactgtggtggagaatctttgtggctgcatcgcctgtgcttgaaggtgcagagtatcttgtcatattcggaccactctttctcactttgctacttctattcgtcagcggcataccattactcgaggcatcggctgacaaaaaacatggaaactcaggagcttacagatcctacaagaagacaacaagtcctctgattctgttcccaagaggagtgtatgggaacttaccaggatggttcaagacggtctttctcttcgagtttccattttacagccgaaatctccctcaagaggtggctgtttagtaactgcttattctgtttcagtttcatcttttatatcttactttagtgtttgatgagtttggcttctctttgttgtatgtgtgcaagaaagttagggtagactccaaaacagcaaagagaaagaagtaaaagatgactgatttgtgatactcatatttgagttattgttcttcacaacactctttgataaaatttgtgtaaaaaattgcccgtaagaaactgaatttgttt

SEQ ID NO: 29214 - protein, 166 aa, Arabidopsis thaliana
  peptide (1)..(166): Ceres Seq. ID no. 12324346
MQVMVGGSLKPADVIGWTMWVFGFLIEAAADQQKLSFKNSPENRGKWCDVGVWKYSRHPNYFGEMLLWWRIFVAASPVLEGAEYLVIFGPLFLTLLLLFVSGIPLLEASADKKHGNSGAYRSYKKTTSPLILFPRGVYGNLPGWFKTVFLFEFPFYSRNLPQEVAV

SEQ ID NO: 29215 - protein, 163 aa, Arabidopsis thaliana
  peptide (1)..(163): Ceres Seq. ID no. 12324347
MVGGSLKPADVIGWTMWVFGFLIEAAADQQKLSFKNSPENRGKWCDVGVWKYSRHPNYFGEMLLWWRIFVAASPVLEGAEYLVIFGPLFLTLLLLFVSGIPLLEASADKKHGNSGAYRSYKKTTSPLILFPRGVYGNLPGWFKTVFLFEFPFYSRNLPQEVAV

SEQ ID NO: 29216 - protein, 162 aa, Arabidopsis thaliana
  peptide (1)..(162): Ceres Seq. ID no. 12324348
RKDNESFLFDRKNIYLEVFSAFLFSFDRMGTVLDSHFLALTAIVTVVYQFIFFVITALFKFDQVTDFAGSTNFVILAVLTLVLKASWHFRQIVLTLLVVVWGLRLGIFLLMRILQWGEDRRFDEQRGNIVRLIIFWTLQAVWVWTVSLPLTLVNASDGGWIS

SEQ ID NO: 29217 - DNA, 1360 bp, Arabidopsis thaliana
  misc_feature (1)..(1360): Ceres Seq. ID no. 12339401
  misc_feature (1)..(1360): Ortholog of  Ceres SEQ ID NO 12578315 as cited in SEQ ID NO 62451
  misc_feature (1)..(1360): Ortholog of  Ceres SEQ ID NO 12617090 as cited in SEQ ID NO 64005
  misc_feature (1)..(1360): Ortholog of  Ceres SEQ ID NO 13597233 as cited in SEQ ID NO 64370
  misc_feature (1)..(1360): Ortholog of  Ceres SEQ ID NO 13584577 as cited in SEQ ID NO 65298
acgcttctgtctttacttcctctctcaacgtacgtagacagaaaaaagcaaaacatcatgacagaaaaatctgcagaactcgttcgtttgaacgaactcaaggcttttgtatcgacaaaagcaggtgtgaaaggactggtagataccaaaataaccgaagttcctcgaatcttccatatcccttcttcttcaactttatctaacaacaaaccttctgatatctctggcttaaacctcactgtcccaatcattgacctcggagatggtaacacatctgctgcaagaaacgtcctcgtttccaagattaaagaagcagctgagaattggggatttttccaagtaatcaatcatggtattcctttaactgttcttgaagatatcaaacaaggtgttcgaagatttcatgaggaagatccagaggtcaagaaacagtattttgctacagatttcaatacaagatttgcttacaacaccaacttcgatattcattattcttctcctatgaattggaaagactctttcacttgctacacttgtcctcaagatcctctaaagccagaggaaatcccactagcttgcagggatgttgtgattgaatactcgaagcatgtaatggaattaggaggtttactcttccaacttctctcagaagctttaggtttagactctgagattcttaagaacatggattgtctcaagggtttgcttatgctctgccattattatccaccttgtccacaacctgacctaactttgggcataagtaaacacaccgacaattccttcataacaattcttcttcaagatcaaatcggtggtcttcaagttcttcatcaagattcttgggtagatgtaactcctgttcctggagctcttgtcatcagtatcggtgatttcatgcaggcaagctcgattgatgcttccttttaactcaaaacagagtctttctttatcaatacacttgagtcattttgttttgcagctgatcgcaaacgataagttcttaagtatggagcatagggtacgggcaaacagagatggaccgcggatttcagttgcttgcttcgttagctcgggagtgtttccaaattccactgtttatggaccgataaaagagcttctttctgatgaaaaccctgcaaagtacagagacatcactataccagaatacactgtaggatacctagcaagcatcttcgatggaaaatcgcatttgtctaagttccggatatgaagaaatgacttgtatggcttagttaaaaacagatatgtgtgttttgctgctctcttctcgctcgagaggacatcaactattttgttaataagaaagatttttttacagtgaagacattgaattacc

SEQ ID NO: 29218 - protein, 309 aa, Arabidopsis thaliana
  peptide (1)..(309): Ceres Seq. ID no. 12339402
TLLSLLPLSTYVDRKKQNIMTEKSAELVRLNELKAFVSTKAGVKGLVDTKITEVPRIFHIPSSSTLSNNKPSDISGLNLTVPIIDLGDGNTSAARNVLVSKIKEAAENWGFFQVINHGIPLTVLEDIKQGVRRFHEEDPEVKKQYFATDFNTRFAYNTNFDIHYSSPMNWKDSFTCYTCPQDPLKPEEIPLACRDVVIEYSKHVMELGGLLFQLLSEALGLDSEILKNMDCLKGLLMLCHYYPPCPQPDLTLGISKHTDNSFITILLQDQIGGLQVLHQDSWVDVTPVPGALVISIGDFMQASSIDASF

SEQ ID NO: 29219 - protein, 290 aa, Arabidopsis thaliana
  peptide (1)..(290): Ceres Seq. ID no. 12339403
MTEKSAELVRLNELKAFVSTKAGVKGLVDTKITEVPRIFHIPSSSTLSNNKPSDISGLNLTVPIIDLGDGNTSAARNVLVSKIKEAAENWGFFQVINHGIPLTVLEDIKQGVRRFHEEDPEVKKQYFATDFNTRFAYNTNFDIHYSSPMNWKDSFTCYTCPQDPLKPEEIPLACRDVVIEYSKHVMELGGLLFQLLSEALGLDSEILKNMDCLKGLLMLCHYYPPCPQPDLTLGISKHTDNSFITILLQDQIGGLQVLHQDSWVDVTPVPGALVISIGDFMQASSIDASF

SEQ ID NO: 29220 - DNA, 1422 bp, Arabidopsis thaliana
  misc_feature (1)..(1422): Ceres Seq. ID no. 12324257
  misc_feature (1)..(1422): Ortholog of  Ceres SEQ ID NO 15177104 as cited in SEQ ID NO 56048
aaatctccgacggaggaaaagtagccaccgcttgacgaatcattcatcaacacacgcagagagctctgaatctcgaggaagaagatggtgaggatcattcctatggctgcttcctccattcgaccttccctcgcctgcttctctgattctcctcgcttccccatctccctcctctccagaaatctctctcgcactctccatgttcctcaatcacagctttttggtttaacttctcataagcttttgagaagaagtgtaaactgtttaggagttgctgaatctggtaaagcagctcaagctactacacaagatgatcttctcacctgggttaagaatgataagagaagaatgcttcatgttgtttatcgtgttggcgatatggaccggacgataaagttttatactgaatgtcttgggatgaagcttctacgtaagcgtgatataccagaagagaagtatactaatgctttccttggttatggaccggaagattcacactttgtgattgagcttacttataattatggagttgacaagtatgacattggggctggttttggtcactttggtattgcggtcgatgatgtggcgaaaactgtagagcttgtgaaagccaaagggggaaaagtaagccgggagcctggtcctgtcaaaggtggcaaaactgtaatagcattcattgaagatcctgatggttacaaatttgaactcttggaaagaggtcctacaccagaacctctttgccaagttatgctccgtgttggtgatctcgatagggccataaagttctatgagaaggcttttggaatggaacttctgcgaacaagagacaacccagagtacaagtacacaatagccatgatgggatatggtccagaagataaatttcctgtcctagagctgacatataactatggtgtcactgaatatgataaaggaaatgcttatgctcagatagcaatagggacggatgatgtgtacaaaactgcagaagctataaaactctttgggggaaaaatcacgagggagcctggtcccttaccaggtattagcacgaagatcaccgcgtgtctggatcctgatggttggaaatcggtatttgtggacaacattgactttctcaaagaactggagtgagaggagaaagcagaagagaggcaacaaatgcacgaaaatggcttatgagggagacaggaggagaggccttgttgtgaattacatcagtttggggtttgatataatctctctcagtgctgaatatttttatcaaagtgaatgatttgtttttcagaatatagtgtagttgtttaatttacagtataaaagcctatgttgcgtctttgtatattagttccacttaacattaattgccaataaataagatgataagtgaatgatattcaagaaaaaatcttatgcctg

SEQ ID NO: 29221 - protein, 350 aa, Arabidopsis thaliana
  peptide (1)..(350): Ceres Seq. ID no. 12324258
MVRIIPMAASSIRPSLACFSDSPRFPISLLSRNLSRTLHVPQSQLFGLTSHKLLRRSVNCLGVAESGKAAQATTQDDLLTWVKNDKRRMLHVVYRVGDMDRTIKFYTECLGMKLLRKRDIPEEKYTNAFLGYGPEDSHFVIELTYNYGVDKYDIGAGFGHFGIAVDDVAKTVELVKAKGGKVSREPGPVKGGKTVIAFIEDPDGYKFELLERGPTPEPLCQVMLRVGDLDRAIKFYEKAFGMELLRTRDNPEYKYTIAMMGYGPEDKFPVLELTYNYGVTEYDKGNAYAQIAIGTDDVYKTAEAIKLFGGKITREPGPLPGISTKITACLDPDGWKSVFVDNIDFLKELE

SEQ ID NO: 29222 - protein, 344 aa, Arabidopsis thaliana
  peptide (1)..(344): Ceres Seq. ID no. 12324259
MAASSIRPSLACFSDSPRFPISLLSRNLSRTLHVPQSQLFGLTSHKLLRRSVNCLGVAESGKAAQATTQDDLLTWVKNDKRRMLHVVYRVGDMDRTIKFYTECLGMKLLRKRDIPEEKYTNAFLGYGPEDSHFVIELTYNYGVDKYDIGAGFGHFGIAVDDVAKTVELVKAKGGKVSREPGPVKGGKTVIAFIEDPDGYKFELLERGPTPEPLCQVMLRVGDLDRAIKFYEKAFGMELLRTRDNPEYKYTIAMMGYGPEDKFPVLELTYNYGVTEYDKGNAYAQIAIGTDDVYKTAEAIKLFGGKITREPGPLPGISTKITACLDPDGWKSVFVDNIDFLKELE

SEQ ID NO: 29223 - protein, 262 aa, Arabidopsis thaliana
  peptide (1)..(262): Ceres Seq. ID no. 12324260
MLHVVYRVGDMDRTIKFYTECLGMKLLRKRDIPEEKYTNAFLGYGPEDSHFVIELTYNYGVDKYDIGAGFGHFGIAVDDVAKTVELVKAKGGKVSREPGPVKGGKTVIAFIEDPDGYKFELLERGPTPEPLCQVMLRVGDLDRAIKFYEKAFGMELLRTRDNPEYKYTIAMMGYGPEDKFPVLELTYNYGVTEYDKGNAYAQIAIGTDDVYKTAEAIKLFGGKITREPGPLPGISTKITACLDPDGWKSVFVDNIDFLKELE

SEQ ID NO: 29224 - DNA, 2118 bp, Arabidopsis thaliana
  misc_feature (1)..(2118): Ceres Seq. ID no. 13488391
  misc_feature (1)..(2118): Ortholog of  Ceres SEQ ID NO 12556893 as cited in SEQ ID NO 30
  misc_feature (1)..(2118): Ortholog of  Ceres SEQ ID NO 13584538 as cited in SEQ ID NO 64739
aaaaaaaagaaaaatcaaaatccaattcaacactctcacacttcgatatctccgccttcattcttctcagagccaattgtcctgagatttcgatttctccaatctctcttcctccgtcgccggcgaaactatgtctcagtctattcaattctccactccttcacacactcctcaccttctccatctccctcactcacaattcaaccgtcctctctcctctatctccttccgtcgcttccctctaacaaccatcaaatacacttccatcagagcctcctcgtcatcatctccttcaccggatctcgattcatcgtcctcatcatcatcctcgcaagtacttctctcacctaacggtactggtgctgtgaagtctgatgagagatccgttgtcgctacggcggttacgactgatacgtctgggattgaggttgatactgtgacggaagctgagcttaaggagaatggatttagaagtacgaggaggacgaagctgatctgtacgatcggaccggcgacttgtggatttgagcagcttgaggcgcttgctgtgggaggtatgaatgtggcaaggcttaatatgtgtcacggtacgcgtgattggcaccgcggtgtgattcgtagtgttcggaggcttaatgaggagaaaggctttgcggttgctattatgatggatactgaaggtagtgagattcatatgggagatcttggtggtgaagcttcagctaaagcagaggatggtgaggtttggactttcactgttagagcttttgattcttctcgtcctgaacgtaccattagtgttagctacgatggtttcgctgaagatgtaagagttggggatgaacttttggttgatggtgggatggtgagatttgaagtgattgagaagattggtcctgatgttaagtgtctatgtaccgatcctggattgttgcttcctcgagctaacttgacgttttggagagatggaagtcttgtacgagagcgtaatgccatgcttccaacaatttcttccaaggactggttggatattgattttggaattgctgaaggtgtggatttcattgctgtatcgtttgtcaagtcggctgaagtcattaatcaccttaaaagttatcttgctgctcgttcccgtggaggggaaattggagtgattgcaaagatcgagagtatcgattcactgaccaatttggaagaaattattctagcatcagatggggccatggttgcaagaggagatctgggagctcagatacctcttgagcaagttccagcagctcaacagagaatcgtccaagtatgcagagctcttaacaaacccgtcattgtcgcttcacagctattggagtccatgattgagtacccaactccaaccagagcagaagttgccgacgtgtctgaagcagtaagacaaagatcagatgcattgatgctctctggagaatcagctatgggacaattcccagacaaggcgctcacggttctaaggactgtcagtttaagaatcgagagatggtggagggaagagaaacgccatgagtctgtaccgcttcaagccataggctcttcattttcagacaaaatctcagaagagatctgtaactcagctgctaaaatggctaacaatcttggagtggacgcggttttcgtttacacaacgagcggacacatggcatcactggtctcccgatgtcgcccggactgcccgatctttgctttcacaaccacaacctcagtgagaagacgcttaaacctacaatggggacttatcccattccgtctcagcttctcagacgacatggaaagcaacttgaacaaaacattctcgttactgaaatcaagaggtatgatcaaatctggtgacctcgtgatcgcagtctcggacatgctgcaatcaatccaggtaatgaacgtcccgtaattctctctctttatacaatttcgcaatcccgcaaaagagtgttttgtttcctacttttgttactgtttttagactactcttacattagattccagaggcatcatcatcttcggtttgttaacaacagtaatgtgtaagctttgtttgtagtgtgtactgtttgtttttggttttcaataatatcagtaatcttattc

SEQ ID NO: 29225 - protein, 596 aa, Arabidopsis thaliana
  peptide (1)..(596): Ceres Seq. ID no. 13488392
MSQSIQFSTPSHTPHLLHLPHSQFNRPLSSISFRRFPLTTIKYTSIRASSSSSPSPDLDSSSSSSSSQVLLSPNGTGAVKSDERSVVATAVTTDTSGIEVDTVTEAELKENGFRSTRRTKLICTIGPATCGFEQLEALAVGGMNVARLNMCHGTRDWHRGVIRSVRRLNEEKGFAVAIMMDTEGSEIHMGDLGGEASAKAEDGEVWTFTVRAFDSSRPERTISVSYDGFAEDVRVGDELLVDGGMVRFEVIEKIGPDVKCLCTDPGLLLPRANLTFWRDGSLVRERNAMLPTISSKDWLDIDFGIAEGVDFIAVSFVKSAEVINHLKSYLAARSRGGEIGVIAKIESIDSLTNLEEIILASDGAMVARGDLGAQIPLEQVPAAQQRIVQVCRALNKPVIVASQLLESMIEYPTPTRAEVADVSEAVRQRSDALMLSGESAMGQFPDKALTVLRTVSLRIERWWREEKRHESVPLQAIGSSFSDKISEEICNSAAKMANNLGVDAVFVYTTSGHMASLVSRCRPDCPIFAFTTTTSVRRRLNLQWGLIPFRLSFSDDMESNLNKTFSLLKSRGMIKSGDLVIAVSDMLQSIQVMNVP

SEQ ID NO: 29226 - protein, 454 aa, Arabidopsis thaliana
  peptide (1)..(454): Ceres Seq. ID no. 13488393
MNVARLNMCHGTRDWHRGVIRSVRRLNEEKGFAVAIMMDTEGSEIHMGDLGGEASAKAEDGEVWTFTVRAFDSSRPERTISVSYDGFAEDVRVGDELLVDGGMVRFEVIEKIGPDVKCLCTDPGLLLPRANLTFWRDGSLVRERNAMLPTISSKDWLDIDFGIAEGVDFIAVSFVKSAEVINHLKSYLAARSRGGEIGVIAKIESIDSLTNLEEIILASDGAMVARGDLGAQIPLEQVPAAQQRIVQVCRALNKPVIVASQLLESMIEYPTPTRAEVADVSEAVRQRSDALMLSGESAMGQFPDKALTVLRTVSLRIERWWREEKRHESVPLQAIGSSFSDKISEEICNSAAKMANNLGVDAVFVYTTSGHMASLVSRCRPDCPIFAFTTTTSVRRRLNLQWGLIPFRLSFSDDMESNLNKTFSLLKSRGMIKSGDLVIAVSDMLQSIQVMNVP

SEQ ID NO: 29227 - protein, 447 aa, Arabidopsis thaliana
  peptide (1)..(447): Ceres Seq. ID no. 13488394
MCHGTRDWHRGVIRSVRRLNEEKGFAVAIMMDTEGSEIHMGDLGGEASAKAEDGEVWTFTVRAFDSSRPERTISVSYDGFAEDVRVGDELLVDGGMVRFEVIEKIGPDVKCLCTDPGLLLPRANLTFWRDGSLVRERNAMLPTISSKDWLDIDFGIAEGVDFIAVSFVKSAEVINHLKSYLAARSRGGEIGVIAKIESIDSLTNLEEIILASDGAMVARGDLGAQIPLEQVPAAQQRIVQVCRALNKPVIVASQLLESMIEYPTPTRAEVADVSEAVRQRSDALMLSGESAMGQFPDKALTVLRTVSLRIERWWREEKRHESVPLQAIGSSFSDKISEEICNSAAKMANNLGVDAVFVYTTSGHMASLVSRCRPDCPIFAFTTTTSVRRRLNLQWGLIPFRLSFSDDMESNLNKTFSLLKSRGMIKSGDLVIAVSDMLQSIQVMNVP

SEQ ID NO: 29228 - DNA, 1406 bp, Arabidopsis thaliana
  misc_feature (1)..(1406): Ceres Seq. ID no. 13490460
  misc_feature (1)..(1406): Ortholog of  Ceres SEQ ID NO 15176375 as cited in SEQ ID NO 53238
  misc_feature (1)..(1406): Ortholog of  Ceres SEQ ID NO 15170532 as cited in SEQ ID NO 55671
  misc_feature (1)..(1406): Ortholog of  Ceres SEQ ID NO 14316507 as cited in SEQ ID NO 57397
  misc_feature (1)..(1406): Ortholog of  Ceres SEQ ID NO 13663060 as cited in SEQ ID NO 60964
  misc_feature (1)..(1406): Ortholog of  Ceres SEQ ID NO 13598532 as cited in SEQ ID NO 65204
  misc_feature (1)..(1406): Ortholog of  Ceres SEQ ID NO 13656849 as cited in SEQ ID NO 65764
  misc_feature (1)..(1406): Ortholog of  Ceres SEQ ID NO 13656501 as cited in SEQ ID NO 69206
ctcctctcttcaagcttttcacagaaaaccaccacccttctctctctactgcctttttaccacagagaagagagaggatccgtcggtgtgctagtctcactgacactacatccgatcgtcgccggtgacattttataagtgtggagtttacttcagctttattattcaggaattgatggatcagtacgagaaagttgagaagattggtgaaggaacttacggtgtggtttataaggcacgtgacaaagtgactaatgagacaattgctttgaagaagatcaggctagagcaggaggatgaaggtgttcctagcacagcaatcagagaaatctccctcttgaaagaaatgcagcacagcaacattgtcaaattgcaggatgtggtgcacagcgagaaacgtttgtatctggtttttgagtatcttgacttggatctcaaaaagcacatggattctactcctgatttctccaaggatctacatatgatcaaaacatatctttaccagattctccgtggaattgcgtattgccactctcatagggttctccatcgtgatctgaagccacagaatttgttgattgatcgccgcacaaactcactgaagcttgctgattttggactggccagagcattcggtatccctgtcaggacatttactcatgaggttgttactctctggtaccgagcaccagagatactcctaggatctcatcattactctacacctgttgatatttggtctgtggggtgcatatttgctgagatgatcagccaaaagcccttatttcctggagactccgagattgatcaactcttcaagattttcagaatcatgggaactccgtacgaggatacatggcgtggggtaacttctctaccggattataaatctgctttccctaaatggaaaccaacggacctagaaacttttgtccccaatctagatcccgatggagtcgatctcctttctaaaatgctgttaatggatccgaccaaaagaatcaacgcaagagccgccctggagcatgaatacttcaaggatcttggaggcatgccttagaaaggcataaaaccagtaatctccttcattctatatataattatcaatcctaagaaaatgaagaacaatattaatgggttttgtttattctttttctgagttcgtttcctacttatattctattacgaaaaaaaagaaagaagaagatttcgagtgtgtgtgtttttttacttctaagcttttgagatcagtttcttgtatcttattttacccagaatatagtatttccctatatgaaatatggtttttgttttgcaaaatgaccatattatgcaacttctcagctcttgattgtgccttgatagtgatcttttgaaatatatcccaaaaaacatcacttttttcg

SEQ ID NO: 29229 - protein, 294 aa, Arabidopsis thaliana [sequence omitted]

SEQ ID NO: 29230 - protein, 237 aa, Arabidopsis thaliana
  peptide (1)..(237): Ceres Seq. ID no. 13490462
MQHSNIVKLQDVVHSEKRLYLVFEYLDLDLKKHMDSTPDFSKDLHMIKTYLYQILRGIAYCHSHRVLHRDLKPQNLLIDRRTNSLKLADFGLARAFGIPVRTFTHEVVTLWYRAPEILLGSHHYSTPVDIWSVGCIFAEMISQKPLFPGDSEIDQLFKIFRIMGTPYEDTWRGVTSLPDYKSAFPKWKPTDLETFVPNLDPDGVDLLSKMLLMDPTKRINARAALEHEYFKDLGGMP

SEQ ID NO: 29231 - protein, 204 aa, Arabidopsis thaliana
  peptide (1)..(204): Ceres Seq. ID no. 13490463
MDSTPDFSKDLHMIKTYLYQILRGIAYCHSHRVLHRDLKPQNLLIDRRTNSLKLADFGLARAFGIPVRTFTHEVVTLWYRAPEILLGSHHYSTPVDIWSVGCIFAEMISQKPLFPGDSEIDQLFKIFRIMGTPYEDTWRGVTSLPDYKSAFPKWKPTDLETFVPNLDPDGVDLLSKMLLMDPTKRINARAALEHEYFKDLGGMP

SEQ ID NO: 29232 - DNA, 1444 bp, Arabidopsis thaliana
  misc_feature (1)..(1444): Ceres Seq. ID no. 13486778
  misc_feature (1)..(1444): Ortholog of  Ceres SEQ ID NO 14311553 as cited in SEQ ID NO 51462
  misc_feature (1)..(1444): Ortholog of  Ceres SEQ ID NO 13599003 as cited in SEQ ID NO 0
actgaattaggatactgtgtggtgttttgcaaaactgctcttgtgctatgactctggctaatgatttcggatattcgaccgctatgtcttcatcttattcagctcttcatactagtgtagaagacagataccacaagttgcctaactctttttgggtttcatcaggtcaggaactgatgaataaccctgtaccgtgtcagtcggtctctggtggcaattctggtggttatttgtttccttcttcctctggatactgcaatgtttcagctgtcttgcctcatggaaggaatttgcaaaaccagccacctgtttccaccgtgcctagagacagattggctatgcaggattgtcctttgatagctcaatcctcgttgattaatcatcaccctcaagagttcatagatccacttcatgagttctttgatttctctgatcatgttcctgttcagaatctacaagcagagagtagtggagtaagggtggactcatccgtggaacttcataagaaaagtgaatggcaagattgggcagatcagctgatttctgttgacgatggttctgagccaaattggtctgaacttcttggagattcaagttcccacaatccaaattcagagatacctacaccatttttggatgtaccaaggctagatataacagctaaccagcagcaacagatggtttcatcagaggaccagctcagcggcagaaactcatcatctagtgtagcaacatctaaacaacgtatgcgttggacaccagaacttcacgaggcattcgttgaagctgttaatcagcttggtggtagtgaacgagccacccctaaggctgttttgaagctcttgaataaccctggcttgaccatttatcatgtaaaaagccatttgcagaaatatagaacggcaaggtataaaccggagacttcggaagttacaggagaacctcaagagaagaagatgacatctattgaagatatcaaatctcttgacatgaaaacgagcgttgagatcacacaagctctacggttacaaatggaagtgcagaaacgtctccacgagcagctcgagatccaacggtcactgcagttacagattgaaaaacagggccggtacctacagatgatgttcgagaaacaacaaaagatacaagacaacaagagctcttcttcagaagcatcaccaaagcaatgcaatggttcatttgcagaagttgaagttggtcttgagacactaacaggggaccaaaatgaatctgcttcagcatcaaggaaacgtgtcagagaagattaaagcatgtttaatttgatctcgtttgacgaaacatgtttattgggaattaattgtggaaaccaactccagttttgttaaaagaatctgtttctttcttagctctgtattgttctagtttagaagcagttgatttggccttgcatggctgcaacacc

SEQ ID NO: 29233 - protein, 413 aa, Arabidopsis thaliana
  peptide (1)..(413): Ceres Seq. ID no. 13486779
MTLANDFGYSTAMSSSYSALHTSVEDRYHKLPNSFWVSSGQELMNNPVPCQSVSGGNSGGYLFPSSSGYCNVSAVLPHGRNLQNQPPVSTVPRDRLAMQDCPLIAQSSLINHHPQEFIDPLHEFFDFSDHVPVQNLQAESSGVRVDSSVELHKKSEWQDWADQLISVDDGSEPNWSELLGDSSSHNPNSEIPTPFLDVPRLDITANQQQQMVSSEDQLSGRNSSSSVATSKQRMRWTPELHEAFVEAVNQLGGSERATPKAVLKLLNNPGLTIYHVKSHLQKYRTARYKPETSEVTGEPQEKKMTSIEDIKSLDMKTSVEITQALRLQMEVQKRLHEQLEIQRSLQLQIEKQGRYLQMMFEKQQKIQDNKSSSSEASPKQCNGSFAEVEVGLETLTGDQNESASASRKRVRED

SEQ ID NO: 29234 - protein, 401 aa, Arabidopsis thaliana
  peptide (1)..(401): Ceres Seq. ID no. 13486780
MSSSYSALHTSVEDRYHKLPNSFWVSSGQELMNNPVPCQSVSGGNSGGYLFPSSSGYCNVSAVLPHGRNLQNQPPVSTVPRDRLAMQDCPLIAQSSLINHHPQEFIDPLHEFFDFSDHVPVQNLQAESSGVRVDSSVELHKKSEWQDWADQLISVDDGSEPNWSELLGDSSSHNPNSEIPTPFLDVPRLDITANQQQQMVSSEDQLSGRNSSSSVATSKQRMRWTPELHEAFVEAVNQLGGSERATPKAVLKLLNNPGLTIYHVKSHLQKYRTARYKPETSEVTGEPQEKKMTSIEDIKSLDMKTSVEITQALRLQMEVQKRLHEQLEIQRSLQLQIEKQGRYLQMMFEKQQKIQDNKSSSSEASPKQCNGSFAEVEVGLETLTGDQNESASASRKRVRED

SEQ ID NO: 29235 - protein, 370 aa, Arabidopsis thaliana
  peptide (1)..(370): Ceres Seq. ID no. 13486781
MNNPVPCQSVSGGNSGGYLFPSSSGYCNVSAVLPHGRNLQNQPPVSTVPRDRLAMQDCPLIAQSSLINHHPQEFIDPLHEFFDFSDHVPVQNLQAESSGVRVDSSVELHKKSEWQDWADQLISVDDGSEPNWSELLGDSSSHNPNSEIPTPFLDVPRLDITANQQQQMVSSEDQLSGRNSSSSVATSKQRMRWTPELHEAFVEAVNQLGGSERATPKAVLKLLNNPGLTIYHVKSHLQKYRTARYKPETSEVTGEPQEKKMTSIEDIKSLDMKTSVEITQALRLQMEVQKRLHEQLEIQRSLQLQIEKQGRYLQMMFEKQQKIQDNKSSSSEASPKQCNGSFAEVEVGLETLTGDQNESASASRKRVRED

SEQ ID NO: 29236 - DNA, 1338 bp, Arabidopsis thaliana
  misc_feature (1)..(1338): Ceres Seq. ID no. 12324858
  misc_feature (1)..(1338): Ortholog of  Ceres SEQ ID NO 15169300 as cited in SEQ ID NO 59572
  misc_feature (1)..(1338): Ortholog of  Ceres SEQ ID NO 15176407 as cited in SEQ ID NO 59620
  misc_feature (1)..(1338): Ortholog of  Ceres SEQ ID NO 13596876 as cited in SEQ ID NO 62696
  misc_feature (1)..(1338): Ortholog of  Ceres SEQ ID NO 13655442 as cited in SEQ ID NO 64359
  misc_feature (1)..(1338): Ortholog of  Ceres SEQ ID NO 14303652 as cited in SEQ ID NO 67569
aattagaaggaaaaatcatttatgagtgaaatagaaatttgatatctctttattagtttctgcatctcgaggggtttttgggattctctgattcgattgagttctatttgtcgttgtgtacaacatctcgggtggatctttgttgatggcgaaactgagacactcgcgatttcaagcgaggaaatggtcgacattgatgcttgttctgtttatgttgtttatgttaacgattgttctcttaatgcttttggctttcggagttttctctcttcctattaacaacgatgaatcctctcctatcgatctctcttatttccgacgagctgccactgagagaagtgaaggacttgggaagagaggagaccagtggaactgaagtgctttcttgggaacctagagcttttgtctaccacaatttcttgtcgaaggaagaatgtgaatatttaatcagtcttgcaaaaccacatatggtgaagtcaactgttgtagatagcgaaaccggcaagagcaaagatagcagggtgcgaacaagctcagggactttccttaggagaggaagggacaaaatcattaagaccattgagaaaagaatagcagattacacctttattcctgcagatcatggtgaaggacttcaagttcttcactacgaagcagggcaaaagtatgaaccacactatgattattttgttgatgagttcaacactaaaaatggaggtcaacggatggctacaatgcttatgtatctgtcggatgttgaggaaggcggtgaaacagtgtttcctgctgccaatatgaattttagttctgtaccatggtataatgagctctctgagtgtgggaaaaagggactttccgtaaagccgagaatgggtgatgcattgcttttctggagcatgaggcctgatgctacactagatcctacaagtttgcatggtggatgtcctgtgattagagggaacaagtggtcatctaccaaatggattcatgttggcgagtacaaaatctagcgtgtttggtttctggacagtaaactgtttcctttcatggtggatgggatgcaaagttggaactagaaattacagagagttgatgtttgttttttccctgcggctcagtgcattccttgctttgatgggattcaaggtttatcattagagaataccaaaagatagagattttgttagagtaaattaggatggcttagagtgactcttactcattggtatacccataaaggtcttgtgtctttgaacaagagttgtgaattacatagttttgtggtattcttttgttttgtttgtgattagaaacataatcaaattaaaaattgttacc

SEQ ID NO: 29237 - protein, 241 aa, Arabidopsis thaliana
  peptide (1)..(241): Ceres Seq. ID no. 12324859
MNPLLSISLISDELPLREVKDLGREETSGTEVLSWEPRAFVYHNFLSKEECEYLISLAKPHMVKSTVVDSETGKSKDSRVRTSSGTFLRRGRDKIIKTIEKRIADYTFIPADHGEGLQVLHYEAGQKYEPHYDYFVDEFNTKNGGQRMATMLMYLSDVEEGGETVFPAANMNFSSVPWYNELSECGKKGLSVKPRMGDALLFWSMRPDATLDPTSLHGGCPVIRGNKWSSTKWIHVGEYKI

SEQ ID NO: 29238 - protein, 180 aa, Arabidopsis thaliana
  peptide (1)..(180): Ceres Seq. ID no. 12324860
MVKSTVVDSETGKSKDSRVRTSSGTFLRRGRDKIIKTIEKRIADYTFIPADHGEGLQVLHYEAGQKYEPHYDYFVDEFNTKNGGQRMATMLMYLSDVEEGGETVFPAANMNFSSVPWYNELSECGKKGLSVKPRMGDALLFWSMRPDATLDPTSLHGGCPVIRGNKWSSTKWIHVGEYKI

SEQ ID NO: 29239 - DNA, 1386 bp, Arabidopsis thaliana
  misc_feature (1)..(1386): Ceres Seq. ID no. 12321239
  misc_feature (1)..(1386): Ortholog of  Ceres SEQ ID NO 15179593 as cited in SEQ ID NO 1057
  misc_feature (1)..(1386): Ortholog of  Ceres SEQ ID NO 14306904 as cited in SEQ ID NO 53566
  misc_feature (1)..(1386): Ortholog of  Ceres SEQ ID NO 13658640 as cited in SEQ ID NO 66419
atctctcttacgattccttcaaatcattcttccatggccaccgtatcttcttcctcctggccaaaccccaaccctaatcccgattccacgtctgcctcagattccgattctacttttccctctcaccgcgatcgcgtagacgaacccgactctctcgattccttctcctccatgagtcttaactccgacgaacctaatcagacttctaatcaatcgcctctttctccccctacgcccaatttaccggtgatgcctcctccgtccgtgcttcatctttcctttaaccaagatcatgcttgcttcgctgtcggcactgaccgtggcttccggatccttaattgcgatccctttcgcgagattttccggcgtgatttcgatcgtggcggtggtgttgcagtcgtggagatgcttttcagatgcaatatattagccctagttggtggcggacctgatcctcaatatcctcctaataaggttatgatttgggatgatcaccagggccgatgtatcggagaactctctttcaggtccgatgttagatccgtccggcttaggagggatcggattattgtcgttcttgagcagaagatttttgtctacaatttctctgacctcaagctgatgcatcagattgaaaccattgccaaccctaagggtttgtgtgctgtttctcagggtgttggttctatggttttggtatgtccaggtttgcagaaaggtcaagttcggatcgagcactacgcttctaaacggaccaaattcgtcatggctcatgattccagaatagcttgcttcgctctcacgcaggatggccatttgttggccacagctagctctaagggtactctggttcggatcttcaaatgctcagtggttagctgtctcaagtgacaaaggaacggtccatgtctttggtctcaaagtcaactccggatctcaagtgaaagactcatcccgaattgcacctgatgctactccctcatccccatcgtcgtctctgtctttattcaaaggagtgttaccgaggtatttcagctcggagtggtcggtggctcagttcaggttggttgaaggaactcagtacatagccgcctttggccatcaaaagaacaccgttgttattcttggcatggatgggagcttctacagatgccagtttgatccggtgaacggcggtgaaatgtctcagctcgagtaccacaactgtctgaaaccgccttcagttttctaaaagctttactacttatactcttttgttccttctctctctttatatctctctgctacttaagcggtgagatttggtgtatagttttgtgtatataataatgatgggtcgtcctataatttgtaaaaccttttatcactaaccaaaactgattcacg

SEQ ID NO: 29240 - protein, 296 aa, Arabidopsis thaliana
  peptide (1)..(296): Ceres Seq. ID no. 12321240
ISLTIPSNHSSMATVSSSSWPNPNPNPDSTSASDSDSTFPSHRDRVDEPDSLDSFSSMSLNSDEPNQTSNQSPLSPPTPNLPVMPPPSVLHLSFNQDHACFAVGTDRGFRILNCDPFREIFRRDFDRGGGVAVVEMLFRCNILALVGGGPDPQYPPNKVMIWDDHQGRCIGELSFRSDVRSVRLRRDRIIVVLEQKIFVYNFSDLKLMHQIETIANPKGLCAVSQGVGSMVLVCPGLQKGQVRIEHYASKRTKFVMAHDSRIACFALTQDGHLLATASSKGTLVRIFKCSVVSCLK

SEQ ID NO: 29241 - protein, 285 aa, Arabidopsis thaliana
  peptide (1)..(285): Ceres Seq. ID no. 12321241
MATVSSSSWPNPNPNPDSTSASDSDSTFPSHRDRVDEPDSLDSFSSMSLNSDEPNQTSNQSPLSPPTPNLPVMPPPSVLHLSFNQDHACFAVGTDRGFRILNCDPFREIFRRDFDRGGGVAVVEMLFRCNILALVGGGPDPQYPPNKVMIWDDHQGRCIGELSFRSDVRSVRLRRDRIIVVLEQKIFVYNFSDLKLMHQIETIANPKGLCAVSQGVGSMVLVCPGLQKGQVRIEHYASKRTKFVMAHDSRIACFALTQDGHLLATASSKGTLVRIFKCSVVSCLK

SEQ ID NO: 29242 - protein, 239 aa, Arabidopsis thaliana
  peptide (1)..(239): Ceres Seq. ID no. 12321242
MSLNSDEPNQTSNQSPLSPPTPNLPVMPPPSVLHLSFNQDHACFAVGTDRGFRILNCDPFREIFRRDFDRGGGVAVVEMLFRCNILALVGGGPDPQYPPNKVMIWDDHQGRCIGELSFRSDVRSVRLRRDRIIVVLEQKIFVYNFSDLKLMHQIETIANPKGLCAVSQGVGSMVLVCPGLQKGQVRIEHYASKRTKFVMAHDSRIACFALTQDGHLLATASSKGTLVRIFKCSVVSCLK

SEQ ID NO: 29243 - DNA, 468 bp, Arabidopsis thaliana
  misc_feature (1)..(468): Ceres Seq. ID no. 12397076
  misc_feature (1)..(468): Ortholog of  Ceres SEQ ID NO 13597380 as cited in SEQ ID NO 64054
aagactcaacacagatgctcaaaactttaacaagaagcttaacgctgctgcttcaaagcttcagaagcaatattccgatcttaagattgttgtcttcgacatctactctccactttatgatcttgttcagaacccttccaaatccggattcacggaagcaaccaaaggatgttgtggaacaggaacagtcgagacaacttcactcttgtgcaacccgaaatcgtttgggacatgctccaatgctactcagtatgtgttctgggacagtgtgcatccttctgaagctgccaatgagattcttgccactgccctaattggacagggcttttctctcctcggttgatctcacgtatttatcttatattctcttttcaaatcgctgtttctatcacacatgagtcatacatttgtttttctttgaattatgtatcaaagcatcactgttttactaaaaatgtattgaaactt

SEQ ID NO: 29244 - protein, 113 aa, Arabidopsis thaliana
  peptide (1)..(113): Ceres Seq. ID no. 12397077
RLNTDAQNFNKKLNAAASKLQKQYSDLKIVVFDIYSPLYDLVQNPSKSGFTEATKGCCGTGTVETTSLLCNPKSFGTCSNATQYVFWDSVHPSEAANEILATALIGQGFSLLG

SEQ ID NO: 29245 - protein, 103 aa, Arabidopsis thaliana
  peptide (1)..(103): Ceres Seq. ID no. 12397078
DSTQMLKTLTRSLTLLLQSFRSNIPILRLLSSTSTLHFMILFRTLPNPDSRKQPKDVVEQEQSRQLHSCATRNRLGHAPMLLSMCSGTVCILLKLPMRFLPLP

SEQ ID NO: 29246 - protein, 99 aa, Arabidopsis thaliana
  peptide (1)..(99): Ceres Seq. ID no. 12397079
MLKTLTRSLTLLLQSFRSNIPILRLLSSTSTLHFMILFRTLPNPDSRKQPKDVVEQEQSRQLHSCATRNRLGHAPMLLSMCSGTVCILLKLPMRFLPLP

SEQ ID NO: 29247 - DNA, 726 bp, Arabidopsis thaliana
  misc_feature (1)..(726): Ceres Seq. ID no. 12372146
  misc_feature (1)..(726): Ortholog of  Ceres SEQ ID NO 12563124 as cited in SEQ ID NO 57104
  misc_feature (1)..(726): Ortholog of  Ceres SEQ ID NO 13598373 as cited in SEQ ID NO 62185
  misc_feature (1)..(726): Ortholog of  Ceres SEQ ID NO 12584664 as cited in SEQ ID NO 62232
  misc_feature (1)..(726): Ortholog of  Ceres SEQ ID NO 12617639 as cited in SEQ ID NO 65219
  misc_feature (1)..(726): Ortholog of  Ceres SEQ ID NO 15179982 as cited in SEQ ID NO 0
aacataagtctctctcttacattttgaaaccctaatttctcaaaaaaaatgtctgaagttgagtaccggtgctttgtcggcggccttgcctgggccaccaatgatgaagatcttcaaaggacgttctcacagttcggcgacgttatcgattctaagatcattaacgaccgcgagagtggaagatcaaggggattcggattcgtcaccttcaaggacgagaaagccatgagggatgcgattgaagagatgaacggtaaagagctcgatggacgtgtcatcaccgtgaacgaggctcagtcgagaggtagcggcggtggcggaggaggccgtggtggaagcggtggtggttaccgcagcggaggcggtggtggatactcaggaggcggtggcggcggatactcaggaggaggcggtggtggttacgagagacgtagcggaggttacggatctggtggaggcggtggtggccgaggatacggtggtggtggacgccgtgagggaggtggctacggaggcggtgatggtggaagttacggaggcggtggtggcggctggtaatcaaagatagagttgtttgcgtgctgctgctctgtttttggtttagatttggatttgtgtcaccacttctggtttggttatcgttcgtttggtttacttttttgatgaaacagtttcgtttaagtcttctttgtctggatcgaaatgttaattcgcgtgttgtttacc

SEQ ID NO: 29248 - protein, 169 aa, Arabidopsis thaliana; identical to SEQ ID NO: 22059
  peptide (1)..(169): Ceres Seq. ID no. 12372147

SEQ ID NO: 29249 - protein, 110 aa, Arabidopsis thaliana; identical to SEQ ID NO: 22060
  peptide (1)..(110): Ceres Seq. ID no. 12372148

SEQ ID NO: 29250 - protein, 103 aa, Arabidopsis thaliana; identical to SEQ ID NO: 22061
  peptide (1)..(103): Ceres Seq. ID no. 12372149

SEQ ID NO: 29251 - DNA, 671 bp, Arabidopsis thaliana
  misc_feature (1)..(671): Ceres Seq. ID no. 12561505
  misc_feature (1)..(671): Ortholog of  Ceres SEQ ID NO 15177478 as cited in SEQ ID NO 1121
tcttctctccttcgtctcccgtcaagctgctttagccatggctatggcggcgtctattatccaatcttctccgctctccttcaatagcaacaacgcaaagccacggattcatagttcaggatcgctcggcggaatcaaaagccaaaatagagtctctccattgagtgcggttggattaagctcaggccttggaagtagaaggaaatctcttttgatatgtcactcagccattaacgcgaaatgcagtgaaggacaaacacagaccgttactcgggagtcaccgactataacacaggctcctgtacactctaaggagaaatcaccaagcctagacgatggaggagacgggttcccaccgcgagatgatggagatggtggtggaggaggagggggtggaggcaactggtcgggtgggttcttcttctttggttttctggccttcttgggtctattgaaggataaagagggcgaggaagattaccgagggagcagaaggcgataataatatgggccactcttggttatcttattacagctacaggactcattttgtatctgtttcgttgagtgggggatgatatgccttgtattcaagagaagagagacacggttgatttcaacaaagcttatattgataactttgaaatcctggcaaaataacaaattcgaac

SEQ ID NO: 29252 - protein, 166 aa, Arabidopsis thaliana
  peptide (1)..(166): Ceres Seq. ID no. 12561506
LLSFVSRQAALAMAMAASIIQSSPLSFNSNNAKPRIHSSGSLGGIKSQNRVSPLSAVGLSSGLGSRRKSLLICHSAINAKCSEGQTQTVTRESPTITQAPVHSKEKSPSLDDGGDGFPPRDDGDGGGGGGGGGNWSGGFFFFGFLAFLGLLKDKEGEEDYRGSRRR

SEQ ID NO: 29253 - protein, 154 aa, Arabidopsis thaliana
  peptide (1)..(154): Ceres Seq. ID no. 12561507
MAMAASIIQSSPLSFNSNNAKPRIHSSGSLGGIKSQNRVSPLSAVGLSSGLGSRRKSLLICHSAINAKCSEGQTQTVTRESPTITQAPVHSKEKSPSLDDGGDGFPPRDDGDGGGGGGGGGNWSGGFFFFGFLAFLGLLKDKEGEEDYRGSRRR

SEQ ID NO: 29254 - protein, 152 aa, Arabidopsis thaliana
  peptide (1)..(152): Ceres Seq. ID no. 12561508
MAASIIQSSPLSFNSNNAKPRIHSSGSLGGIKSQNRVSPLSAVGLSSGLGSRRKSLLICHSAINAKCSEGQTQTVTRESPTITQAPVHSKEKSPSLDDGGDGFPPRDDGDGGGGGGGGGNWSGGFFFFGFLAFLGLLKDKEGEEDYRGSRRR

SEQ ID NO: 29255 - DNA, 2743 bp, Arabidopsis thaliana
  misc_feature (1)..(2743): Ceres Seq. ID no. 13494317
  misc_feature (1)..(2743): Ortholog of  Ceres SEQ ID NO 13582534 as cited in SEQ ID NO 57409
  misc_feature (1)..(2743): Ortholog of  Ceres SEQ ID NO 14302384 as cited in SEQ ID NO 67177
atttaattatctcaggatacgttaacataaaagtttttttttctcttggtctcaatgctcactctatccccatgaagttttgctcatactcaagttatcttgcagagaaatagaaaaaagatgggtatggttttatttgcttgcttgcttttactaatcatattcccaacttgtggctatgcagctataaacacatcaagtcctttgtcaataagacaaactctgagttctcctggtggattttatgagttaggcttcttcagtcctaataatactcagaatcagtatgtcgggatctggttcaagaagattgttcctcgtgtagttgtgtgggtggctaacagagatacgccagttactagctctgcagcaaatctcactatcagcagcaatgggagcctgatcttgcttgatgggaaacaagatgttatttggtcaacaggaaaagctttcacatccaacaaatgtcatgcggagctcttagataccggaaattttgttgtaattgatgatgtttcagggaataaattatggcaaagcttcgagcatcttggtaatactatgctgcctcagtcatcattgatgtatgatacttctaatggcaagaagcgtgtgttgactacatggaaaagtaacagcgatccttcgcctggggagttctcactggagattacaccacaaatccccacacaaggccttataagaagaggctcagtaccttactggagatgtggtccttgggcaaaaacaagattctctgggatatctggaattgatgcatcatatgtaagtccattcagcgttgtccaggatacagcagccggcacaggatctttctcttattccacattaagaaactataatctctcatatgttacgctaacaccagaagggaaaatgaagatcctctgggatgatggaaataattggaagcttcacttgtctctcccagagaacccatgtgatctatatggtagatgcgggccttatggtttgtgtgtgagatctgatcccccaaagtgtgaatgcttgaaagggtttgtaccaaagtctgatgaggagtggggaaaaggaaactggacaagtgggtgtgtgagacgtacaaaattatcttgccaagcaaaatcttctatgaaaacacaaggcaaagacacagacatcttctatcgtatgacagatgtaaagactccggatctgcaccaatttgcaagctttctcaatgccgaacagtgctatcaaggttgtctaggcaactgttcttgcacagccttcgcctatattagtggaattggatgtttggtatggaatggggagctagcagacaccgttcaatttttgtctagcggagagtttctcttcattcgtcttgcaagttcagaattggctggaagcagtcgaaggaagattatcgtaggcactactgtcagcctttccattttcttgatcttggtatttgctgcaattatgttgtggagatacagagcgaaacaaaatgatgcatggaagaatggttttgaacgacaagatgtctccggcgtcaatttctttgagatgcatacaatacgaactgccaccaataacttcagtccttcaaataaacttggtcaaggtggatttggtccagtttacaagggaaagttggtagatgggaaggaaataggtgttaaacgccttgctagtagttccggtcagggtacagaggagttcatgaatgaaataacactgatctcaaaattgcaacacagaaacttggttcggcttttgggatactgcatcgacggagaagagaagctactgatctatgagttcatggtgaacaaaagtctcgatatttttatatttgatccatgtctaaagtttgagcttgattggccaaagagatttaatatcattcaaggtattgcgcgtggacttctctatctccaccgtgactcacgcctcagagttattcaccgagacctgaaggtcagcaatattcttctggacgacagaatgaatccaaaaatatcagattttggattggctcggatgttccagggaacccaatatcaagacaacactcgcagagttgtaggaactctaggatatatgtctcccgagtatgcatgggcaggattgttctctgagaagtctgatatctatagcttcggagttctgatgttagaaatcatcagcggaaagagaatttcacggttcatctatggtgatgaaagcaaaggccttcttgcttatacatgggattcttggtgcgagaccgggggatcaaatctacttgacagagatcttactgatacatgccaagcattcgaagttgcgagatgtgttcagattggtctgctctgtgttcaacacgaagccgtcgacagacccaacactcttcaagtactatccatgcttacttcagcaacagatcttccagtaccaaaacagccaatatttgcagtgcatactctaaacgatatgccaatgttacaggctaattctcaagatttcttatctgtaaatgagatgacagaatctatgatccaaggaaggtaagcctaaggatcttgttatctcactacagaagtagtagtatatacttgtaaattcatgaacatttaaagcttaagattttgatatctcactctatttttctaagcatgtgatctcataaagccccaatatgtcgttgacacgtcataatattgggtataatattgttattaaccgtcgcaaagataaagtatgctttttgatgacc

SEQ ID NO: 29256 - protein, 805 aa, Arabidopsis thaliana
  peptide (1)..(805): Ceres Seq. ID no. 13494318
MGMVLFACLLLLIIFPTCGYAAINTSSPLSIRQTLSSPGGFYELGFFSPNNTQNQYVGIWFKKIVPRVVVWVANRDTPVTSSAANLTISSNGSLILLDGKQDVIWSTGKAFTSNKCHAELLDTGNFVVIDDVSGNKLWQSFEHLGNTMLPQSSLMYDTSNGKKRVLTTWKSNSDPSPGEFSLEITPQIPTQGLIRRGSVPYWRCGPWAKTRFSGISGIDASYVSPFSVVQDTAAGTGSFSYSTLRNYNLSYVTLTPEGKMKILWDDGNNWKLHLSLPENPCDLYGRCGPYGLCVRSDPPKCECLKGFVPKSDEEWGKGNWTSGCVRRTKLSCQAKSSMKTQGKDTDIFYRMTDVKTPDLHQFASFLNAEQCYQGCLGNCSCTAFAYISGIGCLVWNGELADTVQFLSSGEFLFIRLASSELAGSSRRKIIVGTTVSLSIFLILVFAAIMLWRYRAKQNDAWKNGFERQDVSGVNFFEMHTIRTATNNFSPSNKLGQGGFGPVYKGKLVDGKEIGVKRLASSSGQGTEEFMNEITLISKLQHRNLVRLLGYCIDGEEKLLIYEFMVNKSLDIFIFDPCLKFELDWPKRFNIIQGIARGLLYLHRDSRLRVIHRDLKVSNILLDDRMNPKISDFGLARMFQGTQYQDNTRRVVGTLGYMSPEYAWAGLFSEKSDIYSFGVLMLEIISGKRISRFIYGDESKGLLAYTWDSWCETGGSNLLDRDLTDTCQAFEVARCVQIGLLCVQHEAVDRPNTLQVLSMLTSATDLPVPKQPIFAVHTLNDMPMLQANSQDFLSVNEMTESMIQGR

SEQ ID NO: 29257 - protein, 803 aa, Arabidopsis thaliana
  peptide (1)..(803): Ceres Seq. ID no. 13494319
MVLFACLLLLIIFPTCGYAAINTSSPLSIRQTLSSPGGFYELGFFSPNNTQNQYVGIWFKKIVPRVVVWVANRDTPVTSSAANLTISSNGSLILLDGKQDVIWSTGKAFTSNKCHAELLDTGNFVVIDDVSGNKLWQSFEHLGNTMLPQSSLMYDTSNGKKRVLTTWKSNSDPSPGEFSLEITPQIPTQGLIRRGSVPYWRCGPWAKTRFSGISGIDASYVSPFSVVQDTAAGTGSFSYSTLRNYNLSYVTLTPEGKMKILWDDGNNWKLHLSLPENPCDLYGRCGPYGLCVRSDPPKCECLKGFVPKSDEEWGKGNWTSGCVRRTKLSCQAKSSMKTQGKDTDIFYRMTDVKTPDLHQFASFLNAEQCYQGCLGNCSCTAFAYISGIGCLVWNGELADTVQFLSSGEFLFIRLASSELAGSSRRKIIVGTTVSLSIFLILVFAAIMLWRYRAKQNDAWKNGFERQDVSGVNFFEMHTIRTATNNFSPSNKLGQGGFGPVYKGKLVDGKEIGVKRLASSSGQGTEEFMNEITLISKLQHRNLVRLLGYCIDGEEKLLIYEFMVNKSLDIFIFDPCLKFELDWPKRFNIIQGIARGLLYLHRDSRLRVIHRDLKVSNILLDDRMNPKISDFGLARMFQGTQYQDNTRRVVGTLGYMSPEYAWAGLFSEKSDIYSFGVLMLEIISGKRISRFIYGDESKGLLAYTWDSWCETGGSNLLDRDLTDTCQAFEVARCVQIGLLCVQHEAVDRPNTLQVLSMLTSATDLPVPKQPIFAVHTLNDMPMLQANSQDFLSVNEMTESMIQGR

SEQ ID NO: 29258 - protein, 658 aa, Arabidopsis thaliana
  peptide (1)..(658): Ceres Seq. ID no. 13494320
MLPQSSLMYDTSNGKKRVLTTWKSNSDPSPGEFSLEITPQIPTQGLIRRGSVPYWRCGPWAKTRFSGISGIDASYVSPFSVVQDTAAGTGSFSYSTLRNYNLSYVTLTPEGKMKILWDDGNNWKLHLSLPENPCDLYGRCGPYGLCVRSDPPKCECLKGFVPKSDEEWGKGNWTSGCVRRTKLSCQAKSSMKTQGKDTDIFYRMTDVKTPDLHQFASFLNAEQCYQGCLGNCSCTAFAYISGIGCLVWNGELADTVQFLSSGEFLFIRLASSELAGSSRRKIIVGTTVSLSIFLILVFAAIMLWRYRAKQNDAWKNGFERQDVSGVNFFEMHTIRTATNNFSPSNKLGQGGFGPVYKGKLVDGKEIGVKRLASSSGQGTEEFMNEITLISKLQHRNLVRLLGYCIDGEEKLLIYEFMVNKSLDIFIFDPCLKFELDWPKRFNIIQGIARGLLYLHRDSRLRVIHRDLKVSNILLDDRMNPKISDFGLARMFQGTQYQDNTRRVVGTLGYMSPEYAWAGLFSEKSDIYSFGVLMLEIISGKRISRFIYGDESKGLLAYTWDSWCETGGSNLLDRDLTDTCQAFEVARCVQIGLLCVQHEAVDRPNTLQVLSMLTSATDLPVPKQPIFAVHTLNDMPMLQANSQDFLSVNEMTESMIQGR

SEQ ID NO: 29259 - DNA, 1187 bp, Arabidopsis thaliana
  misc_feature (1)..(1187): Ceres Seq. ID no. 13500226
  misc_feature (1)..(1187): Ortholog of  Ceres SEQ ID NO 13655656 as cited in SEQ ID NO 63731
cactttcgcttttcccaatacgaacaagcggtgacgcatatctcctgtatcatcactcttttacttccggcgatctctctccgacggccaatggacgccgtcctttactctgttccactctccttcactcccctacgcgcatcatcctctccttcctcgccgtatcttcttctgccgaggtttctctccgttcagccatgtcacaaattcaccttctctcgaagcttcccttccaaatcccggattccctcagcttcttccgccgccggttccacgttgatgacgaattcctcttcgccaagaagtggagtgtacactgttggtgagttcatgacaaagaaagaggacttgcacgtggtgaaacctacgactactgtggatgaagctctggaactccttgtggagaatagaatcactggatttcctgtaattgacgaagactggaaattggttgggcttgtttcagattatgacttgttggctttggactccatatctggtagtggaagaacagaaaattccatgttccctgaggttgacagcacctggaaaactttcaatgctgtgcaaaagctactcagcaaaaccaatgggaagcttgttggagatttaatgacaccagctccactagttgttgaggaaaaaaccaacctggaagatgctgctaaaatattgcttgagacaaaatatcgccggctccctgtggtagattctgatggcaaattggttggtatcatcacaagaggaaacgtggttagagccgcgcttcaaataaagcgctctggtgataggaatgcttgattaaggtagtatatataccaaacaagaaaatggctttgtagaggaaagcaatgatcaaacattctccagagaataaaagtgagaaaccgcgacaattgtaccatgtattagaataagagccataacttatacgacattttgcaacgaagttaaacctggtaaactctagaagcatcaaaggtaagtgcacatctaactttttgctattttagcagaatcagcttctctgtttgtttgataagttaggttatcagatgctttgggtatttgactctcatccaatatgctttcatttcgagaaaaaaaaaaattgtttcacactttctacatttggttaaccaccaaagtaacaaacctttttaaggtattttaattgattttggttc

SEQ ID NO: 29260 - protein, 266 aa, Arabidopsis thaliana
  peptide (1)..(266): Ceres Seq. ID no. 13500227
HFRFSQYEQAVTHISCIITLLLPAISLRRPMDAVLYSVPLSFTPLRASSSPSSPYLLLPRFLSVQPCHKFTFSRSFPSKSRIPSASSAAGSTLMTNSSSPRSGVYTVGEFMTKKEDLHVVKPTTTVDEALELLVENRITGFPVIDEDWKLVGLVSDYDLLALDSISGSGRTENSMFPEVDSTWKTFNAVQKLLSKTNGKLVGDLMTPAPLVVEEKTNLEDAAKILLETKYRRLPVVDSDGKLVGIITRGNVVRAALQIKRSGDRNA

SEQ ID NO: 29261 - protein, 236 aa, Arabidopsis thaliana
  peptide (1)..(236): Ceres Seq. ID no. 13500228
MDAVLYSVPLSFTPLRASSSPSSPYLLLPRFLSVQPCHKFTFSRSFPSKSRIPSASSAAGSTLMTNSSSPRSGVYTVGEFMTKKEDLHVVKPTTTVDEALELLVENRITGFPVIDEDWKLVGLVSDYDLLALDSISGSGRTENSMFPEVDSTWKTFNAVQKLLSKTNGKLVGDLMTPAPLVVEEKTNLEDAAKILLETKYRRLPVVDSDGKLVGIITRGNVVRAALQIKRSGDRNA

SEQ ID NO: 29262 - protein, 173 aa, Arabidopsis thaliana
  peptide (1)..(173): Ceres Seq. ID no. 13500229
MTNSSSPRSGVYTVGEFMTKKEDLHVVKPTTTVDEALELLVENRITGFPVIDEDWKLVGLVSDYDLLALDSISGSGRTENSMFPEVDSTWKTFNAVQKLLSKTNGKLVGDLMTPAPLVVEEKTNLEDAAKILLETKYRRLPVVDSDGKLVGIITRGNVVRAALQIKRSGDRNA

SEQ ID NO: 29263 - DNA, 870 bp, Arabidopsis thaliana
  misc_feature (1)..(870): Ceres Seq. ID no. 12776994
  misc_feature (1)..(870): Ortholog of  Ceres SEQ ID NO 15179163 as cited in SEQ ID NO 0
aaaaactgtgcgctgttgttatctctgctttgaactgaatcagcgttggctatggcttcttcgacagctttgtctctctcatggagctcctctccttgttggtctcacagcttcaatggcggtactaatgaaaccctaaaagtatctgagcgaaggttcaattttgaagttgtttcccagaagaaagctaagaaacttcgcaaggtaattttgaaagaggatgtgacggatttgggtaagcaagggcagttacttgatgtgaaagctggatttttcagaaacttcctcttgcctactggaaaagctcagcttatgactccacttcttctcaaggaattgaagatggaagacgaacggatagaggcagagaagcaaagggtgaaagaagaggcgcaacaactggcgatggtatttcaaactgttggtgcttttaaggttaaacgcaaaggcggtaaaggcaaactgatatttggatctgtcacagctcaagacctcgtcgacatcatcaaatcgcagctccaaaaggacatatacaaacgccttgtctctctcccggaaatccgttaaaccggagaatacatagccgaactcaagcttcaccccgatgtcactgctcgagttaagatcaatgttttcgctaactaaaccttcaacgattcaagactcctactgcatcccaaggaacgtatagagagggaaaagagagtagcctcttgtggtgaggattgaaggttgtgaagtttttcctttagattgtttgatgcatttgtatttttgctatttttggaatctggaaacgctaaaaagtataatattctcttccaacttatgatatttacttgaagttatattgtattcatttgtctgttc

SEQ ID NO: 29264 - protein, 171 aa, Arabidopsis thaliana
  peptide (1)..(171): Ceres Seq. ID no. 12776995
MASSTALSLSWSSSPCWSHSFNGGTNETLKVSERRFNFEVVSQKKAKKLRKVILKEDVTDLGKQGQLLDVKAGFFRNFLLPTGKAQLMTPLLLKELKMEDERIEAEKQRVKEEAQQLAMVFQTVGAFKVKRKGGKGKLIFGSVTAQDLVDIIKSQLQKDIYKRLVSLPEIR

SEQ ID NO: 29265 - DNA, 493 bp, Arabidopsis thaliana
  misc_feature (1)..(493): Ceres Seq. ID no. 13489281
  misc_feature (1)..(493): Ortholog of  Ceres SEQ ID NO 14302474 as cited in SEQ ID NO 60589
aaaaaccattcggcaaaatcaaataatctttttcttagttcgaatttaatttcccaagagaaaaatgtcaggccgaggaaagggaggaaaaggattaggaaagggaggagccaagagacatcggaaagtactcagagacaacatccaagggattaccaaacctgcgattcgtcgtctcgcgagaagaggaggcgtgaagcgtatcagtggtttgatctatgaagagactcgcggcgttctcaagatctttctcgagaacgtgattcgtgacgccgttacttacacggagcacgctcgccggaaaactgttacggcgatggacgtcgtttacgctctcaagagacaaggacgaactttgtatggattcggcggctaaatcgttcggattgcaatttcggattttgtaaactcttcaatttcagcatctagggatttcagatttgtaatttctcagttaaacgatgaatgaattgaaaaaaaaagaattgtctcc

SEQ ID NO: 29266 - protein, 103 aa, Arabidopsis thaliana; identical to SEQ ID NO: 7737
  peptide (1)..(103): Ceres Seq. ID no. 13489282

SEQ ID NO: 29267 - protein, 73 aa, Arabidopsis thaliana
  peptide (1)..(73): Ceres Seq. ID no. 13489283
KNHSAKSNNLFLSSNLISQEKNVRPRKGRKRIRKGRSQETSESTQRQHPRDYQTCDSSSREKRRREAYQWFDL

SEQ ID NO: 29268 - DNA, 805 bp, Arabidopsis thaliana
  misc_feature (1)..(805): Ceres Seq. ID no. 12466452
  misc_feature (1)..(805): Ortholog of  Ceres SEQ ID NO 12583682 as cited in SEQ ID NO 56297
  misc_feature (1)..(805): Ortholog of  Ceres SEQ ID NO 15179225 as cited in SEQ ID NO 0
aggacacgtttctatctagagagaacacaacacatcgaaccatggagaaatcaacaagaaccctattcataaccatcgtgataacctccatgttgctagggtttggaaactctgatcttgctcaggacagagaggagtgtacgaaccagctcatagaactatccacgtgtattccgtacgttggaggagacgccaaggctccaacaaaagattgttgtgcagggtttggccaagttataagaaagagtgagaagtgtgtttgcatattggtcagagacaaagatgatcctcaacttggtatcaagattaacgcaaccctagccgctcatcttccctccgcttgtcatatcacggctcctaacatcactgactgtatttcgattctgcatctacctcgtaactcaacattggctaaagagtttgagaacttaggaaggattgaagacaactacaactccacatctcctacacaaattcataaagatgggacaggaggaggaaaagccgaaccagtgaagagtaatggatggaaggagaagagttggttgggtgttgagcttttaatatatttgctagtttctctcatcttcttttaattacttcctttctttaatgttcctttgctttattattacaataacttataagatatctatttatatatgagacacatgcatgtgtttgcgatctatatgcatgtaaatgagtcactggttaatttttaatcacgaagcgtacattttaatttcgttgttgccaattgatcttgtacgttagtgaattttatggattatcgacttactat

SEQ ID NO: 29269 - protein, 197 aa, Arabidopsis thaliana
  peptide (1)..(197): Ceres Seq. ID no. 12466453
DTFLSRENTTHRTMEKSTRTLFITIVITSMLLGFGNSDLAQDREECTNQLIELSTCIPYVGGDAKAPTKDCCAGFGQVIRKSEKCVCILVRDKDDPQLGIKINATLAAHLPSACHITAPNITDCISILHLPRNSTLAKEFENLGRIEDNYNSTSPTQIHKDGTGGGKAEPVKSNGWKEKSWLGVELLIYLLVSLIFF

SEQ ID NO: 29270 - protein, 184 aa, Arabidopsis thaliana
  peptide (1)..(184): Ceres Seq. ID no. 12466454
MEKSTRTLFITIVITSMLLGFGNSDLAQDREECTNQLIELSTCIPYVGGDAKAPTKDCCAGFGQVIRKSEKCVCILVRDKDDPQLGIKINATLAAHLPSACHITAPNITDCISILHLPRNSTLAKEFENLGRIEDNYNSTSPTQIHKDGTGGGKAEPVKSNGWKEKSWLGVELLIYLLVSLIFF

SEQ ID NO: 29271 - protein, 168 aa, Arabidopsis thaliana
  peptide (1)..(168): Ceres Seq. ID no. 12466455
MLLGFGNSDLAQDREECTNQLIELSTCIPYVGGDAKAPTKDCCAGFGQVIRKSEKCVCILVRDKDDPQLGIKINATLAAHLPSACHITAPNITDCISILHLPRNSTLAKEFENLGRIEDNYNSTSPTQIHKDGTGGGKAEPVKSNGWKEKSWLGVELLIYLLVSLIFF

SEQ ID NO: 29272 - DNA, 703 bp, Arabidopsis thaliana
  misc_feature (1)..(703): Ceres Seq. ID no. 12393111
  misc_feature (1)..(703): Ortholog of  Ceres SEQ ID NO 15176693 as cited in SEQ ID NO 1078
  misc_feature (1)..(703): Ortholog of  Ceres SEQ ID NO 12615074 as cited in SEQ ID NO 62676
  misc_feature (1)..(703): Ortholog of  Ceres SEQ ID NO 13598819 as cited in SEQ ID NO 0
  misc_feature (1)..(703): Ortholog of  Ceres SEQ ID NO 13600371 as cited in SEQ ID NO 0
ataaccggggcacttaacgtatagatcataaacaaagaagaagaaaaaaaataagaaaagaagaagaagatgtcgtggcaaacttacgttgatgagcatttgatgtgtgatgttggcgatggtcaaggacaccaccttactgctgccgctatcgttggtcatgacggtagcgtttgggctcagagcgccaacttccctcagttcaagggacaggagttcagtgatattatgaaagatttcgacgaaccgggtcacttggcacccacgggattattcatggcaggagcaaagtacatggtgatccaaggtgagcccggggctgtaatccgtggcaagaagggagcaggaggcataacgataaagaaaacaggacagtcatgtgtgtttgggatctatgaagagccagtgacaccaggacagtgcaacatggtcgtcgagaggttgggtgattacctcctcgaacagggtctctagaatcttcttacaatgttccaccacctacatttttttataaggccattgtttctcctatttttttcctttgggtgatttgcatctctttctctaattgatattataagttttgggctaatggaccttcctggtttctccccatagcaaacttttaagaaagctgaagcctaaaaggcttttactctctttgccttggtttcttatttatatgcatgttttagttgttttc

SEQ ID NO: 29273 - protein, 134 aa, Arabidopsis thaliana
  peptide (1)..(134): Ceres Seq. ID no. 12393112
MSWQTYVDEHLMCDVGDGQGHHLTAAAIVGHDGSVWAQSANFPQFKGQEFSDIMKDFDEPGHLAPTGLFMAGAKYMVIQGEPGAVIRGKKGAGGITIKKTGQSCVFGIYEEPVTPGQCNMVVERLGDYLLEQGL

SEQ ID NO: 29274 - protein, 123 aa, Arabidopsis thaliana
  peptide (1)..(123): Ceres Seq. ID no. 12393113
MCDVGDGQGHHLTAAAIVGHDGSVWAQSANFPQFKGQEFSDIMKDFDEPGHLAPTGLFMAGAKYMVIQGEPGAVIRGKKGAGGITIKKTGQSCVFGIYEEPVTPGQCNMVVERLGDYLLEQGL

SEQ ID NO: 29275 - protein, 81 aa, Arabidopsis thaliana
  peptide (1)..(81): Ceres Seq. ID no. 12393114
MKDFDEPGHLAPTGLFMAGAKYMVIQGEPGAVIRGKKGAGGITIKKTGQSCVFGIYEEPVTPGQCNMVVERLGDYLLEQGL

SEQ ID NO: 29276 - DNA, 684 bp, Arabidopsis thaliana
  misc_feature (1)..(684): Ceres Seq. ID no. 13593010
  misc_feature (1)..(684): Ortholog of  Ceres SEQ ID NO 15227029 as cited in SEQ ID NO 60571
  misc_feature (1)..(684): Ortholog of  Ceres SEQ ID NO 15175269 as cited in SEQ ID NO 63840
  misc_feature (1)..(684): Ortholog of  Ceres SEQ ID NO 15176141 as cited in SEQ ID NO 0
gcgttatacttaaaacactctcctcttcttttccttgtccttctctatcgcttctataaactttttcgatctaaggttcgtgatctccttcttctctacgaagtttacactttttcttcaaaggaaacaatgagccagtacaatcaacctcccgttggtgttcctcctcctcaaggttatccaccggagggatatccaaaagatgcttatccaccacaaggatatcctcctcagggatatcctcagcaaggctatccacctcagggatatcctcaacaaggttatcctcagcaaggatatcctccaccgtacgcgcctcaatatcctccaccaccgcagcatcagcaacaacagagcagtcctggctttctagaaggatgtcttgctgctctgtgttgttgctgtctcttggatgcttgcttctgattggagtctctctctctctgcataaagcttcgggatttatttgtaagagggttttggttaaacaaaaaccttaattgatttgtggggcattaaaaatgaatctctcgatgattctctttcgttttatgtgtaatgttcttcggttcataacattttaactattgtctatcgacgttctgccttagtttgtatttgattatgggaatgtaaattggttgggagacactattctatgccatagtttattgcttggatctt

SEQ ID NO: 29277 - protein, 141 aa, Arabidopsis thaliana
  peptide (1)..(141): Ceres Seq. ID no. 13593011
ALYLKHSPLLFLVLLYRFYKLFRSKVRDLLLLYEVYTFSSKETMSQYNQPPVGVPPPQGYPPEGYPKDAYPPQGYPPQGYPQQGYPPQGYPQQGYPQQGYPPPYAPQYPPPPQHQQQQSSPGFLEGCLAALCCCCLLDACF

SEQ ID NO: 29278 - protein, 98 aa, Arabidopsis thaliana
  peptide (1)..(98): Ceres Seq. ID no. 13593012
MSQYNQPPVGVPPPQGYPPEGYPKDAYPPQGYPPQGYPQQGYPPQGYPQQGYPQQGYPPPYAPQYPPPPQHQQQQSSPGFLEGCLAALCCCCLLDACF

SEQ ID NO: 29279 - DNA, 841 bp, Arabidopsis thaliana
  misc_feature (1)..(841): Ceres Seq. ID no. 12379214
  misc_feature (1)..(841): Ortholog of  Ceres SEQ ID NO 14306117 as cited in SEQ ID NO 0
  misc_feature (1)..(841): Ortholog of  Ceres SEQ ID NO 14309181 as cited in SEQ ID NO 0
acaagaacagaggctgacacctaaagcttactctctaactgcaatggctcacttcatagacctcaacagtctcaccaacactttaccgtctcttccgaaactacccgagagtcgtaaaaccgggaaatccagcgggtttgcttgcaggagaactgaagaatttcaagaaccggattcggtacagatcacaagacggatgacattaggatttgctgtctcaataggtcttaccggaattctcggcgaaaataatgtttccttggcacaagacaatgggttttggattgatggtcctcttccaattcctcctatttacaacaatatcgtgaatgagaagacgggaacgagaacattcataaagaaaggagtgtatgtagcggatatcgggacgaaaggaagaatgtatagagttaaaaagaatgcttttgatctcttggcaatggaggatttgatcggaccagatactttaaactatgtgaaaaagtacttgaggcttaaatccacatttttgttttacgatttcgacaatctcatctctgctgctgcctctgaagacaagcaacctctcactgatttagccaacagattgttcgacaatttcgaaaagcttgaagatgcagctaagacgaagaacttagcagagacggaatcgtgttataaagatacaaagtttcttcttcaagaggtaatgaccagaatggcatgatcctggttcggtttataccggtttacttgctattgatgatcctacatggttgataactctgtggtcataaattgtaatctttgcggaaaaatattgagatctagtaatcaaaaaaaaaaatgtaatgtatagacc

SEQ ID NO: 29280 - protein, 234 aa, Arabidopsis thaliana
  peptide (1)..(234): Ceres Seq. ID no. 12379215
QEQRLTPKAYSLTAMAHFIDLNSLTNTLPSLPKLPESRKTGKSSGFACRRTEEFQEPDSVQITRRMTLGFAVSIGLTGILGENNVSLAQDNGFWIDGPLPIPPIYNNIVNEKTGTRTFIKKGVYVADIGTKGRMYRVKKNAFDLLAMEDLIGPDTLNYVKKYLRLKSTFLFYDFDNLISAAASEDKQPLTDLANRLFDNFEKLEDAAKTKNLAETESCYKDTKFLLQEVMTRMA

SEQ ID NO: 29281 - protein, 220 aa, Arabidopsis thaliana
  peptide (1)..(220): Ceres Seq. ID no. 12379216
MAHFIDLNSLTNTLPSLPKLPESRKTGKSSGFACRRTEEFQEPDSVQITRRMTLGFAVSIGLTGILGENNVSLAQDNGFWIDGPLPIPPIYNNIVNEKTGTRTFIKKGVYVADIGTKGRMYRVKKNAFDLLAMEDLIGPDTLNYVKKYLRLKSTFLFYDFDNLISAAASEDKQPLTDLANRLFDNFEKLEDAAKTKNLAETESCYKDTKFLLQEVMTRMA

SEQ ID NO: 29282 - protein, 169 aa, Arabidopsis thaliana
  peptide (1)..(169): Ceres Seq. ID no. 12379217
MTLGFAVSIGLTGILGENNVSLAQDNGFWIDGPLPIPPIYNNIVNEKTGTRTFIKKGVYVADIGTKGRMYRVKKNAFDLLAMEDLIGPDTLNYVKKYLRLKSTFLFYDFDNLISAAASEDKQPLTDLANRLFDNFEKLEDAAKTKNLAETESCYKDTKFLLQEVMTRMA

SEQ ID NO: 29283 - DNA, 708 bp, Arabidopsis thaliana
  misc_feature (1)..(708): Ceres Seq. ID no. 12331871
  misc_feature (1)..(708): Ortholog of  Ceres SEQ ID NO 14306303 as cited in SEQ ID NO 56884
atctaagtagcatcaaagcattctaaaagaagtttcaaagaagaagtgaaaatggaaaccactgcttttaacacaacatcacgaattggaaactggtcatcggctatttctccacctctacaaacatgtggatctttcaagtgccaattaccaacacgaagaggtgttattgtagctgatcttcgaaactcaaacttccgatggaggaaagcaacgacaacaagcagaggaaatgttgcagcagaggcagttaaaattcctacgtcagtaccagtaagagtggcgcgtgagctagctcaagcaggataccgctatctcgacgtgaggacaccagacgaattcagcatcggacatccgactagagccatcaacgtaccttacatgtacagagtcggatcaggaatggttaagaacccgagttttctaagacaggtctcgtcccacttcaggaaacacgatgaaatcataatcggttgtgagagcggtcaaatgtcatttatggcctcaactgatcttctcactgctggcttcacggcgatcacagacattgctggaggatacgtcgcttggacagagaatgagctgccggtagaagagtgaaaacaatcatagccatatcacctcctgtaattatcaataaattctgtagatgttctcaacgcaagtatcaatcatcattattattctctaaaacatagtttaactgtc

SEQ ID NO: 29284 - protein, 182 aa, Arabidopsis thaliana
  peptide (1)..(182): Ceres Seq. ID no. 12331872
METTAFNTTSRIGNWSSAISPPLQTCGSFKCQLPTRRGVIVADLRNSNFRWRKATTTSRGNVAAEAVKIPTSVPVRVARELAQAGYRYLDVRTPDEFSIGHPTRAINVPYMYRVGSGMVKNPSFLRQVSSHFRKHDEIIIGCESGQMSFMASTDLLTAGFTAITDIAGGYVAWTENELPVEE

SEQ ID NO: 29285 - DNA, 819 bp, Arabidopsis thaliana
  misc_feature (1)..(819): Ceres Seq. ID no. 12393395
  misc_feature (1)..(819): Ortholog of  Ceres SEQ ID NO 13598160 as cited in SEQ ID NO 61317
  misc_feature (1)..(819): Ortholog of  Ceres SEQ ID NO 13579986 as cited in SEQ ID NO 64562
  misc_feature (1)..(819): Ortholog of  Ceres SEQ ID NO 12614253 as cited in SEQ ID NO 68518
aaaaaaaggagaaagcttgaaacgccgcttcttcttcttctctgtcgttctctctgtaaatcgcttcttcaatcatctctgtggatttgtctctattcataacttggtgaagaagatgttgacggaagaggagctcaaaagattgtacagaatccagaagacgttgatgcagatgttaagggatcgtggatattttatcgcggattctgaacttacgatgactaaacaacagtttattaggaaacatggtgataacatgaaaagagaggatcttgttactcttaaggctaagcgaaatgataatagtgatcagctctatatattcttccctgatgaggcgaaagttggtgtgaagacgatgaaaatgtacacgaacaggatgaaatcagagaatgtgttcagagctattttggttgtgcaacagaacttgaccccgtttgctcgaacttgcattagtgagatctcttctaagtttcatctggaagttttccaggaggcggaaatgctagtgaacattaaagaacatgttcttgttcctgagcatcaagttcttaccactgaagagaagaaaactttactggagagatacacagtgaaggagacacagcttccaaggatccaagtgactgatccaatcgcaagatactttggactaaaacgtgggcaagtcgtgaagatcattcgtccgagtgaaacggctggtcgttatgttacctatcgttatgttgtataagccaaagcaaaaggcttttgtggattgtaatgcgaattgaacgctgagagttgtgaaacataagagtaatgcttttgtactaaacc

SEQ ID NO: 29286 - protein, 243 aa, Arabidopsis thaliana
  peptide (1)..(243): Ceres Seq. ID no. 12393396
KKGESLKRRFFFFSVVLSVNRFFNHLCGFVSIHNLVKKMLTEEELKRLYRIQKTLMQMLRDRGYFIADSELTMTKQQFIRKHGDNMKREDLVTLKAKRNDNSDQLYIFFPDEAKVGVKTMKMYTNRMKSENVFRAILVVQQNLTPFARTCISEISSKFHLEVFQEAEMLVNIKEHVLVPEHQVLTTEEKKTLLERYTVKETQLPRIQVTDPIARYFGLKRGQVVKIIRPSETAGRYVTYRYVV

SEQ ID NO: 29287 - protein, 205 aa, Arabidopsis thaliana
  peptide (1)..(205): Ceres Seq. ID no. 12393397
MLTEEELKRLYRIQKTLMQMLRDRGYFIADSELTMTKQQFIRKHGDNMKREDLVTLKAKRNDNSDQLYIFFPDEAKVGVKTMKMYTNRMKSENVFRAILVVQQNLTPFARTCISEISSKFHLEVFQEAEMLVNIKEHVLVPEHQVLTTEEKKTLLERYTVKETQLPRIQVTDPIARYFGLKRGQVVKIIRPSETAGRYVTYRYVV

SEQ ID NO: 29288 - protein, 188 aa, Arabidopsis thaliana
  peptide (1)..(188): Ceres Seq. ID no. 12393398
MQMLRDRGYFIADSELTMTKQQFIRKHGDNMKREDLVTLKAKRNDNSDQLYIFFPDEAKVGVKTMKMYTNRMKSENVFRAILVVQQNLTPFARTCISEISSKFHLEVFQEAEMLVNIKEHVLVPEHQVLTTEEKKTLLERYTVKETQLPRIQVTDPIARYFGLKRGQVVKIIRPSETAGRYVTYRYVV

SEQ ID NO: 29289 - DNA, 1146 bp, Arabidopsis thaliana
  misc_feature (1)..(1146): Ceres Seq. ID no. 12337382
  misc_feature (1)..(1146): Ortholog of  Ceres SEQ ID NO 15174890 as cited in SEQ ID NO 53624
atctggatttgttcttttttcatttttattcgagcggcttatctttctcggatccatctgatatcgatttgattctctttggtcaatcgttgaaatggcggatgcgtggaaggatttagcttcagggacagttggaggagcggctcagctagttgttggtcatccatttgacacaatcaaagtcaaacttcagagccaaccgactccagcaccaggccaacttccaaggtacaccggtgcaatcgatgcggttaaacagaccgttgcttctgaaggaactaaaggtttgtacaaaggtatgggagctccactggcaaccgttgctgccttcaatgcggttttgttcactgtgagaggtcaaatggaagggctgcttaggtctgaagctggaattcctttgaccattagtcaacagtttgtggccggtgcaggcgctggttccctgtttcgttccttgcttgtcctactgagttgatcaaatgcaggttgcaagcacaaggtgcattagctggtgcctctactacaagctcagtggttgcagccgtgaaatacggtggaccaatggatgtagcccgtcatgtcctacgatcagaaggcggagcacgaggtctattcaaaggtttattcccgacattcgcccgtgaagtcccgggaaatgcaacaatgtttgcagcctacgaagctttcaagcggtttttagccggtggttcagacacttcaagcttaggacaagggtcattgatcatggcgggtggagtcgctggtgcgtcgttttggggaattgtatatccgacagatgttgtgaagagtgttcttcaagtcgacgattacaaaaacccgaaatacacggggtcgatggatgctttccggaagattctgaaatctgaaggagttaaaggtttgtataaaggatttggtccagctatggctaggagtgttcctgctaatgctgcttgcttcttggcttatgagatgacaaggtcaagcttgggataaaccggttcgttttgggtttaactgttggtcctatttctggatgttccattgtcattaacctctctgtttttagatttgattcttttgaaatttctgcaaaaattatgtatctcttacacagtttatttcaactatctcttacacagaagc

SEQ ID NO: 29290 - protein, 144 aa, Arabidopsis thaliana
  peptide (1)..(144): Ceres Seq. ID no. 12337383
MDVARHVLRSEGGARGLFKGLFPTFAREVPGNATMFAAYEAFKRFLAGGSDTSSLGQGSLIMAGGVAGASFWGIVYPTDVVKSVLQVDDYKNPKYTGSMDAFRKILKSEGVKGLYKGFGPAMARSVPANAACFLAYEMTRSSLG

SEQ ID NO: 29291 - protein, 126 aa, Arabidopsis thaliana
  peptide (1)..(126): Ceres Seq. ID no. 12337384
MADAWKDLASGTVGGAAQLVVGHPFDTIKVKLQSQPTPAPGQLPRYTGAIDAVKQTVASEGTKGLYKGMGAPLATVAAFNAVLFTVRGQMEGLLRSEAGIPLTISQQFVAGAGAGSLFRSLLVLLS

SEQ ID NO: 29292 - protein, 110 aa, Arabidopsis thaliana
  peptide (1)..(110): Ceres Seq. ID no. 12337385
MFAAYEAFKRFLAGGSDTSSLGQGSLIMAGGVAGASFWGIVYPTDVVKSVLQVDDYKNPKYTGSMDAFRKILKSEGVKGLYKGFGPAMARSVPANAACFLAYEMTRSSLG

SEQ ID NO: 29293 - DNA, 1263 bp, Arabidopsis thaliana
  misc_feature (1)..(1263): Ceres Seq. ID no. 12324797
  misc_feature (1)..(1263): Ortholog of  Ceres SEQ ID NO 14306617 as cited in SEQ ID NO 53026
gaaactctctttcagatttcaagaaacccttaaaatcctctctctgtctctttctgtttgtttgttttcttgtttccttctctctctctctttctttctttgtcttcctttcccaggttgtttttttttgctctctctgccttcttgactttcaaaagactctttctttcttttggattgattttggattctagggctctctttcttttagtgggtttttgttcttgttgtggtctctctgatgattactgaacttgagatggggaaaggtgagagtgagcttgagcttggtctagggctgagtcttggcggtggaacggcggccaagattggtaaatcaggtggtggtggcgcgtggggagagcgtggaaggcttttgacggctaaggattttccttctgttggttctaaacgtgctgctgattctgcttctcatgctggttcatctcctcctcgttcaagtcaagttgttggatggcctcctatagggtcacacaggatgaacagtttggttaataaccaagctacaaagtcagcaagagaagaagaagaagctggtaagaagaaagtgaaagatgatgaacctaaagatgtgacaaagaaagtgaatgggaaagtacaagttggatttattaaggtgaacatggatggagttgctataggaagaaaagtggatttgaatgctcattcttcttacgagaatttggcgcaaacattggaagatatgttctttcgcactaatccgggtactgtcgggttaaccagtcagttcactaaaccgttgaggcttttagatggatcgtctgagtttgtacttacttatgaagataaggaaggagattggatgcttgttggtgatgttccatggagaatgttcatcaactcggtgaaaaggctacgtgtgatgaaaacctctgaagctaatggactcgctgcacgaaatcaagaaccaaacgagagacagcgaaagcagccggtttagatctcttttcgacgttacggtgttacaggttttatattttggggttttgcaagtctgagatacttctgaagcaagcataagctagattgatcttatatccagtttgtgtattttcttggttcttataatggtttttactggttttctttagtttttttttttgctgtcttttaattttcggttgcgatttcactatatactatggatggaagagaatgctctttatatcttttactacactgtaaatatttgaagcttatctaatatcgtttttaagggtc

SEQ ID NO: 29294 - protein, 246 aa, Arabidopsis thaliana
  peptide (1)..(246): Ceres Seq. ID no. 12324798
MITELEMGKGESELELGLGLSLGGGTAAKIGKSGGGGAWGERGRLLTAKDFPSVGSKRAADSASHAGSSPPRSSQVVGWPPIGSHRMNSLVNNQATKSAREEEEAGKKKVKDDEPKDVTKKVNGKVQVGFIKVNMDGVAIGRKVDLNAHSSYENLAQTLEDMFFRTNPGTVGLTSQFTKPLRLLDGSSEFVLTYEDKEGDWMLVGDVPWRMFINSVKRLRVMKTSEANGLAARNQEPNERQRKQPV

SEQ ID NO: 29295 - protein, 240 aa, Arabidopsis thaliana
  peptide (1)..(240): Ceres Seq. ID no. 12324799
MGKGESELELGLGLSLGGGTAAKIGKSGGGGAWGERGRLLTAKDFPSVGSKRAADSASHAGSSPPRSSQVVGWPPIGSHRMNSLVNNQATKSAREEEEAGKKKVKDDEPKDVTKKVNGKVQVGFIKVNMDGVAIGRKVDLNAHSSYENLAQTLEDMFFRTNPGTVGLTSQFTKPLRLLDGSSEFVLTYEDKEGDWMLVGDVPWRMFINSVKRLRVMKTSEANGLAARNQEPNERQRKQPV

SEQ ID NO: 29296 - protein, 160 aa, Arabidopsis thaliana
  peptide (1)..(160): Ceres Seq. ID no. 12324800
MNSLVNNQATKSAREEEEAGKKKVKDDEPKDVTKKVNGKVQVGFIKVNMDGVAIGRKVDLNAHSSYENLAQTLEDMFFRTNPGTVGLTSQFTKPLRLLDGSSEFVLTYEDKEGDWMLVGDVPWRMFINSVKRLRVMKTSEANGLAARNQEPNERQRKQPV

SEQ ID NO: 29297 - DNA, 1687 bp, Arabidopsis thaliana
  misc_feature (1)..(1687): Ceres Seq. ID no. 12321246
  misc_feature (1)..(1687): Ortholog of  Ceres SEQ ID NO 15170151 as cited in SEQ ID NO 53069
  misc_feature (1)..(1687): Ortholog of  Ceres SEQ ID NO 13594209 as cited in SEQ ID NO 59089
  misc_feature (1)..(1687): Ortholog of  Ceres SEQ ID NO 14316039 as cited in SEQ ID NO 62062
  misc_feature (1)..(1687): Ortholog of  Ceres SEQ ID NO 15176783 as cited in SEQ ID NO 65590
  misc_feature (1)..(1687): Ortholog of  Ceres SEQ ID NO 14308007 as cited in SEQ ID NO 65760
  misc_feature (1)..(1687): Ortholog of  Ceres SEQ ID NO 14308019 as cited in SEQ ID NO 65849
  misc_feature (1)..(1687): Ortholog of  Ceres SEQ ID NO 13502874 as cited in SEQ ID NO 66298
  misc_feature (1)..(1687): Ortholog of  Ceres SEQ ID NO 12614124 as cited in SEQ ID NO 68392
atccgaacacaaagacttaagtaagtcaaacagaaaaaaatggatctcttattgattatagccggtttagtagcggctgcagccttctttttcctccgtagcacgaccaagaaatctctccggttacctccgggaccaaaaggtcttcctattataggaaaccttcaccagatggagaaattcaacccccaacacttccttttccgtctctccaagctatacggcccgattttcacgatgaaaatcggtggccgtcgcctcgcggtgatctcctcggccgagctagccaaggagctactcaaaactcaagacctcaacttcaccgctcgtcctctcttgaaagggcaacaaaccatgtcgtatcaaggccgtgagcttggtttcggacagtacaccgcgtactaccgtgagatgaggaagatgtgtatggtgaacctcttcagcccgaaccgtgtcgcaagtttcagaccggttagagaagaagagtgtcaacggatgatggacaagatctataaagccgctgatcaatcaggcaccgttgatctaagtgagcttctcttgtctttcactaactgtgtcgtatgtagacaagcttttgggaaacggtacaatgagtacggcacagagatgaagagattcatagatatcttgtacgagacgcaagcacttttgggcactctgtttttctccgaccttttcccttatttcggattccttgacaacctcactggtctcagtgcacgtctcaagaaagctttcaaggagcttgacacttaccttcaagaacttctagacgagactcttgaccctaaccgccctaaacaagaaacagagagtttcattgatcttttgatgcagatctacaaagaccaacctttctccatcaaattcactcacgaaaatgtcaaggccatgatattggatattgttgtgccgggaactgacacggcggctgcagtggtggtatgggccatgacttaccttattaagtaccctgaagcaatgaagaaagctcaagacgaagtgaggagtgtgataggtgacaaaggatatgtctctgaagaagacatacctaatctcccttacctaaaggcagtcatcaaggagtctcttcggctcgaaccagtcatccccattcttctacacagagaaactatcgcagacgcaaagataggtggctatgatattccggccaagaccatcattcaggtgaacgcatgggcggtttctcgtgacacagccgcgtggggagacaaccctaatgagttcattccagagaggttcatgaacgagcacaaaggagtggacttcaagggccaagattttgagctcctacctttcgggtcgggccggagaatgtgcccggccatgcatcttgggattgcaatggtagagatacctttcgctaaccttctctacaaatttgactggagtctacctaaagggattaaaccagaggatataaagatggacgtcatgactggactcgctatgcacaagaaagaacacctcgttcttgcaccaacgaaacacatctgatgctatatatatcattaggacgtttctgctggtagatatggcgtgaccaatggttatttttcattgcaatatccctttttgttttaatgagtactatgttctcattttaacgaataaaaatgtatcagtgctcttgtttttggactag

SEQ ID NO: 29298 - protein, 499 aa, Arabidopsis thaliana
  peptide (1)..(499): Ceres Seq. ID no. 12321247
MDLLLIIAGLVAAAAFFFLRSTTKKSLRLPPGPKGLPIIGNLHQMEKFNPQHFLFRLSKLYGPIFTMKIGGRRLAVISSAELAKELLKTQDLNFTARPLLKGQQTMSYQGRELGFGQYTAYYREMRKMCMVNLFSPNRVASFRPVREEECQRMMDKIYKAADQSGTVDLSELLLSFTNCVVCRQAFGKRYNEYGTEMKRFIDILYETQALLGTLFFSDLFPYFGFLDNLTGLSARLKKAFKELDTYLQELLDETLDPNRPKQETESFIDLLMQIYKDQPFSIKFTHENVKAMILDIVVPGTDTAAAVVVWAMTYLIKYPEAMKKAQDEVRSVIGDKGYVSEEDIPNLPYLKAVIKESLRLEPVIPILLHRETIADAKIGGYDIPAKTIIQVNAWAVSRDTAAWGDNPNEFIPERFMNEHKGVDFKGQDFELLPFGSGRRMCPAMHLGIAMVEIPFANLLYKFDWSLPKGIKPEDIKMDVMTGLAMHKKEHLVLAPTKHI

SEQ ID NO: 29299 - protein, 455 aa, Arabidopsis thaliana
  peptide (1)..(455): Ceres Seq. ID no. 12321248
MEKFNPQHFLFRLSKLYGPIFTMKIGGRRLAVISSAELAKELLKTQDLNFTARPLLKGQQTMSYQGRELGFGQYTAYYREMRKMCMVNLFSPNRVASFRPVREEECQRMMDKIYKAADQSGTVDLSELLLSFTNCVVCRQAFGKRYNEYGTEMKRFIDILYETQALLGTLFFSDLFPYFGFLDNLTGLSARLKKAFKELDTYLQELLDETLDPNRPKQETESFIDLLMQIYKDQPFSIKFTHENVKAMILDIVVPGTDTAAAVVVWAMTYLIKYPEAMKKAQDEVRSVIGDKGYVSEEDIPNLPYLKAVIKESLRLEPVIPILLHRETIADAKIGGYDIPAKTIIQVNAWAVSRDTAAWGDNPNEFIPERFMNEHKGVDFKGQDFELLPFGSGRRMCPAMHLGIAMVEIPFANLLYKFDWSLPKGIKPEDIKMDVMTGLAMHKKEHLVLAPTKHI

SEQ ID NO: 29300 - protein, 433 aa, Arabidopsis thaliana
  peptide (1)..(433): Ceres Seq. ID no. 12321249
MKIGGRRLAVISSAELAKELLKTQDLNFTARPLLKGQQTMSYQGRELGFGQYTAYYREMRKMCMVNLFSPNRVASFRPVREEECQRMMDKIYKAADQSGTVDLSELLLSFTNCVVCRQAFGKRYNEYGTEMKRFIDILYETQALLGTLFFSDLFPYFGFLDNLTGLSARLKKAFKELDTYLQELLDETLDPNRPKQETESFIDLLMQIYKDQPFSIKFTHENVKAMILDIVVPGTDTAAAVVVWAMTYLIKYPEAMKKAQDEVRSVIGDKGYVSEEDIPNLPYLKAVIKESLRLEPVIPILLHRETIADAKIGGYDIPAKTIIQVNAWAVSRDTAAWGDNPNEFIPERFMNEHKGVDFKGQDFELLPFGSGRRMCPAMHLGIAMVEIPFANLLYKFDWSLPKGIKPEDIKMDVMTGLAMHKKEHLVLAPTKHI

SEQ ID NO: 29301 - DNA, 1422 bp, Arabidopsis thaliana
  misc_feature (1)..(1422): Ceres Seq. ID no. 12395190
  misc_feature (1)..(1422): Ortholog of  Ceres SEQ ID NO 13593854 as cited in SEQ ID NO 53403
  misc_feature (1)..(1422): Ortholog of  Ceres SEQ ID NO 12581680 as cited in SEQ ID NO 55019
  misc_feature (1)..(1422): Ortholog of  Ceres SEQ ID NO 15172112 as cited in SEQ ID NO 59632
atcatcccttccattaagacctagggttttctctctctcccatcattctcttctcccgatctcatttccattacccaatcccgctccttttctctgattttgaatcgaacccttaatacccagaaatctcacggttccgaggagtgggtttttgggggttagggttttcgagagatgttgaatgtcaggttcattgatgaatctgttttctctctgcttcaagccattcgggcacgtctgtgataattccgaagctggatcgggtggtggtggtggcgtttctggtggaaccggccgtgaaggcaaagacggattgctttggttccgtgatctcggtaaatattgcggcggagatttctccatggctgtgattcaagccaatcaggttcttgaagatcagagccaggtcgaatccggtaattttgggacttttgttggtgtttacgatggtcatggtggtcctgaagctgctcgttatgtctgtgatcatctctttaaccattttcgagaaatatcagcggaaacacaaggagttgtgacgagagagacgatagaaagagcctttcatgcgacagaagaaggattcgcttccattgtgtcagagctgtggcaagaaataccaaatttggcaactgttggcacttgttgtttggttggagtgatatatcaaaatactctttttgtggcaagtcttggagattcacgggttgttcttggaaagaaaggcaactgtggcggactctctgctattcagctgtcgactgaacacaatgctaacaatgaagatattcgttgggaactcaaggacttacatcctgatgacccgcagatcgttgtgttcaggcatggagtttggagagttaagggcatcattcaggtatcgaggtctataggagacatgtacatgaaacggcccgaatttaacaaggagccaatcagtcaaaagttcagaattgcagagccaatgaaaagacccttgatgtctgcaacaccaacaatactctctcatcctctgcaccctaatgattcgtttctcatttttgcatctgatggtctttgggagcatttgactaacgaaaaagcagttgagattgttcataaccatccccgtgctggaagcgcaaagagactgataaaggcggctcttcacgaggcagcgaggaaacgtgagatgagatattcagatctaaggaagattgacaagaaagtgagacgacattttcatgatgacatcacggttatagtggtgttcttgaaccatgacctcatatcgagaggccacatcaactcaacccaagacacaacagtctctatacggagtgctcttgaacactgagaatcccaaacattttacaacaatgtttcttcttacttgattatatgacttttgcctagaatgaataaaaaaaaggcaacatatgg

SEQ ID NO: 29302 - protein, 384 aa, Arabidopsis thaliana
  peptide (1)..(384): Ceres Seq. ID no. 12395191
MSGSLMNLFSLCFKPFGHVCDNSEAGSGGGGGVSGGTGREGKDGLLWFRDLGKYCGGDFSMAVIQANQVLEDQSQVESGNFGTFVGVYDGHGGPEAARYVCDHLFNHFREISAETQGVVTRETIERAFHATEEGFASIVSELWQEIPNLATVGTCCLVGVIYQNTLFVASLGDSRVVLGKKGNCGGLSAIQLSTEHNANNEDIRWELKDLHPDDPQIVVFRHGVWRVKGIIQVSRSIGDMYMKRPEFNKEPISQKFRIAEPMKRPLMSATPTILSHPLHPNDSFLIFASDGLWEHLTNEKAVEIVHNHPRAGSAKRLIKAALHEAARKREMRYSDLRKIDKKVRRHFHDDITVIVVFLNHDLISRGHINSTQDTTVSIRSALEH

SEQ ID NO: 29303 - protein, 379 aa, Arabidopsis thaliana
  peptide (1)..(379): Ceres Seq. ID no. 12395192
MNLFSLCFKPFGHVCDNSEAGSGGGGGVSGGTGREGKDGLLWFRDLGKYCGGDFSMAVIQANQVLEDQSQVESGNFGTFVGVYDGHGGPEAARYVCDHLFNHFREISAETQGVVTRETIERAFHATEEGFASIVSELWQEIPNLATVGTCCLVGVIYQNTLFVASLGDSRVVLGKKGNCGGLSAIQLSTEHNANNEDIRWELKDLHPDDPQIVVFRHGVWRVKGIIQVSRSIGDMYMKRPEFNKEPISQKFRIAEPMKRPLMSATPTILSHPLHPNDSFLIFASDGLWEHLTNEKAVEIVHNHPRAGSAKRLIKAALHEAARKREMRYSDLRKIDKKVRRHFHDDITVIVVFLNHDLISRGHINSTQDTTVSIRSALEH

SEQ ID NO: 29304 - protein, 324 aa, Arabidopsis thaliana
  peptide (1)..(324): Ceres Seq. ID no. 12395193
MAVIQANQVLEDQSQVESGNFGTFVGVYDGHGGPEAARYVCDHLFNHFREISAETQGVVTRETIERAFHATEEGFASIVSELWQEIPNLATVGTCCLVGVIYQNTLFVASLGDSRVVLGKKGNCGGLSAIQLSTEHNANNEDIRWELKDLHPDDPQIVVFRHGVWRVKGIIQVSRSIGDMYMKRPEFNKEPISQKFRIAEPMKRPLMSATPTILSHPLHPNDSFLIFASDGLWEHLTNEKAVEIVHNHPRAGSAKRLIKAALHEAARKREMRYSDLRKIDKKVRRHFHDDITVIVVFLNHDLISRGHINSTQDTTVSIRSALEH

SEQ ID NO: 29305 - DNA, 2300 bp, Arabidopsis thaliana
  misc_feature (1)..(2300): Ceres Seq. ID no. 13580663
  misc_feature (1)..(2300): Ortholog of  Ceres SEQ ID NO 13594740 as cited in SEQ ID NO 51721
  misc_feature (1)..(2300): Ortholog of  Ceres SEQ ID NO 14316497 as cited in SEQ ID NO 58285
  misc_feature (1)..(2300): Ortholog of  Ceres SEQ ID NO 13595944 as cited in SEQ ID NO 68153
atgacctacatatatagagacacaaagatcacaacaaaatcaaccattcctttccttatcttcttcctcttttgcttttctaatctctcaatggctaccttaaaacacaaacctgtaaatttggtattttacgtttataatttgattattatattctcctcccatagttccacggcggagctccgcaggctactgcagccatcaaaaaccgatggtacagtgagctttctcgttatcggagactggggaagaagaggctcctataatcagtcccaagtagctcttcagatgggagaaatcggagagaaattagatatcgattttgtgatttctactggagataatttttacgacaatggtttaaccagcttgcacgatcctctatttcaagattcttttaccaacatttataccgctccgagcttgcagaaaccttggtatagtgttttaggaaatcatgattatagaggtgacgtcagggcacaacttagccctatgctcagagctctggacaacagatgggtttgcatgagatctttcattgtaaatgctgagatcgtcgatttgttcttcgtcgacacaactccgttcgtcgataaatactttattcaaccaaataagcatgtttatgactggagcggtgtattacctaggcaaacatatctgaataatctcttaaaggaactcgacgtggcgttgagagagtcagtcgcaaagtggaaaatagtgattggtcaccatacgatcaaaagcgcaggccaccacgggaacaccattgagttggagaaacaccttttacctattctccaagcaaatgaagtggatctctacgtaaacggacatgatcattgcttagagcacataagcagcgtggacagtaacatacaatttatgacaagtggaggtggatccaaggcctggaaaggaggtgacgtgaactacgttgaaccagaagagatgaggttttactacgacggacaaggtttcatgtcggttcacgtttcagaagctgaactgcgtgtagtcttttatgatgtttttggacacgttctgcatcattggaagaagacttacaaggaggcgctttatttcgcttcttgattccaatttaatcggacgtaattgtttatgatcgatgtactatgaaattatcaatatcgtacttcgtccaaaaaaaaaaaaaaaaaagcttctcgtgccgttttttttttttttttttggactaaaaacttaattaacataaaaaaccaaaccaatggtttcagtaaataaagcagggaaacattaagagaaagcaaaaagacaaaagctacaaactctcatgactgcgcatggaatcagtgaaaaaacataacaactcgagttttcttttctccttttttttattcagaacagtacgaactcaaccacacacaaactctcgccggtgtaagcttaggcctttgacatgtgaacgataaggtcaacgacacgagaactgtaaccccattcgttgtcgtaccatgacaccaacttcacaaacttgtcgctcaatgcaatcccagccttggcatcgaaaatgcttgacctgttgtcaccaacaaagtcggtagacacaacatcatcctcagtgtatcccaaaattcccttcattttgccttcagattcctccttgatggccttcttgatttcgtcgtatgttgcagctgtcgctcgtctacatttacactcggagcttagaccttccaatctaccggcggcgaaaatgggtttcaagaggtacgttgagatcgggagagtagcacttgtgaactacggagaagatcatggaaagctcgtcgttatcgtcgacgttgttgaccagaacagagctttggtggatgcccctgatatggagaggatccagatgaacttcaagaggttgtctcttaccgatattgtcattgacatcaaccgtgtgccaaagaagaaggctttgatcgaggcaatggaaaaggctgatgtgaagaacaagtgggagaaaagctcatggggtaggaagcttatcgtgcagaaacgtagggctaaccttaacgactttgataggttcaagatcatgttggccaagatcaagaaagctggtgttgtcaggcaagagcttgcaaaactcaagaaggagatcactgcctgatcaaatattatctacaattctgttgtctttcttttttgattttggattcggaaattagtgtttttggaactatcaatatcagtatgtgctcaattatcagacattattcaagtttgaaaccttgtttgcaaaactcaaagttttttgttcc

SEQ ID NO: 29306 - protein, 366 aa, Arabidopsis thaliana
  peptide (1)..(366): Ceres Seq. ID no. 13580664
MTYIYRDTKITTKSTIPFLIFFLFCFSNLSMATLKHKPVNLVFYVYNLIIIFSSHSSTAELRRLLQPSKTDGTVSFLVIGDWGRRGSYNQSQVALQMGEIGEKLDIDFVISTGDNFYDNGLTSLHDPLFQDSFTNIYTAPSLQKPWYSVLGNHDYRGDVRAQLSPMLRALDNRWVCMRSFIVNAEIVDLFFVDTTPFVDKYFIQPNKHVYDWSGVLPRQTYLNNLLKELDVALRESVAKWKIVIGHHTIKSAGHHGNTIELEKHLLPILQANEVDLYVNGHDHCLEHISSVDSNIQFMTSGGGSKAWKGGDVNYVEPEEMRFYYDGQGFMSVHVSEAELRVVFYDVFGHVLHHWKKTYKEALYFAS

SEQ ID NO: 29307 - protein, 336 aa, Arabidopsis thaliana
  peptide (1)..(336): Ceres Seq. ID no. 13580665
MATLKHKPVNLVFYVYNLIIIFSSHSSTAELRRLLQPSKTDGTVSFLVIGDWGRRGSYNQSQVALQMGEIGEKLDIDFVISTGDNFYDNGLTSLHDPLFQDSFTNIYTAPSLQKPWYSVLGNHDYRGDVRAQLSPMLRALDNRWVCMRSFIVNAEIVDLFFVDTTPFVDKYFIQPNKHVYDWSGVLPRQTYLNNLLKELDVALRESVAKWKIVIGHHTIKSAGHHGNTIELEKHLLPILQANEVDLYVNGHDHCLEHISSVDSNIQFMTSGGGSKAWKGGDVNYVEPEEMRFYYDGQGFMSVHVSEAELRVVFYDVFGHVLHHWKKTYKEALYFAS

SEQ ID NO: 29308 - protein, 270 aa, Arabidopsis thaliana
  peptide (1)..(270): Ceres Seq. ID no. 13580666
MGEIGEKLDIDFVISTGDNFYDNGLTSLHDPLFQDSFTNIYTAPSLQKPWYSVLGNHDYRGDVRAQLSPMLRALDNRWVCMRSFIVNAEIVDLFFVDTTPFVDKYFIQPNKHVYDWSGVLPRQTYLNNLLKELDVALRESVAKWKIVIGHHTIKSAGHHGNTIELEKHLLPILQANEVDLYVNGHDHCLEHISSVDSNIQFMTSGGGSKAWKGGDVNYVEPEEMRFYYDGQGFMSVHVSEAELRVVFYDVFGHVLHHWKKTYKEALYFAS

SEQ ID NO: 29309 - DNA, 1389 bp, Arabidopsis thaliana
  misc_feature (1)..(1389): Ceres Seq. ID no. 13486876
  misc_feature (1)..(1389): Ortholog of  Ceres SEQ ID NO 15176803 as cited in SEQ ID NO 52778
  misc_feature (1)..(1389): Ortholog of  Ceres SEQ ID NO 14302283 as cited in SEQ ID NO 68688
attacatgagctctctctctctctccttctccttctctcttctccttccttgttcttagagattgatcctaacttgtttttcctttcttggaattgaagagcttcttgttccataaacagtagagagagaaagcttcaaagagagaatcgtgctaatcagtgaagttaggcaaaaacccacttgccatttttgtataattaggtcaatctcatccaccaccatactcaattctcttccttctgaaattagggttttttttatctcctcctctctctttcttgtctaccaaaaaaggttttatcgaattactctcaaatcgtatggtgaggaagtcaaaatcttgagagatctgagattgtaagaagatgaatcaagaagataaagagaagcctattgaagaagcttcttcatcaatggagagagaacacatgttcgacaaagtagtaacaccaagcgacgttggcaaactaaaccgactcgtgatccctaagcaacacgcagagagatacttcccattagataactccacaacaaacgacagcaacaaaggtttgcttctaaacttcgaagatcgaagtggaaactcatggaggttccgttactcttactggaacagtagtcaaagctatgtcatgactaaaggttggagccgttttgtcaaagacaagaagcttgatgctggagacatcgtttcttttcagagagattcttgtaataaagacaagctttacatcgattggaggagacgacctaagattcccgatcatcatcatcagcaattcgccggagctatgttccctaggttttacacttttcctcatcctcagatgccgacaaattacgaaactcacaacctttatcatcgatttcatcaacgagatctaggaattggatactatgtgaggtcaatggagaggagtcatccaacggctgtgattgaatctgtgccggtgatgatgcaaaggagagcacaagtggcttcaatggcttcgagaggagagaagcggttaaggctgtttggtgtagatatggagtgcggaggaggaggagggagtgtgaatagtacggaggaagagtcgtcgtcttccggtggtagtataccacgtggcagagtttctatggttggtgctggttctctcctccagttgaggttagtgagcagtgatgataagtctttagtagcaatggaagctgcaagtcttgaggatcatcacttctttacaaagaaaggaaaaccttctttgtcttttgatttggataggtgatgattatcatgagattaatcactatttaaaaatgcatatatatgataatttataccatatattatatatgacacaaagatgtctttcaagatttaatgatattatcaagaaataacatgttct

SEQ ID NO: 29310 - protein, 299 aa, Arabidopsis thaliana
  peptide (1)..(299): Ceres Seq. ID no. 13486877
MNQEDKEKPIEEASSSMEREHMFDKVVTPSDVGKLNRLVIPKQHAERYFPLDNSTTNDSNKGLLLNFEDRSGNSWRFRYSYWNSSQSYVMTKGWSRFVKDKKLDAGDIVSFQRDSCNKDKLYIDWRRRPKIPDHHHQQFAGAMFPRFYTFPHPQMPTNYETHNLYHRFHQRDLGIGYYVRSMERSHPTAVIESVPVMMQRRAQVASMASRGEKRLRLFGVDMECGGGGGSVNSTEEESSSSGGSIPRGRVSMVGAGSLLQLRLVSSDDKSLVAMEAASLEDHHFFTKKGKPSLSFDLDR

SEQ ID NO: 29311 - protein, 283 aa, Arabidopsis thaliana
  peptide (1)..(283): Ceres Seq. ID no. 13486878
MEREHMFDKVVTPSDVGKLNRLVIPKQHAERYFPLDNSTTNDSNKGLLLNFEDRSGNSWRFRYSYWNSSQSYVMTKGWSRFVKDKKLDAGDIVSFQRDSCNKDKLYIDWRRRPKIPDHHHQQFAGAMFPRFYTFPHPQMPTNYETHNLYHRFHQRDLGIGYYVRSMERSHPTAVIESVPVMMQRRAQVASMASRGEKRLRLFGVDMECGGGGGSVNSTEEESSSSGGSIPRGRVSMVGAGSLLQLRLVSSDDKSLVAMEAASLEDHHFFTKKGKPSLSFDLDR

SEQ ID NO: 29312 - protein, 278 aa, Arabidopsis thaliana
  peptide (1)..(278): Ceres Seq. ID no. 13486879
MFDKVVTPSDVGKLNRLVIPKQHAERYFPLDNSTTNDSNKGLLLNFEDRSGNSWRFRYSYWNSSQSYVMTKGWSRFVKDKKLDAGDIVSFQRDSCNKDKLYIDWRRRPKIPDHHHQQFAGAMFPRFYTFPHPQMPTNYETHNLYHRFHQRDLGIGYYVRSMERSHPTAVIESVPVMMQRRAQVASMASRGEKRLRLFGVDMECGGGGGSVNSTEEESSSSGGSIPRGRVSMVGAGSLLQLRLVSSDDKSLVAMEAASLEDHHFFTKKGKPSLSFDLDR

SEQ ID NO: 29313 - DNA, 1558 bp, Arabidopsis thaliana
  misc_feature (1)..(1558): Ceres Seq. ID no. 12321966
  misc_feature (1)..(1558): Ortholog of  Ceres SEQ ID NO 13594345 as cited in SEQ ID NO 58043
  misc_feature (1)..(1558): Ortholog of  Ceres SEQ ID NO 12614112 as cited in SEQ ID NO 60891
  misc_feature (1)..(1558): Ortholog of  Ceres SEQ ID NO 13597574 as cited in SEQ ID NO 64677
  misc_feature (1)..(1558): Ortholog of  Ceres SEQ ID NO 13597678 as cited in SEQ ID NO 65375
  misc_feature (1)..(1558): Ortholog of  Ceres SEQ ID NO 13662880 as cited in SEQ ID NO 65422
  misc_feature (1)..(1558): Ortholog of  Ceres SEQ ID NO 12779098 as cited in SEQ ID NO 67698
  misc_feature (1)..(1558): Ortholog of  Ceres SEQ ID NO 13596180 as cited in SEQ ID NO 67941
  misc_feature (1)..(1558): Ortholog of  Ceres SEQ ID NO 13591190 as cited in SEQ ID NO 68044
  misc_feature (1)..(1558): Ortholog of  Ceres SEQ ID NO 13596089 as cited in SEQ ID NO 68373
acaaaacccattttaatggcggacgttagaaaccctacaaaaaatcatcatggtcatcatcatcttcatgctctcttgatcccatatccatttcaagggcatgtaaacccatttgtacacttagccatcaagctcgcgtcacaggggatcaccgtcactttcgtcaacactcattacatccaccaccagatcacaaacggctccgatggagatattttcgctggagttaggtcagagtctggccttgacataaggtacgcgacggtttccgatggtttaccggtcggatttgaccggtcgttgaaccatgacacgtaccaatcgtcgctgttgcacgtgttctatgcgcatgtggaagagcttgtggcgagtcttgttggaggagacgacggtgtgaatgtgatgatcgccgacacattctttgtttggccgtctgtggtggctaggaagtttggtttggtttgtgtctcgttttggaccgaagctgctttagtattttcactttattaccatatggatctgcttcggattcatggccattttggtgctcaagaaacccgcggcgatctaatcgactacattcccggagtcgccgcaattaacccaaaagacacggcgtcgtatcttcaagaaaccgacacgtcatcagtagttcatcaaatcatcttcaaagcattcgaagacgtgaaaaaagtcgattttgtactctgcaacacaattcagcaattcgaagacaaaacaatcaaagccctaaacacaaaaatcccattttacgcaatcggaccaatcataccattcaataaccaaaccggttcagtcacaacctcactctggtctgaatcagattgtacacaatggctcaacactaaaccaaaaagctccgtactttatatctcctttggtagttacgctcatgtcacaaagaaggatcttgttgagatagctcacgggattttgttgagtaaagttaatttcgtttgggtggtgagaccagacattgttagttcagacgaaaccaatccattaccagaagggtttgaaacagaagctggagatcgtgggattgtaataccatggtgttgtcaaatgacggttttgtcacatgagagtgttggtgggtttttgacacattgtggttggaactcgatattggagacgatttggtgtgaggttcctgtgttgtgttttccattgttgactgatcaggttacgaataggaagcttgtggttgatgattgggagattgggattaatctttgtgaagataagagtgattttggtagagatgaagttgggaggaatattaaccgtttgatgtgtggtgtttcgaaagagaagatcggacgggttaaaatgagtttggaaggtgcggtgagaaacagtggatcttcttcggagatgaatttaggtttgtttattgatggacttttgtctaaggttggtttatctaatgggaaagcttaaattctatgaaaactaaaaaaaaaaaaaatgtatgaatttttgtcaaattttttatttggggatgtctcttaaatttaaatttacttttttcttt

SEQ ID NO: 29314 - protein, 487 aa, Arabidopsis thaliana
  peptide (1)..(487): Ceres Seq. ID no. 12321967
TKPILMADVRNPTKNHHGHHHLHALLIPYPFQGHVNPFVHLAIKLASQGITVTFVNTHYIHHQITNGSDGDIFAGVRSESGLDIRYATVSDGLPVGFDRSLNHDTYQSSLLHVFYAHVEELVASLVGGDDGVNVMIADTFFVWPSVVARKFGLVCVSFWTEAALVFSLYYHMDLLRIHGHFGAQETRGDLIDYIPGVAAINPKDTASYLQETDTSSVVHQIIFKAFEDVKKVDFVLCNTIQQFEDKTIKALNTKIPFYAIGPIIPFNNQTGSVTTSLWSESDCTQWLNTKPKSSVLYISFGSYAHVTKKDLVEIAHGILLSKVNFVWVVRPDIVSSDETNPLPEGFETEAGDRGIVIPWCCQMTVLSHESVGGFLTHCGWNSILETIWCEVPVLCFPLLTDQVTNRKLVVDDWEIGINLCEDKSDFGRDEVGRNINRLMCGVSKEKIGRVKMSLEGAVRNSGSSSEMNLGLFIDGLLSKVGLSNGKA

SEQ ID NO: 29315 - protein, 482 aa, Arabidopsis thaliana
  peptide (1)..(482): Ceres Seq. ID no. 12321968
MADVRNPTKNHHGHHHLHALLIPYPFQGHVNPFVHLAIKLASQGITVTFVNTHYIHHQITNGSDGDIFAGVRSESGLDIRYATVSDGLPVGFDRSLNHDTYQSSLLHVFYAHVEELVASLVGGDDGVNVMIADTFFVWPSVVARKFGLVCVSFWTEAALVFSLYYHMDLLRIHGHFGAQETRGDLIDYIPGVAAINPKDTASYLQETDTSSVVHQIIFKAFEDVKKVDFVLCNTIQQFEDKTIKALNTKIPFYAIGPIIPFNNQTGSVTTSLWSESDCTQWLNTKPKSSVLYISFGSYAHVTKKDLVEIAHGILLSKVNFVWVVRPDIVSSDETNPLPEGFETEAGDRGIVIPWCCQMTVLSHESVGGFLTHCGWNSILETIWCEVPVLCFPLLTDQVTNRKLVVDDWEIGINLCEDKSDFGRDEVGRNINRLMCGVSKEKIGRVKMSLEGAVRNSGSSSEMNLGLFIDGLLSKVGLSNGKA

SEQ ID NO: 29316 - protein, 353 aa, Arabidopsis thaliana
  peptide (1)..(353): Ceres Seq. ID no. 12321969
MIADTFFVWPSVVARKFGLVCVSFWTEAALVFSLYYHMDLLRIHGHFGAQETRGDLIDYIPGVAAINPKDTASYLQETDTSSVVHQIIFKAFEDVKKVDFVLCNTIQQFEDKTIKALNTKIPFYAIGPIIPFNNQTGSVTTSLWSESDCTQWLNTKPKSSVLYISFGSYAHVTKKDLVEIAHGILLSKVNFVWVVRPDIVSSDETNPLPEGFETEAGDRGIVIPWCCQMTVLSHESVGGFLTHCGWNSILETIWCEVPVLCFPLLTDQVTNRKLVVDDWEIGINLCEDKSDFGRDEVGRNINRLMCGVSKEKIGRVKMSLEGAVRNSGSSSEMNLGLFIDGLLSKVGLSNGKA

SEQ ID NO: 29317 - DNA, 1190 bp, Arabidopsis thaliana
  misc_feature (1)..(1190): Ceres Seq. ID no. 12562676
  misc_feature (1)..(1190): Ortholog of  Ceres SEQ ID NO 15177091 as cited in SEQ ID NO 52140
  misc_feature (1)..(1190): Ortholog of  Ceres SEQ ID NO 15172539 as cited in SEQ ID NO 57333
  misc_feature (1)..(1190): Ortholog of  Ceres SEQ ID NO 14315951 as cited in SEQ ID NO 57634
  misc_feature (1)..(1190): Ortholog of  Ceres SEQ ID NO 13597324 as cited in SEQ ID NO 64842
  misc_feature (1)..(1190): Ortholog of  Ceres SEQ ID NO 13658672 as cited in SEQ ID NO 66627
aactaaattcccaaattgcggaggctgagagatctcaaatcgacgaccaacaggaagaatgagcagtcgttcgagtagaaccgtgtacgtcggaaaccttcctggcgatatccgtgagagagaggtcgaagatttgttcagtaagtatggacctgttgttcaaattgatttgaaggttcctccaaggcctcctggttatgcattcgttgagtttgatgatgctcgggatgctgaagatgctattcatggtcgtgatggctatgactttgatgggcatcgtttgagggtggaattggcgcatggtgggaggcgttcatcagatgatactcggggtagtttcaatggtggtggccgtggtggtggtcgcggccgtggtgatggccgtggtgatggtggtagtcgtgggccatctaggagatcagagtttcgtgttctagtcacaggcttgccttcatctgcttcttggcaagatctcaaggatcacatgcgtaaaggaggcgatgtctgtttctcgcaagtgtaccgtgatgctagagggacaactggagttgttgattacacctgctatgaggacatgaagtatgcgctgaaaaagctcgacgacacagagtttcgaaatgcgttttcgaatggatatgtccgggttagagaatatgattcaaggaaggattctaggagtcctagccggggaagatcctattctaagagccgcagccgcagccgtggacgaagcgtgagccgaagcaggagcagaagcaggagcaggagcagaagtcccaaggcaaagtcttcacgtaggtcccctgcaaaatctacatcaagatctcctggcccccgctcgaagtcaaggtcaccgtctccaagaagatcgcgttcaagatcaagatctcctctaccttctgttcagaaggaaggaagcaagagccctagcaagccaagtccagccaagagtcctatccacactaggagtccatcgaggtaaaatgggagatatccaggtgaaaagagaagagagaagcatcttcttgctactcaaaacaaattctactttcttgaagtggattatatctgaacgcttattgactgtagaagatgcgacaagtttgatttgcactatcattttgtaatattcttgccattcttcgtcttctggatccctttacttttgagaatgatgtttttttttgaag

SEQ ID NO: 29318 - protein, 307 aa, Arabidopsis thaliana
  peptide (1)..(307): Ceres Seq. ID no. 12562677
MSSRSSRTVYVGNLPGDIREREVEDLFSKYGPVVQIDLKVPPRPPGYAFVEFDDARDAEDAIHGRDGYDFDGHRLRVELAHGGRRSSDDTRGSFNGGGRGGGRGRGDGRGDGGSRGPSRRSEFRVLVTGLPSSASWQDLKDHMRKGGDVCFSQVYRDARGTTGVVDYTCYEDMKYALKKLDDTEFRNAFSNGYVRVREYDSRKDSRSPSRGRSYSKSRSRSRGRSVSRSRSRSRSRSRSPKAKSSRRSPAKSTSRSPGPRSKSRSPSPRRSRSRSRSPLPSVQKEGSKSPSKPSPAKSPIHTRSPSR

SEQ ID NO: 29319 - protein, 165 aa, Arabidopsis thaliana
  peptide (1)..(165): Ceres Seq. ID no. 12562678
MRKGGDVCFSQVYRDARGTTGVVDYTCYEDMKYALKKLDDTEFRNAFSNGYVRVREYDSRKDSRSPSRGRSYSKSRSRSRGRSVSRSRSRSRSRSRSPKAKSSRRSPAKSTSRSPGPRSKSRSPSPRRSRSRSRSPLPSVQKEGSKSPSKPSPAKSPIHTRSPSR

SEQ ID NO: 29320 - DNA, 1302 bp, Arabidopsis thaliana
  misc_feature (1)..(1302): Ceres Seq. ID no. 13622021
  misc_feature (1)..(1302): Ortholog of  Ceres SEQ ID NO 13596780 as cited in SEQ ID NO 62360
ttggagagaagaacgttttaataaacagagagcagagcacttgttctaaagatcaaagcttaagtgagaagcagaaaaaaaaatggcgaaatctcagatctggtttggttttgcgttactcgcgttgcttctggtttcagccgtagctgacgatgtggttgttttgactgacgatagcttcgaaaaggaagttggtaaagataaaggagctctcgtcgagttttacgctccctggtgtggtcactgcaagaaacttgctccagagtatgaaaagctaggggcaagcttcaagaaggctaagtctgtgttgattgcaaaggttgattgtgatgagcaaaagagtgtctgtactaaatatggtgttagtggatacccaaccattcagtggtttcctaaaggatctcttgaacctcaaaagtatgagggtccacgcaatgctgaagctttggctgaatacgtgaacaaggaaggaggcaccaacgtaaaattagctgcagttccacaaaacgtggttgttttgacacctgacaatttcgatgagattgttctggatcaaaacaaagatgtcctagtcgaattttatgcaccatggtgtggccactgcaaatcactcgctcccacatacgaaaaggtagccacagtgtttaaacaggaagaaggtgtagtcatcgccaatttggatgctgatgcacacaaagcccttggcgagaaatatggagtgagtggattcccaacattgaaattcttcccaaaggacaacaaagctggtcacgattatgacggtggcagggatttagatgactttgtaagcttcatcaacgagaaatctgggaccagcagggacagtaaagggcagcttacttcaaaggctggtatagtcgaaagcttagatgctttggtaaaagagttagttgcagctagtgaagatgagaagaaggcagtgttgtctcgcatagaagaggaagcaagtacccttaagggctccaccacgaggtatggaaagctttacttgaaactcgcaaagagctacatagaaaaaggttcagactatgctagcaaagaaacggagaggcttggacgggtgcttgggaagtcgataagtccagtgaaagctgatgaactcactctcaagagaaatatcctaaccacgttcgttgcttcttcttaaaagtcatatagcttgaagctaagagaataggagtcgagagagtttataactgatactgttttgagattttatgtttgtcaagatcaagaacgtctgtggttatttctggttagttctgaaactcttttgaaccc

SEQ ID NO: 29321 - protein, 361 aa, Arabidopsis thaliana
  peptide (1)..(361): Ceres Seq. ID no. 13622022
MAKSQIWFGFALLALLLVSAVADDVVVLTDDSFEKEVGKDKGALVEFYAPWCGHCKKLAPEYEKLGASFKKAKSVLIAKVDCDEQKSVCTKYGVSGYPTIQWFPKGSLEPQKYEGPRNAEALAEYVNKEGGTNVKLAAVPQNVVVLTPDNFDEIVLDQNKDVLVEFYAPWCGHCKSLAPTYEKVATVFKQEEGVVIANLDADAHKALGEKYGVSGFPTLKFFPKDNKAGHDYDGGRDLDDFVSFINEKSGTSRDSKGQLTSKAGIVESLDALVKELVAASEDEKKAVLSRIEEEASTLKGSTTRYGKLYLKLAKSYIEKGSDYASKETERLGRVLGKSISPVKADELTLKRNILTTFVASS

SEQ ID NO: 29322 - DNA, 1522 bp, Arabidopsis thaliana
  misc_feature (1)..(1522): Ceres Seq. ID no. 13621932
  misc_feature (1)..(1522): Ortholog of  Ceres SEQ ID NO 13599602 as cited in SEQ ID NO 0
attttttgcatattgtctacttttagattttgatatctattggaactcttactagctcattcatccgtcggcctgtgaattgtgtttctgaagtttccccaatggctgcttttggagatgacattgtgattgtagcggcatatcgtaccgccatttgcaaagcgagacgtggaggtttcaaagacactcttcctgatgatcttcttgcttctgttcttaaggctgtagtggaaagaacatctttggatccaagtgaagttggtgatatcgttgttggtaccgtgatagcgcctggttctcagagagcaatggagtgtagagttgcagcttattttgctggttttcctgactccgtgccagttagaactgtcaatagacaatgctcatcaggactacaagcagttgctgatgttgctgcttccattagagctggttattacgacattggtattggtgctggagtggaatcaatgtcaactgatcatattcctggaggcggctttcatggctctaatccaagagcacaggatttcccaaaagcccgtgattgtttgcttccaatgggaattacttctgaaaacgttgcagaaaggttcggtgtcacaagagaagagcaagatatggctgcggtggagtctcacaaacgcgctgcagctgcaatcgcgtctggtaaactcaaggatgaaatcattcctgttgctactaagattgtggaccctgagactaaagcagagaaggcaatcgtcgtatctgttgatgacggtgtacgtccaaactcaaacatggcagatttggcaaagctgaagactgtctttaaacagaacggttccaccacagctggcaatgctagtcagatcagtgatggtgctggagcagtactgctaatgaagagaagtttggctatgaagaagggacttcccattcttggagtattcaggagttttgctgttactggtgtggaaccatctgtaatgggtattggtccagctgttgccattcccgctgcaactaagctcgcagggctcaacgtcagcgatattgatctattcgagatcaatgaggcatttgcatctcagtatgtgtactcttgcaagaagttagagctggatatggaaaaggtcaatgttaatggaggagccattgctattggccatcccctgggtgctacaggagctcgatgtgttgcgacattgttgcacgagatgaagcggagaggaaaagattgccgctttggagtaatctcaatgtgcataggcactggaatgggagctgcagctgtttttgagaggggagactctgttgataacttgtccaacgctcgtgtggctaacggggatagtcattagaacatcgaagagagcttgaataagtagaagtaatgatgcattgagtctaataaatatgatgctttagctctttcacattgctgaacaatgaaaacttttgtcattctgagtttaaaatcaactacttttctctgaacaaagtgttaaatctaaaaccaaaagttacatccttccgc

SEQ ID NO: 29323 - protein, 414 aa, Arabidopsis thaliana
  peptide (1)..(414): Ceres Seq. ID no. 13621933
MAAFGDDIVIVAAYRTAICKARRGGFKDTLPDDLLASVLKAVVERTSLDPSEVGDIVVGTVIAPGSQRAMECRVAAYFAGFPDSVPVRTVNRQCSSGLQAVADVAASIRAGYYDIGIGAGVESMSTDHIPGGGFHGSNPRAQDFPKARDCLLPMGITSENVAERFGVTREEQDMAAVESHKRAAAAIASGKLKDEIIPVATKIVDPETKAEKAIVVSVDDGVRPNSNMADLAKLKTVFKQNGSTTAGNASQISDGAGAVLLMKRSLAMKKGLPILGVFRSFAVTGVEPSVMGIGPAVAIPAATKLAGLNVSDIDLFEINEAFASQYVYSCKKLELDMEKVNVNGGAIAIGHPLGATGARCVATLLHEMKRRGKDCRFGVISMCIGTGMGAAAVFERGDSVDNLSNARVANGDSH

SEQ ID NO: 29324 - protein, 345 aa, Arabidopsis thaliana
  peptide (1)..(345): Ceres Seq. ID no. 13621934
MECRVAAYFAGFPDSVPVRTVNRQCSSGLQAVADVAASIRAGYYDIGIGAGVESMSTDHIPGGGFHGSNPRAQDFPKARDCLLPMGITSENVAERFGVTREEQDMAAVESHKRAAAAIASGKLKDEIIPVATKIVDPETKAEKAIVVSVDDGVRPNSNMADLAKLKTVFKQNGSTTAGNASQISDGAGAVLLMKRSLAMKKGLPILGVFRSFAVTGVEPSVMGIGPAVAIPAATKLAGLNVSDIDLFEINEAFASQYVYSCKKLELDMEKVNVNGGAIAIGHPLGATGARCVATLLHEMKRRGKDCRFGVISMCIGTGMGAAAVFERGDSVDNLSNARVANGDSH

SEQ ID NO: 29325 - protein, 291 aa, Arabidopsis thaliana
  peptide (1)..(291): Ceres Seq. ID no. 13621935
MSTDHIPGGGFHGSNPRAQDFPKARDCLLPMGITSENVAERFGVTREEQDMAAVESHKRAAAAIASGKLKDEIIPVATKIVDPETKAEKAIVVSVDDGVRPNSNMADLAKLKTVFKQNGSTTAGNASQISDGAGAVLLMKRSLAMKKGLPILGVFRSFAVTGVEPSVMGIGPAVAIPAATKLAGLNVSDIDLFEINEAFASQYVYSCKKLELDMEKVNVNGGAIAIGHPLGATGARCVATLLHEMKRRGKDCRFGVISMCIGTGMGAAAVFERGDSVDNLSNARVANGDSH

SEQ ID NO: 29326 - DNA, 903 bp, Arabidopsis thaliana
  misc_feature (1)..(903): Ceres Seq. ID no. 12348734
  misc_feature (1)..(903): Ortholog of  Ceres SEQ ID NO 13595658 as cited in SEQ ID NO 59888
  misc_feature (1)..(903): Ortholog of  Ceres SEQ ID NO 13662324 as cited in SEQ ID NO 62162
aacacacatacataaaagtagtagaactaaaaaatggcaaacctcttggtctctactttcatattttccgcacttttgctcatctccaccgcaacagccgccacattcgaaatcctaaaccaatgtagttacaccgtgtgggctgccgcaagccctggaggtggccgacgtctagatgctggccaatcatggaggctagatgtcgcggcgggcactaaaatggcacggatttggggtaggaccaattgtaactttgactcctcaggtcgtggccgatgccaaactggtgactgcagtggtggactccaatgtactggctggggacagccaccaaacacgttggctgagtacgctttgaaccaattcaacaacttagacttctacgatatctcacttgtcgatggatttaacatacctatggagtttagcccaactagttcgaactgccatcggatactatgtaccgcagacataaacggacaatgtccaaacgtgttgagagccccaggtggatgcaacaacccgtgtactgtatttcagacgaaccaatactgttgtacgaacggtcagggatcatgtagcgatactgtgtactcaagattctttaagcagagatgccctgacgcttacagctatccacaagatgacccgactagcactttcacttgcaccaacactaactacagggtcgtgttttgtccaaggtctaggctcggtgctactggatcccaccagctcccgatcaagatggtcaccgaggagaattaatagactcgtatctactgtatgtgtgtgtgtgtgagggtgtacgtagatatgcgtacgtgtgacgtgattatatatacgttaccataaacacttaatggattataataaggcatgcaataataattacgttagtcg

SEQ ID NO: 29327 - protein, 244 aa, Arabidopsis thaliana
  peptide (1)..(244): Ceres Seq. ID no. 12348735
MANLLVSTFIFSALLLISTATAATFEILNQCSYTVWAAASPGGGRRLDAGQSWRLDVAAGTKMARIWGRTNCNFDSSGRGRCQTGDCSGGLQCTGWGQPPNTLAEYALNQFNNLDFYDISLVDGFNIPMEFSPTSSNCHRILCTADINGQCPNVLRAPGGCNNPCTVFQTNQYCCTNGQGSCSDTVYSRFFKQRCPDAYSYPQDDPTSTFTCTNTNYRVVFCPRSRLGATGSHQLPIKMVTEEN

SEQ ID NO: 29328 - protein, 182 aa, Arabidopsis thaliana
  peptide (1)..(182): Ceres Seq. ID no. 12348736
MARIWGRTNCNFDSSGRGRCQTGDCSGGLQCTGWGQPPNTLAEYALNQFNNLDFYDISLVDGFNIPMEFSPTSSNCHRILCTADINGQCPNVLRAPGGCNNPCTVFQTNQYCCTNGQGSCSDTVYSRFFKQRCPDAYSYPQDDPTSTFTCTNTNYRVVFCPRSRLGATGSHQLPIKMVTEEN

SEQ ID NO: 29329 - DNA, 1206 bp, Arabidopsis thaliana
  misc_feature (1)..(1206): Ceres Seq. ID no. 12601145
  misc_feature (1)..(1206): Ortholog of  Ceres SEQ ID NO 15179153 as cited in SEQ ID NO 1066
  misc_feature (1)..(1206): Ortholog of  Ceres SEQ ID NO 15176047 as cited in SEQ ID NO 55988
  misc_feature (1)..(1206): Ortholog of  Ceres SEQ ID NO 13582167 as cited in SEQ ID NO 56203
  misc_feature (1)..(1206): Ortholog of  Ceres SEQ ID NO 13658295 as cited in SEQ ID NO 66515
aaggtgacgtggcgaaaatcggaaattttgcgatatttctcactctctcgtcttcttcgtctgagctatcaaactccagtcaatggcgatgatgacgacgacgacgacaacattcttccatccactacttcctgctaacacttacaaatccggagctgtagcttcttcctttgtctcagttcctcgttcgtcgtctctccaatttcgctcacttgtgtcagattctacgtcgatttgtggtccaagtaagttcaccggaaaaaacagaagagtatcggttaccgtttccgccgccgcaacaactgaacctctcaccgtcctcgttaccggtgccggtggaagaacaggacaaattgtgtataagaaattgaaggagaggtcggagcagttcgtggcaaggggtttagtgaggacaaaggagagtaaggagaagatcaatggagaggatgaagtattcattggagatattagagatactgcatcaattgctcctgctgttgaagggattgatgctttggtcattcttactagcgctgttccgcagatgaagcccggttttgatcctagtaaaggaggaagacctgagttcttctttgatgatggagcttatccagaacaggttgactggattggtcagaagaatcagatagacgctgctaaggctgcaggagttaagcagattgttttggttgggtcgatgggaggaacaaacattaatcaccctctcaatagtattggcaatgctaacattctggtctggaagagaaaggctgagcaatacttggctgattccggtattccatacaccatcatcagggctggaggtctgcaggacaaggacggtggcattcgagaattacttgtgggaaaagatgacgagctacttgagacagaaacaagaacaatcgcaagagctgatgttgcagaagtctgtgttcaggcattgcagcttgaggaggcaaaattcaaagctcttgacctggcctcaaagcccgagggaacaggcaccccaacaaaggatttcaaggcgcttttcactcaagtaaccactaagttctgattaagtatttttttgttccctttgtcattgtagcaaagtcctagaattgacactgagagggatgagttctttatgtgtctgaaccggctctttctatttctcaagatgtcttgccctagaatctctaagtaacatcaaaagctttt

SEQ ID NO: 29330 - protein, 325 aa, Arabidopsis thaliana
  peptide (1)..(325): Ceres Seq. ID no. 12601146
MAMMTTTTTTFFHPLLPANTYKSGAVASSFVSVPRSSSLQFRSLVSDSTSICGPSKFTGKNRRVSVTVSAAATTEPLTVLVTGAGGRTGQIVYKKLKERSEQFVARGLVRTKESKEKINGEDEVFIGDIRDTASIAPAVEGIDALVILTSAVPQMKPGFDPSKGGRPEFFFDDGAYPEQVDWIGQKNQIDAAKAAGVKQIVLVGSMGGTNINHPLNSIGNANILVWKRKAEQYLADSGIPYTIIRAGGLQDKDGGIRELLVGKDDELLETETRTIARADVAEVCVQALQLEEAKFKALDLASKPEGTGTPTKDFKALFTQVTTKF

SEQ ID NO: 29331 - protein, 323 aa, Arabidopsis thaliana
  peptide (1)..(323): Ceres Seq. ID no. 12601147
MMTTTTTTFFHPLLPANTYKSGAVASSFVSVPRSSSLQFRSLVSDSTSICGPSKFTGKNRRVSVTVSAAATTEPLTVLVTGAGGRTGQIVYKKLKERSEQFVARGLVRTKESKEKINGEDEVFIGDIRDTASIAPAVEGIDALVILTSAVPQMKPGFDPSKGGRPEFFFDDGAYPEQVDWIGQKNQIDAAKAAGVKQIVLVGSMGGTNINHPLNSIGNANILVWKRKAEQYLADSGIPYTIIRAGGLQDKDGGIRELLVGKDDELLETETRTIARADVAEVCVQALQLEEAKFKALDLASKPEGTGTPTKDFKALFTQVTTKF

SEQ ID NO: 29332 - protein, 322 aa, Arabidopsis thaliana
  peptide (1)..(322): Ceres Seq. ID no. 12601148
MTTTTTTFFHPLLPANTYKSGAVASSFVSVPRSSSLQFRSLVSDSTSICGPSKFTGKNRRVSVTVSAAATTEPLTVLVTGAGGRTGQIVYKKLKERSEQFVARGLVRTKESKEKINGEDEVFIGDIRDTASIAPAVEGIDALVILTSAVPQMKPGFDPSKGGRPEFFFDDGAYPEQVDWIGQKNQIDAAKAAGVKQIVLVGSMGGTNINHPLNSIGNANILVWKRKAEQYLADSGIPYTIIRAGGLQDKDGGIRELLVGKDDELLETETRTIARADVAEVCVQALQLEEAKFKALDLASKPEGTGTPTKDFKALFTQVTTKF

SEQ ID NO: 29333 - DNA, 1400 bp, Arabidopsis thaliana
  misc_feature (1)..(1400): Ceres Seq. ID no. 12396512
  misc_feature (1)..(1400): Ortholog of  Ceres SEQ ID NO 15176611 as cited in SEQ ID NO 52869
  misc_feature (1)..(1400): Ortholog of  Ceres SEQ ID NO 14307408 as cited in SEQ ID NO 59419
  misc_feature (1)..(1400): Ortholog of  Ceres SEQ ID NO 12617729 as cited in SEQ ID NO 65352
attttccgtttgtgttccttgctcatttcttatctctagaaacctgtctgatttgctccgtcgcctaaaaagtctaaaaccctaagtgtctccgcctcgtagctttacccgattcaacgaagagtgaattcgcgtgagctcaagcagtatcgaaatctaccaatcatggcgagtcaaacaccgaatctcgagtgtcggatgtacgaggcgaaatacccagaggtggatatggcggtgatgatccaggtgaagaacattgccgatatgggagcttatgtttctctcctcgagtacaacaacatcgaaggcatgatccttttctccgagctctctcgtcgtcggatccgaagtgttagcagtttgattaaggtcggaagaattgagcctgtcatggttctccgtgttgacaaagagaaaggttacattgatctgagcaaacgtagagtcagcgaggaagatattcagacttgtgaagagaggtataacaagagcaaacttgttcattctatcatgcgccatgttgctgagactctttcaattgatttggaggacttgtatgtgaacattggttggcctttgtatcgacgacatggtcatgcttttgaggctttcaagatcttagtgacggatcctgattcagtgttgggtcctctcacccgtgagatcaaagaagttgggcctgatgggcaagaggtgactaaggttgtacctgctgttacggaagaagtgaaagatgcacttgtgaagaacattaggaggagaatgacaccacaaccaatgaaaatccgggctgatatcgaattgaagtgttttcagtttgatggagttgttcacattaaggaggctatgaaaaatgctgaagccgctggaaatgaagactgtcctgttaagattaaattggttgctccacctctgtatgtccttactactcagacacttgacaaggaacaagggattgaaattctaaacaaagccatagcagcatgcactgagacaattgagacacacaaaggcaagcttgtcgttaaggagggggctagagctgtgagtgaacgtgatgaaaagatgctgacagaacacatggctaagctacgtcttgacaatgaagaaatgagcggcgatgaagatagcggagacgaagaagaggacactggtatgggcgaagtggatctcgatgcaggtgccggaatcatcgagtaagattgccggatttttctttccattaaatctacccaatctcaacagtcccagtattttggtttaagctttgacaaggcagtagaaaaacctccgagaggatttatgtgctttttgatgactctgaggcattttattttacccatagggggtggttacatatcaatcatacattcatggttttataaaagatttgattcttt

SEQ ID NO: 29334 - protein, 344 aa, Arabidopsis thaliana [sequence omitted]

SEQ ID NO: 29335 - protein, 333 aa, Arabidopsis thaliana
  peptide (1)..(333): Ceres Seq. ID no. 12396514
MYEAKYPEVDMAVMIQVKNIADMGAYVSLLEYNNIEGMILFSELSRRRIRSVSSLIKVGRIEPVMVLRVDKEKGYIDLSKRRVSEEDIQTCEERYNKSKLVHSIMRHVAETLSIDLEDLYVNIGWPLYRRHGHAFEAFKILVTDPDSVLGPLTREIKEVGPDGQEVTKVVPAVTEEVKDALVKNIRRRMTPQPMKIRADIELKCFQFDGVVHIKEAMKNAEAAGNEDCPVKIKLVAPPLYVLTTQTLDKEQGIEILNKAIAACTETIETHKGKLVVKEGARAVSERDEKMLTEHMAKLRLDNEEMSGDEDSGDEEEDTGMGEVDLDAGAGIIE

SEQ ID NO: 29336 - protein, 323 aa, Arabidopsis thaliana
  peptide (1)..(323): Ceres Seq. ID no. 12396515
MAVMIQVKNIADMGAYVSLLEYNNIEGMILFSELSRRRIRSVSSLIKVGRIEPVMVLRVDKEKGYIDLSKRRVSEEDIQTCEERYNKSKLVHSIMRHVAETLSIDLEDLYVNIGWPLYRRHGHAFEAFKILVTDPDSVLGPLTREIKEVGPDGQEVTKVVPAVTEEVKDALVKNIRRRMTPQPMKIRADIELKCFQFDGVVHIKEAMKNAEAAGNEDCPVKIKLVAPPLYVLTTQTLDKEQGIEILNKAIAACTETIETHKGKLVVKEGARAVSERDEKMLTEHMAKLRLDNEEMSGDEDSGDEEEDTGMGEVDLDAGAGIIE

SEQ ID NO: 29337 - DNA, 1489 bp, Arabidopsis thaliana
  misc_feature (1)..(1489): Ceres Seq. ID no. 12371848
  misc_feature (1)..(1489): Ortholog of  Ceres SEQ ID NO 14310740 as cited in SEQ ID NO 53755
  misc_feature (1)..(1489): Ortholog of  Ceres SEQ ID NO 13596202 as cited in SEQ ID NO 68492
aaagataacagaaaaacaaaaacaaaaaatttctgctttgaagaagaagagtcgatccataatcaccactttcagatttccagattctggggaaatatcttcaacgatggcgactgagaatctcaccgataagaatgttgttttcagaaagctgaaatcaaaatccgagaacaaggtttgctttgattgtagtgcgaagaatccaacatgggcttctgttccttatgggatcttcctatgcatcgattgttctgctgttcatcgaagtctaggtgttcatatcagcttcgtcaggtcaacgaacttagactcgtggagtcctgagcagctaagaacaatgatgtttggagggaacaatcgagctcaggtgttttttaagcaacatggatggaatgatggtggtaagattgaggctaagtatacttcaagagctgctgatatgtatagacagactcttgctaaagaagttgctaaagccatggctgaagaaactgttttaccgtcgttatcctctgttgctacttctcagccagtggaatcatctgaaaatgggtttacttctgaatctccgaaagagagttctttggttaagcaagaagcagctgttgtctcttcaccaaaagcttctcagaaagttgttgctagtacgtttaagaaacctcttgtttcgcgaaagtctgggaagactggtggtcttggtgctcgtaagcttactactaagtcaaaggataacctctatgagcagaagcctgaagaacctgtacctgtgattcctgctgcttctccaaccaatgacacatcagcagctggatcatcatttgcctctcgatttgagtactttgatgatgagcaatctggtgggcaaagtggcacacgggtgcttagccatgttgctccaccaaagtcatcaaatttctttaatgaatttggaatggacagtgctttccccaagaagtcaagctcaagctcatccaaagctcaggttgaagaaacagatgaagcaagaaagaagttttcaaacgccaaatcgatttcctctgcccaatttttcggaaatcagaacagagatgccgatcttgactcaaaagctacccttcagaagttctcgggttcagcagctatttcaagttctgatctttttggccacggaccagatgattccaacatcgatatcactgcaagcgatctcatcaaccgaatttctttccaggcgcagcaagatatgtcatctattgctaacttagctgaggaaacaaagaataagctgggaacatttgcctctagtatattcagtgatcttcaggatagaatgctgtaagaaacatacaaaggatcttgtcttttgatttacagagaacaaattgttggatataaatgtcatttttatttttggtttgactttgtagttgaaagagtgatttttgaggtaaattgttaaatgtggaatttgataatttgatatggataaggtagaatatgttacagtatc

SEQ ID NO: 29338 - protein, 438 aa, Arabidopsis thaliana
  peptide (1)..(438): Ceres Seq. ID no. 12371849
KITEKQKQKISALKKKSRSIITTFRFPDSGEISSTMATENLTDKNVVFRKLKSKSENKVCFDCSAKNPTWASVPYGIFLCIDCSAVHRSLGVHISFVRSTNLDSWSPEQLRTMMFGGNNRAQVFFKQHGWNDGGKIEAKYTSRAADMYRQTLAKEVAKAMAEETVLPSLSSVATSQPVESSENGFTSESPKESSLVKQEAAVVSSPKASQKVVASTFKKPLVSRKSGKTGGLGARKLTTKSKDNLYEQKPEEPVPVIPAASPTNDTSAAGSSFASRFEYFDDEQSGGQSGTRVLSHVAPPKSSNFFNEFGMDSAFPKKSSSSSSKAQVEETDEARKKFSNAKSISSAQFFGNQNRDADLDSKATLQKFSGSAAISSSDLFGHGPDDSNIDITASDLINRISFQAQQDMSSIANLAEETKNKLGTFASSIFSDLQDRML

SEQ ID NO: 29339 - protein, 403 aa, Arabidopsis thaliana
  peptide (1)..(403): Ceres Seq. ID no. 12371850
MATENLTDKNVVFRKLKSKSENKVCFDCSAKNPTWASVPYGIFLCIDCSAVHRSLGVHISFVRSTNLDSWSPEQLRTMMFGGNNRAQVFFKQHGWNDGGKIEAKYTSRAADMYRQTLAKEVAKAMAEETVLPSLSSVATSQPVESSENGFTSESPKESSLVKQEAAVVSSPKASQKVVASTFKKPLVSRKSGKTGGLGARKLTTKSKDNLYEQKPEEPVPVIPAASPTNDTSAAGSSFASRFEYFDDEQSGGQSGTRVLSHVAPPKSSNFFNEFGMDSAFPKKSSSSSSKAQVEETDEARKKFSNAKSISSAQFFGNQNRDADLDSKATLQKFSGSAAISSSDLFGHGPDDSNIDITASDLINRISFQAQQDMSSIANLAEETKNKLGTFASSIFSDLQDRML

SEQ ID NO: 29340 - protein, 326 aa, Arabidopsis thaliana
  peptide (1)..(326): Ceres Seq. ID no. 12371851
MMFGGNNRAQVFFKQHGWNDGGKIEAKYTSRAADMYRQTLAKEVAKAMAEETVLPSLSSVATSQPVESSENGFTSESPKESSLVKQEAAVVSSPKASQKVVASTFKKPLVSRKSGKTGGLGARKLTTKSKDNLYEQKPEEPVPVIPAASPTNDTSAAGSSFASRFEYFDDEQSGGQSGTRVLSHVAPPKSSNFFNEFGMDSAFPKKSSSSSSKAQVEETDEARKKFSNAKSISSAQFFGNQNRDADLDSKATLQKFSGSAAISSSDLFGHGPDDSNIDITASDLINRISFQAQQDMSSIANLAEETKNKLGTFASSIFSDLQDRML

SEQ ID NO: 29341 - DNA, 1086 bp, Arabidopsis thaliana
  misc_feature (1)..(1086): Ceres Seq. ID no. 13493751
  misc_feature (1)..(1086): Ortholog of  Ceres SEQ ID NO 12609394 as cited in SEQ ID NO 52095
gtagcaccacaacaacaatatccacattcttcttcttttgagtattacatccaacgaaacgtctctttctttctctctgataggcaacaatggcgcagaggaagatgattgtgtttcccaccaagaatgaattgtccgaagcaatggctgagtacactgccaatctctccgccaagttcatcaaagagaaaggccttttcaccgttgttctctccggcggtgacctaatcgattggctctgcaagttggtgcaacctccttatattgattcaatcgaatggccaaaatggcacgtcttttgggtcgatgagagggtttgtgcatgggaagatccagacagtaactacaaactcgccatggagggttttctctctaaggttccgattccggataagaacatctacgcaatcgacaagcacttggcggctgatggtaacgccgagcactgcgcgacgctctacgaggagtgtctaaagaatctggtgaaagaaaagattatcccaatatcgaaaaagacagggtatcctgagtttgatctacaacttctagggatgggtcctgatggccacatggcgtctctcttcccaaaccatccacagatcaatgagaagcagaaatgggtcacttacatcaccgactctccaaaaccaccaccaaagagaatcacattcactttaccggtcatcaactctactttgtacaatcttatggccatttgtgacaaagcaccggccaaatccgtggctgagatcatgaagcacaacaacctctcgttaccttctgctcatcttagtgctcaagtcgaaaatgtttggtaccttgaccaagcagctgcctccgagctctagagaggtagcctaaacacattaatattggtgttttgtttgtagtctctacgttgctttgtgttgaataaccggttaatacatttgcgtacgtttacttcgtacaaaatgtgttgaatattcgagctagttgtttcttgtagttgtgatgtgagtccctggctatgactatatatcattataaaaatatatagtgggcttcatttaatctgtcatttcatgaatggtgtttaattaaact

SEQ ID NO: 29342 - protein, 252 aa, Arabidopsis thaliana
  peptide (1)..(252): Ceres Seq. ID no. 13493752
MAQRKMIVFPTKNELSEAMAEYTANLSAKFIKEKGLFTVVLSGGDLIDWLCKLVQPPYIDSIEWPKWHVFWVDERVCAWEDPDSNYKLAMEGFLSKVPIPDKNIYAIDKHLAADGNAEHCATLYEECLKNLVKEKIIPISKKTGYPEFDLQLLGMGPDGHMASLFPNHPQINEKQKWVTYITDSPKPPPKRITFTLPVINSTLYNLMAICDKAPAKSVAEIMKHNNLSLPSAHLSAQVENVWYLDQAAASEL

SEQ ID NO: 29343 - protein, 247 aa, Arabidopsis thaliana
  peptide (1)..(247): Ceres Seq. ID no. 13493753
MIVFPTKNELSEAMAEYTANLSAKFIKEKGLFTVVLSGGDLIDWLCKLVQPPYIDSIEWPKWHVFWVDERVCAWEDPDSNYKLAMEGFLSKVPIPDKNIYAIDKHLAADGNAEHCATLYEECLKNLVKEKIIPISKKTGYPEFDLQLLGMGPDGHMASLFPNHPQINEKQKWVTYITDSPKPPPKRITFTLPVINSTLYNLMAICDKAPAKSVAEIMKHNNLSLPSAHLSAQVENVWYLDQAAASEL

SEQ ID NO: 29344 - protein, 234 aa, Arabidopsis thaliana
  peptide (1)..(234): Ceres Seq. ID no. 13493754
MAEYTANLSAKFIKEKGLFTVVLSGGDLIDWLCKLVQPPYIDSIEWPKWHVFWVDERVCAWEDPDSNYKLAMEGFLSKVPIPDKNIYAIDKHLAADGNAEHCATLYEECLKNLVKEKIIPISKKTGYPEFDLQLLGMGPDGHMASLFPNHPQINEKQKWVTYITDSPKPPPKRITFTLPVINSTLYNLMAICDKAPAKSVAEIMKHNNLSLPSAHLSAQVENVWYLDQAAASEL

SEQ ID NO: 29345 - DNA, 897 bp, Arabidopsis thaliana; identical to SEQ ID NO: 26501
  misc_feature (1)..(897): Ceres Seq. ID no. 12603175
  misc_feature (1)..(897): Ortholog of  Ceres SEQ ID NO 15177927 as cited in SEQ ID NO 1170
  misc_feature (1)..(897): Ortholog of  Ceres SEQ ID NO 13596295 as cited in SEQ ID NO 68019

SEQ ID NO: 29346 - protein, 228 aa, Arabidopsis thaliana; identical to SEQ ID NO: 26502
  peptide (1)..(228): Ceres Seq. ID no. 12603176

SEQ ID NO: 29347 - protein, 214 aa, Arabidopsis thaliana [sequence omitted]

SEQ ID NO: 29348 - protein, 200 aa, Arabidopsis thaliana; identical to SEQ ID NO: 26504
  peptide (1)..(200): Ceres Seq. ID no. 12603178

SEQ ID NO: 29349 - DNA, 648 bp, Arabidopsis thaliana
  misc_feature (1)..(648): Ceres Seq. ID no. 13491518
  misc_feature (1)..(648): Ortholog of  Ceres SEQ ID NO 13581866 as cited in SEQ ID NO 52179
  misc_feature (1)..(648): Ortholog of  Ceres SEQ ID NO 14315451 as cited in SEQ ID NO 59289
acatctgaattttgtctgatccaggaaaaagaagaaaatggcgtttgtgacaactgcggaagtttgtgacgcgaatcaagagctgattcggagtggtcagctacgagctttgcaacccattttccagatttatggccgtcgacaaatattctcaggaccagttgtcactgtcaaagtttttgaagacaatggcttaatccgtcaattcatcgaggagaaaggaaacggtagagttcttgtggtggatggtggagggagtcaacgatgtgcaatactcggaggtaaccccgttgttcaagctcagaacaacggatgggcaggaatcgttgtgaacggatgcatcagagacgtcgatgagatcaacggttgtgatatcggagtgagagctttggcctctcatccgataaaagcgagtaagaaaggacttggagaacaacgagttccggtaaatatcgcagggactcggatttgtgatggtgaatggctttatgcagatactgatgggattcttgtctcccaaattgagttatccgtttaataaaaaaggctttgatcagttaccaaaaaaaaaaacagaacgtggtttgtgttcatcttcttgtacttaagagattgttgaattataatggaaaataaatttttgttttg

SEQ ID NO: 29350 - protein, 166 aa, Arabidopsis thaliana
  peptide (1)..(166): Ceres Seq. ID no. 13491519
MAFVTTAEVCDANQELIRSGQLRALQPIFQIYGRRQIFSGPVVTVKVFEDNGLIRQFIEEKGNGRVLVVDGGGSQRCAILGGNPVVQAQNNGWAGIVVNGCIRDVDEINGCDIGVRALASHPIKASKKGLGEQRVPVNIAGTRICDGEWLYADTDGILVSQIELSV

SEQ ID NO: 29351 - DNA, 857 bp, Arabidopsis thaliana
  misc_feature (1)..(857): Ceres Seq. ID no. 12323707
  misc_feature (1)..(857): Ortholog of  Ceres SEQ ID NO 13661939 as cited in SEQ ID NO 61170
  misc_feature (1)..(857): Ortholog of  Ceres SEQ ID NO 14309041 as cited in SEQ ID NO 0
  misc_feature (1)..(857): Ortholog of  Ceres SEQ ID NO 14309611 as cited in SEQ ID NO 0
acgtgtttctgtttttctctaatttttctcttgttgttctcgattaacgaaaaagacttgtcgttctcaattcttatcgatttaagaacaaatcatctaacgaagattacttccgaagatcagaaacaaacacaaactgtgaatcgttgtttgttaattctctttaaaatcgccagaagaaagagatctccgttttctacagaagaaaagcaagagagtaagaatgggatcggaacaaaacgatagcacaagcttcacgcaatcgcaagcttcagagccaaagctatgtgttaaaggatgtggtttctttggatcaccatcaaacatggatctctgttctaaatgttacagaggcatttgtgctgaggaagctcaaacagcagttgctaaagctgctgttgaaaaatctttcaagccttctcctcctcgtagtctcttcatagcagaacctcctgctgttgttgtggaacccaaacccgaaaaggcggcagttgttgttgtctcggccgagccatcttcctcggcggttcctgaggcgaacgagccatcgagacctgcacgaaccaaccggtgtttgtgttgtaacaagaaggttgggatcatggggtttaagtgcaaatgcgggagcactatctgcggcgatcatcggtacccggagactcatgattgcagctttgatttcaaagaagttggacgtggagagattgccaaagctaatcctgtggttaaggctgataaaattcaaaggttctgaaatatggaagttttttctaagtattttggtggtaattactcatttgtatttgaaccgatttgggggttgtcttggatggttttaatggattgtttccaaaggg

SEQ ID NO: 29352 - protein, 176 aa, Arabidopsis thaliana
  peptide (1)..(176): Ceres Seq. ID no. 12323708
MGSEQNDSTSFTQSQASEPKLCVKGCGFFGSPSNMDLCSKCYRGICAEEAQTAVAKAAVEKSFKPSPPRSLFIAEPPAVVVEPKPEKAAVVVVSAEPSSSAVPEANEPSRPARTNRCLCCNKKVGIMGFKCKCGSTICGDHRYPETHDCSFDFKEVGRGEIAKANPVVKADKIQRF

SEQ ID NO: 29353 - protein, 142 aa, Arabidopsis thaliana
  peptide (1)..(142): Ceres Seq. ID no. 12323709
MDLCSKCYRGICAEEAQTAVAKAAVEKSFKPSPPRSLFIAEPPAVVVEPKPEKAAVVVVSAEPSSSAVPEANEPSRPARTNRCLCCNKKVGIMGFKCKCGSTICGDHRYPETHDCSFDFKEVGRGEIAKANPVVKADKIQRF

SEQ ID NO: 29354 - DNA, 1154 bp, Arabidopsis thaliana; identical to SEQ ID NO: 26919
  misc_feature (1)..(1154): Ceres Seq. ID no. 12385275
  misc_feature (1)..(1154): Ortholog of  Ceres SEQ ID NO 14312711 as cited in SEQ ID NO 1401
  misc_feature (1)..(1154): Ortholog of  Ceres SEQ ID NO 13586635 as cited in SEQ ID NO 14217
  misc_feature (1)..(1154): Ortholog of  Ceres SEQ ID NO 15170220 as cited in SEQ ID NO 55383
  misc_feature (1)..(1154): Ortholog of  Ceres SEQ ID NO 14304198 as cited in SEQ ID NO 56479
  misc_feature (1)..(1154): Ortholog of  Ceres SEQ ID NO 14316543 as cited in SEQ ID NO 57118
  misc_feature (1)..(1154): Ortholog of  Ceres SEQ ID NO 12616285 as cited in SEQ ID NO 63483

SEQ ID NO: 29355 - protein, 350 aa, Arabidopsis thaliana; identical to SEQ ID NO: 26920
  peptide (1)..(350): Ceres Seq. ID no. 12385276

SEQ ID NO: 29356 - protein, 331 aa, Arabidopsis thaliana; identical to SEQ ID NO: 21476
  peptide (1)..(331): Ceres Seq. ID no. 12385277

SEQ ID NO: 29357 - protein, 324 aa, Arabidopsis thaliana; identical to SEQ ID NO: 21477
  peptide (1)..(324): Ceres Seq. ID no. 12385278

SEQ ID NO: 29358 - DNA, 1200 bp, Arabidopsis thaliana
  misc_feature (1)..(1200): Ceres Seq. ID no. 12334308
  misc_feature (1)..(1200): Ortholog of  Ceres SEQ ID NO 12583469 as cited in SEQ ID NO 51031
  misc_feature (1)..(1200): Ortholog of  Ceres SEQ ID NO 13597389 as cited in SEQ ID NO 63426
  misc_feature (1)..(1200): Ortholog of  Ceres SEQ ID NO 13595998 as cited in SEQ ID NO 68161
aaaatttcaaatctcacttccttatcacaatgtcttcctctatctctcccctcctcacaaccgtcatcttcgtgtcgagcctcctcttctttactatctccaaagcggcgacaattccaaacatccaccgtccattcaacaaaatctacgccttcggagattctttcaccgacaccggaaactcacgctccggcgaaggaccagccggtttcggacacttgtcaagtcctccatacggcatgactttcttccgaagaccaacaaaccgttactccgacggtcgtctcaccatcgacttcgtggcagagtcaatgaatttaccgtttctgccaccgtatctcagcctcaaaaccactaacgctaacggcacagcaacggatactcacggcgttaatttcgctgtctctggatcaactgtgattaaacacgcgtttttcgtgaagaacaatctgtcgcttgatatgactcctcagtctatagaaacagagcttgcttggttcgagaagtatttagagacacttggaacgaatcagaaggtttcgttgtttaaagattctctcttttggattggagaaattggagtgaatgattatgcgtatacccttggatctactgtgtcaagtgacaccattagagaacttagtatctcaacttttacaaggtttttggagacattgttgaacaaaggtgtgaaatatatgttggtgcaaggacatccagcaactggatgcttaacgttagcaatgtcgttggccgcagaatatgatcgggacagtctaggatgtgtgcagagtgccaataaccaaagttacactcacaatcttgctcttcaatccaaacttaaacaacttaggatcaagtatccgagtgcgacaatagtctacgcagattactggaacgcgtaccgtgcggtgattaaacaccctagcaagtacggtatcaccgagaagttcaaggcgtgttgtggaattggagagccgtacaacttccaagtgttccaaacgtgtgggacggatgcagctacagtgtgtaaggacccgaatcaatacatcaattgggacggagtccacttgaccgaggctatgtataaggttatggccgatatgttccttgacggcactttcactcgtcctagatttagtgacttgttgatcaagaaactaaactatttatgaatgaattgttttactgattttttat

SEQ ID NO: 29359 - protein, 390 aa, Arabidopsis thaliana
  peptide (1)..(390): Ceres Seq. ID no. 12334309
NFKSHFLITMSSSISPLLTTVIFVSSLLFFTISKAATIPNIHRPFNKIYAFGDSFTDTGNSRSGEGPAGFGHLSSPPYGMTFFRRPTNRYSDGRLTIDFVAESMNLPFLPPYLSLKTTNANGTATDTHGVNFAVSGSTVIKHAFFVKNNLSLDMTPQSIETELAWFEKYLETLGTNQKVSLFKDSLFWIGEIGVNDYAYTLGSTVSSDTIRELSISTFTRFLETLLNKGVKYMLVQGHPATGCLTLAMSLAAEYDRDSLGCVQSANNQSYTHNLALQSKLKQLRIKYPSATIVYADYWNAYRAVIKHPSKYGITEKFKACCGIGEPYNFQVFQTCGTDAATVCKDPNQYINWDGVHLTEAMYKVMADMFLDGTFTRPRFSDLLIKKLNYL

SEQ ID NO: 29360 - protein, 381 aa, Arabidopsis thaliana
  peptide (1)..(381): Ceres Seq. ID no. 12334310
MSSSISPLLTTVIFVSSLLFFTISKAATIPNIHRPFNKIYAFGDSFTDTGNSRSGEGPAGFGHLSSPPYGMTFFRRPTNRYSDGRLTIDFVAESMNLPFLPPYLSLKTTNANGTATDTHGVNFAVSGSTVIKHAFFVKNNLSLDMTPQSIETELAWFEKYLETLGTNQKVSLFKDSLFWIGEIGVNDYAYTLGSTVSSDTIRELSISTFTRFLETLLNKGVKYMLVQGHPATGCLTLAMSLAAEYDRDSLGCVQSANNQSYTHNLALQSKLKQLRIKYPSATIVYADYWNAYRAVIKHPSKYGITEKFKACCGIGEPYNFQVFQTCGTDAATVCKDPNQYINWDGVHLTEAMYKVMADMFLDGTFTRPRFSDLLIKKLNYL

SEQ ID NO: 29361 - protein, 311 aa, Arabidopsis thaliana
  peptide (1)..(311): Ceres Seq. ID no. 12334311
MTFFRRPTNRYSDGRLTIDFVAESMNLPFLPPYLSLKTTNANGTATDTHGVNFAVSGSTVIKHAFFVKNNLSLDMTPQSIETELAWFEKYLETLGTNQKVSLFKDSLFWIGEIGVNDYAYTLGSTVSSDTIRELSISTFTRFLETLLNKGVKYMLVQGHPATGCLTLAMSLAAEYDRDSLGCVQSANNQSYTHNLALQSKLKQLRIKYPSATIVYADYWNAYRAVIKHPSKYGITEKFKACCGIGEPYNFQVFQTCGTDAATVCKDPNQYINWDGVHLTEAMYKVMADMFLDGTFTRPRFSDLLIKKLNYL

SEQ ID NO: 29362 - DNA, 813 bp, Arabidopsis thaliana
  misc_feature (1)..(813): Ceres Seq. ID no. 12580234
  misc_feature (1)..(813): Ortholog of  Ceres SEQ ID NO 15173146 as cited in SEQ ID NO 61836
  misc_feature (1)..(813): Ortholog of  Ceres SEQ ID NO 14309121 as cited in SEQ ID NO 0
aaaaattaaaccaaagaaacaaacaatccttgttctcgccgaaatagagaattttgtgaatctgggtttttagttcaggtgttaatataagattttgatcaaaagaagacgagattcgatccgatccgatctgattgaagaagaaatggcgaatctgtatgtgaaagcggttccaccaccggatatgaataggaatacggaatggttcatgtatccaggagtttggacgacttacatgcttattctcttcttcggttggctcgttgttctctctgtctctggttgttcccctggaatggcttggactgttgttaatctcgctcacttcgttgtaacgtatcacagcttccactggatgaaaggaactccttttgcagatgaccaaggaatctacaatggtttaacttggtgggaacaaatggacaatggtcaacagcttacccgcaaccgcaaatttcttaccctagttcctgttgttctgtacttgattgcatcgcatacaacagattacagacatccatggctgttcctcaacacactcgctgtgatggttctcgttgttgccaagttccccaacatgcacaaggtacgcatctttggtatcaatggtgataaataagtttcctttacggcaagagaacacctgaaagaaggaaaaggggatataagcgaacatatatatgtgtaaatgttcatatgagttggtttaattctcgagtcatgttttttgttggatatttgtaagtaaactctctaattttgaagctttcatcttttaccttttataatagacacgaaaaagctttcccttcg

SEQ ID NO: 29363 - protein, 157 aa, Arabidopsis thaliana
  peptide (1)..(157): Ceres Seq. ID no. 12580235
MANLYVKAVPPPDMNRNTEWFMYPGVWTTYMLILFFGWLVVLSVSGCSPGMAWTVVNLAHFVVTYHSFHWMKGTPFADDQGIYNGLTWWEQMDNGQQLTRNRKFLTLVPVVLYLIASHTTDYRHPWLFLNTLAVMVLVVAKFPNMHKVRIFGINGDK

SEQ ID NO: 29364 - protein, 144 aa, Arabidopsis thaliana
  peptide (1)..(144): Ceres Seq. ID no. 12580236
MNRNTEWFMYPGVWTTYMLILFFGWLVVLSVSGCSPGMAWTVVNLAHFVVTYHSFHWMKGTPFADDQGIYNGLTWWEQMDNGQQLTRNRKFLTLVPVVLYLIASHTTDYRHPWLFLNTLAVMVLVVAKFPNMHKVRIFGINGDK

SEQ ID NO: 29365 - protein, 136 aa, Arabidopsis thaliana
  peptide (1)..(136): Ceres Seq. ID no. 12580237
MYPGVWTTYMLILFFGWLVVLSVSGCSPGMAWTVVNLAHFVVTYHSFHWMKGTPFADDQGIYNGLTWWEQMDNGQQLTRNRKFLTLVPVVLYLIASHTTDYRHPWLFLNTLAVMVLVVAKFPNMHKVRIFGINGDK

SEQ ID NO: 29366 - DNA, 1288 bp, Arabidopsis thaliana
  misc_feature (1)..(1288): Ceres Seq. ID no. 12334788
  misc_feature (1)..(1288): Ortholog of  Ceres SEQ ID NO 13597380 as cited in SEQ ID NO 64054
  misc_feature (1)..(1288): Ortholog of  Ceres SEQ ID NO 12625474 as cited in SEQ ID NO 64169
actaattaaattctctataaaacataagagagtctaaacactgtggtagaaaaaaatatagacttttagatatgtgtagtaaaataacattagtgttaactttattttccagttatttcatatcaacagatgctgtgaatggatcatttcctgcgcttttggcttttggagattcaattctcgatactggcaacaacaattttctcctgacttttatgaaaggaaatatctggccatatggaaggagtttcagcatgagaagggcgacaggaagatttggaaatggaagagttttctctgatatagttgctgaaggtttagggatcaagaagattttaccagcttatcgtaagttgttcaattctccaagtgaccttagaactggtgtttgcttcgcatcaggtggtgcaggagttgaccctgttacatccaaattgctgagagttttaacgccaaaggatcaagtaaacgatttcaaagggtacataagaaagctaaaggccacagcaggtccttcaagagcaagtagtatagtttcaaatgcagtgattcttgtttctcaaggaaataatgatattggaatctcatattttggaactccaactgctgctttccgaggattaactcccaatagatataccactaaactagctggttggaacaaacagtttatgaaagaattatacgatcaaggagcgagaaaattcgcggtaatgggagtgataccgttgggatgtttgcctatgacaagaatcttccttggtgggttcgtcatcacgtgtaacttcttcgcgaatagagtcgcagaacagtacaacggaaaattgaggagcggaactaaaagttggggacgtgaagcaggttttaggggtacaaaatttgtctatgtcgacatgtacaacactcttatggatgttattaaaaattatagaagatacggattttctaatgagaaaaatgggtgttgttgtatgattacggctataataccatgccccaacccagataaatacgtcttctacgacttcgttcatccatccgagaaagcttacagaacaatttctaaaaagcttgtccaggatatcaagaatggccttgcctgatttattatatatacaatgctttattttaattttaataacagccatcgttaataatagaaatgagaagacaaaaatcatacatggcgatctctctgtttttcttatgttaaagaatgtataatccagtttatgtattgttcactttatataatcccagaacaacaaaggagtttgtttacaaatgt

SEQ ID NO: 29367 - protein, 343 aa, Arabidopsis thaliana
  peptide (1)..(343): Ceres Seq. ID no. 12334789
MCSKITLVLTLFSSYFISTDAVNGSFPALLAFGDSILDTGNNNFLLTFMKGNIWPYGRSFSMRRATGRFGNGRVFSDIVAEGLGIKKILPAYRKLFNSPSDLRTGVCFASGGAGVDPVTSKLLRVLTPKDQVNDFKGYIRKLKATAGPSRASSIVSNAVILVSQGNNDIGISYFGTPTAAFRGLTPNRYTTKLAGWNKQFMKELYDQGARKFAVMGVIPLGCLPMTRIFLGGFVITCNFFANRVAEQYNGKLRSGTKSWGREAGFRGTKFVYVDMYNTLMDVIKNYRRYGFSNEKNGCCCMITAIIPCPNPDKYVFYDFVHPSEKAYRTISKKLVQDIKNGLA

SEQ ID NO: 29368 - protein, 295 aa, Arabidopsis thaliana
  peptide (1)..(295): Ceres Seq. ID no. 12334790
MKGNIWPYGRSFSMRRATGRFGNGRVFSDIVAEGLGIKKILPAYRKLFNSPSDLRTGVCFASGGAGVDPVTSKLLRVLTPKDQVNDFKGYIRKLKATAGPSRASSIVSNAVILVSQGNNDIGISYFGTPTAAFRGLTPNRYTTKLAGWNKQFMKELYDQGARKFAVMGVIPLGCLPMTRIFLGGFVITCNFFANRVAEQYNGKLRSGTKSWGREAGFRGTKFVYVDMYNTLMDVIKNYRRYGFSNEKNGCCCMITAIIPCPNPDKYVFYDFVHPSEKAYRTISKKLVQDIKNGLA

SEQ ID NO: 29369 - protein, 282 aa, Arabidopsis thaliana
  peptide (1)..(282): Ceres Seq. ID no. 12334791
MRRATGRFGNGRVFSDIVAEGLGIKKILPAYRKLFNSPSDLRTGVCFASGGAGVDPVTSKLLRVLTPKDQVNDFKGYIRKLKATAGPSRASSIVSNAVILVSQGNNDIGISYFGTPTAAFRGLTPNRYTTKLAGWNKQFMKELYDQGARKFAVMGVIPLGCLPMTRIFLGGFVITCNFFANRVAEQYNGKLRSGTKSWGREAGFRGTKFVYVDMYNTLMDVIKNYRRYGFSNEKNGCCCMITAIIPCPNPDKYVFYDFVHPSEKAYRTISKKLVQDIKNGLA

SEQ ID NO: 29370 - DNA, 1304 bp, Arabidopsis thaliana
  misc_feature (1)..(1304): Ceres Seq. ID no. 13487643
  misc_feature (1)..(1304): Ortholog of  Ceres SEQ ID NO 13597582 as cited in SEQ ID NO 65348
gcacgagcgaaaacgaaatctgaaacggtcacacacagtcgctagatatgtctctctcgcttccatcttcttccgccgccgctgctgcggcgtcaacatcgggatcatcatcttctccggcggctgcttcgtcttcctcaacaaccacgtcatggttctccgggatcgttcgtggtcgtggtgataaatccggcaccgcgaagctatctaaaagctcttccatggctggaggaggaagcggaagcggagattacggtggaccaatcaaagggaagaatcaatttcgcggtgttttgttcaaatacggtcctaaatcaattcaggttgcttttaagaccggagagtataaacaacaagtgatatttatcggtggattaactgatggacttttagctactgattacttggaacctcttgcgattgctttggataaagagaaatggtcacttgttcaactactgatgtcttcttcatattctggatttggcacttccagcttgaaacaagatgcacaagaaatcgaccagctaataaaccacctcatcaacaaagagaattctgaaggtgttgttctgcttggtcatagcactggctgtcaggacattgtgtattatatgggaacaaatgcggcatgctcccgagctgtccgggctgcaattttacaggcaccagtcagcgatagagagtacaaagcaacgcttcctgaaacacctgctatgatagacttggctgcaaacatgataaaagaaggtcgaggagaggagctaatgcctagagaagctgatccttgtgctccaatctctgcttatagatatcactccctctgcgcttacatgggagatgacgatatgtttagttctgaccttagtgatgatcagttgaaaactagacttggccatatggctaacacaccttgtcaggtgattttctccatgggtgatgagtatgtaccagattatgtcgacaaaaaagcattggtcaatagattaagtaaagcaatgggaggagcagagaaagtggagatagagcatgggaatcattctctctccaatagagttcatgaagctgttcaagccatcattggttttgtcaaaagagaaggacccagtggttgggatgatccttggagctaaatctgctttttccatttatgtggatgaaaaacttatccaaatctgaatctcatgaattaattcacttcttggctgattcgtaaccatttatccttaaaaagtaaaaaagtaaattgttgtccttttgttctgatatatacttggatcattaagaaaagtgtcttccttatt

SEQ ID NO: 29371 - protein, 361 aa, Arabidopsis thaliana
  peptide (1)..(361): Ceres Seq. ID no. 13487644
MSLSLPSSSAAAAAASTSGSSSSPAAASSSSTTTSWFSGIVRGRGDKSGTAKLSKSSSMAGGGSGSGDYGGPIKGKNQFRGVLFKYGPKSIQVAFKTGEYKQQVIFIGGLTDGLLATDYLEPLAIALDKEKWSLVQLLMSSSYSGFGTSSLKQDAQEIDQLINHLINKENSEGVVLLGHSTGCQDIVYYMGTNAACSRAVRAAILQAPVSDREYKATLPETPAMIDLAANMIKEGRGEELMPREADPCAPISAYRYHSLCAYMGDDDMFSSDLSDDQLKTRLGHMANTPCQVIFSMGDEYVPDYVDKKALVNRLSKAMGGAEKVEIEHGNHSLSNRVHEAVQAIIGFVKREGPSGWDDPWS

SEQ ID NO: 29372 - protein, 303 aa, Arabidopsis thaliana
  peptide (1)..(303): Ceres Seq. ID no. 13487645
MAGGGSGSGDYGGPIKGKNQFRGVLFKYGPKSIQVAFKTGEYKQQVIFIGGLTDGLLATDYLEPLAIALDKEKWSLVQLLMSSSYSGFGTSSLKQDAQEIDQLINHLINKENSEGVVLLGHSTGCQDIVYYMGTNAACSRAVRAAILQAPVSDREYKATLPETPAMIDLAANMIKEGRGEELMPREADPCAPISAYRYHSLCAYMGDDDMFSSDLSDDQLKTRLGHMANTPCQVIFSMGDEYVPDYVDKKALVNRLSKAMGGAEKVEIEHGNHSLSNRVHEAVQAIIGFVKREGPSGWDDPWS

SEQ ID NO: 29373 - protein, 223 aa, Arabidopsis thaliana
  peptide (1)..(223): Ceres Seq. ID no. 13487646
MSSSYSGFGTSSLKQDAQEIDQLINHLINKENSEGVVLLGHSTGCQDIVYYMGTNAACSRAVRAAILQAPVSDREYKATLPETPAMIDLAANMIKEGRGEELMPREADPCAPISAYRYHSLCAYMGDDDMFSSDLSDDQLKTRLGHMANTPCQVIFSMGDEYVPDYVDKKALVNRLSKAMGGAEKVEIEHGNHSLSNRVHEAVQAIIGFVKREGPSGWDDPWS

SEQ ID NO: 29374 - DNA, 810 bp, Arabidopsis thaliana
  misc_feature (1)..(810): Ceres Seq. ID no. 13653785
  misc_feature (1)..(810): Ortholog of  Ceres SEQ ID NO 15176321 as cited in SEQ ID NO 52814
  misc_feature (1)..(810): Ortholog of  Ceres SEQ ID NO 12563124 as cited in SEQ ID NO 57104
  misc_feature (1)..(810): Ortholog of  Ceres SEQ ID NO 13598373 as cited in SEQ ID NO 62185
  misc_feature (1)..(810): Ortholog of  Ceres SEQ ID NO 12584664 as cited in SEQ ID NO 62232
  misc_feature (1)..(810): Ortholog of  Ceres SEQ ID NO 15226273 as cited in SEQ ID NO 64934
  misc_feature (1)..(810): Ortholog of  Ceres SEQ ID NO 12617639 as cited in SEQ ID NO 65219
acatctcactgctcactactctcactgtaatcccttagatcttcttttcaaatttcaatggcgtccggtgatgttgagtatcggtgcttcgttggaggtctagcatgggccactgatgacagagctcttgagactgccttcgctcaatacggcgacgttattgattccaagatcattaacgatcgtgagactggaagatcaaggggattcggattcgtcaccttcaaggatgagaaagccatgaaggatgcgattgagggaatgaacggacaagatctcgatggccgtagcatcactgttaacgaggctcagtcacgaggaagcggtggcggcggaggccaccgtggaggtggtggcggtggataccgcagcggcggtggtggaggttactccggtggaggtggtagctacggaggtggcggcggtagacgcgagggtggaggaggatacagcggcggcggcggttactcctcaagaggtggtggtggcggaagctacggtggtggaagacgtgagggaggaggaggatacggtggtggtgaaggaggaggttacggaggaagcggtggtggtggaggatggtaattcctttaattaggtttgggattaccaatgaatgttctctctctcgcttgttatgcttctacttggttttgtgtgttctctattttgttctggttctgctttagatttgatgtaacagttcgtgattaggtattttggtatctggaaacgtaatgttaagtcacttgtcattctctaaataacaaatttcttcggagatattatctctgttgattgattctatcc

SEQ ID NO: 29375 - protein, 175 aa, Arabidopsis thaliana; identical to SEQ ID NO: 27778
  peptide (1)..(175): Ceres Seq. ID no. 13653786

SEQ ID NO: 29376 - protein, 114 aa, Arabidopsis thaliana; identical to SEQ ID NO: 27779
  peptide (1)..(114): Ceres Seq. ID no. 13653787

SEQ ID NO: 29377 - protein, 107 aa, Arabidopsis thaliana; identical to SEQ ID NO: 27780
  peptide (1)..(107): Ceres Seq. ID no. 13653788

SEQ ID NO: 29378 - DNA, 1231 bp, Arabidopsis thaliana
  misc_feature (1)..(1231): Ceres Seq. ID no. 12391651
  misc_feature (1)..(1231): Ortholog of  Ceres SEQ ID NO 15174780 as cited in SEQ ID NO 53528
gattctcaccgcctggaaataaacaaatcgtcgttgttctcgtctaacgcttgtgcaatggcagatagttcgtcgaggaggaaccttaaacgatccttcttagaagatgaagattccgataaacaacctcccgaaaagcgagtacggtttccaaaggggaagaagtcgaaacctgaacagctcttagaggaagaagctttagcccgccgcaaagcccgtgatgctgctaaggagcgtgcaaagattcgcaatcagaatactactaagctctttatcgaagatgacagtgatgatattaatcaggctcaggagacttatgaggatgatggcaatcgcacagaagatgggatccagattgaagcttttagtctggacagagagaaagaagaaggttactttgatgctgatgggaactttgtagaatatgttagagaaaaggaagtcaaggatgcatggcttgacagtattgaaaaaaatccaatgtatatgggacgatctgctgcaaatgatactgagatggatgatgatagtgggaacgaaaaagcaggggatgacctttctcaagatgaaatcggagttagaaagaggcgcattgctaatgtccttgaaccaggagaaacggtcttgcgagctttaaggaggttgaaagggaattcgaataatcgcaaggagaagatgacatctgagaccaagcttatctttgatcagcttactgaggatgcggacaagcttatcgagaacggcgactacaatgtttatcatgaggagcaagaagttttccaacgtgaagcagaaggatatgagagactagctcaagcgaaagaaaatgggactgccaatatagtatcttgtgatatgtttggcgatgatgagaatgctcctgaaccttcctctgatctacaaccgtctagctccatctcgggcactcagcttaattctgattatgtgtttgatgaatcttcagggtactactacagcagcagccttggttactattatgacccgaacactggactttactgctacgcaacaaccggaaaatggtacaggtacgatgaagagactaaggaatataaagaggtggtttctgaagttgctactgaagaagtttaattttcgtttgtctgtacttttgactaacacagggtcttgaaatatttcccttgttgtttttagtttgaaagtaagcacatcatacatgagtttatataaatatatttggatttattgg

SEQ ID NO: 29379 - protein, 370 aa, Arabidopsis thaliana
  peptide (1)..(370): Ceres Seq. ID no. 12391652
DSHRLEINKSSLFSSNACAMADSSSRRNLKRSFLEDEDSDKQPPEKRVRFPKGKKSKPEQLLEEEALARRKARDAAKERAKIRNQNTTKLFIEDDSDDINQAQETYEDDGNRTEDGIQIEAFSLDREKEEGYFDADGNFVEYVREKEVKDAWLDSIEKNPMYMGRSAANDTEMDDDSGNEKAGDDLSQDEIGVRKRRIANVLEPGETVLRALRRLKGNSNNRKEKMTSETKLIFDQLTEDADKLIENGDYNVYHEEQEVFQREAEGYERLAQAKENGTANIVSCDMFGDDENAPEPSSDLQPSSSISGTQLNSDYVFDESSGYYYSSSLGYYYDPNTGLYCYATTGKWYRYDEETKEYKEVVSEVATEEV

SEQ ID NO: 29380 - protein, 351 aa, Arabidopsis thaliana
  peptide (1)..(351): Ceres Seq. ID no. 12391653
MADSSSRRNLKRSFLEDEDSDKQPPEKRVRFPKGKKSKPEQLLEEEALARRKARDAAKERAKIRNQNTTKLFIEDDSDDINQAQETYEDDGNRTEDGIQIEAFSLDREKEEGYFDADGNFVEYVREKEVKDAWLDSIEKNPMYMGRSAANDTEMDDDSGNEKAGDDLSQDEIGVRKRRIANVLEPGETVLRALRRLKGNSNNRKEKMTSETKLIFDQLTEDADKLIENGDYNVYHEEQEVFQREAEGYERLAQAKENGTANIVSCDMFGDDENAPEPSSDLQPSSSISGTQLNSDYVFDESSGYYYSSSLGYYYDPNTGLYCYATTGKWYRYDEETKEYKEVVSEVATEEV

SEQ ID NO: 29381 - protein, 210 aa, Arabidopsis thaliana
  peptide (1)..(210): Ceres Seq. ID no. 12391654
MYMGRSAANDTEMDDDSGNEKAGDDLSQDEIGVRKRRIANVLEPGETVLRALRRLKGNSNNRKEKMTSETKLIFDQLTEDADKLIENGDYNVYHEEQEVFQREAEGYERLAQAKENGTANIVSCDMFGDDENAPEPSSDLQPSSSISGTQLNSDYVFDESSGYYYSSSLGYYYDPNTGLYCYATTGKWYRYDEETKEYKEVVSEVATEEV

SEQ ID NO: 29382 - DNA, 1350 bp, Arabidopsis thaliana
  misc_feature (1)..(1350): Ceres Seq. ID no. 13490555
  misc_feature (1)..(1350): Ortholog of  Ceres SEQ ID NO 13594037 as cited in SEQ ID NO 55666
  misc_feature (1)..(1350): Ortholog of  Ceres SEQ ID NO 13657707 as cited in SEQ ID NO 66407
aaaagaaaagtagaaaccccaagaaaaaataaaaaaaataatgggtcatcgaacaagaatgatccttgtcctaaccctagttgtaatgtccatatggggttcggacgcatcagcaatgcaaaagacgaaattcgacgccccacttttgactgaaaaaatcgcgacaaatagatcgataattgtagatatcgaaggcaaaggagactacacttcggttcagaaagccatcgatgctgtccctgttggtaactctaattggattattgtccatgtccgtaaaggaatctacaaggagagagtgcacattccggagaacaagccgttcatattcatgaggggtaatggaaaaggaaaaacggtgatcgaatcttcgcaaagttcggtcgacaatgttgcttcagctactttcaaagtcgaggctaatcactttgtcgcttttggtatcagcatccgaaatgatgcacctgtcggaatggcattcacatctgagaaccaatcggtggcagcgtttgtggctgctgacaaagtagcgttttaccattgtgcgttctacagcttacacaacactttgtttgataacaaaggtagacattactaccatgagtgttacatccaaggctccatagacttcatcttcggtcgcgcaacttccattttcaacaattgtgagatatttgtgatatcagacaagagggtgaaaccgtatgggtcaatcacagcacaccatagggaaagcgcagaggaaaaaacgggttacgtgttcataagaggcaaagtgtacggaattgatgaggtttacttgggccgagccaaaggaccttattctcgagtcatctttgccaagacttacttgtccaagaccgttgtgcctgatggttggacaaactggagttaccatggctcgacccagaatctataccatggggagtataaatgtcatggaccaggagctgagaggcaaaagagatctgactgggccaaagatcttaccaaacaagaagttgagtctttcttgtccattgattttattgatggcacttcttggctccctgtttggcttcaggaaaagttttagagttccttatgctgtcgcgtttggcttttgacatttcgcgttttggtgtggcttggaaaaaaaacatatgaagaaagaagagtacttcatcctttcttcgacggtatactatacgaaatagttttctctcttttttttttgtgtacttctactctaaaatgttcttagagtgattggaaactcttatgttgtttgcaaacattatataagattgtttccatcttaataatatatgtaacctaaatttaaatcctataaatttaaaatattttccc

SEQ ID NO: 29383 - protein, 344 aa, Arabidopsis thaliana
  peptide (1)..(344): Ceres Seq. ID no. 13490556
MGHRTRMILVLTLVVMSIWGSDASAMQKTKFDAPLLTEKIATNRSIIVDIEGKGDYTSVQKAIDAVPVGNSNWIIVHVRKGIYKERVHIPENKPFIFMRGNGKGKTVIESSQSSVDNVASATFKVEANHFVAFGISIRNDAPVGMAFTSENQSVAAFVAADKVAFYHCAFYSLHNTLFDNKGRHYYHECYIQGSIDFIFGRATSIFNNCEIFVISDKRVKPYGSITAHHRESAEEKTGYVFIRGKVYGIDEVYLGRAKGPYSRVIFAKTYLSKTVVPDGWTNWSYHGSTQNLYHGEYKCHGPGAERQKRSDWAKDLTKQEVESFLSIDFIDGTSWLPVWLQEKF

SEQ ID NO: 29384 - protein, 338 aa, Arabidopsis thaliana
  peptide (1)..(338): Ceres Seq. ID no. 13490557
MILVLTLVVMSIWGSDASAMQKTKFDAPLLTEKIATNRSIIVDIEGKGDYTSVQKAIDAVPVGNSNWIIVHVRKGIYKERVHIPENKPFIFMRGNGKGKTVIESSQSSVDNVASATFKVEANHFVAFGISIRNDAPVGMAFTSENQSVAAFVAADKVAFYHCAFYSLHNTLFDNKGRHYYHECYIQGSIDFIFGRATSIFNNCEIFVISDKRVKPYGSITAHHRESAEEKTGYVFIRGKVYGIDEVYLGRAKGPYSRVIFAKTYLSKTVVPDGWTNWSYHGSTQNLYHGEYKCHGPGAERQKRSDWAKDLTKQEVESFLSIDFIDGTSWLPVWLQEKF

SEQ ID NO: 29385 - protein, 329 aa, Arabidopsis thaliana
  peptide (1)..(329): Ceres Seq. ID no. 13490558
MSIWGSDASAMQKTKFDAPLLTEKIATNRSIIVDIEGKGDYTSVQKAIDAVPVGNSNWIIVHVRKGIYKERVHIPENKPFIFMRGNGKGKTVIESSQSSVDNVASATFKVEANHFVAFGISIRNDAPVGMAFTSENQSVAAFVAADKVAFYHCAFYSLHNTLFDNKGRHYYHECYIQGSIDFIFGRATSIFNNCEIFVISDKRVKPYGSITAHHRESAEEKTGYVFIRGKVYGIDEVYLGRAKGPYSRVIFAKTYLSKTVVPDGWTNWSYHGSTQNLYHGEYKCHGPGAERQKRSDWAKDLTKQEVESFLSIDFIDGTSWLPVWLQEKF

SEQ ID NO: 29386 - DNA, 1135 bp, Arabidopsis thaliana
  misc_feature (1)..(1135): Ceres Seq. ID no. 12422074
  misc_feature (1)..(1135): Ortholog of  Ceres SEQ ID NO 13593855 as cited in SEQ ID NO 53838
  misc_feature (1)..(1135): Ortholog of  Ceres SEQ ID NO 14302247 as cited in SEQ ID NO 62154
  misc_feature (1)..(1135): Ortholog of  Ceres SEQ ID NO 13539874 as cited in SEQ ID NO 64069
aaaggaaggtgttaccggatttaggagagataaagaaggtttcttcatttagaaacagagacacgaagtttgcgatgatgatgatgattcagagaagaggaggtgagagacaagactcgtcggcggcggcgtacaacgttgtccataagttgcctcacggagacagtccttatgtccgagcgaagcatgttcagttggtggagaaagatgcagaagcagcgatagagttgttttggatagcgattaaagcgagagatagagttgatagtgctcttaaagacatggccttgttaatgaaacaacagaacagagctgaagaagccattgacgctattcaatcctttagagatctttgttcaagacaagctcaagagtcattagacaatgtcctcatcgatctatataagaaatgtgggagaatagaagagcaagttgagttattgaagcaaaagctttggatgatatatcaaggagaagcattcaatggcaaaccaacaaagactgcgagatctcatggcaagaagtttcaggtcaccgtcgagaaggaaacctctaggatcttggggaacttgggatgggcttatatgcaactaatggactatacagcagctgaagctgtgtatcggaaagctcaattgatagagccagatgcaaacaaggcttgcaatttatgcacatgtctcatcaagcaagggaagcacgatgaggcgaggtcgattctctttcgtgatgtactaatggagaacaaagaagggtctggtgatccgaggttgatggctcgggttcaagagctattgagtgagctaaagccacaggaagaagaagcagcggcttctgtgtctgtggaatgtgaagttggtatagatgagatagcggttgtcgaaggacttgatgagtttgtgaaggaatggaggaggccttataggacaagaagacttccgattttcgaagagatcttaccactgagagatcaattggcttgttgatgattctctgtgtgtttggattgatgtttgaatactgaataggaacctttttgggtagaagaatgtagtgagtgaatagagtttacctcttgtaagctttttcgggtgtcgttgtctgttattaccgcaatgtcaaatgatctcattcc

SEQ ID NO: 29387 - protein, 327 aa, Arabidopsis thaliana
  peptide (1)..(327): Ceres Seq. ID no. 12422075
RKVLPDLGEIKKVSSFRNRDTKFAMMMMIQRRGGERQDSSAAAYNVVHKLPHGDSPYVRAKHVQLVEKDAEAAIELFWIAIKARDRVDSALKDMALLMKQQNRAEEAIDAIQSFRDLCSRQAQESLDNVLIDLYKKCGRIEEQVELLKQKLWMIYQGEAFNGKPTKTARSHGKKFQVTVEKETSRILGNLGWAYMQLMDYTAAEAVYRKAQLIEPDANKACNLCTCLIKQGKHDEARSILFRDVLMENKEGSGDPRLMARVQELLSELKPQEEEAAASVSVECEVGIDEIAVVEGLDEFVKEWRRPYRTRRLPIFEEILPLRDQLAC

SEQ ID NO: 29388 - protein, 303 aa, Arabidopsis thaliana
  peptide (1)..(303): Ceres Seq. ID no. 12422076
MMMMIQRRGGERQDSSAAAYNVVHKLPHGDSPYVRAKHVQLVEKDAEAAIELFWIAIKARDRVDSALKDMALLMKQQNRAEEAIDAIQSFRDLCSRQAQESLDNVLIDLYKKCGRIEEQVELLKQKLWMIYQGEAFNGKPTKTARSHGKKFQVTVEKETSRILGNLGWAYMQLMDYTAAEAVYRKAQLIEPDANKACNLCTCLIKQGKHDEARSILFRDVLMENKEGSGDPRLMARVQELLSELKPQEEEAAASVSVECEVGIDEIAVVEGLDEFVKEWRRPYRTRRLPIFEEILPLRDQLAC

SEQ ID NO: 29389 - protein, 302 aa, Arabidopsis thaliana
  peptide (1)..(302): Ceres Seq. ID no. 12422077
MMMIQRRGGERQDSSAAAYNVVHKLPHGDSPYVRAKHVQLVEKDAEAAIELFWIAIKARDRVDSALKDMALLMKQQNRAEEAIDAIQSFRDLCSRQAQESLDNVLIDLYKKCGRIEEQVELLKQKLWMIYQGEAFNGKPTKTARSHGKKFQVTVEKETSRILGNLGWAYMQLMDYTAAEAVYRKAQLIEPDANKACNLCTCLIKQGKHDEARSILFRDVLMENKEGSGDPRLMARVQELLSELKPQEEEAAASVSVECEVGIDEIAVVEGLDEFVKEWRRPYRTRRLPIFEEILPLRDQLAC

SEQ ID NO: 29390 - DNA, 942 bp, Arabidopsis thaliana
  misc_feature (1)..(942): Ceres Seq. ID no. 12384618
  misc_feature (1)..(942): Ortholog of  Ceres SEQ ID NO 13585342 as cited in SEQ ID NO 63601
  misc_feature (1)..(942): Ortholog of  Ceres SEQ ID NO 15177459 as cited in SEQ ID NO 0
ttacttttttttcttcttttcttgacgtgtctttataatttttttgcaggatgtaattgaggagcttgggatatactttgtgttctacgatagagcaggatatggagaaagtgatccacacccatcacgcactgttaagagtgaagcatacgacattcaagaactcgccgataaactcatatcggaccaaagttctacgttcttggtatatcactcggtgcttactcggtttatagttgcctcaaatacattccccacagactagctggagcagtcttaatggttccatttgtgaactattggtggactaaagtgcctcaagaaaaattgagtaaagcgttggagctaatgccaaagaaagaccaatggacgtttaaagtggctcattatgttccgtggttgttatattggtggttgacccaaaaactatttccgtcttcgagtatgatcacggggaacagtgcgttatgcagcgacaaagatttggtcgtcataaagaagaaaatggagaatccacgccctggctttgggaaaaagttagacaacaaggtgaccatgaatgtcttcaccgggacatgatagccggattcgcgacatgggaattcgacccgactgaattagaaaatccgtttgcggaaggcgaaggatcggtccacgtttggcaagggatggaagacagaatcattccatacgaaattaatcgatatatatcagagaagcttccatggattaagtaccatgaggtcttaggttatggacatcttctaaacgccgaggaggagaaatgcaaagacattatcaaggcacttcttgtcaactgatgatcatctctacacaagatgccacaaaaaaatatagcatatttaatagattttattttttatttatggattataatattatagcatattataagtttgtaagtaagatgaaaaccacttg

SEQ ID NO: 29391 - protein, 117 aa, Arabidopsis thaliana
  peptide (1)..(117): Ceres Seq. ID no. 12384619
MQRQRFGRHKEENGESTPWLWEKVRQQGDHECLHRDMIAGFATWEFDPTELENPFAEGEGSVHVWQGMEDRIIPYEINRYISEKLPWIKYHEVLGYGHLLNAEEEKCKDIIKALLVN

SEQ ID NO: 29392 - protein, 99 aa, Arabidopsis thaliana
  peptide (1)..(99): Ceres Seq. ID no. 12384620
MVPFVNYWWTKVPQEKLSKALELMPKKDQWTFKVAHYVPWLLYWWLTQKLFPSSSMITGNSALCSDKDLVVIKKKMENPRPGFGKKLDNKVTMNVFTGT

SEQ ID NO: 29393 - protein, 81 aa, Arabidopsis thaliana
  peptide (1)..(81): Ceres Seq. ID no. 12384621
MIAGFATWEFDPTELENPFAEGEGSVHVWQGMEDRIIPYEINRYISEKLPWIKYHEVLGYGHLLNAEEEKCKDIIKALLVN

SEQ ID NO: 29394 - DNA, 1416 bp, Arabidopsis thaliana; identical to SEQ ID NO: 28614
  misc_feature (1)..(1416): Ceres Seq. ID no. 13487514
  misc_feature (1)..(1416): Ortholog of  Ceres SEQ ID NO 12617323 as cited in SEQ ID NO 64129

SEQ ID NO: 29395 - protein, 373 aa, Arabidopsis thaliana; identical to SEQ ID NO: 28615
  peptide (1)..(373): Ceres Seq. ID no. 13487515

SEQ ID NO: 29396 - protein, 289 aa, Arabidopsis thaliana; identical to SEQ ID NO: 28616
  peptide (1)..(289): Ceres Seq. ID no. 13487516

SEQ ID NO: 29397 - protein, 209 aa, Arabidopsis thaliana; identical to SEQ ID NO: 28617
  peptide (1)..(209): Ceres Seq. ID no. 13487517

SEQ ID NO: 29398 - DNA, 965 bp, Arabidopsis thaliana
  misc_feature (1)..(965): Ceres Seq. ID no. 12782031
  misc_feature (1)..(965): Ortholog of  Ceres SEQ ID NO 13599287 as cited in SEQ ID NO 338
  misc_feature (1)..(965): Ortholog of  Ceres SEQ ID NO 15172934 as cited in SEQ ID NO 51783
  misc_feature (1)..(965): Ortholog of  Ceres SEQ ID NO 15174056 as cited in SEQ ID NO 0
atctctcggtttcactattgaacgtgtaacactggtcgaaagaagacgaacataaactcgtctccggtaaccaaaaatggtttccatgactacttcatcttcttcgtacggaacattctctacagtcttcaacagttctagacctaattcctcagcaacctttctcgtcccttccttgaaattctccaccggaatatcgaatttcgcgaatctgagtaatgggttttctctaaaatctccaattaatcctgggtttctcttcaagtctcgtcctttcactgtccaagctagagctgctgcagaaaaaaccgttcacgatttcaccgttaaggacattgatgggaaggatgttgctttgaacaaattcaaggggaaagttatgttgattgtcaatgttgcttcaagatgtggtttgacatcatcaaattactcagagctttcacatctgtacgagaaatacaaaactcaaggatttgagattctagcttttccctgcaatcagtttggtttccaagagcccgggtcaaactccgagatcaaacaattcgcttgcacccggtttaaagcagagttccctatatttgataaggttgacgtgaatggaccaagcacagcgccgatctacgagttcttgaaatcaaacgcaggaggattcttgggtggtctcattaaatggaactttgagaagttcttgattgataaaaagggaaaggtcgttgagaggtaccctcccaccacatcccctttccaaatcgagaaagacatccagaagttgcttgccgcttaaaaacttttgctcatgagtgagcatatagagactgatggttaaagtaaccgtaaattgtgacataaagtttccggttattgcttgtataccttcttacattctaagttgtactaatcgcttaataatttgcgtataatggtaatgttatatacattatattataaaaatggtgttatat

SEQ ID NO: 29399 - protein, 236 aa, Arabidopsis thaliana
  peptide (1)..(236): Ceres Seq. ID no. 12782032
MVSMTTSSSSYGTFSTVFNSSRPNSSATFLVPSLKFSTGISNFANLSNGFSLKSPINPGFLFKSRPFTVQARAAAEKTVHDFTVKDIDGKDVALNKFKGKVMLIVNVASRCGLTSSNYSELSHLYEKYKTQGFEILAFPCNQFGFQEPGSNSEIKQFACTRFKAEFPIFDKVDVNGPSTAPIYEFLKSNAGGFLGGLIKWNFEKFLIDKKGKVVERYPPTTSPFQIEKDIQKLLAA

SEQ ID NO: 29400 - protein, 233 aa, Arabidopsis thaliana
  peptide (1)..(233): Ceres Seq. ID no. 12782033
MTTSSSSYGTFSTVFNSSRPNSSATFLVPSLKFSTGISNFANLSNGFSLKSPINPGFLFKSRPFTVQARAAAEKTVHDFTVKDIDGKDVALNKFKGKVMLIVNVASRCGLTSSNYSELSHLYEKYKTQGFEILAFPCNQFGFQEPGSNSEIKQFACTRFKAEFPIFDKVDVNGPSTAPIYEFLKSNAGGFLGGLIKWNFEKFLIDKKGKVVERYPPTTSPFQIEKDIQKLLAA

SEQ ID NO: 29401 - protein, 135 aa, Arabidopsis thaliana
  peptide (1)..(135): Ceres Seq. ID no. 12782034
MLIVNVASRCGLTSSNYSELSHLYEKYKTQGFEILAFPCNQFGFQEPGSNSEIKQFACTRFKAEFPIFDKVDVNGPSTAPIYEFLKSNAGGFLGGLIKWNFEKFLIDKKGKVVERYPPTTSPFQIEKDIQKLLAA

SEQ ID NO: 29402 - DNA, 976 bp, Arabidopsis thaliana
  misc_feature (1)..(976): Ceres Seq. ID no. 12369947
  misc_feature (1)..(976): Ortholog of  Ceres SEQ ID NO 13594180 as cited in SEQ ID NO 60353
aagcaccacatgttcagattttttcctaacaagaagaaaagaagtcgcagtttcatcgtctttcttccattatcgtgcaattaaattctctcattttcaagaaaatatctgaaaagacagaaacttaacagaagcagcttcgatcaagagatggcttcacttacttcaatagccacgccttacccatcttcatcgcaggctttgcgtctgaaatcctccggaaacactcttttctctgccggagttcgatcggcagcaatggtttccggtcacaaaacgcttaagattcaatgcacttcaaccaaacctgccaaacctgcagctgaagtcgattggagacagaagagagagcttctattggagaaaagggtgagaagtgtggacgtgaaggaagctcaacggttacaaaaagaaaacaactttgtgattcttgatgtaagaccagaggcagagtacaaggcgggtcatcctccgggagctatcaatgtggagatgtacagactcataagggaatggacggcatgggacatagctcgccgtcttggctttgctttctttggtatcttctctggcacagaagagaaccctgagtttattcaaagtgtagaagctaaacttgacaaagaggcaaagatcatagtagcttgttcatccgcgggtacaatgaagccgacacaaaatcttcccgaaggccaacaatcgaggtctctcatagctgcttatcttctggtccttaacggctataagaacgtatttcacctagaaggtggaatctacacatggggcaaggaaggtcttcctgttgaaacaattgaagaagactaaccaacttctttactctagagttgtccagttttgtatatctgtccatttcagttagttgcatttagagatttggcttttcagagagtgttttgaggtttgtaaaacttcagactttaccatgaaatccagcaaactcgaccggaatccaagg

SEQ ID NO: 29403 - protein, 224 aa, Arabidopsis thaliana
  peptide (1)..(224): Ceres Seq. ID no. 12369948
MASLTSIATPYPSSSQALRLKSSGNTLFSAGVRSAAMVSGHKTLKIQCTSTKPAKPAAEVDWRQKRELLLEKRVRSVDVKEAQRLQKENNFVILDVRPEAEYKAGHPPGAINVEMYRLIREWTAWDIARRLGFAFFGIFSGTEENPEFIQSVEAKLDKEAKIIVACSSAGTMKPTQNLPEGQQSRSLIAAYLLVLNGYKNVFHLEGGIYTWGKEGLPVETIEED

SEQ ID NO: 29404 - protein, 188 aa, Arabidopsis thaliana
  peptide (1)..(188): Ceres Seq. ID no. 12369949
MVSGHKTLKIQCTSTKPAKPAAEVDWRQKRELLLEKRVRSVDVKEAQRLQKENNFVILDVRPEAEYKAGHPPGAINVEMYRLIREWTAWDIARRLGFAFFGIFSGTEENPEFIQSVEAKLDKEAKIIVACSSAGTMKPTQNLPEGQQSRSLIAAYLLVLNGYKNVFHLEGGIYTWGKEGLPVETIEED

SEQ ID NO: 29405 - DNA, 1740 bp, Arabidopsis thaliana
  misc_feature (1)..(1740): Ceres Seq. ID no. 13488118
  misc_feature (1)..(1740): Ortholog of  Ceres SEQ ID NO 13639663 as cited in SEQ ID NO 57850
atcttctacacagttctgaagcaacaaaacagggttttggctagggttttaactttggctgctctgtctcaatccctcgagacttaaacccacttagtacaatctccatataatttgagtagaacctaaaagatcgaagcttgaggaaaatggtcccttccaatggcgcaaaggttcttcgcttgttgagtcgtcgatgtctctcttcatcgcttattcaagatttagccaatcagaaactgagaggagtatgtattgggagttataggagattgaatacgagtgttggcaatcatgctaacgtgattggagattacgcttcaaaatctggacatgatcggaaatggatcaactttggaggttttaatactaattttggttctacaaggtcttttcatggaacaggttcttcgtttatgtctgctaaggactactatagtgttcttggagtgagtaagaatgctcaagaaggtgaaatcaagaaggcttattatgggcttgctaagaaactccatcctgatatgaataaagatgatccagaagctgagacgaagttccaggaagtctcaaaagcatatgaaattttgaaagataaggagaagcgtgacctttatgaccaggttggtcatgaagcatttgagcaaaatgctagtggtggatttccaaatgatcaaggcttcggtggtggtggtggtggtgggtttaacccatttgatatctttgggagcttcaatggcgatatttttaacatgtaccggcaagatattggaggtcaagatgtcaaggttttgcttgatctttctttcatggaagctgttcaaggatgctccaaaactgtgacttttcaaaccgagatggcttgtaatacttgtggtggacaaggtgttcctcctggtaccaaacgagagaaatgcaaagcctgtaatggctctgggatgacctcactgaggaggggtatgttaagcatccaaacaacttgccagaagtgtggtggagctggtcaaacgttctcaagtatttgcaaatcctgtagaggggctagagtggttcgaggacagaagtcagtgaaagtcactattgatccaggggttgacaatagtgatacattaaaggtggcaagggtgggtggggctgatcctgaaggtgaccagcctggagatctttatgttactctcaaggttcgtgaagatcctgtgttccgcagagaaggatcggatattcatgtggacgcggttctcagtgttacccaggccattcttggaggaaccattcaagttccaaccctcactggtgatgttgtcgtgaaggtccgtcctggaacccaacctggtcacaaagtagtgctaagaaataaaggaattagagcaagaaagtcgactaaatttggggatcagtatgtgcatttcaacgtcagcatccctgcaaatataacgcagagacagcgtgaactgcttgaggaatttagtaaagcagaacaaggtgaatacgagcagcgcacagcaactggatcttcccagtgaaaaatgcaaatgctgctataagcctaaaaagctattgttgtggctgtatcaatggatatataatcaatcagacaatgattgagattatattgcgtaggattagtggagagtattgtctgggttttacttttaactaattctacaatgctacaagataaaaagaaggaaaagcctgtgctgttattgccttctcaaagttatagaacttttgatacggttc

SEQ ID NO: 29406 - protein, 456 aa, Arabidopsis thaliana
  peptide (1)..(456): Ceres Seq. ID no. 13488119
MVPSNGAKVLRLLSRRCLSSSLIQDLANQKLRGVCIGSYRRLNTSVGNHANVIGDYASKSGHDRKWINFGGFNTNFGSTRSFHGTGSSFMSAKDYYSVLGVSKNAQEGEIKKAYYGLAKKLHPDMNKDDPEAETKFQEVSKAYEILKDKEKRDLYDQVGHEAFEQNASGGFPNDQGFGGGGGGGFNPFDIFGSFNGDIFNMYRQDIGGQDVKVLLDLSFMEAVQGCSKTVTFQTEMACNTCGGQGVPPGTKREKCKACNGSGMTSLRRGMLSIQTTCQKCGGAGQTFSSICKSCRGARVVRGQKSVKVTIDPGVDNSDTLKVARVGGADPEGDQPGDLYVTLKVREDPVFRREGSDIHVDAVLSVTQAILGGTIQVPTLTGDVVVKVRPGTQPGHKVVLRNKGIRARKSTKFGDQYVHFNVSIPANITQRQRELLEEFSKAEQGEYEQRTATGSSQ

SEQ ID NO: 29407 - protein, 367 aa, Arabidopsis thaliana
  peptide (1)..(367): Ceres Seq. ID no. 13488120
MSAKDYYSVLGVSKNAQEGEIKKAYYGLAKKLHPDMNKDDPEAETKFQEVSKAYEILKDKEKRDLYDQVGHEAFEQNASGGFPNDQGFGGGGGGGFNPFDIFGSFNGDIFNMYRQDIGGQDVKVLLDLSFMEAVQGCSKTVTFQTEMACNTCGGQGVPPGTKREKCKACNGSGMTSLRRGMLSIQTTCQKCGGAGQTFSSICKSCRGARVVRGQKSVKVTIDPGVDNSDTLKVARVGGADPEGDQPGDLYVTLKVREDPVFRREGSDIHVDAVLSVTQAILGGTIQVPTLTGDVVVKVRPGTQPGHKVVLRNKGIRARKSTKFGDQYVHFNVSIPANITQRQRELLEEFSKAEQGEYEQRTATGSSQ

SEQ ID NO: 29408 - protein, 332 aa, Arabidopsis thaliana
  peptide (1)..(332): Ceres Seq. ID no. 13488121
MNKDDPEAETKFQEVSKAYEILKDKEKRDLYDQVGHEAFEQNASGGFPNDQGFGGGGGGGFNPFDIFGSFNGDIFNMYRQDIGGQDVKVLLDLSFMEAVQGCSKTVTFQTEMACNTCGGQGVPPGTKREKCKACNGSGMTSLRRGMLSIQTTCQKCGGAGQTFSSICKSCRGARVVRGQKSVKVTIDPGVDNSDTLKVARVGGADPEGDQPGDLYVTLKVREDPVFRREGSDIHVDAVLSVTQAILGGTIQVPTLTGDVVVKVRPGTQPGHKVVLRNKGIRARKSTKFGDQYVHFNVSIPANITQRQRELLEEFSKAEQGEYEQRTATGSSQ

SEQ ID NO: 29409 - DNA, 1189 bp, Arabidopsis thaliana
  misc_feature (1)..(1189): Ceres Seq. ID no. 12325946
  misc_feature (1)..(1189): Ortholog of  Ceres SEQ ID NO 14316451 as cited in SEQ ID NO 57956
  misc_feature (1)..(1189): Ortholog of  Ceres SEQ ID NO 15224799 as cited in SEQ ID NO 0
gagcttctgtaatggctacttggagtggtttcaacgtctcttcttctccgttgcttaggcttcggtcttcctccgtctcaaatgtcactaagcttccgtttctctctcctatttgccggcgtcggttactggcagaacgctttggtctcgcaactgtcgttgttacgcgccaaaacctcacggttactccgtcgtctgcggcggtggaagctcgtatctcagggaaaagagaacctatgacgcctccgtataacatattgatcactggctcaaccaaaggtataggatatgcattagctagagagtttctgaaagcaggcgacaatgttgtgatttgctctagatcagctgaacgagttgagactgctgttcagagtcttaaggaagaatttggggagcatgtgtggggaactaagtgtgatgttacggaagggaaggatgtgagggaacttgtagcttatagtcagaagaatcttaaatacattgacatttggataaataatgcgggatctaatgcatatagctttaaacctttggcagaggcctcagatgaggatcttattgaagttgtgaaaaccaacactctaggtctcatgttatgttgccgagaggcaatgaatatgatgttgacccaatctcgaggtggtcatatcttcaatattgatggagctggttcagatgggagaccaacacccagatttgctgcatatggtgcaactaaacggagtgtcgttcacctgacaaagtcattacaggcagagttgcagatgcaagatgtcaaaaatgtcgtggtgcataatctatcgcctggaatggtcacaactgatctgctcatgtccggagcaactacaaaacaagccaagttcttcattaatgttttggcagagccagccgaagtggtggctgagtaccttgtcccaaacataagggcaataccggctagcggatctatgaagccgacttacatccgtttcctaactggaatcaaagcctacaccaaaatattctcaagagttgcattgggagcaaggaagaacaggtatgttactgaagagtaggtgtcaaactaagtattagaattgtattgctttctcagtttgttcaatggtaaataaaaacctctacattttgttcatgacaactccaaaacatgcaatctattgtacaatttggatttaagctcatttgc

SEQ ID NO: 29410 - protein, 351 aa, Arabidopsis thaliana
  peptide (1)..(351): Ceres Seq. ID no. 12325947
ASVMATWSGFNVSSSPLLRLRSSSVSNVTKLPFLSPICRRRLLAERFGLATVVVTRQNLTVTPSSAAVEARISGKREPMTPPYNILITGSTKGIGYALAREFLKAGDNVVICSRSAERVETAVQSLKEEFGEHVWGTKCDVTEGKDVRELVAYSQKNLKYIDIWINNAGSNAYSFKPLAEASDEDLIEVVKTNTLGLMLCCREAMNMMLTQSRGGHIFNIDGAGSDGRPTPRFAAYGATKRSVVHLTKSLQAELQMQDVKNVVVHNLSPGMVTTDLLMSGATTKQAKFFINVLAEPAEVVAEYLVPNIRAIPASGSMKPTYIRFLTGIKAYTKIFSRVALGARKNRYVTEE

SEQ ID NO: 29411 - protein, 348 aa, Arabidopsis thaliana
  peptide (1)..(348): Ceres Seq. ID no. 12325948
MATWSGFNVSSSPLLRLRSSSVSNVTKLPFLSPICRRRLLAERFGLATVVVTRQNLTVTPSSAAVEARISGKREPMTPPYNILITGSTKGIGYALAREFLKAGDNVVICSRSAERVETAVQSLKEEFGEHVWGTKCDVTEGKDVRELVAYSQKNLKYIDIWINNAGSNAYSFKPLAEASDEDLIEVVKTNTLGLMLCCREAMNMMLTQSRGGHIFNIDGAGSDGRPTPRFAAYGATKRSVVHLTKSLQAELQMQDVKNVVVHNLSPGMVTTDLLMSGATTKQAKFFINVLAEPAEVVAEYLVPNIRAIPASGSMKPTYIRFLTGIKAYTKIFSRVALGARKNRYVTEE

SEQ ID NO: 29412 - protein, 273 aa, Arabidopsis thaliana
  peptide (1)..(273): Ceres Seq. ID no. 12325949
MTPPYNILITGSTKGIGYALAREFLKAGDNVVICSRSAERVETAVQSLKEEFGEHVWGTKCDVTEGKDVRELVAYSQKNLKYIDIWINNAGSNAYSFKPLAEASDEDLIEVVKTNTLGLMLCCREAMNMMLTQSRGGHIFNIDGAGSDGRPTPRFAAYGATKRSVVHLTKSLQAELQMQDVKNVVVHNLSPGMVTTDLLMSGATTKQAKFFINVLAEPAEVVAEYLVPNIRAIPASGSMKPTYIRFLTGIKAYTKIFSRVALGARKNRYVTEE

SEQ ID NO: 29413 - DNA, 1221 bp, Arabidopsis thaliana
  misc_feature (1)..(1221): Ceres Seq. ID no. 12336049
  misc_feature (1)..(1221): Ortholog of  Ceres SEQ ID NO 12607536 as cited in SEQ ID NO 55306
  misc_feature (1)..(1221): Ortholog of  Ceres SEQ ID NO 15168443 as cited in SEQ ID NO 57116
tagctcttcactgaaatctcataaaccctaaatccccaaaatggaataatcaaaatttcatcaggagatctctaaaatcgaaatctacttgatcccgcaacgaagaaatgttaagaagaagactcttgtcgatcatatcaacatcactcatcaattcttcgtttcatcaaaccgcgaaacccagattcatcatttcttcaccacttcttcaatgccgtccttctccgatctctactcaaattccgacctctacgagcagggctttgtcgtttcaaggaatcagggcttatagtttattgagcttgaacgatctgagagacaatgtgccgagaaaactcaagacgaggaaaggaagaggtattgggtctggtaaaggtaaaactgctggaagaggtcacaaggggcaaaaagcgagaggaacgatgaagtttggtttcgaaggtggtcagactccactacgacgtcgtttacccaaacgtggcttcaagaacaaatttaagctccattttcagccggttggtctagggaagattgctaaactcataaacgctgggaagatagattctcatgaattgattacaatgaaaacgctcaaggatgtgggagccataggaaagcaaatagaagatggagtaagactaatgggtcgtggtgctgatgatatcaaatggccacttcatttcgaggtttcgagagtgacggttagggccaaagaggtggtggaagcagcaggaggatcagtgagaagagtgtattacaacaagttgggcttaagggcattgcttaaaccggaatggtttgagaagaaaggaaggttattgccaaaagcagcgcgaccacctcctaaacaacaagataaggttgatagcattggacgtcttccagctccgaaaaaacccattcccttctttgcagctgaggagaccaaagttgaatctcctgttgaatcataattttgggctgccatttaacgtttgatgtttctgtttaagttgtttgtgttgtttcttggtcaatgttcaccactagaaaattgagaatgtcggattttaatttgacaaataaggtctttctcgttttactttatctgtagttggccacaacaagttattcaaccattttcagacttgttgtttgggatcaaggcctgttcttgtagaaggttgagaaaaccagagaacaatcacgttagatttgaattcattattatccggtttggtt

SEQ ID NO: 29414 - protein, 281 aa, Arabidopsis thaliana
  peptide (1)..(281): Ceres Seq. ID no. 12336050
MLRRRLLSIISTSLINSSFHQTAKPRFIISSPLLQCRPSPISTQIPTSTSRALSFQGIRAYSLLSLNDLRDNVPRKLKTRKGRGIGSGKGKTAGRGHKGQKARGTMKFGFEGGQTPLRRRLPKRGFKNKFKLHFQPVGLGKIAKLINAGKIDSHELITMKTLKDVGAIGKQIEDGVRLMGRGADDIKWPLHFEVSRVTVRAKEVVEAAGGSVRRVYYNKLGLRALLKPEWFEKKGRLLPKAARPPPKQQDKVDSIGRLPAPKKPIPFFAAEETKVESPVES

SEQ ID NO: 29415 - protein, 176 aa, Arabidopsis thaliana
  peptide (1)..(176): Ceres Seq. ID no. 12336051
MKFGFEGGQTPLRRRLPKRGFKNKFKLHFQPVGLGKIAKLINAGKIDSHELITMKTLKDVGAIGKQIEDGVRLMGRGADDIKWPLHFEVSRVTVRAKEVVEAAGGSVRRVYYNKLGLRALLKPEWFEKKGRLLPKAARPPPKQQDKVDSIGRLPAPKKPIPFFAAEETKVESPVES

SEQ ID NO: 29416 - DNA, 641 bp, Arabidopsis thaliana
  misc_feature (1)..(641): Ceres Seq. ID no. 13496822
  misc_feature (1)..(641): Ortholog of  Ceres SEQ ID NO 14305967 as cited in SEQ ID NO 1343
attacacacaccaacgttgattcttcttcttcttcttcttctctctttctcatctaaaccaaaaaatggcagatcagctcaccgatgatcagatctctgagttcaaggaagcttttagccttttcgacaaagacggagatggttgcatcacaacgaaagagctaggaacagtgatgagatcattaggtcaaaatccaacagaagcagagttacaagatatgataaacgaagtagatgctgatggtaacggaaccatagacttccctgagtttctgaacctaatggctaggaagatgaaggacactgactctgaagaagagctcaaagaagctttcagggttttcgataaggaccagaacggtttcatctcggcagctgagttaagacatgtaatgacaaatcttggtgagaagttaactgatgaagaagttgatgagatgatcaaagaagctgatgttgatggagatggtcagatcaattatgaagagtttgtcaaagttatgatggcaaagtgaggaaactattctcatatcttttctctctttttctttctttctttttttgaattgaacaactctgattattgctttattctatgtttgactgttcattattatgcattcgtcccaaatttcatgttg

SEQ ID NO: 29417 - protein, 149 aa, Arabidopsis thaliana
  peptide (1)..(149): Ceres Seq. ID no. 13496823
MADQLTDDQISEFKEAFSLFDKDGDGCITTKELGTVMRSLGQNPTEAELQDMINEVDADGNGTIDFPEFLNLMARKMKDTDSEEELKEAFRVFDKDQNGFISAAELRHVMTNLGEKLTDEEVDEMIKEADVDGDGQINYEEFVKVMMAK

SEQ ID NO: 29418 - protein, 113 aa, Arabidopsis thaliana
  peptide (1)..(113): Ceres Seq. ID no. 13496824
MRSLGQNPTEAELQDMINEVDADGNGTIDFPEFLNLMARKMKDTDSEEELKEAFRVFDKDQNGFISAAELRHVMTNLGEKLTDEEVDEMIKEADVDGDGQINYEEFVKVMMAK

SEQ ID NO: 29419 - protein, 98 aa, Arabidopsis thaliana
  peptide (1)..(98): Ceres Seq. ID no. 13496825
MINEVDADGNGTIDFPEFLNLMARKMKDTDSEEELKEAFRVFDKDQNGFISAAELRHVMTNLGEKLTDEEVDEMIKEADVDGDGQINYEEFVKVMMAK

SEQ ID NO: 29420 - DNA, 812 bp, Arabidopsis thaliana
  misc_feature (1)..(812): Ceres Seq. ID no. 12332082
  misc_feature (1)..(812): Ortholog of  Ceres SEQ ID NO 12582856 as cited in SEQ ID NO 51905
  misc_feature (1)..(812): Ortholog of  Ceres SEQ ID NO 14316155 as cited in SEQ ID NO 52377
caatcgattttgtttgttctctgcttttttggtttagggttttagcttttcaaagttaaaaccttttttttcccgaagaagaatcaatacgactcaaatcaatcaattgaatctatggcgatggctatgagacttccagcgatatctagagctgtgacggaagtagcttcagctccggttggtttgagacgactgttctgttcaaatgcttcaaggttctcttttttgtctccacaagctgaatcccaaacaccggctcgtcctcaggctgaacctagcaccaatctcttcgtctccgggcttagtaagcgcaccacttctgaaggactaaggactgcttttgctcagtttggagaagttgctgatgctaaggttgtcacagacagagtatcaggatattccaaagggtttggatttgttagatatgccactttagaagattctgccaaaggcatagctggaatggacgggaagtttcttgacggttgggtcatattcgcagagtatgcaagaccgagagagcaatcacagtcatatcaacctcagaacaacatgtctcgtcctccatactatggtaaccgctagagaaacagttttcttcggttcttatgaatcttttatattcatatttatgcttcattctatcctcttctatgatcgaactgtgttgtgcttcgtctcgtgttattacctttagaagattaaaaacttcaaattatattttgaaggaataatcagaaactgtcatttacaaaaccaaagtattaagtgtaatagttttttaagaggaagaggattttgcttacatggtt

SEQ ID NO: 29421 - protein, 156 aa, Arabidopsis thaliana
  peptide (1)..(156): Ceres Seq. ID no. 12332083
MAMAMRLPAISRAVTEVASAPVGLRRLFCSNASRFSFLSPQAESQTPARPQAEPSTNLFVSGLSKRTTSEGLRTAFAQFGEVADAKVVTDRVSGYSKGFGFVRYATLEDSAKGIAGMDGKFLDGWVIFAEYARPREQSQSYQPQNNMSRPPYYGNR

SEQ ID NO: 29422 - protein, 154 aa, Arabidopsis thaliana
  peptide (1)..(154): Ceres Seq. ID no. 12332084
MAMRLPAISRAVTEVASAPVGLRRLFCSNASRFSFLSPQAESQTPARPQAEPSTNLFVSGLSKRTTSEGLRTAFAQFGEVADAKVVTDRVSGYSKGFGFVRYATLEDSAKGIAGMDGKFLDGWVIFAEYARPREQSQSYQPQNNMSRPPYYGNR

SEQ ID NO: 29423 - protein, 152 aa, Arabidopsis thaliana
  peptide (1)..(152): Ceres Seq. ID no. 12332085
MRLPAISRAVTEVASAPVGLRRLFCSNASRFSFLSPQAESQTPARPQAEPSTNLFVSGLSKRTTSEGLRTAFAQFGEVADAKVVTDRVSGYSKGFGFVRYATLEDSAKGIAGMDGKFLDGWVIFAEYARPREQSQSYQPQNNMSRPPYYGNR

SEQ ID NO: 29424 - DNA, 998 bp, Arabidopsis thaliana
  misc_feature (1)..(998): Ceres Seq. ID no. 12321343
  misc_feature (1)..(998): Ortholog of  Ceres SEQ ID NO 15176208 as cited in SEQ ID NO 55594
  misc_feature (1)..(998): Ortholog of  Ceres SEQ ID NO 14312330 as cited in SEQ ID NO 58581
acaaataacaacaacaatttcgccggcgtcgtcgtcgtcgtctctccatcaccgtctctgctgcattgattcgcagcactgagtcctaaatttccagtgtaaaaaaaaatcagaaaatggacaacttggaagatttgaagattgtggcagagcagtggtctaaacaaggacttgaatttgttcaaaaaataccaccacctcagctttatactgccattggtgttctcttattagctaccatttggctcttatctattcgtttgtttagacgtacaaaatccaatactgtactcctctctgggctaagtggaagtggcaaaacagttctcttctatcaactacgagatggatcttcccatcagggtgctgtaacgtcaatggaaccgaacgaaggcacctttgtgcttcacaatgaaaacaacactaagaaaggaaaagtaaagcctgttcatcttattgatgttcctggacactctcggcttatatctaagctagaagaatacttgcctcgagccgccgctgttgtgtttgtagtagatgcattggagttcctcccaaatatccgggcagcttcagagtacctttacgacattctgaccaatgctagcgttattaagaataagaccccggttctgctttgctgtaacaagacagataaagtaactgcacacaccaaagagttcatccgcaagcagatggagaaagaaatagataaacttagggtttcgaggagcgcaatatcaacagctgatatagcgaatgacttcactcttgggattgaaggagaagtgttttccttttcgcattgccataacaaagtcacggtcgctgaggcgtctggactaacaggagaaacagatcaggtacaagagttcatcagagaacacgtaaagccatgaggattgtgtaagcatctcagagaatgtacttaaatgtcttttcatttgtttgtaaatgaaattataatttgagaacttagatgatattcgttggaaggc

SEQ ID NO: 29425 - protein, 260 aa, Arabidopsis thaliana
  peptide (1)..(260): Ceres Seq. ID no. 12321344
MDNLEDLKIVAEQWSKQGLEFVQKIPPPQLYTAIGVLLLATIWLLSIRLFRRTKSNTVLLSGLSGSGKTVLFYQLRDGSSHQGAVTSMEPNEGTFVLHNENNTKKGKVKPVHLIDVPGHSRLISKLEEYLPRAAAVVFVVDALEFLPNIRAASEYLYDILTNASVIKNKTPVLLCCNKTDKVTAHTKEFIRKQMEKEIDKLRVSRSAISTADIANDFTLGIEGEVFSFSHCHNKVTVAEASGLTGETDQVQEFIREHVKP

SEQ ID NO: 29426 - protein, 173 aa, Arabidopsis thaliana
  peptide (1)..(173): Ceres Seq. ID no. 12321345
MEPNEGTFVLHNENNTKKGKVKPVHLIDVPGHSRLISKLEEYLPRAAAVVFVVDALEFLPNIRAASEYLYDILTNASVIKNKTPVLLCCNKTDKVTAHTKEFIRKQMEKEIDKLRVSRSAISTADIANDFTLGIEGEVFSFSHCHNKVTVAEASGLTGETDQVQEFIREHVKP

SEQ ID NO: 29427 - DNA, 1133 bp, Arabidopsis thaliana; identical to SEQ ID NO: 29056
  misc_feature (1)..(1133): Ceres Seq. ID no. 12336045
  misc_feature (1)..(1133): Ortholog of  Ceres SEQ ID NO 14315989 as cited in SEQ ID NO 57571

SEQ ID NO: 29428 - protein, 285 aa, Arabidopsis thaliana; identical to SEQ ID NO: 29057
  peptide (1)..(285): Ceres Seq. ID no. 12336046

SEQ ID NO: 29429 - protein, 251 aa, Arabidopsis thaliana; identical to SEQ ID NO: 29058
  peptide (1)..(251): Ceres Seq. ID no. 12336047

SEQ ID NO: 29430 - protein, 235 aa, Arabidopsis thaliana; identical to SEQ ID NO: 29059
  peptide (1)..(235): Ceres Seq. ID no. 12336048

SEQ ID NO: 29431 - DNA, 1311 bp, Arabidopsis thaliana
  misc_feature (1)..(1311): Ceres Seq. ID no. 12580230
  misc_feature (1)..(1311): Ortholog of  Ceres SEQ ID NO 15179926 as cited in SEQ ID NO 57010
ctctcattattttgcttgagccacagatccgtttctcctctcgatttgtcttcttcactcagtttctcgcttgttctgtcaaagatcgaaactttccggcgtctattgtcttcgcactattgcactcgtcttcttcttcgttcttggtgtgaaccgaaactaaattctatctttttgctctacacgatgaacgatcttctgaagggttcgtttgagcttcccagaggtcaatcttctagagaaggagatgttgaactaggggaacaacaaggtggagatcaaggattggaagattttttcaaaaaggttcaagtgattgacaaacagtatgataagctagacaagcttctaaagaaactgcaggcttcccatgaggagtcaaaatctgtgaccaaagctcctgccatgaaggcgataaagaagacaatggaaaaagacgttgatgaagttggaagtattgcccgtttcataaaggggaaactcgaggagttggacagagagaacttggcaaatagacaaaaacctggatgtgcaaaaggatctggtgtggatcgatcaagaacagcaacaacactttccttaaagaagaagttgaaagacaagatggccgagtttcaggttctacgagagaacattcaacaagagtatcgcgatgttgttgataggcgagtttatacagtaactggggagcgggcggatgaagatactattgatgaattgattgaaactggaaacagcgaacagatcttccagaaagcgattcaggagcaaggaagaggacaggtaatggacaccttggcggaaatccaagaacgtcatgatgctgtcagagacttggaaaagaaacttcttgacttacaacaaatattcttggatatggcagttttggttgatgcacaaggagaaatgcttgacaatatagaatctcaggtgtcaagtgcagtagatcacgtgcaatcgggaaacacggcacttcaaagagcaaagagcttgcagaagaactcaagaaaatggatgtgtattgcaattatcatcctcctcattgtggttgcagtgatcgttgttggtgttctcaagccttggaaaaacaagagtgcttgaggaaagaaagaatgtacaaaagaatatcaaatccttattcacggctttgagtgagagtgttttgtttatgatgtgtgtttttttttttaccaagaaacgaaaaaaaaaagaaacaaaattctacattcttttaattggatcaaacaaaccaatttccccttatgattgtgcaatttcacgtggattaaaggaggtacttctaattatttc

SEQ ID NO: 29432 - protein, 366 aa, Arabidopsis thaliana
  peptide (1)..(366): Ceres Seq. ID no. 12580231
LSLFCLSHRSVSPLDLSSSLSFSLVLSKIETFRRLLSSHYCTRLLLRSWCEPKLNSIFLLYTMNDLLKGSFELPRGQSSREGDVELGEQQGGDQGLEDFFKKVQVIDKQYDKLDKLLKKLQASHEESKSVTKAPAMKAIKKTMEKDVDEVGSIARFIKGKLEELDRENLANRQKPGCAKGSGVDRSRTATTLSLKKKLKDKMAEFQVLRENIQQEYRDVVDRRVYTVTGERADEDTIDELIETGNSEQIFQKAIQEQGRGQVMDTLAEIQERHDAVRDLEKKLLDLQQIFLDMAVLVDAQGEMLDNIESQVSSAVDHVQSGNTALQRAKSLQKNSRKWMCIAIIILLIVVAVIVVGVLKPWKNKSA

SEQ ID NO: 29433 - protein, 304 aa, Arabidopsis thaliana
  peptide (1)..(304): Ceres Seq. ID no. 12580232
MNDLLKGSFELPRGQSSREGDVELGEQQGGDQGLEDFFKKVQVIDKQYDKLDKLLKKLQASHEESKSVTKAPAMKAIKKTMEKDVDEVGSIARFIKGKLEELDRENLANRQKPGCAKGSGVDRSRTATTLSLKKKLKDKMAEFQVLRENIQQEYRDVVDRRVYTVTGERADEDTIDELIETGNSEQIFQKAIQEQGRGQVMDTLAEIQERHDAVRDLEKKLLDLQQIFLDMAVLVDAQGEMLDNIESQVSSAVDHVQSGNTALQRAKSLQKNSRKWMCIAIIILLIVVAVIVVGVLKPWKNKSA

SEQ ID NO: 29434 - protein, 231 aa, Arabidopsis thaliana
  peptide (1)..(231): Ceres Seq. ID no. 12580233
MKAIKKTMEKDVDEVGSIARFIKGKLEELDRENLANRQKPGCAKGSGVDRSRTATTLSLKKKLKDKMAEFQVLRENIQQEYRDVVDRRVYTVTGERADEDTIDELIETGNSEQIFQKAIQEQGRGQVMDTLAEIQERHDAVRDLEKKLLDLQQIFLDMAVLVDAQGEMLDNIESQVSSAVDHVQSGNTALQRAKSLQKNSRKWMCIAIIILLIVVAVIVVGVLKPWKNKSA

SEQ ID NO: 29435 - DNA, 1189 bp, Arabidopsis thaliana
  misc_feature (1)..(1189): Ceres Seq. ID no. 12371708
  misc_feature (1)..(1189): Ortholog of  Ceres SEQ ID NO 13582388 as cited in SEQ ID NO 56812
  misc_feature (1)..(1189): Ortholog of  Ceres SEQ ID NO 14305353 as cited in SEQ ID NO 57710
caacataactcttttgcttaagcctcaaaaaattgtcattaacccaatttcccagaaacttcaaaaacagttgggggaagaagaagaagatgaaacgacgaagaacccttttataaagtctcaatcttctaatccaagatctgccctttttcagattctatctcaaagctttcctcgatcttgtgatgtattgaagccggagactgagagagatgttgtgcttcaaaggctcggttaagcggaagaagcaatccggttctgttccggtttatctgaatgtctacgatctaactcctatgaatgcttatggttattggcttggacttggtgtttttcattctggtgttgaagttcatggagttgaatatgcatttggagcacatgaatcatcaagcacaggtatttttgaagtggaaccaaagaagtgtcctggtttcacgtttaggaaatcgattcttgtggggaaaaccgacttggttgcgaaagaagttcgtgtttttatggagaaattagctgaagagtatcaaggaaacaagtaccatctcatcacaaggaactgcaaccatttttgcaatgaagtttgtcttaaacttgctcagaaatcaatccctagatgggtgaatcgacttgctcgcttaggggttctctgcaactgtgtgttaccacctcgtttgaacgaggcaaaagtgagacgagtaggaaaaggagagctttcggaaagtgagaagaagaaactaagaaaccgatcacgatcagatcctttactgtcttcttctccgtcttcatcgacacctgataatcatcgttcacacattcgagcaaaatcaagtggtaatcatccttcttcttcttcttcttcgtcttcgggttctaagaaaaatcgaagacctaaagctcaagaccagaagtcgccaagcgtaagcatcaagacttgattgttatcatcattatttgaacatttaattattgtttatgaaaaggacaaaaagtaaaaagacaagaacagaggaacatgccaagcaaagtatcaatcatatatggggcatgctcgtgctttgttctaaggttattgaaaacctttttgggtgtgtagatcatttttctttgtacaattgcttataggagagagagaggtcatgagtatgtacaaaaagaatatgattcatatatttttctatgttttatctcc

SEQ ID NO: 29436 - protein, 240 aa, Arabidopsis thaliana
  peptide (1)..(240): Ceres Seq. ID no. 12371709
MLCFKGSVKRKKQSGSVPVYLNVYDLTPMNAYGYWLGLGVFHSGVEVHGVEYAFGAHESSSTGIFEVEPKKCPGFTFRKSILVGKTDLVAKEVRVFMEKLAEEYQGNKYHLITRNCNHFCNEVCLKLAQKSIPRWVNRLARLGVLCNCVLPPRLNEAKVRRVGKGELSESEKKKLRNRSRSDPLLSSSPSSSTPDNHRSHIRAKSSGNHPSSSSSSSSGSKKNRRPKAQDQKSPSVSIKT

SEQ ID NO: 29437 - protein, 212 aa, Arabidopsis thaliana
  peptide (1)..(212): Ceres Seq. ID no. 12371710
MNAYGYWLGLGVFHSGVEVHGVEYAFGAHESSSTGIFEVEPKKCPGFTFRKSILVGKTDLVAKEVRVFMEKLAEEYQGNKYHLITRNCNHFCNEVCLKLAQKSIPRWVNRLARLGVLCNCVLPPRLNEAKVRRVGKGELSESEKKKLRNRSRSDPLLSSSPSSSTPDNHRSHIRAKSSGNHPSSSSSSSSGSKKNRRPKAQDQKSPSVSIKT

SEQ ID NO: 29438 - protein, 144 aa, Arabidopsis thaliana
  peptide (1)..(144): Ceres Seq. ID no. 12371711
MEKLAEEYQGNKYHLITRNCNHFCNEVCLKLAQKSIPRWVNRLARLGVLCNCVLPPRLNEAKVRRVGKGELSESEKKKLRNRSRSDPLLSSSPSSSTPDNHRSHIRAKSSGNHPSSSSSSSSGSKKNRRPKAQDQKSPSVSIKT

SEQ ID NO: 29439 - DNA, 1608 bp, Arabidopsis thaliana
  misc_feature (1)..(1608): Ceres Seq. ID no. 13499783
  misc_feature (1)..(1608): Ortholog of  Ceres SEQ ID NO 15174240 as cited in SEQ ID NO 61866
acaattcagatttcaatttctcaaaaatcttaaaaactttctctcaattctctctaccgtgatcaagatgcagattttcgttaagactctcaccggaaagactatcaccctcgaggtggaaagctctgacaccatcgacaacgttaaggccaagatccaggataaggaaggtattcctccggatcagcagaggcttatcttcgccggaaagcagttggaggatggccgcacgttggcggattacaatatccagaaggaatccaccctccacttggttctcaggctccgtggtggtatgcagattttcgttaaaaccctaacgggaaagacgattactcttgaggtggagagctctgacaccattgacaacgtcaaggccaagatccaagataaggagggtattcctccggaccagcagaggttgatcttcgccggaaagcagttggaggatggcagaactcttgctgactacaacatccagaaggagtctacccttcatcttgttctcaggcttcgtggtggtatgcagatctttgtcaagacgttgactggaaaaactatcactttggaggtggagagttctgacaccattgataacgtgaaagccaagatccaggacaaagagggtatcccaccggaccagcagagattgatcttcgctggaaagcaacttgaagatggaagaactttggctgactacaacattcagaaggagtccacacttcacttggtcttgcgtctgcgtggaggtatgcagatcttcgtgaagactctcaccggaaagaccatcactttggaggtagagagctctgacaccattgacaacgtgaaggccaagatccaggataaggaaggtatccctccggaccagcagaggttgatctttgccggaaaacaattggaggacggcagaactttagcggattacaacatccagaaggagtctacccttcacttggtcttgcgtctccgtggaggtatgcagatcttcgttaagactttgaccgggaagaccatcactcttgaagtggagagctctgacaccattgacaacgtgaaggccaagatccaggataaggaaggaatccctccggaccagcagaggttgatctttgccggaaaacaattggaggatggtcgtactttggcggattacaacatccagaaggagtcgacccttcacttggtgttgcgtctgcgtggaggtatgcagatctttgttaagactttgaccggcaagaccataacccttgaagtggagagctccgacaccattgacaacgtgaaggctaagatccaggacaaggaaggtatccctccggaccagcagcgtctcatcttcgctggaaagcagcttgaggatggacgtacattggccgactacaacatccagaaggagtctacccttcacttggtcctccgtcttcgtggaggtttctaaatctcgtctctgttatgctttaagaagttcaatgtctcgtttctgttaaaactttggtggcttgtgtttttgggggccttgtataatcccctgatgaataattgttccaactatgtttccattcctgttatctctttctttctaatgacaagtcgaacgtcttcttt

SEQ ID NO: 29440 - protein, 479 aa, Arabidopsis thaliana
  peptide (1)..(479): Ceres Seq. ID no. 13499784
QFRFQFLKNLKNFLSILSTVIKMQIFVKTLTGKTITLEVESSDTIDNVKAKIQDKEGIPPDQQRLIFAGKQLEDGRTLADYNIQKESTLHLVLRLRGGMQIFVKTLTGKTITLEVESSDTIDNVKAKIQDKEGIPPDQQRLIFAGKQLEDGRTLADYNIQKESTLHLVLRLRGGMQIFVKTLTGKTITLEVESSDTIDNVKAKIQDKEGIPPDQQRLIFAGKQLEDGRTLADYNIQKESTLHLVLRLRGGMQIFVKTLTGKTITLEVESSDTIDNVKAKIQDKEGIPPDQQRLIFAGKQLEDGRTLADYNIQKESTLHLVLRLRGGMQIFVKTLTGKTITLEVESSDTIDNVKAKIQDKEGIPPDQQRLIFAGKQLEDGRTLADYNIQKESTLHLVLRLRGGMQIFVKTLTGKTITLEVESSDTIDNVKAKIQDKEGIPPDQQRLIFAGKQLEDGRTLADYNIQKESTLHLVLRLRGGF

SEQ ID NO: 29441 - protein, 457 aa, Arabidopsis thaliana
  peptide (1)..(457): Ceres Seq. ID no. 13499785
MQIFVKTLTGKTITLEVESSDTIDNVKAKIQDKEGIPPDQQRLIFAGKQLEDGRTLADYNIQKESTLHLVLRLRGGMQIFVKTLTGKTITLEVESSDTIDNVKAKIQDKEGIPPDQQRLIFAGKQLEDGRTLADYNIQKESTLHLVLRLRGGMQIFVKTLTGKTITLEVESSDTIDNVKAKIQDKEGIPPDQQRLIFAGKQLEDGRTLADYNIQKESTLHLVLRLRGGMQIFVKTLTGKTITLEVESSDTIDNVKAKIQDKEGIPPDQQRLIFAGKQLEDGRTLADYNIQKESTLHLVLRLRGGMQIFVKTLTGKTITLEVESSDTIDNVKAKIQDKEGIPPDQQRLIFAGKQLEDGRTLADYNIQKESTLHLVLRLRGGMQIFVKTLTGKTITLEVESSDTIDNVKAKIQDKEGIPPDQQRLIFAGKQLEDGRTLADYNIQKESTLHLVLRLRGGF

SEQ ID NO: 29442 - protein, 381 aa, Arabidopsis thaliana
  peptide (1)..(381): Ceres Seq. ID no. 13499786
MQIFVKTLTGKTITLEVESSDTIDNVKAKIQDKEGIPPDQQRLIFAGKQLEDGRTLADYNIQKESTLHLVLRLRGGMQIFVKTLTGKTITLEVESSDTIDNVKAKIQDKEGIPPDQQRLIFAGKQLEDGRTLADYNIQKESTLHLVLRLRGGMQIFVKTLTGKTITLEVESSDTIDNVKAKIQDKEGIPPDQQRLIFAGKQLEDGRTLADYNIQKESTLHLVLRLRGGMQIFVKTLTGKTITLEVESSDTIDNVKAKIQDKEGIPPDQQRLIFAGKQLEDGRTLADYNIQKESTLHLVLRLRGGMQIFVKTLTGKTITLEVESSDTIDNVKAKIQDKEGIPPDQQRLIFAGKQLEDGRTLADYNIQKESTLHLVLRLRGGF

SEQ ID NO: 29443 - DNA, 1096 bp, Arabidopsis thaliana
  misc_feature (1)..(1096): Ceres Seq. ID no. 12333636
  misc_feature (1)..(1096): Ortholog of  Ceres SEQ ID NO 15168856 as cited in SEQ ID NO 56354
  misc_feature (1)..(1096): Ortholog of  Ceres SEQ ID NO 13583591 as cited in SEQ ID NO 63084
aagctatattcttccttttgatcaaaacacccacacctcttcttcttcttcgcataaaccttaaaaaccatttccacgatcttcttcttcttcttccctcaaatatagcttaggattttcttaatttcctctacccaagctccatggctgctttcaatttcttcctctcttcttaattctctcaggtaggggagatttgagtagtagtagattgttagatttgtaattcagctattggtgaagaggaagggagagagagatgtgttgaattggttgagtttggtggaggaaagaagaagaagaaatgaatgtgagccatgcatcggtacatccagtggaagatcctcctgcagctgcgacggaagtagagaatccgcctcgggtgaggatggatgatatggaaggaatgcctggaacattgcttggtcttgcattgcgtttttttcagttcttgtttgctgctgctgctctttgtgtcatggcttctactagtgattttccttccgttaccgccttctgctacctagttgcagctactggtctgcagagcttgtggagtcttgcactagccatggttgacgtctatgccattatggtcaaacgctctctacagaaccgtcgacttgtgagcttgtttgcaattggtgatggggtgacatcgacgctgacttttgcagcagcttgtgcatcggcaggcataacggttctaatagacaacgatctgaatagctgcgcacaaaaccactgtgttcagtttgaaacatcaacggcattagctttcataagctggttcgctgctttgccttcgtttctcttcaatttctggtctcttgcatcccgttgacacgatactgctcagcaagatgtgttttcatggtgtgtttttcggtgtatagtgactgatttttcttcttctttcttgttttgggtttggaaccaactttcttcaaacccaatacttggaaactgggaattgttttgtagacgacgaccttattcattttgttgtacaatgaaactatctggtcggctttgttgtatgattgaagaaatttcagatgttgaatgcattattatgatatcttgactgaattgc

SEQ ID NO: 29444 - protein, 179 aa, Arabidopsis thaliana
  peptide (1)..(179): Ceres Seq. ID no. 12333637
MNVSHASVHPVEDPPAAATEVENPPRVRMDDMEGMPGTLLGLALRFFQFLFAAAALCVMASTSDFPSVTAFCYLVAATGLQSLWSLALAMVDVYAIMVKRSLQNRRLVSLFAIGDGVTSTLTFAAACASAGITVLIDNDLNSCAQNHCVQFETSTALAFISWFAALPSFLFNFWSLASR

SEQ ID NO: 29445 - protein, 151 aa, Arabidopsis thaliana
  peptide (1)..(151): Ceres Seq. ID no. 12333638
MDDMEGMPGTLLGLALRFFQFLFAAAALCVMASTSDFPSVTAFCYLVAATGLQSLWSLALAMVDVYAIMVKRSLQNRRLVSLFAIGDGVTSTLTFAAACASAGITVLIDNDLNSCAQNHCVQFETSTALAFISWFAALPSFLFNFWSLASR

SEQ ID NO: 29446 - protein, 148 aa, Arabidopsis thaliana
  peptide (1)..(148): Ceres Seq. ID no. 12333639
MEGMPGTLLGLALRFFQFLFAAAALCVMASTSDFPSVTAFCYLVAATGLQSLWSLALAMVDVYAIMVKRSLQNRRLVSLFAIGDGVTSTLTFAAACASAGITVLIDNDLNSCAQNHCVQFETSTALAFISWFAALPSFLFNFWSLASR

SEQ ID NO: 29447 - DNA, 1555 bp, Arabidopsis thaliana
  misc_feature (1)..(1555): Ceres Seq. ID no. 13497190
  misc_feature (1)..(1555): Ortholog of  Ceres SEQ ID NO 15171279 as cited in SEQ ID NO 51378
  misc_feature (1)..(1555): Ortholog of  Ceres SEQ ID NO 13596816 as cited in SEQ ID NO 62287
aacaaaaaaccaaatttggttcctttttcttcttcagacgagtaatatcttttgtcttcatcatgctctattcacctaagaagctgttcttgttcttcctctcgtgcattgtgctgtatgtcaactacaacaacagtggcttcgtaaccgcagcaaatagcatcggcttgaactacggactcctcggtgacaacctctcgtctccttccaatgttatcaacctttacaagtccataggcattagtagaatccgaatcttcgacccgaacactgaggtactcaatgccttacgtggtcaccgcgatattgaagtcactgttggcgttaaggaccaagacttggctgctcttgctgcaagcgaagaagctgttaagggctggttcgcggccaacatcgagtcttacttagctgacgtcaacatcacatttattaccgttgctaacgaagtcatccccggaccaatcggtcctcaagtgcttcccgtcatgcagtctctaaccaacctagtcaagtcgaggaatcttccgatctcgataagcaccgtggtggctatgtcgaacctggagcagtcgtatccaccttccgcgggaatgttcacctcccaggcgcgggaacaacttgttcccgtgttgaaactattgtctcaaacaagcacaccaatccttgtcaacatatacccttacttcgcttatgcgtccgacccagccaacatccgtctcgactatgccagctttaacactaagtccatcgtggtccaagatggatcattgggctattcaaacatgtttgatgcaatctttgatgcgttcgtgtgggcaatggagaaggaaggcgttaaaaatttaccaatggtggtgtccgagaccggatggccatccgcggggaacgggaactttaccacgccggctattgcgtccacctacaacagaaattttgtgaagcatatagcaagcggaaaagggacgcctaaaaggcctaacaagagcatgaacgggtttttgtttgcaacgttcaatgaaaatcagaagccggccgggactgaacaaaactttggtttatacaatccaagtgatatgaagcctatctacaagctattctaagtgtgaaagttacttagactttcccgattcactaataataatgctctactagttgttagtgaattaaagtaagattaacaatgatgcacatgctataagcaactggtgactatgagatgatggctctcgtagcgaacttagttgactttttgtaataaaatctgaatgtagtatttaaaaccaatttcctggttttataaacgaatgtactgcctcttcaataaagtaaggaacctttgcctacggcatcgaatttaatttgaagtcaccagttgacaacgaatgtactggtctggtttgtgcctctccacttaaagtaagttgacaagctaagtgctaagtattctcgttgttactgtataaactattcctaaattatagtttagaggtaatgcttagagcatcataatccatggtttcttaaaaagttaagaaaatctcttaaaatattatat

SEQ ID NO: 29448 - protein, 365 aa, Arabidopsis thaliana
  peptide (1)..(365): Ceres Seq. ID no. 13497191
QKTKFGSFFFFRRVISFVFIMLYSPKKLFLFFLSCIVLYVNYNNSGFVTAANSIGLNYGLLGDNLSSPSNVINLYKSIGISRIRIFDPNTEVLNALRGHRDIEVTVGVKDQDLAALAASEEAVKGWFAANIESYLADVNITFITVANEVIPGPIGPQVLPVMQSLTNLVKSRNLPISISTVVAMSNLEQSYPPSAGMFTSQAREQLVPVLKLLSQTSTPILVNIYPYFAYASDPANIRLDYASFNTKSIVVQDGSLGYSNMFDAIFDAFVWAMEKEGVKNLPMVVSETGWPSAGNGNFTTPAIASTYNRNFVKHIASGKGTPKRPNKSMNGFLFATFNENQKPAGTEQNFGLYNPSDMKPIYKLF

SEQ ID NO: 29449 - protein, 345 aa, Arabidopsis thaliana
  peptide (1)..(345): Ceres Seq. ID no. 13497192
MLYSPKKLFLFFLSCIVLYVNYNNSGFVTAANSIGLNYGLLGDNLSSPSNVINLYKSIGISRIRIFDPNTEVLNALRGHRDIEVTVGVKDQDLAALAASEEAVKGWFAANIESYLADVNITFITVANEVIPGPIGPQVLPVMQSLTNLVKSRNLPISISTVVAMSNLEQSYPPSAGMFTSQAREQLVPVLKLLSQTSTPILVNIYPYFAYASDPANIRLDYASFNTKSIVVQDGSLGYSNMFDAIFDAFVWAMEKEGVKNLPMVVSETGWPSAGNGNFTTPAIASTYNRNFVKHIASGKGTPKRPNKSMNGFLFATFNENQKPAGTEQNFGLYNPSDMKPIYKLF

SEQ ID NO: 29450 - protein, 204 aa, Arabidopsis thaliana
  peptide (1)..(204): Ceres Seq. ID no. 13497193
MQSLTNLVKSRNLPISISTVVAMSNLEQSYPPSAGMFTSQAREQLVPVLKLLSQTSTPILVNIYPYFAYASDPANIRLDYASFNTKSIVVQDGSLGYSNMFDAIFDAFVWAMEKEGVKNLPMVVSETGWPSAGNGNFTTPAIASTYNRNFVKHIASGKGTPKRPNKSMNGFLFATFNENQKPAGTEQNFGLYNPSDMKPIYKLF

SEQ ID NO: 29451 - DNA, 1162 bp, Arabidopsis thaliana
  misc_feature (1)..(1162): Ceres Seq. ID no. 13495779
  misc_feature (1)..(1162): Ortholog of  Ceres SEQ ID NO 14305682 as cited in SEQ ID NO 59267
  misc_feature (1)..(1162): Ortholog of  Ceres SEQ ID NO 13597809 as cited in SEQ ID NO 64598
  misc_feature (1)..(1162): Ortholog of  Ceres SEQ ID NO 14313544 as cited in SEQ ID NO 68424
  misc_feature (1)..(1162): Ortholog of  Ceres SEQ ID NO 12617960 as cited in SEQ ID NO 69051
  misc_feature (1)..(1162): Ortholog of  Ceres SEQ ID NO 13589401 as cited in SEQ ID NO 0
cattacctagaacatcctaatcaaaaaaaatcgaaaaaagctaagatctttgcgttttgaaacgatggcggaagaacataagcatgatgaatctgtgatcgctcctgagccagctgttgaggttgtggagagagaatcgttgatggataagatatcggagaagatccatcacggtggtgattcttcttcgtcttcttcatcttctgatgatgaagacgagaagaagaagactaagaagccctcttctccttcgtcttctatgaaatcgaaagtttaccgcttgttcggacgagagcagcctgttcataaggttctcggcggtggaaagccggctgatatattcatgtggaagaacaagaagatgtctggtggtgtacttggtggtgctacagctgcttgggttgtgtttgaattgatggagtaccatcttctcactctgctttgccacgtgatgattgttgttctcgctgtgctgtttttgtggtctaatgccactatgttcattaacaagtccccaccaaagattcctgaagttcatatccctgaagaacctattcttcagcttgcgtctgggctcaatcgagatcaaccgtggattctcttctctccgtgaaattgcatcaggaagggatctcaagaaattcctcattgctattgccgggttatgggttctctcaatcttgggcggttgcttcaacttcttgacattggcatacatagctcttgtgttgctcttcacggttcctcttgcctacgacaagtatgaagacaaagtcgacccattaggtgagaaagcaatgatcgagctcaagaagcagtatgcagtgttggatgagaaggtgttgagcaagatcccacttgggccgttgaagaacaagaagaaagattaggggtttacacaaggttgtccgtggctagcaaaacgggtgttgtgaaatggtatcgaagtaatgtgttttgggcgtttttttaggtggctctttcggttatgtgaatgaacttggaattttcctgactggtttgttctgttgtttatgtcattgttgatcagcgtcgagggataaaagtagtgatatttcttctctctctaagcctctatataactaagaatttcaagatatttgaattttgcaatctcgtggttaatgttgttctttctctt

SEQ ID NO: 29452 - protein, 182 aa, Arabidopsis thaliana
  peptide (1)..(182): Ceres Seq. ID no. 13495780
MAEEHKHDESVIAPEPAVEVVERESLMDKISEKIHHGGDSSSSSSSSDDEDEKKKTKKPSSPSSSMKSKVYRLFGREQPVHKVLGGGKPADIFMWKNKKMSGGVLGGATAAWVVFELMEYHLLTLLCHVMIVVLAVLFLWSNATMFINKSPPKIPEVHIPEEPILQLASGLNRDQPWILFSP

SEQ ID NO: 29453 - protein, 156 aa, Arabidopsis thaliana
  peptide (1)..(156): Ceres Seq. ID no. 13495781
MDKISEKIHHGGDSSSSSSSSDDEDEKKKTKKPSSPSSSMKSKVYRLFGREQPVHKVLGGGKPADIFMWKNKKMSGGVLGGATAAWVVFELMEYHLLTLLCHVMIVVLAVLFLWSNATMFINKSPPKIPEVHIPEEPILQLASGLNRDQPWILFSP

SEQ ID NO: 29454 - protein, 133 aa, Arabidopsis thaliana
  peptide (1)..(133): Ceres Seq. ID no. 13495782
MPLCSLTSPHQRFLKFISLKNLFFSLRLGSIEINRGFSSLREIASGRDLKKFLIAIAGLWVLSILGGCFNFLTLAYIALVLLFTVPLAYDKYEDKVDPLGEKAMIELKKQYAVLDEKVLSKIPLGPLKNKKKD

SEQ ID NO: 29455 - DNA, 1244 bp, Arabidopsis thaliana
  misc_feature (1)..(1244): Ceres Seq. ID no. 12385291
  misc_feature (1)..(1244): Ortholog of  Ceres SEQ ID NO 15173907 as cited in SEQ ID NO 62356
  misc_feature (1)..(1244): Ortholog of  Ceres SEQ ID NO 13596519 as cited in SEQ ID NO 62572
  misc_feature (1)..(1244): Ortholog of  Ceres SEQ ID NO 12625108 as cited in SEQ ID NO 68102
aaacccaacaacataatttcacatatctctctttctttctcttgaaggaaagacgaagatctccaagtcccaagttgttaacacaagacgtaaacatgggtcatcttgggttcttagttatgattatggtaggagtcatggcttcttctgtgagcggctacggtggcggttggatcaacgctcacgccactttttacggtggtggtgatgcttccggcacaatgggtggtgcttgtggatatggtaatctatatagccaaggctacgggacgagcacggcggctctaagcacagctctcttcaacaatggacttagctgtggttcttgctttgagataagatgtgaaaacgatggtaaatggtgtttacctggctcaatcgttgtaaccgctacaaacttctgcccgccaaataacgcgttagcgaacaataatggcggttggtgtaatcctcctcttgaacactttgaccttgctcagcctgtttttcaacgcattgctcagtacagagctggaatcgtccctgtttcctacagaagggttccttgcaggagaagaggaggaataagattcacgataaacggccactcatacttcaaccttgtgctgatcacaaacgtcggtggtgccggagacgttcactcggcggcgatcaagggttcaagaacagtgtggcaagctatgtcaaggaactgggggcaaaattggcaaagcaactcttacctcaacggtcaagcactttcctttaaggtcaccaccagcgacggccgcacagttgtctccttcaacgccgctcctgccggctggtcttatggccagacttttgccggtggacagttccgttaaaaagggcaagttggttaatctctcttccatttatctaaagtaaactcatttgtgtggttatattggtctcttgaaaaaactcggttattgagagagtgatgcgtcgagggctcggttttgcagaaggccttgatgacgtctaatctttttttggacctctttatttttctttcttgaaactagtttttgttaagaaagaaaaaacaagttatagtagttaatgtattactgatgcagaggtggagttttaactaccacccgctagtagtagttatgagttttttattttaaggtgtgagagagagatggattatcaagatttgtcaattttattatgtttgtttgtaataatacaattctttactccagttaatgaaaattgggggattgatcactttt

SEQ ID NO: 29456 - protein, 280 aa, Arabidopsis thaliana
  peptide (1)..(280): Ceres Seq. ID no. 12385292
TQQHNFTYLSFFLLKERRRSPSPKLLTQDVNMGHLGFLVMIMVGVMASSVSGYGGGWINAHATFYGGGDASGTMGGACGYGNLYSQGYGTSTAALSTALFNNGLSCGSCFEIRCENDGKWCLPGSIVVTATNFCPPNNALANNNGGWCNPPLEHFDLAQPVFQRIAQYRAGIVPVSYRRVPCRRRGGIRFTINGHSYFNLVLITNVGGAGDVHSAAIKGSRTVWQAMSRNWGQNWQSNSYLNGQALSFKVTTSDGRTVVSFNAAPAGWSYGQTFAGGQFR

SEQ ID NO: 29457 - protein, 249 aa, Arabidopsis thaliana; identical to SEQ ID NO: 24224
  peptide (1)..(249): Ceres Seq. ID no. 12385293

SEQ ID NO: 29458 - protein, 241 aa, Arabidopsis thaliana; identical to SEQ ID NO: 24225
  peptide (1)..(241): Ceres Seq. ID no. 12385294

SEQ ID NO: 29459 - DNA, 1151 bp, Arabidopsis thaliana
  misc_feature (1)..(1151): Ceres Seq. ID no. 12327382
  misc_feature (1)..(1151): Ortholog of  Ceres SEQ ID NO 13661504 as cited in SEQ ID NO 61294
  misc_feature (1)..(1151): Ortholog of  Ceres SEQ ID NO 12615311 as cited in SEQ ID NO 62517
  misc_feature (1)..(1151): Ortholog of  Ceres SEQ ID NO 12617197 as cited in SEQ ID NO 63406
  misc_feature (1)..(1151): Ortholog of  Ceres SEQ ID NO 13598597 as cited in SEQ ID NO 65496
  misc_feature (1)..(1151): Ortholog of  Ceres SEQ ID NO 13596227 as cited in SEQ ID NO 68750
  misc_feature (1)..(1151): Ortholog of  Ceres SEQ ID NO 15179068 as cited in SEQ ID NO 0
aaagacccaactaaatatcttcttttctctccatacactttttccagatatttctaatcaacaaaactgatgaatcaagaaaagaccatttcttgttgttgtgttcttgatgcttccacttatgttggtttctggattctcaagagattgctcactagaggttactctgttcacgcagctatccgtaaaaacggggagagtgtgcttgaagagaaaatcagagacatggaagctaacgaagagagattagaggtttatgatgtggatgtgttagattaccaaagtatcctcatttctctcaacaattgtaatgctgtcttctgttgtttggataatcctgaagggtacgatgaggagaaggaagtggatttggaggtgagaggagctattaatgtggtggaagcatgtgcaagaacagagagtatagagaagattgtgttctcatcttcgttaactgctgcaatttggagagataacattggaactcagaaagatgttgatgagaagtgttggagtgatcttgacttctgtctcaaaaaaaagttgtggcatgctcttgcgaagacacagtccgagaaggcagcttgggcattagccatggatcgtatggtcaacatggtttcggttaacccgggcctcatcgttggaccatcagtggctcaacacaacccaagaccgaccatgtcttacctcaaaggagctgcacaaatgtatgagaacggtgtgttagcgtacgtagatgttgaatttgtagcggatgttcacattcgagcattcgaggatacttcggcttgtggtagatacttttgcttcaaccaaattgtgaatacggaagaagaagctctcaagcttgtacaaactctatctcctttaatacatatgccaccaaggcatgagaaagagatgcaaggaagtgaagtttatggagagagattgagaaacaagaaactaaacaagttggtggaagctggatttgcttgttaattacatgaagagagatgttataaattaaagggcaagaaaataacaaagaaattttatagtaagagttgtttgtttacttatttttttaattattgtactctcaattcagtattttatatatctatattttattttattttgaaatgaaaggaaaatatgtgttactc

SEQ ID NO: 29460 - protein, 304 aa, Arabidopsis thaliana
  peptide (1)..(304): Ceres Seq. ID no. 12327383
MNQEKTISCCCVLDASTYVGFWILKRLLTRGYSVHAAIRKNGESVLEEKIRDMEANEERLEVYDVDVLDYQSILISLNNCNAVFCCLDNPEGYDEEKEVDLEVRGAINVVEACARTESIEKIVFSSSLTAAIWRDNIGTQKDVDEKCWSDLDFCLKKKLWHALAKTQSEKAAWALAMDRMVNMVSVNPGLIVGPSVAQHNPRPTMSYLKGAAQMYENGVLAYVDVEFVADVHIRAFEDTSACGRYFCFNQIVNTEEEALKLVQTLSPLIHMPPRHEKEMQGSEVYGERLRNKKLNKLVEAGFAC

SEQ ID NO: 29461 - protein, 252 aa, Arabidopsis thaliana
  peptide (1)..(252): Ceres Seq. ID no. 12327384
MEANEERLEVYDVDVLDYQSILISLNNCNAVFCCLDNPEGYDEEKEVDLEVRGAINVVEACARTESIEKIVFSSSLTAAIWRDNIGTQKDVDEKCWSDLDFCLKKKLWHALAKTQSEKAAWALAMDRMVNMVSVNPGLIVGPSVAQHNPRPTMSYLKGAAQMYENGVLAYVDVEFVADVHIRAFEDTSACGRYFCFNQIVNTEEEALKLVQTLSPLIHMPPRHEKEMQGSEVYGERLRNKKLNKLVEAGFAC

SEQ ID NO: 29462 - DNA, 1062 bp, Arabidopsis thaliana
  misc_feature (1)..(1062): Ceres Seq. ID no. 12421958
  misc_feature (1)..(1062): Ortholog of  Ceres SEQ ID NO 14316161 as cited in SEQ ID NO 52384
  misc_feature (1)..(1062): Ortholog of  Ceres SEQ ID NO 14315249 as cited in SEQ ID NO 52512
  misc_feature (1)..(1062): Ortholog of  Ceres SEQ ID NO 15174595 as cited in SEQ ID NO 53460
  misc_feature (1)..(1062): Ortholog of  Ceres SEQ ID NO 13503553 as cited in SEQ ID NO 64822
  misc_feature (1)..(1062): Ortholog of  Ceres SEQ ID NO 13660155 as cited in SEQ ID NO 67635
agaattaaaaccctaaaaaagaaacacaaatatttaagattttcttccctgatcaaatcaattgtttcagaaaaaatggagttcgagaaccggtacggacttgcaacgtcgcagaagtacgactgtctcttgttcgatttggacgatactctttatcctcttagctccggaatcgcaagagaatgtgggaacaacatcaaagattacatgaccgagaaactcggtataccgaaggacaaaatcgtcgaattgtctgatcttctatacaagaactatggaacaacaatggctggtcttagggcgatcggatatgaatttgactacgatgagtaccacagcttcgtccacggtcgtttaccctatgacaacataaaacccgaccttgttcttcgcagcctcttgcttagcctccctctccgcaaagtcatctttaccaacgcggacagagttcacgcggccaaggcgttgaagaagttgggattagaggattgtttcgaaggaatcatatgtttcgaaacgctaaacctcatgcacacaaacgctgcgtctaacaattccgagatttttgatatcgttggacattttaaccggtctgaaccggtcggttcacttcccaaaacgcctgttgtgtgtaaaccatctgaatctgctatcgagaaagctcttgaaatcgccaatattgatcctaaccgaacgctgttctttgaggacagtgtccgaaacgtacaagctggaaaacgcgttggtctttacacggttctggttggtaaatcgaccaaagtcaaaggagcggattacgcgttggaaaacattcacaacatgaaagaggcgataccggagttatgggaatccgacaggaaatcgtcggatgttggatattccggcaaggtcgccgttgagacttctgttagagcttaggaggagtactgtttcgccgttgtacctaattttccaccactgtcattttcattttcttttttcaaatgacgtaatgtcatttttgtttttttttcgacttgtgtttataaaagattaataaaaaatgagaaaataatttccatc

SEQ ID NO: 29463 - protein, 305 aa, Arabidopsis thaliana
  peptide (1)..(305): Ceres Seq. ID no. 12421959
RIKTLKKKHKYLRFSSLIKSIVSEKMEFENRYGLATSQKYDCLLFDLDDTLYPLSSGIARECGNNIKDYMTEKLGIPKDKIVELSDLLYKNYGTTMAGLRAIGYEFDYDEYHSFVHGRLPYDNIKPDLVLRSLLLSLPLRKVIFTNADRVHAAKALKKLGLEDCFEGIICFETLNLMHTNAASNNSEIFDIVGHFNRSEPVGSLPKTPVVCKPSESAIEKALEIANIDPNRTLFFEDSVRNVQAGKRVGLYTVLVGKSTKVKGADYALENIHNMKEAIPELWESDRKSSDVGYSGKVAVETSVRA

SEQ ID NO: 29464 - protein, 280 aa, Arabidopsis thaliana
  peptide (1)..(280): Ceres Seq. ID no. 12421960
MEFENRYGLATSQKYDCLLFDLDDTLYPLSSGIARECGNNIKDYMTEKLGIPKDKIVELSDLLYKNYGTTMAGLRAIGYEFDYDEYHSFVHGRLPYDNIKPDLVLRSLLLSLPLRKVIFTNADRVHAAKALKKLGLEDCFEGIICFETLNLMHTNAASNNSEIFDIVGHFNRSEPVGSLPKTPVVCKPSESAIEKALEIANIDPNRTLFFEDSVRNVQAGKRVGLYTVLVGKSTKVKGADYALENIHNMKEAIPELWESDRKSSDVGYSGKVAVETSVRA

SEQ ID NO: 29465 - protein, 236 aa, Arabidopsis thaliana; identical to SEQ ID NO: 23607
  peptide (1)..(236): Ceres Seq. ID no. 12421961

SEQ ID NO: 29466 - DNA, 1252 bp, Arabidopsis thaliana
  misc_feature (1)..(1252): Ceres Seq. ID no. 13500119
  misc_feature (1)..(1252): Ortholog of  Ceres SEQ ID NO 14310880 as cited in SEQ ID NO 55342
  misc_feature (1)..(1252): Ortholog of  Ceres SEQ ID NO 14313451 as cited in SEQ ID NO 62474
cacgcaggcaaatgtctcgtaatttaatctatagaagaaacagagctctctgttttgttttaatcttgttctgcttcccttaccggtttggcgctagaatcacgccggaggcggaacaatccacagcaaaagcaactcaaataatacacgtcagcaattccacgtggcatgatttctctcgtcttgtagatgtccaaataggtagccacgtcagcggcgtatcagagctcaaaagatacctccaccgattcggttacgtcaatgatggctccgaaatattttccgacgtgttcgatggtcctctggaatcggcaatctctctgtatcaagaaaatctcggtttaccaataaccggaagactcgacacgagtacagttactctcatgtcgttaccgcgatgtggcgttagcgatacgcacatgaccatcaacaacgatttcctccacacaacggcgcattatacgtatttcaacggtaaaccgaaatggaaccgtgatacgctaacctacgctatctccaaaactcacaaactcgattacttgacgtcagaagacgtcaaaaccgttttccggcgagctttttcacagtggtcaagcgtgattccggtgagtttcgaggaagtcgacgatttcacgacggctgatttaaagatcggattctacgctggtgatcacggtgacgggcttccgtttgacggtgtacttggaactttagcacacgcttttgcgccggagaacgggaggcttcacctcgacgcggcggagacgtggatcgtcgacgatgacttgaaaggatcttcagaggtggccgttgacttggagtctgtggcgactcacgagatcggtcacttgttgggattaggacatagctcgcaggagtcggcggttatgtatccgagtctccgaccgaggaccaagaaagttgaccttacggttgatgacgtggcaggtgtacttaagctatatggtccgaatcctaaactacggttggattcactaacgcagtcggaagattctattaaaaacggcaccgtatcacatagattcttgtcggggaattttatcggttatgttctgttggttgttggtttgattcttttcctataggtttataggcataaaaaatactgtttttattcatttatttttaattaaatgtacatatatttttcaactatgtaaatgtaaatatatagttgaacaaaaaaagatgtacatatatagttaggcttataattaggtttatggtcttg

SEQ ID NO: 29467 - protein, 367 aa, Arabidopsis thaliana
  peptide (1)..(367): Ceres Seq. ID no. 13500120
RRQMSRNLIYRRNRALCFVLILFCFPYRFGARITPEAEQSTAKATQIIHVSNSTWHDFSRLVDVQIGSHVSGVSELKRYLHRFGYVNDGSEIFSDVFDGPLESAISLYQENLGLPITGRLDTSTVTLMSLPRCGVSDTHMTINNDFLHTTAHYTYFNGKPKWNRDTLTYAISKTHKLDYLTSEDVKTVFRRAFSQWSSVIPVSFEEVDDFTTADLKIGFYAGDHGDGLPFDGVLGTLAHAFAPENGRLHLDAAETWIVDDDLKGSSEVAVDLESVATHEIGHLLGLGHSSQESAVMYPSLRPRTKKVDLTVDDVAGVLKLYGPNPKLRLDSLTQSEDSIKNGTVSHRFLSGNFIGYVLLVVGLILFL

SEQ ID NO: 29468 - protein, 364 aa, Arabidopsis thaliana
  peptide (1)..(364): Ceres Seq. ID no. 13500121
MSRNLIYRRNRALCFVLILFCFPYRFGARITPEAEQSTAKATQIIHVSNSTWHDFSRLVDVQIGSHVSGVSELKRYLHRFGYVNDGSEIFSDVFDGPLESAISLYQENLGLPITGRLDTSTVTLMSLPRCGVSDTHMTINNDFLHTTAHYTYFNGKPKWNRDTLTYAISKTHKLDYLTSEDVKTVFRRAFSQWSSVIPVSFEEVDDFTTADLKIGFYAGDHGDGLPFDGVLGTLAHAFAPENGRLHLDAAETWIVDDDLKGSSEVAVDLESVATHEIGHLLGLGHSSQESAVMYPSLRPRTKKVDLTVDDVAGVLKLYGPNPKLRLDSLTQSEDSIKNGTVSHRFLSGNFIGYVLLVVGLILFL

SEQ ID NO: 29469 - protein, 240 aa, Arabidopsis thaliana
  peptide (1)..(240): Ceres Seq. ID no. 13500122
MSLPRCGVSDTHMTINNDFLHTTAHYTYFNGKPKWNRDTLTYAISKTHKLDYLTSEDVKTVFRRAFSQWSSVIPVSFEEVDDFTTADLKIGFYAGDHGDGLPFDGVLGTLAHAFAPENGRLHLDAAETWIVDDDLKGSSEVAVDLESVATHEIGHLLGLGHSSQESAVMYPSLRPRTKKVDLTVDDVAGVLKLYGPNPKLRLDSLTQSEDSIKNGTVSHRFLSGNFIGYVLLVVGLILFL

SEQ ID NO: 29470 - DNA, 990 bp, Arabidopsis thaliana
  misc_feature (1)..(990): Ceres Seq. ID no. 12420633
  misc_feature (1)..(990): Ortholog of  Ceres SEQ ID NO 12608127 as cited in SEQ ID NO 57579
  misc_feature (1)..(990): Ortholog of  Ceres SEQ ID NO 12634558 as cited in SEQ ID NO 0
  misc_feature (1)..(990): Ortholog of  Ceres SEQ ID NO 15180294 as cited in SEQ ID NO 0
aactaattaaagttgttggtttggtaagagtaccgaaacggtaacgaataataaatgggagacatcattatctctttctctaaatctttccaatggcgtctcttcgtatcctttcgatttggttcttcttcttcttcgtcttcttgatcaatccctccatttctattcgaacttccttcatcaagcttcccggaagcgacggatctcgctactgcgacagctggagacttgccgccgagaccaataacgtcgggacttgggatctgattccgttaatctgcgtggattccgtcgccgagtatcttaacggagaccagtttttatccgattacagtgtcatcgtcgattatgctctcgcgtttgcgaaatcggttgaaatttccggcgacggcaaggacgtgtggatcttcgatatcgacgagacgcttctcacgaatattgactactacaaggctcatggttacgggtctgaaccgtatgacgataataaatttagtgagtgggtggaacaaggaacagctccagcttttgatgcgagcttgagactgtacaatgctctcaagaaacttggtttcactatcattttgctaaccggtcgggacgagcatcaaaggacttccaccgagacaaatctccgggatgccggttattccggttgggaacgtctcctcttgagaggtccaaatgatcaagggaagtcagctacaaattacaaatccgagcagcgatcgaaactgattgaggaaggtttcaaaatccgtggcaatagcggtgatcaatggagtgacttgcaaggttttgccgtggctgatcgttctttcaaagtcccaaatcccatgtactacattccttgatcactattcatttctgatttatgtattgagtaacaaccacttatgtgttttagacgttaatattacattgatctttagtataaacattaactaatactttcatataaagtataattataattgctttgtatcttcc

SEQ ID NO: 29471 - protein, 253 aa, Arabidopsis thaliana
  peptide (1)..(253): Ceres Seq. ID no. 12420634
MASLRILSIWFFFFFVFLINPSISIRTSFIKLPGSDGSRYCDSWRLAAETNNVGTWDLIPLICVDSVAEYLNGDQFLSDYSVIVDYALAFAKSVEISGDGKDVWIFDIDETLLTNIDYYKAHGYGSEPYDDNKFSEWVEQGTAPAFDASLRLYNALKKLGFTIILLTGRDEHQRTSTETNLRDAGYSGWERLLLRGPNDQGKSATNYKSEQRSKLIEEGFKIRGNSGDQWSDLQGFAVADRSFKVPNPMYYIP

SEQ ID NO: 29472 - DNA, 694 bp, Arabidopsis thaliana
  misc_feature (1)..(694): Ceres Seq. ID no. 13592873
  misc_feature (1)..(694): Ortholog of  Ceres SEQ ID NO 12563124 as cited in SEQ ID NO 57104
  misc_feature (1)..(694): Ortholog of  Ceres SEQ ID NO 13598373 as cited in SEQ ID NO 62185
  misc_feature (1)..(694): Ortholog of  Ceres SEQ ID NO 12584664 as cited in SEQ ID NO 62232
  misc_feature (1)..(694): Ortholog of  Ceres SEQ ID NO 12617639 as cited in SEQ ID NO 65219
  misc_feature (1)..(694): Ortholog of  Ceres SEQ ID NO 15179982 as cited in SEQ ID NO 0
cataagtctctctcttacattttgaaaccctaatttctcaaaaaaatgtctgaagttgagtaccggtgctttgtcggcggccttgcctgggccaccaatgatgaagatcttcaaaggacgttctcacagttcggcgacgttatcgattctaagatcattaacgaccgcgagagtggaagatcaaggggattcggattcgtcaccttcaaggacgagaaagccatgagggatgcgattgaagagatgaacggtaaagagctcgatggacgtgtcatcaccgtgaacgaggctcagtcgagaggtagcggcggtggcggaggaggccgtggtggaagcggtggtggttaccgcagcggaggcggtggtggatactcaggaggcggtggcggcggatactcaggaggaggcggtggtggttacgagagacgtagcggaggttacggatctggtggaggcggtggtggccgaggatacggtggtggtggacgccgtgagggaggtggctacggaggcggtgatggtggaagttacggcggcggtggtggcggctggtaatcaaagatagagttgtttgcgtgctgctgctctgtttttggtttagatttggatttgtgtcaccacttctggtttggttatcgttcgtttggtttacttttttgatgaaacagttttatcgataccgtcgacctcgagg

SEQ ID NO: 29473 - protein, 169 aa, Arabidopsis thaliana; identical to SEQ ID NO: 22059
  peptide (1)..(169): Ceres Seq. ID no. 13592874

SEQ ID NO: 29474 - protein, 110 aa, Arabidopsis thaliana; identical to SEQ ID NO: 22060
  peptide (1)..(110): Ceres Seq. ID no. 13592875

SEQ ID NO: 29475 - protein, 103 aa, Arabidopsis thaliana; identical to SEQ ID NO: 22061
  peptide (1)..(103): Ceres Seq. ID no. 13592876

SEQ ID NO: 29476 - DNA, 935 bp, Arabidopsis thaliana
  misc_feature (1)..(935): Ceres Seq. ID no. 13495661
  misc_feature (1)..(935): Ortholog of  Ceres SEQ ID NO 12610385 as cited in SEQ ID NO 55938
  misc_feature (1)..(935): Ortholog of  Ceres SEQ ID NO 13661939 as cited in SEQ ID NO 61170
gtcgtcgttagttttcccatttcctcataattcttcatctctttcctttctcatctctcgattcctttctttctttccatattccattgatttctctcttcttataaaaatacagattctctcttcttagaaccatcaccgattcgaacagatctaataaatcgtttttttcaccagatttttttcgccggagtttgttttgatccattctgttatggcggaagaacacagacttcaagaaccacgattatgtgctaacaattgtggcttcttcggaagcacagctacacaaaatctctgttccaaatgttttcgagatcttcaacatcaagaacaaaactcttccaccgccaaacatgctcttacccaatccttagccgccgttggcgctgctgcgtcttcctccgtgtcgccaccgcctccgcctccagctgattcgaaagaaatcgttgaagcgaaatcagagaaacgagcggcggctgaaccggaggaggcggatggtccgccgcaagatccgaagcggtgtttgacttgtcggcggcgcgtgggaatcacggggtttcggtgtaggtgtggtttcgttttctgcgggacgcataggtacgcggagcaacatgaatgttcgtttgatttcaagcggatggggaaggataagatcgctaaagcgaatccgattgtgaaagctgataagcttgagaagatttgactttgttgtttgttgtttgttgttgttgctttggttttgtgcgtttgaatgaaacacacatgaagaagaaagagcaagaaacaaacatgtcaatgtaaatttaagctttatttgatgatttcttcagtttggttattaaatttgcttattattgatttgattgttccgtttgatgatcttgtagaaggcttaagtcgtattatcaatgtgtagaatttggatttggttg

SEQ ID NO: 29477 - protein, 163 aa, Arabidopsis thaliana
  peptide (1)..(163): Ceres Seq. ID no. 13495662
MAEEHRLQEPRLCANNCGFFGSTATQNLCSKCFRDLQHQEQNSSTAKHALTQSLAAVGAAASSSVSPPPPPPADSKEIVEAKSEKRAAAEPEEADGPPQDPKRCLTCRRRVGITGFRCRCGFVFCGTHRYAEQHECSFDFKRMGKDKIAKANPIVKADKLEKI

SEQ ID NO: 29478 - DNA, 1236 bp, Arabidopsis thaliana
  misc_feature (1)..(1236): Ceres Seq. ID no. 12321712
  misc_feature (1)..(1236): Ortholog of  Ceres SEQ ID NO 13594341 as cited in SEQ ID NO 57917
  misc_feature (1)..(1236): Ortholog of  Ceres SEQ ID NO 13656441 as cited in SEQ ID NO 65703
aaaaacattcagacacaaatttagtttcttcttcttttggttctgtctgaatccaattttcttatattttatttcctccaccaccgtgagatatgatcgccgccggagctaaatcgctattagggctttcgatggcttctccaaaagggattttcgatagcaattcaatgagtaattcaagatctgttgttgttgttcgtgcttgtgtttctatggatggatctcaaactctgagtcataacaaaaatggatctattcctgaggttaaatccattaacggtcacacgggacaaaagcaaggacctttgtctacggtcggaaactcgacaaatataaagtggcatgaatgttctgttgagaaagttgatagacagagattgcttgatcagaaaggatgtgtgatttgggtcaccggtcttagtggttcagggaagagtactttggcttgtgctttgaatcagatgttgtatcaaaaggggaagctttgttatattcttgatggtgataatgttaggcatggcttaaaccgtgatcttagctttaaagctgaggatcgtgcagagaatattcgtagagttggagaggttgctaagctttttgcggatgctggaataatctgcattgcgagtttgatatctccttatagaacagatagggacgcttgtcgaagtttgctccccgagggagattttgttgaggtgttcatggatgtaccgcttagtgtttgcgaggcgagggatccaaagggtctttacaagcttgctcgtgcaggaaagatcaaaggttttaccgggatcgatgacccttacgagccaccattgaactgcgagatttctctaggacgtgaaggaggaacttctcctatcgaaatggcggaaaaggtcgtcggatacttagataacaagggttatcttcaagcataacatacttctagatacacaaatttgttatctcacggtcttagttctattttacgagccaaagtataaaagtaagcaaatccatggctgttttatggaatcacaagttcgacaaaataaatataaatctcataatttttcttgtccctttttttttgtatcataaatcttgatgttatggttctgtatataatatgtgtgaaataaggttaagcctactaaccattttatatgatctataatacaatatactttgtatgcaaaaaaaaaaaaaaaaaactcgagactagttctctctctctctctcctcgtgccg

SEQ ID NO: 29479 - protein, 276 aa, Arabidopsis thaliana
  peptide (1)..(276): Ceres Seq. ID no. 12321713
MIAAGAKSLLGLSMASPKGIFDSNSMSNSRSVVVVRACVSMDGSQTLSHNKNGSIPEVKSINGHTGQKQGPLSTVGNSTNIKWHECSVEKVDRQRLLDQKGCVIWVTGLSGSGKSTLACALNQMLYQKGKLCYILDGDNVRHGLNRDLSFKAEDRAENIRRVGEVAKLFADAGIICIASLISPYRTDRDACRSLLPEGDFVEVFMDVPLSVCEARDPKGLYKLARAGKIKGFTGIDDPYEPPLNCEISLGREGGTSPIEMAEKVVGYLDNKGYLQA

SEQ ID NO: 29480 - protein, 263 aa, Arabidopsis thaliana
  peptide (1)..(263): Ceres Seq. ID no. 12321714
MASPKGIFDSNSMSNSRSVVVVRACVSMDGSQTLSHNKNGSIPEVKSINGHTGQKQGPLSTVGNSTNIKWHECSVEKVDRQRLLDQKGCVIWVTGLSGSGKSTLACALNQMLYQKGKLCYILDGDNVRHGLNRDLSFKAEDRAENIRRVGEVAKLFADAGIICIASLISPYRTDRDACRSLLPEGDFVEVFMDVPLSVCEARDPKGLYKLARAGKIKGFTGIDDPYEPPLNCEISLGREGGTSPIEMAEKVVGYLDNKGYLQA

SEQ ID NO: 29481 - protein, 251 aa, Arabidopsis thaliana
  peptide (1)..(251): Ceres Seq. ID no. 12321715
MSNSRSVVVVRACVSMDGSQTLSHNKNGSIPEVKSINGHTGQKQGPLSTVGNSTNIKWHECSVEKVDRQRLLDQKGCVIWVTGLSGSGKSTLACALNQMLYQKGKLCYILDGDNVRHGLNRDLSFKAEDRAENIRRVGEVAKLFADAGIICIASLISPYRTDRDACRSLLPEGDFVEVFMDVPLSVCEARDPKGLYKLARAGKIKGFTGIDDPYEPPLNCEISLGREGGTSPIEMAEKVVGYLDNKGYLQA

SEQ ID NO: 29482 - DNA, 630 bp, Arabidopsis thaliana
  misc_feature (1)..(630): Ceres Seq. ID no. 12396845
  misc_feature (1)..(630): Ortholog of  Ceres SEQ ID NO 12611212 as cited in SEQ ID NO 56066
  misc_feature (1)..(630): Ortholog of  Ceres SEQ ID NO 15178576 as cited in SEQ ID NO 64133
aacaatggatgaaggaagagaaggagagatagagaagaagaagaagaaagatgaagaaggagaagtgaaggaaggagtagcatcaatagctttgttaccatgtgggactatctctggtcatttcattcagatgcctagctctatctgttatggcctccatggcactgaactagcttgtgagactgagtgtagccgcggtgaggattatcggttgatcaaactcactatcatagactacaatagaaagaaggaacaaacagttgtagtggagtgcaaaggccatgatgctgctcgaattaatgatgtcgagcatgctcacgtgtgggaggaagatgtgataggattagtcgaagaaaaacacgggaagaagaaagtatcggtttcgttcgagtgtgagacatttaaggcagatgaagcagcagaggaccatatcagacagtttatgcccaaattagctggacttgatgctgttattaacattggaccgatgaagatttccgggcttgattttgctgcggtggaagagggacacataaactaagacagcttaactctttctttttgtgtatacatcatatttgaatgctctttgagtctttgtttcatatcgtagaacacaattaacgcttc

SEQ ID NO: 29483 - protein, 179 aa, Arabidopsis thaliana
  peptide (1)..(179): Ceres Seq. ID no. 12396846
TMDEGREGEIEKKKKKDEEGEVKEGVASIALLPCGTISGHFIQMPSSICYGLHGTELACETECSRGEDYRLIKLTIIDYNRKKEQTVVVECKGHDAARINDVEHAHVWEEDVIGLVEEKHGKKKVSVSFECETFKADEAAEDHIRQFMPKLAGLDAVINIGPMKISGLDFAAVEEGHIN

SEQ ID NO: 29484 - protein, 178 aa, Arabidopsis thaliana
  peptide (1)..(178): Ceres Seq. ID no. 12396847
MDEGREGEIEKKKKKDEEGEVKEGVASIALLPCGTISGHFIQMPSSICYGLHGTELACETECSRGEDYRLIKLTIIDYNRKKEQTVVVECKGHDAARINDVEHAHVWEEDVIGLVEEKHGKKKVSVSFECETFKADEAAEDHIRQFMPKLAGLDAVINIGPMKISGLDFAAVEEGHIN

SEQ ID NO: 29485 - protein, 136 aa, Arabidopsis thaliana
  peptide (1)..(136): Ceres Seq. ID no. 12396848
MPSSICYGLHGTELACETECSRGEDYRLIKLTIIDYNRKKEQTVVVECKGHDAARINDVEHAHVWEEDVIGLVEEKHGKKKVSVSFECETFKADEAAEDHIRQFMPKLAGLDAVINIGPMKISGLDFAAVEEGHIN

SEQ ID NO: 29486 - DNA, 2369 bp, Arabidopsis thaliana
  misc_feature (1)..(2369): Ceres Seq. ID no. 13495969
  misc_feature (1)..(2369): Ortholog of  Ceres SEQ ID NO 12586556 as cited in SEQ ID NO 64667
  misc_feature (1)..(2369): Ortholog of  Ceres SEQ ID NO 13660894 as cited in SEQ ID NO 67475
atgagagctaagaacaccattacctggaattctctgctcattgggatttctaaagatccaagcagaatgatggaagcacaccaactgttcgacgaaatccctgaaccagatactttctcttataacattatgttgtcttgctacgttcgtaatgttaacttcgagaaggcacagagcttcttcgatcggatgccattcaaggatgcggcgtcatggaacacgatgatcacagggtatgcacgaagaggtgaaatggagaaagcgcgggaattgttctactccatgatggagaagaatgaagtttcttggaatgccatgatctctggatacattgaatgcggagatttggaaaaggcatcacatttcttcaaagtggctccagttagaggcgtcgtggcttggacggcgatgatcacagggtacatgaaagccaagaaggttgaattagctgaggcaatgttcaaagacatgacagtgaataaaaatcttgtaacttggaatgctatgatctctggttatgttgaaaattctaggccagaagatggattgaagcttttcagagctatgcttgaggaaggaattaggcctaactcgtctggactaagcagcgcattgctcggatgcagtgaattatcggcgttacaattagggaggcaaatacatcagatagtgagtaaatctacattgtgtaatgatgtaacagcattgacgtctctgatcagtatgtactgcaaatgtggagaacttggtgatgcttggaagctctttgaggtgatgaagaagaaagatgttgtggcgtggaacgcaatgatttccgggtatgctcagcacggtaatgcggataaggctctgtgtttgttccgtgagatgatagataacaagatcagaccggattggataacgtttgttgcggttttactggcctgtaaccatgctggactagtgaatattgggatggcatatttcgaatcgatggtgagagattataaggtagaaccgcagcctgatcattacacgtgtatggttgatcttttgggtcgggctgggaagctggaggaggcattgaaactgataagatcaatgccgtttagacctcatgctgcggtctttgggacgctcttaggggcttgtagagtgcacaagaatgtggaattggctgaatttgcagctgagaaactgcttcagctaaactcgcaaaatgcagccgggtatgtgcagcttgcgaatatctacgcatcgaagaatcgttgggaagacgttgcaagggttcgcaagagaatgaaagagagcaatgttgtgaaggtagagcgagtcaaagtacctggatacagttggatcgaaatacgaaacaaagttcaccatttcagatcaagtgatcggattcaccctgaactagactcaatacacaagaaactgaaggagttggagaagaagatgaaactagctggatacaaaccggaactagagtttgctttacacaatgtagaggaagagcaaaaagagaagctattgttatggcacagcgagaagttagctgttgcatttggttgcataaaactccctcaaggttcacagatacaagtgttcaagaacttgagaatctgtggtgattgtcataaagcaatcaaatttatctcggagatagagaaacgagagatcattgtaagagacaccacaaggtttcaccatttcaaagatgggtcttgctcttgtggcgattactggtgaaaagagaagagctttgactctctcattggtcaaacctgactgtatttatatgcgttattgtgtggtaaagtttcgacctttgactttacaagttggcgttaagaagagagatgcgtagatcagcgagtggttctagagttttggatcattttccggcgactttaaggtctccgcctcgatctcagagtgttacagctatggaagatgatgtggagctgcttttgcctaggtacgatccgaattcacaagcggggaagagagagaaatcaagattcagatttgcagaaaacgtcatccatttgattcctctcattcttcttctctgtgttgcaatcctctggctctcctcttactcagcagcgttaaggagttgagttcaagaagcaacatgttgtcttgtctccatgggaactcatcatattcagttttgggaaaggaaacaatttttttaccaccggtgattatgtgccgcaaaccatacgtaactcttgtaatttttggttctgtagacacacaaaaggatctctcgttttcatgaaatgtatgtttaatakttcastgatatacatcacacaactcaagtagaaaacactgatggttatccattaatcattctattggtcgaaaaaaagattagtttc

SEQ ID NO: 29487 - protein, 575 aa, Arabidopsis thaliana
  peptide (1)..(575): Ceres Seq. ID no. 15222970
MRAKNTITWNSLLIGISKDPSRMMEAHQLFDEIPEPDTFSYNIMLSCYVRNVNFEKAQSFFDRMPFKDAASWNTMITGYARRGEMEKARELFYSMMEKNEVSWNAMISGYIECGDLEKASHFFKVAPVRGVVAWTAMITGYMKAKKVELAEAMFKDMTVNKNLVTWNAMISGYVENSRPEDGLKLFRAMLEEGIRPNSSGLSSALLGCSELSALQLGRQIHQIVSKSTLCNDVTALTSLISMYCKCGELGDAWKLFEVMKKKDVVAWNAMISGYAQHGNADKALCLFREMIDNKIRPDWITFVAVLLACNHAGLVNIGMAYFESMVRDYKVEPQPDHYTCMVDLLGRAGKLEEALKLIRSMPFRPHAAVFGTLLGACRVHKNVELAEFAAEKLLQLNSQNAAGYVQLANIYASKNRWEDVARVRKRMKESNVVKVERVKVPGYSWIEIRNKVHHFRSSDRIHPELDSIHKKLKELEKKMKLAGYKPELEFALHNVEEEQKEKLLLWHSEKLAVAFGCIKLPQGSQIQVFKNLRICGDCHKAIKFISEIEKREIIVRDTTRFHHFKDGSCSCGDYW

SEQ ID NO: 29488 - protein, 553 aa, Arabidopsis thaliana
  peptide (1)..(553): Ceres Seq. ID no. 15222971
MMEAHQLFDEIPEPDTFSYNIMLSCYVRNVNFEKAQSFFDRMPFKDAASWNTMITGYARRGEMEKARELFYSMMEKNEVSWNAMISGYIECGDLEKASHFFKVAPVRGVVAWTAMITGYMKAKKVELAEAMFKDMTVNKNLVTWNAMISGYVENSRPEDGLKLFRAMLEEGIRPNSSGLSSALLGCSELSALQLGRQIHQIVSKSTLCNDVTALTSLISMYCKCGELGDAWKLFEVMKKKDVVAWNAMISGYAQHGNADKALCLFREMIDNKIRPDWITFVAVLLACNHAGLVNIGMAYFESMVRDYKVEPQPDHYTCMVDLLGRAGKLEEALKLIRSMPFRPHAAVFGTLLGACRVHKNVELAEFAAEKLLQLNSQNAAGYVQLANIYASKNRWEDVARVRKRMKESNVVKVERVKVPGYSWIEIRNKVHHFRSSDRIHPELDSIHKKLKELEKKMKLAGYKPELEFALHNVEEEQKEKLLLWHSEKLAVAFGCIKLPQGSQIQVFKNLRICGDCHKAIKFISEIEKREIIVRDTTRFHHFKDGSCSCGDYW

SEQ ID NO: 29489 - protein, 552 aa, Arabidopsis thaliana
  peptide (1)..(552): Ceres Seq. ID no. 15222972
MEAHQLFDEIPEPDTFSYNIMLSCYVRNVNFEKAQSFFDRMPFKDAASWNTMITGYARRGEMEKARELFYSMMEKNEVSWNAMISGYIECGDLEKASHFFKVAPVRGVVAWTAMITGYMKAKKVELAEAMFKDMTVNKNLVTWNAMISGYVENSRPEDGLKLFRAMLEEGIRPNSSGLSSALLGCSELSALQLGRQIHQIVSKSTLCNDVTALTSLISMYCKCGELGDAWKLFEVMKKKDVVAWNAMISGYAQHGNADKALCLFREMIDNKIRPDWITFVAVLLACNHAGLVNIGMAYFESMVRDYKVEPQPDHYTCMVDLLGRAGKLEEALKLIRSMPFRPHAAVFGTLLGACRVHKNVELAEFAAEKLLQLNSQNAAGYVQLANIYASKNRWEDVARVRKRMKESNVVKVERVKVPGYSWIEIRNKVHHFRSSDRIHPELDSIHKKLKELEKKMKLAGYKPELEFALHNVEEEQKEKLLLWHSEKLAVAFGCIKLPQGSQIQVFKNLRICGDCHKAIKFISEIEKREIIVRDTTRFHHFKDGSCSCGDYW

SEQ ID NO: 29490 - DNA, 909 bp, Arabidopsis thaliana
  misc_feature (1)..(909): Ceres Seq. ID no. 12333026
  misc_feature (1)..(909): Ortholog of  Ceres SEQ ID NO 14306439 as cited in SEQ ID NO 53628
  misc_feature (1)..(909): Ortholog of  Ceres SEQ ID NO 12611235 as cited in SEQ ID NO 56101
attttctcagtttttcccctctttttaccttttctggaaaaaagttagataaaatcggaattgtttggattagggcttcgattttttgatgttgttgtatacttttttcaatagagatttgattgtgaaacttttgtcgtcgtagctttaagcaaacaaaaaaaaaagatgaccggcgttggcgagaatcagcttatctccattcaacctgatgaactcaaatttctctttgaacttgagaagcaaagctactgtgatcttaaagttgccaataaaacagagaactatgttgctttcaaggtgaaaacaacatctccaaagaagtattttgtaagacctaacactggtgtcattcagccatgggactcttgcatcattagagttactctacaagcgcaacgagagtatcctccagatatgcagtgcaaagacaaatttctcctgcaaagtaccattgtacctccacacactgatgtggatgaacttcctcaagacactttcaccaaggacagtggaaagacattaacagaatgtaagctcaaagtctcttatattaccccgtctacaacccaaagatcctctgaatccggagcaacaaatggtgatggacaaagctcggaaaccatctctactatacagcggctgaaggaagagcgagatgcagccgttaagcaaacacaacagctgcaacatgaattggaaacggtaaggaggcggagaaaccagaggaacagcggaaatgggctatccttgaagttggcagctatggttggactcatcggactcatcatcggtttcatcctaaaacttaccttagcttctcccacataacaactcttgagcttcaacacatcgcctatcatctcaatatatgtaacagccgaatcaaaacagattcacatattttcg

SEQ ID NO: 29491 - protein, 220 aa, Arabidopsis thaliana; identical to SEQ ID NO: 21397
  peptide (1)..(220): Ceres Seq. ID no. 12333027

SEQ ID NO: 29492 - protein, 137 aa, Arabidopsis thaliana; identical to SEQ ID NO: 21398
  peptide (1)..(137): Ceres Seq. ID no. 12333028

SEQ ID NO: 29493 - DNA, 818 bp, Arabidopsis thaliana
  misc_feature (1)..(818): Ceres Seq. ID no. 12338666
  misc_feature (1)..(818): Ortholog of  Ceres SEQ ID NO 13599545 as cited in SEQ ID NO 0
acattacaagaatcattcgattctcttctatcatcatcttcttcttctccatcaaaattcaccaaaacatggaagctctaattcaccacttcactctcctctccgatcaagctcttgtcgacaaaacattcgacccttcaagaatcgaggacctcatgcgtctctttgaagtcgattcatacaaagcttgggcagctctcgaatccgaacagcaacaagaactcgaagaagctgaagaatctctccgtgaagctgaacttgaacttgatcgggatatggagtgggggatggaggagtataggcggacgttggaggagatggagaggatggaggcggcggagctgaaagagcttgaggagaaagcggagactgctcggagaacggggaatttaatggagaaagcggcgacagttgccgcgaaacgacatattgcggcggcgatgggatcagccgccgcgtctatgagatcagcttggaagactgcagctggaaataaggttcatccatcttgatcgatgatgatgatgatgaatatgataagatgacgatgattgtcaaagtattggtccccatgttataggattagtaggtcaagaacattttaatgaataattatttcctttgataaacatatgggttactacttactattgccgaagaattatgaattataggtagtttctagtttatgtatctgtaatttgtaatcaatatatatttatgggattataggaagtcgtaaaatgtggtactagtttattggtttgatggtagaacagaaaaaaaaaaaaaaaaattggtgggacacctaaaagtac

SEQ ID NO: 29494 - protein, 169 aa, Arabidopsis thaliana
  peptide (1)..(169): Ceres Seq. ID no. 12338668
ITRIIRFSSIIIFFFSIKIHQNMEALIHHFTLLSDQALVDKTFDPSRIEDLMRLFEVDSYKAWAALESEQQQELEEAEESLREAELELDRDMEWGMEEYRRTLEEMERMEAAELKELEEKAETARRTGNLMEKAATVAAKRHIAAAMGSAAASMRSAWKTAAGNKVHPS

SEQ ID NO: 29495 - protein, 147 aa, Arabidopsis thaliana
  peptide (1)..(147): Ceres Seq. ID no. 12338669
MEALIHHFTLLSDQALVDKTFDPSRIEDLMRLFEVDSYKAWAALESEQQQELEEAEESLREAELELDRDMEWGMEEYRRTLEEMERMEAAELKELEEKAETARRTGNLMEKAATVAAKRHIAAAMGSAAASMRSAWKTAAGNKVHPS

SEQ ID NO: 29496 - protein, 118 aa, Arabidopsis thaliana
  peptide (1)..(118): Ceres Seq. ID no. 12338670
MRLFEVDSYKAWAALESEQQQELEEAEESLREAELELDRDMEWGMEEYRRTLEEMERMEAAELKELEEKAETARRTGNLMEKAATVAAKRHIAAAMGSAAASMRSAWKTAAGNKVHPS

SEQ ID NO: 29497 - DNA, 1449 bp, Arabidopsis thaliana
  misc_feature (1)..(1449): Ceres Seq. ID no. 12325319
  misc_feature (1)..(1449): Ortholog of  Ceres SEQ ID NO 15178873 as cited in SEQ ID NO 1103
  misc_feature (1)..(1449): Ortholog of  Ceres SEQ ID NO 15173557 as cited in SEQ ID NO 60031
  misc_feature (1)..(1449): Ortholog of  Ceres SEQ ID NO 13661430 as cited in SEQ ID NO 61258
  misc_feature (1)..(1449): Ortholog of  Ceres SEQ ID NO 13590940 as cited in SEQ ID NO 68653
  misc_feature (1)..(1449): Ortholog of  Ceres SEQ ID NO 15180040 as cited in SEQ ID NO 0
atatttttgtgattagaaattaggatcttacagaaatctttcaaaaagaaattcataacagttccattttttttggtaagattcataaaaaaattcaagttaaatgcattttataaaaatgtaggaaaaactttcaacaaaaatcgttgagaagaacatacagtatatcttatccactctcttcctcatccacgcggcaaaggcacaaacctctttagaaaaatgtcgtcagcttattgttcctccgccgtggctgtatccgccgcagccaccgcttcctccgccgctacctttaatccattactctcctcccactccaattcccaactcttctatcgctttacaccaaaatccttcaaactcgttgccaattgccctaatccactaatcctccactcaaatatccgccgccaccgcttcttctgcgccgccgaaaccgaagctagttccgccgatgatgaaatccaggcatcagtagaagaagaagaagaggtagaagaagaaggagatgaaggtgaagaagaagtagaggaagaaaaacagacgacgcaagcgagtggtgaagaagggaggctttacgttgggaatttaccttacacaatcacttcttctgagctctctcagatttttggagaagctggaactgtcgtcgatgttcagattgtttatgataaagttactgatagaagcagaggatttggatttgtaacaatgggaagcattgaagaagctaaagaagcgatgcagatgtttaacagctctcaaattggtggtagaacggtgaaagtgaacttcccggaggtgccgagaggcggtgagaacgaagtaatgagaaccaaaatccgtgataataaccggagttatgttgatagtcctcataaggtatatgcaggaaaccttggttggaatctaacctcacaaggtttaaaggatgcatttggtgatcaacctggtgtgcttggtgctaaagttatctatgaaagaaatactgggaggtctagggggtttggtttcatctcgttcgagtcagcggaaaatgttcagtctgctttggctacaatgaatggcgtggaagttgaaggacgagcgctgaggctaaatttggcttcagagagagagaaacccactgtgtctcctccttccgtagaagaaggagaaaccgaggaggccagtctagagagtaacgaggtgctttcgaatgttagtgcatgaagcagcaaaagcacaatagattccggataagtttcagactgatctgctcgaggtgccaaaaatgaaaattttgttgtctttataaatgtgttgttttgttctagtgaggctgaagaagaagacaatatatgagatagaaaacaagagattgtttgtaatttttattgagaatgtttttaatccataaatggtgtaatgtaacaacatatcttgattccagtaaactgcaaatttctg

SEQ ID NO: 29498 - protein, 329 aa, Arabidopsis thaliana
  peptide (1)..(329): Ceres Seq. ID no. 12325320
MSSAYCSSAVAVSAAATASSAATFNPLLSSHSNSQLFYRFTPKSFKLVANCPNPLILHSNIRRHRFFCAAETEASSADDEIQASVEEEEEVEEEGDEGEEEVEEEKQTTQASGEEGRLYVGNLPYTITSSELSQIFGEAGTVVDVQIVYDKVTDRSRGFGFVTMGSIEEAKEAMQMFNSSQIGGRTVKVNFPEVPRGGENEVMRTKIRDNNRSYVDSPHKVYAGNLGWNLTSQGLKDAFGDQPGVLGAKVIYERNTGRSRGFGFISFESAENVQSALATMNGVEVEGRALRLNLASEREKPTVSPPSVEEGETEEASLESNEVLSNVSA

SEQ ID NO: 29499 - protein, 166 aa, Arabidopsis thaliana
  peptide (1)..(166): Ceres Seq. ID no. 12325321
MGSIEEAKEAMQMFNSSQIGGRTVKVNFPEVPRGGENEVMRTKIRDNNRSYVDSPHKVYAGNLGWNLTSQGLKDAFGDQPGVLGAKVIYERNTGRSRGFGFISFESAENVQSALATMNGVEVEGRALRLNLASEREKPTVSPPSVEEGETEEASLESNEVLSNVSA

SEQ ID NO: 29500 - DNA, 836 bp, Arabidopsis thaliana
  misc_feature (1)..(836): Ceres Seq. ID no. 12738757
  misc_feature (1)..(836): Ortholog of  Ceres SEQ ID NO 15172913 as cited in SEQ ID NO 51824
  misc_feature (1)..(836): Ortholog of  Ceres SEQ ID NO 13654659 as cited in SEQ ID NO 61998
aagctctcatcttcttcagcacaaaaagccatctcaaaggtatattttgaatcaaaaacaatggcagggactaatgattcttgtcctttggtaaagaacattcttcttctagactctgaaggaaagcgtgtggctgtcaagtactactcagatgattggacaactaatgcttccaagttagcttttgaaaaatatgtcttctcgaaaacctccaagaccaatgctcgcacagaagctgaaatcacactgttggagagtaatattgttgtctataagtttgcccaggacctgcatttctttgttactggaggtgaaaatgaaaacgagctcgtcttatcatctgttcttcaaggcttttttgatgctgttgcattacttctgaggaacaatgttgaaaagatggaagcccttgaaaacttgtatctcatctttttgtgccttgatgagatggttgatcaagggatggtacttgaaacagacgcgaatgttattgcggggaaagtagcaatgcaaagcgcagaagcaagtggttcgctctctgaacagacattaactcaagcattggcaacagctcgggagcaccttgcgagaagtcttcttacataattttcatcgtgggtgcgaaatgatatattcataagcccttgtaaccaaccatatctgaaatggttacccgttcactagaaatcaacccctattgacttaactatctcatgactttgttttcttatgtttttttggtggaacgtagatcttttattcgcctgttcttgcggaaccatctttttaaatgtgaggatcaacattgcactagtgattgattgctttacatatcg

SEQ ID NO: 29501 - protein, 201 aa, Arabidopsis thaliana
  peptide (1)..(201): Ceres Seq. ID no. 12738758
KLSSSSAQKAISKVYFESKTMAGTNDSCPLVKNILLLDSEGKRVAVKYYSDDWTTNASKLAFEKYVFSKTSKTNARTEAEITLLESNIVVYKFAQDLHFFVTGGENENELVLSSVLQGFFDAVALLLRNNVEKMEALENLYLIFLCLDEMVDQGMVLETDANVIAGKVAMQSAEASGSLSEQTLTQALATAREHLARSLLT

SEQ ID NO: 29502 - protein, 181 aa, Arabidopsis thaliana
  peptide (1)..(181): Ceres Seq. ID no. 12738759
MAGTNDSCPLVKNILLLDSEGKRVAVKYYSDDWTTNASKLAFEKYVFSKTSKTNARTEAEITLLESNIVVYKFAQDLHFFVTGGENENELVLSSVLQGFFDAVALLLRNNVEKMEALENLYLIFLCLDEMVDQGMVLETDANVIAGKVAMQSAEASGSLSEQTLTQALATAREHLARSLLT

SEQ ID NO: 29503 - DNA, 607 bp, Arabidopsis thaliana
  misc_feature (1)..(607): Ceres Seq. ID no. 12333324
  misc_feature (1)..(607): Ortholog of  Ceres SEQ ID NO 14305493 as cited in SEQ ID NO 0
acgccgagatgagttatcttctgaagacgttaacgacgaagaaagagattgatcgggttatcagagacaccattgatgaagttcttgttttacgatttggtcgttcctccgacgccgtttgtcttcagcatgatgaaatccttgcgaaatcggtgagagatgtttcgaaatttgctaaggtagctttggttgatgttgattcagaggatgttcaagtgtatgtgaagtattttgatatcacgttgtttccttcgacgatcttcttcttcaatgcgcatcatatgaaattggattctggaactgcggatcatactaaatgggttggtgcatttcatataaaacaagactttattgatgttgttgaggctatatatcgaggagcaatgaaagggaagatgattgttcaatgtccaataccgccagagaggataccaaagtaccagctcttgtacaaggatgtgtagacactaaagtttgttgtgcttacaatgcaaaatctgtttctcatcttctgtgttggcaataatatttacatttgacattttgagatttacagttatgtttttgtacacagttgaagaatgagaataaatatgcagatttttcg

SEQ ID NO: 29504 - protein, 153 aa, Arabidopsis thaliana
  peptide (1)..(153): Ceres Seq. ID no. 12333325
AEMSYLLKTLTTKKEIDRVIRDTIDEVLVLRFGRSSDAVCLQHDEILAKSVRDVSKFAKVALVDVDSEDVQVYVKYFDITLFPSTIFFFNAHHMKLDSGTADHTKWVGAFHIKQDFIDVVEAIYRGAMKGKMIVQCPIPPERIPKYQLLYKDV

SEQ ID NO: 29505 - protein, 151 aa, Arabidopsis thaliana
  peptide (1)..(151): Ceres Seq. ID no. 12333326
MSYLLKTLTTKKEIDRVIRDTIDEVLVLRFGRSSDAVCLQHDEILAKSVRDVSKFAKVALVDVDSEDVQVYVKYFDITLFPSTIFFFNAHHMKLDSGTADHTKWVGAFHIKQDFIDVVEAIYRGAMKGKMIVQCPIPPERIPKYQLLYKDV

SEQ ID NO: 29506 - DNA, 628 bp, Arabidopsis thaliana
  misc_feature (1)..(628): Ceres Seq. ID no. 12420685
  misc_feature (1)..(628): Ortholog of  Ceres SEQ ID NO 13594457 as cited in SEQ ID NO 50888
aaaacagggctaagaggagcttccgcagcagtagctggattcatcaaatcctcaataccgatccgacccatttcctccatggacagttccgacaaagattcatcttccaccaccaccaccagcgaaactgcccgacgtttcgttccgctttcatcggtggtttctgattgtgcgaagcggtggtttaaagacactcttgaggaagctaaagctgggaacatcactatgcaggttttgttaggtcagatgtattactctgggtatggagtccctaaggatgctaaaaaggggagactttggattacgaaagcatcaagagttcgttcttcagtgtggaaagtgatagataaacgaccaggttacaacgcaagtgattcagattcagagtctgattagcatgtcctgatcgagagagcttgtgtttgttctgttttgtttcaatcttggatgatccaagttccaacaatgaacaatatcttctctctgcgcatatcttttgatgcttgctaatcattttgtagctctattactcaaatatgtcttctttttttattttgtttaaattttggtgaatgcctttgctcacagtgtatgattattctagcaatgaaaaggagttaaaaaaggt

SEQ ID NO: 29507 - protein, 131 aa, Arabidopsis thaliana
  peptide (1)..(131): Ceres Seq. ID no. 12420686
KTGLRGASAAVAGFIKSSIPIRPISSMDSSDKDSSSTTTTSETARRFVPLSSVVSDCAKRWFKDTLEEAKAGNITMQVLLGQMYYSGYGVPKDAKKGRLWITKASRVRSSVWKVIDKRPGYNASDSDSESD

SEQ ID NO: 29508 - protein, 105 aa, Arabidopsis thaliana
  peptide (1)..(105): Ceres Seq. ID no. 12420687
MDSSDKDSSSTTTTSETARRFVPLSSVVSDCAKRWFKDTLEEAKAGNITMQVLLGQMYYSGYGVPKDAKKGRLWITKASRVRSSVWKVIDKRPGYNASDSDSESD

SEQ ID NO: 29509 - DNA, 1110 bp, Arabidopsis thaliana
  misc_feature (1)..(1110): Ceres Seq. ID no. 13491279
  misc_feature (1)..(1110): Ortholog of  Ceres SEQ ID NO 13638643 as cited in SEQ ID NO 52149
agatttctccgaggaaaaaaatggcgtctggtttgatcggaagattggttggaacgaaaccgtcgaaattagccacggcggcgaggttaattccggcgagatggacctctacaggagcggaggcggaaacaaaagcttcctctggcggcggaagaggatcgaacttgaagacttttcagatctatcgatggaatccagataatccagggaagccagagcttcaaaattaccagatcgatctcaaagattgtggtccaatggtattagatgctttgattaagatcaaaaacgaaatggatccatctcttactttccgtagatcatgccgtgaagggatctgtggttcatgtgctatgaacattgatggatgtaacggacttgcttgtttgacaaagattcaagatgaagcatcggagacgacgattacaccgttgcctcatatgtttgtgattaaggatttggttgttgatatgactaatttttataatcagtataagagtattgagccgtggttgaagaggaagactccagcgtctgttcctgctaaggagattttgcagagtaagaaggatagagctaagcttgatgggatgtatgaatgtattctttgtgcttgttgtagcacatcttgtcctagttactggtggaatcctgagtcttaccttggtccagctgctttgctacacgctaataggtggataagcgacagtcgtgatgagtacactaaggaaagacttgaggctattgacgacgagttcaagctttaccgttgccatacaatcttgaattgtgctcgtgcctgtccaaagggtttgaacccaggaaaacagattactcacatcaagcaacttcagcgttgaaacagctaagtttgtgtgcgggatccgttgggaaactcatcagtcttaacgtttgaagctaataatcttcacaaaacctcttcggattttcaattcattcttgtattgttgttgccaaatattagcgccttaaaaaaactcgtttgcaagtcttcccaagtagatgagctttgtggttgtatcttgctgaaaatctcctctttaagtaataaaactcgagtaaacttaaacctcatctacttatcatctg

SEQ ID NO: 29510 - protein, 285 aa, Arabidopsis thaliana
  peptide (1)..(285): Ceres Seq. ID no. 13491280
ISPRKKMASGLIGRLVGTKPSKLATAARLIPARWTSTGAEAETKASSGGGRGSNLKTFQIYRWNPDNPGKPELQNYQIDLKDCGPMVLDALIKIKNEMDPSLTFRRSCREGICGSCAMNIDGCNGLACLTKIQDEASETTITPLPHMFVIKDLVVDMTNFYNQYKSIEPWLKRKTPASVPAKEILQSKKDRAKLDGMYECILCACCSTSCPSYWWNPESYLGPAALLHANRWISDSRDEYTKERLEAIDDEFKLYRCHTILNCARACPKGLNPGKQITHIKQLQR

SEQ ID NO: 29511 - protein, 279 aa, Arabidopsis thaliana
  peptide (1)..(279): Ceres Seq. ID no. 13491281
MASGLIGRLVGTKPSKLATAARLIPARWTSTGAEAETKASSGGGRGSNLKTFQIYRWNPDNPGKPELQNYQIDLKDCGPMVLDALIKIKNEMDPSLTFRRSCREGICGSCAMNIDGCNGLACLTKIQDEASETTITPLPHMFVIKDLVVDMTNFYNQYKSIEPWLKRKTPASVPAKEILQSKKDRAKLDGMYECILCACCSTSCPSYWWNPESYLGPAALLHANRWISDSRDEYTKERLEAIDDEFKLYRCHTILNCARACPKGLNPGKQITHIKQLQR

SEQ ID NO: 29512 - protein, 200 aa, Arabidopsis thaliana
  peptide (1)..(200): Ceres Seq. ID no. 13491282
MVLDALIKIKNEMDPSLTFRRSCREGICGSCAMNIDGCNGLACLTKIQDEASETTITPLPHMFVIKDLVVDMTNFYNQYKSIEPWLKRKTPASVPAKEILQSKKDRAKLDGMYECILCACCSTSCPSYWWNPESYLGPAALLHANRWISDSRDEYTKERLEAIDDEFKLYRCHTILNCARACPKGLNPGKQITHIKQLQR

SEQ ID NO: 29513 - DNA, 998 bp, Arabidopsis thaliana
  misc_feature (1)..(998): Ceres Seq. ID no. 12389197
  misc_feature (1)..(998): Ortholog of  Ceres SEQ ID NO 12615296 as cited in SEQ ID NO 62724
  misc_feature (1)..(998): Ortholog of  Ceres SEQ ID NO 15225093 as cited in SEQ ID NO 65177
  misc_feature (1)..(998): Ortholog of  Ceres SEQ ID NO 15179532 as cited in SEQ ID NO 0
aggagaaggacgatcgatctaaggagacgatgaagatcttccacgttccttgtctgcaagacaactactcttatctgataatcgatgagagcaccggagacgcggcggttgtggatccagttgatccggagaaggtgatcgcatcggctgagaagcaccaagctaagatcaagttcgtactcactacgcatcatcactgggatcatgccggtggaaacgagaagattaagcagttggttcctgatatcaaagtatatggaggttctctggataaggtgaagggttgcactgatgcggttgataatggtgacaagctgactttgggtcaggatattaacatattggctctccacactccttgtcacaccaagggtcacattagttattatgtgaacggaaaagaaggagaaaacccagccgtgttcaccggagatacactttttgttgctggatgtgggaagttttttgaagggacagctgagcagatgtatcagtcgttgtgtgtgactctggctgcattacctaaaccgacacaggtttactgcggccatgagtacaccgttaagaacttggaatttgctctaactgtggaaccaaacaacgggaagatacaacagaagttagcatgggcccgtcaacagcgccaagcagatcttcccacaatcccttcaacactggaggaagagctcgaaacaaatccatttatgcgtgttgataagccagagatacaggagaaactcggttgcaagtcgccaattgatacaatgagggaagttcggaacaagaaggatcagtggaggggatgatgataaatggagagcttcttgcctatgttttgtgtacttgtgttgaatgatcctgtaaaaggtgtatgaaccagtaatgttgatattctgtgtgaaactgtgaaccggtttggtaaaccgaaatcagaccgacctgtaagccgtactccctttttgaattttcagtttactatggataataatttcagtgtc

SEQ ID NO: 29514 - protein, 267 aa, Arabidopsis thaliana
  peptide (1)..(267): Ceres Seq. ID no. 12389198
EKDDRSKETMKIFHVPCLQDNYSYLIIDESTGDAAVVDPVDPEKVIASAEKHQAKIKFVLTTHHHWDHAGGNEKIKQLVPDIKVYGGSLDKVKGCTDAVDNGDKLTLGQDINILALHTPCHTKGHISYYVNGKEGENPAVFTGDTLFVAGCGKFFEGTAEQMYQSLCVTLAALPKPTQVYCGHEYTVKNLEFALTVEPNNGKIQQKLAWARQQRQADLPTIPSTLEEELETNPFMRVDKPEIQEKLGCKSPIDTMREVRNKKDQWRG

SEQ ID NO: 29515 - protein, 258 aa, Arabidopsis thaliana
  peptide (1)..(258): Ceres Seq. ID no. 12389199
MKIFHVPCLQDNYSYLIIDESTGDAAVVDPVDPEKVIASAEKHQAKIKFVLTTHHHWDHAGGNEKIKQLVPDIKVYGGSLDKVKGCTDAVDNGDKLTLGQDINILALHTPCHTKGHISYYVNGKEGENPAVFTGDTLFVAGCGKFFEGTAEQMYQSLCVTLAALPKPTQVYCGHEYTVKNLEFALTVEPNNGKIQQKLAWARQQRQADLPTIPSTLEEELETNPFMRVDKPEIQEKLGCKSPIDTMREVRNKKDQWRG

SEQ ID NO: 29516 - DNA, 843 bp, Arabidopsis thaliana
  misc_feature (1)..(843): Ceres Seq. ID no. 13496878
  misc_feature (1)..(843): Ortholog of  Ceres SEQ ID NO 13599568 as cited in SEQ ID NO 509
  misc_feature (1)..(843): Ortholog of  Ceres SEQ ID NO 13638595 as cited in SEQ ID NO 52050
  misc_feature (1)..(843): Ortholog of  Ceres SEQ ID NO 13594748 as cited in SEQ ID NO 52114
  misc_feature (1)..(843): Ortholog of  Ceres SEQ ID NO 12623490 as cited in SEQ ID NO 61136
  misc_feature (1)..(843): Ortholog of  Ceres SEQ ID NO 12583993 as cited in SEQ ID NO 68098
  misc_feature (1)..(843): Ortholog of  Ceres SEQ ID NO 13654535 as cited in SEQ ID NO 68227
attgtgaatttattagtaatttataaattcatcaaaaacaaactcttttcagaaaaaaaataacaacaacaacaataatggcgtcttttgcaacccatcttgttgttgttgttacaatgttgtttgtagccatggcctccgcggagatgcttcaagatgtttgtgttgctgatttgtctaatgcggtcaaggtcaacggatacacttgcaaggactcaacacaaataacaccagaagacttctacttcaaaggcttagccaacattgccgccacaaacacctctaccggctcagtcgtgaccggagccaacgtagaaaagctaccgggactcaacactctcggcctctccatgtcccgcatcgactacgccccaaacggcctaaacccaccccatgtccacccacgtgcctccgagatcattttcgtccttgaaggtcagctctatgttggctttgtaacaaccgctggaaaactcatcgccaagaaccttaacaagggagacgttttcaccttccccaagggactcatccatttccagaagaacattgccaacagtccagcatctgtactcgcagccttcgatagccaattgcccggaacacaatcacttgtcgcctctctctttggagctcttcccgatgacattctggccaagtcattccagctcaaacacaaacaggttaagaagatcaaactgagatacgcacccaagaaatgagtttgtttttgtttatattgtaaacactaagcaaagaagaatgaatcaatataaagtttgcaactttaaaactattatgagatgaaactaaagaactgataaaaagctttgttttcattgtttc

SEQ ID NO: 29517 - protein, 213 aa, Arabidopsis thaliana
  peptide (1)..(213): Ceres Seq. ID no. 13496879
MASFATHLVVVVTMLFVAMASAEMLQDVCVADLSNAVKVNGYTCKDSTQITPEDFYFKGLANIAATNTSTGSVVTGANVEKLPGLNTLGLSMSRIDYAPNGLNPPHVHPRASEIIFVLEGQLYVGFVTTAGKLIAKNLNKGDVFTFPKGLIHFQKNIANSPASVLAAFDSQLPGTQSLVASLFGALPDDILAKSFQLKHKQVKKIKLRYAPKK

SEQ ID NO: 29518 - protein, 200 aa, Arabidopsis thaliana
  peptide (1)..(200): Ceres Seq. ID no. 13496880
MLFVAMASAEMLQDVCVADLSNAVKVNGYTCKDSTQITPEDFYFKGLANIAATNTSTGSVVTGANVEKLPGLNTLGLSMSRIDYAPNGLNPPHVHPRASEIIFVLEGQLYVGFVTTAGKLIAKNLNKGDVFTFPKGLIHFQKNIANSPASVLAAFDSQLPGTQSLVASLFGALPDDILAKSFQLKHKQVKKIKLRYAPKK

SEQ ID NO: 29519 - protein, 195 aa, Arabidopsis thaliana
  peptide (1)..(195): Ceres Seq. ID no. 13496881
MASAEMLQDVCVADLSNAVKVNGYTCKDSTQITPEDFYFKGLANIAATNTSTGSVVTGANVEKLPGLNTLGLSMSRIDYAPNGLNPPHVHPRASEIIFVLEGQLYVGFVTTAGKLIAKNLNKGDVFTFPKGLIHFQKNIANSPASVLAAFDSQLPGTQSLVASLFGALPDDILAKSFQLKHKQVKKIKLRYAPKK

SEQ ID NO: 29520 - DNA, 980 bp, Arabidopsis thaliana
  misc_feature (1)..(980): Ceres Seq. ID no. 13499491
  misc_feature (1)..(980): Ortholog of  Ceres SEQ ID NO 13594418 as cited in SEQ ID NO 60153
gaagaaggtttcggaagtaaatatgtcttccttggggagcagcaaatccctgagggatgagatggaggtaacaaccgccgatgtttttccggaggttaacgccgccgctgtgacggaaaatcttgatcggaacgagcttgtgcttgctgacggagtcgtgtcggctgaggaaaggaatattgagccagacaatcgtggagagaggaagatagagagcgagtcgcctccagaggatgatgtttgcccgatctgtttcggctcctttacggttccgtgtcgtggaaattgtggtcattggtattgcggaaattgcatcttgcagtactggaactatgctgcaatatctaggccttgcaagtgtcccatgtgtgttaggcacatcacgaagctgtcaccagaaccatctttgcaagagcgtcaggagcaagaggtgaaggaggttcttgataaagtccgtaggtataaccgtctctttgttggaggtctaactggctttgttcagaaggtgcatgagcttccgtttctagtgaagagaatggtgtggcatatgatggatacagatgtgaacaatctgtattttcacgaagtgcgcatctttgcaatgttcatgagtaccctttacactgccgcagagtttaacttcattccaacgggcgggttcagaatagtgacagtttttgactacgctgcgattgctatgatcctgattctacgcttagtagggatatatcggaggagacgcctagctcagcaggttagacatctagcagctgcagcaattgagccggaattagagcaaagggaattgtaacagacacgtgaatctattaagtcttgtgcagtttgatccttgtggataagtttggtagtagatcatagaaacctcgagagtcgtgtgcagttttacagacaatgatattgcagactttaaaagtatatacatatctccttttctaacagtggaaataaaatattgattg

SEQ ID NO: 29521 - protein, 269 aa, Arabidopsis thaliana
  peptide (1)..(269): Ceres Seq. ID no. 13499492
KKVSEVNMSSLGSSKSLRDEMEVTTADVFPEVNAAAVTENLDRNELVLADGVVSAEERNIEPDNRGERKIESESPPEDDVCPICFGSFTVPCRGNCGHWYCGNCILQYWNYAAISRPCKCPMCVRHITKLSPEPSLQERQEQEVKEVLDKVRRYNRLFVGGLTGFVQKVHELPFLVKRMVWHMMDTDVNNLYFHEVRIFAMFMSTLYTAAEFNFIPTGGFRIVTVFDYAAIAMILILRLVGIYRRRRLAQQVRHLAAAAIEPELEQREL

SEQ ID NO: 29522 - protein, 262 aa, Arabidopsis thaliana
  peptide (1)..(262): Ceres Seq. ID no. 13499493
MSSLGSSKSLRDEMEVTTADVFPEVNAAAVTENLDRNELVLADGVVSAEERNIEPDNRGERKIESESPPEDDVCPICFGSFTVPCRGNCGHWYCGNCILQYWNYAAISRPCKCPMCVRHITKLSPEPSLQERQEQEVKEVLDKVRRYNRLFVGGLTGFVQKVHELPFLVKRMVWHMMDTDVNNLYFHEVRIFAMFMSTLYTAAEFNFIPTGGFRIVTVFDYAAIAMILILRLVGIYRRRRLAQQVRHLAAAAIEPELEQREL

SEQ ID NO: 29523 - protein, 249 aa, Arabidopsis thaliana
  peptide (1)..(249): Ceres Seq. ID no. 13499494
MEVTTADVFPEVNAAAVTENLDRNELVLADGVVSAEERNIEPDNRGERKIESESPPEDDVCPICFGSFTVPCRGNCGHWYCGNCILQYWNYAAISRPCKCPMCVRHITKLSPEPSLQERQEQEVKEVLDKVRRYNRLFVGGLTGFVQKVHELPFLVKRMVWHMMDTDVNNLYFHEVRIFAMFMSTLYTAAEFNFIPTGGFRIVTVFDYAAIAMILILRLVGIYRRRRLAQQVRHLAAAAIEPELEQREL

SEQ ID NO: 29524 - DNA, 787 bp, Arabidopsis thaliana
  misc_feature (1)..(787): Ceres Seq. ID no. 13580358
  misc_feature (1)..(787): Ortholog of  Ceres SEQ ID NO 13580204 as cited in SEQ ID NO 0
gggtttgtggatactctgaagcgcagcagcagccgtaagaaagaaaccgaggaagaacgatctcagtgagaggacgatcacttcgccgtcgcagtcatgggtcgaatgcatagtagaggtaagggtatctcggcatctgctttgccgtacaagcgttcatctccgagctggctcaagacaacccctcaagatgttgatgagtccatctgcaagtttgcgaagaagggtttgaccccatcgcagattggtgtcattcttcgtgactctcacggaattccacaggtgaaaagtgttactggaagcaagattctcagaattttgaaagctcatggtcttgcacctgagatccctgaggatctgtatcacttgatcaagaaagctgttgctatccgcaagcatcttgagaggaacaggaaagataaggattccaaattcaggctgattcttgtagagagcagaatccatcgtcttgctcgttactacaagaagaccaagaagctcccacccgtctggaagtacgagtctacaactgcaagcactcttgtggcttgagaagaatagagttgatcatgtccttcaagaaggaccatttcattgtctgcattgcaactcaaagctcttcttcttttgaacctatgtatctgttttcgctagttttgatgggttacaacttgctatgagattttgattttagggaacgaatttgtttatgcgaatctttccattatcgttacagcttatctttcaattaacgttaattatcgttctcagagaatttttacagact

SEQ ID NO: 29525 - protein, 151 aa, Arabidopsis thaliana
  peptide (1)..(151): Ceres Seq. ID no. 13580359
MGRMHSRGKGISASALPYKRSSPSWLKTTPQDVDESICKFAKKGLTPSQIGVILRDSHGIPQVKSVTGSKILRILKAHGLAPEIPEDLYHLIKKAVAIRKHLERNRKDKDSKFRLILVESRIHRLARYYKKTKKLPPVWKYESTTASTLVA

SEQ ID NO: 29526 - protein, 148 aa, Arabidopsis thaliana
  peptide (1)..(148): Ceres Seq. ID no. 13580360
MHSRGKGISASALPYKRSSPSWLKTTPQDVDESICKFAKKGLTPSQIGVILRDSHGIPQVKSVTGSKILRILKAHGLAPEIPEDLYHLIKKAVAIRKHLERNRKDKDSKFRLILVESRIHRLARYYKKTKKLPPVWKYESTTASTLVA

SEQ ID NO: 29527 - DNA, 674 bp, Arabidopsis thaliana
  misc_feature (1)..(674): Ceres Seq. ID no. 12393615
  misc_feature (1)..(674): Ortholog of  Ceres SEQ ID NO 12582657 as cited in SEQ ID NO 51070
gatacaaagctttctttataaacgctgcgtcacatcactgaatcaaaaaccctagcgatacttcatctctcgagccggagccgcgttgcgaaagcatttcaatcgtagtctaagagaatgtcgacagtgggagagctcgcttgcagctacgctgttatgatcctcgaggatgagggtattgctatcacggctgacaaaatcgccactttggtgaaagctgctggtgttaccattgagtcatactggccaatgctattcgccaagatggctgagaaacgtaatgtcactgatctcatcatgaacgttggtgctggtggtggaggtggtgcgcctgttgcagctgctgctcctgctgctggcggtggtgctgccgctgctgctcctgctgccgaggagaagaagaaggacgaaccagcagaagagagtgatggagatttgggttttggcttgttcgattaagtgcattttacttgttttttcttcttcgatttgagactatttttttttcgtatcgagctattacttgttttggtctggctgaagaactataattagttgttttctgaaccatatgttgtatgacacaagttttcaagcaaacccatcggctccttctttccttagaaatgattttgtcacctcttttttttttaattcattcgagatattagtct

SEQ ID NO: 29528 - protein, 113 aa, Arabidopsis thaliana
  peptide (1)..(113): Ceres Seq. ID no. 12393616
MSTVGELACSYAVMILEDEGIAITADKIATLVKAAGVTIESYWPMLFAKMAEKRNVTDLIMNVGAGGGGGAPVAAAAPAAGGGAAAAAPAAEEKKKDEPAEESDGDLGFGLFD

SEQ ID NO: 29529 - protein, 100 aa, Arabidopsis thaliana
  peptide (1)..(100): Ceres Seq. ID no. 12393617
MILEDEGIAITADKIATLVKAAGVTIESYWPMLFAKMAEKRNVTDLIMNVGAGGGGGAPVAAAAPAAGGGAAAAAPAAEEKKKDEPAEESDGDLGFGLFD

SEQ ID NO: 29530 - protein, 69 aa, Arabidopsis thaliana
  peptide (1)..(69): Ceres Seq. ID no. 12393618
MLFAKMAEKRNVTDLIMNVGAGGGGGAPVAAAAPAAGGGAAAAAPAAEEKKKDEPAEESDGDLGFGLFD

SEQ ID NO: 29531 - DNA, 1087 bp, Arabidopsis thaliana
  misc_feature (1)..(1087): Ceres Seq. ID no. 12384539
  misc_feature (1)..(1087): Ortholog of  Ceres SEQ ID NO 13595464 as cited in SEQ ID NO 59792
cttcttcttgatctttttcagaaatcaacttcatctcatcattcctctgtttttttctctctatctctcttaataaagaaaatgatgaaaatgagtatcggaacaacaacttccggcgacggtgaaatggagctccgacctggaggaatggttgtacagaaaaggacggatcatagctcaagcgtgccacgtggcattcgggttcgggtcaaatacgggtcggtccatcacgagatcagtatcaactctcaatctactttcggggaattaaagaagatattgtctggtgcgacaggagttcatcatcaagacatgcagattatatacaaagacaaagaaagagactcaaagatgtttcttgatctttctggtgtcaaagatcgttcgaaacttattcttatagaagatcccatttctcaggagaaacgtctccttgagttgaggaaaatcgccaccaaagagaaatcatctaaagcaatctctgatattagtttccaagtcgaaagactcgccggacaactgtcggcgtttgatacagtgattggtaaaggagggaaagttgaagagaagaatcttgagaatttgatggagatgttgatgaatcaattggtcaagctcgatgccatctcaggtgatggagacgttaaattgaagaagaagatgcagaatctaatgattcgatttacaaattgttggaaggaggaaagattacacaagtatgttgaggctctcgacttgttgaagatcaagaactcaaggcaaccgcaaacgaaaccaaagccgcaatacaaggaacgggaaatgctgacattttacgaggaggcgtcaaggaaaccgacggcctcctcatcaagtcctccggtgatcataacaacaagatgggaaacgtttgattctagttcagcctccacggcaaccctacaacccgttagaccggttcacccaaaatttaaatgggaattattcaattaatatctagatattaattacacgataatataatatactatacttagttttcagatttattgtaaggtgtaacatatgtgattatttttgtctagttgtatatgatttgtgattggtc

SEQ ID NO: 29532 - protein, 323 aa, Arabidopsis thaliana
  peptide (1)..(323): Ceres Seq. ID no. 12384540
LLLDLFQKSTSSHHSSVFFSLSLLIKKMMKMSIGTTTSGDGEMELRPGGMVVQKRTDHSSSVPRGIRVRVKYGSVHHEISINSQSTFGELKKILSGATGVHHQDMQIIYKDKERDSKMFLDLSGVKDRSKLILIEDPISQEKRLLELRKIATKEKSSKAISDISFQVERLAGQLSAFDTVIGKGGKVEEKNLENLMEMLMNQLVKLDAISGDGDVKLKKKMQNLMIRFTNCWKEERLHKYVEALDLLKIKNSRQPQTKPKPQYKEREMLTFYEEASRKPTASSSSPPVIITTRWETFDSSSASTATLQPVRPVHPKFKWELFN

SEQ ID NO: 29533 - protein, 296 aa, Arabidopsis thaliana
  peptide (1)..(296): Ceres Seq. ID no. 12384541
MMKMSIGTTTSGDGEMELRPGGMVVQKRTDHSSSVPRGIRVRVKYGSVHHEISINSQSTFGELKKILSGATGVHHQDMQIIYKDKERDSKMFLDLSGVKDRSKLILIEDPISQEKRLLELRKIATKEKSSKAISDISFQVERLAGQLSAFDTVIGKGGKVEEKNLENLMEMLMNQLVKLDAISGDGDVKLKKKMQNLMIRFTNCWKEERLHKYVEALDLLKIKNSRQPQTKPKPQYKEREMLTFYEEASRKPTASSSSPPVIITTRWETFDSSSASTATLQPVRPVHPKFKWELFN

SEQ ID NO: 29534 - protein, 295 aa, Arabidopsis thaliana
  peptide (1)..(295): Ceres Seq. ID no. 12384542
MKMSIGTTTSGDGEMELRPGGMVVQKRTDHSSSVPRGIRVRVKYGSVHHEISINSQSTFGELKKILSGATGVHHQDMQIIYKDKERDSKMFLDLSGVKDRSKLILIEDPISQEKRLLELRKIATKEKSSKAISDISFQVERLAGQLSAFDTVIGKGGKVEEKNLENLMEMLMNQLVKLDAISGDGDVKLKKKMQNLMIRFTNCWKEERLHKYVEALDLLKIKNSRQPQTKPKPQYKEREMLTFYEEASRKPTASSSSPPVIITTRWETFDSSSASTATLQPVRPVHPKFKWELFN

SEQ ID NO: 29535 - DNA, 854 bp, Arabidopsis thaliana
  misc_feature (1)..(854): Ceres Seq. ID no. 12333023
  misc_feature (1)..(854): Ortholog of  Ceres SEQ ID NO 14305944 as cited in SEQ ID NO 52294
  misc_feature (1)..(854): Ortholog of  Ceres SEQ ID NO 13596338 as cited in SEQ ID NO 68005
aaatttctcagtgaaacactgaaacttccttttcagttcgtaccgttcttcgctactttactcattctttagggtttcaaggttttctattggtcttgttgtagactcgagtagcttctgggttcaagccacaaagtttgagccttttttgatttgcagagtcctctgtgtttcttggtttgtctcttgatcaagaatctgagatgggcgagccactaggactgctccaggtgactgttattcaaggaaagaaactggtgatccgagatttcaagtcaagtgatccttatgtgattgtcaaattaggaaatgagtcagcgaagaccaaagtgatcaacaattgcctgaatccagtgtggaatgaggaactgaactttactctgaaagatcctgcagcagttctcgcattggaagtgtttgataaagataggttcaaggcagatgacaagatgggccatgcctctctcagccttcaaccgcttatctcagttgccagactaagacacgtagtccgcgtgtcctctggtgagacaacgcttaggaaagtattaccggatccagagaactgcgtatctcgagagagcacaatcagttgcatagacggagaggtggtgcagagtgtgtggctgaggctgtgtgctgttgaatcgggtgagattgagttgaagataaagttgattgatcctcctggaacaaacaagtagcaatagggtattttatgttagtttgtaacacgagacccgtttgtgactagtataattgcaacatcagtatggtcttgtcttgtttccaagtgtgcctttgtgactactcaccaatttattaggaatctttgagatacattgttctgctcc

SEQ ID NO: 29536 - protein, 166 aa, Arabidopsis thaliana; identical to SEQ ID NO: 26630
  peptide (1)..(166): Ceres Seq. ID no. 12333024

SEQ ID NO: 29537 - protein, 84 aa, Arabidopsis thaliana; identical to SEQ ID NO: 26631
  peptide (1)..(84): Ceres Seq. ID no. 12333025

SEQ ID NO: 29538 - DNA, 1871 bp, Arabidopsis thaliana
  misc_feature (1)..(1871): Ceres Seq. ID no. 13496804
  misc_feature (1)..(1871): Ortholog of  Ceres SEQ ID NO 14314096 as cited in SEQ ID NO 63279
gttccacttcatacccatttgcttccttgaatggcaagtctcttctcctcacgtctcggctctcaatctctttctctcctcatcaacatcttcttcatctttctcatctttctccatttcgcttcacaaactcctcctccctccggatccatccaaaccttaaattcctttgccggcggtgacagtgacagctgcagcggaggactcgccagccttgacgaccaccgttccaagtgttcttacataagatctcaatcaaaatgtggcccacaaggttacatagactatctcaagattttcttctgcatcttcggacaatcccctgttttgggccatctagttttatccgcctggttgtttgttctgttctacttgctcggagacacggccgcgagttacttctgtccttctttagacagcttatctaaggttttgaagctgtctcctacaatggctggagtcacgcttctctctcttggcaacggtgcgcctgatttgttctcaagtgttgtctccttcacaagatcgaataatggcgattttgggctcaactctattttaggcggtgcgttcttcgtctctagcttcgttgttgggacgatttgtgtgttgattggatctagagatgtcgctatcgacagaaatagctttatccgcgacgtggtttttcttcttgtcgctctttgctgtctcggtttgatcatcttcataggcaaagtaaccatttgggtcgctctctgttatctctccatttatctcctctatgtagggtttttatcggtttcacatttctttgaccgcaagaaacgtatgtccgatcagattcttcgtagcagagaagatttggccgagatgggtgtttcgttgctaggctatatagcagaggagaagctggctttgccagagaaaacaactcaagaattcaagattgtgtttgaagattctccaaaaaggcaccgatcttgcttctcggtgctagtgagcataattggactacctctatatctccccaggcggctcacaattcccgtcgtttgcgaagaaaaatggtcaaagccttgcgctgtggtttccacggccatcgctcctgttctactaaccgaactttactgttctcattacagcgggtcacaaagaaacctaatcttgtacataatatccggatctatcgggctaatcgtcggtatcttagcttacttgacgacagaaaaatcacatccgccgaagaaattctcattagtttggcttctaggaggcttcacgatgagtgtgacatggacatacatgatagcacaagagctagtctcattgttaatatccttaggtaatatctttggtataagcccatccgtgctaggactaaccgtcctagcttggggaaattctctaggcgatcttatcgcgaatgtgaccgtggcgtttcacggaggcaacgatggtgctcagatagcactttccggatgctacgcaggcccgctattcaacacggtaattggactaggtgtgccacttgtcatctcctcgttggccgaataccccggggtctacatcattcctagtgacaattcgttgcttgagacactagggttcttaatggtaggcttgctttgggcacttgtgataatgccaaagaagaagatgagacttgataagcttgtcggtgggggcttactcgctatttacctctgtttcttgtccttgaggttggctagagttttcggagtccttgataccgaccggtgaattttatagtaatgtaaattttgttttatttgtttttgtaatagtagttaattcttaaagaaaaaaattgcaaataggtcaaatttgtgggtcttaatttattccttaaatgaaaagatactttgtgc

SEQ ID NO: 29539 - protein, 570 aa, Arabidopsis thaliana
  peptide (1)..(570): Ceres Seq. ID no. 13496805
MASLFSSRLGSQSLSLLINIFFIFLIFLHFASQTPPPSGSIQTLNSFAGGDSDSCSGGLASLDDHRSKCSYIRSQSKCGPQGYIDYLKIFFCIFGQSPVLGHLVLSAWLFVLFYLLGDTAASYFCPSLDSLSKVLKLSPTMAGVTLLSLGNGAPDLFSSVVSFTRSNNGDFGLNSILGGAFFVSSFVVGTICVLIGSRDVAIDRNSFIRDVVFLLVALCCLGLIIFIGKVTIWVALCYLSIYLLYVGFLSVSHFFDRKKRMSDQILRSREDLAEMGVSLLGYIAEEKLALPEKTTQEFKIVFEDSPKRHRSCFSVLVSIIGLPLYLPRRLTIPVVCEEKWSKPCAVVSTAIAPVLLTELYCSHYSGSQRNLILYIISGSIGLIVGILAYLTTEKSHPPKKFSLVWLLGGFTMSVTWTYMIAQELVSLLISLGNIFGISPSVLGLTVLAWGNSLGDLIANVTVAFHGGNDGAQIALSGCYAGPLFNTVIGLGVPLVISSLAEYPGVYIIPSDNSLLETLGFLMVGLLWALVIMPKKKMRLDKLVGGGLLAIYLCFLSLRLARVFGVLDTDR

SEQ ID NO: 29540 - protein, 430 aa, Arabidopsis thaliana
  peptide (1)..(430): Ceres Seq. ID no. 13496806
MAGVTLLSLGNGAPDLFSSVVSFTRSNNGDFGLNSILGGAFFVSSFVVGTICVLIGSRDVAIDRNSFIRDVVFLLVALCCLGLIIFIGKVTIWVALCYLSIYLLYVGFLSVSHFFDRKKRMSDQILRSREDLAEMGVSLLGYIAEEKLALPEKTTQEFKIVFEDSPKRHRSCFSVLVSIIGLPLYLPRRLTIPVVCEEKWSKPCAVVSTAIAPVLLTELYCSHYSGSQRNLILYIISGSIGLIVGILAYLTTEKSHPPKKFSLVWLLGGFTMSVTWTYMIAQELVSLLISLGNIFGISPSVLGLTVLAWGNSLGDLIANVTVAFHGGNDGAQIALSGCYAGPLFNTVIGLGVPLVISSLAEYPGVYIIPSDNSLLETLGFLMVGLLWALVIMPKKKMRLDKLVGGGLLAIYLCFLSLRLARVFGVLDTDR

SEQ ID NO: 29541 - protein, 310 aa, Arabidopsis thaliana
  peptide (1)..(310): Ceres Seq. ID no. 13496807
MSDQILRSREDLAEMGVSLLGYIAEEKLALPEKTTQEFKIVFEDSPKRHRSCFSVLVSIIGLPLYLPRRLTIPVVCEEKWSKPCAVVSTAIAPVLLTELYCSHYSGSQRNLILYIISGSIGLIVGILAYLTTEKSHPPKKFSLVWLLGGFTMSVTWTYMIAQELVSLLISLGNIFGISPSVLGLTVLAWGNSLGDLIANVTVAFHGGNDGAQIALSGCYAGPLFNTVIGLGVPLVISSLAEYPGVYIIPSDNSLLETLGFLMVGLLWALVIMPKKKMRLDKLVGGGLLAIYLCFLSLRLARVFGVLDTDR

SEQ ID NO: 29542 - DNA, 2338 bp, Arabidopsis thaliana
  misc_feature (1)..(2338): Ceres Seq. ID no. 13497306
  misc_feature (1)..(2338): Ortholog of  Ceres SEQ ID NO 13623192 as cited in SEQ ID NO 1286
  misc_feature (1)..(2338): Ortholog of  Ceres SEQ ID NO 13594171 as cited in SEQ ID NO 60359
  misc_feature (1)..(2338): Ortholog of  Ceres SEQ ID NO 14301866 as cited in SEQ ID NO 60955
  misc_feature (1)..(2338): Ortholog of  Ceres SEQ ID NO 13590645 as cited in SEQ ID NO 62109
agaaaccaccattaaccctaatttttgccgaactcgtcttctgctgaaaaccctagatctacagatctcccgaatctcccagggagataatttgaagatggtgtctgacgctagcaagaagaaggcagctcagaagaaagctgctgccgccgctaaaagaggtggtaaagctgctgctccatccaaatccgccgctacttcttccaacggtgttgatagcttgtcaagcggtgtcgatgctcttcaaatttctgatcggacttgtaccggagttctctgttctcatcctcaatctagagatatccgaatagaatctctgtctgtgacgtttcatggttatgaccttattgttgattcaatgttggagcttaactatggaaggcgttatggtctccttgggttgaatggttgtggaaagtccactcttttaactgcaatcggacgcagagagataccgattccggatcaaatggatatctaccatttgtctcacgagattgaagctactgacatgtcttccctggaggctgttgttagctgtgatgaggagaggttgaggttagagaaagaagttgaaattcttgtacagcaggatgatggaggcggagagcgtcttcaatctatctatgagaggttagacgccatggatgcagaaaccgctgagaaacgtgctgctgaaattctgtttggacttggtttcgacaaggaaatgcaggcgaagaagacaaaagatttctctggtggttggaggatgagaattgcattggcaagagcactcttcattatgccgacaatccttttgcttgatgagccgactaatcatttagatttggaagcttgtgtgtggctagaagagagcctgaagaattttgatcgcatccttgttgtggtatcccactcacaggatttcttgaatggagtgtgtacaaacatcatccacatgcagagcaaacagctcaagtactacactggtaactttgatcagtattgccagactcgttctgaacttgaagagaaccagatgaaacaatacagatgggagcaggagcagatttctcacatgaaggagtacattgctcggtttggtcacggttcagccaaacttgctcgtcaagcacagagtaaggagaaaacattggcaaagatggagagaggtgggctcactgaaaaggttgctagagacagtgttctcgttttccgttttgctgatgttgggaagcttccaccgccagtgcttcagtttgttgaagtgtcttttggttacacaccggactatcttatttacaagaacattgactttggtgtcgacttggactcgagggttgcccttgtgggacctaatggagctggaaagagtacacttttgaagctcatgactggtgaattgcacccaactgaaggaatggtgcgacgtcacaaccacttgaagattgctcagtaccatcagcatctggctgagaagctagacttggaattgcctgcacttctctacatgatgagggagttcccgggtactgaagaggagaaaatgagagctgcgattggtaggtttggtctaactggtaaggctcaagtgatgccaatgaagaatctatctgacggacaaaggagcagagtgatctttgcgtggttagcttataagcagcctaacatgcttcttcttgatgagcctactaaccatttggatatcgagacaatcgactcgcttgctgaggcattgaatgagtgggatggtggtttggttctggttagtcacgacttcaggttgatcaaccaagtggctcatgagatatgggtttgcgagaaacaatgcatcactaaatggaatggtgacattatggacttcaagaggcaccttaaggctaaagccggacttgaagattgaagatagagagtcgagtcttcttctcttgatggaaaatggaaaagactcagattggggtcacatgctaagagagagagagggaaggctttggtttttttgatgggtttgggaatggtttttaacgagttctaaagccacacacttgagagacagagaaaccatactcactaatctctgcatttccttaagaggtcagagattctttctatattagtattatcattatcatgtgcaccttctttttttttcgttattgttgttgaacgtttttttgaaggcgaaacagagagaaaagtaatattttttggtggtattgtaggattttttttttctgtttttttaaagactgagatgttgacgattatggtattatatttaatattaaagtgggaatattctcataattatattcgaatattctcataattatattcgaatattcgttggaaaggc

SEQ ID NO: 29543 - protein, 627 aa, Arabidopsis thaliana
  peptide (1)..(627): Ceres Seq. ID no. 13497307
ETTINPNFCRTRLLLKTLDLQISRISQGDNLKMVSDASKKKAAQKKAAAAAKRGGKAAAPSKSAATSSNGVDSLSSGVDALQISDRTCTGVLCSHPQSRDIRIESLSVTFHGYDLIVDSMLELNYGRRYGLLGLNGCGKSTLLTAIGRREIPIPDQMDIYHLSHEIEATDMSSLEAVVSCDEERLRLEKEVEILVQQDDGGGERLQSIYERLDAMDAETAEKRAAEILFGLGFDKEMQAKKTKDFSGGWRMRIALARALFIMPTILLLDEPTNHLDLEACVWLEESLKNFDRILVVVSHSQDFLNGVCTNIIHMQSKQLKYYTGNFDQYCQTRSELEENQMKQYRWEQEQISHMKEYIARFGHGSAKLARQAQSKEKTLAKMERGGLTEKVARDSVLVFRFADVGKLPPPVLQFVEVSFGYTPDYLIYKNIDFGVDLDSRVALVGPNGAGKSTLLKLMTGELHPTEGMVRRHNHLKIAQYHQHLAEKLDLELPALLYMMREFPGTEEEKMRAAIGRFGLTGKAQVMPMKNLSDGQRSRVIFAWLAYKQPNMLLLDEPTNHLDIETIDSLAEALNEWDGGLVLVSHDFRLINQVAHEIWVCEKQCITKWNGDIMDFKRHLKAKAGLED

SEQ ID NO: 29544 - protein, 595 aa, Arabidopsis thaliana
  peptide (1)..(595): Ceres Seq. ID no. 13497308
MVSDASKKKAAQKKAAAAAKRGGKAAAPSKSAATSSNGVDSLSSGVDALQISDRTCTGVLCSHPQSRDIRIESLSVTFHGYDLIVDSMLELNYGRRYGLLGLNGCGKSTLLTAIGRREIPIPDQMDIYHLSHEIEATDMSSLEAVVSCDEERLRLEKEVEILVQQDDGGGERLQSIYERLDAMDAETAEKRAAEILFGLGFDKEMQAKKTKDFSGGWRMRIALARALFIMPTILLLDEPTNHLDLEACVWLEESLKNFDRILVVVSHSQDFLNGVCTNIIHMQSKQLKYYTGNFDQYCQTRSELEENQMKQYRWEQEQISHMKEYIARFGHGSAKLARQAQSKEKTLAKMERGGLTEKVARDSVLVFRFADVGKLPPPVLQFVEVSFGYTPDYLIYKNIDFGVDLDSRVALVGPNGAGKSTLLKLMTGELHPTEGMVRRHNHLKIAQYHQHLAEKLDLELPALLYMMREFPGTEEEKMRAAIGRFGLTGKAQVMPMKNLSDGQRSRVIFAWLAYKQPNMLLLDEPTNHLDIETIDSLAEALNEWDGGLVLVSHDFRLINQVAHEIWVCEKQCITKWNGDIMDFKRHLKAKAGLED

SEQ ID NO: 29545 - protein, 508 aa, Arabidopsis thaliana
  peptide (1)..(508): Ceres Seq. ID no. 13497309
MLELNYGRRYGLLGLNGCGKSTLLTAIGRREIPIPDQMDIYHLSHEIEATDMSSLEAVVSCDEERLRLEKEVEILVQQDDGGGERLQSIYERLDAMDAETAEKRAAEILFGLGFDKEMQAKKTKDFSGGWRMRIALARALFIMPTILLLDEPTNHLDLEACVWLEESLKNFDRILVVVSHSQDFLNGVCTNIIHMQSKQLKYYTGNFDQYCQTRSELEENQMKQYRWEQEQISHMKEYIARFGHGSAKLARQAQSKEKTLAKMERGGLTEKVARDSVLVFRFADVGKLPPPVLQFVEVSFGYTPDYLIYKNIDFGVDLDSRVALVGPNGAGKSTLLKLMTGELHPTEGMVRRHNHLKIAQYHQHLAEKLDLELPALLYMMREFPGTEEEKMRAAIGRFGLTGKAQVMPMKNLSDGQRSRVIFAWLAYKQPNMLLLDEPTNHLDIETIDSLAEALNEWDGGLVLVSHDFRLINQVAHEIWVCEKQCITKWNGDIMDFKRHLKAKAGLED

SEQ ID NO: 29546 - DNA, 1129 bp, Arabidopsis thaliana
  misc_feature (1)..(1129): Ceres Seq. ID no. 12332178
  misc_feature (1)..(1129): Ortholog of  Ceres SEQ ID NO 13655598 as cited in SEQ ID NO 64077
  misc_feature (1)..(1129): Ortholog of  Ceres SEQ ID NO 15179351 as cited in SEQ ID NO 0
  misc_feature (1)..(1129): Ortholog of  Ceres SEQ ID NO 15180408 as cited in SEQ ID NO 0
aactattaagaagaagaaaacactcgatcggctatatatatacgtacaacacataagaaaaccaaaccaatcacttcactctctctaatcaaaaagcttttaacctcagccgttaaatctttctccgatcatgccgaccagaaacatcgccattggtggagtccaagaagaggtctatcaccccaacgcacttagggcggcgctcgctgagtttatctcgactttgatcttcgtcttcgccggctcaggctccggaattgctttcaacaagatcactgacaatggagcaaccactccttccggcctcgtcgccgctgccttagctcatgctttcggtctctttgtcgctgtctctgttggcgctaacatttccggtggccacgttaaccctgccgttaccttcggtgtcttactcggtggtaacatcactctcctccgtggtattctctactggattgctcagcttcttggctccgtcgccgcttgtttcctccttagctttgccaccggtggcgagccaatcccagcgttcggtctctctgccggagtcagatcattaaacgctctcgtcttcgagatcgtgatgaccttcgggctcgtctacaccgtctacgccacagccgttgatcccaagaacggtagtctcggaacaatcgcaccaatcgccataggtttcatcgttagagataacatcctcgctggtggagctttcagcggagcttccatgaacccagccgttgctttcggaccagccgtcgtaagctggacgtggaccaaccactgggtttactgggctggtcctcttattggtggtggactcgccggaattatctacgactttgtcttcatcgatgaaaatgcccacgagcaattgcctaccaccgattactgaagacgtcaaattcaacgttgttaatctgatgaatttttcgtgatttgcttttttaatttgcatcgtaatgggtttctggccgttggatcatttttagatgaatctttgtctattgattgatcatttatgtgtctttgggtttgttgttggagttgtaatatctctggaaggcttttgtgcaattgtattgtacggtttaataactataattgagaaaaccagggaatgtgaattatg

SEQ ID NO: 29547 - protein, 253 aa, Arabidopsis thaliana
  peptide (1)..(253): Ceres Seq. ID no. 12332179
MPTRNIAIGGVQEEVYHPNALRAALAEFISTLIFVFAGSGSGIAFNKITDNGATTPSGLVAAALAHAFGLFVAVSVGANISGGHVNPAVTFGVLLGGNITLLRGILYWIAQLLGSVAACFLLSFATGGEPIPAFGLSAGVRSLNALVFEIVMTFGLVYTVYATAVDPKNGSLGTIAPIAIGFIVRDNILAGGAFSGASMNPAVAFGPAVVSWTWTNHWVYWAGPLIGGGLAGIIYDFVFIDENAHEQLPTTDY

SEQ ID NO: 29548 - DNA, 2121 bp, Arabidopsis thaliana; identical to SEQ ID NO: 24365
  misc_feature (1)..(2121): Ceres Seq. ID no. 12601883
  misc_feature (1)..(2121): Ortholog of  Ceres SEQ ID NO 15179194 as cited in SEQ ID NO 0

SEQ ID NO: 29549 - protein, 181 aa, Arabidopsis thaliana; identical to SEQ ID NO: 24366
  peptide (1)..(181): Ceres Seq. ID no. 12601884

SEQ ID NO: 29550 - protein, 177 aa, Arabidopsis thaliana; identical to SEQ ID NO: 24367
  peptide (1)..(177): Ceres Seq. ID no. 12601885

SEQ ID NO: 29551 - protein, 162 aa, Arabidopsis thaliana; identical to SEQ ID NO: 24368
  peptide (1)..(162): Ceres Seq. ID no. 12601886

SEQ ID NO: 29552 - DNA, 607 bp, Arabidopsis thaliana
  misc_feature (1)..(607): Ceres Seq. ID no. 12332180
  misc_feature (1)..(607): Ortholog of  Ceres SEQ ID NO 12608953 as cited in SEQ ID NO 51227
atcttaatttccctcgcattgagaattttcaactttttctatctctcttcccaaatcacaaatggcgggtcgcggcaaaactctcggatctggcgttgctaagaaatcaacatcgagaagcagcaaagccggtctccaattccccgttggtcgtatcgctcgttttctaaagaacggcaagtacgcaacacgtgttggtgccggagctccggtttacttagccgccgttctcgaatacctcgccgctgaggtattggaattggctggaaacgcagctagggataacaagaagactaggattgtgccacgtcacattcagctcgcggtgagaaacgatgaggagctgagtaaactgcttggagatgtgacgattgctaatggaggtgtgatgcctaacattcacagtcttcttcttcccaagaaagctggtgcttcaaaaccttccgctgatgaagattagattagggatttgtgttgtggttgtttagctaattaatgtgtagcttagtctttcattagattagatctgaattagttttcattaatggtgttgtgtagtctctcttttgcttcaaaaacaagtattaaaatcttattattttgaatt

SEQ ID NO: 29553 - protein, 132 aa, Arabidopsis thaliana
  peptide (1)..(132): Ceres Seq. ID no. 12332181
MAGRGKTLGSGVAKKSTSRSSKAGLQFPVGRIARFLKNGKYATRVGAGAPVYLAAVLEYLAAEVLELAGNAARDNKKTRIVPRHIQLAVRNDEELSKLLGDVTIANGGVMPNIHSLLLPKKAGASKPSADED

SEQ ID NO: 29554 - DNA, 854 bp, Arabidopsis thaliana
  misc_feature (1)..(854): Ceres Seq. ID no. 12333072
  misc_feature (1)..(854): Ortholog of  Ceres SEQ ID NO 13594465 as cited in SEQ ID NO 51233
  misc_feature (1)..(854): Ortholog of  Ceres SEQ ID NO 13585110 as cited in SEQ ID NO 60647
gttttcaagtctcgaactttgttggaatcggcgaagtgataatttcgaagcttgatcggtaaatccaggagcttttggatcggaatctgttcgctgatgctttggtgaaaatgggtttcggtgcaattagatcgattttgcgtccattgtcgagaaccttagtttcgcgtgccgtcgttaactactcgtctgcgccgttcaatgcgacgattccggctgcgaaaccccagttatgttccttcttcggtggatcgattactcatttgaggttaccatggattccaatggctaaccattttcatagcttaagcttgactgatactcggctcccgaagagacgacccatgactcatcccaagaggaaaagatccaaattgaaacctccagggccttatgcatacgttcaatatacacctggccagccaatttcttcaaacaatcctaatgagggaagtgtgaagagaagaaatgcgaagaagcgcatagggcagcgtcgtgcttttatactgtctgagaagaagaagaggcaagcgctggtgcaagaggcgaagaggaagaagagaattaagcaagtggaacgtaagatggctgctgtcgctagggaccgagcatgggctgaaagactgattgagcttcaacagctggaagaagagaagaagaaatcaatgtcttcttgagatcaaacatagaaataatcctaaatgacaatctcttttcttgtcttgagttagagaattactcttctttgttgtgtttggcatgttctcttgagagttaactcgctatgttgtctgaagaactgagagttacttgacgtttgtgttctttatatccagtcatgtgtttcttgtttc

SEQ ID NO: 29555 - protein, 188 aa, Arabidopsis thaliana
  peptide (1)..(188): Ceres Seq. ID no. 12333073
MGFGAIRSILRPLSRTLVSRAVVNYSSAPFNATIPAAKPQLCSFFGGSITHLRLPWIPMANHFHSLSLTDTRLPKRRPMTHPKRKRSKLKPPGPYAYVQYTPGQPISSNNPNEGSVKRRNAKKRIGQRRAFILSEKKKRQALVQEAKRKKRIKQVERKMAAVARDRAWAERLIELQQLEEEKKKSMSS

SEQ ID NO: 29556 - protein, 130 aa, Arabidopsis thaliana
  peptide (1)..(130): Ceres Seq. ID no. 12333074
MANHFHSLSLTDTRLPKRRPMTHPKRKRSKLKPPGPYAYVQYTPGQPISSNNPNEGSVKRRNAKKRIGQRRAFILSEKKKRQALVQEAKRKKRIKQVERKMAAVARDRAWAERLIELQQLEEEKKKSMSS

SEQ ID NO: 29557 - protein, 110 aa, Arabidopsis thaliana
  peptide (1)..(110): Ceres Seq. ID no. 12333075
MTHPKRKRSKLKPPGPYAYVQYTPGQPISSNNPNEGSVKRRNAKKRIGQRRAFILSEKKKRQALVQEAKRKKRIKQVERKMAAVARDRAWAERLIELQQLEEEKKKSMSS

SEQ ID NO: 29558 - DNA, 943 bp, Arabidopsis thaliana
  misc_feature (1)..(943): Ceres Seq. ID no. 12332131
  misc_feature (1)..(943): Ortholog of  Ceres SEQ ID NO 14301727 as cited in SEQ ID NO 61209
aaccactccatctctcgtgctgaccacgctccgattctccatttctttcccttttgacttttcacttccaatttttcggtatcagatctggacgatggcttcacaaatctctcagcttgcttgtttctcatccaccaatcgccaatttcacttccaaagccgatcgtttccatgccctatgattcgtccccagtcttttgtagttaaaagtgttgatgggaatagctctgaaacaccagcttctctaagctatacagctgaggtttcaaaacctgttgttgagaaaacatccaaaccgtattccactgttgatgaaactgctaccaataaagagagcatcacagagccagtagaggaagatgttgccacacaaccaataagagcagcaaagatccacgacttctgtttcggcattccttatggtggtctcgttgtgagtggagggcttcttggttttgcgttttcacgaaatcttacaagtttaagtactggtgtcctctatggtggtggccttctagcccttagtacactgagcttaaagatttggcgagagggaaaatctagtttcccttatatactaggacaagcagtgctttcagctgtcgtcttctggaagaacttcacagcttattcgatgactaagaagctgtttccggccggggtttttgctgtcatcagtgcttgcatgttgtgtttctattcatatgtggtgctctctggaggaaacccacctccaaagaaattgaaaccatctgcgactagtccttcatactgaagggactttacataggtttagatttaaaaaagtggagatcttctctcttttgataactctggtctgttggattactggtgtaattttatactctttacgaattgatacacttggttttgtttgtgacctgttctttccagtgtcataatctaaagttttgattttctc

SEQ ID NO: 29559 - protein, 257 aa, Arabidopsis thaliana
  peptide (1)..(257): Ceres Seq. ID no. 12332132
TTPSLVLTTLRFSISFPFDFSLPIFRYQIWTMASQISQLACFSSTNRQFHFQSRSFPCPMIRPQSFVVKSVDGNSSETPASLSYTAEVSKPVVEKTSKPYSTVDETATNKESITEPVEEDVATQPIRAAKIHDFCFGIPYGGLVVSGGLLGFAFSRNLTSLSTGVLYGGGLLALSTLSLKIWREGKSSFPYILGQAVLSAVVFWKNFTAYSMTKKLFPAGVFAVISACMLCFYSYVVLSGGNPPPKKLKPSATSPSY

SEQ ID NO: 29560 - protein, 226 aa, Arabidopsis thaliana
  peptide (1)..(226): Ceres Seq. ID no. 12332133
MASQISQLACFSSTNRQFHFQSRSFPCPMIRPQSFVVKSVDGNSSETPASLSYTAEVSKPVVEKTSKPYSTVDETATNKESITEPVEEDVATQPIRAAKIHDFCFGIPYGGLVVSGGLLGFAFSRNLTSLSTGVLYGGGLLALSTLSLKIWREGKSSFPYILGQAVLSAVVFWKNFTAYSMTKKLFPAGVFAVISACMLCFYSYVVLSGGNPPPKKLKPSATSPSY

SEQ ID NO: 29561 - protein, 198 aa, Arabidopsis thaliana
  peptide (1)..(198): Ceres Seq. ID no. 12332134
MIRPQSFVVKSVDGNSSETPASLSYTAEVSKPVVEKTSKPYSTVDETATNKESITEPVEEDVATQPIRAAKIHDFCFGIPYGGLVVSGGLLGFAFSRNLTSLSTGVLYGGGLLALSTLSLKIWREGKSSFPYILGQAVLSAVVFWKNFTAYSMTKKLFPAGVFAVISACMLCFYSYVVLSGGNPPPKKLKPSATSPSY

SEQ ID NO: 29562 - DNA, 864 bp, Arabidopsis thaliana
  misc_feature (1)..(864): Ceres Seq. ID no. 12332127
  misc_feature (1)..(864): Ortholog of  Ceres SEQ ID NO 13594647 as cited in SEQ ID NO 52208
  misc_feature (1)..(864): Ortholog of  Ceres SEQ ID NO 13637658 as cited in SEQ ID NO 53077
  misc_feature (1)..(864): Ortholog of  Ceres SEQ ID NO 13664275 as cited in SEQ ID NO 61120
  misc_feature (1)..(864): Ortholog of  Ceres SEQ ID NO 15174168 as cited in SEQ ID NO 61888
  misc_feature (1)..(864): Ortholog of  Ceres SEQ ID NO 12635311 as cited in SEQ ID NO 0
  misc_feature (1)..(864): Ortholog of  Ceres SEQ ID NO 13599510 as cited in SEQ ID NO 0
  misc_feature (1)..(864): Ortholog of  Ceres SEQ ID NO 13599622 as cited in SEQ ID NO 0
  misc_feature (1)..(864): Ortholog of  Ceres SEQ ID NO 13600020 as cited in SEQ ID NO 0
atatcaagcttctacacacgatctagcttaaagttctgtaacctaagcgataatcacttagctactccaagtttcttcttaatttctctcacactagtagttctaagctttagaaatggcaacagcatcgttcaacatgcaatcagtcttcgccggtggattaaccactcgcaagatcaacaccaacaagcttttctccgccggtagcttccctaacctcaagaggaattatccggtgggagtgagatgcatggctgagggaggacccacgaatgaagactcttcaccagcaccatctacctcggccgctcagccgttgccgaagtcaccatctcctcctcctcctatgaaacctaaggtgagcacaaagtttagcgacttgctagcgtttagcggtccagcaccagagaggattaacggacgtttagcgatggttggattcgttgcggcgttggctgtcgagctatccaagggtgaaaacgttttagctcagatctccgacggtggcgtctcatggttcctcggtacaacagcgatcttgacacttgcgtcgcttgtgccgcttttcaagggcataagcgttgagtccaagtccaaaggtatcatgacgtcagacgctgagctttggaacggacgtttcgcgatgctcggtttggtcgcgttggcgttcactgagttcgtcaaaggtgggacactcgtctaaggaaaagagagcacgttatggggaggatgttttaatacgattttgcccatgtaatttctctgtaaagtaatctgtgttaggcctactgtgtgttttatacatgtgtactaagtgacattttgaaacttcgggttaaaaacactttaaaattagtggtgttc

SEQ ID NO: 29563 - protein, 195 aa, Arabidopsis thaliana
  peptide (1)..(195): Ceres Seq. ID no. 12332128
MATASFNMQSVFAGGLTTRKINTNKLFSAGSFPNLKRNYPVGVRCMAEGGPTNEDSSPAPSTSAAQPLPKSPSPPPPMKPKVSTKFSDLLAFSGPAPERINGRLAMVGFVAALAVELSKGENVLAQISDGGVSWFLGTTAILTLASLVPLFKGISVESKSKGIMTSDAELWNGRFAMLGLVALAFTEFVKGGTLV

SEQ ID NO: 29564 - protein, 188 aa, Arabidopsis thaliana
  peptide (1)..(188): Ceres Seq. ID no. 12332129
MQSVFAGGLTTRKINTNKLFSAGSFPNLKRNYPVGVRCMAEGGPTNEDSSPAPSTSAAQPLPKSPSPPPPMKPKVSTKFSDLLAFSGPAPERINGRLAMVGFVAALAVELSKGENVLAQISDGGVSWFLGTTAILTLASLVPLFKGISVESKSKGIMTSDAELWNGRFAMLGLVALAFTEFVKGGTLV

SEQ ID NO: 29565 - protein, 150 aa, Arabidopsis thaliana
  peptide (1)..(150): Ceres Seq. ID no. 12332130
MAEGGPTNEDSSPAPSTSAAQPLPKSPSPPPPMKPKVSTKFSDLLAFSGPAPERINGRLAMVGFVAALAVELSKGENVLAQISDGGVSWFLGTTAILTLASLVPLFKGISVESKSKGIMTSDAELWNGRFAMLGLVALAFTEFVKGGTLV

SEQ ID NO: 29566 - DNA, 854 bp, Arabidopsis thaliana
  misc_feature (1)..(854): Ceres Seq. ID no. 12369952
  misc_feature (1)..(854): Ortholog of  Ceres SEQ ID NO 15224629 as cited in SEQ ID NO 56014
  misc_feature (1)..(854): Ortholog of  Ceres SEQ ID NO 13595484 as cited in SEQ ID NO 56583
  misc_feature (1)..(854): Ortholog of  Ceres SEQ ID NO 15173971 as cited in SEQ ID NO 63609
  misc_feature (1)..(854): Ortholog of  Ceres SEQ ID NO 15173400 as cited in SEQ ID NO 63712
gaacaaggcttgttctccaagacgctttttaataagctctctctcacaacgccggatctgtagacggaagatggagtgtgtattcggtcttgttgggaatggattcgccatcgttgctgctgatacatcggcggttcatagtatccttcttcacaaaaacaacgaagacaagatcatggtacttgactcacacaagcttgttgctgctagtggcgagcctggtgaccgggttcagtttacggagtacgttcagaagaatgtgtccttgtacaaattcagaaatggaatcccgttgactaccgccgctgctgccaatttcactcgcggagagctcgctactgctttgaggaagaatccgtattcggtgaatatcctgatggctggctatgacgatgagtctggtgcatcactttactacatcgactacattgcaactcttcacaaagtcgacaagggagcttttggttacggctcctacttctccctctccacgatggacaggcattaccgcagtgacatgtctgtagaagaagccattgaactagttgacaaatgcatacttgagatccggtcaagactcgttgttgcaccaccaaactttgtgatcaagattgttgacaaagatggagctcgtgattacgcttggcgtcagtccgtaaaggatgtcacaactgctgttgtctgagttggttttgtgtttggttttcagatgttatgtgtctgtgacatttgcttttgattttaagtcgggagttagtgttttgacactttttaatcgttgagcatcaatagtgtttgcgattccataaaaatgatgatgtattacttcaacaacacaaaataaatctcactcg

SEQ ID NO: 29567 - protein, 227 aa, Arabidopsis thaliana
  peptide (1)..(227): Ceres Seq. ID no. 12369953
NKACSPRRFLISSLSQRRICRRKMECVFGLVGNGFAIVAADTSAVHSILLHKNNEDKIMVLDSHKLVAASGEPGDRVQFTEYVQKNVSLYKFRNGIPLTTAAAANFTRGELATALRKNPYSVNILMAGYDDESGASLYYIDYIATLHKVDKGAFGYGSYFSLSTMDRHYRSDMSVEEAIELVDKCILEIRSRLVVAPPNFVIKIVDKDGARDYAWRQSVKDVTTAVV

SEQ ID NO: 29568 - protein, 204 aa, Arabidopsis thaliana
  peptide (1)..(204): Ceres Seq. ID no. 12369954
MECVFGLVGNGFAIVAADTSAVHSILLHKNNEDKIMVLDSHKLVAASGEPGDRVQFTEYVQKNVSLYKFRNGIPLTTAAAANFTRGELATALRKNPYSVNILMAGYDDESGASLYYIDYIATLHKVDKGAFGYGSYFSLSTMDRHYRSDMSVEEAIELVDKCILEIRSRLVVAPPNFVIKIVDKDGARDYAWRQSVKDVTTAVV

SEQ ID NO: 29569 - protein, 169 aa, Arabidopsis thaliana
  peptide (1)..(169): Ceres Seq. ID no. 12369955
MVLDSHKLVAASGEPGDRVQFTEYVQKNVSLYKFRNGIPLTTAAAANFTRGELATALRKNPYSVNILMAGYDDESGASLYYIDYIATLHKVDKGAFGYGSYFSLSTMDRHYRSDMSVEEAIELVDKCILEIRSRLVVAPPNFVIKIVDKDGARDYAWRQSVKDVTTAVV

SEQ ID NO: 29570 - DNA, 979 bp, Arabidopsis thaliana
  misc_feature (1)..(979): Ceres Seq. ID no. 12333275
  misc_feature (1)..(979): Ortholog of  Ceres SEQ ID NO 14306264 as cited in SEQ ID NO 1386
  misc_feature (1)..(979): Ortholog of  Ceres SEQ ID NO 15179159 as cited in SEQ ID NO 0
aaagaacaagaaaaaagggtgttgttacgatggcatcgagtgataaggttccggtggcgtgtccggcaagcagtggagatggaaaggagccaatgggaaatccgacgaaaaccactacggcgatgctagagaaaggaacggctatgatgcaatcgatgaaaccgatcaggcaaatgagcctccacgtgtgttcattcgcttgctatagccatgatcccggtcgtcagatcgaagttcatatttacggccaccgtgtaaaccaggatttcctccaatgtgctgtctacgattccaattcctctaaggctcatctcatagggatcgaatatatagtgtcggaaaagttattcgaaagtctctcaccggaggaacaaaagctttggcactcgcatgattacgaggttcatgattttcgatacattgtccgatatgtttattatttatctgaaaaacgaaaatgatcgaatgagagttgtttttagatccaaatggctcttctagtaactccaagggtccctgagctcgttgcgaaaccggagcttaaaaatcttgccaaatcttacgggaaattttggtgtacatggcagattgaccgaggggataaattaccactaggtgtaccatcactaatggtatcgccacaagacgtgaatctcgggagaatcaaaccggagttggtgaaaaagagagatgaagaacatggaaactcgactgaatcgttgaagccgtcaagagatgggatctgtggaccagagaagaagaacctggttgctgattattgggttaggtttaggaaaggctttgcgcttgatgttgttgaaacagatatgaagagaacagctcccttcccctaacttttgtgtgtgctttttttctcagacattaattatataagttttcgtaagcttacactagatgggttgtgtacttattatgttatggagtatgataatgtcataaacatgagaattttttcgcc

SEQ ID NO: 29571 - protein, 152 aa, Arabidopsis thaliana
  peptide (1)..(152): Ceres Seq. ID no. 12333276
RTRKKGVVTMASSDKVPVACPASSGDGKEPMGNPTKTTTAMLEKGTAMMQSMKPIRQMSLHVCSFACYSHDPGRQIEVHIYGHRVNQDFLQCAVYDSNSSKAHLIGIEYIVSEKLFESLSPEEQKLWHSHDYEVHDFRYIVRYVYYLSEKRK

SEQ ID NO: 29572 - protein, 143 aa, Arabidopsis thaliana
  peptide (1)..(143): Ceres Seq. ID no. 12333277
MASSDKVPVACPASSGDGKEPMGNPTKTTTAMLEKGTAMMQSMKPIRQMSLHVCSFACYSHDPGRQIEVHIYGHRVNQDFLQCAVYDSNSSKAHLIGIEYIVSEKLFESLSPEEQKLWHSHDYEVHDFRYIVRYVYYLSEKRK

SEQ ID NO: 29573 - protein, 122 aa, Arabidopsis thaliana
  peptide (1)..(122): Ceres Seq. ID no. 12333278
MGNPTKTTTAMLEKGTAMMQSMKPIRQMSLHVCSFACYSHDPGRQIEVHIYGHRVNQDFLQCAVYDSNSSKAHLIGIEYIVSEKLFESLSPEEQKLWHSHDYEVHDFRYIVRYVYYLSEKRK

SEQ ID NO: 29574 - DNA, 930 bp, Arabidopsis thaliana
  misc_feature (1)..(930): Ceres Seq. ID no. 12370141
  misc_feature (1)..(930): Ortholog of  Ceres SEQ ID NO 13504265 as cited in SEQ ID NO 85
gcgaccactagaaggagaaacaaatcttcattccagcaatggcgattcgttgtgtagcgagtagaaaaaccctagccggcttgaaggagacatcatcgaggctattgaggatcagagggattcagacttttacgcttcctgatcttccttacgattatggcgcattggaaccggccattagtggagagatcatgcagattcatcaccagaagcatcaccaggcttatgttactaattacaataatgctcttgagcagcttgatcaagctgtgaacaagggagatgcttccactgttgttaagttgcagagcgccatcaaattcaacggcggaggtcatgtcaaccattcgattttctggaagaaccttgctccttccagtgaaggtggtggagagccaccaaaaggatctcttggtagtgccattgacgctcactttggctcccttgaaggtctggtgaaaaagatgagtgctgagggtgctgcagtgcaaggctcaggatgggtgtggctcggactagacaaagaactgaagaagctagttgttgacacaactgccaatcaggatccattagtgacaaaaggaggaagcttggtacctctggtgggtatagatgtttgggagcacgcctactacttgcagtacaaaaatgtgaggcctgagtatctgaagaatgtatggaaagtgatcaactggaaatatgcaagcgaggtttatgagaaggaaaacaactgaatcgtttacacgatgacataaggagatgaaccagttccagctcagcttttgttttaaggttgtctgaaacaaacttacagtgtctctttggtttttaagatttgctcaactcagctgtgtggtacgttgttttacaatgaaagttttcaagaataaaaatttgctattattgtcagaaagcgctattgtttattct

SEQ ID NO: 29575 - protein, 231 aa, Arabidopsis thaliana
  peptide (1)..(231): Ceres Seq. ID no. 12370142
MAIRCVASRKTLAGLKETSSRLLRIRGIQTFTLPDLPYDYGALEPAISGEIMQIHHQKHHQAYVTNYNNALEQLDQAVNKGDASTVVKLQSAIKFNGGGHVNHSIFWKNLAPSSEGGGEPPKGSLGSAIDAHFGSLEGLVKKMSAEGAAVQGSGWVWLGLDKELKKLVVDTTANQDPLVTKGGSLVPLVGIDVWEHAYYLQYKNVRPEYLKNVWKVINWKYASEVYEKENN

SEQ ID NO: 29576 - protein, 180 aa, Arabidopsis thaliana
  peptide (1)..(180): Ceres Seq. ID no. 12370143
MQIHHQKHHQAYVTNYNNALEQLDQAVNKGDASTVVKLQSAIKFNGGGHVNHSIFWKNLAPSSEGGGEPPKGSLGSAIDAHFGSLEGLVKKMSAEGAAVQGSGWVWLGLDKELKKLVVDTTANQDPLVTKGGSLVPLVGIDVWEHAYYLQYKNVRPEYLKNVWKVINWKYASEVYEKENN

SEQ ID NO: 29577 - DNA, 1440 bp, Arabidopsis thaliana
  misc_feature (1)..(1440): Ceres Seq. ID no. 12370638
  misc_feature (1)..(1440): Ortholog of  Ceres SEQ ID NO 13645078 as cited in SEQ ID NO 51158
ctctcttgcagtcctcatcgttggagcttagaagccgtcggcacaagaagaagaagaagaagaatgtctcacaggaagtttgagcacccaagacatggttctcttggtttccttccaaggaagagagctaaccgtcacagaggaaaggtgaaggcgttccctaaggatgaccaaaccaagccttgcaagttcacagctttcatgggttacaaagctggtatgactcacattgtcagagaagtggagaaacctggatccaagcttcacaagaaggagacatgtgaggctgttaccatcattgagacacctgctatggtggttgttggagttgttgcctatgtgaagactcctagaggtttgaggtctttgaacactgtctgggcacagcatttgagtgaggaggtcaggagaaggttctacaagaactgggctaagtctaagaagaaggctttcactgggtacgctaagcagtatgacagtgaggatggcaagaagggtattcaggctcagcttgagaagatgaagaagtacgctactgtcatccgtgttttggctcacactcagatcaggaagatgaagggattgaagcagaagaaggctcacatgatggagatccagatcaatggtggtaccattgcccagaaggttgactttgcctacagtttctttgagaagcagatcccaattgaagctgtcttccagaaggatgaaatgattgatatcattggtgtgaccaagggtaagggttatgaaggtgttgttactcgttggggtgttacccgtcttcctcgtaagactcacagaggtctgcgtaaggttgcttgtattggtgcgtggcatcctgctagagtgtcctacactgttgctagggctggtcagaacggttaccatcaccgtactgagcttaacaagaagatttacaggttgggtaaggttggtactgaggcacacacagccatgactgaatatgacaggactgagaaggatgtgactccaatgggaggcttcccacactacggtattgtgaaggatgactacttgatgattaaggggtgctgtgttggtcccaagaagagagttgtaactctcagacagtcacttctcactcagacttcccgtcttgccttggaggagatcaaactcaagtttattgacaccgcctccatttttggacatggtcgcttccagacctcccttgagaagatgaggttttacaaccgtgtcacgaagtaagagttgttttatcacaattcttcttagaaagtttcatgtttggttatctgttgctacttatctcagagatgttatcctttaaacaatgttatggagttttcttttgcttttagtttgttacttttttggaagttaaaacgatttgcttctcaagttttgagactttgatgtgttctttatcatttatgaaaaaccaacctggagcat

SEQ ID NO: 29578 - protein, 410 aa, Arabidopsis thaliana
  peptide (1)..(410): Ceres Seq. ID no. 12370639
LSCSPHRWSLEAVGTRRRRRRMSHRKFEHPRHGSLGFLPRKRANRHRGKVKAFPKDDQTKPCKFTAFMGYKAGMTHIVREVEKPGSKLHKKETCEAVTIIETPAMVVVGVVAYVKTPRGLRSLNTVWAQHLSEEVRRRFYKNWAKSKKKAFTGYAKQYDSEDGKKGIQAQLEKMKKYATVIRVLAHTQIRKMKGLKQKKAHMMEIQINGGTIAQKVDFAYSFFEKQIPIEAVFQKDEMIDIIGVTKGKGYEGVVTRWGVTRLPRKTHRGLRKVACIGAWHPARVSYTVARAGQNGYHHRTELNKKIYRLGKVGTEAHTAMTEYDRTEKDVTPMGGFPHYGIVKDDYLMIKGCCVGPKKRVVTLRQSLLTQTSRLALEEIKLKFIDTASIFGHGRFQTSLEKMRFYNRVTK

SEQ ID NO: 29579 - protein, 389 aa, Arabidopsis thaliana
  peptide (1)..(389): Ceres Seq. ID no. 12370640
MSHRKFEHPRHGSLGFLPRKRANRHRGKVKAFPKDDQTKPCKFTAFMGYKAGMTHIVREVEKPGSKLHKKETCEAVTIIETPAMVVVGVVAYVKTPRGLRSLNTVWAQHLSEEVRRRFYKNWAKSKKKAFTGYAKQYDSEDGKKGIQAQLEKMKKYATVIRVLAHTQIRKMKGLKQKKAHMMEIQINGGTIAQKVDFAYSFFEKQIPIEAVFQKDEMIDIIGVTKGKGYEGVVTRWGVTRLPRKTHRGLRKVACIGAWHPARVSYTVARAGQNGYHHRTELNKKIYRLGKVGTEAHTAMTEYDRTEKDVTPMGGFPHYGIVKDDYLMIKGCCVGPKKRVVTLRQSLLTQTSRLALEEIKLKFIDTASIFGHGRFQTSLEKMRFYNRVTK

SEQ ID NO: 29580 - protein, 343 aa, Arabidopsis thaliana
  peptide (1)..(343): Ceres Seq. ID no. 12370641
MGYKAGMTHIVREVEKPGSKLHKKETCEAVTIIETPAMVVVGVVAYVKTPRGLRSLNTVWAQHLSEEVRRRFYKNWAKSKKKAFTGYAKQYDSEDGKKGIQAQLEKMKKYATVIRVLAHTQIRKMKGLKQKKAHMMEIQINGGTIAQKVDFAYSFFEKQIPIEAVFQKDEMIDIIGVTKGKGYEGVVTRWGVTRLPRKTHRGLRKVACIGAWHPARVSYTVARAGQNGYHHRTELNKKIYRLGKVGTEAHTAMTEYDRTEKDVTPMGGFPHYGIVKDDYLMIKGCCVGPKKRVVTLRQSLLTQTSRLALEEIKLKFIDTASIFGHGRFQTSLEKMRFYNRVTK

SEQ ID NO: 29581 - DNA, 1188 bp, Arabidopsis thaliana; identical to SEQ ID NO: 25989
  misc_feature (1)..(1188): Ceres Seq. ID no. 12396278
  misc_feature (1)..(1188): Ortholog of  Ceres SEQ ID NO 12636774 as cited in SEQ ID NO 372
  misc_feature (1)..(1188): Ortholog of  Ceres SEQ ID NO 12562215 as cited in SEQ ID NO 20489
  misc_feature (1)..(1188): Ortholog of  Ceres SEQ ID NO 13595548 as cited in SEQ ID NO 51024
  misc_feature (1)..(1188): Ortholog of  Ceres SEQ ID NO 13582350 as cited in SEQ ID NO 56734
  misc_feature (1)..(1188): Ortholog of  Ceres SEQ ID NO 12476493 as cited in SEQ ID NO 58163
  misc_feature (1)..(1188): Ortholog of  Ceres SEQ ID NO 14313459 as cited in SEQ ID NO 62395
  misc_feature (1)..(1188): Ortholog of  Ceres SEQ ID NO 13597295 as cited in SEQ ID NO 63743
  misc_feature (1)..(1188): Ortholog of  Ceres SEQ ID NO 12617090 as cited in SEQ ID NO 64005
  misc_feature (1)..(1188): Ortholog of  Ceres SEQ ID NO 13597439 as cited in SEQ ID NO 64081
  misc_feature (1)..(1188): Ortholog of  Ceres SEQ ID NO 13597233 as cited in SEQ ID NO 64370
  misc_feature (1)..(1188): Ortholog of  Ceres SEQ ID NO 13623850 as cited in SEQ ID NO 0
  misc_feature (1)..(1188): Ortholog of  Ceres SEQ ID NO 14309162 as cited in SEQ ID NO 0

SEQ ID NO: 29582 - protein, 345 aa, Arabidopsis thaliana; identical to SEQ ID NO: 25990
  peptide (1)..(345): Ceres Seq. ID no. 12396279

SEQ ID NO: 29583 - protein, 323 aa, Arabidopsis thaliana; identical to SEQ ID NO: 25991
  peptide (1)..(323): Ceres Seq. ID no. 12396280

SEQ ID NO: 29584 - protein, 303 aa, Arabidopsis thaliana; identical to SEQ ID NO: 25992
  peptide (1)..(303): Ceres Seq. ID no. 12396281

SEQ ID NO: 29585 - DNA, 946 bp, Arabidopsis thaliana
  misc_feature (1)..(946): Ceres Seq. ID no. 12441500
  misc_feature (1)..(946): Ortholog of  Ceres SEQ ID NO 13595072 as cited in SEQ ID NO 55971
aatcactctcaccagtcacaaccaaaaaaaaagaaaacacaaaaacaaagattataatggcttcctcaaccatggctttgtcctcccctgccttcgccggaaaggctgtgaagcctgccgcatcagatgtcctcggaagcggccgtgtgaccatgaggaagactgtcgccaagccaaagggtccatcaggcagcccatggtacggatctgaccgagtcaagtacttgggtccattctccggcgagcccccgagctaccttaccggtgagttccccggtgactacggatgggacaccgctggtctatccgccgacccagagaccttcgccaggaaccgtgagctagaagttatccacagcagatgggccatgctcggagccctaggctgcgttttccctgagctattggctaggaacggagtgaagttcggagaagcggtttggttcaaggccggttcacagatcttcagcgacggaggattggactacttgggcaacccgagcttggtccacgctcagagcatcttagccatttgggctactcaagttatcctcatgggagctgttgaaggctacagagtcgccggagatggtccattgggagaagcagaggacttgctttacccaggtggcagcttcgacccattgggcctcgctactgaccccgaggctttcgcagagttgaaggtgaaggagctcaagaacggaaggttggctatgttctctatgtttggattcttcgttcaagccatcgtcaccggaaagggacctttggagaacctcgccgaccatttggccgacccagtcaacaacaacgcttgggccttcgccaccaacttcgtccccggaaagtgagcggctgcttattatgtgaatgagagcagagaaagagagtttgtttgtggtctattctatgtaaatttgtgacagtgatgtgtttacttttg

SEQ ID NO: 29586 - protein, 283 aa, Arabidopsis thaliana
  peptide (1)..(283): Ceres Seq. ID no. 12441501
SLSPVTTKKKENTKTKIIMASSTMALSSPAFAGKAVKPAASDVLGSGRVTMRKTVAKPKGPSGSPWYGSDRVKYLGPFSGEPPSYLTGEFPGDYGWDTAGLSADPETFARNRELEVIHSRWAMLGALGCVFPELLARNGVKFGEAVWFKAGSQIFSDGGLDYLGNPSLVHAQSILAIWATQVILMGAVEGYRVAGDGPLGEAEDLLYPGGSFDPLGLATDPEAFAELKVKELKNGRLAMFSMFGFFVQAIVTGKGPLENLADHLADPVNNNAWAFATNFVPGK

SEQ ID NO: 29587 - protein, 265 aa, Arabidopsis thaliana
  peptide (1)..(265): Ceres Seq. ID no. 12441502
MASSTMALSSPAFAGKAVKPAASDVLGSGRVTMRKTVAKPKGPSGSPWYGSDRVKYLGPFSGEPPSYLTGEFPGDYGWDTAGLSADPETFARNRELEVIHSRWAMLGALGCVFPELLARNGVKFGEAVWFKAGSQIFSDGGLDYLGNPSLVHAQSILAIWATQVILMGAVEGYRVAGDGPLGEAEDLLYPGGSFDPLGLATDPEAFAELKVKELKNGRLAMFSMFGFFVQAIVTGKGPLENLADHLADPVNNNAWAFATNFVPGK

SEQ ID NO: 29588 - protein, 260 aa, Arabidopsis thaliana
  peptide (1)..(260): Ceres Seq. ID no. 12441503
MALSSPAFAGKAVKPAASDVLGSGRVTMRKTVAKPKGPSGSPWYGSDRVKYLGPFSGEPPSYLTGEFPGDYGWDTAGLSADPETFARNRELEVIHSRWAMLGALGCVFPELLARNGVKFGEAVWFKAGSQIFSDGGLDYLGNPSLVHAQSILAIWATQVILMGAVEGYRVAGDGPLGEAEDLLYPGGSFDPLGLATDPEAFAELKVKELKNGRLAMFSMFGFFVQAIVTGKGPLENLADHLADPVNNNAWAFATNFVPGK

SEQ ID NO: 29589 - DNA, 1462 bp, Arabidopsis thaliana
  misc_feature (1)..(1462): Ceres Seq. ID no. 12421962
  misc_feature (1)..(1462): Ortholog of  Ceres SEQ ID NO 13594168 as cited in SEQ ID NO 59043
aagacaatccctttcttctcccctttctccaacacctaccaaaagcctctctctctctctagttcttgatttttcaagatttcaagaaaacatggctgaccaaagtggtgggttggttatgatgagagagtacagaaaaggcaactggacgttgaatgagacgatggttctcattgaggccaagaggatggatgatgagaggaggatgcggcggtccatcggccttccaccgccggagcagcaacaagatatccggagtaataaaccggcggagctacggtggaagtggatagaagattactgttggagaaaaggttgtatgagaagtcagaatcagtgcaatgacaaatgggacaatctcatgagagactacaaaaaagttagagagtacgagagacgaagggtagaatcgtctattaccgccggtgagtcgtcttcatcttcagctccagctggagaaacggcgtcgtactggaagatggagaagagtgagaggaaagagagaagcttaccaagtaatatgttacctcaaacataccaagctttgtttgaagttgttgagagtaaaacgcttccttcttctaccgccgtaaccgctgtaaccgctgcagttgcggctgctgctgctgctattagtagtggaaacggttcaggcggtggacaaatccataaagtgatacaacaaggtttaggatttgttgttcctaaagtacatcaaatcattcagcagcaacctgttttgttaccacttcagccaccgccgccaccaccaccgtctcagccgttaccacgaccactactactgccaccgcctccaccgccttcttttcatgctcagccaatactgcccacagtagaaggatagtagcacagattctgatacaagtgagtattcagacacatctccggcgaagcggaggagaacaatgccgacaaccacaaccgccggtcccagcggcggcggtgtagatgtggaggaggttggacgtagtaagagagatgaagaaacgacagtagcggctgcgttatcaagaagtgtgtcagtgatcgcaaacgcgattagggagagtgaggagagacaagatcggagacataaagaagtgatgaacgtacaagagaggagattgaagatcgaagaatctaatgttgagatgaatagagaaggcatgaatgggttagtggaagccattaataagctagcgagctccattttcgctttggcttcttcttctcgccataataatcagcatcaaggaggtccaccatagtaattcaaatgattattatgtagttaatttgattagggaagtgattaaattgtggagagtgatgatcggagtacataaattgataatgaagtcttaattaatcttgttttcatcactctcaatgttttaaattaatttgttgatttcatgcaatatagattgaaatgtgatcatataaagttgatttaatatgc

SEQ ID NO: 29590 - protein, 287 aa, Arabidopsis thaliana
  peptide (1)..(287): Ceres Seq. ID no. 12421963
RQSLSSPLSPTPTKSLSLSLVLDFSRFQENMADQSGGLVMMREYRKGNWTLNETMVLIEAKRMDDERRMRRSIGLPPPEQQQDIRSNKPAELRWKWIEDYCWRKGCMRSQNQCNDKWDNLMRDYKKVREYERRRVESSITAGESSSSSAPAGETASYWKMEKSERKERSLPSNMLPQTYQALFEVVESKTLPSSTAVTAVTAAVAAAAAAISSGNGSGGGQIHKVIQQGLGFVVPKVHQIIQQQPVLLPLQPPPPPPPSQPLPRPLLLPPPPPPSFHAQPILPTVEG

SEQ ID NO: 29591 - protein, 257 aa, Arabidopsis thaliana
  peptide (1)..(257): Ceres Seq. ID no. 12421964
MADQSGGLVMMREYRKGNWTLNETMVLIEAKRMDDERRMRRSIGLPPPEQQQDIRSNKPAELRWKWIEDYCWRKGCMRSQNQCNDKWDNLMRDYKKVREYERRRVESSITAGESSSSSAPAGETASYWKMEKSERKERSLPSNMLPQTYQALFEVVESKTLPSSTAVTAVTAAVAAAAAAISSGNGSGGGQIHKVIQQGLGFVVPKVHQIIQQQPVLLPLQPPPPPPPSQPLPRPLLLPPPPPPSFHAQPILPTVEG

SEQ ID NO: 29592 - protein, 248 aa, Arabidopsis thaliana
  peptide (1)..(248): Ceres Seq. ID no. 12421965
MMREYRKGNWTLNETMVLIEAKRMDDERRMRRSIGLPPPEQQQDIRSNKPAELRWKWIEDYCWRKGCMRSQNQCNDKWDNLMRDYKKVREYERRRVESSITAGESSSSSAPAGETASYWKMEKSERKERSLPSNMLPQTYQALFEVVESKTLPSSTAVTAVTAAVAAAAAAISSGNGSGGGQIHKVIQQGLGFVVPKVHQIIQQQPVLLPLQPPPPPPPSQPLPRPLLLPPPPPPSFHAQPILPTVEG

SEQ ID NO: 29593 - DNA, 1150 bp, Arabidopsis thaliana
  misc_feature (1)..(1150): Ceres Seq. ID no. 12439663
  misc_feature (1)..(1150): Ortholog of  Ceres SEQ ID NO 15170458 as cited in SEQ ID NO 52842
  misc_feature (1)..(1150): Ortholog of  Ceres SEQ ID NO 13597679 as cited in SEQ ID NO 65073
aattttgaattgagcgaggtttcaaagttcaaaactatcacaactagtcttgatcaattctatataagatctgtgatcttggttgaagaaaagaatcgtcgtaggttgatatttaacaaggaatggcaaaggaagggggcttgggagagaactcaagatggagtcttggaggcatgaccgctcttgtcactggtggctctaaaggcatcggggaagctgtggtggaggaactagccatgttgggagcaaaagtccacacgtgtgccagagacgaaactcagcttcaagaacgcttacgtgaatggcaagcaaaagggtttcaggtcaccacttctgtctgcgacgtctcttctcgtgaccaacgagtgaaactcatggaaactgtttcctctctctaccaaggaaaactcaacatcctcgtcaacaatgtgggaacgtcaatattcaagccgaccacagagtatacagcagaagatttctcttttgtaatggctacaaatctcgagtcagctttccatctctcacagcttgcccacccattgttaaaagcctctggctcagggagcatcgtgctcatatcctctgctgctggagtcgtgcatgtcaatgttggatccatctatggagcaaccaaaggagccatgaatcagctggctagaaacttagcttgcgaatgggcgagcgacaacataaggacgaactctgtttgtccttggtatatcacaactcctttaagtaacgattttttcgatgaagagtttaagaaagaagcggtgcgtacgacaccaatggggcgtgttggagaagcaaatgaagtctcaccgcttgtggcatttctttgtcttccttcagcttcttatattactggtcagaccatttgcgttgacggcggtgccactgttaacggtttttccttcaagactatgccataaaacacatatgcatgtgtttggatcatattttcaataatttaaacttacgggttatatacatcgtcaatatgtaataaatgtaatttagatgtgtccacatgttctgtttctaagagattcttagatatttatgcttgcgtggtgaacaagagttcactctccggatggaccgcatccataatctatgaatttgggaattatattaccaatttgacggc

SEQ ID NO: 29594 - protein, 269 aa, Arabidopsis thaliana
  peptide (1)..(269): Ceres Seq. ID no. 12439664
MAKEGGLGENSRWSLGGMTALVTGGSKGIGEAVVEELAMLGAKVHTCARDETQLQERLREWQAKGFQVTTSVCDVSSRDQRVKLMETVSSLYQGKLNILVNNVGTSIFKPTTEYTAEDFSFVMATNLESAFHLSQLAHPLLKASGSGSIVLISSAAGVVHVNVGSIYGATKGAMNQLARNLACEWASDNIRTNSVCPWYITTPLSNDFFDEEFKKEAVRTTPMGRVGEANEVSPLVAFLCLPSASYITGQTICVDGGATVNGFSFKTMP

SEQ ID NO: 29595 - protein, 252 aa, Arabidopsis thaliana
  peptide (1)..(252): Ceres Seq. ID no. 12439665
MTALVTGGSKGIGEAVVEELAMLGAKVHTCARDETQLQERLREWQAKGFQVTTSVCDVSSRDQRVKLMETVSSLYQGKLNILVNNVGTSIFKPTTEYTAEDFSFVMATNLESAFHLSQLAHPLLKASGSGSIVLISSAAGVVHVNVGSIYGATKGAMNQLARNLACEWASDNIRTNSVCPWYITTPLSNDFFDEEFKKEAVRTTPMGRVGEANEVSPLVAFLCLPSASYITGQTICVDGGATVNGFSFKTMP

SEQ ID NO: 29596 - protein, 231 aa, Arabidopsis thaliana
  peptide (1)..(231): Ceres Seq. ID no. 12439666
MLGAKVHTCARDETQLQERLREWQAKGFQVTTSVCDVSSRDQRVKLMETVSSLYQGKLNILVNNVGTSIFKPTTEYTAEDFSFVMATNLESAFHLSQLAHPLLKASGSGSIVLISSAAGVVHVNVGSIYGATKGAMNQLARNLACEWASDNIRTNSVCPWYITTPLSNDFFDEEFKKEAVRTTPMGRVGEANEVSPLVAFLCLPSASYITGQTICVDGGATVNGFSFKTMP

SEQ ID NO: 29597 - DNA, 1528 bp, Arabidopsis thaliana
  misc_feature (1)..(1528): Ceres Seq. ID no. 13490257
  misc_feature (1)..(1528): Ortholog of  Ceres SEQ ID NO 15171275 as cited in SEQ ID NO 51428
  misc_feature (1)..(1528): Ortholog of  Ceres SEQ ID NO 14307678 as cited in SEQ ID NO 59456
  misc_feature (1)..(1528): Ortholog of  Ceres SEQ ID NO 13586716 as cited in SEQ ID NO 0
atttatcgacatcatcttctcctacattctaggtttcttcttcatttctcctttctctggccaaagttccgactttttgcttctcccagaggctaatcatggacgctgtggcggcgaatttgtttcaatctccttccttactgcgtcaaacttccgaaaggttgatattttcgacgcccaactgtcctggcttcatgcgaattagctccggacctcaatttcgtctcagacaaaactcttctcttaaattctcgagaccatttcaaagcggaacaacttgtgttaaatctcggagaagctttgtggttaaagcttcagcttctggtgatgcttcaacagaatcaatcgcgccgcttcagttgaagtctcctgtgggacagtttctgtcacagatattagtgagccatcctcatcttgttccagcagctgttgaacagcagcttgaacagctccaaattgatcgagacgctgaagaacagagtaaagatgcatcctctgtccttggaacagacattgttctctacaggagaattgctgaagttaaggagaaagagagaagaagggccttggaagagattttgtatgcgttagtggttcagaagttcatggatgctaatgttacacttgtaccatccataacctcttcatctgcggatccatctggtcgagttgatacttggccaactctagatggggaacttgagagacttcactcgcctgaagtttatgagatgattcagaatcatctttccatcattcttaaaaaccgcactgatgatctgacagcagttgcgcagataagcaaacttggagttggacaggtatatgctgcttcggtgatgtatgggtatttcctgaagaggatcgatcaaaggtttcagcttgagaagacgatgaggattctcccaggtgggtcagatgaaggtgagactagcattgagcaagcaggccgagatgtagagagaaacttctatgaagaagcagaagagacttatcaggctgtttcctcaaaccaagacgttggttcgtttgtaggagggatcaatgccagtggcggttttagcagtgatatgaagcaatcccggttaaagacatacgttatgtcctttgatggagaaacccttcaaaggtacgctacaataagatctagagaatcggttgggataattgagaagcatacagaagcattgtttgggaggccagagattgtgataacgccacaaggcactattgattcctcgaaggacgagcatatcaagatcagcttcaagggattgaagaggcttgtgttggaggctgtgacgtttggttctttcctctgggacgtggagagccatgtagactcaaggtatcacttcgtactgaactgaaatggcctctgtggtttatgaggatgtgccacattctttgagagggtttggggatttgttgtttgtaatatatgcgactgtgaactgaccaactaatatcaatacccattttatggtaatactacattcgcgatcagtttgtgttattcttctcgttt

SEQ ID NO: 29598 - protein, 423 aa, Arabidopsis thaliana
  peptide (1)..(423): Ceres Seq. ID no. 13490258
MDAVAANLFQSPSLLRQTSERLIFSTPNCPGFMRISSGPQFRLRQNSSLKFSRPFQSGTTCVKSRRSFVVKASASGDASTESIAPLQLKSPVGQFLSQILVSHPHLVPAAVEQQLEQLQIDRDAEEQSKDASSVLGTDIVLYRRIAEVKEKERRRALEEILYALVVQKFMDANVTLVPSITSSSADPSGRVDTWPTLDGELERLHSPEVYEMIQNHLSIILKNRTDDLTAVAQISKLGVGQVYAASVMYGYFLKRIDQRFQLEKTMRILPGGSDEGETSIEQAGRDVERNFYEEAEETYQAVSSNQDVGSFVGGINASGGFSSDMKQSRLKTYVMSFDGETLQRYATIRSRESVGIIEKHTEALFGRPEIVITPQGTIDSSKDEHIKISFKGLKRLVLEAVTFGSFLWDVESHVDSRYHFVLN

SEQ ID NO: 29599 - protein, 391 aa, Arabidopsis thaliana
  peptide (1)..(391): Ceres Seq. ID no. 13490259
MRISSGPQFRLRQNSSLKFSRPFQSGTTCVKSRRSFVVKASASGDASTESIAPLQLKSPVGQFLSQILVSHPHLVPAAVEQQLEQLQIDRDAEEQSKDASSVLGTDIVLYRRIAEVKEKERRRALEEILYALVVQKFMDANVTLVPSITSSSADPSGRVDTWPTLDGELERLHSPEVYEMIQNHLSIILKNRTDDLTAVAQISKLGVGQVYAASVMYGYFLKRIDQRFQLEKTMRILPGGSDEGETSIEQAGRDVERNFYEEAEETYQAVSSNQDVGSFVGGINASGGFSSDMKQSRLKTYVMSFDGETLQRYATIRSRESVGIIEKHTEALFGRPEIVITPQGTIDSSKDEHIKISFKGLKRLVLEAVTFGSFLWDVESHVDSRYHFVLN

SEQ ID NO: 29600 - protein, 254 aa, Arabidopsis thaliana
  peptide (1)..(254): Ceres Seq. ID no. 13490260
MDANVTLVPSITSSSADPSGRVDTWPTLDGELERLHSPEVYEMIQNHLSIILKNRTDDLTAVAQISKLGVGQVYAASVMYGYFLKRIDQRFQLEKTMRILPGGSDEGETSIEQAGRDVERNFYEEAEETYQAVSSNQDVGSFVGGINASGGFSSDMKQSRLKTYVMSFDGETLQRYATIRSRESVGIIEKHTEALFGRPEIVITPQGTIDSSKDEHIKISFKGLKRLVLEAVTFGSFLWDVESHVDSRYHFVLN

SEQ ID NO: 29601 - DNA, 1355 bp, Arabidopsis thaliana
  misc_feature (1)..(1355): Ceres Seq. ID no. 13489420
  misc_feature (1)..(1355): Ortholog of  Ceres SEQ ID NO 14312328 as cited in SEQ ID NO 59022
gttgtactctcaaattcttgggtcgttctgagtcgtctccgcgttaaatcttttccctttttgatcctttcttcctttcttcttcttcttcgcattgatttggtcctccttcctcttctattctattcattaagaacctaatcttcatcttctccatcttcttcttcacggactccacttcgctcatccaggaaggtttattagtagtaaccaatccaagtgttccttttgtttgaagcaacaagctttgtgatattatcctgagagacaatgtttggtttaaggaaatcaccggcaaatcttcccaagcataactcagtcgacctcaagtcttccaagccaaatcctttcgattcagatgatgaatctgacaacaaacatacccttaacccttctaagaggactacctctgaaccctctttggctgatatgacaaacccttttggtggtgagagagttcagaaaggagatagtagttcatccaaacagtcattgttttcgaactccaaataccagtacaagaacaatttccgtgattctggtggtattgaaaaccagtcggttcaggagcttgaaggttatgctgtgtacaaggctgaagagactacgaaatctgtacaaggttgtttgaaggtagcagaagatataaggtctgatgctaccagaactttggtcatgttacacgatcagggcgagcaaatcactaggacgcaccataaagccgttgaaatcgaccatgatctcagtcgtggtgagaaacttcttggaagccttggaggcatgttttcaaagacttggaaaccaaagaagactcgtcctataaatggtcccgtcgtaaccagagatgactcaccaacgagaagagttaaccacttagagaaaagggaaaaactgggactgaactcagcacccagaggacaatcaagaacccgagaaccactccccgaatcagctgatgcttatcagagagtggagatggaaaaagctaagcaagacgatgggctttcagacttgagtgatatactcggcgagctaaagaacatggctgttgacatgggaagcgaaatcgagaagcagaacaaaggacttgaccatcttcatgatgatgttgacgaactcaacttcagagtgcaacaatcaaaccaacgtggtcgccgtttgcttggaaagtagatgaacagagggtttatatgttcattacactcattcctcgtttgttttattctctatgaagttgttctttaaaactggaaagattcttatcatgttaaatacattattgctatctgtgtttgtatttgatcttgtgacaaaaaaccaaaaaacttattgatcaaacagaagctaactttggt

SEQ ID NO: 29602 - protein, 300 aa, Arabidopsis thaliana
  peptide (1)..(300): Ceres Seq. ID no. 13489421
MFGLRKSPANLPKHNSVDLKSSKPNPFDSDDESDNKHTLNPSKRTTSEPSLADMTNPFGGERVQKGDSSSSKQSLFSNSKYQYKNNFRDSGGIENQSVQELEGYAVYKAEETTKSVQGCLKVAEDIRSDATRTLVMLHDQGEQITRTHHKAVEIDHDLSRGEKLLGSLGGMFSKTWKPKKTRPINGPVVTRDDSPTRRVNHLEKREKLGLNSAPRGQSRTREPLPESADAYQRVEMEKAKQDDGLSDLSDILGELKNMAVDMGSEIEKQNKGLDHLHDDVDELNFRVQQSNQRGRRLLGK

SEQ ID NO: 29603 - protein, 247 aa, Arabidopsis thaliana
  peptide (1)..(247): Ceres Seq. ID no. 13489422
MTNPFGGERVQKGDSSSSKQSLFSNSKYQYKNNFRDSGGIENQSVQELEGYAVYKAEETTKSVQGCLKVAEDIRSDATRTLVMLHDQGEQITRTHHKAVEIDHDLSRGEKLLGSLGGMFSKTWKPKKTRPINGPVVTRDDSPTRRVNHLEKREKLGLNSAPRGQSRTREPLPESADAYQRVEMEKAKQDDGLSDLSDILGELKNMAVDMGSEIEKQNKGLDHLHDDVDELNFRVQQSNQRGRRLLGK

SEQ ID NO: 29604 - protein, 165 aa, Arabidopsis thaliana
  peptide (1)..(165): Ceres Seq. ID no. 13489423
MLHDQGEQITRTHHKAVEIDHDLSRGEKLLGSLGGMFSKTWKPKKTRPINGPVVTRDDSPTRRVNHLEKREKLGLNSAPRGQSRTREPLPESADAYQRVEMEKAKQDDGLSDLSDILGELKNMAVDMGSEIEKQNKGLDHLHDDVDELNFRVQQSNQRGRRLLGK

SEQ ID NO: 29605 - DNA, 675 bp, Arabidopsis thaliana
  misc_feature (1)..(675): Ceres Seq. ID no. 12738445
  misc_feature (1)..(675): Ortholog of  Ceres SEQ ID NO 13587131 as cited in SEQ ID NO 331
  misc_feature (1)..(675): Ortholog of  Ceres SEQ ID NO 13661176 as cited in SEQ ID NO 61114
gattttttagggtttcaagtgaaaagagtaatagcgcggcggagccatggttctcaagactgagctttgccgattcagtggccagaaaatttaccctggtagagggatcagatttatccgatcggactctcaggtgtttttgtttctcaactccaaatgtaagaggtatttccacaacaagttgaagccatctaagctttgctggactgctatgtaccgaaagcagcacaagaaggacgcagcacaagaggctgtgaagagaaggagacgtgcaactaagaagccttactcaaggtcgattgtcggtgctactttggaggttattcagaagaagcgagcagagaagcctgaagttcgtgatgccgctagagaagctgccctacgtgagatcaaggagagaatcaagaagaccaaggacgagaagaaggcaaagaaggtcgagtatgcatcaaagcaacagaagtcacaagtgaagggaaatatccccaagagtgctgcacccaaggctgctaagatgggtggtggtggaggcagacgttgaatggagctatagagtagcccactcttctctcttcacttatctttctttcttgttttgacattgttttgttttgtcagccattttttagttttgcaccagatctaatatattcagtttatgaaaactttttgttt

SEQ ID NO: 29606 - protein, 164 aa, Arabidopsis thaliana
  peptide (1)..(164): Ceres Seq. ID no. 12738446
MVLKTELCRFSGQKIYPGRGIRFIRSDSQVFLFLNSKCKRYFHNKLKPSKLCWTAMYRKQHKKDAAQEAVKRRRRATKKPYSRSIVGATLEVIQKKRAEKPEVRDAAREAALREIKERIKKTKDEKKAKKVEYASKQQKSQVKGNIPKSAAPKAAKMGGGGGRR

SEQ ID NO: 29607 - protein, 109 aa, Arabidopsis thaliana
  peptide (1)..(109): Ceres Seq. ID no. 12738447
MYRKQHKKDAAQEAVKRRRRATKKPYSRSIVGATLEVIQKKRAEKPEVRDAAREAALREIKERIKKTKDEKKAKKVEYASKQQKSQVKGNIPKSAAPKAAKMGGGGGRR

SEQ ID NO: 29608 - DNA, 1217 bp, Arabidopsis thaliana
  misc_feature (1)..(1217): Ceres Seq. ID no. 13489591
  misc_feature (1)..(1217): Ortholog of  Ceres SEQ ID NO 15180047 as cited in SEQ ID NO 0
aatgctcgtaagttcaagcaaaatcacaagagcgagagagatggtgacgaaaacagaggagaagcaattgaaccagctagagattcaagtcgataatggcggaggcggaacatgggagtatctttgcctcgttcgtaatctcaaagttcgccggtcggagaaagtgttaaaacacggttcctcgattttgaatgatcagaagaaacgatctgctcttggtccagatgaatggacactaaatgagcaggtggcaattgcagctatggactgtcaatgtctcggtgtcgcacagagttgcattaaggctttgcagacaaaatttcctgggagcaaaagagttgggaggcttgaggcattgcttcttgaagcgaagggattatggggagaggctgaggaagcatatgcgagtcttttggaggataatccactcgaccaagcgatacacaaacgaagagtggctatatccaaggcactaggcaaaccttccatagccattgagcttcttaacaaatatcttgaactattcatggctgatcatgatgcatggagagaactcgcagagctttacctttccttgcaaatgtataagcaagcagctttctgctatgaagagctcatactatctcagcctactgttccattgtaccacctcgcatatgctgaggttctctatacaatcggtggagtagaaaacattatctcagcaagaaaatactatgcagcgaccgtagatttaacaggcggcaaaaacactagagctcttctcggaatctgcttgtgtgcatcggccattgcacagctctcaaaaggcaggaacaaagaggacaaagacgctacggcagccccagagcttcattccctggctgcagctgcagtagagaaagaatacaagcaaaaagccccggacaaacttcaactcatctcttccgcgttaagaatcttgaagacttgatcgcaagtaaacgatgttctggcccacaagacgcaaacgatttagcagtagtagatagtcggaaaatatcgaactctaaattcaaataactttctttaaagtttaaaccaaagagaattttgattactgttagataccaaaaccaaataactgtatcactccttagcctttacggtttccatgcttgcgacgtgcagcttcttttgtatcattttcgatgcgctcaacgtacatcggtagaaggataatctctttgatctccttc

SEQ ID NO: 29609 - protein, 316 aa, Arabidopsis thaliana
  peptide (1)..(316): Ceres Seq. ID no. 13489592
MLVSSSKITRAREMVTKTEEKQLNQLEIQVDNGGGGTWEYLCLVRNLKVRRSEKVLKHGSSILNDQKKRSALGPDEWTLNEQVAIAAMDCQCLGVAQSCIKALQTKFPGSKRVGRLEALLLEAKGLWGEAEEAYASLLEDNPLDQAIHKRRVAISKALGKPSIAIELLNKYLELFMADHDAWRELAELYLSLQMYKQAAFCYEELILSQPTVPLYHLAYAEVLYTIGGVENIISARKYYAATVDLTGGKNTRALLGICLCASAIAQLSKGRNKEDKDATAAPELHSLAAAAVEKEYKQKAPDKLQLISSALRILKT

SEQ ID NO: 29610 - protein, 303 aa, Arabidopsis thaliana
  peptide (1)..(303): Ceres Seq. ID no. 13489593
MVTKTEEKQLNQLEIQVDNGGGGTWEYLCLVRNLKVRRSEKVLKHGSSILNDQKKRSALGPDEWTLNEQVAIAAMDCQCLGVAQSCIKALQTKFPGSKRVGRLEALLLEAKGLWGEAEEAYASLLEDNPLDQAIHKRRVAISKALGKPSIAIELLNKYLELFMADHDAWRELAELYLSLQMYKQAAFCYEELILSQPTVPLYHLAYAEVLYTIGGVENIISARKYYAATVDLTGGKNTRALLGICLCASAIAQLSKGRNKEDKDATAAPELHSLAAAAVEKEYKQKAPDKLQLISSALRILKT

SEQ ID NO: 29611 - protein, 229 aa, Arabidopsis thaliana
  peptide (1)..(229): Ceres Seq. ID no. 13489594
MDCQCLGVAQSCIKALQTKFPGSKRVGRLEALLLEAKGLWGEAEEAYASLLEDNPLDQAIHKRRVAISKALGKPSIAIELLNKYLELFMADHDAWRELAELYLSLQMYKQAAFCYEELILSQPTVPLYHLAYAEVLYTIGGVENIISARKYYAATVDLTGGKNTRALLGICLCASAIAQLSKGRNKEDKDATAAPELHSLAAAAVEKEYKQKAPDKLQLISSALRILKT

SEQ ID NO: 29612 - DNA, 1535 bp, Arabidopsis thaliana
  misc_feature (1)..(1535): Ceres Seq. ID no. 13490268
  misc_feature (1)..(1535): Ortholog of  Ceres SEQ ID NO 14306538 as cited in SEQ ID NO 53117
accaacaacacaaaacttgtactcacaactaaaagaagaactcaaacgcaagacagaaagatcaatggcgagcaacggagttaccaactgtaacgcaaacgccaatgtttggcggttcaaaggaaacggtgcaacgagtgatgcggcggcggtgacgttgagaaagcttgcttttgggatgtttaaaaactgcaccatgaacagtggaaagaccattttgttcccaactcccggcgagccctccgcccattccaacttcaggacttgcccggaagccgaggaagccgttgccgcagctgcacgctccggcatggctaactcttacgcacccagccctggagttttcaaggctagaagggcggtggctgaatatttaaacggagaacttccgacgaagctgaaggccgaggatgtgtatatcaccggaggatgtaaccaagccatagagatcgtgatagattctcttgccggaaatccatccgccaacattctacttccaaggccgggatatcctcactacgatgctcgtgctgtctatagcggcctcgagattcgcaaatacgatcttctccccgagagtgattgggaaatcaatctcgatggcctcgaggcggctgcggatgagaataccgtcgcaatggtaatcatcaaccccaacaatccatgtggaaacgtctacacctacgaccatctcaacaaggtcgcggagatggctagaaaactcggtataatgataatatccgacgaagtatatgatcatgttgtatatggagacaagccttttattcccatggggaagtttgcatcaatagctccggtgatcacgctcggatccatatccaaaggatgggtcaacccaggctggagagttggctggatcgccatgaacgatcctaatggtatctttgtatctacaggggtagttcaagcaatagaggattttcttgatttaactccacagccttcatttattctccaggaagcacttcctgatatattggagaaaacacctaaagagttcttcgagaagaagatcaaagccatgagacgcaacgtcgagctttcatgtgagaggctcaaggatattccttgtctcttttgtcccaagaaacccgaatcttgttcttatttatggttgaagcttgacacatcaatgttgaataatatcaaaaatgattttgatttctgcacgaagctagttagtgaggagagtcttatccttataccaggagtggctctaggggcagagaattgggtgaggatatcgataggaaccgacgaatcagtggtacaagaaatatttgacagactaaaaggtttctatgatcgtcatgccatctccaaggaagctatcaaactcagtggccatgccattaaccagatcgtcgtctctgtcaactgattgtagtagtcctatgccacaagtccacattataatttgtgcgtaattccttaattatcaggaacacaatcaagaaaaatagcattggataatgaaataaagatgtgtgaaaaataaaaggatatttgttttc

SEQ ID NO: 29613 - protein, 466 aa, Arabidopsis thaliana
  peptide (1)..(466): Ceres Seq. ID no. 13490269
PTTQNLYSQLKEELKRKTERSMASNGVTNCNANANVWRFKGNGATSDAAAVTLRKLAFGMFKNCTMNSGKTILFPTPGEPSAHSNFRTCPEAEEAVAAAARSGMANSYAPSPGVFKARRAVAEYLNGELPTKLKAEDVYITGGCNQAIEIVIDSLAGNPSANILLPRPGYPHYDARAVYSGLEIRKYDLLPESDWEINLDGLEAAADENTVAMVIINPNNPCGNVYTYDHLNKVAEMARKLGIMIISDEVYDHVVYGDKPFIPMGKFASIAPVITLGSISKGWVNPGWRVGWIAMNDPNGIFVSTGVVQAIEDFLDLTPQPSFILQEALPDILEKTPKEFFEKKIKAMRRNVELSCERLKDIPCLFCPKKPESCSYLWLKLDTSMLNNIKNDFDFCTKLVSEESLILIPGVALGAENWVRISIGTDESVVQEIFDRLKGFYDRHAISKEAIKLSGHAINQIVVSVN

SEQ ID NO: 29614 - protein, 445 aa, Arabidopsis thaliana
  peptide (1)..(445): Ceres Seq. ID no. 13490270
MASNGVTNCNANANVWRFKGNGATSDAAAVTLRKLAFGMFKNCTMNSGKTILFPTPGEPSAHSNFRTCPEAEEAVAAAARSGMANSYAPSPGVFKARRAVAEYLNGELPTKLKAEDVYITGGCNQAIEIVIDSLAGNPSANILLPRPGYPHYDARAVYSGLEIRKYDLLPESDWEINLDGLEAAADENTVAMVIINPNNPCGNVYTYDHLNKVAEMARKLGIMIISDEVYDHVVYGDKPFIPMGKFASIAPVITLGSISKGWVNPGWRVGWIAMNDPNGIFVSTGVVQAIEDFLDLTPQPSFILQEALPDILEKTPKEFFEKKIKAMRRNVELSCERLKDIPCLFCPKKPESCSYLWLKLDTSMLNNIKNDFDFCTKLVSEESLILIPGVALGAENWVRISIGTDESVVQEIFDRLKGFYDRHAISKEAIKLSGHAINQIVVSVN

SEQ ID NO: 29615 - protein, 407 aa, Arabidopsis thaliana
  peptide (1)..(407): Ceres Seq. ID no. 13490271
MFKNCTMNSGKTILFPTPGEPSAHSNFRTCPEAEEAVAAAARSGMANSYAPSPGVFKARRAVAEYLNGELPTKLKAEDVYITGGCNQAIEIVIDSLAGNPSANILLPRPGYPHYDARAVYSGLEIRKYDLLPESDWEINLDGLEAAADENTVAMVIINPNNPCGNVYTYDHLNKVAEMARKLGIMIISDEVYDHVVYGDKPFIPMGKFASIAPVITLGSISKGWVNPGWRVGWIAMNDPNGIFVSTGVVQAIEDFLDLTPQPSFILQEALPDILEKTPKEFFEKKIKAMRRNVELSCERLKDIPCLFCPKKPESCSYLWLKLDTSMLNNIKNDFDFCTKLVSEESLILIPGVALGAENWVRISIGTDESVVQEIFDRLKGFYDRHAISKEAIKLSGHAINQIVVSVN

SEQ ID NO: 29616 - DNA, 1032 bp, Arabidopsis thaliana
  misc_feature (1)..(1032): Ceres Seq. ID no. 13490453
  misc_feature (1)..(1032): Ortholog of  Ceres SEQ ID NO 13594700 as cited in SEQ ID NO 51982
  misc_feature (1)..(1032): Ortholog of  Ceres SEQ ID NO 14309538 as cited in SEQ ID NO 52606
agaggggtagtttggtaaattttcaaatgcccttatctcatttccgatcctccttcttcttgctaccgccttcgcacccattcataaaaaaggaaagacgcaatcttttcttgtctcttccattgcttcaaatcctcctaataaagctttcctctttcactttctaatctctttaatccgtttaaatccaatcccaaatacagattttgattacaaaaatctaacattttgctgatttgtgttttagggttctctcgtgttttttatgattttgattcccgtaaagattcaatcacttttctcatatctcttgttactgaatttgatccaatcgatcgataaaccaaacccagaagctatgagagtgcacccaattcccagaaacatcaacaacacattgatccatcatcatcatcataacccgacccgagaacccggaaagaatctccgacgattaccacatatcttcaaccgtgttctggagctaccattgaggtcagaagcagatgtagcagtggaagagagacacgactgttttcgatttgtggcggagacggtaggtctctgtaacggcgatggagaaatgagggcttatatggttgagattcatcctggtataaccaagatcgttgtgaggacaaatgggtcttcttctcttggtttgtctttagacgaattagagcttgacgtgtggcgttttaggttaccggaatcaactaggcctgagcttgttactgttgcttgtgttgatggtgatttgattgttactgtgcctaagaatgctgaagaagaagatgatgatggtggtggtggtgattttggacaaggtattggtagtggaaggcttgtgcttgttcagtgaatcaaagtaatgtcctctatgtaacatgagaagaagactaatctctaatcttcttcgtttcgttgatattgtgtagccttctgtttttgttgttggcaataaaagaaaagattgaatctttgatgttctcttattttgtaagatcaacaagggttgtttaaggttgtacc

SEQ ID NO: 29617 - protein, 198 aa, Arabidopsis thaliana
  peptide (1)..(198): Ceres Seq. ID no. 13490454
MILIPVKIQSLFSYLLLLNLIQSIDKPNPEAMRVHPIPRNINNTLIHHHHHNPTREPGKNLRRLPHIFNRVLELPLRSEADVAVEERHDCFRFVAETVGLCNGDGEMRAYMVEIHPGITKIVVRTNGSSSLGLSLDELELDVWRFRLPESTRPELVTVACVDGDLIVTVPKNAEEEDDDGGGGDFGQGIGSGRLVLVQ

SEQ ID NO: 29618 - protein, 167 aa, Arabidopsis thaliana
  peptide (1)..(167): Ceres Seq. ID no. 13490455
MRVHPIPRNINNTLIHHHHHNPTREPGKNLRRLPHIFNRVLELPLRSEADVAVEERHDCFRFVAETVGLCNGDGEMRAYMVEIHPGITKIVVRTNGSSSLGLSLDELELDVWRFRLPESTRPELVTVACVDGDLIVTVPKNAEEEDDDGGGGDFGQGIGSGRLVLVQ

SEQ ID NO: 29619 - DNA, 1281 bp, Arabidopsis thaliana
  misc_feature (1)..(1281): Ceres Seq. ID no. 13487403
  misc_feature (1)..(1281): Ortholog of  Ceres SEQ ID NO 15177289 as cited in SEQ ID NO 59364
gctttttgtgttgaagagagagtttcctatcttctccattcctcccaccatctccctcatcttcatcttcctctctctttctctctttctcaacaatctctattagatctttctccattaccattacctctggctttctcttaaatccaccatcatgaggagaggaagaggctcttccgccgtcgccggacctaccgtcgttgccgccatcaacggatctgtaaaagaaatcagattcagaggcgtaaggaagagaccttggggacgattcgcagctgagatccgtgatccatggaaaaaagctcgtgtttggttaggtactttcgattccgccgaagaagctgctcgcgcttacgactccgccgctcgtaacctccgtggtcctaaagccaaaactaatttccccatcgattcttcttctcctcctcctcctaatctccgatttaatcagattcgtaatcaaaatcaaaaccaagtcgatccgtttatggaccaccggttattcaccgaccatcaacaacagttcccgattgttaaccggcctactagtagcagcatgagcagcaccgttgaatcgtttagcggacccagacctacgacgatgaaaccggccacgacgaagagatatcctagaactccaccggttgttccggaggattgtcacagcgattgcgattcgtcgtcgtctgtaatcgacgacgacgacgatatcgcatcgtcttcacggcgacggaatccgccgtttcaattcgatcttaattttccaccgttggattgtgttgacttgttcaatggcgctgatgatcttcactgtaccgatctacgtctctaatgaattggtaaaatcaaactcaaaatcacagatccgtgatcggtttgattttaatcgaaaacacacaacaaaatccttttttttttttttttaaattttctgtttcgttgatctcatataatttttactatgcgggagaaatagaaagacaaagaaacgaagaagaagaagaagatggtgatgagcttgagagagcttgagctggttctgtgtttcttctgtgatgatattgtaagagtattattattttactattattactaaatcttcaaaaccaagaagaagaagaccgaacacgatgatctgttgtgtctgtttgttttactgtaagaaaaacgcagatctgggtttcgtttttttcttgagatagatcaaacaacccccatctttgtaacatatacatttggaacactcatgattctaaataaaaaatctagaatctttttttc

SEQ ID NO: 29620 - protein, 225 aa, Arabidopsis thaliana
  peptide (1)..(225): Ceres Seq. ID no. 13487404
MRRGRGSSAVAGPTVVAAINGSVKEIRFRGVRKRPWGRFAAEIRDPWKKARVWLGTFDSAEEAARAYDSAARNLRGPKAKTNFPIDSSSPPPPNLRFNQIRNQNQNQVDPFMDHRLFTDHQQQFPIVNRPTSSSMSSTVESFSGPRPTTMKPATTKRYPRTPPVVPEDCHSDCDSSSSVIDDDDDIASSSRRRNPPFQFDLNFPPLDCVDLFNGADDLHCTDLRL

SEQ ID NO: 29621 - protein, 114 aa, Arabidopsis thaliana
  peptide (1)..(114): Ceres Seq. ID no. 13487405
MDHRLFTDHQQQFPIVNRPTSSSMSSTVESFSGPRPTTMKPATTKRYPRTPPVVPEDCHSDCDSSSSVIDDDDDIASSSRRRNPPFQFDLNFPPLDCVDLFNGADDLHCTDLRL

SEQ ID NO: 29622 - DNA, 1635 bp, Arabidopsis thaliana
  misc_feature (1)..(1635): Ceres Seq. ID no. 13497565
  misc_feature (1)..(1635): Ortholog of  Ceres SEQ ID NO 14311136 as cited in SEQ ID NO 56694
aaacgaaaaccctcgggattcctctgcttctgtctcgtccgtcgtcgtcaatttctctgcatcagagattccggtgtccttcttcctttcactcgcgtataacctcttttccttgacgttgtctccgtgagctctctgtgctttgactgcaaccatgtcgactattatgcagaagatcaaagaaattgaagatgagatggctaaaacacagaagaataaagctacttctcatcatctgggtttgttaaaggccaagcttgctaagcttcggagggaccttcttgcaccgcctaccaaaggtggcggtggtggtgctggagaaggttttgatgtgactaaaagtggagattctagagttggactggtcggatttccttcggttggaaaatctacgctattaaacaagctgactgggacattttccgaggttgcttcttatgagttcacgactttgacatgcattcctggtgttatcacatatcgtggagctaaaatccagttattagatcttcctggtattattgagggtgctaaagatggaaaaggtagaggaagacaggttataagtacggctaggacatgcaactgcatcttaatagttcttgatgccataaaaccaattactcacaagcgtctcattgaaaaagagctcgaaggattcggaataaggttgaacaaggagccaccaaatttaacatttaggaaaaaagacaaaggtggtatcaatctaacttctacagtcgctgtcacacaccttgaccttgacaccgtcaaggcgatttgcggtgagtacaggatgcacaatgctgacatcaccctgcgctacgatgcaaccgctgatgacctcattgatgtcatcgagggcagtcggatttatatgccctgtatctatgctgtcaacaagatcgattcaatcacacttgaggaacttgaaattttggacaaacttcctcattactgtcctgtcagtgcgcatctggagtggaatcttgatggacttctggacaagatatgggaatacttggatctaactcgaatctacacaaaaccaaaggcaatgaatccggattatgatgatcccgtaatcttatcatccaagaagagaacagtagaggacttctgcatccggattcacaaagacatgcttaaacaattcaagtacgctctggtttggggttcaagtgccaaacacaagccacaaagagttggaaaggaacacgagcttgaggacgaggatgttgttcagatcgttaaaaagatatgatttttgcagataatggagagcagtcaagagaccaaccaaagtagccataatgagatctcctataggaaggtcaggatttcttttggtttctcagctttatctttcttttgtaattgtattattatatccagacgaaatctgtgtctacacccttttttatgtcttattagatacttttgtcttcttccaataatactattaagcatgtgattgatgttgtcggaacacctcctattatctccagtatgggtttgcctagattttctcctcccttgtttttatgtatgcaactagacttttttggattttatttactaaacatatgattcagtttttcttcatgtaataaagaaaaactgttaaaacggcct

SEQ ID NO: 29623 - protein, 369 aa, Arabidopsis thaliana
  peptide (1)..(369): Ceres Seq. ID no. 13497566
MSTIMQKIKEIEDEMAKTQKNKATSHHLGLLKAKLAKLRRDLLAPPTKGGGGGAGEGFDVTKSGDSRVGLVGFPSVGKSTLLNKLTGTFSEVASYEFTTLTCIPGVITYRGAKIQLLDLPGIIEGAKDGKGRGRQVISTARTCNCILIVLDAIKPITHKRLIEKELEGFGIRLNKEPPNLTFRKKDKGGINLTSTVAVTHLDLDTVKAICGEYRMHNADITLRYDATADDLIDVIEGSRIYMPCIYAVNKIDSITLEELEILDKLPHYCPVSAHLEWNLDGLLDKIWEYLDLTRIYTKPKAMNPDYDDPVILSSKKRTVEDFCIRIHKDMLKQFKYALVWGSSAKHKPQRVGKEHELEDEDVVQIVKKI

SEQ ID NO: 29624 - protein, 365 aa, Arabidopsis thaliana
  peptide (1)..(365): Ceres Seq. ID no. 13497567
MQKIKEIEDEMAKTQKNKATSHHLGLLKAKLAKLRRDLLAPPTKGGGGGAGEGFDVTKSGDSRVGLVGFPSVGKSTLLNKLTGTFSEVASYEFTTLTCIPGVITYRGAKIQLLDLPGIIEGAKDGKGRGRQVISTARTCNCILIVLDAIKPITHKRLIEKELEGFGIRLNKEPPNLTFRKKDKGGINLTSTVAVTHLDLDTVKAICGEYRMHNADITLRYDATADDLIDVIEGSRIYMPCIYAVNKIDSITLEELEILDKLPHYCPVSAHLEWNLDGLLDKIWEYLDLTRIYTKPKAMNPDYDDPVILSSKKRTVEDFCIRIHKDMLKQFKYALVWGSSAKHKPQRVGKEHELEDEDVVQIVKKI

SEQ ID NO: 29625 - protein, 355 aa, Arabidopsis thaliana
  peptide (1)..(355): Ceres Seq. ID no. 13497568
MAKTQKNKATSHHLGLLKAKLAKLRRDLLAPPTKGGGGGAGEGFDVTKSGDSRVGLVGFPSVGKSTLLNKLTGTFSEVASYEFTTLTCIPGVITYRGAKIQLLDLPGIIEGAKDGKGRGRQVISTARTCNCILIVLDAIKPITHKRLIEKELEGFGIRLNKEPPNLTFRKKDKGGINLTSTVAVTHLDLDTVKAICGEYRMHNADITLRYDATADDLIDVIEGSRIYMPCIYAVNKIDSITLEELEILDKLPHYCPVSAHLEWNLDGLLDKIWEYLDLTRIYTKPKAMNPDYDDPVILSSKKRTVEDFCIRIHKDMLKQFKYALVWGSSAKHKPQRVGKEHELEDEDVVQIVKKI

SEQ ID NO: 29626 - DNA, 1518 bp, Arabidopsis thaliana; identical to SEQ ID NO: 29022
  misc_feature (1)..(1518): Ceres Seq. ID no. 12371601
  misc_feature (1)..(1518): Ortholog of  Ceres SEQ ID NO 12625948 as cited in SEQ ID NO 64717

SEQ ID NO: 29627 - protein, 454 aa, Arabidopsis thaliana; identical to SEQ ID NO: 29023
  peptide (1)..(454): Ceres Seq. ID no. 12371602

SEQ ID NO: 29628 - protein, 440 aa, Arabidopsis thaliana; identical to SEQ ID NO: 29024
  peptide (1)..(440): Ceres Seq. ID no. 12371603

SEQ ID NO: 29629 - protein, 330 aa, Arabidopsis thaliana; identical to SEQ ID NO: 29025
  peptide (1)..(330): Ceres Seq. ID no. 12371604

SEQ ID NO: 29630 - DNA, 557 bp, Arabidopsis thaliana
  misc_feature (1)..(557): Ceres Seq. ID no. 12332139
  misc_feature (1)..(557): Ortholog of  Ceres SEQ ID NO 12583650 as cited in SEQ ID NO 57575
aaaaagccgtctttttgcttctctgtttctccgtcgagtctcccggagatttcatagaatccaatcgcctcaaatcgaatcgctaatctagttgaatcaagatggtttatatcgcatcgtgggacgaattcgttgatcgatctgttcagctttttcgagctgatccggaatctactcggtatgtgatgaagtatagacactgtgacggcaagttggttcttaaggttactgataacaaagagtgtctcaagttcaagacagaccaagcacaagaagcgaagaagatggagaaactgaataacatatttttcaccctcatggccagaggacctgatgtcgatctctcagaagtcaccgggaaagaacagatggagacacagcctgccaagaaaggaagaggaaggaagcaataagtctcaagatttgttttccgtttgtcttggtatcaagattttgatccatttttgtttgatattttgagatggtagggttgtcaagattcgttctaaagcttacgacttttttttacactttgatcgattaatcacttttggatt

SEQ ID NO: 29631 - protein, 103 aa, Arabidopsis thaliana
  peptide (1)..(103): Ceres Seq. ID no. 12332140
MVYIASWDEFVDRSVQLFRADPESTRYVMKYRHCDGKLVLKVTDNKECLKFKTDQAQEAKKMEKLNNIFFTLMARGPDVDLSEVTGKEQMETQPAKKGRGRKQ

SEQ ID NO: 29632 - protein, 75 aa, Arabidopsis thaliana
  peptide (1)..(75): Ceres Seq. ID no. 12332141
MKYRHCDGKLVLKVTDNKECLKFKTDQAQEAKKMEKLNNIFFTLMARGPDVDLSEVTGKEQMETQPAKKGRGRKQ

SEQ ID NO: 29633 - DNA, 2689 bp, Arabidopsis thaliana
  misc_feature (1)..(2689): Ceres Seq. ID no. 13490032
  misc_feature (1)..(2689): Ortholog of  Ceres SEQ ID NO 12609770 as cited in SEQ ID NO 51477
  misc_feature (1)..(2689): Ortholog of  Ceres SEQ ID NO 15177764 as cited in SEQ ID NO 57561
gacgaattttggttcgctgctgcataatttttacccatacatcttcctcatcttctctctccgtgttgactcttgaggcgatccaacaaacaacaacaacaacgccgcgattctcgagggaccaatccgttcagagagattaaagctgagctgagcttctccttataaaggaagatactgcttgttctacggaattttgagagatgcctcgggacttgtcaagatcgaggtcaccgtctccatcaccttcacgtcgtagaaagcactcgaggtctcccgtaaggcagaggcatagcaggaggagtagaagagacagaagcccttctccatactcatctcattcgtatagcaggtgatacccctagtgtttgttttttccgctattcgtttgccttagttatcattcgtttatacgaactgtaagaaacattggtggaacacggttatagatagacatgtaaagtttacagactcaagaattgcttttagtaaagttcctacttatagatatattttctacccttctctaaaagagagtgcaatgtctggatgctgctggctctgtatcgtaagcgttttttttgagtgatgctgcgtattggaaatatatcgtgtttatttggctgttgtgattaaatttgttgcaagagaatatgttttatgacctgagctttgtgatttttagaatgaaacctgtatattcggtaaagacataagttaagctgggataatagcactactgatagtctgatctagtttatattttaattgtatctgtagattattagttagaatcagttttaagagcgactatattatgttcttttaaatggagtttgttagcaatagtgatacaaaaccaccactattccttaggtaagataatatagtaatttgttgagaacatggctgagaagctaggaaaatgatacatgcgcttaccattataaaatagctcagtttcttcccgttcccacgggaggggaaatgagcagctgatggattgctcttaggtgttctttcattgatcccttgtctcgttagcttctcttcgtgtgataaaagttggagctgataattctttacagtgtatgaggtaactgcacatacttttgttttctttatgtgtaactgtgggctacctgatgcctagtcttcacgtgcgtggtacttcattagttccatctttttgcttactactttattttgggtaatgttcaggcgaaaaagtcgttctatttctcctaggcgccatcgaagtcgatctgttactcctaagagacgttctccaaccccaaaacgttacaaaagacaaaagagtaggagttcaactccatctcctgcaaaaagatctcccgccgcaacccttgagtcagccaaaaataggaatggagaaaaacttaaaagagaagaggaagaacgaaaaaggtaaatcaatacaaaattttgaagtaagatggatgttatggtgaaattaaggttttttgttctcaaatgttattttagtgtagtgtggaagtccttgattgttagtctcaaaagtgcgacaggttttatggtattctctcacaggctttgcttatggaagataagctatatttcgatttgtttatatttgatcctctggcacaaatgttcgtactatctcgatttgatgagttaccgtttgtcattacatggatcatgattgacttagagatgtaaatatgtccaaagcacaagaataatcttggtgaaggtttgcttgtgttatggtgacaaaaaagaaatttcttcacgaaatttaccattggtattgggaggagtgaaaatggaaacgatctcaacattttttacggatttgcaataaaattttggtcttttgctgttcaagattgaagacatcaggaaatgagaaagttcaggtgatattcaatattctgaacctgctgtggatgtcctctaatttttcactgtatttgctaccaggcgacagcgtgaagcagaactgaagctaatagaggaagaaactgtgaaacgggttgaagaagctattcgaaagaaggtcgaagaaagcttacagtctgagaaaatcaaaatggaaattctaacgctgttggaggaagggcgaaagagacttaatgaagaagtcgcggctcaacttgaggaggagaaagaggcttctcttattgaggctaaagaaaaagagggtgttatgcggtgtttgtcacaggaaagagagcaacaagagaaagaagagagggagagaatagcagaggagaacctaaagagagtggaagaagctcagagaaaagaagcaatggagaggcaaaggaaagaggaggaacggtatcgagagctagaggagctgcaacgacagaaagaagaagcgatgcgaaggaagaaagctgaagaggaagaagaacgtctcaaacagatgaaactgttgggtaaaaacaaatcacggcctaaattatcctttgccttaagctccaagtaaatgcgtgcatgcatgaagataaaaggattgatgtgatggatgatgatatgcatcttcttcctctcaaagatgctttatgattattgttattagtgcttcttgttggagcttaaactcttttatggcttttaattttttgtaattctatttttctcgttttgtaattttacgttaggttaatggtgatgaatgataatatagcaatgatcc

SEQ ID NO: 29634 - protein, 133 aa, Arabidopsis thaliana
  peptide (1)..(133): Ceres Seq. ID no. 13490033
MEILTLLEEGRKRLNEEVAAQLEEEKEASLIEAKEKEGVMRCLSQEREQQEKEERERIAEENLKRVEEAQRKEAMERQRKEEERYRELEELQRQKEEAMRRKKAEEEEERLKQMKLLGKNKSRPKLSFALSSK

SEQ ID NO: 29635 - protein, 94 aa, Arabidopsis thaliana
  peptide (1)..(94): Ceres Seq. ID no. 13490034
MRCLSQEREQQEKEERERIAEENLKRVEEAQRKEAMERQRKEEERYRELEELQRQKEEAMRRKKAEEEEERLKQMKLLGKNKSRPKLSFALSSK

SEQ ID NO: 29636 - protein, 76 aa, Arabidopsis thaliana
  peptide (1)..(76): Ceres Seq. ID no. 13490035
MDVMVKLRFFVLKCYFSVVWKSLIVSLKSATGFMVFSHRLCLWKISYISICLYLILWHKCSYYLDLMSYRLSLHGS

SEQ ID NO: 29637 - DNA, 344 bp, Arabidopsis thaliana
  misc_feature (1)..(344): Ceres Seq. ID no. 12422844
  misc_feature (1)..(344): Ortholog of  Ceres SEQ ID NO 13639704 as cited in SEQ ID NO 51325
  misc_feature (1)..(344): Ortholog of  Ceres SEQ ID NO 13599646 as cited in SEQ ID NO 0
aaacttaatcacacacaaggagagaagagagaaagagagaaagagagacagagataatggcgtacagtgcgtgtttcctacaccagagcgcattggcttcatcagccgcacgatcatcatcttcctcctcatcccagcgtcacgtgtcgctctccaaacctgttcagatcatctgtaaagcacaagctggagacaagaggtggttcaagggagccaggaaatttgtcgagagcgcacgcacttctttcagtgttgcttgagtgaaagcaacacaacgtaacaatgctctgcttgctttcttcatttgtctcttgtaaaaaatggaaaatgaaactgagcttttg

SEQ ID NO: 29638 - protein, 67 aa, Arabidopsis thaliana
  peptide (1)..(67): Ceres Seq. ID no. 12422845
MAYSACFLHQSALASSAARSSSSSSSQRHVSLSKPVQIICKAQAGDKRWFKGARKFVESARTSFSVA

SEQ ID NO: 29639 - protein, 58 aa, Arabidopsis thaliana
  peptide (1)..(58): Ceres Seq. ID no. 12422846
NLITHKERREKERKRDRDNGVQCVFPTPERIGFISRTIIIFLLIPASRVALQTCSDHL

SEQ ID NO: 29640 - DNA, 539 bp, Arabidopsis thaliana
  misc_feature (1)..(539): Ceres Seq. ID no. 12561397
  misc_feature (1)..(539): Ortholog of  Ceres SEQ ID NO 15177246 as cited in SEQ ID NO 57731
aagctgtcataaaattgagcttcttcttctctgaagccgtatcctagggttttctttgcacactactcgctccaatgggaaagggaacagggagtttcggtaagaggaggaacaagagtcacacactctgtgtgagatgtggtcgtcgtagtttccacatccagaagagtcgttgctcggcttgtgcttacccagctgctcgcaagaggacttacaactggagtgtgaaggccatcaggaggaagactactggtaccggaaggatgaggtatctccgtaatgttcctcgtcggttcaagactggattcagagaaggtactgaagccaagccaaggagcaaggcatcagcttcatcagcttaaagagccagttcgagtagtctctcaggaaggactaaagcttagcattttttgcattcaactagttgaagattacttttcatgtggatctcatacattatgttatgtgggttttgtttcttttgttattcacttataaagttttgaacttggtttaaatatcatcttacatttgcaacc

SEQ ID NO: 29641 - protein, 95 aa, Arabidopsis thaliana
  peptide (1)..(95): Ceres Seq. ID no. 12561398
MGKGTGSFGKRRNKSHTLCVRCGRRSFHIQKSRCSACAYPAARKRTYNWSVKAIRRKTTGTGRMRYLRNVPRRFKTGFREGTEAKPRSKASASSA

SEQ ID NO: 29642 - protein, 72 aa, Arabidopsis thaliana
  peptide (1)..(72): Ceres Seq. ID no. 12561399
MFLVGSRLDSEKVLKPSQGARHQLHQLKEPVRVVSQEGLKLSIFCIQLVEDYFSCGSHTLCYVGFVSFVIHL

SEQ ID NO: 29643 - DNA, 1058 bp, Arabidopsis thaliana
  misc_feature (1)..(1058): Ceres Seq. ID no. 12333067
  misc_feature (1)..(1058): Ortholog of  Ceres SEQ ID NO 15169809 as cited in SEQ ID NO 52839
  misc_feature (1)..(1058): Ortholog of  Ceres SEQ ID NO 15224302 as cited in SEQ ID NO 53942
gtcgaccttttttctctcacttacccaataagagcttttttcgcgttttccaccgcaaccaccgtcaccttcaaccgccggagccgccgcaaggaaggctcatcatccgccgtggcaattttttgaggtgtacaaagcattgcctatttgacgaaccaggaaatggttaaaaggcatggagagttttgatttacaagatatatcatgtcgcagtgcatagacggtttcaagcatgtatgctcctcttttttccggtgttttgatatcgatatttacaaacaatctggaggccttggtgaccctgaacttcttgcgagagagacagtttttagcgtgagtgaaatagaggctctctatgagctgtttaagaaaatcagcagtgctgtgattgatgatgggctaataaacaaggaagaatttcagttagccttgttcaagacaaataaaaaagagagcttgtttgcagaccggtaccaatcacaggtattcgatttgtttgacacaaagcataatggaatactggggtttgaggagtttgcgcgtgctctctctgtctttcatccaaatgctcccatagaagacaagattgacttttcgtttcagctatatgatcttaagcagcaaggtttcatagagaggcaagaggtgaagcaaatggtggtggctactcttgctgagtccggcatgaacctgtcagacgaaatcatagagagtataatcgacaagacatttgaggaagctgatacaaaacatgacgggaggatcgataaggaagagtggagaacccttgttctcaggcatccttcccttctaaagaatatgactctccagtatcttaaggatataacaactacatttccgagctttgtgttccactcgcaggtggaagatacctgagaaaaacaatagcatattagcagaggagacaatttgggaattgtgtttgttttctgattatgtatcatgtctatttgtttcaatctctctgaacattttcaagattttgttgttacttgtgtgaattaaaagtaaagaaaacaaatctgtatttttgctac

SEQ ID NO: 29644 - protein, 230 aa, Arabidopsis thaliana
  peptide (1)..(230): Ceres Seq. ID no. 12333068
MSQCIDGFKHVCSSFFRCFDIDIYKQSGGLGDPELLARETVFSVSEIEALYELFKKISSAVIDDGLINKEEFQLALFKTNKKESLFADRYQSQVFDLFDTKHNGILGFEEFARALSVFHPNAPIEDKIDFSFQLYDLKQQGFIERQEVKQMVVATLAESGMNLSDEIIESIIDKTFEEADTKHDGRIDKEEWRTLVLRHPSLLKNMTLQYLKDITTTFPSFVFHSQVEDT

SEQ ID NO: 29645 - DNA, 638 bp, Arabidopsis thaliana
  misc_feature (1)..(638): Ceres Seq. ID no. 13489850
  misc_feature (1)..(638): Ortholog of  Ceres SEQ ID NO 13504026 as cited in SEQ ID NO 58279
  misc_feature (1)..(638): Ortholog of  Ceres SEQ ID NO 15226827 as cited in SEQ ID NO 69141
gaaaagattctgacgctggtagtggtgagtggtgagcacggccaaaaggattttggtattgaaaaatggcatcaaaattggttcaacttcaatcaaaggcatgtcaggcttcaaagtttgtggccaagcatgggaattcgtactacaagcaattgttggagcagaacaagcaatacatccaagagcctgcaactatagagaagtgcagtgaattgtctaaacaattgctctacactcgtcttgctagcattcccgggcgctacgaaacatttaggaaagaagtagactacgcaaagaacttattgaagaacagagcgaatctgaaggtggaagatgcaggaatcgctgcattgtttggcttagaatgctttgcttggttttgcgcaggtgaaatcgtcggcagaggattcactttcaccggctactacccttgaaattgagacaacaaacaaccaggtcgccggaatattcttcctgacgcttgtaactccctccatatgattcctcacttgaactatatatacttcctcgaatccatttatattttcagttttttcctgaaacagaagtgttggagctaagggaaaaaaaaacattttggtaaagctcttaataagttgagaaaaatgcatttgatg

SEQ ID NO: 29646 - protein, 122 aa, Arabidopsis thaliana
  peptide (1)..(122): Ceres Seq. ID no. 13489851
MASKLVQLQSKACQASKFVAKHGNSYYKQLLEQNKQYIQEPATIEKCSELSKQLLYTRLASIPGRYETFRKEVDYAKNLLKNRANLKVEDAGIAALFGLECFAWFCAGEIVGRGFTFTGYYP

SEQ ID NO: 29647 - protein, 65 aa, Arabidopsis thaliana
  peptide (1)..(65): Ceres Seq. ID no. 13489852
EKILTLVVVSGEHGQKDFGIEKWHQNWFNFNQRHVRLQSLWPSMGIRTTSNCWSRTSNTSKSLQL

SEQ ID NO: 29648 - DNA, 732 bp, Arabidopsis thaliana
  misc_feature (1)..(732): Ceres Seq. ID no. 12476429
  misc_feature (1)..(732): Ortholog of  Ceres SEQ ID NO 13600689 as cited in SEQ ID NO 0
  misc_feature (1)..(732): Ortholog of  Ceres SEQ ID NO 15178120 as cited in SEQ ID NO 0
agaaacagttccgtgtaggcaaccattaggaaaaccctaactaaattccattattaatttcttttataatccctttctcttgacattgacttctctctctcgattcttcttctccagtttcaatcaaactcaatttcttctcaacgaaccctaatttccaacaaatcggattcagtttcttcttcggagactaatcgaatcgcaatggctaagagttccttcaagatctctaaccctctcgaggcaaggatgagtgaatcttctcgaatcagagagaagtaccctgacagaattcccgtgattgtggagaaggctggacaaagtgatgttcctgacattgacaagaagaagtatcttgtaccagctgatctaacagtgggacaatttgtatacgtggttcgtaaaagaatcaagcttggagctgagaaagctatttttgtctttgttaagaacacattgcctccaactgctgcattgatgtctgcgatctatgaagaacacaaagatgaggatgggttcctctacatgacttacagtggagagaacacttttggatctcttaccgttgcttgaataaaaatcgatctttggatgactttgatgtacatacataaatcaggaagataaagatgtacattgcttccttcttttctctggcttttaactttgctttggatgtttggatatctttccctttgggtttattaatcgtcagaaacttctccttttctt

SEQ ID NO: 29649 - protein, 122 aa, Arabidopsis thaliana
  peptide (1)..(122): Ceres Seq. ID no. 12476430
MAKSSFKISNPLEARMSESSRIREKYPDRIPVIVEKAGQSDVPDIDKKKYLVPADLTVGQFVYVVRKRIKLGAEKAIFVFVKNTLPPTAALMSAIYEEHKDEDGFLYMTYSGENTFGSLTVA

SEQ ID NO: 29650 - protein, 107 aa, Arabidopsis thaliana
  peptide (1)..(107): Ceres Seq. ID no. 12476431
MSESSRIREKYPDRIPVIVEKAGQSDVPDIDKKKYLVPADLTVGQFVYVVRKRIKLGAEKAIFVFVKNTLPPTAALMSAIYEEHKDEDGFLYMTYSGENTFGSLTVA

SEQ ID NO: 29651 - DNA, 537 bp, Arabidopsis thaliana
  misc_feature (1)..(537): Ceres Seq. ID no. 13491058
  misc_feature (1)..(537): Ortholog of  Ceres SEQ ID NO 15179080 as cited in SEQ ID NO 0
acgaacaacggaagaacaaaactctgagcgaatcaatcaatcggaaaaaggagataggtttcgcgaaaatggcggagaaaaaggatagtgtgccaccggaatacgatgtgaatgctaagtgggacgcatgtctcgatctcactgtccgccgcttcgtttactcttccctcggcggcgcatttgccggtcttctgttcttcaggagtcctgttacaagatgggcatcgattgctttaggtgctggaattggtattggctctgcatattcagattgttctcgtgcttttgattcaccttcttcatcttcagctaatttagcagctcccaagaataatattacagagacttctcctgtatctcaggctgcagacgagtagacaatgtcgataaagtggaagttagtaacacatccaatgatcggggtgttcagaaacagagctattatcatgcaatgctttgttgaattgtttcctaaacctgcaaagacaagagtctattgagataatgtcaaatgtaaaaacctttttttattcgctc

SEQ ID NO: 29652 - protein, 124 aa, Arabidopsis thaliana
  peptide (1)..(124): Ceres Seq. ID no. 13491059
EQRKNKTLSESINRKKEIGFAKMAEKKDSVPPEYDVNAKWDACLDLTVRRFVYSSLGGAFAGLLFFRSPVTRWASIALGAGIGIGSAYSDCSRAFDSPSSSSANLAAPKNNITETSPVSQAADE

SEQ ID NO: 29653 - protein, 102 aa, Arabidopsis thaliana
  peptide (1)..(102): Ceres Seq. ID no. 13491060
MAEKKDSVPPEYDVNAKWDACLDLTVRRFVYSSLGGAFAGLLFFRSPVTRWASIALGAGIGIGSAYSDCSRAFDSPSSSSANLAAPKNNITETSPVSQAADE

SEQ ID NO: 29654 - DNA, 857 bp, Arabidopsis thaliana
  misc_feature (1)..(857): Ceres Seq. ID no. 12332793
  misc_feature (1)..(857): Ortholog of  Ceres SEQ ID NO 13661928 as cited in SEQ ID NO 61155
acggcataataagaccaagaagaaaaagaaaacattaatttcaaccaaagcaaaacagagagaaaaaaatagagagagtgaatcaatttcggtggagaaagagaagaatggagcagccgtacgtgtacgcatacccgcaaggtagtggcccctcgggagctccgactccacaagccggaggagtggtagtggatccaaggtactgcgctccttaccctatagatatggcgatcgtacggaagatgatgtcgttgacggacggtaatttcgtgataacggacgtcaacggaaacctgctgttcaaggtgaaggaaccggtgtttggtctccacgacaagagggtcttgctggatggttctggtactccggtcgtcactttgagagaaaagatggtgagcatgcatgacaggtggcaagtgtttagaggagggagtacggcagcagcgtgatctgctgtacacggtgaaaagatcgtcgatgcttcagctaaagaccaaactcgatgtgtttttgggacacaacaaagatgagaagagatgtgatttcagagtcaaagggagttggctcgagcgttcttgtgttgtttacgccggcgaatctgacgccattgttgcccaagtatactatctctaactctctttccttcattaagggcccatccatctcatttatcaatgcatctcacatgtctctacacagtacacatttattagcaatgttttaatctggttttggtctactgctttagaatccggttttgatggacaggtttaggtagtttttgatttcggtttagatcaaaagatacatttatcttagcccatatattgtatgtttgatgaaattgggaagatttg

SEQ ID NO: 29655 - protein, 113 aa, Arabidopsis thaliana
  peptide (1)..(113): Ceres Seq. ID no. 12332794
MEQPYVYAYPQGSGPSGAPTPQAGGVVVDPRYCAPYPIDMAIVRKMMSLTDGNFVITDVNGNLLFKVKEPVFGLHDKRVLLDGSGTPVVTLREKMVSMHDRWQVFRGGSTAAA

SEQ ID NO: 29656 - protein, 76 aa, Arabidopsis thaliana
  peptide (1)..(76): Ceres Seq. ID no. 12332795
MTGGKCLEEGVRQQRDLLYTVKRSSMLQLKTKLDVFLGHNKDEKRCDFRVKGSWLERSCVVYAGESDAIVAQVYYL

SEQ ID NO: 29657 - protein, 74 aa, Arabidopsis thaliana
  peptide (1)..(74): Ceres Seq. ID no. 12332796
MAIVRKMMSLTDGNFVITDVNGNLLFKVKEPVFGLHDKRVLLDGSGTPVVTLREKMVSMHDRWQVFRGGSTAAA

SEQ ID NO: 29658 - DNA, 1558 bp, Arabidopsis thaliana; identical to SEQ ID NO: 22226
  misc_feature (1)..(1558): Ceres Seq. ID no. 13487458
  misc_feature (1)..(1558): Ortholog of  Ceres SEQ ID NO 14302734 as cited in SEQ ID NO 66748

SEQ ID NO: 29659 - protein, 415 aa, Arabidopsis thaliana; identical to SEQ ID NO: 22227
  peptide (1)..(415): Ceres Seq. ID no. 13487459

SEQ ID NO: 29660 - protein, 379 aa, Arabidopsis thaliana; identical to SEQ ID NO: 22228
  peptide (1)..(379): Ceres Seq. ID no. 13487460

SEQ ID NO: 29661 - protein, 372 aa, Arabidopsis thaliana; identical to SEQ ID NO: 22229
  peptide (1)..(372): Ceres Seq. ID no. 13487461

SEQ ID NO: 29662 - DNA, 1004 bp, Arabidopsis thaliana
  misc_feature (1)..(1004): Ceres Seq. ID no. 12332763
  misc_feature (1)..(1004): Ortholog of  Ceres SEQ ID NO 12626061 as cited in SEQ ID NO 64594
  misc_feature (1)..(1004): Ortholog of  Ceres SEQ ID NO 15174020 as cited in SEQ ID NO 0
  misc_feature (1)..(1004): Ortholog of  Ceres SEQ ID NO 15179151 as cited in SEQ ID NO 0
ctcacacacacaccaacgcaaacctccaaaacagggccggggcgattcattcacaatctcggcgattctctcttccgtctcgagtcgctgagatccatcagtaaaaggtctgcaaaatggttgctcagggattcactgtggatcttaaaaagccccttgtatttcaggttggtcatcttggagaagattatgaggaatgggttcaccaacctatcgcgaccaaggaaggccctcggttttttcagagtgacttttgggagttcttgacacttacagtttggtgggcagttcctgtcatttggttgccagttgtagtctggtgcatatcaaggtcagtaagtatgggatgttcacttccagaaatcgtcccaattgttgtcatgggaatattcatctggacattttttgaatacgttcttcaccggttcgttttccacataaaaacgaagagttactggggaaacactgcacactatcttattcacggatgccatcataagcacccgatggaccaccttcggctcgtctttcctcctactgcaacagcgattttatgctttccgttctggaacattgcgaaggctatctcaactccttcaaccgcacctgcattgtttggtggaggcatgctcggatatgtgatgtacgatgtcactcattattaccttcaccatgcccaacctactagaccagtgaccaaaaatctcaagaagtaccatttgaatcatcacttcaggattcaggacaaaggatttggtataacttcgtcgttatgggacatagtctttgggacacttcccaccacaaaagcccccagaaaagagcaatagtagtaaaaggcaaaaactaaaaagatgtttgtaatacatttaatttaatcttaagttattaatcatccttctgaattttgagatgtttaatctgaggtttcatttggatcactgtcttttgtagtttgtaaatcaatacttcacaatcctaatataatatttttctgcgaaagt

SEQ ID NO: 29663 - protein, 237 aa, Arabidopsis thaliana
  peptide (1)..(237): Ceres Seq. ID no. 12332764
MVAQGFTVDLKKPLVFQVGHLGEDYEEWVHQPIATKEGPRFFQSDFWEFLTLTVWWAVPVIWLPVVVWCISRSVSMGCSLPEIVPIVVMGIFIWTFFEYVLHRFVFHIKTKSYWGNTAHYLIHGCHHKHPMDHLRLVFPPTATAILCFPFWNIAKAISTPSTAPALFGGGMLGYVMYDVTHYYLHHAQPTRPVTKNLKKYHLNHHFRIQDKGFGITSSLWDIVFGTLPTTKAPRKEQ

SEQ ID NO: 29664 - protein, 162 aa, Arabidopsis thaliana
  peptide (1)..(162): Ceres Seq. ID no. 12332765
MGCSLPEIVPIVVMGIFIWTFFEYVLHRFVFHIKTKSYWGNTAHYLIHGCHHKHPMDHLRLVFPPTATAILCFPFWNIAKAISTPSTAPALFGGGMLGYVMYDVTHYYLHHAQPTRPVTKNLKKYHLNHHFRIQDKGFGITSSLWDIVFGTLPTTKAPRKEQ

SEQ ID NO: 29665 - protein, 149 aa, Arabidopsis thaliana
  peptide (1)..(149): Ceres Seq. ID no. 12332766
MGIFIWTFFEYVLHRFVFHIKTKSYWGNTAHYLIHGCHHKHPMDHLRLVFPPTATAILCFPFWNIAKAISTPSTAPALFGGGMLGYVMYDVTHYYLHHAQPTRPVTKNLKKYHLNHHFRIQDKGFGITSSLWDIVFGTLPTTKAPRKEQ

SEQ ID NO: 29666 - DNA, 636 bp, Arabidopsis thaliana; identical to SEQ ID NO: 22820
  misc_feature (1)..(636): Ceres Seq. ID no. 12562389
  misc_feature (1)..(636): Ortholog of  Ceres SEQ ID NO 12556889 as cited in SEQ ID NO 125
  misc_feature (1)..(636): Ortholog of  Ceres SEQ ID NO 15172982 as cited in SEQ ID NO 51725
  misc_feature (1)..(636): Ortholog of  Ceres SEQ ID NO 13598188 as cited in SEQ ID NO 61498

SEQ ID NO: 29667 - protein, 140 aa, Arabidopsis thaliana; identical to SEQ ID NO: 22821
  peptide (1)..(140): Ceres Seq. ID no. 12562390

SEQ ID NO: 29668 - DNA, 851 bp, Arabidopsis thaliana
  misc_feature (1)..(851): Ceres Seq. ID no. 13496922
  misc_feature (1)..(851): Ortholog of  Ceres SEQ ID NO 13589868 as cited in SEQ ID NO 55521
  misc_feature (1)..(851): Ortholog of  Ceres SEQ ID NO 14312250 as cited in SEQ ID NO 59168
  misc_feature (1)..(851): Ortholog of  Ceres SEQ ID NO 12617659 as cited in SEQ ID NO 65286
  misc_feature (1)..(851): Ortholog of  Ceres SEQ ID NO 12780566 as cited in SEQ ID NO 65822
  misc_feature (1)..(851): Ortholog of  Ceres SEQ ID NO 15179979 as cited in SEQ ID NO 0
gctctcacgttcgaagaccatttcttgttctttggacgaccatcggcgacagtgttaagtctagagtcttcttcttcttcggcgtagttttttccccggcttgaaaaatgggtctatccttcggaaagttgttcagcaagctctttgcaaagaaagagatgcgtatcctcatggtgggtctcgatgcagctggtaagactacgatcttgtacaagctcaagcttggagagatcgtgactacgattccaaccattggtttcaatgtggagactgtggaatacaagaacattagctttaccgtgtgggatgtcgggggtcaagacaagattcgtccattgtggaggcactacttccagaacactcagggacttatctttgtggtggacagcaatgatcgtgaccgtgttgtggaagccagagatgagcttcacagaatgttgaacgaagatgagttgagagatgctgtgcttctcgtttttgctaacaagcaagatcttccaaatgcgatgaacgccgctgagataaccgataagcttggacttcactctctccgtcaacgacactggtacatacagagcacatgtgctacctccggagaagggctttatgagggacttgactggctctctaacaacatcgcaaacaaggcttaggagaacaacgtgtggtttggtttttaatcgaggagagtcttgtcttcttccttctatcttttgttctttcgtctcaaactcttatcatttcatactctttgttcttcgctctaataatttacaagttttttttttttgttgcttttatcctataattcagactcttataaaatggggcccaatttcggcggatattcc

SEQ ID NO: 29669 - protein, 181 aa, Arabidopsis thaliana
  peptide (1)..(181): Ceres Seq. ID no. 13496923
MGLSFGKLFSKLFAKKEMRILMVGLDAAGKTTILYKLKLGEIVTTIPTIGFNVETVEYKNISFTVWDVGGQDKIRPLWRHYFQNTQGLIFVVDSNDRDRVVEARDELHRMLNEDELRDAVLLVFANKQDLPNAMNAAEITDKLGLHSLRQRHWYIQSTCATSGEGLYEGLDWLSNNIANKA

SEQ ID NO: 29670 - protein, 164 aa, Arabidopsis thaliana
  peptide (1)..(164): Ceres Seq. ID no. 13496924
MRILMVGLDAAGKTTILYKLKLGEIVTTIPTIGFNVETVEYKNISFTVWDVGGQDKIRPLWRHYFQNTQGLIFVVDSNDRDRVVEARDELHRMLNEDELRDAVLLVFANKQDLPNAMNAAEITDKLGLHSLRQRHWYIQSTCATSGEGLYEGLDWLSNNIANKA

SEQ ID NO: 29671 - protein, 160 aa, Arabidopsis thaliana
  peptide (1)..(160): Ceres Seq. ID no. 13496925
MVGLDAAGKTTILYKLKLGEIVTTIPTIGFNVETVEYKNISFTVWDVGGQDKIRPLWRHYFQNTQGLIFVVDSNDRDRVVEARDELHRMLNEDELRDAVLLVFANKQDLPNAMNAAEITDKLGLHSLRQRHWYIQSTCATSGEGLYEGLDWLSNNIANKA

SEQ ID NO: 29672 - DNA, 2121 bp, Arabidopsis thaliana
  misc_feature (1)..(2121): Ceres Seq. ID no. 13493768
  misc_feature (1)..(2121): Ortholog of  Ceres SEQ ID NO 13582297 as cited in SEQ ID NO 56486
  misc_feature (1)..(2121): Ortholog of  Ceres SEQ ID NO 13586936 as cited in SEQ ID NO 0
ttcttcaaaaaccccaaccacttcttctccccaaaaacctccaaagtttcaatctttacttctctctttttctccaagttatcttcttttctaggaagagatatgtgcggtgcaaagagcaacctttgctcatctaaaaccctaacagaagtcgaattcatgaggcagaaatcagaagacggagcttccgccacgtgtctcctcgaattcgccgcctgtgatgatctttcatcgtttaagagagagatcgaagagaatccatcggtggagattgatgagtcagggttttggtattgcagacgggtcgggtctaagaagatgggttttgaagaaagaacaccacttatggttgctgctatgtatggaagcatggaagtgttgaattacataattgccacaggaagatccgatgtgaacagagtttgcagtgacgagaaagtcactgctcttcactgtgcagtttctggctgttctgtttctatcgttgagatcatcaagatcttgcttgatgcttctgcttcacctaattgtgttgacgctaatgggaacaaaccggttgatttgttggctaaagattctcggtttgttcctaaccagagtagaaaggcggttgaggttttactgaccgggattcatggttcggttatggaagaagaggaggaggaactgaagagtgttgtgactaagtatccagctgatgcatcacttcctgatattaacgaaggtgtttatggaactgatgattttaggatgtttagctttaaggttaagccatgttctagggcttattcacatgattggactgaatgtccttttgttcatcctggtgagaatgcaaggaggagagatcctaggaagtatccttacacttgtgtgccttgtcccgagtttcgtaaagggtcttgtcctaaaggagattcgtgtgagtacgcgcacggtgttttcgagtcttggcttcacccggcgcagtataggacacggctttgcaaagatgagactggttgtgctaggagagtttgtttctttgctcatagacgggatgagttaagaccggttaatgcttctactggttctgcaatggtttcaccaaggtcgtctaatcagtctcctgagatgtctgttatgtctcctttgacgctgggatcatcgccaatgaactctcctatggctaatggtgttcctttgtctccaagaaatggtggtttatggcagaacagagttaatagccttacaccaccaccgttgcagcttaatggtagcagattgaagtcgactttgagtgctagagatatggatatggagatggaacttaggtttcgcggtttggataaccggagacttggtgatctcaagccatccaacctcgaagagactttcggatcatatgactcagcttctgtgatgcaacttcaatcaccaagcaggcattctcagatgaaccactatccgtcttcacctgtgaggcagcctcctcctcatggattcgaatcttcagcagccatggcagctgcagtgatgaatgcaagatcctcagcgtttgcgaaacgcagcttgagtttcaaaccagctccagtagcttctaatgtctccgattggggatcaccaaatgggaagcttgagtggggaatgcaaagagatgagctgaacaagttgaggagaagtgcctccttcggcattcatggaaacaacaacaacagtgtgtcacgccctgctagagactacagtgacgagccagatgtgtcgtgggtgaactcactggtgaaagagaatgcaccagagagagtgaatgagagggttgggaatacggtgaatggtgcagcgagtagagacaagtttaagctgccgtcgtgggcagagcaaatgtatatagaccatgagcagcagattgtggcataagaagcagaaagaaagatgtgggatttatattgcttttgtcttctgggcctctctacacagaatctaacaaatctggcaataattctttgatttgtgtttgacccatagtttggttactagtatatgtttttttatgttctttttttctttgtcattctcttgtccttcgtgacactatgtaatgattaaaagcaaataattgatgcatgagttcaaatgttcttt

SEQ ID NO: 29673 - protein, 631 aa, Arabidopsis thaliana
  peptide (1)..(631): Ceres Seq. ID no. 13493769
FFKNPNHFFSPKTSKVSIFTSLFFSKLSSFLGRDMCGAKSNLCSSKTLTEVEFMRQKSEDGASATCLLEFAACDDLSSFKREIEENPSVEIDESGFWYCRRVGSKKMGFEERTPLMVAAMYGSMEVLNYIIATGRSDVNRVCSDEKVTALHCAVSGCSVSIVEIIKILLDASASPNCVDANGNKPVDLLAKDSRFVPNQSRKAVEVLLTGIHGSVMEEEEEELKSVVTKYPADASLPDINEGVYGTDDFRMFSFKVKPCSRAYSHDWTECPFVHPGENARRRDPRKYPYTCVPCPEFRKGSCPKGDSCEYAHGVFESWLHPAQYRTRLCKDETGCARRVCFFAHRRDELRPVNASTGSAMVSPRSSNQSPEMSVMSPLTLGSSPMNSPMANGVPLSPRNGGLWQNRVNSLTPPPLQLNGSRLKSTLSARDMDMEMELRFRGLDNRRLGDLKPSNLEETFGSYDSASVMQLQSPSRHSQMNHYPSSPVRQPPPHGFESSAAMAAAVMNARSSAFAKRSLSFKPAPVASNVSDWGSPNGKLEWGMQRDELNKLRRSASFGIHGNNNNSVSRPARDYSDEPDVSWVNSLVKENAPERVNERVGNTVNGAASRDKFKLPSWAEQMYIDHEQQIVA

SEQ ID NO: 29674 - protein, 597 aa, Arabidopsis thaliana
  peptide (1)..(597): Ceres Seq. ID no. 13493770
MCGAKSNLCSSKTLTEVEFMRQKSEDGASATCLLEFAACDDLSSFKREIEENPSVEIDESGFWYCRRVGSKKMGFEERTPLMVAAMYGSMEVLNYIIATGRSDVNRVCSDEKVTALHCAVSGCSVSIVEIIKILLDASASPNCVDANGNKPVDLLAKDSRFVPNQSRKAVEVLLTGIHGSVMEEEEEELKSVVTKYPADASLPDINEGVYGTDDFRMFSFKVKPCSRAYSHDWTECPFVHPGENARRRDPRKYPYTCVPCPEFRKGSCPKGDSCEYAHGVFESWLHPAQYRTRLCKDETGCARRVCFFAHRRDELRPVNASTGSAMVSPRSSNQSPEMSVMSPLTLGSSPMNSPMANGVPLSPRNGGLWQNRVNSLTPPPLQLNGSRLKSTLSARDMDMEMELRFRGLDNRRLGDLKPSNLEETFGSYDSASVMQLQSPSRHSQMNHYPSSPVRQPPPHGFESSAAMAAAVMNARSSAFAKRSLSFKPAPVASNVSDWGSPNGKLEWGMQRDELNKLRRSASFGIHGNNNNSVSRPARDYSDEPDVSWVNSLVKENAPERVNERVGNTVNGAASRDKFKLPSWAEQMYIDHEQQIVA

SEQ ID NO: 29675 - protein, 578 aa, Arabidopsis thaliana
  peptide (1)..(578): Ceres Seq. ID no. 13493771
MRQKSEDGASATCLLEFAACDDLSSFKREIEENPSVEIDESGFWYCRRVGSKKMGFEERTPLMVAAMYGSMEVLNYIIATGRSDVNRVCSDEKVTALHCAVSGCSVSIVEIIKILLDASASPNCVDANGNKPVDLLAKDSRFVPNQSRKAVEVLLTGIHGSVMEEEEEELKSVVTKYPADASLPDINEGVYGTDDFRMFSFKVKPCSRAYSHDWTECPFVHPGENARRRDPRKYPYTCVPCPEFRKGSCPKGDSCEYAHGVFESWLHPAQYRTRLCKDETGCARRVCFFAHRRDELRPVNASTGSAMVSPRSSNQSPEMSVMSPLTLGSSPMNSPMANGVPLSPRNGGLWQNRVNSLTPPPLQLNGSRLKSTLSARDMDMEMELRFRGLDNRRLGDLKPSNLEETFGSYDSASVMQLQSPSRHSQMNHYPSSPVRQPPPHGFESSAAMAAAVMNARSSAFAKRSLSFKPAPVASNVSDWGSPNGKLEWGMQRDELNKLRRSASFGIHGNNNNSVSRPARDYSDEPDVSWVNSLVKENAPERVNERVGNTVNGAASRDKFKLPSWAEQMYIDHEQQIVA

SEQ ID NO: 29676 - DNA, 853 bp, Arabidopsis thaliana
  misc_feature (1)..(853): Ceres Seq. ID no. 13490099
  misc_feature (1)..(853): Ortholog of  Ceres SEQ ID NO 14309686 as cited in SEQ ID NO 58523
gacattcctctctttcttctgctctcggaattggtgttgcagaagttgcaaatttggaagaaaagttaacaggactggtgaagtatcaaaatttggggttttgctacgatgacgctaggtgctcggcttgttgctcccatgattatacttctcctttttataccgattgaattagttaaagcggaagtcattacactgacaccagaaaccttttctgacaagataaaggagaaggatactgcgtggttcgtaaagttttgtgttccttggtgtaaacactgcaagaaactggggaatttgtgggaagacttgggaaaagcaatggagggagacgatgaaattgaggttggtgaagtagactgtggtactagcagagctgtttgcaccaaagttgaaattcactcgtatccaacatttatgctattttacaatggagaagaagtttcgaaatataaaggaaaaagagacgttgaatcgctcaaggcttttgttgtagaggaaactgaaaaggcagcagaaaaagcacagcttgaagacaaggaactgtgatacaactagtcggtgattattagaacctgatacattgttccctttggttttcattttgcctatgcagttgtgtgactcttaccgttagttagataggcatggttttcagcacgatggaggatcatctttgggtttaaaggtttttcacaccactgttttgctaaaatattcagtttccattttattcagagtcagataagcaaagacgtaagtgtagttagtcgagatttcttacaagtttgtgttgtatgttcgttttaagagcagctgcagaccaaagttcttgctttaaaatttcatatcc

SEQ ID NO: 29677 - protein, 146 aa, Arabidopsis thaliana
  peptide (1)..(146): Ceres Seq. ID no. 13490100
MTLGARLVAPMIILLLFIPIELVKAEVITLTPETFSDKIKEKDTAWFVKFCVPWCKHCKKLGNLWEDLGKAMEGDDEIEVGEVDCGTSRAVCTKVEIHSYPTFMLFYNGEEVSKYKGKRDVESLKAFVVEETEKAAEKAQLEDKEL

SEQ ID NO: 29678 - protein, 136 aa, Arabidopsis thaliana
  peptide (1)..(136): Ceres Seq. ID no. 13490101
MIILLLFIPIELVKAEVITLTPETFSDKIKEKDTAWFVKFCVPWCKHCKKLGNLWEDLGKAMEGDDEIEVGEVDCGTSRAVCTKVEIHSYPTFMLFYNGEEVSKYKGKRDVESLKAFVVEETEKAAEKAQLEDKEL

SEQ ID NO: 29679 - protein, 75 aa, Arabidopsis thaliana
  peptide (1)..(75): Ceres Seq. ID no. 13490102
MEGDDEIEVGEVDCGTSRAVCTKVEIHSYPTFMLFYNGEEVSKYKGKRDVESLKAFVVEETEKAAEKAQLEDKEL

SEQ ID NO: 29680 - DNA, 689 bp, Arabidopsis thaliana
  misc_feature (1)..(689): Ceres Seq. ID no. 12466456
  misc_feature (1)..(689): Ortholog of  Ceres SEQ ID NO 13581656 as cited in SEQ ID NO 59965
catagggtcaccaatggcttcttctttgcttgcactcttctcctgtctcttcctctctctcttatctctctcctcctccctaaatctccgccgtccgatcttctctcaatccaacgacctcgatctcttctcttctctaaatctcgaccgtccatctctcgccgccgatgacatccacgatcttctcccacgctacggattcccgaaaggtcttcttcccaacaacgtcaaatcgtacactatctccgacgacggcgatttcaccgttgacctgatttccagttgctacgtcaagttctccgatcaactcgttttctacggcaagaatatcgccggaaaactcagttacggatctgttaaagacgtccgtggaatccaagctaaagaagctttcctttggctaccaatcaccgccatggaatcggatccaagctctgccacggttgtgttctccgtcggatttgtgtccaagactttacctgcttccatgttcgaaaatgttccttcttgctcaagaaacctaaatcttcaagactcttgaatccacctgaaacgatctcaagattcaacattccctccaccctttatagttttgtatttcagaagtattttgcttggtttcgtagatataggttcgaattggaaaagatactatcttaattattcgaatcagattatgttatactgcc

SEQ ID NO: 29681 - protein, 179 aa, Arabidopsis thaliana
  peptide (1)..(179): Ceres Seq. ID no. 12466457
IGSPMASSLLALFSCLFLSLLSLSSSLNLRRPIFSQSNDLDLFSSLNLDRPSLAADDIHDLLPRYGFPKGLLPNNVKSYTISDDGDFTVDLISSCYVKFSDQLVFYGKNIAGKLSYGSVKDVRGIQAKEAFLWLPITAMESDPSSATVVFSVGFVSKTLPASMFENVPSCSRNLNLQDS

SEQ ID NO: 29682 - protein, 175 aa, Arabidopsis thaliana
  peptide (1)..(175): Ceres Seq. ID no. 12466458
MASSLLALFSCLFLSLLSLSSSLNLRRPIFSQSNDLDLFSSLNLDRPSLAADDIHDLLPRYGFPKGLLPNNVKSYTISDDGDFTVDLISSCYVKFSDQLVFYGKNIAGKLSYGSVKDVRGIQAKEAFLWLPITAMESDPSSATVVFSVGFVSKTLPASMFENVPSCSRNLNLQDS

SEQ ID NO: 29683 - DNA, 908 bp, Arabidopsis thaliana
  misc_feature (1)..(908): Ceres Seq. ID no. 12333389
  misc_feature (1)..(908): Ortholog of  Ceres SEQ ID NO 15173410 as cited in SEQ ID NO 61812
acacacaacaactacaacaatggctacttcaagaacattcattttctctaatctcttcatcttcttcctcgttatagccactacttatggtcaggctccagctccaggcccttcaggtccaacgaacataaccgcaatcctagaaaaggctggtcaattcacattgttcataagacttcttaaaagcactcaagcctcagaccaaatcaacactcagctcaattcttcctcgagtaatggcttaaccgtgtttgccccgactgataacgccttcaacagcctcaaatccggaaccttaaactcattgtctgaccaacaaaaagttcagcttgttcagttccatgtcttacctacactcataaccatgcctcagtttcaaaccgttagtaaccctttacgcacgcaagctggagatggccaaaacggtaaattccctcttaacatcactagctccggtaaccaagttaacatcaccactggagttgtcagcgccaccgtggctaactctgtctacagcgataagcagctggccgtttatcaggttgatcaagttttgctgccattagccatgtttggatcaagcgtggctcctgctccggcccctgagaaaggcggctctgtttcaaaaggctcagcttccggtggcgatgatggaggagattctactgattcatctgatgcagagaggactggattcgggtttgggatcagaatcactaccgttgcagccattgctgcttcttcttctctgtggatataactcgagagagagcttttcttgagtctccacatttggaattttaagaataacgagagctttaagtttttgttgtactttgagattgttttatagatgtgttattacgtgtgattgttttgattaagattgcacacaactttttttgatg

SEQ ID NO: 29684 - protein, 252 aa, Arabidopsis thaliana
  peptide (1)..(252): Ceres Seq. ID no. 12333390
HTTTTTMATSRTFIFSNLFIFFLVIATTYGQAPAPGPSGPTNITAILEKAGQFTLFIRLLKSTQASDQINTQLNSSSSNGLTVFAPTDNAFNSLKSGTLNSLSDQQKVQLVQFHVLPTLITMPQFQTVSNPLRTQAGDGQNGKFPLNITSSGNQVNITTGVVSATVANSVYSDKQLAVYQVDQVLLPLAMFGSSVAPAPAPEKGGSVSKGSASGGDDGGDSTDSSDAERTGFGFGIRITTVAAIAASSSLWI

SEQ ID NO: 29685 - protein, 246 aa, Arabidopsis thaliana
  peptide (1)..(246): Ceres Seq. ID no. 12333391
MATSRTFIFSNLFIFFLVIATTYGQAPAPGPSGPTNITAILEKAGQFTLFIRLLKSTQASDQINTQLNSSSSNGLTVFAPTDNAFNSLKSGTLNSLSDQQKVQLVQFHVLPTLITMPQFQTVSNPLRTQAGDGQNGKFPLNITSSGNQVNITTGVVSATVANSVYSDKQLAVYQVDQVLLPLAMFGSSVAPAPAPEKGGSVSKGSASGGDDGGDSTDSSDAERTGFGFGIRITTVAAIAASSSLWI

SEQ ID NO: 29686 - protein, 131 aa, Arabidopsis thaliana
  peptide (1)..(131): Ceres Seq. ID no. 12333392
MPQFQTVSNPLRTQAGDGQNGKFPLNITSSGNQVNITTGVVSATVANSVYSDKQLAVYQVDQVLLPLAMFGSSVAPAPAPEKGGSVSKGSASGGDDGGDSTDSSDAERTGFGFGIRITTVAAIAASSSLWI

SEQ ID NO: 29687 - DNA, 1135 bp, Arabidopsis thaliana
  misc_feature (1)..(1135): Ceres Seq. ID no. 12559930
  misc_feature (1)..(1135): Ortholog of  Ceres SEQ ID NO 15178873 as cited in SEQ ID NO 1103
  misc_feature (1)..(1135): Ortholog of  Ceres SEQ ID NO 15173557 as cited in SEQ ID NO 60031
  misc_feature (1)..(1135): Ortholog of  Ceres SEQ ID NO 13590940 as cited in SEQ ID NO 68653
acgacactcgcaacttcttccttatcgacacctacactctcctgctacaatggcgactttcctaacaaatgttgtttcaatcaaacctacaatcttctcattccagtccgaatccttcactcctttgcatacacgggtcaatgtattctcctcgaaaccctttccttctctcgctggaactttctcccggagctctagaacgagattcattccttatgctgtaacggagacggaagaaaaacccgccgctttggaccctagttcagaagctgccaggcgtgtgtatatcggtaacatacccaggacggtgaccaatgagcagctcactaaacttgttgaagaacacggtgctgttgaaaaagttcaggtgatgtatgataagtattcaggaagaagccgtcgatttgggtttgctacaatgaaatcagttgaagatgctaatgctgtggttgagaaattgaatggcaataccgttgaagggcgtgagataaaggttaacattacagagaaacctatagcatcatcacctgatttatcagttcttcagtctgaggattcagcatttgtagatagcccttacaaagtgtatgttgggaatctagcaaagactgttacaaaagagatgcttgagaatttgttttctgagaaagggaaagtagtaagtgctaaggtttcaagagtacctggaacttccaaatccaccgggtttggattcgttacgttttcttctgaagaagatgtggaagcagccattgttgctcttaacaattcgttgctggaaggacagaagattcgggtgaataaggcttagcctattggatcataaagaatgtgaaaagaatcgctttgaagagtttttgtaatgcaaatcattagagcttagtgtatcatcttgtattcattctaagttgaaaatgaaaccatatcttttcaaaagcttatagttgtggtaatcttgtttctaggcagtgtaaacagagaactccaatgacatgaacaagtcatgctacatccaattcagaggtagggatgataatgaagatccccaagntaaatttatctccaccaagtttcctttccataaatgtatcatacaatgtnaaantgctacttgtgtgacttgtgagctttggcc

SEQ ID NO: 29688 - protein, 269 aa, Arabidopsis thaliana; identical to SEQ ID NO: 24385
  peptide (1)..(269): Ceres Seq. ID no. 12559931

SEQ ID NO: 29689 - protein, 253 aa, Arabidopsis thaliana; identical to SEQ ID NO: 24386
  peptide (1)..(253): Ceres Seq. ID no. 12559932

SEQ ID NO: 29690 - protein, 146 aa, Arabidopsis thaliana; identical to SEQ ID NO: 24387
  peptide (1)..(146): Ceres Seq. ID no. 12559933

SEQ ID NO: 29691 - DNA, 684 bp, Arabidopsis thaliana; identical to SEQ ID NO: 24528
  misc_feature (1)..(684): Ceres Seq. ID no. 12332058
  misc_feature (1)..(684): Ortholog of  Ceres SEQ ID NO 14314198 as cited in SEQ ID NO 57472
  misc_feature (1)..(684): Ortholog of  Ceres SEQ ID NO 15174264 as cited in SEQ ID NO 61877

SEQ ID NO: 29692 - protein, 172 aa, Arabidopsis thaliana; identical to SEQ ID NO: 24529
  peptide (1)..(172): Ceres Seq. ID no. 12332059

SEQ ID NO: 29693 - protein, 151 aa, Arabidopsis thaliana; identical to SEQ ID NO: 24530
  peptide (1)..(151): Ceres Seq. ID no. 12332060

SEQ ID NO: 29694 - DNA, 812 bp, Arabidopsis thaliana
  misc_feature (1)..(812): Ceres Seq. ID no. 12321339
  misc_feature (1)..(812): Ortholog of  Ceres SEQ ID NO 13583358 as cited in SEQ ID NO 62221
  misc_feature (1)..(812): Ortholog of  Ceres SEQ ID NO 15179036 as cited in SEQ ID NO 0
aactatacagtaatcgaaggaaccaagaaacggtctcaatcttattttcagcgatggcgatgtcaattctaaagctaagaaatttatcggcactaagatcggcggcaaatagtgcccggatcggagtttcatcgaggggtttctcaaagctcgcggaaggcactgacataacctcggcggcgcctggcgtttctctccagaaagctcgcagctgggacgaaggtgtttcctccaaattctccaccacgccattgtcagatatcttcaaggggaagaaagtcgtcatctttggtcttcctggggcttacacgggagtttgttcacagcagcatgtgcctagctacaagagccacattgataagtttaaagccaaaggcattgattctgtcatctgtgtctctgttaatgatccctttgctatcaatggttgggcagagaagcttggtgccaaagatgcaattgagttttatggagattttgatgggaaatttcacaaaagcttggggctagacaaggatctctctgctgcattgctcgggccacggtctgagagatggtcggcttatgtagaagacgggaaggttaaggcggtgaatgtggaagaagcaccgtctgacttcaaggttacaggggcagaagtcatcttaggacagatctaaaaagtatttccagagttgctgtttcttctgagttgcaactgataataagtttgatccgaacatgtctcaaggatcagaccaagtaacagcttcacttcttttgttttgtttccacagtttcagtttaaataaaacttatgtgtcttgccgttt

SEQ ID NO: 29695 - protein, 218 aa, Arabidopsis thaliana
  peptide (1)..(218): Ceres Seq. ID no. 12321340
LYSNRRNQETVSILFSAMAMSILKLRNLSALRSAANSARIGVSSRGFSKLAEGTDITSAAPGVSLQKARSWDEGVSSKFSTTPLSDIFKGKKVVIFGLPGAYTGVCSQQHVPSYKSHIDKFKAKGIDSVICVSVNDPFAINGWAEKLGAKDAIEFYGDFDGKFHKSLGLDKDLSAALLGPRSERWSAYVEDGKVKAVNVEEAPSDFKVTGAEVILGQI

SEQ ID NO: 29696 - protein, 201 aa, Arabidopsis thaliana
  peptide (1)..(201): Ceres Seq. ID no. 12321341
MAMSILKLRNLSALRSAANSARIGVSSRGFSKLAEGTDITSAAPGVSLQKARSWDEGVSSKFSTTPLSDIFKGKKVVIFGLPGAYTGVCSQQHVPSYKSHIDKFKAKGIDSVICVSVNDPFAINGWAEKLGAKDAIEFYGDFDGKFHKSLGLDKDLSAALLGPRSERWSAYVEDGKVKAVNVEEAPSDFKVTGAEVILGQI

SEQ ID NO: 29697 - protein, 199 aa, Arabidopsis thaliana
  peptide (1)..(199): Ceres Seq. ID no. 12321342
MSILKLRNLSALRSAANSARIGVSSRGFSKLAEGTDITSAAPGVSLQKARSWDEGVSSKFSTTPLSDIFKGKKVVIFGLPGAYTGVCSQQHVPSYKSHIDKFKAKGIDSVICVSVNDPFAINGWAEKLGAKDAIEFYGDFDGKFHKSLGLDKDLSAALLGPRSERWSAYVEDGKVKAVNVEEAPSDFKVTGAEVILGQI

SEQ ID NO: 29698 - DNA, 1112 bp, Arabidopsis thaliana
  misc_feature (1)..(1112): Ceres Seq. ID no. 12421015
  misc_feature (1)..(1112): Ortholog of  Ceres SEQ ID NO 14304678 as cited in SEQ ID NO 53747
gagtttcaatggcggcaattttttctctcttccttttcttcattctcttcatcgtctctcttctcatcatcttatctttcatcgtacggccaagatccgtcacgatccccatcaagtttcgccacgtcttcatcaccggtggatcaagcggaatcggtctcgctctcgctcaccgtgccgtctccgaaggcgctaaagtctccatcctcgctcgttcaactgaaaagctcgccgaagccaaacgatccatccagctagctaccggtgtcgaggtcgccacgttctctgcggacgttcgcgattacgacgccgtttcgaaagcgattgatgaatcgggaccgatcgatgtgttgattgttaatcaaggcgtgtttattgggaaagagattgagaaacagagtcctgaggaggttaagtttatgattgatgtgaatctgactgggagcttcaatgtgattaaggcggctttacctgctatgaaagctagggaaagtcgtggttctgcttccatttctcttgtgtcctctcaagctggtcaggcaggtatatatggttacactgcatattcagcgagcaagtttgggcttcagggtttagcgcaagcattgcagcaagaagttatttctgatgacattcatgtgactctcttgtttcctcctgacactgatacacccgggtttgaacaagaactgaagaagaggccagaactaacttcaatcatagccgcatcatcgggttcaatgaaaaccaaggaagtggccaagatatgttttgatggtatcaaagcaggaaaatttacagtgacatgccattttattggcttcttactatcaattgctagcaccggcatgtcccctcagggatcgttttggcttgcgctcattgaagttatattcggtggtctaataagattcgtcagcttggttttccaatggcaatggtacaaaaccatagaaaagtggagcaaagaaaaacaagtaaatagtaagttagcttaggttattttgtacaatggtactaatactatatgatcagtctcttgtacagtgaacaggctcatgtgtttgtagttccaacttcggcttctctgttttcaatttgaataaattgtg

SEQ ID NO: 29699 - protein, 331 aa, Arabidopsis thaliana
  peptide (1)..(331): Ceres Seq. ID no. 12421016
VSMAAIFSLFLFFILFIVSLLIILSFIVRPRSVTIPIKFRHVFITGGSSGIGLALAHRAVSEGAKVSILARSTEKLAEAKRSIQLATGVEVATFSADVRDYDAVSKAIDESGPIDVLIVNQGVFIGKEIEKQSPEEVKFMIDVNLTGSFNVIKAALPAMKARESRGSASISLVSSQAGQAGIYGYTAYSASKFGLQGLAQALQQEVISDDIHVTLLFPPDTDTPGFEQELKKRPELTSIIAASSGSMKTKEVAKICFDGIKAGKFTVTCHFIGFLLSIASTGMSPQGSFWLALIEVIFGGLIRFVSLVFQWQWYKTIEKWSKEKQVNSKLA

SEQ ID NO: 29700 - protein, 329 aa, Arabidopsis thaliana
  peptide (1)..(329): Ceres Seq. ID no. 12421017
MAAIFSLFLFFILFIVSLLIILSFIVRPRSVTIPIKFRHVFITGGSSGIGLALAHRAVSEGAKVSILARSTEKLAEAKRSIQLATGVEVATFSADVRDYDAVSKAIDESGPIDVLIVNQGVFIGKEIEKQSPEEVKFMIDVNLTGSFNVIKAALPAMKARESRGSASISLVSSQAGQAGIYGYTAYSASKFGLQGLAQALQQEVISDDIHVTLLFPPDTDTPGFEQELKKRPELTSIIAASSGSMKTKEVAKICFDGIKAGKFTVTCHFIGFLLSIASTGMSPQGSFWLALIEVIFGGLIRFVSLVFQWQWYKTIEKWSKEKQVNSKLA

SEQ ID NO: 29701 - protein, 192 aa, Arabidopsis thaliana
  peptide (1)..(192): Ceres Seq. ID no. 12421018
MIDVNLTGSFNVIKAALPAMKARESRGSASISLVSSQAGQAGIYGYTAYSASKFGLQGLAQALQQEVISDDIHVTLLFPPDTDTPGFEQELKKRPELTSIIAASSGSMKTKEVAKICFDGIKAGKFTVTCHFIGFLLSIASTGMSPQGSFWLALIEVIFGGLIRFVSLVFQWQWYKTIEKWSKEKQVNSKLA

SEQ ID NO: 29702 - DNA, 772 bp, Arabidopsis thaliana
  misc_feature (1)..(772): Ceres Seq. ID no. 12332756
  misc_feature (1)..(772): Ortholog of  Ceres SEQ ID NO 12563476 as cited in SEQ ID NO 53763
aaaaagagtaattgaacaaaagaaagaaaaactgataatgaagggtcttcatctccacctcgtcctagtcaccatgacgatcgttgcctccatcgccgccgctgcaccggctgctcccggaggagctctggctgatgaatgcaaccaggattttcaaaaggtgactttgtgtttggactttgcgaccgggaaggcaacaattccgtctaagaagtgttgtgacgctgttgaagatatcaaagaaagagatccaaagtgtttgtgtttcgttatacaacaagcgaagacaggaggacaagccttgaaggatcttggtgttcaagaagacaaactcattcaactcccaacttcttgtcagctccacaacgctagcattaccaactgtccaaagcttctagggatttcacctagctcgccagacgcagccgtattcacaaacaatgccacaacaacaccggtggcaccagcaggaaagtctccggcaactccagctacgtccacggataagggaggatcagcttcagcaaaggatggtcacgcagtcgttgctctagccgtcgctttgatggccgtctcctttgtcttgaccttgcctagacatgtcacattagggatgtaatcttttcttatgaagttggttggtgcttttgtttttgtcccttttgtttcaaaacttatctttcaagtgtgtttctttgttcggacatttgttgtaatgagtcaacttcccactcaaatctgatatctctccgcaaatgagtaaatttatgct

SEQ ID NO: 29703 - protein, 205 aa, Arabidopsis thaliana
  peptide (1)..(205): Ceres Seq. ID no. 12332757
KRVIEQKKEKLIMKGLHLHLVLVTMTIVASIAAAAPAAPGGALADECNQDFQKVTLCLDFATGKATIPSKKCCDAVEDIKERDPKCLCFVIQQAKTGGQALKDLGVQEDKLIQLPTSCQLHNASITNCPKLLGISPSSPDAAVFTNNATTTPVAPAGKSPATPATSTDKGGSASAKDGHAVVALAVALMAVSFVLTLPRHVTLGM

SEQ ID NO: 29704 - protein, 193 aa, Arabidopsis thaliana
  peptide (1)..(193): Ceres Seq. ID no. 12332758
MKGLHLHLVLVTMTIVASIAAAAPAAPGGALADECNQDFQKVTLCLDFATGKATIPSKKCCDAVEDIKERDPKCLCFVIQQAKTGGQALKDLGVQEDKLIQLPTSCQLHNASITNCPKLLGISPSSPDAAVFTNNATTTPVAPAGKSPATPATSTDKGGSASAKDGHAVVALAVALMAVSFVLTLPRHVTLGM

SEQ ID NO: 29705 - protein, 181 aa, Arabidopsis thaliana
  peptide (1)..(181): Ceres Seq. ID no. 12332759
MTIVASIAAAAPAAPGGALADECNQDFQKVTLCLDFATGKATIPSKKCCDAVEDIKERDPKCLCFVIQQAKTGGQALKDLGVQEDKLIQLPTSCQLHNASITNCPKLLGISPSSPDAAVFTNNATTTPVAPAGKSPATPATSTDKGGSASAKDGHAVVALAVALMAVSFVLTLPRHVTLGM

SEQ ID NO: 29706 - DNA, 748 bp, Arabidopsis thaliana
  misc_feature (1)..(748): Ceres Seq. ID no. 13486683
  misc_feature (1)..(748): Ortholog of  Ceres SEQ ID NO 13583412 as cited in SEQ ID NO 62624
agcattttcaacatttctattaatatttccatagactagatctctctttcttatacatccatatcaccgatgatgcctcgccgtgacgtcctcttcctctcactcctcctcgtcatcgccaccgtctccgctgtcgcattagccgacgatgaagcagattgtgtctacacattcttccttagaaccggatcaaccttcaaagccggtacagattcgatcataagcgctagagtctacgacaaatacggagactacatcgggatccgaaacctagaagcatggggtggtttaatgggaccaggttacaactactacgagaggggtaatctcgacattttcagtgggaaagcaccatgtcttccgagcccagtctgttcattaaatctgacctctgacggctccggtgaccaccacggttggtatgttaactacgtggaagtcacgacagccggagttcatgcaaagtgctcgtaccaaagctttgatgttgagcaatggcttgcgtccgatacatcgccgtatgagctcagtgctgttcggaataactgtccagtttcgcttagggaaagtgtcggtcgggtcgggtctgagatccggaagactctctcttggatcgtgtgagagtagtgaatgaaatgtcaaatgtgtatgtgtgtgtgtaacttggagagttgttctttgttgtcttgtgaacgtgtgatggcaataatgaaaatgattcgatcgaataaaagttccgttctttgtt

SEQ ID NO: 29707 - protein, 183 aa, Arabidopsis thaliana
  peptide (1)..(183): Ceres Seq. ID no. 13486684
MMPRRDVLFLSLLLVIATVSAVALADDEADCVYTFFLRTGSTFKAGTDSIISARVYDKYGDYIGIRNLEAWGGLMGPGYNYYERGNLDIFSGKAPCLPSPVCSLNLTSDGSGDHHGWYVNYVEVTTAGVHAKCSYQSFDVEQWLASDTSPYELSAVRNNCPVSLRESVGRVGSEIRKTLSWIV

SEQ ID NO: 29708 - protein, 182 aa, Arabidopsis thaliana
  peptide (1)..(182): Ceres Seq. ID no. 13486685
MPRRDVLFLSLLLVIATVSAVALADDEADCVYTFFLRTGSTFKAGTDSIISARVYDKYGDYIGIRNLEAWGGLMGPGYNYYERGNLDIFSGKAPCLPSPVCSLNLTSDGSGDHHGWYVNYVEVTTAGVHAKCSYQSFDVEQWLASDTSPYELSAVRNNCPVSLRESVGRVGSEIRKTLSWIV

SEQ ID NO: 29709 - protein, 109 aa, Arabidopsis thaliana
  peptide (1)..(109): Ceres Seq. ID no. 13486686
MGPGYNYYERGNLDIFSGKAPCLPSPVCSLNLTSDGSGDHHGWYVNYVEVTTAGVHAKCSYQSFDVEQWLASDTSPYELSAVRNNCPVSLRESVGRVGSEIRKTLSWIV

SEQ ID NO: 29710 - DNA, 1417 bp, Arabidopsis thaliana
  misc_feature (1)..(1417): Ceres Seq. ID no. 12336041
  misc_feature (1)..(1417): Ortholog of  Ceres SEQ ID NO 14303843 as cited in SEQ ID NO 53775
  misc_feature (1)..(1417): Ortholog of  Ceres SEQ ID NO 15179800 as cited in SEQ ID NO 58215
  misc_feature (1)..(1417): Ortholog of  Ceres SEQ ID NO 13654549 as cited in SEQ ID NO 68530
tctatctcagtttcgagactcattgcctcgccgagagagaaggagacgccatggaaaggcttcttcaaccatcttcttcttcttcctcaatttctccttccaaattcccttcacggacttctcctttccttccccgtctccgctcatcgggtctgagctttgtctcgactcaccggcccgagtcacgccgagtcagctcaatttcctgcaacagttcccagattccgtcactgtatacgcctataggatctaacacaactaacaattccttcaatgggtctcccaaatcggatgaatcgaaacctaatcccggatttctcacacggatcgcgacgtcggcttctgagcagcgaaagacgttatctactggaaccgttatactaatctctgcagtagctgtgcttttgcttaacccgcttcttgcaccacctgctttcgctagctttcaaactgcagctaaatccggttggctaacaagtgcgtggaccggtttccttgctggttgcttgcacacgctctcaggacctgatcacctcgctgctttagctccgctttcgatcggacgcagcaaaatggaaagtgctgctgttggagctctctggggatgtgggcatgatgctggtcaagtcatctttggtttactgtttctgctacttaaagaccggcttcacattgaagtattacaaacttggggtacaagaattgtgggattgactcttgttattatcggtgctatgggaatcaaggaagcttctgagattccagaaccttgtgtcgctttagaaaccgacatcagcatggtatcaacagagaaagaagccttaccactgcccaaaaagaagaagatcgggtttgctacatttgcaactggagtggttcacgggttgcaaccggatgctctgatgattgttttgcctgcattagctctcccatcacggttagcagggtctgcgtttttgataatgtttctggttgggacagttatagcgatgggaagttacacagcgtttattgggtcttgcagtgaggctttgaaagagaaagttccaaggatcacagagaaactaacttgggtttcgtcacttgtggctattggtcttggattgggaattgtcatcagccctttctttggttttagcctctactgagaaagtaaaagcttcttcaggtaaatgagacaagttgaaatctttgtagttcttatagaagaaagagagttttttttgggtccatatcactcgtattattgtcacctgtacgaacaaaatctcgtaatcttgcttcagaaactcctctcggagaaaaccatttggtgattctttttattttccttatttttaagagaagtttggttttggttctgaattatcgatcaactgcatgtaaccatactttgtaatattatcaaattttaacc

SEQ ID NO: 29711 - protein, 381 aa, Arabidopsis thaliana
  peptide (1)..(381): Ceres Seq. ID no. 12336042
YLSFETHCLAEREGDAMERLLQPSSSSSSISPSKFPSRTSPFLPRLRSSGLSFVSTHRPESRRVSSISCNSSQIPSLYTPIGSNTTNNSFNGSPKSDESKPNPGFLTRIATSASEQRKTLSTGTVILISAVAVLLLNPLLAPPAFASFQTAAKSGWLTSAWTGFLAGCLHTLSGPDHLAALAPLSIGRSKMESAAVGALWGCGHDAGQVIFGLLFLLLKDRLHIEVLQTWGTRIVGLTLVIIGAMGIKEASEIPEPCVALETDISMVSTEKEALPLPKKKKIGFATFATGVVHGLQPDALMIVLPALALPSRLAGSAFLIMFLVGTVIAMGSYTAFIGSCSEALKEKVPRITEKLTWVSSLVAIGLGLGIVISPFFGFSLY

SEQ ID NO: 29712 - protein, 365 aa, Arabidopsis thaliana
  peptide (1)..(365): Ceres Seq. ID no. 12336043
MERLLQPSSSSSSISPSKFPSRTSPFLPRLRSSGLSFVSTHRPESRRVSSISCNSSQIPSLYTPIGSNTTNNSFNGSPKSDESKPNPGFLTRIATSASEQRKTLSTGTVILISAVAVLLLNPLLAPPAFASFQTAAKSGWLTSAWTGFLAGCLHTLSGPDHLAALAPLSIGRSKMESAAVGALWGCGHDAGQVIFGLLFLLLKDRLHIEVLQTWGTRIVGLTLVIIGAMGIKEASEIPEPCVALETDISMVSTEKEALPLPKKKKIGFATFATGVVHGLQPDALMIVLPALALPSRLAGSAFLIMFLVGTVIAMGSYTAFIGSCSEALKEKVPRITEKLTWVSSLVAIGLGLGIVISPFFGFSLY

SEQ ID NO: 29713 - protein, 191 aa, Arabidopsis thaliana
  peptide (1)..(191): Ceres Seq. ID no. 12336044
MESAAVGALWGCGHDAGQVIFGLLFLLLKDRLHIEVLQTWGTRIVGLTLVIIGAMGIKEASEIPEPCVALETDISMVSTEKEALPLPKKKKIGFATFATGVVHGLQPDALMIVLPALALPSRLAGSAFLIMFLVGTVIAMGSYTAFIGSCSEALKEKVPRITEKLTWVSSLVAIGLGLGIVISPFFGFSLY

SEQ ID NO: 29714 - DNA, 832 bp, Arabidopsis thaliana
  misc_feature (1)..(832): Ceres Seq. ID no. 13491488
  misc_feature (1)..(832): Ortholog of  Ceres SEQ ID NO 13584593 as cited in SEQ ID NO 65340
aatcattcatccgtctctgcaaacaaaggaagaagaatcaagatggctctggaaatctgtgtgaaagctgctgttggtgctcctgatcatctcggcgactgtccgttcagccaacgggctcttctcacactcgaggagaagagtcttacctacaaaatccatctgattaacctctctgacaaaccccagtggttcttggacattagtcctcaagggaaagtaccagtgcttaagatcgacgacaagtgggtgactgattccgacgtcatcgttggtatactcgaggagaagtatcctgatccaccactcaagactcctgctgaatttgcctctgttggatccaacatttttggtacttttgggacattcttgaagagcaaagactccaatgacggatctgaacatgccttgcttgttgagctagaagctttggaaaaccatcttaagagtcacgatggcccttttatcgccggagaaagagtttccgcagtggatctaagcttagcaccaaagctttaccaccttcaagttgctcttggccatttcaaaagctggtctgtccctgagagctttccccatgtccataactacatgaagactctgttctcgctcgactcttttgagaaaactaagaccgaggaaaagtatgtgatctctggatgggctcccaaggttaacccttgaaactatgcaccgttatgagatcgttggtgtggtaatgttgttcaaggtctctctcttatatcagtcaaataatgtacttggacctttttatgtaatgtactgtatcaatcaaataagaagcctattttgaaataagatttgcctccat

SEQ ID NO: 29715 - protein, 227 aa, Arabidopsis thaliana
  peptide (1)..(227): Ceres Seq. ID no. 13491489
NHSSVSANKGRRIKMALEICVKAAVGAPDHLGDCPFSQRALLTLEEKSLTYKIHLINLSDKPQWFLDISPQGKVPVLKIDDKWVTDSDVIVGILEEKYPDPPLKTPAEFASVGSNIFGTFGTFLKSKDSNDGSEHALLVELEALENHLKSHDGPFIAGERVSAVDLSLAPKLYHLQVALGHFKSWSVPESFPHVHNYMKTLFSLDSFEKTKTEEKYVISGWAPKVNP

SEQ ID NO: 29716 - protein, 213 aa, Arabidopsis thaliana
  peptide (1)..(213): Ceres Seq. ID no. 13491490
MALEICVKAAVGAPDHLGDCPFSQRALLTLEEKSLTYKIHLINLSDKPQWFLDISPQGKVPVLKIDDKWVTDSDVIVGILEEKYPDPPLKTPAEFASVGSNIFGTFGTFLKSKDSNDGSEHALLVELEALENHLKSHDGPFIAGERVSAVDLSLAPKLYHLQVALGHFKSWSVPESFPHVHNYMKTLFSLDSFEKTKTEEKYVISGWAPKVNP

SEQ ID NO: 29717 - DNA, 720 bp, Arabidopsis thaliana
  misc_feature (1)..(720): Ceres Seq. ID no. 12329948
  misc_feature (1)..(720): Ortholog of  Ceres SEQ ID NO 15168856 as cited in SEQ ID NO 56354
cctttttcagttgctctttcttggtgggaactgtttgagctcgagttctatgatgaacgtgagccggccggcgattcacccggttgatgctcttccggtggctcctactgccggagcgatcgatagaccaccagtgaggatgaaggatgtgcaaggcatgcccggaaccaccggcggtctcatcctccgtctctctcagttcgttcccgctcttatctccgtctccgtcatggtcactacctccgacttccgctccgccaccgcattctgttgcttggttcttgcggttagtctgcaaagcctgtggagcttgtctctatttcttgtcgatgcttatgctcttctagtgagaagaagccttcgaaatcactctgttgttcaatgtttcactgttggagatggagtcacatctacgctcacatttgcagctgcatctgcgtctgctggcataactgtactcatcaacgatcttggacaatgtaacgtgaatcactgcacaaggtttgagactgccacagcaatggccttcatcagctggtttgcggtgtctccttcctttattctcaacttctggtccttagccacccactaaatatatagcacacaagttgagttcagagaaatccatctttctagtataatgtaaataaagggtggagtataatgtatcgcttgattagcaaatgttttgagacagatattatattggaaaatcatagt

SEQ ID NO: 29718 - protein, 196 aa, Arabidopsis thaliana
  peptide (1)..(196): Ceres Seq. ID no. 12329949
LFQLLFLGGNCLSSSSMMNVSRPAIHPVDALPVAPTAGAIDRPPVRMKDVQGMPGTTGGLILRLSQFVPALISVSVMVTTSDFRSATAFCCLVLAVSLQSLWSLSLFLVDAYALLVRRSLRNHSVVQCFTVGDGVTSTLTFAAASASAGITVLINDLGQCNVNHCTRFETATAMAFISWFAVSPSFILNFWSLATH

SEQ ID NO: 29719 - protein, 180 aa, Arabidopsis thaliana
  peptide (1)..(180): Ceres Seq. ID no. 12329950
MMNVSRPAIHPVDALPVAPTAGAIDRPPVRMKDVQGMPGTTGGLILRLSQFVPALISVSVMVTTSDFRSATAFCCLVLAVSLQSLWSLSLFLVDAYALLVRRSLRNHSVVQCFTVGDGVTSTLTFAAASASAGITVLINDLGQCNVNHCTRFETATAMAFISWFAVSPSFILNFWSLATH

SEQ ID NO: 29720 - protein, 179 aa, Arabidopsis thaliana
  peptide (1)..(179): Ceres Seq. ID no. 12329951
MNVSRPAIHPVDALPVAPTAGAIDRPPVRMKDVQGMPGTTGGLILRLSQFVPALISVSVMVTTSDFRSATAFCCLVLAVSLQSLWSLSLFLVDAYALLVRRSLRNHSVVQCFTVGDGVTSTLTFAAASASAGITVLINDLGQCNVNHCTRFETATAMAFISWFAVSPSFILNFWSLATH

SEQ ID NO: 29721 - DNA, 812 bp, Arabidopsis thaliana
  misc_feature (1)..(812): Ceres Seq. ID no. 12332051
  misc_feature (1)..(812): Ortholog of  Ceres SEQ ID NO 13594705 as cited in SEQ ID NO 52034
aaaaagaaaaaaaaacgctcgtcttcttcttcttcttcttcttatattacttcttcctcccacacagacaaattttgtaacgaagacgggatcgcgataagatcccggtgatcgaaaagccctaagaagtaattttcaagggaaagggacttaaagatgcatacttttggttacagagcaaatgctctgctcactttcgcagtcacggctcttgctttcatttgcgcaatcgcgtccttctcagacaaattcagcaaccaaaatccttctgctgagatccagatacttaatatcaatcggtttaagaagcaatctcatggtaacgatgaggtcagcttgacactggacatatcagcagacttgcaatcactttttacttggaacaccaaacaggtttttgttttcgtagcagcagagtatgaaaccccaaagaattccctgaatcaggtttctctatgggatgccattattcctgccaaggaacatgccaaattccggattcaagtctcaaacaagtaccgtttcatcgatcagggacagaatcttcggggcaaagacttcaacttgacattacactggcatgtcatgcccaagaccgggaagatgtttgctgacaagatagtcttgcctggttacagtttaccagatgcatacagatgatgaagattgaataaaacatcaaacctagtccaagactttttgtatttcagttttctgaaaagttttagactttcttttattccaaagaaaactaattcaaaagtactattgttctcttagaatcaaacaaaactattctttttagtgatctt

SEQ ID NO: 29722 - protein, 167 aa, Arabidopsis thaliana
  peptide (1)..(167): Ceres Seq. ID no. 12332052
MHTFGYRANALLTFAVTALAFICAIASFSDKFSNQNPSAEIQILNINRFKKQSHGNDEVSLTLDISADLQSLFTWNTKQVFVFVAAEYETPKNSLNQVSLWDAIIPAKEHAKFRIQVSNKYRFIDQGQNLRGKDFNLTLHWHVMPKTGKMFADKIVLPGYSLPDAYR

SEQ ID NO: 29723 - DNA, 1127 bp, Arabidopsis thaliana
  misc_feature (1)..(1127): Ceres Seq. ID no. 12348491
  misc_feature (1)..(1127): Ortholog of  Ceres SEQ ID NO 14315060 as cited in SEQ ID NO 60039
  misc_feature (1)..(1127): Ortholog of  Ceres SEQ ID NO 13597809 as cited in SEQ ID NO 64598
  misc_feature (1)..(1127): Ortholog of  Ceres SEQ ID NO 12617960 as cited in SEQ ID NO 69051
  misc_feature (1)..(1127): Ortholog of  Ceres SEQ ID NO 13589401 as cited in SEQ ID NO 0
acattttgaaaaaaacatttttttgtaattcaattattcgacacaaccaatcccatctcttgtttcacttccgccctccatctttcttcgtgattgagagaatcttcaacgaaagaaagcaacttttttttgggtgaaattcacacacaaccaaggtttttcttcttcttcttcttctccagttcctacagaatcatgcctgacaagaatatcgtagaggacgttatcggtgatttggtggataacttcacggagactgttcagaagaacaaacatggttcctccttcttcgaacaagaagattccgtcagttctcgtttcaaccgtttgtttgatcgccagaagccaattcatcatgtcttaggcggtggcaaatctgctgatgtgttgttatggaggaacaagaagatctctgcaagtgttttgatgggagctaccgcaatttgggtgctttttgaatggatcaatttccatttcctgtctctcgtttgctatgccctcttgcttggtatgattgcacaattcgtttggtctaacgcctctggattcttaaaccgctcacagtctagagtgcctcgcctagttcttccaaaggatttctttgctgaagtcggtgtggccgttggaaaagaagttaaccgcggtttgttgtttcttcaggacttggcttgtaaagggaatttgaaacagttcctcatggctgtaatcggactatgggtagctgcaatggtcgggagctgttgcaatttcctaactgttttgtatatcgggtttgttggggcacacacaatgccggttctgtatgagagatacgaagacgaagtggatggttttatggattctatgattatgaagtttcatagtcattacaagaagcttgatactgggtttctcagtagaatcccaagtggaaagtttggattaaagaagcgtgagtgactaaatcactcaagcattttcttattttaccttgtttgttgttagaacaatatggattatggtttgctaaatgaatgttttggagaatattattcattcatgtagattttgtgtatttccttactaaacaataccttgtccatgtatttgtcaataccttggttaataacagaatcatcatatttgtc

SEQ ID NO: 29724 - protein, 247 aa, Arabidopsis thaliana
  peptide (1)..(247): Ceres Seq. ID no. 12348492
MPDKNIVEDVIGDLVDNFTETVQKNKHGSSFFEQEDSVSSRFNRLFDRQKPIHHVLGGGKSADVLLWRNKKISASVLMGATAIWVLFEWINFHFLSLVCYALLLGMIAQFVWSNASGFLNRSQSRVPRLVLPKDFFAEVGVAVGKEVNRGLLFLQDLACKGNLKQFLMAVIGLWVAAMVGSCCNFLTVLYIGFVGAHTMPVLYERYEDEVDGFMDSMIMKFHSHYKKLDTGFLSRIPSGKFGLKKRE

SEQ ID NO: 29725 - protein, 170 aa, Arabidopsis thaliana
  peptide (1)..(170): Ceres Seq. ID no. 12348493
MGATAIWVLFEWINFHFLSLVCYALLLGMIAQFVWSNASGFLNRSQSRVPRLVLPKDFFAEVGVAVGKEVNRGLLFLQDLACKGNLKQFLMAVIGLWVAAMVGSCCNFLTVLYIGFVGAHTMPVLYERYEDEVDGFMDSMIMKFHSHYKKLDTGFLSRIPSGKFGLKKRE

SEQ ID NO: 29726 - protein, 142 aa, Arabidopsis thaliana
  peptide (1)..(142): Ceres Seq. ID no. 12348494
MIAQFVWSNASGFLNRSQSRVPRLVLPKDFFAEVGVAVGKEVNRGLLFLQDLACKGNLKQFLMAVIGLWVAAMVGSCCNFLTVLYIGFVGAHTMPVLYERYEDEVDGFMDSMIMKFHSHYKKLDTGFLSRIPSGKFGLKKRE

SEQ ID NO: 29727 - DNA, 1076 bp, Arabidopsis thaliana; identical to SEQ ID NO: 22642
  misc_feature (1)..(1076): Ceres Seq. ID no. 13588829
  misc_feature (1)..(1076): Ortholog of  Ceres SEQ ID NO 14313662 as cited in SEQ ID NO 54162
  misc_feature (1)..(1076): Ortholog of  Ceres SEQ ID NO 14302123 as cited in SEQ ID NO 0
  misc_feature (1)..(1076): Ortholog of  Ceres SEQ ID NO 15179452 as cited in SEQ ID NO 0

SEQ ID NO: 29728 - protein, 250 aa, Arabidopsis thaliana [sequence omitted]

SEQ ID NO: 29729 - protein, 207 aa, Arabidopsis thaliana; identical to SEQ ID NO: 22644
  peptide (1)..(207): Ceres Seq. ID no. 15220913

SEQ ID NO: 29730 - DNA, 873 bp, Arabidopsis thaliana
  misc_feature (1)..(873): Ceres Seq. ID no. 12369966
  misc_feature (1)..(873): Ortholog of  Ceres SEQ ID NO 15171239 as cited in SEQ ID NO 52298
agctccatccaatatatcgtcttcttcctcctcgaaccaaaaacatcagtctctcctagtctcagcgctcgtgaaaatctgaaactctgcgttcgaattttcgaagaacattagagatctggtattatctggatccgatctgttcaccatggaggagaagaagacagaatcaaccaacaagaatgttaagaaggccaatctattggaccaccactcgatcaagcacatccttgacgaatccgtctccgatatcgttacgagccgtggctataaggaggatgtgagattgagcaacctcaaactgattttgggaacgattatcatcgttgttgctcttgttgctcaattctacaacaagaaattccctgagaacagggattttttgattggatgcatcgcattgtatgtagtgttgaatgcggtgttgcagctgattctgtacactaaggagaagaatgcgattttgttcacctatcctcctgagggatcattcaccagcactggtttggtggtatcttcaaagttgcccagattctctgatcagtacactctcaccatcgacagtgctgatccaaaatcaatctcagctgggaagtcagttcagctcaccaaaagtgtcacccaatggttcacgaaagatggagttcttgttgagggtttattctggaaagacgtagaagcactaatcaagaactatgcagaagaagaaccaaagaagaagaaatgatcatcttccagagaaatatatgcttttgaaactccatatgttggcgttttagaatactaaatcgatggtgactttgtttagagatgaaactaatatttggatttttccttatagccaactttttgaattaatccgagattttatga

SEQ ID NO: 29731 - protein, 192 aa, Arabidopsis thaliana
  peptide (1)..(192): Ceres Seq. ID no. 12369967
MEEKKTESTNKNVKKANLLDHHSIKHILDESVSDIVTSRGYKEDVRLSNLKLILGTIIIVVALVAQFYNKKFPENRDFLIGCIALYVVLNAVLQLILYTKEKNAILFTYPPEGSFTSTGLVVSSKLPRFSDQYTLTIDSADPKSISAGKSVQLTKSVTQWFTKDGVLVEGLFWKDVEALIKNYAEEEPKKKK

SEQ ID NO: 29732 - DNA, 1347 bp, Arabidopsis thaliana
  misc_feature (1)..(1347): Ceres Seq. ID no. 12371997
  misc_feature (1)..(1347): Ortholog of  Ceres SEQ ID NO 14304148 as cited in SEQ ID NO 57313
  misc_feature (1)..(1347): Ortholog of  Ceres SEQ ID NO 13598513 as cited in SEQ ID NO 64102
  misc_feature (1)..(1347): Ortholog of  Ceres SEQ ID NO 14302224 as cited in SEQ ID NO 64268
accatgtcttcagatcaactaagcaaattccttgatagaaacaaaatggaagacaataaaagaaaagtattagatgaagaagcgaaagcttctctagacatatggaagtatgtctttgggtttgcagatatagcagctgcaaagtgtgccattgatcttaaaataccagaagccattgaaaaccatccttcttcacagcccgtaacactagccgaactctcctccgccgtctccgcctctccctcgcatctccgccgtataatgaggtttcttgtacaccaaggaatctttaaagaaatccccacaaaagatggtttagctacaggctacgttaatacgccactctctcgccgtttgatgatcacaagacgtgatggaaaatcgctggctccttttgttctcttcgaaacaactcccgagatgctcgctccatggttgagacttagctcagtcgtttcttcgccggtcaacggttcaactccaccaccgtttgatgcagtgcacggtaaggacgtgtggtcgttcgcgcaggataatcccttcctcagcgatatgatcaatgaggccatggcttgtgatgcaaggcgcgtggtgccacgtgtagccggagcttgtcacggcttgtttgatggcgtgactacgatggttgacgtaggaggtggtacgggagagacgatggggatgcttgtgaaggagtttccttggatcaaaggatttaactttgatcttcctcatgtcattgaagttgctgaagtcttggacggtgttgagaatgttgagggcgatatgtttgattctattccggcttgcgacgccattttcatcaagtgggtgttacacgattggggagacaaagattgcataaagatattgaagaattgcaaagaagcggtccctccaaatatcggaaaagtgttgatagtggaatcggtgatcggagagaataaaaagacgatgatagtggacgaacgagatgaaaagttagagcacgtgagattgatgcttgatatggtgatgatggctcacacaagcacaggcaaagaacggactttgaaagaatgggactttgttcttaaagaagctggctttgctcgatatgaggttagggacattgatgatgttcagagtcttataatcgcgtatcggtcttaagaggaggacatgaaagatatatctttcctttgaggaaaactcaataaattagtgattgttgatttggtgtttttatacagaacgacgtgtgggtgaataattgtgttgtgtgataataagtaaggcttgtttcagtatcagcagagttgttttttatttgtatttttcacatttttttatcattaatttccttgt

SEQ ID NO: 29733 - protein, 383 aa, Arabidopsis thaliana
  peptide (1)..(383): Ceres Seq. ID no. 12371998
TMSSDQLSKFLDRNKMEDNKRKVLDEEAKASLDIWKYVFGFADIAAAKCAIDLKIPEAIENHPSSQPVTLAELSSAVSASPSHLRRIMRFLVHQGIFKEIPTKDGLATGYVNTPLSRRLMITRRDGKSLAPFVLFETTPEMLAPWLRLSSVVSSPVNGSTPPPFDAVHGKDVWSFAQDNPFLSDMINEAMACDARRVVPRVAGACHGLFDGVTTMVDVGGGTGETMGMLVKEFPWIKGFNFDLPHVIEVAEVLDGVENVEGDMFDSIPACDAIFIKWVLHDWGDKDCIKILKNCKEAVPPNIGKVLIVESVIGENKKTMIVDERDEKLEHVRLMLDMVMMAHTSTGKERTLKEWDFVLKEAGFARYEVRDIDDVQSLIIAYRS

SEQ ID NO: 29734 - protein, 382 aa, Arabidopsis thaliana
  peptide (1)..(382): Ceres Seq. ID no. 12371999
MSSDQLSKFLDRNKMEDNKRKVLDEEAKASLDIWKYVFGFADIAAAKCAIDLKIPEAIENHPSSQPVTLAELSSAVSASPSHLRRIMRFLVHQGIFKEIPTKDGLATGYVNTPLSRRLMITRRDGKSLAPFVLFETTPEMLAPWLRLSSVVSSPVNGSTPPPFDAVHGKDVWSFAQDNPFLSDMINEAMACDARRVVPRVAGACHGLFDGVTTMVDVGGGTGETMGMLVKEFPWIKGFNFDLPHVIEVAEVLDGVENVEGDMFDSIPACDAIFIKWVLHDWGDKDCIKILKNCKEAVPPNIGKVLIVESVIGENKKTMIVDERDEKLEHVRLMLDMVMMAHTSTGKERTLKEWDFVLKEAGFARYEVRDIDDVQSLIIAYRS

SEQ ID NO: 29735 - protein, 368 aa, Arabidopsis thaliana
  peptide (1)..(368): Ceres Seq. ID no. 12372000
MEDNKRKVLDEEAKASLDIWKYVFGFADIAAAKCAIDLKIPEAIENHPSSQPVTLAELSSAVSASPSHLRRIMRFLVHQGIFKEIPTKDGLATGYVNTPLSRRLMITRRDGKSLAPFVLFETTPEMLAPWLRLSSVVSSPVNGSTPPPFDAVHGKDVWSFAQDNPFLSDMINEAMACDARRVVPRVAGACHGLFDGVTTMVDVGGGTGETMGMLVKEFPWIKGFNFDLPHVIEVAEVLDGVENVEGDMFDSIPACDAIFIKWVLHDWGDKDCIKILKNCKEAVPPNIGKVLIVESVIGENKKTMIVDERDEKLEHVRLMLDMVMMAHTSTGKERTLKEWDFVLKEAGFARYEVRDIDDVQSLIIAYRS

SEQ ID NO: 29736 - DNA, 1059 bp, Arabidopsis thaliana
  misc_feature (1)..(1059): Ceres Seq. ID no. 12396829
  misc_feature (1)..(1059): Ortholog of  Ceres SEQ ID NO 12472003 as cited in SEQ ID NO 143
tctctccgtccaatttccgtctctctctctttttatctcaccgtctgatcgcttagaagcaaccatgcctcagggagattacatagatttgcacaggaagaggaatggatatcgcctcgaccacttcgagagaaagcgcaagaaggaggcgcgtgaagttcacaagcactccaccatggctcaaaagtctctaggtatcaagggtaagatgattgctaagaaaaactatgctgagaaagctctcatgaagaaaacattgaaaatgcatgaagagtcatcatcaaggcgtaaggctgatgagaatgttcaggaaggagctgttcctgcttatcttcttgatcgtgaagacaccactcgtgccaaggttcttagcaacaccattaaacaaaagaggaaagagaaagctggcaaatgggaggtccctcttccaaaggtccgtccagttgctgaagatgaaatgtttagagtgatccgatctggaaaaaggaaaactaaacaatggaagcggatggttacaaaagctacatttgttggacctgctttcacaaggaagcctccaaagtacgagcgtttcatccgtccatctggtcttcgtttcaccaaggcccacgtcactcaccctgaactaaaatgcactttctgtctcgagatcatcgggattaagaagaatcctaacggtcccatgtatacatcactcggtgtgatgaccaggggaacaatcatcgaggtcaatgtgagtgagcttggtcttgttacaccagctggaaaggttgtctggggaaaatacgctcaagtgacaaacaatccagagaacgacggatgtataaatgctgttttacttgtgtaaccaaatgtccggcactgtcgtagaagtatggatagagacgagaggaaggcgagaatcatgttggctagttttattttgttttctcctgaaacaattttgtgttatttcaagtttttttatgaatgtgtggttggtcttctcatcacattaactagctgctatgttagctttataagtatcccacattatgaaatttgttgcttctaatgtcc

SEQ ID NO: 29737 - protein, 281 aa, Arabidopsis thaliana
  peptide (1)..(281): Ceres Seq. ID no. 12396830
LSVQFPSLSLFISPSDRLEATMPQGDYIDLHRKRNGYRLDHFERKRKKEAREVHKHSTMAQKSLGIKGKMIAKKNYAEKALMKKTLKMHEESSSRRKADENVQEGAVPAYLLDREDTTRAKVLSNTIKQKRKEKAGKWEVPLPKVRPVAEDEMFRVIRSGKRKTKQWKRMVTKATFVGPAFTRKPPKYERFIRPSGLRFTKAHVTHPELKCTFCLEIIGIKKNPNGPMYTSLGVMTRGTIIEVNVSELGLVTPAGKVVWGKYAQVTNNPENDGCINAVLLV

SEQ ID NO: 29738 - protein, 260 aa, Arabidopsis thaliana
  peptide (1)..(260): Ceres Seq. ID no. 12396831
MPQGDYIDLHRKRNGYRLDHFERKRKKEAREVHKHSTMAQKSLGIKGKMIAKKNYAEKALMKKTLKMHEESSSRRKADENVQEGAVPAYLLDREDTTRAKVLSNTIKQKRKEKAGKWEVPLPKVRPVAEDEMFRVIRSGKRKTKQWKRMVTKATFVGPAFTRKPPKYERFIRPSGLRFTKAHVTHPELKCTFCLEIIGIKKNPNGPMYTSLGVMTRGTIIEVNVSELGLVTPAGKVVWGKYAQVTNNPENDGCINAVLLV

SEQ ID NO: 29739 - protein, 223 aa, Arabidopsis thaliana
  peptide (1)..(223): Ceres Seq. ID no. 12396832
MAQKSLGIKGKMIAKKNYAEKALMKKTLKMHEESSSRRKADENVQEGAVPAYLLDREDTTRAKVLSNTIKQKRKEKAGKWEVPLPKVRPVAEDEMFRVIRSGKRKTKQWKRMVTKATFVGPAFTRKPPKYERFIRPSGLRFTKAHVTHPELKCTFCLEIIGIKKNPNGPMYTSLGVMTRGTIIEVNVSELGLVTPAGKVVWGKYAQVTNNPENDGCINAVLLV

SEQ ID NO: 29740 - DNA, 976 bp, Arabidopsis thaliana
  misc_feature (1)..(976): Ceres Seq. ID no. 12322294
  misc_feature (1)..(976): Ortholog of  Ceres SEQ ID NO 15173410 as cited in SEQ ID NO 61812
aacacaaacaaaatatcaacactcttgaaaacagagccatggaacattctctcatcatcctcctcttcaccgtcctcctcctcctcaccaccactcccggaatcctatctcagccctctccagccgtcgctccggccccaccaggacccacaaacgttaccaaaatcctagagaaagctggtcaattcaccgtcttcatccgactcctcaaatccactggagtcgctaaccaactctacggccaactaaacaactccgacaatggaatcactatattcgcaccgagtgattcctcgttcaccggtctcaaagccgggaccctaaattcgttaaccgatgagcaacaagtagagcttattcagtttcatgtcataccaagttacgtctcttcctcaaacttccaaacaataagtaaccctctccggactcaggccggtgactccgccgatggacattttcctctcaacgttaccaccagtggcaataccgtaaatatcacgtccggcgtaaccaacaccaccgtctccggcaatgtctacagcgatggacagctcgctgtttatcaggtcgataaggttttgcttccacaacaagttttcgatcctcgtcctcctgctccggctccggctccgtctgtatcgaaatcaaagaagaagaaggatgacagtgatagttccagtgatgattctccggcgatgcttcgtttgctttgcgtaatgttggttctgtgtgtgatgcggtgtcgttttgcgtcatgagtgtaatgctcgcatggttttatttgtgatgaaaagctttttttttttttgtgctgataaattgttattttttattactcatgattttctgccatgtgggtgattttggggatatatttgtgtcttggttttcatacgattttgtgttaatcaatccatttgttttttatattttcgtttatttttattaatacaaatcatattttccgtttttgtgc

SEQ ID NO: 29741 - protein, 251 aa, Arabidopsis thaliana
  peptide (1)..(251): Ceres Seq. ID no. 12322295
HKQNINTLENRAMEHSLIILLFTVLLLLTTTPGILSQPSPAVAPAPPGPTNVTKILEKAGQFTVFIRLLKSTGVANQLYGQLNNSDNGITIFAPSDSSFTGLKAGTLNSLTDEQQVELIQFHVIPSYVSSSNFQTISNPLRTQAGDSADGHFPLNVTTSGNTVNITSGVTNTTVSGNVYSDGQLAVYQVDKVLLPQQVFDPRPPAPAPAPSVSKSKKKKDDSDSSSDDSPAMLRLLCVMLVLCVMRCRFAS

SEQ ID NO: 29742 - protein, 239 aa, Arabidopsis thaliana
  peptide (1)..(239): Ceres Seq. ID no. 12322296
MEHSLIILLFTVLLLLTTTPGILSQPSPAVAPAPPGPTNVTKILEKAGQFTVFIRLLKSTGVANQLYGQLNNSDNGITIFAPSDSSFTGLKAGTLNSLTDEQQVELIQFHVIPSYVSSSNFQTISNPLRTQAGDSADGHFPLNVTTSGNTVNITSGVTNTTVSGNVYSDGQLAVYQVDKVLLPQQVFDPRPPAPAPAPSVSKSKKKKDDSDSSSDDSPAMLRLLCVMLVLCVMRCRFAS

SEQ ID NO: 29743 - DNA, 1153 bp, Arabidopsis thaliana
  misc_feature (1)..(1153): Ceres Seq. ID no. 13497626
  misc_feature (1)..(1153): Ortholog of  Ceres SEQ ID NO 13639102 as cited in SEQ ID NO 56610
aatcaaaacattttaaccaaacagcaaaatcaaaatcaaaatccaaagctaaaaaacagatactatcagataacatcaaaatatatagagacacaacaaatacaacatttatctatactagagtttattactatggcttttgatgaagatatgaaaatggcgtctttcttaagagaagaagaagaacaacactattctttatcaagactctccgtttgttccaactacgacggcgatgaagccgacggtgagtcttctgcttccgacgagaaacgtgttgtccacggcggaggagagaaatccatggaggagctaaatttttcagattctgataaagaatcaaccggttgtcaatctctcccggcgacacctccgagacggagacggcggagaggcggtggaggaggaggatatttagcggtgagttctccggtttccggcgataaagcttacgctagcgagaacgaagtacaaaagacgaataacaatcagaggagaaggaggagattgaaaccggagtgtccaccgtgggttgatagtatgcggaggagctacgtcggagatgaacagagtagtcacggtggttacggaggaggagtggtggttgttacgaggcctataggaggaggaaggccattgtgtatggatttagaagaagtcaaagcttgtaaagatttggggtttgagcttgaaccgggtcgggtttcgtattccgggtcaacggtggatactagtagtggcggcaattctcctatctcttctaaccaccgtatttcgagtcccggggatgatccaaaagacgtgaaagcgaggcttaaggcgtgggctcaagctgtggcttttgtgtccactactcatcatcaacctcctaattctttatgattcactttcttacaaaaaaaaattcacttcaaaaaaaaaataaaaaaaaattgcatgcattttcgagtttcatttttgaaaaattattttcgggtttttgatttgcttaattttttttttacagattttgttctgtttttgtgtgttgacggtgagattttggcaattgatatatggtcataagccaaaagtatagagttaaataagtttgatgattgacttctccagcattgtaatatttaacattttacattattgaaaaaattatacc

SEQ ID NO: 29744 - protein, 293 aa, Arabidopsis thaliana
  peptide (1)..(293): Ceres Seq. ID no. 13497627
NQNILTKQQNQNQNPKLKNRYYQITSKYIETQQIQHLSILEFITMAFDEDMKMASFLREEEEQHYSLSRLSVCSNYDGDEADGESSASDEKRVVHGGGEKSMEELNFSDSDKESTGCQSLPATPPRRRRRRGGGGGGYLAVSSPVSGDKAYASENEVQKTNNNQRRRRRLKPECPPWVDSMRRSYVGDEQSSHGGYGGGVVVVTRPIGGGRPLCMDLEEVKACKDLGFELEPGRVSYSGSTVDTSSGGNSPISSNHRISSPGDDPKDVKARLKAWAQAVAFVSTTHHQPPNSL

SEQ ID NO: 29745 - protein, 249 aa, Arabidopsis thaliana
  peptide (1)..(249): Ceres Seq. ID no. 13497628
MAFDEDMKMASFLREEEEQHYSLSRLSVCSNYDGDEADGESSASDEKRVVHGGGEKSMEELNFSDSDKESTGCQSLPATPPRRRRRRGGGGGGYLAVSSPVSGDKAYASENEVQKTNNNQRRRRRLKPECPPWVDSMRRSYVGDEQSSHGGYGGGVVVVTRPIGGGRPLCMDLEEVKACKDLGFELEPGRVSYSGSTVDTSSGGNSPISSNHRISSPGDDPKDVKARLKAWAQAVAFVSTTHHQPPNSL

SEQ ID NO: 29746 - protein, 243 aa, Arabidopsis thaliana
  peptide (1)..(243): Ceres Seq. ID no. 13497629
MKMASFLREEEEQHYSLSRLSVCSNYDGDEADGESSASDEKRVVHGGGEKSMEELNFSDSDKESTGCQSLPATPPRRRRRRGGGGGGYLAVSSPVSGDKAYASENEVQKTNNNQRRRRRLKPECPPWVDSMRRSYVGDEQSSHGGYGGGVVVVTRPIGGGRPLCMDLEEVKACKDLGFELEPGRVSYSGSTVDTSSGGNSPISSNHRISSPGDDPKDVKARLKAWAQAVAFVSTTHHQPPNSL

SEQ ID NO: 29747 - DNA, 946 bp, Arabidopsis thaliana; identical to SEQ ID NO: 26202
  misc_feature (1)..(946): Ceres Seq. ID no. 13487250
  misc_feature (1)..(946): Ortholog of  Ceres SEQ ID NO 13597542 as cited in SEQ ID NO 64986

SEQ ID NO: 29748 - protein, 223 aa, Arabidopsis thaliana; identical to SEQ ID NO: 26203
  peptide (1)..(223): Ceres Seq. ID no. 13487251

SEQ ID NO: 29749 - protein, 201 aa, Arabidopsis thaliana; identical to SEQ ID NO: 26204
  peptide (1)..(201): Ceres Seq. ID no. 13487252

SEQ ID NO: 29750 - protein, 199 aa, Arabidopsis thaliana; identical to SEQ ID NO: 26205
  peptide (1)..(199): Ceres Seq. ID no. 13487253

SEQ ID NO: 29751 - DNA, 1151 bp, Arabidopsis thaliana
  misc_feature (1)..(1151): Ceres Seq. ID no. 13490670
  misc_feature (1)..(1151): Ortholog of  Ceres SEQ ID NO 12582601 as cited in SEQ ID NO 51064
  misc_feature (1)..(1151): Ortholog of  Ceres SEQ ID NO 13581092 as cited in SEQ ID NO 54771
  misc_feature (1)..(1151): Ortholog of  Ceres SEQ ID NO 13594298 as cited in SEQ ID NO 57803
  misc_feature (1)..(1151): Ortholog of  Ceres SEQ ID NO 13503476 as cited in SEQ ID NO 61978
  misc_feature (1)..(1151): Ortholog of  Ceres SEQ ID NO 12578438 as cited in SEQ ID NO 62201
  misc_feature (1)..(1151): Ortholog of  Ceres SEQ ID NO 12617675 as cited in SEQ ID NO 64656
tgaccatcatcatcatcatcatcatcatcatttctctctatctctttctaaaacacaaccatgactgtttcttcatctccatgggctctcatggctctctttctaatggtttcttcaacaatggtaatggctattcctccacgcaaggccattgatgtaccatttggtcgtaactacgtcccaacttgggcttttgaccaccagaaacagttcaatggcggttccgaacttcagcttatcctcgacaaatacactggcacaggatttcaatcaaaggggtcatatttgtttggacattttagtatgcacataaagcttccagctggtgacacagccggagttgtcacagctttctatctatcatctaccaacaatgagcatgacgagatagactttgagttccttggaaacagaacaggacaaccagctatattacagacaaatgtattcacaggaggaaagggaaacagagaacaacgaatctatctctggtttgatccttctaaggcttatcacacttactcaatcctttggaacatgtaccagatcgtattctttgttgacaacataccaatccgaacgttcaagaatgctaaggatctaggagtacgtttcccattcaaccaaccaatgaagctttactcaagcctttggaacgcggatgattgggccacgagaggcggtttagagaagaccaattgggccaatgcacctttcgttgcatcttacaaaggattccacatagatggttgccaagcttctgtggaagccaagtactgtgccacacaaggccgcatgtggtgggatcagaaagagttccgtgaccttgacgctgaacaatggcgtcgtctcaaatgggttcgtatgaagtggaccatctacaactactgtaccgaccggactaggttcccggttatgccagctgaatgtaaaagggacagagacgcataagttactactcttgagggttttaatgaatttatgctatcattattatttgaattatgcttgttcaagagattgatatatgtattgtttgttggcccatgatgtttatgctatatttgggcctaaaattacatgttataattcatatatgtattgattagctatgtattttcatatgttatgatctacttacaagttttatt

SEQ ID NO: 29752 - protein, 296 aa, Arabidopsis thaliana
  peptide (1)..(296): Ceres Seq. ID no. 13490671
MTVSSSPWALMALFLMVSSTMVMAIPPRKAIDVPFGRNYVPTWAFDHQKQFNGGSELQLILDKYTGTGFQSKGSYLFGHFSMHIKLPAGDTAGVVTAFYLSSTNNEHDEIDFEFLGNRTGQPAILQTNVFTGGKGNREQRIYLWFDPSKAYHTYSILWNMYQIVFFVDNIPIRTFKNAKDLGVRFPFNQPMKLYSSLWNADDWATRGGLEKTNWANAPFVASYKGFHIDGCQASVEAKYCATQGRMWWDQKEFRDLDAEQWRRLKWVRMKWTIYNYCTDRTRFPVMPAECKRDRDA

SEQ ID NO: 29753 - protein, 286 aa, Arabidopsis thaliana
  peptide (1)..(286): Ceres Seq. ID no. 13490672
MALFLMVSSTMVMAIPPRKAIDVPFGRNYVPTWAFDHQKQFNGGSELQLILDKYTGTGFQSKGSYLFGHFSMHIKLPAGDTAGVVTAFYLSSTNNEHDEIDFEFLGNRTGQPAILQTNVFTGGKGNREQRIYLWFDPSKAYHTYSILWNMYQIVFFVDNIPIRTFKNAKDLGVRFPFNQPMKLYSSLWNADDWATRGGLEKTNWANAPFVASYKGFHIDGCQASVEAKYCATQGRMWWDQKEFRDLDAEQWRRLKWVRMKWTIYNYCTDRTRFPVMPAECKRDRDA

SEQ ID NO: 29754 - protein, 281 aa, Arabidopsis thaliana
  peptide (1)..(281): Ceres Seq. ID no. 13490673
MVSSTMVMAIPPRKAIDVPFGRNYVPTWAFDHQKQFNGGSELQLILDKYTGTGFQSKGSYLFGHFSMHIKLPAGDTAGVVTAFYLSSTNNEHDEIDFEFLGNRTGQPAILQTNVFTGGKGNREQRIYLWFDPSKAYHTYSILWNMYQIVFFVDNIPIRTFKNAKDLGVRFPFNQPMKLYSSLWNADDWATRGGLEKTNWANAPFVASYKGFHIDGCQASVEAKYCATQGRMWWDQKEFRDLDAEQWRRLKWVRMKWTIYNYCTDRTRFPVMPAECKRDRDA

SEQ ID NO: 29755 - DNA, 1176 bp, Arabidopsis thaliana
  misc_feature (1)..(1176): Ceres Seq. ID no. 13487542
  misc_feature (1)..(1176): Ortholog of  Ceres SEQ ID NO 13586635 as cited in SEQ ID NO 14217
  misc_feature (1)..(1176): Ortholog of  Ceres SEQ ID NO 15170220 as cited in SEQ ID NO 55383
  misc_feature (1)..(1176): Ortholog of  Ceres SEQ ID NO 14304198 as cited in SEQ ID NO 56479
  misc_feature (1)..(1176): Ortholog of  Ceres SEQ ID NO 14316543 as cited in SEQ ID NO 57118
  misc_feature (1)..(1176): Ortholog of  Ceres SEQ ID NO 12616285 as cited in SEQ ID NO 63483
acctgagagtaaagaagtgagaaggagaagaaagaagcaatggagaagatagagcacacgacgatatctaccaatggtattaacatgcatgtggcttcgattggttcaggtccagtgatcctattcgtccatggctttcccgatctctggtactcatggcgtcaccagcttgtctctttcgctgccttaggttaccgcgcaatcgctccagatcttcgaggatacggcgattccgatgcgccgccgtctcgtgaatcttacaccatccttcatatcgtcggagacctcgtcggattactggattcgctcggtgttgatcgggttttcctcgtcggtcacgattggggagcaattgttgcgtggtggctttgtatgatcaggcctgatcgagtcaacgcgttggtcaacactagcgttgtgtttaatccgaggaatccttctgtgaaacctgttgatgcgtttagggctttgttcggcgatgattactacatttgcaggtttcaggagcctggagagatcgaagaggactttgctcaagttgatacaaaaaagttaataaccagatttttcacttcgcgtaacccacgtccaccttgcattccaaagtcagttggtttcagaggtttacctgatccaccttctttgcccgcttggctcaccgaacaagatgtcaggttctacggagacaagtttagccaaaaaggcttcaccggtgggctaaactactatcgcgccctgaacctaagctgggaactaacagctccatggaccggtctacaaatcaaagtccctgtgaaattcatagtgggtgatctagacataacatacaatatccccggaacaaaggaatacatacatgaaggtggtttgaagaagcacgtaccttttctacaagaagtggtggtaatggaaggtgtaggtcacttcctccatcaagagaagcctgacgaggtcactgaccatatctatggcttcttcaagaaattcagaacccgcgaaaccgcatccttgtagtagttctccgtctgcacaatgtcaaattcaaggttgattaagcttgatcagggttacttactgtcttagagccctactatgtaatgttttcaaggatgctatctgtgtattgtgcttgtttaataatttagcaaaatataataatagaacaaataatttccc

SEQ ID NO: 29756 - protein, 324 aa, Arabidopsis thaliana
  peptide (1)..(324): Ceres Seq. ID no. 13487543
MEKIEHTTISTNGINMHVASIGSGPVILFVHGFPDLWYSWRHQLVSFAALGYRAIAPDLRGYGDSDAPPSRESYTILHIVGDLVGLLDSLGVDRVFLVGHDWGAIVAWWLCMIRPDRVNALVNTSVVFNPRNPSVKPVDAFRALFGDDYYICRFQEPGEIEEDFAQVDTKKLITRFFTSRNPRPPCIPKSVGFRGLPDPPSLPAWLTEQDVRFYGDKFSQKGFTGGLNYYRALNLSWELTAPWTGLQIKVPVKFIVGDLDITYNIPGTKEYIHEGGLKKHVPFLQEVVVMEGVGHFLHQEKPDEVTDHIYGFFKKFRTRETASL

SEQ ID NO: 29757 - protein, 309 aa, Arabidopsis thaliana
  peptide (1)..(309): Ceres Seq. ID no. 13487544
MHVASIGSGPVILFVHGFPDLWYSWRHQLVSFAALGYRAIAPDLRGYGDSDAPPSRESYTILHIVGDLVGLLDSLGVDRVFLVGHDWGAIVAWWLCMIRPDRVNALVNTSVVFNPRNPSVKPVDAFRALFGDDYYICRFQEPGEIEEDFAQVDTKKLITRFFTSRNPRPPCIPKSVGFRGLPDPPSLPAWLTEQDVRFYGDKFSQKGFTGGLNYYRALNLSWELTAPWTGLQIKVPVKFIVGDLDITYNIPGTKEYIHEGGLKKHVPFLQEVVVMEGVGHFLHQEKPDEVTDHIYGFFKKFRTRETASL

SEQ ID NO: 29758 - protein, 213 aa, Arabidopsis thaliana
  peptide (1)..(213): Ceres Seq. ID no. 13487545
MIRPDRVNALVNTSVVFNPRNPSVKPVDAFRALFGDDYYICRFQEPGEIEEDFAQVDTKKLITRFFTSRNPRPPCIPKSVGFRGLPDPPSLPAWLTEQDVRFYGDKFSQKGFTGGLNYYRALNLSWELTAPWTGLQIKVPVKFIVGDLDITYNIPGTKEYIHEGGLKKHVPFLQEVVVMEGVGHFLHQEKPDEVTDHIYGFFKKFRTRETASL

SEQ ID NO: 29759 - DNA, 1215 bp, Arabidopsis thaliana
  misc_feature (1)..(1215): Ceres Seq. ID no. 12339760
  misc_feature (1)..(1215): Ortholog of  Ceres SEQ ID NO 13593963 as cited in SEQ ID NO 59580
aagacaaaaatggtgaaaacaaagaaagaagatctaaatcaatttctgattcctcgtctcaacaccatctacgaaaccctccagttgttcgatggaacagcttctcctacagtggaaagagttaattggaacgatgttcttcagatgtctgatcacctctctaaacaagccaccatagtgggaatgctatggactggagaatctccaaaagctgattcacttaaagagactatggagtcttacttcaatgcccttcaagggtttttactctgttgccatggaagcactcttggtgctggacctacgctttcttcaatcatacatgtttctgttaagcaaattgttgattctagcttcagattgttgcagggttctgtttctctatacgagggatcgtatgagaaggataagaagccgtctattccgcagctctcgggagtggtttgggaagcatgttccagtttcaagaaggttcctgcaacaaacattactgcgattggtagagctattacacaggttgcggtttccatgaaggatgttcttagggagatgaaagaagtgaagccagcgtgtcctttatctgaatgtgaggcatctggtgataatatgtctagtgatgatgatgatgatgacgatttaggcgatgatttgtctcctgaagaaatggaagttgctacaatggttactgagattgtctctgaaactatcatggtgataaaagaactcattcgagttatcactggtatgattaagatggagaatccaaaggataatagtgggtttgtggagtcgcttgagaagctactgaagctgtgtcaaggaactggtgtacaaatcgatgagcttggtgcttgtgtctatccaccgcaggagatgaacaagatgaagcaaacagtgaaggttatacagggaaatctagacgaatttgaaactgaagttgagcgtttgaagagttcttcagacggcttttcgggagcttgcgggaagctgcgaaactccttgaaacatatggaaactgaattggataaaagatgtgaagctgagctagtagttgaaatgcagaatgttactcttgacagttagtttggattttgcaattgagttttttttcggtttgtttcagtggcttgtgtcttgtagtaacattcatctaatgttcaatgtgttgtacacgtttcttaactttatagatatggtacttagattttgttttcg

SEQ ID NO: 29760 - protein, 360 aa, Arabidopsis thaliana
  peptide (1)..(360): Ceres Seq. ID no. 12339761
KTKMVKTKKEDLNQFLIPRLNTIYETLQLFDGTASPTVERVNWNDVLQMSDHLSKQATIVGMLWTGESPKADSLKETMESYFNALQGFLLCCHGSTLGAGPTLSSIIHVSVKQIVDSSFRLLQGSVSLYEGSYEKDKKPSIPQLSGVVWEACSSFKKVPATNITAIGRAITQVAVSMKDVLREMKEVKPACPLSECEASGDNMSSDDDDDDDLGDDLSPEEMEVATMVTEIVSETIMVIKELIRVITGMIKMENPKDNSGFVESLEKLLKLCQGTGVQIDELGACVYPPQEMNKMKQTVKVIQGNLDEFETEVERLKSSSDGFSGACGKLRNSLKHMETELDKRCEAELVVEMQNVTLDS

SEQ ID NO: 29761 - protein, 357 aa, Arabidopsis thaliana
  peptide (1)..(357): Ceres Seq. ID no. 12339762
MVKTKKEDLNQFLIPRLNTIYETLQLFDGTASPTVERVNWNDVLQMSDHLSKQATIVGMLWTGESPKADSLKETMESYFNALQGFLLCCHGSTLGAGPTLSSIIHVSVKQIVDSSFRLLQGSVSLYEGSYEKDKKPSIPQLSGVVWEACSSFKKVPATNITAIGRAITQVAVSMKDVLREMKEVKPACPLSECEASGDNMSSDDDDDDDLGDDLSPEEMEVATMVTEIVSETIMVIKELIRVITGMIKMENPKDNSGFVESLEKLLKLCQGTGVQIDELGACVYPPQEMNKMKQTVKVIQGNLDEFETEVERLKSSSDGFSGACGKLRNSLKHMETELDKRCEAELVVEMQNVTLDS

SEQ ID NO: 29762 - protein, 312 aa, Arabidopsis thaliana
  peptide (1)..(312): Ceres Seq. ID no. 12339763
MSDHLSKQATIVGMLWTGESPKADSLKETMESYFNALQGFLLCCHGSTLGAGPTLSSIIHVSVKQIVDSSFRLLQGSVSLYEGSYEKDKKPSIPQLSGVVWEACSSFKKVPATNITAIGRAITQVAVSMKDVLREMKEVKPACPLSECEASGDNMSSDDDDDDDLGDDLSPEEMEVATMVTEIVSETIMVIKELIRVITGMIKMENPKDNSGFVESLEKLLKLCQGTGVQIDELGACVYPPQEMNKMKQTVKVIQGNLDEFETEVERLKSSSDGFSGACGKLRNSLKHMETELDKRCEAELVVEMQNVTLDS

SEQ ID NO: 29763 - DNA, 1168 bp, Arabidopsis thaliana
  misc_feature (1)..(1168): Ceres Seq. ID no. 12396040
  misc_feature (1)..(1168): Ortholog of  Ceres SEQ ID NO 14316095 as cited in SEQ ID NO 52477
attcaataaattctcttttcttgcattttcaactcaatctttatctcatgctttcgtcttcgtcttcgtcaacggtagagcaaccatcacgtggcggaagtccgggaatcaacgccgtgtcctccgatgttttacggtctaacatcctaacccgcctcgacggttcctctctcgccgccctaagctgcacgtgctccaacctaaactctttttgctccgacgagtccctctggaggcaacaatgttccgctacatggccttctaccttggacagacgtgtacagagcatcatctcaacgttcccagacggtcaccggacgtttttctccgattcctttccgtttcttgaacatgatgttgtgatcaatctcccaccgtcctttgatacctcggagttaatctcagccgttgatatattctacaaagatgatgtgattttctcaagggttcatgtgacagagacagtctctggttggttcctttgctcacctatgcgtgtcgatcttgtcgaaccgaaagaactaattccgaccagagttttggttacggaccaatgtaaggatgacacgtggaaaagtgacttggaagagaatctctccttgagctggatactcattgacccgacatgtaaacgtgcggcaaatgtatcaacccgtaaacctgtctcggtgcaccgtcattggttaaccggagaagtccacgtaaaattctcctctatttttgtcgtgggcaacaagaaaaggtcggagcaagtggagttcactgtaacggtggtgctggcggcgtttaaccggagggaagaggagacagcagtgatgcagataagagaggtgagcctagtagcagaggacaaggatgggaggaatctaggagggaaggttagtttggaaattttggtggcggccatggggatgaaacgtaggtttagggcgggaggggaagaagaagggaaagagaagtacatagaatatatagagaggaagaccgcgaaggcggagatgaagtggcggcgagggaaagaaacggctatggagacggcggcgtgctggatcgccgtcctcttacttggtttccttttgtgtttttatctgtttatgcataaaaatttagtagctattatgaaaaaactaataaaatagttaaataatatgttttgattcaaaacttc

SEQ ID NO: 29764 - protein, 378 aa, Arabidopsis thaliana
  peptide (1)..(378): Ceres Seq. ID no. 12396041
SINSLFLHFQLNLYLMLSSSSSSTVEQPSRGGSPGINAVSSDVLRSNILTRLDGSSLAALSCTCSNLNSFCSDESLWRQQCSATWPSTLDRRVQSIISTFPDGHRTFFSDSFPFLEHDVVINLPPSFDTSELISAVDIFYKDDVIFSRVHVTETVSGWFLCSPMRVDLVEPKELIPTRVLVTDQCKDDTWKSDLEENLSLSWILIDPTCKRAANVSTRKPVSVHRHWLTGEVHVKFSSIFVVGNKKRSEQVEFTVTVVLAAFNRREEETAVMQIREVSLVAEDKDGRNLGGKVSLEILVAAMGMKRRFRAGGEEEGKEKYIEYIERKTAKAEMKWRRGKETAMETAACWIAVLLLGFLLCFYLFMHKNLVAIMKKLIK

SEQ ID NO: 29765 - protein, 363 aa, Arabidopsis thaliana
  peptide (1)..(363): Ceres Seq. ID no. 12396042
MLSSSSSSTVEQPSRGGSPGINAVSSDVLRSNILTRLDGSSLAALSCTCSNLNSFCSDESLWRQQCSATWPSTLDRRVQSIISTFPDGHRTFFSDSFPFLEHDVVINLPPSFDTSELISAVDIFYKDDVIFSRVHVTETVSGWFLCSPMRVDLVEPKELIPTRVLVTDQCKDDTWKSDLEENLSLSWILIDPTCKRAANVSTRKPVSVHRHWLTGEVHVKFSSIFVVGNKKRSEQVEFTVTVVLAAFNRREEETAVMQIREVSLVAEDKDGRNLGGKVSLEILVAAMGMKRRFRAGGEEEGKEKYIEYIERKTAKAEMKWRRGKETAMETAACWIAVLLLGFLLCFYLFMHKNLVAIMKKLIK

SEQ ID NO: 29766 - protein, 215 aa, Arabidopsis thaliana
  peptide (1)..(215): Ceres Seq. ID no. 12396043
MRVDLVEPKELIPTRVLVTDQCKDDTWKSDLEENLSLSWILIDPTCKRAANVSTRKPVSVHRHWLTGEVHVKFSSIFVVGNKKRSEQVEFTVTVVLAAFNRREEETAVMQIREVSLVAEDKDGRNLGGKVSLEILVAAMGMKRRFRAGGEEEGKEKYIEYIERKTAKAEMKWRRGKETAMETAACWIAVLLLGFLLCFYLFMHKNLVAIMKKLIK

SEQ ID NO: 29767 - DNA, 1401 bp, Arabidopsis thaliana
  misc_feature (1)..(1401): Ceres Seq. ID no. 12422582
  misc_feature (1)..(1401): Ortholog of  Ceres SEQ ID NO 15179955 as cited in SEQ ID NO 0
aattccttcctttgccccatttttattttcttcttcatccataataacttcactctctcccccccccccaacatgttcctgtgacgacgatacactctttcactgacttacccctacctcaaaatcaccttcttcttcatcgtctcagctcaggaattgctaactacctgtttttgaatttgagatctgtttttgtttctagaagaaaacagcttgttttcaccgtctctgatcctctgatttgatcggaatctaatgggtaaaaccaccgggaacagagattggactcagatctacgctatttacggaatcgaacaatggcagacactcgtcttccttctcttccatgctttcttcttctctcttctctctcttctcttcctcatctacttcgatcagatttgcttcttcctcgattccttcttcctctccggcgccgccagattagccgcgggtttcaccggtgctgtaaccgctctctccgcggtttgtctactcttcgccgcagctaatttcgtttactcagatgttccgcttcagtacgagatggctcaacgcatggttagctccgtcggtgactggtcttgtgtcaaaactgctctcgatctcggttgtggccgtggtatcctcctcaatgccgtcgctacacagcttaagaaaaccggtagctccggtcgggtcgtcgggttagaccgctctaaacgcaccactctctccactctccgcaccgctaaactcgaaggtgtgcaagagtatgtgacatgccgtgaaggagatgtgaagacgttgccgtttggcgataattacttcgacgtggtggtctcgtcggtgttcgttcacacggtggggaaagagcatggtcagaagtcggtggaagctgcggcggagagaatgagagtgctcggagagattgtgagagttgtgaagccaggaggtttgtgtgtggtttgggatctcttacacgtgccggagtacgtgcgtcgtcttcaagagctaaagatggaagatatacgagtctcggagcgagtcacggcgtttatggccggaagtcacatcgtttcgttccggaaacccagtgaactcgtcgccgggccccgtgaagtccgcctcgattggagatgatgacgtggtgttcaaaacgacagtgatgtgtgtcggttcgttatataaaaaacggcacgtagttgaagaagtctggaggttcgacactataattgtaatatattaattacgaatctactactactacactagaaaatcaaaatgtatgtggcgtctggggaggcgaagcggaaccagatgctttgatgaagaggcataacgctgcgtttgcgtttttgtcttgtatttgtataacctatagtttttattaacatattaagctgaatcttaatatgtgat

SEQ ID NO: 29768 - protein, 288 aa, Arabidopsis thaliana
  peptide (1)..(288): Ceres Seq. ID no. 12422583
MGKTTGNRDWTQIYAIYGIEQWQTLVFLLFHAFFFSLLSLLFLIYFDQICFFLDSFFLSGAARLAAGFTGAVTALSAVCLLFAAANFVYSDVPLQYEMAQRMVSSVGDWSCVKTALDLGCGRGILLNAVATQLKKTGSSGRVVGLDRSKRTTLSTLRTAKLEGVQEYVTCREGDVKTLPFGDNYFDVVVSSVFVHTVGKEHGQKSVEAAAERMRVLGEIVRVVKPGGLCVVWDLLHVPEYVRRLQELKMEDIRVSERVTAFMAGSHIVSFRKPSELVAGPREVRLDWR

SEQ ID NO: 29769 - protein, 191 aa, Arabidopsis thaliana
  peptide (1)..(191): Ceres Seq. ID no. 12422584
MAQRMVSSVGDWSCVKTALDLGCGRGILLNAVATQLKKTGSSGRVVGLDRSKRTTLSTLRTAKLEGVQEYVTCREGDVKTLPFGDNYFDVVVSSVFVHTVGKEHGQKSVEAAAERMRVLGEIVRVVKPGGLCVVWDLLHVPEYVRRLQELKMEDIRVSERVTAFMAGSHIVSFRKPSELVAGPREVRLDWR

SEQ ID NO: 29770 - protein, 187 aa, Arabidopsis thaliana
  peptide (1)..(187): Ceres Seq. ID no. 12422585
MVSSVGDWSCVKTALDLGCGRGILLNAVATQLKKTGSSGRVVGLDRSKRTTLSTLRTAKLEGVQEYVTCREGDVKTLPFGDNYFDVVVSSVFVHTVGKEHGQKSVEAAAERMRVLGEIVRVVKPGGLCVVWDLLHVPEYVRRLQELKMEDIRVSERVTAFMAGSHIVSFRKPSELVAGPREVRLDWR

SEQ ID NO: 29771 - DNA, 1107 bp, Arabidopsis thaliana
  misc_feature (1)..(1107): Ceres Seq. ID no. 12396806
  misc_feature (1)..(1107): Ortholog of  Ceres SEQ ID NO 15170617 as cited in SEQ ID NO 52614
gagatcttgattagagagagttcttgcaaaaagtgtctctgtattttgttattaaattcttcaatcttgtttctgtaaatttcggatatttttgaaaacaagcaaagatgtgtagtttggctacaaatctgttactaccatcgaagatgaaaccagtttttccagagaaactgagcactagctcactctgtgccacccctagaagatccaagatgaagaaccgatctattgttcctgttgcaagattgtttggaccggcgatttttgaagcctccaaattgaaagtattattcttaggagttgatgagaagaagcatccagcaaaacttccaagaacttacactcttactcacagtgacataaccgctaaattaactttagctatatctcaatccattaataactctcagttgcaaggatgggcaaataaattgttccgggacgaagtagtgggcgagtggaagaaagtgaaaggtaaaatgtcgcttcatgttcattgccacattagcggaggccacttcctcttgaatctcattgcgaagcttcggtactacatcttttgcaaagaattacctgtggtactggaagcttttgcccatggagatgagtatttgttaaataatcaccccgagctacaagaatctcctgtttgggtttatttccattccaacatcccggagtacaacaaggtcgaatgttggggaccgctttgggaggccatgtcgcagcaccagcacgacggaaggacccacaagaagagtgaaactctaccggagctaccttgtcctgatgattgcaagtgttgctttccgacggttagcacgattccgtggtctcatcgtcattatcaacataccgcagcggatgagaatgttgcggatggcctgttgggaatttctatacctaaccctgggaaatcaaagggatagatctaatgtaaatgtgttttttctttttctttggtggttaggaatgttagaaggagcatgaaaatctatttggtcggtgttaatagggagtgacaattgtataacataagtttcagtattttacaaattccttatatattaacccatccacgtgttatacatgtctttttattgtatg

SEQ ID NO: 29772 - protein, 273 aa, Arabidopsis thaliana
  peptide (1)..(273): Ceres Seq. ID no. 12396807
MCSLATNLLLPSKMKPVFPEKLSTSSLCATPRRSKMKNRSIVPVARLFGPAIFEASKLKVLFLGVDEKKHPAKLPRTYTLTHSDITAKLTLAISQSINNSQLQGWANKLFRDEVVGEWKKVKGKMSLHVHCHISGGHFLLNLIAKLRYYIFCKELPVVLEAFAHGDEYLLNNHPELQESPVWVYFHSNIPEYNKVECWGPLWEAMSQHQHDGRTHKKSETLPELPCPDDCKCCFPTVSTIPWSHRHYQHTAADENVADGLLGISIPNPGKSKG

SEQ ID NO: 29773 - protein, 260 aa, Arabidopsis thaliana
  peptide (1)..(260): Ceres Seq. ID no. 12396808
MKPVFPEKLSTSSLCATPRRSKMKNRSIVPVARLFGPAIFEASKLKVLFLGVDEKKHPAKLPRTYTLTHSDITAKLTLAISQSINNSQLQGWANKLFRDEVVGEWKKVKGKMSLHVHCHISGGHFLLNLIAKLRYYIFCKELPVVLEAFAHGDEYLLNNHPELQESPVWVYFHSNIPEYNKVECWGPLWEAMSQHQHDGRTHKKSETLPELPCPDDCKCCFPTVSTIPWSHRHYQHTAADENVADGLLGISIPNPGKSKG

SEQ ID NO: 29774 - protein, 238 aa, Arabidopsis thaliana
  peptide (1)..(238): Ceres Seq. ID no. 12396809
MKNRSIVPVARLFGPAIFEASKLKVLFLGVDEKKHPAKLPRTYTLTHSDITAKLTLAISQSINNSQLQGWANKLFRDEVVGEWKKVKGKMSLHVHCHISGGHFLLNLIAKLRYYIFCKELPVVLEAFAHGDEYLLNNHPELQESPVWVYFHSNIPEYNKVECWGPLWEAMSQHQHDGRTHKKSETLPELPCPDDCKCCFPTVSTIPWSHRHYQHTAADENVADGLLGISIPNPGKSKG

SEQ ID NO: 29775 - DNA, 1016 bp, Arabidopsis thaliana
  misc_feature (1)..(1016): Ceres Seq. ID no. 12321335
  misc_feature (1)..(1016): Ortholog of  Ceres SEQ ID NO 14304124 as cited in SEQ ID NO 56378
  misc_feature (1)..(1016): Ortholog of  Ceres SEQ ID NO 12585331 as cited in SEQ ID NO 62912
  misc_feature (1)..(1016): Ortholog of  Ceres SEQ ID NO 13654964 as cited in SEQ ID NO 63176
aattttttcccagaatcaaccagatctgctttcgaagacgaatctagctattagccatggacaaaccgtacggatacgcgagcgtgagcatgagcggcatagatcgttccgccggaaaggatattgatcttgagatgggagtcggagaagcgacgctttatcctgggctaagttacggcgagaatcagctccgatggggatttattcgtaaggtctatgggattctctcagctcagcttcttcttacgacgcttatctccgccgtcgttgttcttaatcctcctgttaacgatctcttgaccggatctcctgggattcttctcttcctctgcatcgttcccttcatcttaatctggcctctgcacatttaccaccagaagcatcctgttaacctgatcctccttgccctcttcactgtttcattgagtttcactgttggtgtcagttgtgctatgacagaaggacgaattgtgctacaagccttgatattgactctgtctgtggtcggatctctaaccgcatacactttctgggctgcaaagaagggaaaagacttcagcttccttggacccattctcttcaccagcctcatcattcttgtagtgaccagcttcatccagatgttcttccctcttggcccgacttctgttgccgtatacggaggattcagtgccttggtattctgcggatacatagtctatgataccgacaacctcatcaagcgtttcacatatgacgaatacatcctagcatcagtagctctctacttggacatcctcaatctcttcttgaccatattgcgtatactgaggcaaggcgacaactgaaaggcataaaacgatgcttcagtgatgtgatccagtttataactataagagaatccaaaagcctttatgtgtgtatatctgatttctgtttggagaattaagtatatgatgctatgtggttaaacgattgatataaacaaaatcaagcaatgtcgattttcaacttcaaataaatttgttaattttggc

SEQ ID NO: 29776 - protein, 256 aa, Arabidopsis thaliana
  peptide (1)..(256): Ceres Seq. ID no. 12321336
MDKPYGYASVSMSGIDRSAGKDIDLEMGVGEATLYPGLSYGENQLRWGFIRKVYGILSAQLLLTTLISAVVVLNPPVNDLLTGSPGILLFLCIVPFILIWPLHIYHQKHPVNLILLALFTVSLSFTVGVSCAMTEGRIVLQALILTLSVVGSLTAYTFWAAKKGKDFSFLGPILFTSLIILVVTSFIQMFFPLGPTSVAVYGGFSALVFCGYIVYDTDNLIKRFTYDEYILASVALYLDILNLFLTILRILRQGDN

SEQ ID NO: 29777 - protein, 245 aa, Arabidopsis thaliana
  peptide (1)..(245): Ceres Seq. ID no. 12321337
MSGIDRSAGKDIDLEMGVGEATLYPGLSYGENQLRWGFIRKVYGILSAQLLLTTLISAVVVLNPPVNDLLTGSPGILLFLCIVPFILIWPLHIYHQKHPVNLILLALFTVSLSFTVGVSCAMTEGRIVLQALILTLSVVGSLTAYTFWAAKKGKDFSFLGPILFTSLIILVVTSFIQMFFPLGPTSVAVYGGFSALVFCGYIVYDTDNLIKRFTYDEYILASVALYLDILNLFLTILRILRQGDN

SEQ ID NO: 29778 - protein, 230 aa, Arabidopsis thaliana
  peptide (1)..(230): Ceres Seq. ID no. 12321338
MGVGEATLYPGLSYGENQLRWGFIRKVYGILSAQLLLTTLISAVVVLNPPVNDLLTGSPGILLFLCIVPFILIWPLHIYHQKHPVNLILLALFTVSLSFTVGVSCAMTEGRIVLQALILTLSVVGSLTAYTFWAAKKGKDFSFLGPILFTSLIILVVTSFIQMFFPLGPTSVAVYGGFSALVFCGYIVYDTDNLIKRFTYDEYILASVALYLDILNLFLTILRILRQGDN

SEQ ID NO: 29779 - DNA, 1957 bp, Arabidopsis thaliana
  misc_feature (1)..(1957): Ceres Seq. ID no. 12396656
  misc_feature (1)..(1957): Ortholog of  Ceres SEQ ID NO 13582783 as cited in SEQ ID NO 67821
attgaggtttctcttgtccctgttcctcttctaaaacctaaccgccgtttaaaccaccttcggcaccgccattgatatactctactgttttcgtcaaatcgaaggaaccctaatttcgagggcactgaggaagctcaatcaatggcgacggtaaaggattcggggtttgaagcccttgagaagcttaaggcaacagagccaccagtttttctagcgccaagttcaatatctgaggatgctcgctctgcatctcagtatctattcatgaagttgaagccgcataaccctaaatgtccatttgatcagctctcttctgatgggtttgatgcggagcagatttggcagcaaattgatatgcaatctcaacctttgttgactagcttgcggcaggaagtcaagagatttgctaaaaaccctgaagagattcgtaaacttgggaagttggcccttaaggtttctcatgaagatgatgttgatgagatggatatggatggttgtgactcggatgatgttgatgatgaggataaagagatagaatctaatgacagcgaaggagaagatgaagaggaagaggaagaggacgaggaagaagaagaggaggaagaggaggaggaggaggaggaggaggaggagaaggatggagacaatgaaggaatagaggataagttcttcaagataaaagaattggaggaatttttagaggaaggtgaagcagaagagtatgggatagaccacaaaaacaaaaaaggagtggcacagagaaagaagcaaaatttgagcgatgatgaagacaaagaagatgatgatgatgaagaagaagatgttgagtttgatgcttttgctggtggtgacgacgaagagacagataaattaggaaaagcaaggtatgatgatttctttggtggcaaaaaggagacaaaaatgaagttgaaagatttgagtgaagatgaggaagctgaaatagaaaacaaaggcaatgaaaaactctctacccatgagagagcacgactaaagcttcaatccaagattgaacagatggagaaagcaaacttggacccaaaacattggacaatgcagggagagataactgcggcaaagaggccaatgaacagtgctctagaagttgatttagattttgagcacaatgccaggcctgctcctgtaatcacagaagaagtcacagcctcacttgaagatttgatcaagagcagaatcattgaggctcgtttcgatgatgttcaacgagcacctcgtctacccactaaaggaaaaagagaagccaaggaattggacgaaagcaaaagcaagaaaggtcttgccgaagtttacgaggcagaatactttcagaaggctaatccagcttttgccccaacaactcactctgatgaactaaagaaagaggcaagcatgttgttcaagaaactatgcctgaagttggatgctctctcccacttccacttcacacctaaaccagtgattgaagaaatgtctataccaaacgtttcagccatagcaatggaagaggttgcgcccgtggcagtctcagattcagcaatgcttgccccagaggaaatcttttccgggaaaggtgacattaaggatgagtctgagctcacacaggaagatagaaagaggaggagagcgaataagaagagaaagtttaaggctgaatctgcaaatgaaccgcctagaaaggcgctggatacaagtaccaagaacccttaaactgttacatgttgaagaaaggagagagttacagaggcaaattcaagatgataagatctcggtcaagagcattgctacacagacagcttgaagattagataaaacaacagttttgaatgagagaaatatttaaactttgtctttcacaaatttgaattttattgtatttttttctctttgtatgagtagttccattttccttgtatcgatagaaaaattccaaagaaatctt

SEQ ID NO: 29780 - protein, 527 aa, Arabidopsis thaliana
  peptide (1)..(527): Ceres Seq. ID no. 12396657
MATVKDSGFEALEKLKATEPPVFLAPSSISEDARSASQYLFMKLKPHNPKCPFDQLSSDGFDAEQIWQQIDMQSQPLLTSLRQEVKRFAKNPEEIRKLGKLALKVSHEDDVDEMDMDGCDSDDVDDEDKEIESNDSEGEDEEEEEEDEEEEEEEEEEEEEEEEEKDGDNEGIEDKFFKIKELEEFLEEGEAEEYGIDHKNKKGVAQRKKQNLSDDEDKEDDDDEEEDVEFDAFAGGDDEETDKLGKARYDDFFGGKKETKMKLKDLSEDEEAEIENKGNEKLSTHERARLKLQSKIEQMEKANLDPKHWTMQGEITAAKRPMNSALEVDLDFEHNARPAPVITEEVTASLEDLIKSRIIEARFDDVQRAPRLPTKGKREAKELDESKSKKGLAEVYEAEYFQKANPAFAPTTHSDELKKEASMLFKKLCLKLDALSHFHFTPKPVIEEMSIPNVSAIAMEEVAPVAVSDSAMLAPEEIFSGKGDIKDESELTQEDRKRRRANKKRKFKAESANEPPRKALDTSTKNP

SEQ ID NO: 29781 - protein, 486 aa, Arabidopsis thaliana
  peptide (1)..(486): Ceres Seq. ID no. 12396658
MKLKPHNPKCPFDQLSSDGFDAEQIWQQIDMQSQPLLTSLRQEVKRFAKNPEEIRKLGKLALKVSHEDDVDEMDMDGCDSDDVDDEDKEIESNDSEGEDEEEEEEDEEEEEEEEEEEEEEEEEKDGDNEGIEDKFFKIKELEEFLEEGEAEEYGIDHKNKKGVAQRKKQNLSDDEDKEDDDDEEEDVEFDAFAGGDDEETDKLGKARYDDFFGGKKETKMKLKDLSEDEEAEIENKGNEKLSTHERARLKLQSKIEQMEKANLDPKHWTMQGEITAAKRPMNSALEVDLDFEHNARPAPVITEEVTASLEDLIKSRIIEARFDDVQRAPRLPTKGKREAKELDESKSKKGLAEVYEAEYFQKANPAFAPTTHSDELKKEASMLFKKLCLKLDALSHFHFTPKPVIEEMSIPNVSAIAMEEVAPVAVSDSAMLAPEEIFSGKGDIKDESELTQEDRKRRRANKKRKFKAESANEPPRKALDTSTKNP

SEQ ID NO: 29782 - protein, 456 aa, Arabidopsis thaliana
  peptide (1)..(456): Ceres Seq. ID no. 12396659
MQSQPLLTSLRQEVKRFAKNPEEIRKLGKLALKVSHEDDVDEMDMDGCDSDDVDDEDKEIESNDSEGEDEEEEEEDEEEEEEEEEEEEEEEEEKDGDNEGIEDKFFKIKELEEFLEEGEAEEYGIDHKNKKGVAQRKKQNLSDDEDKEDDDDEEEDVEFDAFAGGDDEETDKLGKARYDDFFGGKKETKMKLKDLSEDEEAEIENKGNEKLSTHERARLKLQSKIEQMEKANLDPKHWTMQGEITAAKRPMNSALEVDLDFEHNARPAPVITEEVTASLEDLIKSRIIEARFDDVQRAPRLPTKGKREAKELDESKSKKGLAEVYEAEYFQKANPAFAPTTHSDELKKEASMLFKKLCLKLDALSHFHFTPKPVIEEMSIPNVSAIAMEEVAPVAVSDSAMLAPEEIFSGKGDIKDESELTQEDRKRRRANKKRKFKAESANEPPRKALDTSTKNP

SEQ ID NO: 29783 - DNA, 897 bp, Arabidopsis thaliana
  misc_feature (1)..(897): Ceres Seq. ID no. 12321699
  misc_feature (1)..(897): Ortholog of  Ceres SEQ ID NO 12627139 as cited in SEQ ID NO 64036
aacaaggacgatcagaagaaatcttagagaaatcagaaaattcttactcgggttttgcatcggtgaatatgaattgcgaagtttgtcagctaaaggaactggaagtggaatccttcgagatacgcgaagttttgcgctgcattctacatacgattgtctttcatcgtgcgcttggtcttatccgccctaaagatattgatttggagctttttgagatcacttatgttcaatgcggtgaaattgaagtggagaagaaaatcgatgaaaagattgagcagttcattaactggattgagaaacacccaaacaaaaagagtcagatttgtctatcgttctatgaagtcaaaagcaaacagccttcttggttcaccaaaatcgaacgcttgtactgggaacaatggtacatcaatctgaatgtgcttcagcccactaagccccctgtcggaaagtctcaccattctaaactagttatggaccctggagaggcatcggaggagagaagttctcgtaggacactgcttgagcaatcccttcaagaagtcttgttccaaatcataaaattcgtgaatgagaagaaggatcatgttcctcccattaacgatggtgtaatctactacccttttgaaatcactatcccaagctcatcggactctgcctttgggatggatatgttcaagaggatactacacagtggccatccatcaatgctcggctaaattccattttccacttaacttagtacatatacactttgatgtttcttggtgcagcctaactccaatcaacactttcctagttacattttctgtgtaaatatataatatgttaccctctcctcgtcgatggataatgttaccttatctatgctttgttgtatataactgatgtgttgtatat

SEQ ID NO: 29784 - protein, 237 aa, Arabidopsis thaliana
  peptide (1)..(237): Ceres Seq. ID no. 12321700
QGRSEEILEKSENSYSGFASVNMNCEVCQLKELEVESFEIREVLRCILHTIVFHRALGLIRPKDIDLELFEITYVQCGEIEVEKKIDEKIEQFINWIEKHPNKKSQICLSFYEVKSKQPSWFTKIERLYWEQWYINLNVLQPTKPPVGKSHHSKLVMDPGEASEERSSRRTLLEQSLQEVLFQIIKFVNEKKDHVPPINDGVIYYPFEITIPSSSDSAFGMDMFKRILHSGHPSMLG

SEQ ID NO: 29785 - protein, 215 aa, Arabidopsis thaliana
  peptide (1)..(215): Ceres Seq. ID no. 12321701
MNCEVCQLKELEVESFEIREVLRCILHTIVFHRALGLIRPKDIDLELFEITYVQCGEIEVEKKIDEKIEQFINWIEKHPNKKSQICLSFYEVKSKQPSWFTKIERLYWEQWYINLNVLQPTKPPVGKSHHSKLVMDPGEASEERSSRRTLLEQSLQEVLFQIIKFVNEKKDHVPPINDGVIYYPFEITIPSSSDSAFGMDMFKRILHSGHPSMLG

SEQ ID NO: 29786 - DNA, 1590 bp, Arabidopsis thaliana
  misc_feature (1)..(1590): Ceres Seq. ID no. 12422847
  misc_feature (1)..(1590): Ortholog of  Ceres SEQ ID NO 14303831 as cited in SEQ ID NO 52976
  misc_feature (1)..(1590): Ortholog of  Ceres SEQ ID NO 12619453 as cited in SEQ ID NO 65952
aagactctctctgctttcgaccaaaaccttctcctctcctctgggagatctccatcttcttcgcttcttcgcttccccgcctgaaacaattactcgatctcgccggcggaacaagctctccgtttctctttccggcagatcgattcttccaattccttattcctttctaggtcttccttaagaaacccttactttcttcaaaatctgcatttatggcgattagggttaccttcacctactccagctatgttgctaggagcattgcttcatccgccgggactcgtgtcggtaccggcgacgttagatcatgcttcgaaacatgggttcgtcccaggttctgcggccacaatcagataccagatattgttgataaatctcccggatccaacacatggggtccaagctcaggccctcgtgctcgaccagcttcatcaatgtatagcaccattgcgagggaaatcctcgaagaaggctgcaagagtccacttgtcttgggtatgatctctctcatgaatttgactggagctccacagttttcgggtgtgaccggtctcgggatctctccctttaagacttcttctgtcatcccgttccttaggggttccaagtggatgccttgtagtattccggcgacgttatcaacggatattgctgaggttgatagaggaggaaaggtctgtgatcctaaagtgaagttggagttgagtgataaagtctcgaatggtggaaacggatgggttaataagctgttgaatatctgctcggaggatgctaaggctgctttcacggcggttactttttctctccttttccgatcggctttggccgagccaaagtctataccttcaacatctatgcttcctactctcgatgtgggtgatcgtgttatagccgagaaggtctcatactttttcaggaagccagaggtttcagacatagttatcttcaaggctcctcctattttggtggaacatggttacagttgtgctgatgttttcataaaaaggatagttgctagcgaaggtgactgggttgaagtttgtgatggaaagctcttagtaaatgacactgttcaagcagaggattttgtcttagagccaattgactatgaaatggaaccaatgtttgtccctgaaggttatgtcttcgtcctaggagacaaccgcaacaaaagctttgattctcataactggggtccacttccaataaagaacatcatagggagatctgtgtttcgctattggccaccaagcaaagtgtcagacataatacaccatgaacaagttagccaaaagagagctgttgatgtatcttgaccaacgcagatggtatcttaggattaagcagaaaatttgattagatgagctgtgccatgccaaccattttggcgctgaaggcaacagagcaattctttcttcctgtctaggcttgatggcggacatggaatgcactgggaaatccatataaaaagaacaagaaaattgatatttttgctttgattttttttgatgtgttgaaacctaaatgcatccagtgtaattggcagtagctgtcaaacataaaagggtaaactttcttttttgagtattt

SEQ ID NO: 29787 - protein, 367 aa, Arabidopsis thaliana
  peptide (1)..(367): Ceres Seq. ID no. 12422848
MAIRVTFTYSSYVARSIASSAGTRVGTGDVRSCFETWVRPRFCGHNQIPDIVDKSPGSNTWGPSSGPRARPASSMYSTIAREILEEGCKSPLVLGMISLMNLTGAPQFSGVTGLGISPFKTSSVIPFLRGSKWMPCSIPATLSTDIAEVDRGGKVCDPKVKLELSDKVSNGGNGWVNKLLNICSEDAKAAFTAVTFSLLFRSALAEPKSIPSTSMLPTLDVGDRVIAEKVSYFFRKPEVSDIVIFKAPPILVEHGYSCADVFIKRIVASEGDWVEVCDGKLLVNDTVQAEDFVLEPIDYEMEPMFVPEGYVFVLGDNRNKSFDSHNWGPLPIKNIIGRSVFRYWPPSKVSDIIHHEQVSQKRAVDVS

SEQ ID NO: 29788 - protein, 293 aa, Arabidopsis thaliana
  peptide (1)..(293): Ceres Seq. ID no. 12422849
MYSTIAREILEEGCKSPLVLGMISLMNLTGAPQFSGVTGLGISPFKTSSVIPFLRGSKWMPCSIPATLSTDIAEVDRGGKVCDPKVKLELSDKVSNGGNGWVNKLLNICSEDAKAAFTAVTFSLLFRSALAEPKSIPSTSMLPTLDVGDRVIAEKVSYFFRKPEVSDIVIFKAPPILVEHGYSCADVFIKRIVASEGDWVEVCDGKLLVNDTVQAEDFVLEPIDYEMEPMFVPEGYVFVLGDNRNKSFDSHNWGPLPIKNIIGRSVFRYWPPSKVSDIIHHEQVSQKRAVDVS

SEQ ID NO: 29789 - protein, 272 aa, Arabidopsis thaliana
  peptide (1)..(272): Ceres Seq. ID no. 12422850
MISLMNLTGAPQFSGVTGLGISPFKTSSVIPFLRGSKWMPCSIPATLSTDIAEVDRGGKVCDPKVKLELSDKVSNGGNGWVNKLLNICSEDAKAAFTAVTFSLLFRSALAEPKSIPSTSMLPTLDVGDRVIAEKVSYFFRKPEVSDIVIFKAPPILVEHGYSCADVFIKRIVASEGDWVEVCDGKLLVNDTVQAEDFVLEPIDYEMEPMFVPEGYVFVLGDNRNKSFDSHNWGPLPIKNIIGRSVFRYWPPSKVSDIIHHEQVSQKRAVDVS

SEQ ID NO: 29790 - DNA, 1825 bp, Arabidopsis thaliana
  misc_feature (1)..(1825): Ceres Seq. ID no. 12738746
  misc_feature (1)..(1825): Ortholog of  Ceres SEQ ID NO 14303324 as cited in SEQ ID NO 54563
  misc_feature (1)..(1825): Ortholog of  Ceres SEQ ID NO 13582184 as cited in SEQ ID NO 56002
  misc_feature (1)..(1825): Ortholog of  Ceres SEQ ID NO 14308575 as cited in SEQ ID NO 58782
  misc_feature (1)..(1825): Ortholog of  Ceres SEQ ID NO 15227042 as cited in SEQ ID NO 0
agtagattagactaataacttgtgtgggaaaacaatgggcagatcgccatgttgtgataaggccgggttgaagaaagggccttggactccagaagaggatcagaaacttttggcttatattgaagaacatggccatggaagctggcgttctttgcctgagaaagccggtctccaaaggtgtggaaagagttgcagactcagatggactaactacctaagacctgacatcaagagaggcaaattcactgtacaagaagaacaaaccatcattcaactccacgctctcctcggaaacaggtggtcagcgattgcaactcatttaccaaagaggacagacaacgagatcaagaactactggaacacacacttgaagaaacgtctgatcaaaatggggatagatccagtgactcacaagcacaaaaacgagactctttcgtcttccacaggacaatcaaagaacgcagccacgcttagtcatatggctcaatgggagagtgcaagactcgaagctgaagcaaggctagctagagaatcaaagcttctccatttacagcattacgaaaacaataacaaccttaacaaatcagcagctcctcaacaacattgcttcactcaaaaaacatcaacaagctggactaaaccaaaccaaggaaacggagaccaacagcttgaatctccgacatcgacggtgacattctctgagaatcttctgatgcccttaggaatcccgacggatagcagcagaaatagaaacaataacaacaatgagtcctcggcgatgattgaactcgccgtatcttcgtcaacctcctccgatgtgagtctggtcaaagaacacgaacacgactggattaggcaaatcaactgtggtagtggaggaataggagaaggattcacgagtctattgatcggtgattcggtcggccggagtttacccaccgggaaaaacgaagcgacggcgggcgtggggaatgagagtgagtataactactatgaggataacaagaattactggaatagcattctcaacttggttgattcttcaccgtccgattccgcgacgatgttctgatctaagggtcttcaaccatacatttttaattctcagattgttttttaaatgtatggttgaagaccaaaaggactgctcctaagtccgatgatgtctacctaaagcttctcgtcaagctttaccggtttttggtgaggagatctaacagcaacttcaatgctgtgattctgaagaggcttttcatgagcaaagtcaacaaagctcctctttcactctctaggcttgtagagttcatgactggcaaggatgacaagattgctgtgttagttggaactatcactgatgatttgagagttcatgagattcctgccatgaaggttactgccttgaggtttactgagagggctagggctagaattgagaaagctggtggagagtgcttaacctttgaccagcttgctctcagagctccattgggacagaacacagttcttcttagaggaccaaagaactcgcgtgaagcagtgaagcatttcggacctgctcctggtgtgccacacagtaacactaagccatatgttaggcataagggaaggaagtttgagaaagctagaggaaagcgaaagagtcgtggattcaaggtctaagaagatgttttctggtttcgttttgcttggtttaagtatcgaagttttggtagggaacgctggttcctctttaccctgttccagactttgttttaagttctgtttttctattctcaagacaattggatattttgctttgtcttttaatcttattactattagctgc

SEQ ID NO: 29791 - protein, 345 aa, Arabidopsis thaliana
  peptide (1)..(345): Ceres Seq. ID no. 12738747
MGRSPCCDKAGLKKGPWTPEEDQKLLAYIEEHGHGSWRSLPEKAGLQRCGKSCRLRWTNYLRPDIKRGKFTVQEEQTIIQLHALLGNRWSAIATHLPKRTDNEIKNYWNTHLKKRLIKMGIDPVTHKHKNETLSSSTGQSKNAATLSHMAQWESARLEAEARLARESKLLHLQHYENNNNLNKSAAPQQHCFTQKTSTSWTKPNQGNGDQQLESPTSTVTFSENLLMPLGIPTDSSRNRNNNNNESSAMIELAVSSSTSSDVSLVKEHEHDWIRQINCGSGGIGEGFTSLLIGDSVGRSLPTGKNEATAGVGNESEYNYYEDNKNYWNSILNLVDSSPSDSATMF

SEQ ID NO: 29792 - protein, 227 aa, Arabidopsis thaliana
  peptide (1)..(227): Ceres Seq. ID no. 12738748
MGIDPVTHKHKNETLSSSTGQSKNAATLSHMAQWESARLEAEARLARESKLLHLQHYENNNNLNKSAAPQQHCFTQKTSTSWTKPNQGNGDQQLESPTSTVTFSENLLMPLGIPTDSSRNRNNNNNESSAMIELAVSSSTSSDVSLVKEHEHDWIRQINCGSGGIGEGFTSLLIGDSVGRSLPTGKNEATAGVGNESEYNYYEDNKNYWNSILNLVDSSPSDSATMF

SEQ ID NO: 29793 - protein, 197 aa, Arabidopsis thaliana
  peptide (1)..(197): Ceres Seq. ID no. 12738749
MAQWESARLEAEARLARESKLLHLQHYENNNNLNKSAAPQQHCFTQKTSTSWTKPNQGNGDQQLESPTSTVTFSENLLMPLGIPTDSSRNRNNNNNESSAMIELAVSSSTSSDVSLVKEHEHDWIRQINCGSGGIGEGFTSLLIGDSVGRSLPTGKNEATAGVGNESEYNYYEDNKNYWNSILNLVDSSPSDSATMF

SEQ ID NO: 29794 - DNA, 852 bp, Arabidopsis thaliana
  misc_feature (1)..(852): Ceres Seq. ID no. 12332047
  misc_feature (1)..(852): Ortholog of  Ceres SEQ ID NO 13581670 as cited in SEQ ID NO 57766
aatcaccctgacgaagttgaaacaagcagcacaagaagaagacgaagcacgacgactctctcgcttccagatttcttgatccgatatttatattccctctgcccttgaaatcaaatctcttctcgaatttgtgctctagaaattataatctggcaatttgaagatcttgtgggtcacgacacaaacttataagcaagagcttagcattttcatcatctgctgaagaacgtatgggagaaactgttaaagagcgtggtgatggaagtgcagagctggttaaatccgtagctgataagcatgccggtctcgtgagaccagttgctaaatattactctgcagttaaagatgctatggtgtgtgggaaaggaagatatacgcttgtaaaagacgtagacgaggtggaaaatggagtgtatgacaagcctcttccatgctttggttgtggaatcggatggttctcctttctcttgggttttgtgttccctttcttatggtactatgcaacatttttatatttcgggaactactaccgcaaggatcctagagaaagagccggccttgctgcttccgcaatcactgggatgggattctccctcttgctactagtgattgttgttttctggtggctctaatgggttctctgacttatacgccataatcttgagatatatatgatggaaagtctcatccttgtcaaaggaaaaaggaggggacttagatatatatataaaccctatatacacagattatagttatacctctctcaagctctgtatcattttcttctcaaaaatctgcagtttgtgtacaaagaacagaaaatacaataataaatgagtaaatggttgttgc

SEQ ID NO: 29795 - protein, 133 aa, Arabidopsis thaliana
  peptide (1)..(133): Ceres Seq. ID no. 12332048
MGETVKERGDGSAELVKSVADKHAGLVRPVAKYYSAVKDAMVCGKGRYTLVKDVDEVENGVYDKPLPCFGCGIGWFSFLLGFVFPFLWYYATFLYFGNYYRKDPRERAGLAASAITGMGFSLLLLVIVVFWWL

SEQ ID NO: 29796 - protein, 93 aa, Arabidopsis thaliana
  peptide (1)..(93): Ceres Seq. ID no. 12332049
MVCGKGRYTLVKDVDEVENGVYDKPLPCFGCGIGWFSFLLGFVFPFLWYYATFLYFGNYYRKDPRERAGLAASAITGMGFSLLLLVIVVFWWL

SEQ ID NO: 29797 - protein, 66 aa, Arabidopsis thaliana
  peptide (1)..(66): Ceres Seq. ID no. 12332050
MECMTSLFHALVVESDGSPFSWVLCSLSYGTMQHFYISGTTTARILEKEPALLLPQSLGWDSPSCY

SEQ ID NO: 29798 - DNA, 912 bp, Arabidopsis thaliana
  misc_feature (1)..(912): Ceres Seq. ID no. 12333050
  misc_feature (1)..(912): Ortholog of  Ceres SEQ ID NO 12619999 as cited in SEQ ID NO 66123
  misc_feature (1)..(912): Ortholog of  Ceres SEQ ID NO 13656436 as cited in SEQ ID NO 69154
atttcctttgccagctccatctctctctctctctctaaaaccagtctgcaactttctctctctcaaaatcagaaacaaaaaaaacgatgtcgtccgatgacgaaggaggagaagagtatctattcaagatagtgataatcggcgactctgccgtcgggaaatcgaaccttctctctcgctatgctcgtaacgagttcaacgctcattccaaggccacgatcggcgtcgagttagagacgcagaatatggaaatcgaaggtaaagaagttaaagctcagatttgggatactgcttgtcaagaacggtttcgtgccgtcacttccgcttattatcgcggcgccgtcggagctctcgtcgtttacgatattagtcgtcgatccacgtttgagagtgttggtcgttggcttgatgagctcaagacacattcggatacaacggttgcgaggatgctggtgggaaacaaatgcgatctagaaagcataagagcggtgagcgtggaagaaggcaaagcactagctgaaaccgaaggactatttttcatggaaacatcagctctcgattcaacaaatgttaaaacagctttcgaaatggtaatccgtgacatctataccaatataagccggaaacaactcaactccgacacttataaaaccgaactaagcatgaaaaacagagtcagtctcgttaaggacgataataaaagctccacacaaggctttggtttctcttgctgttcttcctcgtgacctgaattttgatcccaaattatttttcttttgcttcatttgtggattttttttcttttgaatttttttcaaccatagaaaaaagggcagatcatatagattcaaaaattgtagtgtttatgtgtggatcgtatagtaaacaatttatacgataattatttattgc

SEQ ID NO: 29799 - protein, 219 aa, Arabidopsis thaliana
  peptide (1)..(219): Ceres Seq. ID no. 12333051
MSSDDEGGEEYLFKIVIIGDSAVGKSNLLSRYARNEFNAHSKATIGVELETQNMEIEGKEVKAQIWDTACQERFRAVTSAYYRGAVGALVVYDISRRSTFESVGRWLDELKTHSDTTVARMLVGNKCDLESIRAVSVEEGKALAETEGLFFMETSALDSTNVKTAFEMVIRDIYTNISRKQLNSDTYKTELSMKNRVSLVKDDNKSSTQGFGFSCCSSS

SEQ ID NO: 29800 - protein, 166 aa, Arabidopsis thaliana
  peptide (1)..(166): Ceres Seq. ID no. 12333052
MEIEGKEVKAQIWDTACQERFRAVTSAYYRGAVGALVVYDISRRSTFESVGRWLDELKTHSDTTVARMLVGNKCDLESIRAVSVEEGKALAETEGLFFMETSALDSTNVKTAFEMVIRDIYTNISRKQLNSDTYKTELSMKNRVSLVKDDNKSSTQGFGFSCCSSS

SEQ ID NO: 29801 - DNA, 594 bp, Arabidopsis thaliana
  misc_feature (1)..(594): Ceres Seq. ID no. 12333048
  misc_feature (1)..(594): Ortholog of  Ceres SEQ ID NO 14302474 as cited in SEQ ID NO 60589
aatttcacatctttctcacccaaatctactcttaaccgttcttcttcttctacagacatcaatttctctcgagataaactaaatcttcgctgaaaaaatgtcgggtcgtggaaagggaggaaaaggtttgggtaagggaggagccaagcgtcacaggaaggttctgagagacaacatccaaggaatcaccaagcctgcgattcgaagattggctcgtagaggtggagtcaagcgtatcagtggtctcatctacgaggagactcgtggcgtcctcaagatctttctcgagaacgtgattcgtgatgctgtcacttacaccgagcacgctaggaggaagactgtgaccgccatggatgttgtctacgctctcaagaggcaaggaaggactctttacggattcggtggttaattagagtttttcagatccgcgtttgtgttttctgggtttctcacttaagcgtctgcgttttacttttgtattgggtttggcgtttagtagtttgcggtagcgttcttgttatgtgtaattacgctttttcttcttgcttcagcagtttcggttgaaatataaatcgaatcaagtttcactttaat

SEQ ID NO: 29802 - protein, 103 aa, Arabidopsis thaliana; identical to SEQ ID NO: 7737
  peptide (1)..(103): Ceres Seq. ID no. 12333049

SEQ ID NO: 29803 - DNA, 1136 bp, Arabidopsis thaliana
  misc_feature (1)..(1136): Ceres Seq. ID no. 12330223
  misc_feature (1)..(1136): Ortholog of  Ceres SEQ ID NO 13594163 as cited in SEQ ID NO 60426
atgctagtatgcttcaggttcaatcaccgccccattagattctctctccctctctaaagaccacacctttatgttccctctatatctatataagacgcaaacacagggaccattctcttcaaagacgagaaattataagttaggaaacgacaaagaccgatctatatatatatctcggagcaatatagctagcacaaacatgtttcagattggaaaaaacgcattattcaagaatgtgagcaagaacttccttatcaagggaatatcctcatcctcatcatctcattcaacttcaaggaagctagaaggtaaagtagcactcatcactggaggagcaagtgggattggcaaagcaacagccggaaaattcatcagtcatggagccaaagttatcattgccgatatccaaccgcagattgggcgagaaaccgagcaagaactcggtcccagttgtgcttacttcccatgcgatgtgaccaaagaatcagacattgctaacgcagttgacttcgctgtctcgctccatacaaagctcgacattatgtacaacaatgctggtattccctgcaaaacgcctcctagtatcgttgatcttgatctcaatgttttcgacaaggtaatcaacacaaatgtccgtggagtcatggcaggaatcaaacatgctgctcgtgtgatgatcccgcgtaactctggatccatcatttgtgcagggagtgtcacggggatgatgggcggtttagcccaacatacttacagcgtctcaaaatccgctgttatcggaattgtaagatcaacagcttcagaactatgcaagcacaggatccgggtcaactgcatttctccttttgcgatcacaacatcattcgtgatggatgagatgcgacagatttaccccggtgttgatgactcaaggctgatccagatagtgcagagtacaggagtgttaaatggagaggtttgtgaaccaaccgatgtagctaatgcagcggtgtatctcgcttccgatgattcaaagtatgtaaatgggcataatctggtggtagatggaggattcacaactgtaaagacgttagatttccctgcacctgaccaagtgaagtaacaaaactcataatatacaaagaaaactgttcttg

SEQ ID NO: 29804 - protein, 343 aa, Arabidopsis thaliana
  peptide (1)..(343): Ceres Seq. ID no. 12330224
MFPLYLYKTQTQGPFSSKTRNYKLGNDKDRSIYISRSNIASTNMFQIGKNALFKNVSKNFLIKGISSSSSSHSTSRKLEGKVALITGGASGIGKATAGKFISHGAKVIIADIQPQIGRETEQELGPSCAYFPCDVTKESDIANAVDFAVSLHTKLDIMYNNAGIPCKTPPSIVDLDLNVFDKVINTNVRGVMAGIKHAARVMIPRNSGSIICAGSVTGMMGGLAQHTYSVSKSAVIGIVRSTASELCKHRIRVNCISPFAITTSFVMDEMRQIYPGVDDSRLIQIVQSTGVLNGEVCEPTDVANAAVYLASDDSKYVNGHNLVVDGGFTTVKTLDFPAPDQVK

SEQ ID NO: 29805 - protein, 300 aa, Arabidopsis thaliana
  peptide (1)..(300): Ceres Seq. ID no. 12330225
MFQIGKNALFKNVSKNFLIKGISSSSSSHSTSRKLEGKVALITGGASGIGKATAGKFISHGAKVIIADIQPQIGRETEQELGPSCAYFPCDVTKESDIANAVDFAVSLHTKLDIMYNNAGIPCKTPPSIVDLDLNVFDKVINTNVRGVMAGIKHAARVMIPRNSGSIICAGSVTGMMGGLAQHTYSVSKSAVIGIVRSTASELCKHRIRVNCISPFAITTSFVMDEMRQIYPGVDDSRLIQIVQSTGVLNGEVCEPTDVANAAVYLASDDSKYVNGHNLVVDGGFTTVKTLDFPAPDQVK

SEQ ID NO: 29806 - protein, 186 aa, Arabidopsis thaliana
  peptide (1)..(186): Ceres Seq. ID no. 12330226
MYNNAGIPCKTPPSIVDLDLNVFDKVINTNVRGVMAGIKHAARVMIPRNSGSIICAGSVTGMMGGLAQHTYSVSKSAVIGIVRSTASELCKHRIRVNCISPFAITTSFVMDEMRQIYPGVDDSRLIQIVQSTGVLNGEVCEPTDVANAAVYLASDDSKYVNGHNLVVDGGFTTVKTLDFPAPDQVK

SEQ ID NO: 29807 - DNA, 820 bp, Arabidopsis thaliana
  misc_feature (1)..(820): Ceres Seq. ID no. 13490245
  misc_feature (1)..(820): Ortholog of  Ceres SEQ ID NO 12613614 as cited in SEQ ID NO 68243
  misc_feature (1)..(820): Ortholog of  Ceres SEQ ID NO 12556636 as cited in SEQ ID NO 0
  misc_feature (1)..(820): Ortholog of  Ceres SEQ ID NO 13600066 as cited in SEQ ID NO 0
  misc_feature (1)..(820): Ortholog of  Ceres SEQ ID NO 15179946 as cited in SEQ ID NO 0
gagaagggagaaaactttctccgagctcgattgtttttggaaatcgtcaatcagatatttctcgttcgtctccgccttcgatttatccaaaggctcttgttattgaaaatggcagattccaccaaagcagggttgaagaagccagctttcactaaggttgatcagctgcgtcctgggactagcggacacaatgtcaatgtgaagattgtcagcacgaaaatggtgttacagaaaggtcgtgctgatggtcctcaagctcgccagttgcggatttctgaatgcattgttggtgacgagacaggagtgatcgtctttaccgcaagaaatgaccaagtggacttaatgaaagagggatcaactgtaactctacgcaatgcgaaaatcgacatgtataaaggatcaatgaggctagctgtagacaagtggggtcgtgttgaagtcacagagcctgcgagcttcaaagtgaaagaagacaccaacatgtcccttatcgagtatgagctcgtaaacgtcgttgaatgagtgacaaattcctcgaaataccactaggagaaacgccctcaagaataaacaagtcaaatccgtaaccgtttatgttagcgtcaagaaaagagttaaaccctgatcagctgatgtcttgcactaagctatgtaagagtgatgatggctctaaaagttgaatgcagagcttttggcttaggttatgacttcgtgataccttttcttttgtaatgtcatcatacacgctaaggcttttgtgctacattattactctctttgtctttgcctcgtttcaaaaaatccatattcttagtgaagc

SEQ ID NO: 29808 - protein, 173 aa, Arabidopsis thaliana
  peptide (1)..(173): Ceres Seq. ID no. 13490246
EKGENFLRARLFLEIVNQIFLVRLRLRFIQRLLLLKMADSTKAGLKKPAFTKVDQLRPGTSGHNVNVKIVSTKMVLQKGRADGPQARQLRISECIVGDETGVIVFTARNDQVDLMKEGSTVTLRNAKIDMYKGSMRLAVDKWGRVEVTEPASFKVKEDTNMSLIEYELVNVVE

SEQ ID NO: 29809 - protein, 137 aa, Arabidopsis thaliana
  peptide (1)..(137): Ceres Seq. ID no. 13490247
MADSTKAGLKKPAFTKVDQLRPGTSGHNVNVKIVSTKMVLQKGRADGPQARQLRISECIVGDETGVIVFTARNDQVDLMKEGSTVTLRNAKIDMYKGSMRLAVDKWGRVEVTEPASFKVKEDTNMSLIEYELVNVVE

SEQ ID NO: 29810 - protein, 100 aa, Arabidopsis thaliana
  peptide (1)..(100): Ceres Seq. ID no. 13490248
MVLQKGRADGPQARQLRISECIVGDETGVIVFTARNDQVDLMKEGSTVTLRNAKIDMYKGSMRLAVDKWGRVEVTEPASFKVKEDTNMSLIEYELVNVVE

SEQ ID NO: 29811 - DNA, 1026 bp, Arabidopsis thaliana
  misc_feature (1)..(1026): Ceres Seq. ID no. 13495944
  misc_feature (1)..(1026): Ortholog of  Ceres SEQ ID NO 15168868 as cited in SEQ ID NO 58303
agaaactgatttgataaaaaaaaatatcttcgttgaagtgagggtgacgagaagtttctgctttcatcaattaaaggtttacgcgtgaagcagatcatcagcaatggcggcgtcgcaagataagttggataagatgaaacttaggcaagattaccggaatttatggcactccgatctcatgggcaccgtcaccgccgacactccctattgctgcatctcgtgtctgtgtggaccttgtgtgtcatacatgcttcggagaagagcactttacaatgacatgtcaaggtatacttgctgtgctggatatatgccctgtagtggaaggtgtggagaaagcaaatgtcctcaactttgccttgccactgaggtcttcctttgcttcggaaactctgtggcctctacccgctttcttctgcaggatgaattcaacatccagacaacacaatgcgacaattgcataattggatttatgttctgcctcagccaagttgcttgcatattctctatagttgcttgcattgttggtagtgatgaactttccgaggcttctcagatactctcttgctgtgctgatatggtctactgcacggtctgcgcatgtatgcagacacaacacaaacttgagatggacaaaagagatggagtgtttggatcgcagccaatgggtgtgccaccagctcagcagatgtctcgttttgatcaacctgtccctcctccagtcggataccctcagtcctatccaccgcctgctcaaggctaccctcctgcatcttacccgcctcccggttatcctcagcattaagaaatttaaccagtatcttcattttatgtgtcaaagtgttgttgttacttggtttaggtgtgcagaactattatattgttcagctttgtcctctgcttatttctgcgatttatttattttgaggtattggtactctggttatgtctgaaaagcttttgctatcatcaactggtttgttgactttggtatttaagtaaagaaaaagaacaacatatgtattagct

SEQ ID NO: 29812 - protein, 232 aa, Arabidopsis thaliana
  peptide (1)..(232): Ceres Seq. ID no. 13495945
MAASQDKLDKMKLRQDYRNLWHSDLMGTVTADTPYCCISCLCGPCVSYMLRRRALYNDMSRYTCCAGYMPCSGRCGESKCPQLCLATEVFLCFGNSVASTRFLLQDEFNIQTTQCDNCIIGFMFCLSQVACIFSIVACIVGSDELSEASQILSCCADMVYCTVCACMQTQHKLEMDKRDGVFGSQPMGVPPAQQMSRFDQPVPPPVGYPQSYPPPAQGYPPASYPPPGYPQH

SEQ ID NO: 29813 - protein, 222 aa, Arabidopsis thaliana
  peptide (1)..(222): Ceres Seq. ID no. 13495946
MKLRQDYRNLWHSDLMGTVTADTPYCCISCLCGPCVSYMLRRRALYNDMSRYTCCAGYMPCSGRCGESKCPQLCLATEVFLCFGNSVASTRFLLQDEFNIQTTQCDNCIIGFMFCLSQVACIFSIVACIVGSDELSEASQILSCCADMVYCTVCACMQTQHKLEMDKRDGVFGSQPMGVPPAQQMSRFDQPVPPPVGYPQSYPPPAQGYPPASYPPPGYPQH

SEQ ID NO: 29814 - protein, 207 aa, Arabidopsis thaliana
  peptide (1)..(207): Ceres Seq. ID no. 13495947
MGTVTADTPYCCISCLCGPCVSYMLRRRALYNDMSRYTCCAGYMPCSGRCGESKCPQLCLATEVFLCFGNSVASTRFLLQDEFNIQTTQCDNCIIGFMFCLSQVACIFSIVACIVGSDELSEASQILSCCADMVYCTVCACMQTQHKLEMDKRDGVFGSQPMGVPPAQQMSRFDQPVPPPVGYPQSYPPPAQGYPPASYPPPGYPQH

SEQ ID NO: 29815 - DNA, 873 bp, Arabidopsis thaliana; identical to SEQ ID NO: 21755
  misc_feature (1)..(873): Ceres Seq. ID no. 13497760
  misc_feature (1)..(873): Ortholog of  Ceres SEQ ID NO 14306406 as cited in SEQ ID NO 1412
  misc_feature (1)..(873): Ortholog of  Ceres SEQ ID NO 15178824 as cited in SEQ ID NO 0

SEQ ID NO: 29816 - protein, 200 aa, Arabidopsis thaliana; identical to SEQ ID NO: 21756
  peptide (1)..(200): Ceres Seq. ID no. 13497761

SEQ ID NO: 29817 - protein, 175 aa, Arabidopsis thaliana; identical to SEQ ID NO: 21757
  peptide (1)..(175): Ceres Seq. ID no. 13497762

SEQ ID NO: 29818 - DNA, 608 bp, Arabidopsis thaliana
  misc_feature (1)..(608): Ceres Seq. ID no. 12397109
  misc_feature (1)..(608): Ortholog of  Ceres SEQ ID NO 13661089 as cited in SEQ ID NO 61053
aaccaccacaaatctcatcgaaatgtcgtctcaagaaacgaaatcagatcaaagagaaggagcagagatctgcaatggcgaatcaaactgcaaacagaaagccaaagagattttatcaaccatgaatctacccaaaggtcttcttcctctagacaacatgacagagatcggtcacaacaaatcaaccggttatgtctggatcaagatcaagaacaaggttcaacatcggtttaaagccattggacgaaacgtatcgtacgattcggaggttactgcgatccttgagaatcgtcggatgagtcagcttacgggaatcaagagcaaagagattttgatttgggttacgatctctgagatctttgttaatcatcaagatccgactcaaatcacttttgctaatcctacgggactatcacgtactttccccgtcactgcttttgaagaagacgaatgattcatttgtcaacgctcaccatcatgatactttgcttagctaaattatcttttgttttttccttataattccttttgtttagctaagttctattttcaacatttgtatttctgcatcttttccattagagattttataaaattaataatatagg

SEQ ID NO: 29819 - protein, 150 aa, Arabidopsis thaliana
  peptide (1)..(150): Ceres Seq. ID no. 12397110
TTTNLIEMSSQETKSDQREGAEICNGESNCKQKAKEILSTMNLPKGLLPLDNMTEIGHNKSTGYVWIKIKNKVQHRFKAIGRNVSYDSEVTAILENRRMSQLTGIKSKEILIWVTISEIFVNHQDPTQITFANPTGLSRTFPVTAFEEDE

SEQ ID NO: 29820 - protein, 143 aa, Arabidopsis thaliana
  peptide (1)..(143): Ceres Seq. ID no. 12397111
MSSQETKSDQREGAEICNGESNCKQKAKEILSTMNLPKGLLPLDNMTEIGHNKSTGYVWIKIKNKVQHRFKAIGRNVSYDSEVTAILENRRMSQLTGIKSKEILIWVTISEIFVNHQDPTQITFANPTGLSRTFPVTAFEEDE

SEQ ID NO: 29821 - protein, 110 aa, Arabidopsis thaliana
  peptide (1)..(110): Ceres Seq. ID no. 12397112
MNLPKGLLPLDNMTEIGHNKSTGYVWIKIKNKVQHRFKAIGRNVSYDSEVTAILENRRMSQLTGIKSKEILIWVTISEIFVNHQDPTQITFANPTGLSRTFPVTAFEEDE

SEQ ID NO: 29822 - DNA, 971 bp, Arabidopsis thaliana
  misc_feature (1)..(971): Ceres Seq. ID no. 12372139
  misc_feature (1)..(971): Ortholog of  Ceres SEQ ID NO 13597524 as cited in SEQ ID NO 64782
aacgaagcatcggagaaaaaagaagatgaacatcgttggattgtgcaaacgtttcttctccgatcgtcgctctcttcacgggatcaacaatgctctcgtaaaaacagtgttcacgggtcggaaaccgattctcggattctccggccgatcgtttcacgagctgcgaaaaactgggaatttcgtaatccctcgtgttttctccgtttcacgaaatctaacgacgaaggcttcgtcttcttcttcttcgaaacaacctgcgtttctacgatggtatttgagaaagctcgaatcacatccttttatgactaagagtatcactacttctgtcatctatatggctgcagatctcacttctcagatgatcacgatggagccaactggttcttttgacttgataagaacagcgagaatggcgagctttgggttgatatttctcgggccgtctcagcatctgtggttcagttatctttcgaagatattgccaaagcgcgacgtgttgacaacctttaagaaaataatgatggggcaggttcttttcggacctgttagcaacacagtcttctattcctacaatgctgctttacaaggtgaaaattctgaggaaattgtggcgagattgaagcgagatcttctgccaacattgaaaaatggacttatgtattggccggtctgtgattttgttacattcaagtatgtgccagttcatctacagccactgatgaatagctcgtgcgcatatatatggacaatctatttgacatatatggcaaaccagacgaaagctgacagctgaacaatgacaagtatgagtgttcttggtcacacgcaatcgcattctttttattcaattgaaccaaccatcagtactagtagaatttgtctttttggtgtctacaatgcagcaaaagtgtcgcatagatatggacacaaacatgtatgaattttgatcatctaagcatatatttatcagc

SEQ ID NO: 29823 - protein, 263 aa, Arabidopsis thaliana
  peptide (1)..(263): Ceres Seq. ID no. 12372140
TKHRRKKKMNIVGLCKRFFSDRRSLHGINNALVKTVFTGRKPILGFSGRSFHELRKTGNFVIPRVFSVSRNLTTKASSSSSSKQPAFLRWYLRKLESHPFMTKSITTSVIYMAADLTSQMITMEPTGSFDLIRTARMASFGLIFLGPSQHLWFSYLSKILPKRDVLTTFKKIMMGQVLFGPVSNTVFYSYNAALQGENSEEIVARLKRDLLPTLKNGLMYWPVCDFVTFKYVPVHLQPLMNSSCAYIWTIYLTYMANQTKADS

SEQ ID NO: 29824 - protein, 255 aa, Arabidopsis thaliana
  peptide (1)..(255): Ceres Seq. ID no. 12372141
MNIVGLCKRFFSDRRSLHGINNALVKTVFTGRKPILGFSGRSFHELRKTGNFVIPRVFSVSRNLTTKASSSSSSKQPAFLRWYLRKLESHPFMTKSITTSVIYMAADLTSQMITMEPTGSFDLIRTARMASFGLIFLGPSQHLWFSYLSKILPKRDVLTTFKKIMMGQVLFGPVSNTVFYSYNAALQGENSEEIVARLKRDLLPTLKNGLMYWPVCDFVTFKYVPVHLQPLMNSSCAYIWTIYLTYMANQTKADS

SEQ ID NO: 29825 - protein, 163 aa, Arabidopsis thaliana
  peptide (1)..(163): Ceres Seq. ID no. 12372142
MTKSITTSVIYMAADLTSQMITMEPTGSFDLIRTARMASFGLIFLGPSQHLWFSYLSKILPKRDVLTTFKKIMMGQVLFGPVSNTVFYSYNAALQGENSEEIVARLKRDLLPTLKNGLMYWPVCDFVTFKYVPVHLQPLMNSSCAYIWTIYLTYMANQTKADS

SEQ ID NO: 29826 - DNA, 1717 bp, Arabidopsis thaliana
  misc_feature (1)..(1717): Ceres Seq. ID no. 12423026
  misc_feature (1)..(1717): Ortholog of  Ceres SEQ ID NO 14314896 as cited in SEQ ID NO 54010
  misc_feature (1)..(1717): Ortholog of  Ceres SEQ ID NO 13655744 as cited in SEQ ID NO 64032
ataaataaaaccactctcgttgctgattccatttatcgttcttattgaccctagccgctacacacttttctgcgatatctctgagatttgttgacagtctctaaccatgggtaaagagaagtttcacatcaacattgtggtcattggccacgtcgattctggaaagtcgaccaccactgggcacttgatctacaagttgggtggtattgacaagcgtgtcattgagaggttcgagaaggaggctgctgagatgaacaagaggtccttcaagtacgcatgggttttggacaaacttaaggctgagcgtgagcgtggtatcaccattgacattgctctctggaagttcgagaccaccaagtactactgcactgtcattgatgctcctggccatcgtgatttcatcaagaacatgatcactggtacctcccaggctgattgtgctgtccttatcattgactccaccactggtggttttgaggctggtatctccaaggatggtcagacccgtgagcacgctctacttgctttcacccttggtgtcaagcagatgatctgctgttgtaacaagatggatgccactacccccaagtactccaaggccaggtacgatgaaatcatcaaggaggtgtcttcctacttgaagaaggttggttacaaccccgacaaaatcccatttgtgcccatctctggatttgagggtgacaacatgattgagaggtccaccaaccttgactggtacaagggaccaactctccttgaggctcttgaccagatcaacgagcccaagaggccgtcagacaagccccttcgtctcccacttcaggatgtctacaagattggtggtattggaacggtgccagtgggacgtgttgagactggtatgatcaagcctggtatggttgtgacctttgctcccacaggattgaccactgaggtcaagtctgttgagatgcaccacgagtctcttcttgaggcacttccaggtgacaacgttgggttcaatgttaagaatgttgctgtcaaggatcttaagagagggtacgtcgcatccaactccaaggatgaccctgccaagggtgctgctaacttcacctcccaggtcatcatcatgaaccaccctggtcagattggtaacggttacgccccagtcctggattgccacacctctcacattgcagtcaagttctctgagatcttgaccaagattgacaggcgttctggtaaggagattgagaaggagcctaaattcttgaagaatggtgatgctggtatggtgaagatgactccaaccaagcccatggttgtggagaccttctctgagtacccaccacttggacgtttcgctgtgagggacatgaggcagactgttgcagtcggtgttatcaagagtgttgacaagaaggacccaactggagccaaggttaccaaggctgcagtcaagaagggtgccaagtgaactctgaacatcaaaactctttccgctgatgaaatgaaggactattttagtttctttactttagtagtttggtatttggttggttgtttgtgttaccgcttcgtttattctccgtcggagctcaattctcggaattgggttcttgatcggaggtggcggaggtacttggcactcgagcttcctgtttatttcttttgttttgtgttatgattttgaacctttttggatattcggttatatgatatttgtgtcattcctgcc

SEQ ID NO: 29827 - protein, 449 aa, Arabidopsis thaliana; identical to SEQ ID NO: 27284
  peptide (1)..(449): Ceres Seq. ID no. 12423027

SEQ ID NO: 29828 - protein, 401 aa, Arabidopsis thaliana; identical to SEQ ID NO: 21437
  peptide (1)..(401): Ceres Seq. ID no. 12423028

SEQ ID NO: 29829 - protein, 348 aa, Arabidopsis thaliana; identical to SEQ ID NO: 21438
  peptide (1)..(348): Ceres Seq. ID no. 12423029

SEQ ID NO: 29830 - DNA, 2004 bp, Arabidopsis thaliana
  misc_feature (1)..(2004): Ceres Seq. ID no. 12558495
  misc_feature (1)..(2004): Ortholog of  Ceres SEQ ID NO 14309934 as cited in SEQ ID NO 20583
  misc_feature (1)..(2004): Ortholog of  Ceres SEQ ID NO 13654989 as cited in SEQ ID NO 63117
  misc_feature (1)..(2004): Ortholog of  Ceres SEQ ID NO 13584744 as cited in SEQ ID NO 69137
acattcattttctctggtctttgattgcttttcttttcactgcttaggttctttgtctgttaggtttagagagatcctttccaaagatccaaagctggaaactttctagtcaatgctgcttaagatctgactttttcccttcaatgtcgctctgaaatcccctaaatttttgggcccatcaggtgaataaagcggaggtcagaagatgggttctggtttaaatgacacattatctcggaactacaatggtttggagctatgggagataatagtgattgttctctctgcgatattcgttgtagttttagctatatcgctatggcttactttcagaagaaaaacctctagatcttcttctaatctaatccctgttagtcgccagattcctcctagtgttcctgaagagattaaagagattagagtcgacgaggtttcttcaagcaatggtgggaatggatacccctctattagtgagaaatttggcgataaagaacccgaaaaagggataaaagcagagtcagaaaatggcgatagtagccggtcaggctcgtttaatcacttggagaaaaaagacggatcgagcgtatcttctgctaatcctttgacagctccatctcctttgtctggtcttcctgagttttctcaccttggatggggacattggttcactcttagagatcttcagatggctactaatcagttttcaagggataatatcatcggtgatggtggatatggagttgtttaccgcggtaaccttgttaatggtactcctgttgctgttaaaaagttgctcaacaatttaggacaagctgataaagacttcagagttgaagttgaagctataggtcacgttcgacataaaaacttggtccgccttctcggatattgtatggaaggaacgcagaggatgctggtgtatgagtatgttaacaatggaaatttggagcaatggctccgtggagacaatcaaaatcatgagtatcttacatgggaggcacgagtgaaaattcttattgggacagccaaagcgctcgcgtaccttcacgaggcgattgagccaaaagtggtgcacagagacattaagtctagtaacattctgattgatgacaaattcaattctaaaatttctgactttggacttgctaaactacttggtgctgataagagttttataactactagagttatgggtaccttcggttacgtagctccagagtatgcgaattccggtcttctgaatgagaaaagcgatgtctacagcttcggggttgtactcttggaagctataactggtagatatccggtagactatgctcgtccaccacccgaggtacatttggtggagtggctgaagatgatggtccaacaaagacgatcagaagaagtggttgatccaaaccttgaaacaaaaccatctacaagtgctttgaaaagaacactattgactgctttgagatgtgttgatccaatgtctgagaaaagaccgaggatgagccaagttgcacgtatgcttgaatccgaagaatacccaattgctagagaggataggagaagacgaaggagtcagaacgggacaacaagagattcagatcctccgaggaacagcacagacactgacaagagtgagtaccatgacctaaagcctgaaggtggatagccattggaaataatggaggtgtaaattgtcgtaaagtctcgagctttatgggaagtttcaagtccttagttcttctccagatcttctgcgttatttgatgtttcttttcttttgtaataaggagggagagagagagtgaatgagttagtgagtgttcatcgttcgtttgttgcttgtatagtatttgtttgttgtattatcgtttgcttctccacgttttgcaatgtaggttgtttttggactaagtaaacgctatttgcaggttttgtagggtatgtaagtctttgagagaaacgacgtgtaatttgcaatttgcttgtggaagatattgttatttgagagag

SEQ ID NO: 29831 - protein, 484 aa, Arabidopsis thaliana
  peptide (1)..(484): Ceres Seq. ID no. 12558496
MGSGLNDTLSRNYNGLELWEIIVIVLSAIFVVVLAISLWLTFRRKTSRSSSNLIPVSRQIPPSVPEEIKEIRVDEVSSSNGGNGYPSISEKFGDKEPEKGIKAESENGDSSRSGSFNHLEKKDGSSVSSANPLTAPSPLSGLPEFSHLGWGHWFTLRDLQMATNQFSRDNIIGDGGYGVVYRGNLVNGTPVAVKKLLNNLGQADKDFRVEVEAIGHVRHKNLVRLLGYCMEGTQRMLVYEYVNNGNLEQWLRGDNQNHEYLTWEARVKILIGTAKALAYLHEAIEPKVVHRDIKSSNILIDDKFNSKISDFGLAKLLGADKSFITTRVMGTFGYVAPEYANSGLLNEKSDVYSFGVVLLEAITGRYPVDYARPPPEVHLVEWLKMMVQQRRSEEVVDPNLETKPSTSALKRTLLTALRCVDPMSEKRPRMSQVARMLESEEYPIAREDRRRRRSQNGTTRDSDPPRNSTDTDKSEYHDLKPEGG

SEQ ID NO: 29832 - protein, 324 aa, Arabidopsis thaliana
  peptide (1)..(324): Ceres Seq. ID no. 12558497
MATNQFSRDNIIGDGGYGVVYRGNLVNGTPVAVKKLLNNLGQADKDFRVEVEAIGHVRHKNLVRLLGYCMEGTQRMLVYEYVNNGNLEQWLRGDNQNHEYLTWEARVKILIGTAKALAYLHEAIEPKVVHRDIKSSNILIDDKFNSKISDFGLAKLLGADKSFITTRVMGTFGYVAPEYANSGLLNEKSDVYSFGVVLLEAITGRYPVDYARPPPEVHLVEWLKMMVQQRRSEEVVDPNLETKPSTSALKRTLLTALRCVDPMSEKRPRMSQVARMLESEEYPIAREDRRRRRSQNGTTRDSDPPRNSTDTDKSEYHDLKPEGG

SEQ ID NO: 29833 - protein, 255 aa, Arabidopsis thaliana
  peptide (1)..(255): Ceres Seq. ID no. 12558498
MEGTQRMLVYEYVNNGNLEQWLRGDNQNHEYLTWEARVKILIGTAKALAYLHEAIEPKVVHRDIKSSNILIDDKFNSKISDFGLAKLLGADKSFITTRVMGTFGYVAPEYANSGLLNEKSDVYSFGVVLLEAITGRYPVDYARPPPEVHLVEWLKMMVQQRRSEEVVDPNLETKPSTSALKRTLLTALRCVDPMSEKRPRMSQVARMLESEEYPIAREDRRRRRSQNGTTRDSDPPRNSTDTDKSEYHDLKPEGG

SEQ ID NO: 29834 - DNA, 1239 bp, Arabidopsis thaliana
  misc_feature (1)..(1239): Ceres Seq. ID no. 6443802
  misc_feature (1)..(1239): Ortholog of  Ceres SEQ ID NO 13598579 as cited in SEQ ID NO 65523
attttatagaacagcaaaaccctagatttcctgttcaagctcaagaccgtacaaaactttggaactcatatataaagatctcgagaatagcattatgaatatcgtctcttggaaagatgcaaacgacgaagttgcaggcggcgctacgacaagacgtgaaagagaagtaaaagaggatcaagaagaaaccgaagtcagagccaccagtggcaaaaccgtaattaaaaagcagcctacatcgatctcttcttcttcttcttcgtggatgaaatccaaggatccgaggattgttagggtttcacgcgcctttggaggcaaagaccgtcacagcaaagtgtgtacgttacgtggactacgtgacagacgcgtgagattatcagtcccaacggctattcagctctacgatcttcaagaacggctcggtgttgaccagcctagcaaagccgttgactggttgcttgatgcagctaaagaggagatcgacgagctacctccgttacctatctcgccggaaaatttcagcatcttcaaccatcatcagtccttcttgaatcttggtcaacggcccggtcaagatccgacccaactcgggtttaaaatcaatggatgtgtacaaaagtctactactactagccgcgaagaaaacgatagagagaaaggagaaaacgatgtcgtttacacaaacaatcatcatgttgggtcttatggaacttatcacaacctggaacatcatcatcatcatcaccaacatttgagtttacaggcagattatcatagtcatcaactacatagtcttgtcccatttccatcacaaattttggtatgtccaatgacgacatcaccaacaactacaactatacaatctttgtttccatcatcatcgtcagctggttcagggactatggagacattagatccgaggcaaatgtagcaacaatggtggtagagacattgataatcggatgtcgtcggtccaattcaaccgaactaatagcactacaacggctaacatgtcgaggcatctaggctcggagcgttgtacaagtagaggaagtgatcaccatatgtgaagttagattattgaaacgatataattgttgtttgatgtgttcagaaataaggggacacaaaacaaaatataaggtaattactattgtactatgttttgctgatatattttttaatagacaaattaatgttataaattgatttattaatttactattagcatgtgttttg

SEQ ID NO: 29835 - protein, 278 aa, Arabidopsis thaliana
  peptide (1)..(278): Ceres Seq. ID no. 6443803
MNIVSWKDANDEVAGGATTRREREVKEDQEETEVRATSGKTVIKKQPTSISSSSSSWMKSKDPRIVRVSRAFGGKDRHSKVCTLRGLRDRRVRLSVPTAIQLYDLQERLGVDQPSKAVDWLLDAAKEEIDELPPLPISPENFSIFNHHQSFLNLGQRPGQDPTQLGFKINGCVQKSTTTSREENDREKGENDVVYTNNHHVGSYGTYHNLEHHHHHHQHLSLQADYHSHQLHSLVPFPSQILVCPMTTSPTTTTIQSLFPSSSSAGSGTMETLDPRQM

SEQ ID NO: 29836 - protein, 221 aa, Arabidopsis thaliana
  peptide (1)..(221): Ceres Seq. ID no. 6443804
MKSKDPRIVRVSRAFGGKDRHSKVCTLRGLRDRRVRLSVPTAIQLYDLQERLGVDQPSKAVDWLLDAAKEEIDELPPLPISPENFSIFNHHQSFLNLGQRPGQDPTQLGFKINGCVQKSTTTSREENDREKGENDVVYTNNHHVGSYGTYHNLEHHHHHHQHLSLQADYHSHQLHSLVPFPSQILVCPMTTSPTTTTIQSLFPSSSSAGSGTMETLDPRQM

SEQ ID NO: 29837 - DNA, 1580 bp, Arabidopsis thaliana
  misc_feature (1)..(1580): Ceres Seq. ID no. 12385358
  misc_feature (1)..(1580): Ortholog of  Ceres SEQ ID NO 13662245 as cited in SEQ ID NO 62708
aaacccatccaacccaaaagcatacaatacaatgtctactcttgttttattcctccaacttttttccatcctaccattagcacttgggttgaaccacccaaattgtgacctgaccaagactcaagaccaaggctctaccctaagaatcttccacatagacagcccttgctcccccttcaaatcatcatccccactctcatgggaagcgcgtgtgctccagactctggctcaagaccaggcccgtctccagtacctgagcagcctcgtcgccgggagatctgtagtccccattgcctcagggcgtcaaatgttgcaaagcactacatacattgtcaaggctttgatcggtactccggctcagccactgctcctagccatggacacgagcagtgacgtggcttggattccttgctccggttgcgttggctgtccttctaacaccgccttttcccctgccaagtctacctccttcaagaatgttagctgcagcgctcctcagtgtaagcaggtaccaaaccccacgtgtggagcacgcgcgtgctctttcaacctcacctatggaagctcctccattgcggctaacctctctcaagacacgatccgtcttgccgccgatccgatcaaagcctttacatttggatgcgtcaacaaagtcgccggtggaggaaccatcccaccacctcaaggcttgttgggcttgggacgaggcccactttcactcatgtcacaggctcagtctatttacaagtccactttctcttactgtttgccaagtttcaggtctctgaccttctctggttctctcagactcggccctacctcccagccccagcgcgtgaagtacactcaacttctcagaaaccctagaaggtcttctctgtactacgtcaacctcgttgcgatccgcgttggtcggaaagtcgtcgatttaccgccggcagctattgcttttaatccttcaaccggcgctggaaccatcttcgactccgggactgtgtacacgcggctggctaaaccggtttacgaggcagtgaggaacgagttcaggaagcgcgtgaagccaaccacagccgtggtgacgtcactcgggggtttcgacacgtgctactcagggcaagtcaaggtgccgacgataacattcatgttcaagggagtgaacatgacgatgccagctgataacctgatgttacacagtaccgccggaagcacgtcgtgcctcgccatggctgcagcgccggaaaacgtaaactctgtcgtcaatgtgatcgcaagcatgcagcagcagaaccaccgtgtcctcatcgacgtccccaatggacggctcggtttggcacgtgaacgatgctcttagaaagatgaatgagacaataagagcctactcatatttatgcagagacttgtttgtttgtgttatttgtgtgtttcatttttgtcttgtcttgtgtcgtttgcttcaccagtcttagagggcggaggtgtgtagcatttgtgctatctagtaatttatgtttttaattgttcttcaattatctagagatttggatctaaactaatcaaataatgaaactatattatatttc

SEQ ID NO: 29838 - protein, 449 aa, Arabidopsis thaliana
  peptide (1)..(449): Ceres Seq. ID no. 12385359
NPSNPKAYNTMSTLVLFLQLFSILPLALGLNHPNCDLTKTQDQGSTLRIFHIDSPCSPFKSSSPLSWEARVLQTLAQDQARLQYLSSLVAGRSVVPIASGRQMLQSTTYIVKALIGTPAQPLLLAMDTSSDVAWIPCSGCVGCPSNTAFSPAKSTSFKNVSCSAPQCKQVPNPTCGARACSFNLTYGSSSIAANLSQDTIRLAADPIKAFTFGCVNKVAGGGTIPPPQGLLGLGRGPLSLMSQAQSIYKSTFSYCLPSFRSLTFSGSLRLGPTSQPQRVKYTQLLRNPRRSSLYYVNLVAIRVGRKVVDLPPAAIAFNPSTGAGTIFDSGTVYTRLAKPVYEAVRNEFRKRVKPTTAVVTSLGGFDTCYSGQVKVPTITFMFKGVNMTMPADNLMLHSTAGSTSCLAMAAAPENVNSVVNVIASMQQQNHRVLIDVPNGRLGLARERCS

SEQ ID NO: 29839 - protein, 439 aa, Arabidopsis thaliana
  peptide (1)..(439): Ceres Seq. ID no. 12385360
MSTLVLFLQLFSILPLALGLNHPNCDLTKTQDQGSTLRIFHIDSPCSPFKSSSPLSWEARVLQTLAQDQARLQYLSSLVAGRSVVPIASGRQMLQSTTYIVKALIGTPAQPLLLAMDTSSDVAWIPCSGCVGCPSNTAFSPAKSTSFKNVSCSAPQCKQVPNPTCGARACSFNLTYGSSSIAANLSQDTIRLAADPIKAFTFGCVNKVAGGGTIPPPQGLLGLGRGPLSLMSQAQSIYKSTFSYCLPSFRSLTFSGSLRLGPTSQPQRVKYTQLLRNPRRSSLYYVNLVAIRVGRKVVDLPPAAIAFNPSTGAGTIFDSGTVYTRLAKPVYEAVRNEFRKRVKPTTAVVTSLGGFDTCYSGQVKVPTITFMFKGVNMTMPADNLMLHSTAGSTSCLAMAAAPENVNSVVNVIASMQQQNHRVLIDVPNGRLGLARERCS

SEQ ID NO: 29840 - protein, 347 aa, Arabidopsis thaliana
  peptide (1)..(347): Ceres Seq. ID no. 12385361
MLQSTTYIVKALIGTPAQPLLLAMDTSSDVAWIPCSGCVGCPSNTAFSPAKSTSFKNVSCSAPQCKQVPNPTCGARACSFNLTYGSSSIAANLSQDTIRLAADPIKAFTFGCVNKVAGGGTIPPPQGLLGLGRGPLSLMSQAQSIYKSTFSYCLPSFRSLTFSGSLRLGPTSQPQRVKYTQLLRNPRRSSLYYVNLVAIRVGRKVVDLPPAAIAFNPSTGAGTIFDSGTVYTRLAKPVYEAVRNEFRKRVKPTTAVVTSLGGFDTCYSGQVKVPTITFMFKGVNMTMPADNLMLHSTAGSTSCLAMAAAPENVNSVVNVIASMQQQNHRVLIDVPNGRLGLARERCS

SEQ ID NO: 29841 - DNA, 2141 bp, Arabidopsis thaliana
  misc_feature (1)..(2141): Ceres Seq. ID no. 12333959
  misc_feature (1)..(2141): Ortholog of  Ceres SEQ ID NO 13582619 as cited in SEQ ID NO 56520
  misc_feature (1)..(2141): Ortholog of  Ceres SEQ ID NO 13660872 as cited in SEQ ID NO 60830
  misc_feature (1)..(2141): Ortholog of  Ceres SEQ ID NO 12616221 as cited in SEQ ID NO 63291
aattccaatgccatcgtgatcgattcatctctctctctctcttccaattttcccaattcttttttaaaaccctaatttttcagatatctgattatctcttgtatttcttctactcgatttgctcccataaaaacccttactttcttcaagttctggttttcaccgattgatgggtcgtggctcagtgacgtcgcttgctcctgggttccgttttcacccgacggatgaggaacttgttcgctactaccttaagcgtaaggtctgcaacaaaccctttaagttcgatgctatttccgtcaccgacatatacaagtctgagccttgggatctaccagataagtcgaagctgaaaagtagagacttggaatggtacttctttagtatgctggataagaagtacagtaatggttccaagacgaatcgtgctacggagaaagggtattggaagacgactgggaaagatcgggagattcgtaatggttcaagagtcgttgggatgaagaagacacttgtttatcacaagggtcgagctcctcgtggtgaaaggaccaattgggttatgcatgagtatcggctttctgatgaggacttgaagaaagctggtgtgccacaagaagcatatgtgttatgtaggatattccagaaaagtggtacgggtcctaagaatggggagcagtatggtgctccttatcttgaggaggagtgggaagaagatggaatgacttatgtacctgctcaagatgctttcagtgaaggattggctttgaatgatgatgtttatgtcgatattgatgacattgacgagaagcccgaaaatctggtggtctatgatgccgttcctattctacctaactattgtcatggggaatcaagtaacaatgttgaatcaggcaattactcagactctggaaattacattcaaccaggaaacaatgttgtcgactctggtgggtactttgaacaaccaattgaaacttttgaggaagatcggaagcctattatacgggagggtagcattcagccttgttctctgtttccagaggaacaaattggctgtggtgtgcaagacgaaaatgtggtgaatctggaatcttccaacaataatgtgtttgtagctgatacatgctacagtgacattcctattgatcataactatttacccgatgagccattcatggatcctaataacaatcttccactcaacgatggtctgtacctggaaacgaatgatctcagctgtgctcaacaagatgattttaacttcgaagattatctcagcttctttgatgatgagggtttgacttttgacgattctctattaatgggacctgaagattttcttcccaaccaagaagcccttgaccagaaacctgcccctaaagaattggagaaggaggtcgcaggaggcaaagaggcagtggaggaaaaggaaagtggcgaaggatcttcttcaaaacaagatacagatttcaaggactttgattcagctccgaagtacccatttctcaaaaagacgagccacatgcttggagccattcctactccatcttcatttgcttcacagttccaaacaaaggacgcaatgcgtctacacgcagcacaatcttctggttcagttcacgtgactgcaggtatgatgagaatatcaaacatgactctagcagcggacagcggtatgggctggtcatatgacaagaacggtaacctcaacgtagtcctttcattcggggtagtccaacaggatgatgcgatgactgcctcgggaagcaagacaggaattacggcgacaagagctatgttagtcttcatgtgtttatgggttctcctactctctgttagcttcaaaatagtaaccatggtgtctgctcggtaataggatcaaagttgaatcgtctcaaagactttttttggtgtttgtacctctccaatcatatagcctttaactttggcagtgctttgctgctcaatatttaaatttttattcgaagggtttggtgtagcttgaattctctatatggtttctagtttgagtttctagaaataagaacataaacaactttcttatgacaattattatttgatcccgttattgttggaatcattggtctaaacatgttacattgtgaaatgatatttcgttg

SEQ ID NO: 29842 - protein, 567 aa, Arabidopsis thaliana
  peptide (1)..(567): Ceres Seq. ID no. 12333960
MGRGSVTSLAPGFRFHPTDEELVRYYLKRKVCNKPFKFDAISVTDIYKSEPWDLPDKSKLKSRDLEWYFFSMLDKKYSNGSKTNRATEKGYWKTTGKDREIRNGSRVVGMKKTLVYHKGRAPRGERTNWVMHEYRLSDEDLKKAGVPQEAYVLCRIFQKSGTGPKNGEQYGAPYLEEEWEEDGMTYVPAQDAFSEGLALNDDVYVDIDDIDEKPENLVVYDAVPILPNYCHGESSNNVESGNYSDSGNYIQPGNNVVDSGGYFEQPIETFEEDRKPIIREGSIQPCSLFPEEQIGCGVQDENVVNLESSNNNVFVADTCYSDIPIDHNYLPDEPFMDPNNNLPLNDGLYLETNDLSCAQQDDFNFEDYLSFFDDEGLTFDDSLLMGPEDFLPNQEALDQKPAPKELEKEVAGGKEAVEEKESGEGSSSKQDTDFKDFDSAPKYPFLKKTSHMLGAIPTPSSFASQFQTKDAMRLHAAQSSGSVHVTAGMMRISNMTLAADSGMGWSYDKNGNLNVVLSFGVVQQDDAMTASGSKTGITATRAMLVFMCLWVLLLSVSFKIVTMVSAR

SEQ ID NO: 29843 - protein, 496 aa, Arabidopsis thaliana
  peptide (1)..(496): Ceres Seq. ID no. 12333961
MLDKKYSNGSKTNRATEKGYWKTTGKDREIRNGSRVVGMKKTLVYHKGRAPRGERTNWVMHEYRLSDEDLKKAGVPQEAYVLCRIFQKSGTGPKNGEQYGAPYLEEEWEEDGMTYVPAQDAFSEGLALNDDVYVDIDDIDEKPENLVVYDAVPILPNYCHGESSNNVESGNYSDSGNYIQPGNNVVDSGGYFEQPIETFEEDRKPIIREGSIQPCSLFPEEQIGCGVQDENVVNLESSNNNVFVADTCYSDIPIDHNYLPDEPFMDPNNNLPLNDGLYLETNDLSCAQQDDFNFEDYLSFFDDEGLTFDDSLLMGPEDFLPNQEALDQKPAPKELEKEVAGGKEAVEEKESGEGSSSKQDTDFKDFDSAPKYPFLKKTSHMLGAIPTPSSFASQFQTKDAMRLHAAQSSGSVHVTAGMMRISNMTLAADSGMGWSYDKNGNLNVVLSFGVVQQDDAMTASGSKTGITATRAMLVFMCLWVLLLSVSFKIVTMVSAR

SEQ ID NO: 29844 - protein, 458 aa, Arabidopsis thaliana
  peptide (1)..(458): Ceres Seq. ID no. 12333962
MKKTLVYHKGRAPRGERTNWVMHEYRLSDEDLKKAGVPQEAYVLCRIFQKSGTGPKNGEQYGAPYLEEEWEEDGMTYVPAQDAFSEGLALNDDVYVDIDDIDEKPENLVVYDAVPILPNYCHGESSNNVESGNYSDSGNYIQPGNNVVDSGGYFEQPIETFEEDRKPIIREGSIQPCSLFPEEQIGCGVQDENVVNLESSNNNVFVADTCYSDIPIDHNYLPDEPFMDPNNNLPLNDGLYLETNDLSCAQQDDFNFEDYLSFFDDEGLTFDDSLLMGPEDFLPNQEALDQKPAPKELEKEVAGGKEAVEEKESGEGSSSKQDTDFKDFDSAPKYPFLKKTSHMLGAIPTPSSFASQFQTKDAMRLHAAQSSGSVHVTAGMMRISNMTLAADSGMGWSYDKNGNLNVVLSFGVVQQDDAMTASGSKTGITATRAMLVFMCLWVLLLSVSFKIVTMVSAR

SEQ ID NO: 29845 - DNA, 1538 bp, Arabidopsis thaliana
  misc_feature (1)..(1538): Ceres Seq. ID no. 12580443
  misc_feature (1)..(1538): Ortholog of  Ceres SEQ ID NO 14314567 as cited in SEQ ID NO 52335
  misc_feature (1)..(1538): Ortholog of  Ceres SEQ ID NO 14308803 as cited in SEQ ID NO 55038
  misc_feature (1)..(1538): Ortholog of  Ceres SEQ ID NO 13595437 as cited in SEQ ID NO 56562
  misc_feature (1)..(1538): Ortholog of  Ceres SEQ ID NO 14315985 as cited in SEQ ID NO 57720
aacattttcttattttccttcctaatttccaacctctgttcttagcaatatattttttctccaaaaataattctcagtttgattttcttcttctagctcttaagtatatttctttgttgttatttatcttttaatcctttaatctcatctttgtttatctttaatcaaaacccaaaatttacatgggttcttgaaaatctagaagaaataaaggaaacataacaaaaatagaaagaaaaagaagctaatggtcttaaatatggagtctaccggagaagctgttagatcaaccaccggtaacgacggtggtattacggtggttagatccgacgcgccgtcagatttccacgtagctcaaagatcagaaagctcaaaccaatctcccacctctgtcactcctcctccaccacagccatcgtctcatcacacagctcctccgccgctgcaaatttcgacggtgacgactacgactacgacggccgcgatggaaggtatctccggtggactgatgaagaagaagcgtggacggccaaggaagtatggaccggacgggactgttgtagcgttatctcctaaaccgatttcatcagcgccggcgccgtcgcatcttccgccgccgagttcacacgtcatcgatttctccgcttctgagaaacgtagcaaagtgaaaccaacgaactcgtttaacagaacaaagtatcatcaccaagttgagaatttgggtgaatgggctccttgctccgtcggtggtaatttcacacctcatataatcacagtcaacaccggcgaggatgtaacaatgaagataatctcgttttcgcaacaaggacctcgctctatttgtgttctgtcagcaaacggtgttatttcaagcgttacacttcgtcagccagattcctctggcggcacattgacatacgaaggtcggtttgagatattatcattatccgggtcattcatgcctaatgattcaggcggaacacgaagtagaacgggaggaatgagtgtatcgttagcaagtcccgatggacgtgtagtaggcggtggcctcgccggtttactagtagccgcgagtccggttcaggtggttgtaggaagttttttagcgggcactgaccatcaagatcagaaaccgaaaaagaacaaacatgatttcatgttgtcgagtcctaccgctgcaattcctatctctagtgcagctgatcaccggacaatccattcggtctcgtctcttccggtcaataataatacatggcagacttctttagcttccgatccaagaaacaagcataccgatattaatgtcaatgtaacttgaaatccaatctttctctgtattttctgttaacaagtttgatttggttgtttatctacattaggattttactaaaatggtagtattatttatagggttttagggtctttattttggttccactgttgtcacttgtaggataatttctatctttttattaggattgaatcatcttgtttccttaattttttgctaacgagtcatggtcctggttttgcatgtc

SEQ ID NO: 29846 - protein, 356 aa, Arabidopsis thaliana
  peptide (1)..(356): Ceres Seq. ID no. 12580444
MVLNMESTGEAVRSTTGNDGGITVVRSDAPSDFHVAQRSESSNQSPTSVTPPPPQPSSHHTAPPPLQISTVTTTTTTAAMEGISGGLMKKKRGRPRKYGPDGTVVALSPKPISSAPAPSHLPPPSSHVIDFSASEKRSKVKPTNSFNRTKYHHQVENLGEWAPCSVGGNFTPHIITVNTGEDVTMKIISFSQQGPRSICVLSANGVISSVTLRQPDSSGGTLTYEGRFEILSLSGSFMPNDSGGTRSRTGGMSVSLASPDGRVVGGGLAGLLVAASPVQVVVGSFLAGTDHQDQKPKKNKHDFMLSSPTAAIPISSAADHRTIHSVSSLPVNNNTWQTSLASDPRNKHTDINVNVT

SEQ ID NO: 29847 - protein, 352 aa, Arabidopsis thaliana
  peptide (1)..(352): Ceres Seq. ID no. 12580445
MESTGEAVRSTTGNDGGITVVRSDAPSDFHVAQRSESSNQSPTSVTPPPPQPSSHHTAPPPLQISTVTTTTTTAAMEGISGGLMKKKRGRPRKYGPDGTVVALSPKPISSAPAPSHLPPPSSHVIDFSASEKRSKVKPTNSFNRTKYHHQVENLGEWAPCSVGGNFTPHIITVNTGEDVTMKIISFSQQGPRSICVLSANGVISSVTLRQPDSSGGTLTYEGRFEILSLSGSFMPNDSGGTRSRTGGMSVSLASPDGRVVGGGLAGLLVAASPVQVVVGSFLAGTDHQDQKPKKNKHDFMLSSPTAAIPISSAADHRTIHSVSSLPVNNNTWQTSLASDPRNKHTDINVNVT

SEQ ID NO: 29848 - protein, 277 aa, Arabidopsis thaliana
  peptide (1)..(277): Ceres Seq. ID no. 12580446
MEGISGGLMKKKRGRPRKYGPDGTVVALSPKPISSAPAPSHLPPPSSHVIDFSASEKRSKVKPTNSFNRTKYHHQVENLGEWAPCSVGGNFTPHIITVNTGEDVTMKIISFSQQGPRSICVLSANGVISSVTLRQPDSSGGTLTYEGRFEILSLSGSFMPNDSGGTRSRTGGMSVSLASPDGRVVGGGLAGLLVAASPVQVVVGSFLAGTDHQDQKPKKNKHDFMLSSPTAAIPISSAADHRTIHSVSSLPVNNNTWQTSLASDPRNKHTDINVNVT

SEQ ID NO: 29849 - DNA, 1543 bp, Arabidopsis thaliana
  misc_feature (1)..(1543): Ceres Seq. ID no. 12579838
  misc_feature (1)..(1543): Ortholog of  Ceres SEQ ID NO 14307678 as cited in SEQ ID NO 59456
  misc_feature (1)..(1543): Ortholog of  Ceres SEQ ID NO 13586716 as cited in SEQ ID NO 0
aggaaaactaaaccaaagtctgtttaccagtaatatcaatcgatcgccattctcgacatttctctctctcaagctagtctaaagtttcttcttatctccttcctccgaccaaaacttcgacttctctcttattttcaccctcagagagtaaccatggatgccttgacctcgagtttggttcgatctcccatcgtaccatcgagaacttccgacaacggttctggatctatgttccttaccgccagtggccctggattcacgcgttctggttcttcaagacttcaacttcgtttaaggcaaaacgcgtctgctagatcctcaagatcattacagagcttaacaacgactgctaaaactcggagaagttttgtggttagagcttcttcagcgtctaatgatgcttcatctggttcttcccccaaaccgatcgctccgctccagctgcaatccctgctggtcagtttctgtctcagattttggtgagccatcctcatcttgtgcctgcagctgttgaacagcagcttgagcagcttcaaactgatcgggactctcagggacagaacaaagattcagcgtctgtacctggaaccgacatcgtcctctacaggagaattgcggagttgaaggaaaacgagagaagaagaacattggaagagattttgtatgcattggtggttcaaaagttcatggaagctaacgtatcacttgtaccttcagtaagcccatcttcagatccgtctggtcgggttgatacttggccgaccaaagtggagaaactcgagcggcttcactcgcccgagatgtacgagatgattcacaaccatcttgccttgattcttggaagcagaatgggtgatctgaactctgttgcacagataagcaagctcagagttggccaagtttacgctgcttctgtgatgtatggatatttcttgaagagggtggaccaaaggtttcagcttgagaagacgatgaagattcttccgggtgggtcggatgaaagtcaaacaagcgttgagcaagccgaggggacggcaacatatcaggcggctgtatcgtctcacccagaggttggtgcatttgcgggcggagttagtgctaagggcttcggcagcgagattaaaccatcccgattaaggtcatatgtgatgtcatttgatgcggagacgctgcagagatacgccactataagatcaagagaagcagttggaatcatcgagaagcacacagaggcattgtttggtaagcctgagattgtaataacaccggagggcacagtcgattcatcgaaggacgaacagataaagatcagcttcggtggaatgaagaggctcgtcttggaggcagttactttcgggtcgttcctttgggatgttgagagccatgtagatgcgaggtaccactttgtattgaactaaaaacatggtctgtaatgcagttgactaacttatgtagcattaagaagatacccattaagggtatcattacacttgtatcaaaaatttgaggaaaagatcgtacattttatatgttattgtgatgg

SEQ ID NO: 29850 - protein, 243 aa, Arabidopsis thaliana
  peptide (1)..(243): Ceres Seq. ID no. 12579839
MEANVSLVPSVSPSSDPSGRVDTWPTKVEKLERLHSPEMYEMIHNHLALILGSRMGDLNSVAQISKLRVGQVYAASVMYGYFLKRVDQRFQLEKTMKILPGGSDESQTSVEQAEGTATYQAAVSSHPEVGAFAGGVSAKGFGSEIKPSRLRSYVMSFDAETLQRYATIRSREAVGIIEKHTEALFGKPEIVITPEGTVDSSKDEQIKISFGGMKRLVLEAVTFGSFLWDVESHVDARYHFVLN

SEQ ID NO: 29851 - protein, 205 aa, Arabidopsis thaliana
  peptide (1)..(205): Ceres Seq. ID no. 12579840
MYEMIHNHLALILGSRMGDLNSVAQISKLRVGQVYAASVMYGYFLKRVDQRFQLEKTMKILPGGSDESQTSVEQAEGTATYQAAVSSHPEVGAFAGGVSAKGFGSEIKPSRLRSYVMSFDAETLQRYATIRSREAVGIIEKHTEALFGKPEIVITPEGTVDSSKDEQIKISFGGMKRLVLEAVTFGSFLWDVESHVDARYHFVLN

SEQ ID NO: 29852 - protein, 202 aa, Arabidopsis thaliana
  peptide (1)..(202): Ceres Seq. ID no. 12579841
MIHNHLALILGSRMGDLNSVAQISKLRVGQVYAASVMYGYFLKRVDQRFQLEKTMKILPGGSDESQTSVEQAEGTATYQAAVSSHPEVGAFAGGVSAKGFGSEIKPSRLRSYVMSFDAETLQRYATIRSREAVGIIEKHTEALFGKPEIVITPEGTVDSSKDEQIKISFGGMKRLVLEAVTFGSFLWDVESHVDARYHFVLN

SEQ ID NO: 29853 - DNA, 1859 bp, Arabidopsis thaliana; identical to SEQ ID NO: 21171
  misc_feature (1)..(1859): Ceres Seq. ID no. 13646168
  misc_feature (1)..(1859): Ortholog of  Ceres SEQ ID NO 15176230 as cited in SEQ ID NO 58796
  misc_feature (1)..(1859): Ortholog of  Ceres SEQ ID NO 14308156 as cited in SEQ ID NO 59006
  misc_feature (1)..(1859): Ortholog of  Ceres SEQ ID NO 15174240 as cited in SEQ ID NO 61866
  misc_feature (1)..(1859): Ortholog of  Ceres SEQ ID NO 13596321 as cited in SEQ ID NO 67976

SEQ ID NO: 29854 - protein, 180 aa, Arabidopsis thaliana; identical to SEQ ID NO: 21172
  peptide (1)..(180): Ceres Seq. ID no. 13646169

SEQ ID NO: 29855 - protein, 168 aa, Arabidopsis thaliana; identical to SEQ ID NO: 21173
  peptide (1)..(168): Ceres Seq. ID no. 13646170

SEQ ID NO: 29856 - protein, 158 aa, Arabidopsis thaliana; identical to SEQ ID NO: 21174
  peptide (1)..(158): Ceres Seq. ID no. 13646171

SEQ ID NO: 29857 - DNA, 1430 bp, Arabidopsis thaliana; identical to SEQ ID NO: 22042
  misc_feature (1)..(1430): Ceres Seq. ID no. 12482890
  misc_feature (1)..(1430): Ortholog of  Ceres SEQ ID NO 14316017 as cited in SEQ ID NO 67028
  misc_feature (1)..(1430): Ortholog of  Ceres SEQ ID NO 15177500 as cited in SEQ ID NO 0

SEQ ID NO: 29858 - protein, 425 aa, Arabidopsis thaliana; identical to SEQ ID NO: 22043
  peptide (1)..(425): Ceres Seq. ID no. 12482891

SEQ ID NO: 29859 - protein, 404 aa, Arabidopsis thaliana; identical to SEQ ID NO: 22044
  peptide (1)..(404): Ceres Seq. ID no. 12482892

SEQ ID NO: 29860 - protein, 315 aa, Arabidopsis thaliana; identical to SEQ ID NO: 22045
  peptide (1)..(315): Ceres Seq. ID no. 12482893

SEQ ID NO: 29861 - DNA, 665 bp, Arabidopsis thaliana
  misc_feature (1)..(665): Ceres Seq. ID no. 13491980
  misc_feature (1)..(665): Ortholog of  Ceres SEQ ID NO 12608953 as cited in SEQ ID NO 51227
  misc_feature (1)..(665): Ortholog of  Ceres SEQ ID NO 12609890 as cited in SEQ ID NO 51792
attattgttatttttgacagagagaaatttctcagttacgcttcatcctcctctaagagatcttttttctatcttgggtagtagagagaaatggcgggtcggggaaaacaacttggatctggtgcagcgaagaagtctacttctcgtagtagcaaggctgggcttcaattccctgttggtcgtatcgctcgatttttgaaagccggtaagtacgccgagcgtgttggtgccggagctccggtctatctcgccgccgttcttgaatacctcgccgctgaggtacttgagcttgctgggaacgcagcgagagacaacaagaagacccgtatagttccacgacacattcagcttgctgtgaggaatgatgaggagctaagcaagttgcttggagatgtgacaattgctaatggaggagtgatgcctaacatccacaatctccttctccccaagaaggctggttcatctaagcctactgaagaagattaggttcattacgaagatagggaaagctggaaactggttgatatcagataatgcttaggattgtttgttttttttgtcatttgcttttcctctgcagcaatggaagctgtgtggttgtactagttgttaaggttacccttgtttcactttatgtgaatatatgaagaaattgttctatttcg

SEQ ID NO: 29862 - protein, 131 aa, Arabidopsis thaliana
  peptide (1)..(131): Ceres Seq. ID no. 13491981
MAGRGKQLGSGAAKKSTSRSSKAGLQFPVGRIARFLKAGKYAERVGAGAPVYLAAVLEYLAAEVLELAGNAARDNKKTRIVPRHIQLAVRNDEELSKLLGDVTIANGGVMPNIHNLLLPKKAGSSKPTEED

SEQ ID NO: 29863 - protein, 65 aa, Arabidopsis thaliana
  peptide (1)..(65): Ceres Seq. ID no. 13491982
LLLFLTERNFSVTLHPPLRDLFSILGSREKWRVGENNLDLVQRRSLLLVVARLGFNSLLVVSLDF

SEQ ID NO: 29864 - DNA, 2799 bp, Arabidopsis thaliana
  misc_feature (1)..(2799): Ceres Seq. ID no. 12329264
  misc_feature (1)..(2799): Ortholog of  Ceres SEQ ID NO 14312844 as cited in SEQ ID NO 55601
  misc_feature (1)..(2799): Ortholog of  Ceres SEQ ID NO 14312866 as cited in SEQ ID NO 55630
  misc_feature (1)..(2799): Ortholog of  Ceres SEQ ID NO 13597376 as cited in SEQ ID NO 64002
  misc_feature (1)..(2799): Ortholog of  Ceres SEQ ID NO 13503573 as cited in SEQ ID NO 65402
  misc_feature (1)..(2799): Ortholog of  Ceres SEQ ID NO 13659615 as cited in SEQ ID NO 67248
ggagatcacaaagcaatctaaaaacatttctcttgatctttttcctttaccaaaaaacaaagatcctttcttctgtttcgtaatgatggctagaaacgttctagtaagcggtggtgctggatacatcggtagtcacacggtgcttcaacttcttctcggtggttactccgtcgtagttgttgataatctcgataattcctccgccgtctctcttcaacgtgtgaagaaactcgcggctgaacacggagaacgcctctccttccaccaggtggatcttcgagacaggtctgctcttgagaagatattctcagaaacaaagtttgatgcagtgatacattttgctggacttaaagcagttggtgagagtgtagagaagcctttgctttattataataataatcttgttggtactattactcttttggaagttatggctcaacatggctgcaaaaatcttgtgttttcatcatcagcaactgtgtatggctctccaaaagaagttccttgtacagaggagtttccaatttctgctttgaacccatatggacgaacaaagctattcattgaggaaatctgccgcgatgtatacggttctgacccggaatggaagattatattgcttaggtatttcaatcctgttggtgcacatcctagtggtgacattggtgaagaccctcgtggtattccaaacaatctcatgccctttgtacaacaagtggctgttggtaggagacctcatctcactgtctttggaaatgattacaatacaaaagatggaacaggggttcgagattacattcatgttattgatttagctgatggacacatagcggctctacgtaagctagaagattgcaagatcggttgtgaagtgtacaatctcggaacaggaaatggaacatcagttcttgaaatggttgatgcttttgaaaaagcatccggaaagaaaatccctctggtgatcgcgggacgtcgaccgggagatgctgaagttgtatacgcctcgacggaaagagcagaaagtgaattgaattggaaggccaaatatgggattgaggagatgtgtagagatttgtggaactgggctagtaataatccttatggatatgattcctcttctgaagacaactctcattaacttttcttaatcgttttcttcttttgctaaaacatatttctccacactaaattattatagtatccgcaagaaaaaacaacaacaataaagagtcagattttagggaaatatagggacattatgtattattattacaatcaatacttagtctgtaattgatttggatatgttcttgtataatcaaaaaagatttgttatgaatagctacaacgcaaatgtttagctctatacggcaaaaagtaccttgaggttgacacgacgtcgttttcagctcggtgatagttgaaatgtatctttctgaagcttttaagttcaagagcccacacacttcttctcattctttataaacataacactggacagtaaccaaacttcagatctgaatcaacctcttaagtggtacagaagaagagaaaggaatgatgattagtgaaagagatgattttagtctcactggaccattacacttaacatctatagattgggctaatgaacatcatcgacgatccgtagctggatctttggttcaaggaatctatgtagctgagcgtgaccgtcagctacaaagagaaggtcctgagttagctttatctccaatatggtctgagtttttccatttccgcctcattcgtaagtttgtcgatgacgcggataactctatcttcggaggaatctatgagtacaaactgccgcaacagctctctcaaaccgtcaaatcaatggaatttagtccacgttttgtgattgctttcagaggaacggttacaaaagtggactccatttcccgtgacatcgagcatgacatccatgttattagaaacgggcttcacacgacaacacggtttgagatagctatccaagcagtgagaaacattgttgcttcggttggtggttctagtgtttggcttgctggtcattctcttggtgcatctatggcattacttaccgggaaaaccatcgctagaaccgggttttttcctgagtgtttcgcattcaatccgccgtttttgtctgcccctatcgaaaaaattaaggataagaggattaaacatgggatacgcattgcaggcagtgtgatcacagctggacttgctctagccaaaaaagccacccaacactacagccaaaacgaccgtgcattacccgcacctcctgatccatttgaagctttatccgactggttcccgcggctgtatgtcaaccctggtgaccacttatgctcagagtatgttggttactttgagcaccgaaacaagatggaagaaatcgggattgggtttgtagagcgggtagcgacgcagcactcgttgggcggtatgctgttaggaggacaagagccggtacatctgattccatcttcggttttgacggtgaacttaagctcctcgagagatttcaaacaagctcatgggattcatcagtggtggagggaagataacaagtttgagactaaagtttaccagtacaaatgatttgtatcagtttttttttaaatggatttaaccggtattaggcttttactttccggtttagacggttcaatgtatcgcaatcataaataagtgtctctctatagtcggtatatataaaccggaaataggcgtctacgttctaatttagccggttcaatgtgttgtaatcttatatatagtctcttgatc

SEQ ID NO: 29865 - protein, 378 aa, Arabidopsis thaliana
  peptide (1)..(378): Ceres Seq. ID no. 12329265
EITKQSKNISLDLFPLPKNKDPFFCFVMMARNVLVSGGAGYIGSHTVLQLLLGGYSVVVVDNLDNSSAVSLQRVKKLAAEHGERLSFHQVDLRDRSALEKIFSETKFDAVIHFAGLKAVGESVEKPLLYYNNNLVGTITLLEVMAQHGCKNLVFSSSATVYGSPKEVPCTEEFPISALNPYGRTKLFIEEICRDVYGSDPEWKIILLRYFNPVGAHPSGDIGEDPRGIPNNLMPFVQQVAVGRRPHLTVFGNDYNTKDGTGVRDYIHVIDLADGHIAALRKLEDCKIGCEVYNLGTGNGTSVLEMVDAFEKASGKKIPLVIAGRRPGDAEVVYASTERAESELNWKAKYGIEEMCRDLWNWASNNPYGYDSSSEDNSH

SEQ ID NO: 29866 - protein, 351 aa, Arabidopsis thaliana
  peptide (1)..(351): Ceres Seq. ID no. 12329266
MMARNVLVSGGAGYIGSHTVLQLLLGGYSVVVVDNLDNSSAVSLQRVKKLAAEHGERLSFHQVDLRDRSALEKIFSETKFDAVIHFAGLKAVGESVEKPLLYYNNNLVGTITLLEVMAQHGCKNLVFSSSATVYGSPKEVPCTEEFPISALNPYGRTKLFIEEICRDVYGSDPEWKIILLRYFNPVGAHPSGDIGEDPRGIPNNLMPFVQQVAVGRRPHLTVFGNDYNTKDGTGVRDYIHVIDLADGHIAALRKLEDCKIGCEVYNLGTGNGTSVLEMVDAFEKASGKKIPLVIAGRRPGDAEVVYASTERAESELNWKAKYGIEEMCRDLWNWASNNPYGYDSSSEDNSH

SEQ ID NO: 29867 - protein, 350 aa, Arabidopsis thaliana
  peptide (1)..(350): Ceres Seq. ID no. 12329267
MARNVLVSGGAGYIGSHTVLQLLLGGYSVVVVDNLDNSSAVSLQRVKKLAAEHGERLSFHQVDLRDRSALEKIFSETKFDAVIHFAGLKAVGESVEKPLLYYNNNLVGTITLLEVMAQHGCKNLVFSSSATVYGSPKEVPCTEEFPISALNPYGRTKLFIEEICRDVYGSDPEWKIILLRYFNPVGAHPSGDIGEDPRGIPNNLMPFVQQVAVGRRPHLTVFGNDYNTKDGTGVRDYIHVIDLADGHIAALRKLEDCKIGCEVYNLGTGNGTSVLEMVDAFEKASGKKIPLVIAGRRPGDAEVVYASTERAESELNWKAKYGIEEMCRDLWNWASNNPYGYDSSSEDNSH

SEQ ID NO: 29868 - DNA, 1144 bp, Arabidopsis thaliana
  misc_feature (1)..(1144): Ceres Seq. ID no. 13490483
  misc_feature (1)..(1144): Ortholog of  Ceres SEQ ID NO 13574576 as cited in SEQ ID NO 47
  misc_feature (1)..(1144): Ortholog of  Ceres SEQ ID NO 13638673 as cited in SEQ ID NO 51830
  misc_feature (1)..(1144): Ortholog of  Ceres SEQ ID NO 13638785 as cited in SEQ ID NO 51967
agctatttggtttctctatccgattcgtctctctcacgccctcacgtttatccacctcatcctcaaaccaaaccacaagacctcttttttaagtaaccaatcacagagagatagagagagagaacagagtcaatgtcaatggcgtctatagcttcttcttcttccaccaccctactctcttcctctagggttcttcttccctccaagtcttctcttttatctcctaccgtctctttccccagaatcataccctcttcctcggcatcatcctcttctctctgttccgggttctccagtctcggttccctcaccaccaaccgctccgcctcacgccggaacttcgccgtcaaggctcaggctgatgatttaccactggtcggtaataaggcgcctgattttgaagctgaggcagtttttgatcaagagttcataaaggtgaagctctctgagtacattggcaaaaagtatgttattctattcttctaccctttggacttcacttttgtctgccccactgagattactgccttcagtgaccgttatgaagaatttgagaagctaaacaccgaagtattaggggtctctgtcgacagtgtgttctcgcatcttgcgtgggtccaaacagacagaaagtcgggagggctcggtgatctgaattatcctcttgtttcggatatcactaaatccatttcaaaatcgtttggagtgctcatccctgatcagggcattgcactgagagggcttttcatcatagacaaggaaggagtcattcagcattccaccatcaacaacctcggtattggccgaagtgttgatgagacaatgagaaccctccaggcattacagtatgttcaagaaaacccggatgaagtgtgccctgcgggatggaagccaggggagaaatcaatgaaacctgaccccaagctcagcaaagaatacttttcagctatctagaggctaagattgaacacatgtttggtgaaaattagcaatcagagttgttttattcgtcttttcaaagttggagcagagttgttatttttagccaaagaacctttgtatctatctcatctttctcctgtttctgctatgtgattctccttaaattgaatcaaaaataaagaaatccttcttttcttttgcc

SEQ ID NO: 29869 - protein, 273 aa, Arabidopsis thaliana
  peptide (1)..(273): Ceres Seq. ID no. 13490484
MSMASIASSSSTTLLSSSRVLLPSKSSLLSPTVSFPRIIPSSSASSSSLCSGFSSLGSLTTNRSASRRNFAVKAQADDLPLVGNKAPDFEAEAVFDQEFIKVKLSEYIGKKYVILFFYPLDFTFVCPTEITAFSDRYEEFEKLNTEVLGVSVDSVFSHLAWVQTDRKSGGLGDLNYPLVSDITKSISKSFGVLIPDQGIALRGLFIIDKEGVIQHSTINNLGIGRSVDETMRTLQALQYVQENPDEVCPAGWKPGEKSMKPDPKLSKEYFSAI

SEQ ID NO: 29870 - protein, 271 aa, Arabidopsis thaliana
  peptide (1)..(271): Ceres Seq. ID no. 13490485
MASIASSSSTTLLSSSRVLLPSKSSLLSPTVSFPRIIPSSSASSSSLCSGFSSLGSLTTNRSASRRNFAVKAQADDLPLVGNKAPDFEAEAVFDQEFIKVKLSEYIGKKYVILFFYPLDFTFVCPTEITAFSDRYEEFEKLNTEVLGVSVDSVFSHLAWVQTDRKSGGLGDLNYPLVSDITKSISKSFGVLIPDQGIALRGLFIIDKEGVIQHSTINNLGIGRSVDETMRTLQALQYVQENPDEVCPAGWKPGEKSMKPDPKLSKEYFSAI

SEQ ID NO: 29871 - DNA, 1235 bp, Arabidopsis thaliana
  misc_feature (1)..(1235): Ceres Seq. ID no. 13490486
  misc_feature (1)..(1235): Ortholog of  Ceres SEQ ID NO 13581947 as cited in SEQ ID NO 51812
gaaaaaaaaaatccaatttagaaaaccgcgcgttggagggaaagccatagaaaactaaaagataacaaacattttaacaaacccaaacccaaaaattctcaaggaggccgaagaagaagaagaagaaatgagcgttaatggtgagaacaaggtctcaggaggagatagttcatcttcagatcgacctgttagagtctacgccgatgggatcttcgatttgttccatttcggccacgctcgtgccatcgaacaagccaaaaaatcgtttccgaatacgtatctgcttgttggatgttgcaatgacgaaattacgaacaaattcaaggggaaaactgtgatgactgaatctgagcgatacgaatctcttcgacattgcaagtgggttgatgaagtgattccagatgcaccatgggttcttacaacagagtttcttgataagcataagatagattacgtagctcacgatgctcttccctatgcggatactagtggagctggaaatgatgtttatgagtttgtaaagtcgattgggaagtttaaggagactaaacgaacagaggggatatcgacatctgatataatcatgagaatagtgaaagattataaccagtatgtgttgcgtaatctggaccgaggttattcaagagaagaactcggtgtcagcttcgttaaggagaagaggcttagagtgaatatgagattgaagaaactacaagagaaagttaaagaacaacaagaaaagatacaaaccgtagcaaaaactgctgggatgcaccatgatgagtggcttgaaaatgctgatcgttgggtggctggatttcttgaaatgtttgaggaaggttgtcataaaatgggaacagccatcagagatgggattcagcaacggctaatgaggcaagaatcggaagagaaccggcgattgcttcaaaatggactgacgatttccaaagacaatgacgatgaacaaatgtctgatgacaacgagtttgcagaagaagactgcgtcaatgtgagcaacaaagggattgaaacagtaaagaaatgagagattttgggtcatggttgaagtatttccagatacagaaccaaaatctactagatttcaccagtaatggtattaggcttgtttattcaactgtacatcaaactctgtttcaaaatctctacttgtgtctaaaactcaaatgcatcagaaatcaaaagcagtcatggatatatctatgatcaaacactcc

SEQ ID NO: 29872 - protein, 305 aa, Arabidopsis thaliana
  peptide (1)..(305): Ceres Seq. ID no. 13490487
MSVNGENKVSGGDSSSSDRPVRVYADGIFDLFHFGHARAIEQAKKSFPNTYLLVGCCNDEITNKFKGKTVMTESERYESLRHCKWVDEVIPDAPWVLTTEFLDKHKIDYVAHDALPYADTSGAGNDVYEFVKSIGKFKETKRTEGISTSDIIMRIVKDYNQYVLRNLDRGYSREELGVSFVKEKRLRVNMRLKKLQEKVKEQQEKIQTVAKTAGMHHDEWLENADRWVAGFLEMFEEGCHKMGTAIRDGIQQRLMRQESEENRRLLQNGLTISKDNDDEQMSDDNEFAEEDCVNVSNKGIETVKK

SEQ ID NO: 29873 - protein, 235 aa, Arabidopsis thaliana
  peptide (1)..(235): Ceres Seq. ID no. 13490488
MTESERYESLRHCKWVDEVIPDAPWVLTTEFLDKHKIDYVAHDALPYADTSGAGNDVYEFVKSIGKFKETKRTEGISTSDIIMRIVKDYNQYVLRNLDRGYSREELGVSFVKEKRLRVNMRLKKLQEKVKEQQEKIQTVAKTAGMHHDEWLENADRWVAGFLEMFEEGCHKMGTAIRDGIQQRLMRQESEENRRLLQNGLTISKDNDDEQMSDDNEFAEEDCVNVSNKGIETVKK

SEQ ID NO: 29874 - protein, 153 aa, Arabidopsis thaliana
  peptide (1)..(153): Ceres Seq. ID no. 13490489
MRIVKDYNQYVLRNLDRGYSREELGVSFVKEKRLRVNMRLKKLQEKVKEQQEKIQTVAKTAGMHHDEWLENADRWVAGFLEMFEEGCHKMGTAIRDGIQQRLMRQESEENRRLLQNGLTISKDNDDEQMSDDNEFAEEDCVNVSNKGIETVKK

SEQ ID NO: 29875 - DNA, 1654 bp, Arabidopsis thaliana
  misc_feature (1)..(1654): Ceres Seq. ID no. 12422368
  misc_feature (1)..(1654): Ortholog of  Ceres SEQ ID NO 12613725 as cited in SEQ ID NO 68196
attatagaatatctaataatgaagaatcggtttcaaaattaataatgactgattataattacattgacaacatgcagggactaataacaattacactcacagcatcgtttcctcaactccacccagcatcatgcaacagccaggacccactcagttgcggcggtccgaataagctccagatcggagttttgctattgggactctgtttcctctccgtagggagtggaggaatacgaccttgtagcatcccttttggggttgatcagtttgaccaacgaactgaggaaggggttaaaggagtggccagtttcttcaactggtattacatgactttcactgtggttctgatcattacgcagaccgtagttgtgtatatccaggatcaagtcagttggattatcggttttagtatccctaccggactcatggctcttgcggttgttatgttttttgccggaatgaagcgttatgtctacgttaaaccagaaggaagtatattctctgggatcgctcaagttatcgtggcagctcgtaagaagcgaaagctgaaacttccggcggaagatgacggcactgtcacctattacgacccagccatcaagtctagcgtgttatccaagttacaccgcagtaaccaattcaggtgtcttgacaaagccgcggtggttatagaaggtgacctaacacccgagggacctcccgcagacaagtggcggttatgcagcgtccaagaagtggaagaagtgaagtgtttgatccgaattgttcctatctggtcggccggaataatctcactcgcggccatgacaacacaaggcactttcacggtctctcaagctttgaaaatggatcgaaacttaggtcctaaattcgagattccggctggttcactctccgtcatctctctcctcacaatcggcatctttcttcccttctacgaccgcgtttttgtaccattcatgcggcgaatcaccggccataaatccggaatcacactcctccaaaggataggaacagggatcgttttcacgatcttttctatgatcgttgcgggcattgtggagcgtatgagacgcatacgctccatcaatgccggagatccaacgggaatgactccaatgtcggtgttttggctttcgccgcagctaattctcatgggactatgtgaagcattcaatatcatcggacaaattgagttcttcaacagtcagtttccagagcacatgagaagtatcgctaattctctcttctctttatcgttcgccggttcgagctaccttagtagtttccttgtgactgtcgttcataaattctccggtgggcatgatcgtccggattggctaaacaagaatctcaacgcgggaaaattggattacttctattatctgattgcggttttgggtgtggttaatctggtttacttttggtattgtgctcggggataccggtacaaggtcggtttaccgattgaagactttgaggaggacaagtcctccgatgatgttgagatgacttccaagaaatcgatggaatgatttaatagactatccttagggacaacaagaagattgtcgatgttgtttgaataattactatgacaatgtatgtatcataatatgtaagaactagaatatataataaatttttaccttcc

SEQ ID NO: 29876 - protein, 510 aa, Arabidopsis thaliana
  peptide (1)..(510): Ceres Seq. ID no. 12422369
YRISNNEESVSKLIMTDYNYIDNMQGLITITLTASFPQLHPASCNSQDPLSCGGPNKLQIGVLLLGLCFLSVGSGGIRPCSIPFGVDQFDQRTEEGVKGVASFFNWYYMTFTVVLIITQTVVVYIQDQVSWIIGFSIPTGLMALAVVMFFAGMKRYVYVKPEGSIFSGIAQVIVAARKKRKLKLPAEDDGTVTYYDPAIKSSVLSKLHRSNQFRCLDKAAVVIEGDLTPEGPPADKWRLCSVQEVEEVKCLIRIVPIWSAGIISLAAMTTQGTFTVSQALKMDRNLGPKFEIPAGSLSVISLLTIGIFLPFYDRVFVPFMRRITGHKSGITLLQRIGTGIVFTIFSMIVAGIVERMRRIRSINAGDPTGMTPMSVFWLSPQLILMGLCEAFNIIGQIEFFNSQFPEHMRSIANSLFSLSFAGSSYLSSFLVTVVHKFSGGHDRPDWLNKNLNAGKLDYFYYLIAVLGVVNLVYFWYCARGYRYKVGLPIEDFEEDKSSDDVEMTSKKSME

SEQ ID NO: 29877 - protein, 496 aa, Arabidopsis thaliana
  peptide (1)..(496): Ceres Seq. ID no. 12422370
MTDYNYIDNMQGLITITLTASFPQLHPASCNSQDPLSCGGPNKLQIGVLLLGLCFLSVGSGGIRPCSIPFGVDQFDQRTEEGVKGVASFFNWYYMTFTVVLIITQTVVVYIQDQVSWIIGFSIPTGLMALAVVMFFAGMKRYVYVKPEGSIFSGIAQVIVAARKKRKLKLPAEDDGTVTYYDPAIKSSVLSKLHRSNQFRCLDKAAVVIEGDLTPEGPPADKWRLCSVQEVEEVKCLIRIVPIWSAGIISLAAMTTQGTFTVSQALKMDRNLGPKFEIPAGSLSVISLLTIGIFLPFYDRVFVPFMRRITGHKSGITLLQRIGTGIVFTIFSMIVAGIVERMRRIRSINAGDPTGMTPMSVFWLSPQLILMGLCEAFNIIGQIEFFNSQFPEHMRSIANSLFSLSFAGSSYLSSFLVTVVHKFSGGHDRPDWLNKNLNAGKLDYFYYLIAVLGVVNLVYFWYCARGYRYKVGLPIEDFEEDKSSDDVEMTSKKSME

SEQ ID NO: 29878 - protein, 487 aa, Arabidopsis thaliana
  peptide (1)..(487): Ceres Seq. ID no. 12422371
MQGLITITLTASFPQLHPASCNSQDPLSCGGPNKLQIGVLLLGLCFLSVGSGGIRPCSIPFGVDQFDQRTEEGVKGVASFFNWYYMTFTVVLIITQTVVVYIQDQVSWIIGFSIPTGLMALAVVMFFAGMKRYVYVKPEGSIFSGIAQVIVAARKKRKLKLPAEDDGTVTYYDPAIKSSVLSKLHRSNQFRCLDKAAVVIEGDLTPEGPPADKWRLCSVQEVEEVKCLIRIVPIWSAGIISLAAMTTQGTFTVSQALKMDRNLGPKFEIPAGSLSVISLLTIGIFLPFYDRVFVPFMRRITGHKSGITLLQRIGTGIVFTIFSMIVAGIVERMRRIRSINAGDPTGMTPMSVFWLSPQLILMGLCEAFNIIGQIEFFNSQFPEHMRSIANSLFSLSFAGSSYLSSFLVTVVHKFSGGHDRPDWLNKNLNAGKLDYFYYLIAVLGVVNLVYFWYCARGYRYKVGLPIEDFEEDKSSDDVEMTSKKSME

SEQ ID NO: 29879 - DNA, 842 bp, Arabidopsis thaliana
  misc_feature (1)..(842): Ceres Seq. ID no. 12322334
  misc_feature (1)..(842): Ortholog of  Ceres SEQ ID NO 13656436 as cited in SEQ ID NO 69154
ctacgattagtttaatctctcagtccaccggagagtgtaaaaacagcgagaaaatcgacgtcgttcgatcgccgactgcgagcgaagaagaagatggctgaagaagaagttgactacgtattcaaggttgttttgaacggagattcagcggttgggaagtcacagctacgggctcggttcacaagagacgaattcagtatggattccaaagccacaattcggtgtcgatttcaatactcgaacgctcgttattgacgataagaacatcaaagctcagatctgggacatcgcaggccagaaacgacacagagctattacataagcctactacaaaggtgctgttggtgcaatgttagtttacgatatgacaatacgtgaaagctttgagcacattcctcagtggttggaagaactacgagtgcacgcggataagaacattgtcatcatcttgattggtaacaagacggatttagagaaccagagatcggttcctgtggaagatgccaaggaatttgcagagaaggaagggctttttttccttgagacttcagcactaaactccacaaatgtcgagaactctttcaacactctcttgactgagatcttcaacaaggtgaacaagaagaatctcgctaagaccaccgtgtcttgcagctcacaagtcagtcttctaagaccaccgtgtgttgcagctcaataagtcagtcttctcgatttggtccattacagtttagaatgaaataaaccatttcatatacttcaaaaatattgtttatatttggtttttagatagtgagttttgtgtagtgtacgttgatttttagaacaaaatctttcatttt

SEQ ID NO: 29880 - protein, 116 aa, Arabidopsis thaliana
  peptide (1)..(116): Ceres Seq. ID no. 12322335
MLVYDMTIRESFEHIPQWLEELRVHADKNIVIILIGNKTDLENQRSVPVEDAKEFAEKEGLFFLETSALNSTNVENSFNTLLTEIFNKVNKKNLAKTTVSCSSQVSLLRPPCVAAQ

SEQ ID NO: 29881 - protein, 111 aa, Arabidopsis thaliana
  peptide (1)..(111): Ceres Seq. ID no. 12322336
MTIRESFEHIPQWLEELRVHADKNIVIILIGNKTDLENQRSVPVEDAKEFAEKEGLFFLETSALNSTNVENSFNTLLTEIFNKVNKKNLAKTTVSCSSQVSLLRPPCVAAQ

SEQ ID NO: 29882 - DNA, 1119 bp, Arabidopsis thaliana
  misc_feature (1)..(1119): Ceres Seq. ID no. 13487755
  misc_feature (1)..(1119): Ortholog of  Ceres SEQ ID NO 13593932 as cited in SEQ ID NO 54078
  misc_feature (1)..(1119): Ortholog of  Ceres SEQ ID NO 12635231 as cited in SEQ ID NO 0
tgaagactgagaagcagagaaccgaaagaagaaaacaaaactctcgaagtcgcaacagaaaagaaacgagagagatatggtggtaggcggcggaggagaaggagatcagaagagaagcagcggagaaatgatggcgatggcgagtttattcaacgatcagcagaatccaattcaacagtttcaggttaaattcaaagaagtagaaactaatttcaagacatggttgtcgaaacagtcgattccggtggaagccgccgtcgtatccaccatgagcggtgtacaaggagctttcattggtggtctcatgggaacactctctcctgaaatgcctcaagccggcgttgaccctcaagccatagcttcgatgaaacaagctcaggctcttgtgggtggtccttgggtccaagctcggaattttgctgcaattactggtgtgaatgctggaattgcttctgttatgaagcggattagaggcaaagaggatattgaatctgcagtggtggcagcgttaggatctggatttgcatactcattggtgagccaaggattgcaaggacaacctatgaatgcaatcactactgctgctggttttgctgtttttcaaggagtgttttttaaattgggagaaagattctctaaaccgagtactgaagatccatttttcacaagaggaaggacaatgctagtgaagctaggtttggagaaatacgagaagaacttcaagaaaggacttttaactgatcccacattgccattgctcactgatagcgcgctgaaagatgcgaacatcccaccagggccaagacttatgatactagatcatatccagagggacccggagataaagggcaaacgaaagtaggagccatgttgtttaatcaaatatgttttgatggtaacgatcttcaaacacatatgtaatgccttttacttttagctgctattgccatgaagagctcttgttagatacttctgtttctattaccaatgtttgattatctttaaaaaaattgagtagttcgtctcaaatcaaattggatataggttctgaataaaacgaaaatgaaatatgctttgtatgagaataagatgtttatattatgtatagttgattgactc

SEQ ID NO: 29883 - protein, 261 aa, Arabidopsis thaliana
  peptide (1)..(261): Ceres Seq. ID no. 13487756
MVVGGGGEGDQKRSSGEMMAMASLFNDQQNPIQQFQVKFKEVETNFKTWLSKQSIPVEAAVVSTMSGVQGAFIGGLMGTLSPEMPQAGVDPQAIASMKQAQALVGGPWVQARNFAAITGVNAGIASVMKRIRGKEDIESAVVAALGSGFAYSLVSQGLQGQPMNAITTAAGFAVFQGVFFKLGERFSKPSTEDPFFTRGRTMLVKLGLEKYEKNFKKGLLTDPTLPLLTDSALKDANIPPGPRLMILDHIQRDPEIKGKRK

SEQ ID NO: 29884 - protein, 244 aa, Arabidopsis thaliana
  peptide (1)..(244): Ceres Seq. ID no. 13487757
MMAMASLFNDQQNPIQQFQVKFKEVETNFKTWLSKQSIPVEAAVVSTMSGVQGAFIGGLMGTLSPEMPQAGVDPQAIASMKQAQALVGGPWVQARNFAAITGVNAGIASVMKRIRGKEDIESAVVAALGSGFAYSLVSQGLQGQPMNAITTAAGFAVFQGVFFKLGERFSKPSTEDPFFTRGRTMLVKLGLEKYEKNFKKGLLTDPTLPLLTDSALKDANIPPGPRLMILDHIQRDPEIKGKRK

SEQ ID NO: 29885 - protein, 243 aa, Arabidopsis thaliana
  peptide (1)..(243): Ceres Seq. ID no. 13487758
MAMASLFNDQQNPIQQFQVKFKEVETNFKTWLSKQSIPVEAAVVSTMSGVQGAFIGGLMGTLSPEMPQAGVDPQAIASMKQAQALVGGPWVQARNFAAITGVNAGIASVMKRIRGKEDIESAVVAALGSGFAYSLVSQGLQGQPMNAITTAAGFAVFQGVFFKLGERFSKPSTEDPFFTRGRTMLVKLGLEKYEKNFKKGLLTDPTLPLLTDSALKDANIPPGPRLMILDHIQRDPEIKGKRK

SEQ ID NO: 29886 - DNA, 1277 bp, Arabidopsis thaliana
  misc_feature (1)..(1277): Ceres Seq. ID no. 12370517
  misc_feature (1)..(1277): Ortholog of  Ceres SEQ ID NO 15169053 as cited in SEQ ID NO 53926
aaaagctgaaacaagagttcgagaaaaatttcgattctcttgctcgtaaaagcttcttttgattctctttgactctgttttgtggatagctcctgaagaagaagaagatgatggtagtgaacagctttgatctatggcaaaaagatgttttcttctctgcagctgaagagaatggagtctgcttatagattgtggattagagagaagaaagatgagatttgtaaggaacttcaagcagctttaggtacagctaaatggcagttggaggagtttgagaaggcagtgagattgagtcataaacggtgtggggatgatgattcttcatccacacggcataaacagtttgttaccgctattgaaaaccagattcatcgcgtagaaacttctctggcaagaagcttatagtgaaaatgggaaaaagcctctccgttgggttgatcttaatgaagaagagcgtgatgacttagcaatgtttctctctggatcttctcgaacttcacagagttttagtggtgagagcagcatcaagtcgagagagtctactaatagttctctagttgaaaacgttatggaagtttcagctaaagtaacattcaagaaagctaaagtttatggtgatggctctgagtgtgtcatagacattgaagaaagagtgacacctggccaagcagagaaatcagttgggctgagaagaatatggagttcaccaaatttcaattctttgagaattatagttcctggtggtgataatgaagaagaaaaggagacattggtggcacaaatagaagcgacgcctaaagttaaaggaactaagtctgtattgtggatgcagagacttcctgatcataatcagctctttgacaagaccggttgctttcaaaatccgatacgcttaccgtttaatcacccgatcaagtttattgtttccttaatgctaatggtgtttctactattacccttcgtagtgtatttgtcttgagaattttaccacggttcgaaactgtcaagaagctgctaaagagatcagctttcgcgtctaatggttaggattcataatcccacaagaacaaacagagattaaaaagctttacatatgttacttttaacttgttgctttggttcttcagggaacgtatagaaacattgaaacttgtaagattaagtaaagggattagagtttatattacggctttggctgccgttgataaagatggaaatgcaatattcgtttcgtagatgtttgacaatacaatgccataagaatcaagatttatgcc

SEQ ID NO: 29887 - protein, 169 aa, Arabidopsis thaliana
  peptide (1)..(169): Ceres Seq. ID no. 12370518
MFLSGSSRTSQSFSGESSIKSRESTNSSLVENVMEVSAKVTFKKAKVYGDGSECVIDIEERVTPGQAEKSVGLRRIWSSPNFNSLRIIVPGGDNEEEKETLVAQIEATPKVKGTKSVLWMQRLPDHNQLFDKTGCFQNPIRLPFNHPIKFIVSLMLMVFLLLPFVVYLS

SEQ ID NO: 29888 - protein, 136 aa, Arabidopsis thaliana
  peptide (1)..(136): Ceres Seq. ID no. 12370519
MEVSAKVTFKKAKVYGDGSECVIDIEERVTPGQAEKSVGLRRIWSSPNFNSLRIIVPGGDNEEEKETLVAQIEATPKVKGTKSVLWMQRLPDHNQLFDKTGCFQNPIRLPFNHPIKFIVSLMLMVFLLLPFVVYLS

SEQ ID NO: 29889 - protein, 86 aa, Arabidopsis thaliana
  peptide (1)..(86): Ceres Seq. ID no. 12370520
MFSSLQLKRMESAYRLWIREKKDEICKELQAALGTAKWQLEEFEKAVRLSHKRCGDDDSSSTRHKQFVTAIENQIHRVETSLARSL

SEQ ID NO: 29890 - DNA, 1647 bp, Arabidopsis thaliana
  misc_feature (1)..(1647): Ceres Seq. ID no. 13492901
  misc_feature (1)..(1647): Ortholog of  Ceres SEQ ID NO 13660024 as cited in SEQ ID NO 67241
aattctacaaagaaaaagcctcctttttgttgccctgtgtcaaaaaagaaacctttttggtgggatttggtttcgctttcttgggggccaaaaagaggagatgatgaatccgaataagcagcaaagaagaaacctttacttcttcttcgtcttcgtcttctatgtcttcatcctctgtgctcgctttcaaacctctgaagctactaaagactcgtcggctcaagtgaagttacagaatcgtcgacttagctccaccgtcgtgtttcctgtctccgggaatgtgtatcctcttgggtactattatgtgttgcttaacattggcaacccacctaagctctttgacttggacattgacactggcagtgacctcacttgggttcagtgtgatgcaccttgcaacggttgcacaaagcctcgtgctaagcagtacaagcccaatcacaacactttgccttgttcacacatcttgtgttctggtcttgaccttccccaggacagaccttgtgctgaccctgaggatcaatgtgactatgaaatcggatactccgatcatgcatcatctattggtgcacttgtaactgatgaggttcctctaaaactcgcaaatggctccattatgaatcttcgtttgacatttggatgtgggtatgatcagcagaatcctggtccacatcctcctcctccaacagcgggaatacttggccttggaagagggaaagtaggcctctcaactcagctaaagtccttggggataacgaagaatgtgattgtgcattgcttaagtcatactggtaaaggctttctctctattggagatgagcttgttccttcttctggagttacatggacttcattggctactaattcacctagtaaaaactacatggctggaccagcagagcttctctttaacgacaagaccacaggtgtcaaaggcattaacgtagttttcgatagtggaagctcgtacacttacttcaatgcagaagcataccaagctattctcgatcttataagaaaagacttgaatgggaagcctttgacggacacaaaagatgataaaagcttaccagtctgctggaaaggcaaaaaacctttgaaatcacttgatgaggttaagaaatacttcaagacgattactttacgatttgggaatcaaaagaatggtcagctatttcaggttccacctgagtcgtatctcataatcaccgaaaaaggaagagtatgtttgggtattctgaatggaactgaaatcggtctcgagggctacaatatcattggagacatatctttccaagggataatggtgatctatgacaatgagaagcagaggattggatggatttcttcagactgtgacaaacttcccaatgtgaatcacgactatggaggagatctgtcggaggaagcttatccaataggatttggtttgataaaagagcttttctcaggaagtgattcttcaaagaacaagaacttggtctcagatggagagctttgacacaagagaagagtcttttttaaagtggtgtagtaaaaagattttgaggtttttggtttttggttttgttgttatcatagaaacaaggaaaatattttgtgaatatatatatcatcatataatagcaaaatgcaacagagtttaag

SEQ ID NO: 29891 - protein, 499 aa, Arabidopsis thaliana
  peptide (1)..(499): Ceres Seq. ID no. 13492902
ILQRKSLLFVALCQKRNLFGGIWFRFLGGQKEEMMNPNKQQRRNLYFFFVFVFYVFILCARFQTSEATKDSSAQVKLQNRRLSSTVVFPVSGNVYPLGYYYVLLNIGNPPKLFDLDIDTGSDLTWVQCDAPCNGCTKPRAKQYKPNHNTLPCSHILCSGLDLPQDRPCADPEDQCDYEIGYSDHASSIGALVTDEVPLKLANGSIMNLRLTFGCGYDQQNPGPHPPPPTAGILGLGRGKVGLSTQLKSLGITKNVIVHCLSHTGKGFLSIGDELVPSSGVTWTSLATNSPSKNYMAGPAELLFNDKTTGVKGINVVFDSGSSYTYFNAEAYQAILDLIRKDLNGKPLTDTKDDKSLPVCWKGKKPLKSLDEVKKYFKTITLRFGNQKNGQLFQVPPESYLIITEKGRVCLGILNGTEIGLEGYNIIGDISFQGIMVIYDNEKQRIGWISSDCDKLPNVNHDYGGDLSEEAYPIGFGLIKELFSGSDSSKNKNLVSDGEL

SEQ ID NO: 29892 - protein, 466 aa, Arabidopsis thaliana
  peptide (1)..(466): Ceres Seq. ID no. 13492903
MMNPNKQQRRNLYFFFVFVFYVFILCARFQTSEATKDSSAQVKLQNRRLSSTVVFPVSGNVYPLGYYYVLLNIGNPPKLFDLDIDTGSDLTWVQCDAPCNGCTKPRAKQYKPNHNTLPCSHILCSGLDLPQDRPCADPEDQCDYEIGYSDHASSIGALVTDEVPLKLANGSIMNLRLTFGCGYDQQNPGPHPPPPTAGILGLGRGKVGLSTQLKSLGITKNVIVHCLSHTGKGFLSIGDELVPSSGVTWTSLATNSPSKNYMAGPAELLFNDKTTGVKGINVVFDSGSSYTYFNAEAYQAILDLIRKDLNGKPLTDTKDDKSLPVCWKGKKPLKSLDEVKKYFKTITLRFGNQKNGQLFQVPPESYLIITEKGRVCLGILNGTEIGLEGYNIIGDISFQGIMVIYDNEKQRIGWISSDCDKLPNVNHDYGGDLSEEAYPIGFGLIKELFSGSDSSKNKNLVSDGEL

SEQ ID NO: 29893 - protein, 465 aa, Arabidopsis thaliana
  peptide (1)..(465): Ceres Seq. ID no. 13492904
MNPNKQQRRNLYFFFVFVFYVFILCARFQTSEATKDSSAQVKLQNRRLSSTVVFPVSGNVYPLGYYYVLLNIGNPPKLFDLDIDTGSDLTWVQCDAPCNGCTKPRAKQYKPNHNTLPCSHILCSGLDLPQDRPCADPEDQCDYEIGYSDHASSIGALVTDEVPLKLANGSIMNLRLTFGCGYDQQNPGPHPPPPTAGILGLGRGKVGLSTQLKSLGITKNVIVHCLSHTGKGFLSIGDELVPSSGVTWTSLATNSPSKNYMAGPAELLFNDKTTGVKGINVVFDSGSSYTYFNAEAYQAILDLIRKDLNGKPLTDTKDDKSLPVCWKGKKPLKSLDEVKKYFKTITLRFGNQKNGQLFQVPPESYLIITEKGRVCLGILNGTEIGLEGYNIIGDISFQGIMVIYDNEKQRIGWISSDCDKLPNVNHDYGGDLSEEAYPIGFGLIKELFSGSDSSKNKNLVSDGEL

SEQ ID NO: 29894 - DNA, 1232 bp, Arabidopsis thaliana
  misc_feature (1)..(1232): Ceres Seq. ID no. 13490604
  misc_feature (1)..(1232): Ortholog of  Ceres SEQ ID NO 15225069 as cited in SEQ ID NO 68012
  misc_feature (1)..(1232): Ortholog of  Ceres SEQ ID NO 15179217 as cited in SEQ ID NO 0
aattccccaatttctccaatctgagaaaatagggtttccgatttggatccttaattcagacacctgactcgtcttctcatcctacccccaattcaatattcgtcgccaatatgccgcaaagacactcgaagaacaacaatgatcttgcgtatttcacttacgacgagaagaagaagttaggttatggaactcagagagagagattggggagagactcgatcaaaccctttgatgcttgttctctctgcttgaagcctttcattgatccgatgtgttgccataagggtcatgtcttttgcagagagtgtatgcttgaatgtttccttgctcagaagaaagatatccaaaggaggcttgctgcacattcgtctcaaaagaagcaagataaggatgaagaagaagagaggctaatgttacaaaaggcgagagagctcgacgaatttgatcagcaaaaccatagtgcaatgcctcgaaacagtgacaagaatcacgacgaagataagaatggttttcatggggcaaacagtgtgaagacgacttcctttgaagaagaagcgcttaggacaatgaaagccttctggctcccatcagctacaccagcagcttcggtcagagtagatgctccagaaactcacacagtctgtccagagggcaaagagaagctcaagcttaagaacctctttgcaattcgtttcacagaagacaacagcgaagaggaagagaccaagacaaaatcagcatcttcaagctcttatgataaatcctacatctgcccgagctgcaaagtcactctcaccaacacaatgtccctcgtggcacttagctcatgcggacatgttttctgcaagaagtgtgctgagaagtttatgcccgtcgacaaagtctgtcttgtgtgtgacaaaccttgcaaggataggaacttggttgggttaaagaaagtaggcacgggtttcgctgagcacgacgatcatcttgaggctaaggagtacaagcatttgggtagtggatctggtttggggcttgtgaggccggttaagacatgatgtaaccacatcaaatgttctgttccagttacagaaaatatccttgattttgtaatacttatggcttgtatcctttgctacaactaagagacgctgctttctccattttggctcttggtttgtccttttgatcggatcctatttgtgtttcttccctacggagatcaaatggaaatttaacatttaagt

SEQ ID NO: 29895 - protein, 310 aa, Arabidopsis thaliana
  peptide (1)..(310): Ceres Seq. ID no. 13490605
MPQRHSKNNNDLAYFTYDEKKKLGYGTQRERLGRDSIKPFDACSLCLKPFIDPMCCHKGHVFCRECMLECFLAQKKDIQRRLAAHSSQKKQDKDEEEERLMLQKARELDEFDQQNHSAMPRNSDKNHDEDKNGFHGANSVKTTSFEEEALRTMKAFWLPSATPAASVRVDAPETHTVCPEGKEKLKLKNLFAIRFTEDNSEEEETKTKSASSSSYDKSYICPSCKVTLTNTMSLVALSSCGHVFCKKCAEKFMPVDKVCLVCDKPCKDRNLVGLKKVGTGFAEHDDHLEAKEYKHLGSGSGLGLVRPVKT

SEQ ID NO: 29896 - protein, 257 aa, Arabidopsis thaliana
  peptide (1)..(257): Ceres Seq. ID no. 13490606
MCCHKGHVFCRECMLECFLAQKKDIQRRLAAHSSQKKQDKDEEEERLMLQKARELDEFDQQNHSAMPRNSDKNHDEDKNGFHGANSVKTTSFEEEALRTMKAFWLPSATPAASVRVDAPETHTVCPEGKEKLKLKNLFAIRFTEDNSEEEETKTKSASSSSYDKSYICPSCKVTLTNTMSLVALSSCGHVFCKKCAEKFMPVDKVCLVCDKPCKDRNLVGLKKVGTGFAEHDDHLEAKEYKHLGSGSGLGLVRPVKT

SEQ ID NO: 29897 - protein, 244 aa, Arabidopsis thaliana
  peptide (1)..(244): Ceres Seq. ID no. 13490607
MLECFLAQKKDIQRRLAAHSSQKKQDKDEEEERLMLQKARELDEFDQQNHSAMPRNSDKNHDEDKNGFHGANSVKTTSFEEEALRTMKAFWLPSATPAASVRVDAPETHTVCPEGKEKLKLKNLFAIRFTEDNSEEEETKTKSASSSSYDKSYICPSCKVTLTNTMSLVALSSCGHVFCKKCAEKFMPVDKVCLVCDKPCKDRNLVGLKKVGTGFAEHDDHLEAKEYKHLGSGSGLGLVRPVKT

SEQ ID NO: 29898 - DNA, 1821 bp, Arabidopsis thaliana
  misc_feature (1)..(1821): Ceres Seq. ID no. 13490490
  misc_feature (1)..(1821): Ortholog of  Ceres SEQ ID NO 13597407 as cited in SEQ ID NO 64106
gaaaaaaagattggggaagctgacctctgcctttcctcctccattaatcaaggaatataaatcagctttaaactcagtcctcttatggaagacaaaaaagcaaatatttattcgtaaatataacttcagaaccctttcaacaaaactctctctgttctttctccgtggagaagttaaagatgacgatgtcggagaactcaagaaacttggaagctggtttgctactgaggaagaaccaaaacgacatcaacgaatgtcgtatcactgctgttgtacttttcagtactttcgtttctgtttgtggctctttctgcttcggttgtgcggcaggttattcatcagttgctcaaacagggatcataaatgatttaggtctctctgttgcacaatactccatgtttggttcaatcatgacttttggaggaatgattggtgccatcttcagcgggaaagttgcagatctcatgggtcgaaaagggactatgtggtttgctcaaattttctgcatcttcggttgggttgcagtagcattagcaaaagactccatgtggcttgatattggaagactatccacaggatttgcagttggtttattaagctatgtgataccagtttacattgcagaaataacaccaaaacatgttcgaggagcgtttgtatttgctaatcagctgatgcagagttgtggattgtctttattctacgtcattggaaattttgttcattggcgtaacttggccttaatcggtctcattccatgtgcgttgcaagttgtgactttgttctttattccagagtcccctagactactgggaaaatggggacatgaaaaagaatgtagagcttcattgcaaagtcttcgcggagatgatgcagatatctctgaagaagccaacactatcaaagaaaccatgatcttgtttgatgaaggaccaaaatcgcgggttatggatttgtttcagagaagatatgctccatctgttgttattggtgtgggactaatgcttctacaacaactctctggaagctcaggacttatgtactatgtcggtagcgtatttgataaaggagggtttccaagcagcattggctcaatgattcttgcagtgatcatgataccaaaagctctattgggtctgattttggttgagaaaatgggacgaagaccacttctattggcctctaccggtggaatgtgctttttcagcttgctcctcagtttttccttctgctttcggtcatatggcatgcttgatgagctcactccgattttcacatgtatcggtgtagtgggtttcatctcttcatttgccgtaggcatgggaggcttaccatggatcatcatgtctgagatattcccaatgaatgttaaagtttctgctgggactctggttaccttagccaactggtcctttggttggattgttgctttcgcctacaacttcatgctagagtggaacgcatcaggaacgttcttgatcttctttactatatgtggtgcgggtatagtctttatttatgcgatggtacccgaaactaaaggaagaacattggaagatatacaagcttctcttacagattttctacaatgagatcaagtttgacttgtttaaagttattcattttttcttagattacaattggggggaggtttatagttttttgttgtaattgttacctcatttgatgtgcaattgagaaagagatcacttgaacataaggtttagatatctctctgtctcagtaaattagcccaatgtatgtatagtatagtcccagttttacacccaaaaaaaagaaatataaaattgaactttaagg

SEQ ID NO: 29899 - protein, 470 aa, Arabidopsis thaliana
  peptide (1)..(470): Ceres Seq. ID no. 13490491
MTMSENSRNLEAGLLLRKNQNDINECRITAVVLFSTFVSVCGSFCFGCAAGYSSVAQTGIINDLGLSVAQYSMFGSIMTFGGMIGAIFSGKVADLMGRKGTMWFAQIFCIFGWVAVALAKDSMWLDIGRLSTGFAVGLLSYVIPVYIAEITPKHVRGAFVFANQLMQSCGLSLFYVIGNFVHWRNLALIGLIPCALQVVTLFFIPESPRLLGKWGHEKECRASLQSLRGDDADISEEANTIKETMILFDEGPKSRVMDLFQRRYAPSVVIGVGLMLLQQLSGSSGLMYYVGSVFDKGGFPSSIGSMILAVIMIPKALLGLILVEKMGRRPLLLASTGGMCFFSLLLSFSFCFRSYGMLDELTPIFTCIGVVGFISSFAVGMGGLPWIIMSEIFPMNVKVSAGTLVTLANWSFGWIVAFAYNFMLEWNASGTFLIFFTICGAGIVFIYAMVPETKGRTLEDIQASLTDFLQ

SEQ ID NO: 29900 - protein, 468 aa, Arabidopsis thaliana
  peptide (1)..(468): Ceres Seq. ID no. 13490492
MSENSRNLEAGLLLRKNQNDINECRITAVVLFSTFVSVCGSFCFGCAAGYSSVAQTGIINDLGLSVAQYSMFGSIMTFGGMIGAIFSGKVADLMGRKGTMWFAQIFCIFGWVAVALAKDSMWLDIGRLSTGFAVGLLSYVIPVYIAEITPKHVRGAFVFANQLMQSCGLSLFYVIGNFVHWRNLALIGLIPCALQVVTLFFIPESPRLLGKWGHEKECRASLQSLRGDDADISEEANTIKETMILFDEGPKSRVMDLFQRRYAPSVVIGVGLMLLQQLSGSSGLMYYVGSVFDKGGFPSSIGSMILAVIMIPKALLGLILVEKMGRRPLLLASTGGMCFFSLLLSFSFCFRSYGMLDELTPIFTCIGVVGFISSFAVGMGGLPWIIMSEIFPMNVKVSAGTLVTLANWSFGWIVAFAYNFMLEWNASGTFLIFFTICGAGIVFIYAMVPETKGRTLEDIQASLTDFLQ

SEQ ID NO: 29901 - protein, 398 aa, Arabidopsis thaliana
  peptide (1)..(398): Ceres Seq. ID no. 13490493
MFGSIMTFGGMIGAIFSGKVADLMGRKGTMWFAQIFCIFGWVAVALAKDSMWLDIGRLSTGFAVGLLSYVIPVYIAEITPKHVRGAFVFANQLMQSCGLSLFYVIGNFVHWRNLALIGLIPCALQVVTLFFIPESPRLLGKWGHEKECRASLQSLRGDDADISEEANTIKETMILFDEGPKSRVMDLFQRRYAPSVVIGVGLMLLQQLSGSSGLMYYVGSVFDKGGFPSSIGSMILAVIMIPKALLGLILVEKMGRRPLLLASTGGMCFFSLLLSFSFCFRSYGMLDELTPIFTCIGVVGFISSFAVGMGGLPWIIMSEIFPMNVKVSAGTLVTLANWSFGWIVAFAYNFMLEWNASGTFLIFFTICGAGIVFIYAMVPETKGRTLEDIQASLTDFLQ

SEQ ID NO: 29902 - DNA, 1901 bp, Arabidopsis thaliana
  misc_feature (1)..(1901): Ceres Seq. ID no. 13653850
  misc_feature (1)..(1901): Ortholog of  Ceres SEQ ID NO 15168348 as cited in SEQ ID NO 58074
aaagaaggaagaaaatttgagtgggtgagaattttttacgatagaggaagagacagcatcatctacttgtgttgtctgtgtacatatattacagtaagcgttgcaatataacttcttgaggatcttctcacattaatgggtcaaaccttttgctcttccttttgattaatttagtgtttgacaatctcctcctccttctccttcttcttcaaagttttgtcgcagtatctattgttcttacagagagaaaggaaagctttagtcttttaccagtttgatccaattctgggtttcactgaaaaaaagttgggagtttgattcttctaactgtagaagaaacagagtcaacagaagaaaactaaaaaagttgagatttttctctcacgcgctcaagaacttgagtatgtcttcttctgtagcagtgttatgggttgctacttcttctctaaatccagacccaatgaacaattgtgggttggtaagggttctagaatcttctagactgttctctccttgtcagaatcagagactaaacaaaggtaagaagaagcagataccaacttggagttcttcttttgtaaggaaccgaagtagaagaattggtgttgtgtcttcaagcttagtagcaagtccttctggagagatagctctttcatctgaagagaaggtttacaatgttgtgttgaaacaagctgctttggtgaacaaacagctaaggtcttcttcttatgaccttgatgtgaagaaaccacaagatgttgttcttcctgggagtttgagtttgttggtgggtgaagcttatgatcgatgcggtgaagtttgcgctgaatatgctaagacgttttatcttggaactttgcttatgacacccgaaaggcgaaaggcgatttgggcaatctacgtttggtgtagaagaactgatgaacttgtggatgggccaaatgcttcacatataactcccatggctttagatagatgggaagcaaggttagaagatcttttccgtggtcgtcctttcgatatgcttgatgctgctctcgctgatacagttgctagatacccggtcgatattcagccatttcgagacatgatcgaaggaatgagaatggacttgaagaaatcgagataccagaacttcgatgatctatacctttactgctactacgtcgctggaaccgtcggattgatgagcgttccggttatgggaatcgatcctaagtcgaaagcaacaaccgaaagtgtttacaacgctgccttggcccttggtatagccaatcagcttactaacatactcagagacgtaggcgaagatgcgagaagaggaagggtttatctgcctcaggatgaattggctcaggctggtctttcagatgaagacatattcgccggaaaagtaactgataaatggagaaacttcatgaaaatgcagcttaaacgagcaagaatgttcttcgacgaagctgagaaaggcgtcaccgagctcagtgccgctagcagatggcctgtatgggcttcattgctattgtacaggagaatactggacgagattgaagcgaatgattacaacaattttactaagagagcttatgtggggaaagtcaagaaaattgcagctttgccattggcttatgctaaatcagtactaaagacttcaagttcaagactatcgatatgagagcgagaggaaagtggaacaaaaacaacctaagagcgctttttgtgattaagaaaaaacttaggctcgaatttattatgttaactaatatatacatattaatggggaagcaaattcttataatgttacattatctttctgaatgtaaaaaagtatttttttttttaattttattttagttatagttctcttggcctaatgaggggatatacaatttttggttgat

SEQ ID NO: 29903 - protein, 423 aa, Arabidopsis thaliana
  peptide (1)..(423): Ceres Seq. ID no. 13653851
MSSSVAVLWVATSSLNPDPMNNCGLVRVLESSRLFSPCQNQRLNKGKKKQIPTWSSSFVRNRSRRIGVVSSSLVASPSGEIALSSEEKVYNVVLKQAALVNKQLRSSSYDLDVKKPQDVVLPGSLSLLVGEAYDRCGEVCAEYAKTFYLGTLLMTPERRKAIWAIYVWCRRTDELVDGPNASHITPMALDRWEARLEDLFRGRPFDMLDAALADTVARYPVDIQPFRDMIEGMRMDLKKSRYQNFDDLYLYCYYVAGTVGLMSVPVMGIDPKSKATTESVYNAALALGIANQLTNILRDVGEDARRGRVYLPQDELAQAGLSDEDIFAGKVTDKWRNFMKMQLKRARMFFDEAEKGVTELSAASRWPVWASLLLYRRILDEIEANDYNNFTKRAYVGKVKKIAALPLAYAKSVLKTSSSRLSI

SEQ ID NO: 29904 - protein, 404 aa, Arabidopsis thaliana
  peptide (1)..(404): Ceres Seq. ID no. 13653852
MNNCGLVRVLESSRLFSPCQNQRLNKGKKKQIPTWSSSFVRNRSRRIGVVSSSLVASPSGEIALSSEEKVYNVVLKQAALVNKQLRSSSYDLDVKKPQDVVLPGSLSLLVGEAYDRCGEVCAEYAKTFYLGTLLMTPERRKAIWAIYVWCRRTDELVDGPNASHITPMALDRWEARLEDLFRGRPFDMLDAALADTVARYPVDIQPFRDMIEGMRMDLKKSRYQNFDDLYLYCYYVAGTVGLMSVPVMGIDPKSKATTESVYNAALALGIANQLTNILRDVGEDARRGRVYLPQDELAQAGLSDEDIFAGKVTDKWRNFMKMQLKRARMFFDEAEKGVTELSAASRWPVWASLLLYRRILDEIEANDYNNFTKRAYVGKVKKIAALPLAYAKSVLKTSSSRLSI

SEQ ID NO: 29905 - protein, 270 aa, Arabidopsis thaliana
  peptide (1)..(270): Ceres Seq. ID no. 13653853
MTPERRKAIWAIYVWCRRTDELVDGPNASHITPMALDRWEARLEDLFRGRPFDMLDAALADTVARYPVDIQPFRDMIEGMRMDLKKSRYQNFDDLYLYCYYVAGTVGLMSVPVMGIDPKSKATTESVYNAALALGIANQLTNILRDVGEDARRGRVYLPQDELAQAGLSDEDIFAGKVTDKWRNFMKMQLKRARMFFDEAEKGVTELSAASRWPVWASLLLYRRILDEIEANDYNNFTKRAYVGKVKKIAALPLAYAKSVLKTSSSRLSI

SEQ ID NO: 29906 - DNA, 1303 bp, Arabidopsis thaliana
  misc_feature (1)..(1303): Ceres Seq. ID no. 12334147
  misc_feature (1)..(1303): Ortholog of  Ceres SEQ ID NO 13584646 as cited in SEQ ID NO 60715
attctttgtcgtgttcttttaattaaccttttgcaatttgtcttgtgtttctcacaacacaaaaacttgtaaaagtgttaaaaaatcaagatctgaaaaatcttatcaccgcttctaggtttttcagttttttttcttccttttcctgatctaaattaacttatatttcttagggtttcacttcttgaaacatttaatcagaattaattaacctctctagggctttcatggcgaatccatggtggacaggacaagtgaacctatccggcctcgaaacgacgccgcctggttcctctcagttaaagaaaccagatctccacatctccatgaacatggccatggactcaggtcacaataatcatcaccatcaccaagaagtcgataacaacaacaacgacgacgatagagacaacttgagtggagacgaccacgagccacgtgaaggagccgtagaagcccccacgcgccgtccacgtggacgtcctgctggttccaagaacaaaccaaagccaccgatcttcgtcactcgcgattctccaaatgctctcaagagccatgtcatggagatcgctagtgggactgacgtcatcgaaaccctagctacttttgctaggcggcgtcaacgtggcatctgcatcttgagcggaaatggcacagtggctaacgtcaccctccgtcaaccctcgaccgctgccgttgcggcggctcctggtggtgcggctgttttggctttacaagggaggtttgagattctttctttaaccggttctttcttgccaggaccggctccacctggttccaccggtttaacgatttacttagccggtggtcaaggtcaggttgttggaggaagcgtggtgggcccattgatggcagcaggtccggtgatgctgatcgccgccacgttctctaacgcgacttacgagagattgccattggaggaggaagaggcagcagagagaggcggtggtggaggcagcggaggagtggttccggggcagctcggaggcggaggttcgccactaagcagcggtgctggtggaggcgacggtaaccaaggacttccggtgtataatatgccgggaaatcttgtttctaatggtggcagtggtggaggaggacagatgagcggccaagaagcttatggttgggctcaagctaggtcaggattttaacgtgcgttaaaatggtttttaatttacagaagttaacaataagattataatgatgtttattatgatgttgaaaaccagtcagttgctacttgttactagtgagctatatagtttgtggacattatatt

SEQ ID NO: 29907 - protein, 315 aa, Arabidopsis thaliana
  peptide (1)..(315): Ceres Seq. ID no. 12334148
MANPWWTGQVNLSGLETTPPGSSQLKKPDLHISMNMAMDSGHNNHHHHQEVDNNNNDDDRDNLSGDDHEPREGAVEAPTRRPRGRPAGSKNKPKPPIFVTRDSPNALKSHVMEIASGTDVIETLATFARRRQRGICILSGNGTVANVTLRQPSTAAVAAAPGGAAVLALQGRFEILSLTGSFLPGPAPPGSTGLTIYLAGGQGQVVGGSVVGPLMAAGPVMLIAATFSNATYERLPLEEEEAAERGGGGGSGGVVPGQLGGGGSPLSSGAGGGDGNQGLPVYNMPGNLVSNGGSGGGGQMSGQEAYGWAQARSGF

SEQ ID NO: 29908 - protein, 282 aa, Arabidopsis thaliana
  peptide (1)..(282): Ceres Seq. ID no. 12334149
MNMAMDSGHNNHHHHQEVDNNNNDDDRDNLSGDDHEPREGAVEAPTRRPRGRPAGSKNKPKPPIFVTRDSPNALKSHVMEIASGTDVIETLATFARRRQRGICILSGNGTVANVTLRQPSTAAVAAAPGGAAVLALQGRFEILSLTGSFLPGPAPPGSTGLTIYLAGGQGQVVGGSVVGPLMAAGPVMLIAATFSNATYERLPLEEEEAAERGGGGGSGGVVPGQLGGGGSPLSSGAGGGDGNQGLPVYNMPGNLVSNGGSGGGGQMSGQEAYGWAQARSGF

SEQ ID NO: 29909 - protein, 280 aa, Arabidopsis thaliana
  peptide (1)..(280): Ceres Seq. ID no. 12334150
MAMDSGHNNHHHHQEVDNNNNDDDRDNLSGDDHEPREGAVEAPTRRPRGRPAGSKNKPKPPIFVTRDSPNALKSHVMEIASGTDVIETLATFARRRQRGICILSGNGTVANVTLRQPSTAAVAAAPGGAAVLALQGRFEILSLTGSFLPGPAPPGSTGLTIYLAGGQGQVVGGSVVGPLMAAGPVMLIAATFSNATYERLPLEEEEAAERGGGGGSGGVVPGQLGGGGSPLSSGAGGGDGNQGLPVYNMPGNLVSNGGSGGGGQMSGQEAYGWAQARSGF

SEQ ID NO: 29910 - DNA, 667 bp, Arabidopsis thaliana
  misc_feature (1)..(667): Ceres Seq. ID no. 12389141
  misc_feature (1)..(667): Ortholog of  Ceres SEQ ID NO 12585656 as cited in SEQ ID NO 68874
ctagccgcaaagagagaaagggagggaggagagtgtagcagatcggcgaaaatgacaaccagattcaagaagaacaggaagaagagaggtcacgtcagcgccggacatggacgtatcggtaagcaccgtaagcatcccggaggtcgtggtaacgctggaggtatgcatcaccacaggatcctcttcgacaagtaccatccaggttacttcggtaaagttggtatgaggtatttccacaagctgaggaacaagttcttctgcccaatcgttaacctcgacaagctttggtcactcgtccctgaagatgtgaaggcgaaatcaaccaaggacaatgttccgttgatcgatgtgactcaacatggtttcttcaaggttttgggtaaaggtcatttgcctgagaacaagccgttcgttgtgaaggcgaagcttatttcgaagactgctgagaagaagattaaggaagctggtggtgctgttgtgcttactgcttaagttaggtgaatttatttgcttaactctgtttttgaatcttctatggagttttatcatcttttgttgtcttttggattttggaaagagcgagatctctttaaagttagtagttttatgaaccttttgttggattttgataaatgtttggtattccgaattcagacttataattgcc

SEQ ID NO: 29911 - protein, 163 aa, Arabidopsis thaliana
  peptide (1)..(163): Ceres Seq. ID no. 12389142
LAAKREREGGECSRSAKMTTRFKKNRKKRGHVSAGHGRIGKHRKHPGGRGNAGGMHHHRILFDKYHPGYFGKVGMRYFHKLRNKFFCPIVNLDKLWSLVPEDVKAKSTKDNVPLIDVTQHGFFKVLGKGHLPENKPFVVKAKLISKTAEKKIKEAGGAVVLTA

SEQ ID NO: 29912 - protein, 146 aa, Arabidopsis thaliana [sequence omitted]

SEQ ID NO: 29913 - protein, 109 aa, Arabidopsis thaliana
  peptide (1)..(109): Ceres Seq. ID no. 12389144
MHHHRILFDKYHPGYFGKVGMRYFHKLRNKFFCPIVNLDKLWSLVPEDVKAKSTKDNVPLIDVTQHGFFKVLGKGHLPENKPFVVKAKLISKTAEKKIKEAGGAVVLTA

SEQ ID NO: 29914 - DNA, 969 bp, Arabidopsis thaliana
  misc_feature (1)..(969): Ceres Seq. ID no. 12421076
  misc_feature (1)..(969): Ortholog of  Ceres SEQ ID NO 14314838 as cited in SEQ ID NO 52573
agaagaagaaagaaacaatggagtctcccaaatctaacgtcgacgatggctaccagaacatcttcgtcatgcgtcacggtgatcgaatcgacaatttcaagccactctgggtttcaaccgccgagagaccttgggatccacctctggttcaagacggtatgattcgtgcgtttcgtaccggtcaaaggatccgatctcagatcgggtttccgattcaccgtgtcttcgtctcccctttcctccgatgtctccaaacagcttccgaagtcgtcgcagctctctccgccgtcaatgtcgatcctaacgccatgtcttccaaagacgtcccttccattgataaatctaagctcaaggtttctattgaattaggtttgtgtgagatgttgaactcagtggctataaggcgtgagcttgctcctaaagatgggaaatttgacttcactgtttcagatattgaaactatgtttcctgagggaatggttgatcataatgtggatatggtttataaagagttgcctaaatgggaagagtctgtggaaggttgcagagatcgatatgttaaagttgtaaaggctcttgctgataagtatcctgaagagaacttgctcttagtaacccacggggaaggagttggaactacattttcgacattctataaagatacaacagtgtacgaagtagactactgtgcttatgttgaaatgagaagacaagtctcaagtgaagatgggtctgttaaagctggggactatgaggtggttttgagtcatggtcaagctgggatcaggtttagtcatgatcctgtcagttatgaacctgtcataagccattcacctgtttagtcaaattgtcttcagtgtcctctgtttctgtacttttgattgtatttgaactgcttttgtatgaattatgaaacattgtttcaaagttttcattcaatcgaataagagtccaaagaaaacaaaaaaa

SEQ ID NO: 29915 - protein, 279 aa, Arabidopsis thaliana
  peptide (1)..(279): Ceres Seq. ID no. 12421077
KKKETMESPKSNVDDGYQNIFVMRHGDRIDNFKPLWVSTAERPWDPPLVQDGMIRAFRTGQRIRSQIGFPIHRVFVSPFLRCLQTASEVVAALSAVNVDPNAMSSKDVPSIDKSKLKVSIELGLCEMLNSVAIRRELAPKDGKFDFTVSDIETMFPEGMVDHNVDMVYKELPKWEESVEGCRDRYVKVVKALADKYPEENLLLVTHGEGVGTTFSTFYKDTTVYEVDYCAYVEMRRQVSSEDGSVKAGDYEVVLSHGQAGIRFSHDPVSYEPVISHSPV

SEQ ID NO: 29916 - protein, 274 aa, Arabidopsis thaliana
  peptide (1)..(274): Ceres Seq. ID no. 12421078
MESPKSNVDDGYQNIFVMRHGDRIDNFKPLWVSTAERPWDPPLVQDGMIRAFRTGQRIRSQIGFPIHRVFVSPFLRCLQTASEVVAALSAVNVDPNAMSSKDVPSIDKSKLKVSIELGLCEMLNSVAIRRELAPKDGKFDFTVSDIETMFPEGMVDHNVDMVYKELPKWEESVEGCRDRYVKVVKALADKYPEENLLLVTHGEGVGTTFSTFYKDTTVYEVDYCAYVEMRRQVSSEDGSVKAGDYEVVLSHGQAGIRFSHDPVSYEPVISHSPV

SEQ ID NO: 29917 - protein, 257 aa, Arabidopsis thaliana
  peptide (1)..(257): Ceres Seq. ID no. 12421079
MRHGDRIDNFKPLWVSTAERPWDPPLVQDGMIRAFRTGQRIRSQIGFPIHRVFVSPFLRCLQTASEVVAALSAVNVDPNAMSSKDVPSIDKSKLKVSIELGLCEMLNSVAIRRELAPKDGKFDFTVSDIETMFPEGMVDHNVDMVYKELPKWEESVEGCRDRYVKVVKALADKYPEENLLLVTHGEGVGTTFSTFYKDTTVYEVDYCAYVEMRRQVSSEDGSVKAGDYEVVLSHGQAGIRFSHDPVSYEPVISHSPV

SEQ ID NO: 29918 - DNA, 617 bp, Arabidopsis thaliana
  misc_feature (1)..(617): Ceres Seq. ID no. 12333456
  misc_feature (1)..(617): Ortholog of  Ceres SEQ ID NO 15178860 as cited in SEQ ID NO 0
aaaatcagacaaaagcctcgcatctctctctcttgggatctgaatcttcaaattgaaaacaaaaagatcacaagagaaaaaaccaaaaaaaaatgcctcatggaactcttgaagttgttcttgtcagcgccaaaggtctcgaggacgcagattttctgaatcagaagagcaacgttgcagaaggaatggggacaactccggaatggaatgagacatttatcttcactgtgtctgaaggaactacagagttaaaagcgaaaatcttcgacaaagatgtcggtacagaggatgatgcggttggtgaagcaactattccgttggagccggttttcgtggaaggaagtattccaccaactgcatacaatgtggtgaaagatgaagagtacaaaggagagatttgggtggctctctccttcaagccctcggaaaaccgaagcaggggtatggacgaggagtcctatgggggctggaaaaactctgaagcatcatactaagagaagaaaccattgtgcgtgtcactgtttgatttgagtcttgggaacaaaattttgagttttcatttgaaagcgtattttttgttcagattgtttttaatgatttcataaactcgtgagatt

SEQ ID NO: 29919 - protein, 133 aa, Arabidopsis thaliana
  peptide (1)..(133): Ceres Seq. ID no. 12333457
MPHGTLEVVLVSAKGLEDADFLNQKSNVAEGMGTTPEWNETFIFTVSEGTTELKAKIFDKDVGTEDDAVGEATIPLEPVFVEGSIPPTAYNVVKDEEYKGEIWVALSFKPSENRSRGMDEESYGGWKNSEASY

SEQ ID NO: 29920 - protein, 102 aa, Arabidopsis thaliana
  peptide (1)..(102): Ceres Seq. ID no. 12333458
MGTTPEWNETFIFTVSEGTTELKAKIFDKDVGTEDDAVGEATIPLEPVFVEGSIPPTAYNVVKDEEYKGEIWVALSFKPSENRSRGMDEESYGGWKNSEASY

SEQ ID NO: 29921 - DNA, 1371 bp, Arabidopsis thaliana
  misc_feature (1)..(1371): Ceres Seq. ID no. 13497131
  misc_feature (1)..(1371): Ortholog of  Ceres SEQ ID NO 14315518 as cited in SEQ ID NO 60467
  misc_feature (1)..(1371): Ortholog of  Ceres SEQ ID NO 12585444 as cited in SEQ ID NO 62814
aagctcaaagctcaagccgcttctatctctctacatttctctttctgcaatggcgagattagtgcgtgtggctagatcctcctccctctttggctttggtaaccgtttctactctacttcagccgaagctagccacgcgtcgtcgccttcgccgtttcttcacggcggcggagctagcagggttgctccgaaagatagaaatgttcagtgggtgtttttgggatgtcctggtgttggaaaaggaacttacgctagtagactatcaacccttctcggcgttcctcacatcgccaccggcgatctcgtccgtgaagagcttgcatcttctggacctctctctcaaaagctatcggagattgtaaatcagggaaaattggtttctgatgagatcattgtagacttattgtccaaaagacttgaggctggtgaagctagaggtgaatcagggtttatccttgatggctttcctcgtaccatgagacaagctgaaatactgggagatgtaactgacatcgatttggtggtgaatttgaagcttcctgaggaagttttggttgacaaatgccttggaaggagaacatgtagtcaatgtggcaagggttttaatgtagctcacatcaacttaaagggtgagaatggaagacctggaattagtatggatccacttctccctccacatcaatgtatgtcaaagcttgtcactcgagctgatgatactgaagaggtggtgaaagcaaggcttcgtatatacaatgaaacgagccagcctcttgaagaatactaccgtaccaagggaaagcttatggagtttgacttacctggaggcatcccagagtcatggccaaggctattggaagctttaaggcttgacgattacgaggagaaacagtctgtcgcagcataagttcactatcaaatcccggtatttaaaattctttgcatgtcgaatacatatgcgtaatcaattttgtgttggaaataaaagtaaaaagaaaaccttagattgtttttcacctcaatagaaataatcatacacacttgcgcaaactattatttttccaccagccggggattttggctccatgagagaaatatgatgtatcatgattgtttgagattgctagtgacattacaggaatgtatcaatacttctacaccacttgttatgcattgagtttaatcgttatgctcttgtgatatgttttttttggaaaatgtgatgaatgatgatattgcggctggccgagctggctggttaaagaactcaaccagacagtaaagtaaaacagccgcatagattaaacgggaacttataaccagctcttgactgtcctagcattggcggtgcgggatagaatcgttccttacatc

SEQ ID NO: 29922 - protein, 300 aa, Arabidopsis thaliana
  peptide (1)..(300): Ceres Seq. ID no. 13497132
SSKLKPLLSLYISLSAMARLVRVARSSSLFGFGNRFYSTSAEASHASSPSPFLHGGGASRVAPKDRNVQWVFLGCPGVGKGTYASRLSTLLGVPHIATGDLVREELASSGPLSQKLSEIVNQGKLVSDEIIVDLLSKRLEAGEARGESGFILDGFPRTMRQAEILGDVTDIDLVVNLKLPEEVLVDKCLGRRTCSQCGKGFNVAHINLKGENGRPGISMDPLLPPHQCMSKLVTRADDTEEVVKARLRIYNETSQPLEEYYRTKGKLMEFDLPGGIPESWPRLLEALRLDDYEEKQSVAA

SEQ ID NO: 29923 - protein, 284 aa, Arabidopsis thaliana
  peptide (1)..(284): Ceres Seq. ID no. 13497133
MARLVRVARSSSLFGFGNRFYSTSAEASHASSPSPFLHGGGASRVAPKDRNVQWVFLGCPGVGKGTYASRLSTLLGVPHIATGDLVREELASSGPLSQKLSEIVNQGKLVSDEIIVDLLSKRLEAGEARGESGFILDGFPRTMRQAEILGDVTDIDLVVNLKLPEEVLVDKCLGRRTCSQCGKGFNVAHINLKGENGRPGISMDPLLPPHQCMSKLVTRADDTEEVVKARLRIYNETSQPLEEYYRTKGKLMEFDLPGGIPESWPRLLEALRLDDYEEKQSVAA

SEQ ID NO: 29924 - DNA, 1609 bp, Arabidopsis thaliana
  misc_feature (1)..(1609): Ceres Seq. ID no. 12333595
  misc_feature (1)..(1609): Ortholog of  Ceres SEQ ID NO 15176444 as cited in SEQ ID NO 53249
agccattctcttatttggctcattcgattattataggaggaaaccatggagctaaggaaatctcaagtggccatgcctgttttcttggcaataatgagtctaatggtgagtcaagtggtcttcgccgagaaagattcaggttcaatgtcccctcatgatcgggcattagcagaaatgcaagcccttaaagcttcattggttcggcgaaatctaccggctttggtatctcctcctcctacccctcctcaggccgtacccggtccgcgcgtgtaccaagtgatatcatatggtgccgatcccacagggaaattggatagcacggatgcaatattaaaagctatggaagaagcatttgatggtccaaatcatggagttttgatgcaaggtataaatgatctcggaggagcaagaattgatcttcaaggtcgaagctacttaatcagccgtcctctacggtttccctcagccggcgccggaaatcttcttataagcggaggtacattaagagcatcaaatgatttcccggtcgataggtacttaatcgaactcaaagacgaatcgtcaaagttacaatacatcttcgaatacataactctcagagatcttctcatcgattgcaactaccgcggcggagcaatcgccgtcatcaactctctccggacaagcatagacaactgttacatcacacggttcggagacacgaacgggattcttgtcaaaagtggacacgagacttatatccgaaactcgtttcttggtcaacacataaccgccggtggagacagaggagaaagaagcttttccggcaccgccatcaatttgatgggaaacgataacgccgttactgacaccgttatattctccgccaggatcggagtaatggtatcgggacaagctaacttattgtccggcgtgcattgatataacaaagcaaccggttttggaggaaccgggatttatttgagattacccggtttaactcagaaccggattgtgaattcgtatttggattataccggtatcgtcgcggaagatccggttcagttacagatttcagggacgttttttttgggagatgcgtttattttgttgaaatcgatagccggatatattcgtggggttagtattgttgacaatatgttttccgggtcgggtcatggggtccagattgttcaattggatcagaggaacactgcgtttgatgacgttggccaggtggtcgttgaccgtaacagtgtgaacggaatggtagagaaatcgacggtggctagaggttcggtagatggaaacgggacgtcttggaccgttgattttaacccggttttgttgttcccggatttaatcaaccacgtgcagtacacacttgtggcgagtgaagctggcgtgtttcctctgcacgcgctaaggaacgtttctgataaccgggtggtcgttgagacaaacgctcctgttactgggacagtttatgtaacagtgaatcaaggagtttaatgtcgtgtttttgccgtttaatggttttataattttataaaatgatttatacttgttggtttttatttgtaatttttcctgtaagggggaaatttattttttatacagctaataaatg

SEQ ID NO: 29925 - protein, 291 aa, Arabidopsis thaliana
  peptide (1)..(291): Ceres Seq. ID no. 12333596
MELRKSQVAMPVFLAIMSLMVSQVVFAEKDSGSMSPHDRALAEMQALKASLVRRNLPALVSPPPTPPQAVPGPRVYQVISYGADPTGKLDSTDAILKAMEEAFDGPNHGVLMQGINDLGGARIDLQGRSYLISRPLRFPSAGAGNLLISGGTLRASNDFPVDRYLIELKDESSKLQYIFEYITLRDLLIDCNYRGGAIAVINSLRTSIDNCYITRFGDTNGILVKSGHETYIRNSFLGQHITAGGDRGERSFSGTAINLMGNDNAVTDTVIFSARIGVMVSGQANLLSGVH

SEQ ID NO: 29926 - protein, 282 aa, Arabidopsis thaliana
  peptide (1)..(282): Ceres Seq. ID no. 12333597
MPVFLAIMSLMVSQVVFAEKDSGSMSPHDRALAEMQALKASLVRRNLPALVSPPPTPPQAVPGPRVYQVISYGADPTGKLDSTDAILKAMEEAFDGPNHGVLMQGINDLGGARIDLQGRSYLISRPLRFPSAGAGNLLISGGTLRASNDFPVDRYLIELKDESSKLQYIFEYITLRDLLIDCNYRGGAIAVINSLRTSIDNCYITRFGDTNGILVKSGHETYIRNSFLGQHITAGGDRGERSFSGTAINLMGNDNAVTDTVIFSARIGVMVSGQANLLSGVH

SEQ ID NO: 29927 - protein, 275 aa, Arabidopsis thaliana
  peptide (1)..(275): Ceres Seq. ID no. 12333598
MSLMVSQVVFAEKDSGSMSPHDRALAEMQALKASLVRRNLPALVSPPPTPPQAVPGPRVYQVISYGADPTGKLDSTDAILKAMEEAFDGPNHGVLMQGINDLGGARIDLQGRSYLISRPLRFPSAGAGNLLISGGTLRASNDFPVDRYLIELKDESSKLQYIFEYITLRDLLIDCNYRGGAIAVINSLRTSIDNCYITRFGDTNGILVKSGHETYIRNSFLGQHITAGGDRGERSFSGTAINLMGNDNAVTDTVIFSARIGVMVSGQANLLSGVH

SEQ ID NO: 29928 - DNA, 1237 bp, Arabidopsis thaliana
  misc_feature (1)..(1237): Ceres Seq. ID no. 13580595
  misc_feature (1)..(1237): Ortholog of  Ceres SEQ ID NO 14311044 as cited in SEQ ID NO 53643
aaatattaacacttactgattgccgagagacgaaagacggaaaatcccaacaataaagagcaaaagatcttacagctcataatatttcgttaattatcaaattgctaataggagaaaaaaatgggtcaagctttgggttgtattcaagttgatcagtcgaatgtagcaatcaaagagacttttgggaagtttgacgaagttcttgagccgggttgtcactgtttgccatggtgtttgggaagtcaagtcgctggtcacctttctttacgtgttcaacagctcgcatgttcgctgcgagacaaagactaaggataatgtgtttgtcacggttgttgcttccattcaataccgtgccttagcggagagtgctcaagatgctttttacaagctcagcaacacaaggaatcagattcaagcttatgtctttgatgtgatccgagcaagtgtacctaagctggatctagactctacctttgagcaaaagaatgacattgcaaaaaccgttgagactgagctcgaaaagggctatgtcgcattacggatatgagattgttcagacactgattgtggatatcgagcctgatgtgcatgtcaagagggcaatgaatgagatcaatgctgcttctagaatgagagaggcagcgagtgagaaagctgaggcagagaaaattctgcagatcaagcgtgctgagggagaagctgaatcgaaatacctttcaggtatgggtatagcccgtcagagacaagccattgtggatggtctgaggaacagcgtactcgccttctctgagtctgttccaggaacatcttccaaagacgtgatggatatggttcttgtgactcagtactttgacacattgaaggaaattggtgcttcttcgaagtcaaactcggtgttcataccgcacggtccaggcgctgttagggacattgcttcacagatcagggatggtcttcttcagggtaactctgctgctgagtagagaaatgtctcaaagtacaaaaaggctttttcagggttttagagttgtgttgctacttgcttactcagtttatcttttagcggtttgctctatatgatgggttcttaaatttcttatcgtttctctcttctaggcttgtggacttgatccattgtcttgttttctggtggtttgtggatagagtttgggcttgaaaaacatccgagttattttgggttttaatgtcattattaatgtttaatacgacagtggtc

SEQ ID NO: 29929 - protein, 165 aa, Arabidopsis thaliana
  peptide (1)..(165): Ceres Seq. ID no. 13580596
MTLQKPLRLSSKRAMSHYGYEIVQTLIVDIEPDVHVKRAMNEINAASRMREAASEKAEAEKILQIKRAEGEAESKYLSGMGIARQRQAIVDGLRNSVLAFSESVPGTSSKDVMDMVLVTQYFDTLKEIGASSKSNSVFIPHGPGAVRDIASQIRDGLLQGNSAAE

SEQ ID NO: 29930 - protein, 151 aa, Arabidopsis thaliana; identical to SEQ ID NO: 23095
  peptide (1)..(151): Ceres Seq. ID no. 13580597

SEQ ID NO: 29931 - protein, 126 aa, Arabidopsis thaliana
  peptide (1)..(126): Ceres Seq. ID no. 13580598
MNEINAASRMREAASEKAEAEKILQIKRAEGEAESKYLSGMGIARQRQAIVDGLRNSVLAFSESVPGTSSKDVMDMVLVTQYFDTLKEIGASSKSNSVFIPHGPGAVRDIASQIRDGLLQGNSAAE

SEQ ID NO: 29932 - DNA, 740 bp, Arabidopsis thaliana
  misc_feature (1)..(740): Ceres Seq. ID no. 13494290
  misc_feature (1)..(740): Ortholog of  Ceres SEQ ID NO 12784091 as cited in SEQ ID NO 67615
  misc_feature (1)..(740): Ortholog of  Ceres SEQ ID NO 15177688 as cited in SEQ ID NO 0
gcggtcttatcccgaaactccaagaacacagaaaaaaaaaattcttggtggcctctccaatggctttctcagctaccctgtctcagctttcttctctttcgtccatctcctcttcattaccaatttcttctagaagacttcctcatcgatctcttcctcaattcacagtcaaagcagaagcagagaaagagaaacagagcgcacaggctaagtctgatggggaagcatcaccagctgcaaccaaaacccctaaaactcttcccaagaaaccggtttactcgatgaaaaagggccaaatagttcgtgtagaaaaagagaagtacctcaacagcatcaattacttatcagttggacatcctcctttctacaaaggacttgattacatatacgaagatcgcggcgaggtcttggaccttcgtgtctttgagacaggagagtatgcacttgttggatgggttggtatccccaccgcaccagcttggctcccaacagatatgctcatcaagtgtgagaaacttgtttacgagcgaatgtagagccaagaaggttccaacaagaatcctttggaatgcaactgatataccaaggattgtgttaagctgagatgaacgataacaatggcgcaccatcatgatcatgtgttcaagagtttgacaaagtatcaacgttacaattagttacaaaaactgttgtggagtgtggaatatgtcatcagactcctataataagaatgcagcttc

SEQ ID NO: 29933 - protein, 177 aa, Arabidopsis thaliana
  peptide (1)..(177): Ceres Seq. ID no. 13494291
GLIPKLQEHRKKKFLVASPMAFSATLSQLSSLSSISSSLPISSRRLPHRSLPQFTVKAEAEKEKQSAQAKSDGEASPAATKTPKTLPKKPVYSMKKGQIVRVEKEKYLNSINYLSVGHPPFYKGLDYIYEDRGEVLDLRVFETGEYALVGWVGIPTAPAWLPTDMLIKCEKLVYERM

SEQ ID NO: 29934 - protein, 158 aa, Arabidopsis thaliana
  peptide (1)..(158): Ceres Seq. ID no. 13494292
MAFSATLSQLSSLSSISSSLPISSRRLPHRSLPQFTVKAEAEKEKQSAQAKSDGEASPAATKTPKTLPKKPVYSMKKGQIVRVEKEKYLNSINYLSVGHPPFYKGLDYIYEDRGEVLDLRVFETGEYALVGWVGIPTAPAWLPTDMLIKCEKLVYERM

SEQ ID NO: 29935 - protein, 94 aa, Arabidopsis thaliana
  peptide (1)..(94): Ceres Seq. ID no. 13494293
AVLSRNSKNTEKKNSWWPLQWLSQLPCLSFLLFRPSPLHYQFLLEDFLIDLFLNSQSKQKQRKRNRAHRLSLMGKHHQLQPKPLKLFPRNRFTR

SEQ ID NO: 29936 - DNA, 1758 bp, Arabidopsis thaliana; identical to SEQ ID NO: 25899
  misc_feature (1)..(1758): Ceres Seq. ID no. 13490176
  misc_feature (1)..(1758): Ortholog of  Ceres SEQ ID NO 15176262 as cited in SEQ ID NO 54751
  misc_feature (1)..(1758): Ortholog of  Ceres SEQ ID NO 13656177 as cited in SEQ ID NO 64997

SEQ ID NO: 29937 - protein, 524 aa, Arabidopsis thaliana; identical to SEQ ID NO: 25900
  peptide (1)..(524): Ceres Seq. ID no. 13490177

SEQ ID NO: 29938 - protein, 496 aa, Arabidopsis thaliana; identical to SEQ ID NO: 25901
  peptide (1)..(496): Ceres Seq. ID no. 13490178

SEQ ID NO: 29939 - protein, 394 aa, Arabidopsis thaliana; identical to SEQ ID NO: 25902
  peptide (1)..(394): Ceres Seq. ID no. 13490179

SEQ ID NO: 29940 - DNA, 2360 bp, Arabidopsis thaliana
  misc_feature (1)..(2360): Ceres Seq. ID no. 12339318
  misc_feature (1)..(2360): Ortholog of  Ceres SEQ ID NO 12778278 as cited in SEQ ID NO 63035
atccttttctcttctcttcccactctctctctctctctctatctatcttcttcatctttgtttcagcttctcctttgaaactagattatctccgttaatggcgcctcagatctaaccttgggagttatatatatatacttgttcaactcttcttcgaacgctgtccaacttcttcctctggttcgatcatcgagatctcgaggttatttggccgcaatgcagaagcgaatagccttgtcgtttccagaagaggtactagagcatgtgttctcgtttattcagctggataaggataggaactcagtctctctggtgtgcaagtcatggtacgagatcgagcggtggtgcaggaggaaagtcttcatcgggaactgctacgccgtgagtccagcgacggtgattaggaggttcccgaaagtgagatccgtggagcttaaaggaaaacctcactttgctgactttaatttggtacctgacggatggggaggttacgtgtatccatggattgaggccatgtcttcgtcttacacgtggcttgaagagataaggctgaagaggatggtggtcaccgacgattgcttggagctcatagccaagtcttttaagaattttaaggttcttgtgctttcttcctgcgaaggcttctccaccgatggtctcgctgctatcgctgccacttgcaggaatctgaaagagcttgacttacgagagagtgatgttgacgacgttagtggccactggcttagccatttcccagatacatacacttctttggtatcactcaatatatcttgcttagcatctgaggtcagtttctctgctctggaaaggctggtgactaggtgtcccaatctcaagtctctcaagcttaaccgagctgttccacttgaaaaattggctactttacttcaaagagcacctcaattggaggaattgggcactggtgggtacactgcagaagtgcgaccagatgtttactctggtttatctgtagcgctctctgggtgcaaggaattgaggtgcttatctggattttgggatgctgttcctgcctatcttccagcagtttattcggtttgcagtcggcttacaactttgaatctgagttatgcaacagtccagagctatgatcttgtcaagcttctttgtcaatgccctaaactgcagcgcctctgggtgcttgactacatcgaggatgctggtcttgaggtgcttgcttcaacctgcaaggacctacgcgagctgagagtgtttccgtccgagccttttgtcatggaaccaaatgtggcattgacggaacaggggcttgtctccgtctccatgggctgtccaaaactcgagtcggttctctacttctgccgtcaaatgaccaatgctgcattgataaccattgctaggaaccgtcccaacatgactcgcttccgtttgtgcatcattgagccaaaagccccagactatctgactctagagccactggatattggatttggagccatagtagagcactgcaaggatctccgtcgcctctctctatctggcctcttgaccgacaaggtttttgaatacattgggacatatgccaagaagatggaaatgctctcagtggcatttgcaggagacagtgacttaggcatgcatcatgttttgtccgggtgcgatagcttgaggaaactagagataagggactgcccgtttggagacaaggcgcttttggccaatgcttcaaagctggagacaatgcgatccctttggatgtcttcttgttccgtgagttttggagcctgcaagttactaggacagaagatgccaaagctgaatgtggaagtcatcgatgaacggggtgcaccggactcgagaccagagagctgccctgttgagagagtcttcatataccgaacagtggctggtcctcgatttgacatgcctggcttcgtctggaacatggaccaagactcaacaatgaggttttccaggcaaatcattactactaacggattataagacaaagaaacgaggtacatttttcattaatccttgttcatcatcccatataatcgtgttccggtttaggaacatgagagagctcggtcgccaataatttgaatctcggctgcttcatataaccatcaagctcatgagcaatgaataagtggagagagagaaagagagatctaagagagctttgttttatttatgtaagaattattgattgttgtatgtttatttggctacttacactgagagatcctggtggggtatttttcttaagaggataagagatttttttaaaagacaatgtcaaaaatgtaactgttctacttgttttgtttggactcttttatccttttaaatgttttcta

SEQ ID NO: 29941 - protein, 594 aa, Arabidopsis thaliana
  peptide (1)..(594): Ceres Seq. ID no. 12339319
MQKRIALSFPEEVLEHVFSFIQLDKDRNSVSLVCKSWYEIERWCRRKVFIGNCYAVSPATVIRRFPKVRSVELKGKPHFADFNLVPDGWGGYVYPWIEAMSSSYTWLEEIRLKRMVVTDDCLELIAKSFKNFKVLVLSSCEGFSTDGLAAIAATCRNLKELDLRESDVDDVSGHWLSHFPDTYTSLVSLNISCLASEVSFSALERLVTRCPNLKSLKLNRAVPLEKLATLLQRAPQLEELGTGGYTAEVRPDVYSGLSVALSGCKELRCLSGFWDAVPAYLPAVYSVCSRLTTLNLSYATVQSYDLVKLLCQCPKLQRLWVLDYIEDAGLEVLASTCKDLRELRVFPSEPFVMEPNVALTEQGLVSVSMGCPKLESVLYFCRQMTNAALITIARNRPNMTRFRLCIIEPKAPDYLTLEPLDIGFGAIVEHCKDLRRLSLSGLLTDKVFEYIGTYAKKMEMLSVAFAGDSDLGMHHVLSGCDSLRKLEIRDCPFGDKALLANASKLETMRSLWMSSCSVSFGACKLLGQKMPKLNVEVIDERGAPDSRPESCPVERVFIYRTVAGPRFDMPGFVWNMDQDSTMRFSRQIITTNGL

SEQ ID NO: 29942 - protein, 495 aa, Arabidopsis thaliana
  peptide (1)..(495): Ceres Seq. ID no. 12339320
MSSSYTWLEEIRLKRMVVTDDCLELIAKSFKNFKVLVLSSCEGFSTDGLAAIAATCRNLKELDLRESDVDDVSGHWLSHFPDTYTSLVSLNISCLASEVSFSALERLVTRCPNLKSLKLNRAVPLEKLATLLQRAPQLEELGTGGYTAEVRPDVYSGLSVALSGCKELRCLSGFWDAVPAYLPAVYSVCSRLTTLNLSYATVQSYDLVKLLCQCPKLQRLWVLDYIEDAGLEVLASTCKDLRELRVFPSEPFVMEPNVALTEQGLVSVSMGCPKLESVLYFCRQMTNAALITIARNRPNMTRFRLCIIEPKAPDYLTLEPLDIGFGAIVEHCKDLRRLSLSGLLTDKVFEYIGTYAKKMEMLSVAFAGDSDLGMHHVLSGCDSLRKLEIRDCPFGDKALLANASKLETMRSLWMSSCSVSFGACKLLGQKMPKLNVEVIDERGAPDSRPESCPVERVFIYRTVAGPRFDMPGFVWNMDQDSTMRFSRQIITTNGL

SEQ ID NO: 29943 - protein, 480 aa, Arabidopsis thaliana
  peptide (1)..(480): Ceres Seq. ID no. 12339322
MVVTDDCLELIAKSFKNFKVLVLSSCEGFSTDGLAAIAATCRNLKELDLRESDVDDVSGHWLSHFPDTYTSLVSLNISCLASEVSFSALERLVTRCPNLKSLKLNRAVPLEKLATLLQRAPQLEELGTGGYTAEVRPDVYSGLSVALSGCKELRCLSGFWDAVPAYLPAVYSVCSRLTTLNLSYATVQSYDLVKLLCQCPKLQRLWVLDYIEDAGLEVLASTCKDLRELRVFPSEPFVMEPNVALTEQGLVSVSMGCPKLESVLYFCRQMTNAALITIARNRPNMTRFRLCIIEPKAPDYLTLEPLDIGFGAIVEHCKDLRRLSLSGLLTDKVFEYIGTYAKKMEMLSVAFAGDSDLGMHHVLSGCDSLRKLEIRDCPFGDKALLANASKLETMRSLWMSSCSVSFGACKLLGQKMPKLNVEVIDERGAPDSRPESCPVERVFIYRTVAGPRFDMPGFVWNMDQDSTMRFSRQIITTNGL

SEQ ID NO: 29944 - DNA, 727 bp, Arabidopsis thaliana
  misc_feature (1)..(727): Ceres Seq. ID no. 12738409
  misc_feature (1)..(727): Ortholog of  Ceres SEQ ID NO 12626078 as cited in SEQ ID NO 69113
agtgaaaaagcgtgttacacagattaaaaatcttattgagcaagcggagcaagattacgagaaggagaaactcaatgagagaattgcaaagctctctggtggagttgctgtgattcaggttggagcacaaactgagacagaactcaaagagaagaagttgagagttgaagatgctcttaatgcaacaaaggccgctgtcgaggaaggtattgttgttggtggtggttgcactctgcttcgtcttgcttccaaggttgatgccattaaagccacgcttgataatgatgaagaaaaggttggagcggatatagttaaaagagcactaagttaccccctaaaactaatcgccaagaatgctggtgttaatggaagtgtagttagcgagaaggtgctttccaacgataacgtgaaattcggttacaatgctgcaaccggcaagtacgaggatttgatggctgcaggaatcatcgatccaacaaaggttgtgagatgttgcttggaacacgcagcttcggttgcaaagactttcttgatgtcggactgcgttgttgttgagatcaaggaacctgaaccagttcccgtcggcaacccaatggacaactcaggatatggatactaagaggagataggctaatattgaaacggattactttagcttgcgagtgtaatgattttgaacaagagaatgtgtaatgtgaaactgaaattttgaattaatcatcatatg

SEQ ID NO: 29945 - protein, 205 aa, Arabidopsis thaliana
  peptide (1)..(205): Ceres Seq. ID no. 12738410
VKKRVTQIKNLIEQAEQDYEKEKLNERIAKLSGGVAVIQVGAQTETELKEKKLRVEDALNATKAAVEEGIVVGGGCTLLRLASKVDAIKATLDNDEEKVGADIVKRALSYPLKLIAKNAGVNGSVVSEKVLSNDNVKFGYNAATGKYEDLMAAGIIDPTKVVRCCLEHAASVAKTFLMSDCVVVEIKEPEPVPVGNPMDNSGYGY

SEQ ID NO: 29946 - DNA, 1261 bp, Arabidopsis thaliana
  misc_feature (1)..(1261): Ceres Seq. ID no. 12482789
  misc_feature (1)..(1261): Ortholog of  Ceres SEQ ID NO 15173355 as cited in SEQ ID NO 61844
acgatttcgatttctcctgaaaatctcaatttcaacaaaacccttaagatttttcgattttggattcccaattctcccggagttctgatgcagatcgccggagataagtaatctcgagtttactaatgccgcggcttccgtcgtctcgtcgcggtgtcgtgtggtttcgatggaagatactcatcactatctccaccgcattatgcatcctcgctctcttctgtatcaaccgtcagtctaattccactgcgacgacgacgacactgtcttcgtctctctccgtcgcgagatctcgtatccctctcgttaaatactccggcgatcgtcccaaactcgccttccttttcctcgctcgacgtgatttgccacttgattttctctgggacagattcttcaagagtgcagatcagaggaatttctcaatctatgtacattcaatacctggtttcgtattcgatgaatcatccacaagatcacatttcttctacaatcgtcaattgaagaatagcattgaggtagtttggggagaatcaagcatgattgcagcagaaagattgttgcttgcatctgctttggaagatccttctaatcaaagatttgttcttttgtctgatagctgtgttccgttatacgactttggttacatttacagatatctagtttcttcaccaaagagttttgtagacagcttccttgataaagataatcgctacactatgaaaatgtttcctgttatacggaaagaaaaatggcgaaaaggatctcagtggatatcattgatcagaagccatgcagaggtcattgtaatgatgatactgtgttccctgtttttcagaaattttgcaagcgatctctacctctggatcccagaaagaattggctatatcttaaaaagaggcgacacaactgtatccctgatgaacactacgtgcaaactctactaacaatgcgtggcttggaaaatgaaatggaacggagaacagtgacatacaccacatggaacctatcagcaaaaaaagctgaagctaaatcttggcatcctctcactttcacatctgacaattgcggaccagaggaaatagaaggaataaagaaaatcaaccatgtatattatgaatcggagtatcgaacagaatggtgcagagcgaattcaaaacccgtcccgtgctttctgtttgcgaggaagttcactagaggagccgcaatgcgtcttttgagtgaaggattaatagaatcctcaatagatacaacaaccttttag

SEQ ID NO: 29947 - protein, 272 aa, Arabidopsis thaliana
  peptide (1)..(272): Ceres Seq. ID no. 12482790
MPRLPSSRRGVVWFRWKILITISTALCILALFCINRQSNSTATTTTLSSSLSVARSRIPLVKYSGDRPKLAFLFLARRDLPLDFLWDRFFKSADQRNFSIYVHSIPGFVFDESSTRSHFFYNRQLKNSIEVVWGESSMIAAERLLLASALEDPSNQRFVLLSDSCVPLYDFGYIYRYLVSSPKSFVDSFLDKDNRYTMKMFPVIRKEKWRKGSQWISLIRSHAEVIVMMILCSLFFRNFASDLYLWIPERIGYILKRGDTTVSLMNTTCKLY

SEQ ID NO: 29948 - protein, 170 aa, Arabidopsis thaliana
  peptide (1)..(170): Ceres Seq. ID no. 12482791
MAKRISVDIIDQKPCRGHCNDDTVFPVFQKFCKRSLPLDPRKNWLYLKKRRHNCIPDEHYVQTLLTMRGLENEMERRTVTYTTWNLSAKKAEAKSWHPLTFTSDNCGPEEIEGIKKINHVYYESEYRTEWCRANSKPVPCFLFARKFTRGAAMRLLSEGLIESSIDTTTF

SEQ ID NO: 29949 - DNA, 997 bp, Arabidopsis thaliana
  misc_feature (1)..(997): Ceres Seq. ID no. 12396633
  misc_feature (1)..(997): Ortholog of  Ceres SEQ ID NO 14301996 as cited in SEQ ID NO 56657
attcgtctcagaggccgaggttgaagattaatcggacaaaggagattagaagagtagaaaaaacgacaagaagaaagaaacacagttgcaggagagaaagagatatggctgtccggataaacgcgatggcggtgacgtttgtggcgcacgcgctggcggtaatagcggcgattatggtactggtttggagtatcagttacagaggtggattggcctgggaagctactaacaagaatctcatcttcaatctgcatcctgttctgatgctcatcggatttataatcttgggaggagaagccatcataagttacaaatcgcttccgctggagaaaccagtgaagaagttgatccaccttatactccatgccattgctctggctcttgggatatttggcatctgtgcagcctttaagaaccacaatgaaagccatatccctaatctctacagtctccattcctggattggtattggagtcatttctctttatggcttccagtgggtgtacagcttcatagtgttcttcttcccaggaggatcaacaaatttgaaaagcggattgcttccgtggcacgcaatgcttggcctgtttgtttacatacttgctgtcgggaatgcagctttagggtttctggaaaagctgactttcttggagaatggagggcttgacaagtatggatccgaagcatttcttatcaacttcacggccattatcactattctctttggtgcctttgtggtactcactgcttctgctgagtctccttctccttctccttccgtctccaatgatgatagtgttgacttcagttattctgctatataaaacactttctacattccacgttacatctgtatcgccccttgtactctcaaaactccatttatgtatgatgcatttgtagcgaaaagctttgtgtgttacggctttgctacttctggtgtgtaaaatcttcaatgatattgatgaatcttttaaatcattttcttttcttttct

SEQ ID NO: 29950 - protein, 273 aa, Arabidopsis thaliana
  peptide (1)..(273): Ceres Seq. ID no. 12396634
SSQRPRLKINRTKEIRRVEKTTRRKKHSCRRERDMAVRINAMAVTFVAHALAVIAAIMVLVWSISYRGGLAWEATNKNLIFNLHPVLMLIGFIILGGEAIISYKSLPLEKPVKKLIHLILHAIALALGIFGICAAFKNHNESHIPNLYSLHSWIGIGVISLYGFQWVYSFIVFFFPGGSTNLKSGLLPWHAMLGLFVYILAVGNAALGFLEKLTFLENGGLDKYGSEAFLINFTAIITILFGAFVVLTASAESPSPSPSVSNDDSVDFSYSAI

SEQ ID NO: 29951 - protein, 239 aa, Arabidopsis thaliana
  peptide (1)..(239): Ceres Seq. ID no. 12396635
MAVRINAMAVTFVAHALAVIAAIMVLVWSISYRGGLAWEATNKNLIFNLHPVLMLIGFIILGGEAIISYKSLPLEKPVKKLIHLILHAIALALGIFGICAAFKNHNESHIPNLYSLHSWIGIGVISLYGFQWVYSFIVFFFPGGSTNLKSGLLPWHAMLGLFVYILAVGNAALGFLEKLTFLENGGLDKYGSEAFLINFTAIITILFGAFVVLTASAESPSPSPSVSNDDSVDFSYSAI

SEQ ID NO: 29952 - protein, 232 aa, Arabidopsis thaliana
  peptide (1)..(232): Ceres Seq. ID no. 12396636
MAVTFVAHALAVIAAIMVLVWSISYRGGLAWEATNKNLIFNLHPVLMLIGFIILGGEAIISYKSLPLEKPVKKLIHLILHAIALALGIFGICAAFKNHNESHIPNLYSLHSWIGIGVISLYGFQWVYSFIVFFFPGGSTNLKSGLLPWHAMLGLFVYILAVGNAALGFLEKLTFLENGGLDKYGSEAFLINFTAIITILFGAFVVLTASAESPSPSPSVSNDDSVDFSYSAI

SEQ ID NO: 29953 - DNA, 1449 bp, Arabidopsis thaliana
  misc_feature (1)..(1449): Ceres Seq. ID no. 12396528
  misc_feature (1)..(1449): Ortholog of  Ceres SEQ ID NO 15168537 as cited in SEQ ID NO 57100
  misc_feature (1)..(1449): Ortholog of  Ceres SEQ ID NO 15178681 as cited in SEQ ID NO 63192
  misc_feature (1)..(1449): Ortholog of  Ceres SEQ ID NO 13579918 as cited in SEQ ID NO 64644
  misc_feature (1)..(1449): Ortholog of  Ceres SEQ ID NO 13654122 as cited in SEQ ID NO 68192
aattcccattcgtgttttttcggattgcgagaatcctacgttatttcttcacttttcatgatcccgaggacatcttagaccccaaatgttcttcgtcgatgtttctttggaaactggttcctctatacttgttcggatcagaaacaaagtctctctcagcaacagagtccattttgcagatagttcctgaggcaatggctgctacttcatctaacgtcctttgcaatgctagcgagtcagatctttgtcgtgatgattccgctgcatttctacttaaatttgtagccattgcttcgattctcttagctggagctgctggtgtaactataccactcattggcaggaaccgtcgtttccttcaaactgatggtaatctctttgtgactgctaaagcttttgcagctggtgtgattctcgccacgggttttgttcatatgttggcgggtggcacggaagctttgaagaacccgtgcttaccggatttcccttggtctaagtttcctttcccgggattctttgcgatgattgctgctttgatcactctgtttgtggatttcatggggactcagtactatgaacggaagcaagagagggaagctagtgagtctgttgaaccgtttggccgtgaacaatcaccgggtattgttgttcccatgattggagaaggaacgaatgatgggaaagtgtttggtgaagaagacagtggtgggattcacattgttggcattcatgctcatgctgctcatcatagacatagtcatcctcctggtcatgattcatgtgaaggacacagtaaaatcgacattggtcatgctcatgctcatgggcacgggcatggacacggacatggacacgtacacgggggtttggatgctgttaatggagctaggcatatcgttgtttctcaggttctggagcttggaattgtgtcacattccataatcatcggtctatcccttggagtatctcagtctccttgcacaatccggcctctaatcgcagcactatccttccatcaattctttgaaggatttgcgctcggtggatgcatctcccaagcgcaattcaggaacaaatcagcgaccataatggcttgttttttcgccctcacaaccccgatagggatcgggattggaaccgcagtggcgtcgtctttcaattctcacagtgtcggagcattggtcactgaaggtatcttggactcgctctcagccggaattcttgtgtacatggctttagtggatctcatagctgctgatttcttgagtacaaaaatgaggtgtaactttaggcttcaaattgtatcttatgtaatgttgttcctaggagctggactcatgtcttctcttgccatttgggcttaattagagtataagattccatagtttcttctatagctacaaataacatgtatagttctttctagagaatttatcaatctaagatttc

SEQ ID NO: 29954 - protein, 453 aa, Arabidopsis thaliana
  peptide (1)..(453): Ceres Seq. ID no. 12396529
FPFVFFRIARILRYFFTFHDPEDILDPKCSSSMFLWKLVPLYLFGSETKSLSATESILQIVPEAMAATSSNVLCNASESDLCRDDSAAFLLKFVAIASILLAGAAGVTIPLIGRNRRFLQTDGNLFVTAKAFAAGVILATGFVHMLAGGTEALKNPCLPDFPWSKFPFPGFFAMIAALITLFVDFMGTQYYERKQEREASESVEPFGREQSPGIVVPMIGEGTNDGKVFGEEDSGGIHIVGIHAHAAHHRHSHPPGHDSCEGHSKIDIGHAHAHGHGHGHGHGHVHGGLDAVNGARHIVVSQVLELGIVSHSIIIGLSLGVSQSPCTIRPLIAALSFHQFFEGFALGGCISQAQFRNKSATIMACFFALTTPIGIGIGTAVASSFNSHSVGALVTEGILDSLSAGILVYMALVDLIAADFLSTKMRCNFRLQIVSYVMLFLGAGLMSSLAIWA

SEQ ID NO: 29955 - protein, 421 aa, Arabidopsis thaliana
  peptide (1)..(421): Ceres Seq. ID no. 12396530
MFLWKLVPLYLFGSETKSLSATESILQIVPEAMAATSSNVLCNASESDLCRDDSAAFLLKFVAIASILLAGAAGVTIPLIGRNRRFLQTDGNLFVTAKAFAAGVILATGFVHMLAGGTEALKNPCLPDFPWSKFPFPGFFAMIAALITLFVDFMGTQYYERKQEREASESVEPFGREQSPGIVVPMIGEGTNDGKVFGEEDSGGIHIVGIHAHAAHHRHSHPPGHDSCEGHSKIDIGHAHAHGHGHGHGHGHVHGGLDAVNGARHIVVSQVLELGIVSHSIIIGLSLGVSQSPCTIRPLIAALSFHQFFEGFALGGCISQAQFRNKSATIMACFFALTTPIGIGIGTAVASSFNSHSVGALVTEGILDSLSAGILVYMALVDLIAADFLSTKMRCNFRLQIVSYVMLFLGAGLMSSLAIWA

SEQ ID NO: 29956 - protein, 389 aa, Arabidopsis thaliana
  peptide (1)..(389): Ceres Seq. ID no. 12396531
MAATSSNVLCNASESDLCRDDSAAFLLKFVAIASILLAGAAGVTIPLIGRNRRFLQTDGNLFVTAKAFAAGVILATGFVHMLAGGTEALKNPCLPDFPWSKFPFPGFFAMIAALITLFVDFMGTQYYERKQEREASESVEPFGREQSPGIVVPMIGEGTNDGKVFGEEDSGGIHIVGIHAHAAHHRHSHPPGHDSCEGHSKIDIGHAHAHGHGHGHGHGHVHGGLDAVNGARHIVVSQVLELGIVSHSIIIGLSLGVSQSPCTIRPLIAALSFHQFFEGFALGGCISQAQFRNKSATIMACFFALTTPIGIGIGTAVASSFNSHSVGALVTEGILDSLSAGILVYMALVDLIAADFLSTKMRCNFRLQIVSYVMLFLGAGLMSSLAIWA

SEQ ID NO: 29957 - DNA, 940 bp, Arabidopsis thaliana
  misc_feature (1)..(940): Ceres Seq. ID no. 12323107
  misc_feature (1)..(940): Ortholog of  Ceres SEQ ID NO 12333459 as cited in SEQ ID NO 20477
  misc_feature (1)..(940): Ortholog of  Ceres SEQ ID NO 15176155 as cited in SEQ ID NO 0
acattttcagctgctcataaaccctaaaaatcctctctttttctcaaccttgattcttagccatggagttctggggaattgaagttaaatcaggaaagccagttacagtgactcctgaagaaggcattcttatccacgtttctcaggcatcgcttggagaatgtaaaaacaagaagggagagtttgtgcctttacatgtaaaggttgggaaccagaacttggttctgggaactctatcgactgagaacatccctcagcttttctgtgatttggtattcgacaaggagtttagctttctcacacttggggaaaaggaagtgtttactttgttggatacaaaactcccaacattgagccacaaggctattctgaggaagaagaggaagaagaggaagaagttcctgctgccgttactgctagtgggaatgctgccaaggctgtagctaaaccaaaggctaagcctgcagaagtgaagccagctgttgatgatgaagaggatgagtctgattctgacggaatggatgaagatgattctgatggtgaggattctgaggaagaagagcctacacctaagaagcctgcatcaagcaagaagagagctaatgaaactacccctaaagcacctgtgtcagcaaagaaggcgaaagtagcagttactcctcagaaaacagatgagaagaagaaaggtggaaaggctgcaaaccagagcccaaagtcggccagtcaagtctcatgtggttcatgcaagaagactttcaactcagggaatgcacttgagtctcacaacaaggccaagcacgctgctgccaagtgaagtggtttcttattagagcttatgatttctatggaattttgcctgtagtctttatgaaaccttcagatttccttatattttcttttgataacaagagtcttaatgaaagagagccagttggagtct

SEQ ID NO: 29958 - protein, 126 aa, Arabidopsis thaliana
  peptide (1)..(126): Ceres Seq. ID no. 12323108
MEFWGIEVKSGKPVTVTPEEGILIHVSQASLGECKNKKGEFVPLHVKVGNQNLVLGTLSTENIPQLFCDLVFDKEFSFLTLGEKEVFTLLDTKLPTLSHKAILRKKRKKRKKFLLPLLLVGMLPRL

SEQ ID NO: 29959 - protein, 98 aa, Arabidopsis thaliana
  peptide (1)..(98): Ceres Seq. ID no. 12323109
MDEDDSDGEDSEEEEPTPKKPASSKKRANETTPKAPVSAKKAKVAVTPQKTDEKKKGGKAANQSPKSASQVSCGSCKKTFNSGNALESHNKAKHAAAK

SEQ ID NO: 29960 - DNA, 607 bp, Arabidopsis thaliana
  misc_feature (1)..(607): Ceres Seq. ID no. 12377317
  misc_feature (1)..(607): Ortholog of  Ceres SEQ ID NO 12582657 as cited in SEQ ID NO 51070
cgcatccaaaccctagaaattttgtctctctcgccgccttgcgaaaagcattttcgatcttactcttaggataaaaaaatgtcgacagttggagagcttgcttgcagctacgctgttatgatcctcgaggacgagggtatcgctatcacggctgacaaaatcgcgaccttggtgaaagctgctggtgttagtattgagtcatactggccaatgctattcgccaagatggctgagaaacgtaacgtgactgatctcatcatgaacgttggtgctggtggtggaggtggtgctccggttgcagctgctgctccagctgctggcggtggtgcggcagctgctcctgctgctgaggagaagaagaaggatgagccagcagaagagagtgacggagatttgggtttcggtttgtttgactaaacgcagtcacttgtctttcttctttgtagttggatattggagactatattttgtcgtatgagttattattacttgtttgatctggctaaaggactattagttggtttatgatgcgtatgttgtataactcaagtttcctagcaaaccaatcggctcgggcttttgttagaattgattttgtttattttct

SEQ ID NO: 29961 - protein, 112 aa, Arabidopsis thaliana
  peptide (1)..(112): Ceres Seq. ID no. 12377318
MSTVGELACSYAVMILEDEGIAITADKIATLVKAAGVSIESYWPMLFAKMAEKRNVTDLIMNVGAGGGGGAPVAAAAPAAGGGAAAAPAAEEKKKDEPAEESDGDLGFGLFD

SEQ ID NO: 29962 - protein, 99 aa, Arabidopsis thaliana
  peptide (1)..(99): Ceres Seq. ID no. 12377319
MILEDEGIAITADKIATLVKAAGVSIESYWPMLFAKMAEKRNVTDLIMNVGAGGGGGAPVAAAAPAAGGGAAAAPAAEEKKKDEPAEESDGDLGFGLFD

SEQ ID NO: 29963 - protein, 68 aa, Arabidopsis thaliana
  peptide (1)..(68): Ceres Seq. ID no. 12377320
MLFAKMAEKRNVTDLIMNVGAGGGGGAPVAAAAPAAGGGAAAAPAAEEKKKDEPAEESDGDLGFGLFD

SEQ ID NO: 29964 - DNA, 1562 bp, Arabidopsis thaliana
  misc_feature (1)..(1562): Ceres Seq. ID no. 12439764
  misc_feature (1)..(1562): Ortholog of  Ceres SEQ ID NO 13658590 as cited in SEQ ID NO 66762
gtggctaattctccgattaggttttcgattctcttcgtcttcgtctctgaagcgaccaaaaaccctaattctatcaattcgaaatcttcaatttcacatgggtgaacattcaccttctcaaccatcatctcatactcttcctccaaaccaaccggaatcacccaatcacgaaacccctaatccaattccaccggaaaccaacgatgacgactccgcctcatccgccggagtttctggctcaatcgtctcatcaaccaccattgaagcaccacaagtcactgaattaggcaatgtatcgtctccacctaccaagatccctctccgtcctcgaaaaatcagaaaactttcacccgacgacgacgcttccgacggattcaatccggagcataacctttctcagatgacgacgacgaaaccggcaacgaagagtaaattatcacagtcacgcactgtaaccgtgccgagaatccaagcaaggtctctcacttgtgaaggcgagcttgaagcagctcttcaccatctccgaagtgttgatcctctgctcgcgtctttaatcgacattcatccaccaccaacgttcgagacttttcagactccgttcttggcgttgattcgaagcattctttatcagcaattagcagctaaagcaggtaattcaatctacacacgcttcgttgccttatgcggcggtgaaaacggcgtcgtgccagagaatgtattgcctttaacacctcaacagcttcgtcaaattggtgtttccgggcgtaaagcgagttaccttcatgatcttgctaggaaatatcaaaatgggatcttgtcggattctggaatagtgaatatggatgagaaatctttgttcacgatgttaacaatggtgaatgggattgggtcatggtcggtccatatgtttatgataaactctcttcatagacctgatgtgttaccagttaatgatcttggtgtaaggaagggtgtgcagatgcttaatggtatggaggatttgcctcgtccatccaaaatggagcagctttgcgagaaatggcgtccgtatagatcagtagcgtcttggtacttgtggcggctcattgaatctaaaaatacaccacctaatgctgcggctgctacggccggagctgctctttcgtttccacagttggaagacattcagcaacaagaacaagaacagcaacatcaacaacatcagcaacaacagccgcagcttatggaccctcttaataatgtgttcagtatcggggcatggggccaaacgtagctgactttgcaccttaaattatcgtctctcatagcgtgatagggattctggtccggtggtcttcagctactgtctggtgaagaagtctttgttccacagcttggaaataagaataaaaatggccatggaacagaaatcttctttagctaagtgaagagtatgtaagatttaagcttagctaatgaacttgacatcgattttctttttgttggagacttgaactcgtctaaagaaacctctaaagcgtttcctgattcgtatctaaaacagagcaacatatttgatttct

SEQ ID NO: 29965 - protein, 423 aa, Arabidopsis thaliana
  peptide (1)..(423): Ceres Seq. ID no. 12439765
WLILRLGFRFSSSSSLKRPKTLILSIRNLQFHMGEHSPSQPSSHTLPPNQPESPNHETPNPIPPETNDDDSASSAGVSGSIVSSTTIEAPQVTELGNVSSPPTKIPLRPRKIRKLSPDDDASDGFNPEHNLSQMTTTKPATKSKLSQSRTVTVPRIQARSLTCEGELEAALHHLRSVDPLLASLIDIHPPPTFETFQTPFLALIRSILYQQLAAKAGNSIYTRFVALCGGENGVVPENVLPLTPQQLRQIGVSGRKASYLHDLARKYQNGILSDSGIVNMDEKSLFTMLTMVNGIGSWSVHMFMINSLHRPDVLPVNDLGVRKGVQMLNGMEDLPRPSKMEQLCEKWRPYRSVASWYLWRLIESKNTPPNAAAATAGAALSFPQLEDIQQQEQEQQHQQHQQQQPQLMDPLNNVFSIGAWGQT

SEQ ID NO: 29966 - protein, 391 aa, Arabidopsis thaliana
  peptide (1)..(391): Ceres Seq. ID no. 12439766
MGEHSPSQPSSHTLPPNQPESPNHETPNPIPPETNDDDSASSAGVSGSIVSSTTIEAPQVTELGNVSSPPTKIPLRPRKIRKLSPDDDASDGFNPEHNLSQMTTTKPATKSKLSQSRTVTVPRIQARSLTCEGELEAALHHLRSVDPLLASLIDIHPPPTFETFQTPFLALIRSILYQQLAAKAGNSIYTRFVALCGGENGVVPENVLPLTPQQLRQIGVSGRKASYLHDLARKYQNGILSDSGIVNMDEKSLFTMLTMVNGIGSWSVHMFMINSLHRPDVLPVNDLGVRKGVQMLNGMEDLPRPSKMEQLCEKWRPYRSVASWYLWRLIESKNTPPNAAAATAGAALSFPQLEDIQQQEQEQQHQQHQQQQPQLMDPLNNVFSIGAWGQT

SEQ ID NO: 29967 - protein, 290 aa, Arabidopsis thaliana
  peptide (1)..(290): Ceres Seq. ID no. 12439767
MTTTKPATKSKLSQSRTVTVPRIQARSLTCEGELEAALHHLRSVDPLLASLIDIHPPPTFETFQTPFLALIRSILYQQLAAKAGNSIYTRFVALCGGENGVVPENVLPLTPQQLRQIGVSGRKASYLHDLARKYQNGILSDSGIVNMDEKSLFTMLTMVNGIGSWSVHMFMINSLHRPDVLPVNDLGVRKGVQMLNGMEDLPRPSKMEQLCEKWRPYRSVASWYLWRLIESKNTPPNAAAATAGAALSFPQLEDIQQQEQEQQHQQHQQQQPQLMDPLNNVFSIGAWGQT

SEQ ID NO: 29968 - DNA, 868 bp, Arabidopsis thaliana
  misc_feature (1)..(868): Ceres Seq. ID no. 13487046
  misc_feature (1)..(868): Ortholog of  Ceres SEQ ID NO 13597839 as cited in SEQ ID NO 64260
aaacacgcttgagatatctttccccaaattcgaaagaaccctaattttttccgattccgattgatcaaacaagcgaatcccgattaactgatcgaggagatgggtaatacagataagctgatgaaccagatctttgaattgaaatttacgtcaaagtctctgcagaggcaagctaggaagtgcgaaaaagaggagagatcggagaagctcaaggtaaagaaagccattgagaaaggtaacatggatggtgctcggatctatgccgagaacgccattcgcaaacgcagcgagcagatgaactaccttcgtctctcttctcgattggacgctgttgttgctcgactcgatacccaggctaagatggctaccatcaccaaatcgatgaccaacattgtcaaatccctcgaatcgtctcttaccactggcaacttacagaagatgtctgagacgatggattcgtttgagaaacagtttgtgaacatggaagtccaagctgagttcatggataatgcaatggctggctctacttcattgtcgactccagaaggagaagtcaacagcttgatgcagcaagtagcagatgattacggtcttgaagtttctgttggactacctcagcctgctggtcatgccattcctaccaagactgaagagaaagttgaggaggatgatttaaccaggagacttgccgagcttaaagccagaggttaattagctaacctaacaaaaaaaaaaactgtatttggattcttcttttattgagatgttgatgctattaatccctgaacatgatgggaatgtttgtgtaaattgctcaccctggtacatgcttttgtttatataaaacctagagtgtgtttttacaatg

SEQ ID NO: 29969 - protein, 203 aa, Arabidopsis thaliana
  peptide (1)..(203): Ceres Seq. ID no. 13487047
MGNTDKLMNQIFELKFTSKSLQRQARKCEKEERSEKLKVKKAIEKGNMDGARIYAENAIRKRSEQMNYLRLSSRLDAVVARLDTQAKMATITKSMTNIVKSLESSLTTGNLQKMSETMDSFEKQFVNMEVQAEFMDNAMAGSTSLSTPEGEVNSLMQQVADDYGLEVSVGLPQPAGHAIPTKTEEKVEEDDLTRRLAELKARG

SEQ ID NO: 29970 - protein, 196 aa, Arabidopsis thaliana
  peptide (1)..(196): Ceres Seq. ID no. 13487048
MNQIFELKFTSKSLQRQARKCEKEERSEKLKVKKAIEKGNMDGARIYAENAIRKRSEQMNYLRLSSRLDAVVARLDTQAKMATITKSMTNIVKSLESSLTTGNLQKMSETMDSFEKQFVNMEVQAEFMDNAMAGSTSLSTPEGEVNSLMQQVADDYGLEVSVGLPQPAGHAIPTKTEEKVEEDDLTRRLAELKARG

SEQ ID NO: 29971 - protein, 156 aa, Arabidopsis thaliana
  peptide (1)..(156): Ceres Seq. ID no. 13487049
MDGARIYAENAIRKRSEQMNYLRLSSRLDAVVARLDTQAKMATITKSMTNIVKSLESSLTTGNLQKMSETMDSFEKQFVNMEVQAEFMDNAMAGSTSLSTPEGEVNSLMQQVADDYGLEVSVGLPQPAGHAIPTKTEEKVEEDDLTRRLAELKARG

SEQ ID NO: 29972 - DNA, 1566 bp, Arabidopsis thaliana
  misc_feature (1)..(1566): Ceres Seq. ID no. 13492623
  misc_feature (1)..(1566): Ortholog of  Ceres SEQ ID NO 14304000 as cited in SEQ ID NO 53798
  misc_feature (1)..(1566): Ortholog of  Ceres SEQ ID NO 14314782 as cited in SEQ ID NO 56830
  misc_feature (1)..(1566): Ortholog of  Ceres SEQ ID NO 14303568 as cited in SEQ ID NO 65364
agatattgatttagacggagatttcattatctatctctcaagtttgatttgcttctgctgtaacaaaaagatcacgatcgcaacttgtgtgtatgtgtgtgtgagagagagattcagatatggcttggttagctagatccatagcgaactcactcaagctcgatgaggaagatgaagatgatgataagcatctgaatcaacagccgtcggaatctgtatcggattcacagtctccacgaggcgttaaggaagacattagcgaacttaccaagaccttgagaacccaattttggggtgtagcttcgttcctctcgcaaccttcttcatctccggatcttcaggagagaaatcaaactcccgatcatccggaggaagatgaggatctaatcgctgggattaagaacgatttcgctgagattggtgggagattcaggactgggatttcgaaactatctgggaacttacctgtgtctgagttcacaaagatcgcttcgaatttcttacaattgagttcagaagatgtggatccgaaagattacgacgtaatcggagttacagaggaattagttgcgtttgtgaaggatcttgcgatgcatcctgagacttggttggattttcctttacctgatgacgacgatagctttgatgactttgaattggccgatgctcaatacgagcacgctttagctgtagaaaggctagcaccgagcttggcttctttgaggattgagctttgccctgaatatatgactgagaattgcttctggaggatttactttgttcttgtgcatcctaaactcagtaaagaccatgccttgcttctctccactcctcaggtactcgaagcaagatcaatgttatctcaggaactacagaaacgaagcaaattacctgtagaagcagggagttctgaagctaatactgtcattgtggaacctcttactgtgcctccttcaccagaaacagcagctgttaaaatcgtaaatccagtcgagtcatctgacgttgaaacagacaagcaccctattgagagcaaagagatacaaattgttgacaaatctgtcattgaagaaagaagcacatccactgcttcttcatctagatttattaatgtgcaagtggatgatgaagacgacgacgatgcagatgattggttgaatgatgaagagacttcatcagttagcgccattggaggaagatcaaccacaaatcatccttttggtgaagacgaagaagatgtatcattcagtgatctagaagaagaagacgataacgaaggagacgtgaaagtgagttacaagaaccttactaactctggttctgattcttcagacaaaaaatcaccagattgggttcagctaaaagaggtaaaagagaagaaaaaatcaaacgactggcttgatgttgatgcagtgtgatgtgatctccaatgtttcttttggcaatatataacatttaaatctacgtcttgcaaatatctgatgctaccgaaatttgttgtgaataatttttatattccattttatcaaaacctatatagccgtagtaaaaaaaactgcaatgttt

SEQ ID NO: 29973 - protein, 432 aa, Arabidopsis thaliana
  peptide (1)..(432): Ceres Seq. ID no. 13492624
MAWLARSIANSLKLDEEDEDDDKHLNQQPSESVSDSQSPRGVKEDISELTKTLRTQFWGVASFLSQPSSSPDLQERNQTPDHPEEDEDLIAGIKNDFAEIGGRFRTGISKLSGNLPVSEFTKIASNFLQLSSEDVDPKDYDVIGVTEELVAFVKDLAMHPETWLDFPLPDDDDSFDDFELADAQYEHALAVERLAPSLASLRIELCPEYMTENCFWRIYFVLVHPKLSKDHALLLSTPQVLEARSMLSQELQKRSKLPVEAGSSEANTVIVEPLTVPPSPETAAVKIVNPVESSDVETDKHPIESKEIQIVDKSVIEERSTSTASSSRFINVQVDDEDDDDADDWLNDEETSSVSAIGGRSTTNHPFGEDEEDVSFSDLEEEDDNEGDVKVSYKNLTNSGSDSSDKKSPDWVQLKEVKEKKKSNDWLDVDAV

SEQ ID NO: 29974 - protein, 275 aa, Arabidopsis thaliana
  peptide (1)..(275): Ceres Seq. ID no. 13492625
MHPETWLDFPLPDDDDSFDDFELADAQYEHALAVERLAPSLASLRIELCPEYMTENCFWRIYFVLVHPKLSKDHALLLSTPQVLEARSMLSQELQKRSKLPVEAGSSEANTVIVEPLTVPPSPETAAVKIVNPVESSDVETDKHPIESKEIQIVDKSVIEERSTSTASSSRFINVQVDDEDDDDADDWLNDEETSSVSAIGGRSTTNHPFGEDEEDVSFSDLEEEDDNEGDVKVSYKNLTNSGSDSSDKKSPDWVQLKEVKEKKKSNDWLDVDAV

SEQ ID NO: 29975 - protein, 223 aa, Arabidopsis thaliana
  peptide (1)..(223): Ceres Seq. ID no. 13492626
MTENCFWRIYFVLVHPKLSKDHALLLSTPQVLEARSMLSQELQKRSKLPVEAGSSEANTVIVEPLTVPPSPETAAVKIVNPVESSDVETDKHPIESKEIQIVDKSVIEERSTSTASSSRFINVQVDDEDDDDADDWLNDEETSSVSAIGGRSTTNHPFGEDEEDVSFSDLEEEDDNEGDVKVSYKNLTNSGSDSSDKKSPDWVQLKEVKEKKKSNDWLDVDAV

SEQ ID NO: 29976 - DNA, 862 bp, Arabidopsis thaliana
  misc_feature (1)..(862): Ceres Seq. ID no. 12332832
  misc_feature (1)..(862): Ortholog of  Ceres SEQ ID NO 15170072 as cited in SEQ ID NO 55533
  misc_feature (1)..(862): Ortholog of  Ceres SEQ ID NO 15173959 as cited in SEQ ID NO 63398
  misc_feature (1)..(862): Ortholog of  Ceres SEQ ID NO 13663564 as cited in SEQ ID NO 66903
aattttagctttctgtctattcaccagattctctctattcgattctccctttacttcttctcgtctctcttctctgctcgtcagatctcaaaatcaatcggatatcgaaaccacaacttcatcaattatgactcttggctcaggaggatctagcgttgttgttccgaggaattttcggttgttggaggagcttgaacgtggggagaaaggtattggggatggaactgtgagctatggaatggatgatggagatgacatctatatgcgttcttggactggcaccatcatcggtcctcacaacactgttcatgaaggtagaatctatcagttgaagctcttttgtgacaaagattacccggagaaacctccaactgtccgattccattcacgtgtcaacatggcttgtgtcaaccacgaaacaggagtggtggatcctaagaaatttgggctacttgcaaactggcaaagagagtacacaatggaggatatactggtacagttgaagaaggaaatgtctacgtcgcataaccgtaagcttgttcaacctccggaaggtacttgcttctagttacttctggaatcttcttctggtttgctagaaaatcattgccccttctaataccaaagtatgtatctgggggtcctccattgtcgttctcaacgcttttttttttttaattcatcaaaaaatggtctgtgtggatggtatggtgatgatgatgatgttgtccgattgatcatctgaagttttatcattgtgtgcaaatatcaaaaacagcttctcttcctcactccatgtgttcaatcttttgaatttaacattttgtgtcagccctttttttatatataaatgaaatctgct

SEQ ID NO: 29977 - protein, 188 aa, Arabidopsis thaliana
  peptide (1)..(188): Ceres Seq. ID no. 12332833
ILAFCLFTRFSLFDSPFTSSRLSSLLVRSQNQSDIETTTSSIMTLGSGGSSVVVPRNFRLLEELERGEKGIGDGTVSYGMDDGDDIYMRSWTGTIIGPHNTVHEGRIYQLKLFCDKDYPEKPPTVRFHSRVNMACVNHETGVVDPKKFGLLANWQREYTMEDILVQLKKEMSTSHNRKLVQPPEGTCF

SEQ ID NO: 29978 - protein, 146 aa, Arabidopsis thaliana
  peptide (1)..(146): Ceres Seq. ID no. 12332834
MTLGSGGSSVVVPRNFRLLEELERGEKGIGDGTVSYGMDDGDDIYMRSWTGTIIGPHNTVHEGRIYQLKLFCDKDYPEKPPTVRFHSRVNMACVNHETGVVDPKKFGLLANWQREYTMEDILVQLKKEMSTSHNRKLVQPPEGTCF

SEQ ID NO: 29979 - protein, 109 aa, Arabidopsis thaliana
  peptide (1)..(109): Ceres Seq. ID no. 12332835
MDDGDDIYMRSWTGTIIGPHNTVHEGRIYQLKLFCDKDYPEKPPTVRFHSRVNMACVNHETGVVDPKKFGLLANWQREYTMEDILVQLKKEMSTSHNRKLVQPPEGTCF

SEQ ID NO: 29980 - DNA, 1592 bp, Arabidopsis thaliana
  misc_feature (1)..(1592): Ceres Seq. ID no. 13488446
  misc_feature (1)..(1592): Ortholog of  Ceres SEQ ID NO 13661452 as cited in SEQ ID NO 68781
atctgaagatcgtagaagaaatcgagaaaacgctttgtaccaattagaaaccctagcgagcggaggaaggagacaaagaacgagacttttgagagattggagatttcaattttgagatcaaatcttgaaatcaacaaataggagaaagatttagtgatgggtaagaagaagaagagagctacagagaaggtgtggtgttattactgcgatagagagtttgatgatgagaagattcttgtgcagcatcagaaagctaagcactttaagtgtcatgtctgtcataagaagctttctacagctagtggcatggtgattcatgttcttcaggttcataaagagaatgttacaaaagttcctaatgctaaagacggtcgagattcaactgatattgaaatatatggaatgcaaggaattccaccccatgtcttgactgctcattatggagaagaagaggatgagcctccagccaaagttgcaaaagttgagattccttctgcccctcttggtggtgtagttcctagaccatatggaatggtatatccgcctcaacaagtacctggtgctgtacctgcacgaccaatgtattatccgggtcctcctatgcgtcatcctgctcctgtatggcaaatgccacctcctcgtccgcaacaatggtatcctcaaaatccagctctttctgtacctccagctgcccatttagggtatcgaccacaaccactttttcctgttcaaaatatggggatgactccaactccaacctcagctcctgccatacaaccatcaccagtcactggagtaactcctcctggaattcctacatcatcacctgcaatgccagttcctcaacctctgttccctgttgtgaataacagcattccttctcaagctccaccattttctgctcctctgcctgttggtggggctcagcaaccatctcatgcagatgctttaggatcagcagatgcttatccgcctaacaattctattccaggtgggactaatgctcattcttatgcctctggcccaaacactagcggtccttcaattggtccacctcctgtaattgcaaacaaagctcctagcaatcagcctaatgaggtctatcttgtatgggatgatgaagcgatgtctatggaggaaagaagaatgtccttaccaaaatacaaagtgcacgatgaaaccagccagatgaactcgataaatgcagcgatagacagacgaatctcagagagtaggcttgctgggcggatggcgttttagaatttggcaccaaaccaaaccagcgtcaaagaaaaggcgatatggatgaaggctttgttacaacaacaagtcttcactcacttttgttcagatactgaatttatgatctgattttaagttattaactttccatctgttgtattctttagccaggtgagttagtttaccattacattgtttagggatctcagagatgttttttctcagaagtttagtcctttttttttttggtcgttggagacttggaggaagaactttgtctccttttcttctgaattgatcaaagtattatattatacagattcacccaaaatgtttgcaccatgttgttc

SEQ ID NO: 29981 - protein, 367 aa, Arabidopsis thaliana
  peptide (1)..(367): Ceres Seq. ID no. 13488447
MGKKKKRATEKVWCYYCDREFDDEKILVQHQKAKHFKCHVCHKKLSTASGMVIHVLQVHKENVTKVPNAKDGRDSTDIEIYGMQGIPPHVLTAHYGEEEDEPPAKVAKVEIPSAPLGGVVPRPYGMVYPPQQVPGAVPARPMYYPGPPMRHPAPVWQMPPPRPQQWYPQNPALSVPPAAHLGYRPQPLFPVQNMGMTPTPTSAPAIQPSPVTGVTPPGIPTSSPAMPVPQPLFPVVNNSIPSQAPPFSAPLPVGGAQQPSHADALGSADAYPPNNSIPGGTNAHSYASGPNTSGPSIGPPPVIANKAPSNQPNEVYLVWDDEAMSMEERRMSLPKYKVHDETSQMNSINAAIDRRISESRLAGRMAF

SEQ ID NO: 29982 - protein, 317 aa, Arabidopsis thaliana
  peptide (1)..(317): Ceres Seq. ID no. 13488448
MVIHVLQVHKENVTKVPNAKDGRDSTDIEIYGMQGIPPHVLTAHYGEEEDEPPAKVAKVEIPSAPLGGVVPRPYGMVYPPQQVPGAVPARPMYYPGPPMRHPAPVWQMPPPRPQQWYPQNPALSVPPAAHLGYRPQPLFPVQNMGMTPTPTSAPAIQPSPVTGVTPPGIPTSSPAMPVPQPLFPVVNNSIPSQAPPFSAPLPVGGAQQPSHADALGSADAYPPNNSIPGGTNAHSYASGPNTSGPSIGPPPVIANKAPSNQPNEVYLVWDDEAMSMEERRMSLPKYKVHDETSQMNSINAAIDRRISESRLAGRMAF

SEQ ID NO: 29983 - protein, 285 aa, Arabidopsis thaliana
  peptide (1)..(285): Ceres Seq. ID no. 13488449
MQGIPPHVLTAHYGEEEDEPPAKVAKVEIPSAPLGGVVPRPYGMVYPPQQVPGAVPARPMYYPGPPMRHPAPVWQMPPPRPQQWYPQNPALSVPPAAHLGYRPQPLFPVQNMGMTPTPTSAPAIQPSPVTGVTPPGIPTSSPAMPVPQPLFPVVNNSIPSQAPPFSAPLPVGGAQQPSHADALGSADAYPPNNSIPGGTNAHSYASGPNTSGPSIGPPPVIANKAPSNQPNEVYLVWDDEAMSMEERRMSLPKYKVHDETSQMNSINAAIDRRISESRLAGRMAF

SEQ ID NO: 29984 - DNA, 1708 bp, Arabidopsis thaliana
  misc_feature (1)..(1708): Ceres Seq. ID no. 12603224
  misc_feature (1)..(1708): Ortholog of  Ceres SEQ ID NO 14307843 as cited in SEQ ID NO 20508
  misc_feature (1)..(1708): Ortholog of  Ceres SEQ ID NO 15170811 as cited in SEQ ID NO 52649
  misc_feature (1)..(1708): Ortholog of  Ceres SEQ ID NO 13638331 as cited in SEQ ID NO 58047
  misc_feature (1)..(1708): Ortholog of  Ceres SEQ ID NO 15225845 as cited in SEQ ID NO 65125
atagagaaagagagagagagaaatacaaagaaaaataaatggagaacggcaaatgcaacggagccacgacggtgaagttaccggagatcaaattcaccaagcttttcatcaacggccagttcattgatgctgcttcagggaagacgtttgagacgatagaccctaggaacggtgaagtgatcgcaacaatagccgaaggagacaaagaagacgttgacttggccgttaacgctgcacgttacgccttcgaccatggtccttggcctcgcatgaccggcttcgagagggcaaagcttatcaacaaattcgcagacttaatagaggaaaacattgaggaattggctaaacttgatgcggttgacggtggaaaattgtttcagttgggaaaatatgctgatattccggccacagccggtcattttcgatacaatgcgggtgcagcagataaaatccacggcgagactcttaaaatgacgcgtcaatctttgttcggatacaccctcaaagaaccaattggagtggttggtaatatcatcccttggaatttcccaagcattatgtttgccacaaaggtggctccggctatggctgctggttgcaccatggtggtcaagccagctgaacagacttcactctctgctttgttctatgcccatctctcaaaagaagcgggaattcctgatggtgtgctcaacattgtaactggttttggatcaactgctggagctgccattgcctcccatatggacgtagacaaagttagtttcactgggtcaacagatgttggaaggaagataatgcaagccgcagccgcaagtaatctcaaaaaagtttcccttgaattaggcgggaaatcgccacttctcatattcaacgacgctgatattgacaaagccgccgatcttgcgcttctcggttgcttttacaacaagggtgaaatttgcgtggcgagctctcgtgtgtttgttcaagaaggtatatacgataaggttgtggagaagttagtagagaaggctaaagattggaccgttggtgatccttttgattccactgctcgacaaggacctcaagtggataaaagacagtttgagaagattctatcttacattgagcacggtaaaaacgaaggagcgaccttattaactggaggaaaagccattggagacaaaggatatttcatccaaccaactatattcgcagatgtcactgaggatatgaagatataccaagatgaaatctttggaccagtcatgtcactgatgaaattcaagacggtagaggaagggatcaaatgcgcaaacaacacgaaatacggtcttgcagcaggaatactaagccaagacatagacttgatcaacacggtttcgaggtcaatcaaagctggaatcatttgggttaattgctacttcgggtttgatcttgactgtccttatggtggctacaagatgagtggtaattgtcgtgaaagtggcatggacgctctcgacaactatctacaaaccaaatccgtcgttatgcctcttcacaattccccttggatgtaataaaattgtccataacacatagaaaaaaacttaatccaatgataataaggcggcttgaattttttctttttctttttgtgcaaccactttttattttttgttcaatacttttttgtttttgttaaaaaaaattttgtgctaaataataataatatttttatact

SEQ ID NO: 29985 - protein, 501 aa, Arabidopsis thaliana
  peptide (1)..(501): Ceres Seq. ID no. 12603225
MENGKCNGATTVKLPEIKFTKLFINGQFIDAASGKTFETIDPRNGEVIATIAEGDKEDVDLAVNAARYAFDHGPWPRMTGFERAKLINKFADLIEENIEELAKLDAVDGGKLFQLGKYADIPATAGHFRYNAGAADKIHGETLKMTRQSLFGYTLKEPIGVVGNIIPWNFPSIMFATKVAPAMAAGCTMVVKPAEQTSLSALFYAHLSKEAGIPDGVLNIVTGFGSTAGAAIASHMDVDKVSFTGSTDVGRKIMQAAAASNLKKVSLELGGKSPLLIFNDADIDKAADLALLGCFYNKGEICVASSRVFVQEGIYDKVVEKLVEKAKDWTVGDPFDSTARQGPQVDKRQFEKILSYIEHGKNEGATLLTGGKAIGDKGYFIQPTIFADVTEDMKIYQDEIFGPVMSLMKFKTVEEGIKCANNTKYGLAAGILSQDIDLINTVSRSIKAGIIWVNCYFGFDLDCPYGGYKMSGNCRESGMDALDNYLQTKSVVMPLHNSPWM

SEQ ID NO: 29986 - protein, 424 aa, Arabidopsis thaliana
  peptide (1)..(424): Ceres Seq. ID no. 12603226
MTGFERAKLINKFADLIEENIEELAKLDAVDGGKLFQLGKYADIPATAGHFRYNAGAADKIHGETLKMTRQSLFGYTLKEPIGVVGNIIPWNFPSIMFATKVAPAMAAGCTMVVKPAEQTSLSALFYAHLSKEAGIPDGVLNIVTGFGSTAGAAIASHMDVDKVSFTGSTDVGRKIMQAAAASNLKKVSLELGGKSPLLIFNDADIDKAADLALLGCFYNKGEICVASSRVFVQEGIYDKVVEKLVEKAKDWTVGDPFDSTARQGPQVDKRQFEKILSYIEHGKNEGATLLTGGKAIGDKGYFIQPTIFADVTEDMKIYQDEIFGPVMSLMKFKTVEEGIKCANNTKYGLAAGILSQDIDLINTVSRSIKAGIIWVNCYFGFDLDCPYGGYKMSGNCRESGMDALDNYLQTKSVVMPLHNSPWM

SEQ ID NO: 29987 - protein, 357 aa, Arabidopsis thaliana
  peptide (1)..(357): Ceres Seq. ID no. 12603227
MTRQSLFGYTLKEPIGVVGNIIPWNFPSIMFATKVAPAMAAGCTMVVKPAEQTSLSALFYAHLSKEAGIPDGVLNIVTGFGSTAGAAIASHMDVDKVSFTGSTDVGRKIMQAAAASNLKKVSLELGGKSPLLIFNDADIDKAADLALLGCFYNKGEICVASSRVFVQEGIYDKVVEKLVEKAKDWTVGDPFDSTARQGPQVDKRQFEKILSYIEHGKNEGATLLTGGKAIGDKGYFIQPTIFADVTEDMKIYQDEIFGPVMSLMKFKTVEEGIKCANNTKYGLAAGILSQDIDLINTVSRSIKAGIIWVNCYFGFDLDCPYGGYKMSGNCRESGMDALDNYLQTKSVVMPLHNSPWM

SEQ ID NO: 29988 - DNA, 640 bp, Arabidopsis thaliana; identical to SEQ ID NO: 21715
  misc_feature (1)..(640): Ceres Seq. ID no. 12323094
  misc_feature (1)..(640): Ortholog of  Ceres SEQ ID NO 12610679 as cited in SEQ ID NO 56077

SEQ ID NO: 29989 - protein, 125 aa, Arabidopsis thaliana; identical to SEQ ID NO: 21716
  peptide (1)..(125): Ceres Seq. ID no. 12323095

SEQ ID NO: 29990 - DNA, 939 bp, Arabidopsis thaliana
  misc_feature (1)..(939): Ceres Seq. ID no. 12322718
  misc_feature (1)..(939): Ortholog of  Ceres SEQ ID NO 13584593 as cited in SEQ ID NO 65340
ggaaattaaaccactgcgaaaaatatgataagccttaggtttcaaccaagcaccaccgccggtgttttatcggcgtcagtgagccgcgccggttttatcaagcggtgcggttcgactaaaccgggaagggttggccggtttgttacaatggcgacggcggcgagtcctcttgaaatctgcgttaaagcttctatcaccactcccaacaagctcggagactgccctttttgccaaaaggtgttactgacaatggaggagaagaatgttccttatgacatgaaaatggtggatttgagtaacaaaccagaatggttcttgaagattagtccagaaggtaaagtcccagttgtgaagtttgatgagaaatgggttccggattcagatgttataacacaggctttagaagagaagtatcctgagcctcctcttgctaccccacctgaaaaggcttcagttggatcgaagatcttttccacatttgtcggttttctgaagagcaaagattcaggagatggaactgagcaagttttgttggatgagcttactacattcaacgattatatcaaggacaatggccctttcataaatggagagaagatctcggcagcagatttgtccttggcaccaaagttataccacatgaagattgcattgggacattacaagaactggtctgttccagattcacttcctttcgtcaaatcctacatggagaatgttttctcgagggaatcattcacgaacacacgggcggaaacagaggatgtaattgctggttggagaccaaaggttatgggttaagagattttgatgttgacctcaagcttccttgtcttctactaaatgtaaaaaacataataatcaaatcttcttcaactgttaccaatgatatataccttgaatccttgattgcttatatgatgaaaactatattgtgtc

SEQ ID NO: 29991 - protein, 258 aa, Arabidopsis thaliana
  peptide (1)..(258): Ceres Seq. ID no. 12322719
MISLRFQPSTTAGVLSASVSRAGFIKRCGSTKPGRVGRFVTMATAASPLEICVKASITTPNKLGDCPFCQKVLLTMEEKNVPYDMKMVDLSNKPEWFLKISPEGKVPVVKFDEKWVPDSDVITQALEEKYPEPPLATPPEKASVGSKIFSTFVGFLKSKDSGDGTEQVLLDELTTFNDYIKDNGPFINGEKISAADLSLAPKLYHMKIALGHYKNWSVPDSLPFVKSYMENVFSRESFTNTRAETEDVIAGWRPKVMG

SEQ ID NO: 29992 - protein, 217 aa, Arabidopsis thaliana
  peptide (1)..(217): Ceres Seq. ID no. 12322720
MATAASPLEICVKASITTPNKLGDCPFCQKVLLTMEEKNVPYDMKMVDLSNKPEWFLKISPEGKVPVVKFDEKWVPDSDVITQALEEKYPEPPLATPPEKASVGSKIFSTFVGFLKSKDSGDGTEQVLLDELTTFNDYIKDNGPFINGEKISAADLSLAPKLYHMKIALGHYKNWSVPDSLPFVKSYMENVFSRESFTNTRAETEDVIAGWRPKVMG

SEQ ID NO: 29993 - protein, 183 aa, Arabidopsis thaliana
  peptide (1)..(183): Ceres Seq. ID no. 12322721
MEEKNVPYDMKMVDLSNKPEWFLKISPEGKVPVVKFDEKWVPDSDVITQALEEKYPEPPLATPPEKASVGSKIFSTFVGFLKSKDSGDGTEQVLLDELTTFNDYIKDNGPFINGEKISAADLSLAPKLYHMKIALGHYKNWSVPDSLPFVKSYMENVFSRESFTNTRAETEDVIAGWRPKVMG

SEQ ID NO: 29994 - DNA, 781 bp, Arabidopsis thaliana
  misc_feature (1)..(781): Ceres Seq. ID no. 13487058
  misc_feature (1)..(781): Ortholog of  Ceres SEQ ID NO 15173990 as cited in SEQ ID NO 1070
  misc_feature (1)..(781): Ortholog of  Ceres SEQ ID NO 13594900 as cited in SEQ ID NO 52042
gaaagacgttataccttccccatccacattttcttgcttaactgcagaacaacaccaaattcgaccctatcaagttttgattcgtgtctacatagaaagagtctcaattgttctgtccctggacttttttttgtttcgtttttcttgttaagatcgaaaactctgttttggtagatttttgtgttcttgattttgattcaagatggggaggctgtttgtggtgaatcttgaagggaagatctatagctgcaaacactgtaagactcatcttgctacttatgaagacatcatctccaagtcttttcactgcaagcatgggaaagcttatctcttcaataaggttgccaatgtttccattggagagactgaagaaagactgatgatgactggtaaacatactgtggctgatattttctgtgtctcgtgtggatcaatcgttggctggaaatacgagactgctcatgagaagaaccagaagtacaaagaaggaaaatcagtgcttgaaagatttaagatatcgggtcctgatgggagcaactattgggtgagtagccatggaaggcatataggtggaagtgatgcagatgatgcttgaatcatctctctctctctctattctctgatttgaccatttcatgtaaatgtaaattattcaacctccattccaatttcttgtaataagactaaccaatactctttcttctcttgacttattatgtctcagtaaataaaaaatctgattctgtctaatgactatttattggttttctgtgaaaccatc

SEQ ID NO: 29995 - protein, 130 aa, Arabidopsis thaliana
  peptide (1)..(130): Ceres Seq. ID no. 13487059
MGRLFVVNLEGKIYSCKHCKTHLATYEDIISKSFHCKHGKAYLFNKVANVSIGETEERLMMTGKHTVADIFCVSCGSIVGWKYETAHEKNQKYKEGKSVLERFKISGPDGSNYWVSSHGRHIGGSDADDA

SEQ ID NO: 29996 - protein, 71 aa, Arabidopsis thaliana
  peptide (1)..(71): Ceres Seq. ID no. 13487060
MMTGKHTVADIFCVSCGSIVGWKYETAHEKNQKYKEGKSVLERFKISGPDGSNYWVSSHGRHIGGSDADDA

SEQ ID NO: 29997 - protein, 70 aa, Arabidopsis thaliana
  peptide (1)..(70): Ceres Seq. ID no. 13487061
MTGKHTVADIFCVSCGSIVGWKYETAHEKNQKYKEGKSVLERFKISGPDGSNYWVSSHGRHIGGSDADDA

SEQ ID NO: 29998 - DNA, 1635 bp, Arabidopsis thaliana
  misc_feature (1)..(1635): Ceres Seq. ID no. 12327239
  misc_feature (1)..(1635): Ortholog of  Ceres SEQ ID NO 14313491 as cited in SEQ ID NO 0
aatctctccttctttagattcctttctatcttcttctcttctcaaagatctgattctctcaagtctcaccaatggcgataattctccgttcatcagatccactcctctcacgaatccatccggaaccacaagaaatcgaccacttcgataacctcccagactcaatcctcctcctcatcttcaacaacatcggcgacgtcaaagccttaggtcgttgctccgtcgtctccaaaagattccattccttaatccctcaagtcgaaaatgtcttcgttcgtgtcgattgcgttatctccgacgacgattcttcctctctcctctccgataaacctcgatccgcctccgccgcttctcctttctccgccattttccgtctcgtcttcaagccgttacaagctttgggacagttccttaaacgctcaggttcttcttctcttccttcaggatcatctccttcttcgttgttgattagtggtggtgatgatggagagattgaacaaggaggtgtaacgcatcattcaccgactcaggttttgaaaaacttcgatgagattaagtttcttaaaatcgagcttcctagtggtgaattagggattgatgatggtgttttattgaaatggagagctgaatttggttctactctcgagaattgtgtgatcctcggtgcttcctctgtgattccgccgacgaattcggataagacggaagcgagttcggctcccgtcgcggcggtggaagataatggaagtataccggaatcgttttatacaaacggagggcttaagctacgtgttgtatggactataagctctttgattgctgcttccgctagacattacttgttgcaaccgattatagcagagcataagacgcttgatagtttagtgcttactgatgttgatggtcaaggagttttgtgtatgaatcgagatcagttagaggaattagagtgaaaccattgtcagcttcttcagcttctaagaggactcttgtacctgctttgaatatgagactttggtatgctccttctttggaattgcctgatgggactgtgttgaagggagctacgcttgtggcgattaggccgagtgagtcgaggaaggaggtgtgtgatgtgtcttgggtttcttctgcgtttgatgagccttatggggtagctgctaagatgttggttaagagaaggacttattgtcttgaaatgaattcgttctaaagcttgacgatttcgctaagtcggatctgaggtgaatgaatcacaaaggctaaccaggttttgaaagagagagactacaatgcataagatcagttttgtatgcagtgtgactaatcttagattcaccaatggagctcaattctatgtgttattggtctattggaaggttcgaattccgtctgcttggtcatcggaaaccgcattcgctggctgttttttgttttagctggcaaagcaatcatgtaagagcaagttttaatcttataaaatcttccatgtagcaagtttttctttcattatttatgtgaatattgtttgtaggtaagagatacagttgctttgcttctccttgtcttttgtatacttgtcccaagttgtttaaaaaataatattgagcaatgtaaagtactttattactttct

SEQ ID NO: 29999 - protein, 293 aa, Arabidopsis thaliana
  peptide (1)..(293): Ceres Seq. ID no. 12327240
MAIILRSSDPLLSRIHPEPQEIDHFDNLPDSILLLIFNNIGDVKALGRCSVVSKRFHSLIPQVENVFVRVDCVISDDDSSSLLSDKPRSASAASPFSAIFRLVFKPLQALGQFLKRSGSSSLPSGSSPSSLLISGGDDGEIEQGGVTHHSPTQVLKNFDEIKFLKIELPSGELGIDDGVLLKWRAEFGSTLENCVILGASSVIPPTNSDKTEASSAPVAAVEDNGSIPESFYTNGGLKLRVVWTISSLIAASARHYLLQPIIAEHKTLDSLVLTDVDGQGVLCMNRDQLEELE

SEQ ID NO: 30000 - DNA, 832 bp, Arabidopsis thaliana; identical to SEQ ID NO: 26742
  misc_feature (1)..(832): Ceres Seq. ID no. 12482239
  misc_feature (1)..(832): Ortholog of  Ceres SEQ ID NO 12557512 as cited in SEQ ID NO 4
  misc_feature (1)..(832): Ortholog of  Ceres SEQ ID NO 13657435 as cited in SEQ ID NO 66084
  misc_feature (1)..(832): Ortholog of  Ceres SEQ ID NO 14309476 as cited in SEQ ID NO 0

SEQ ID NO: 30001 - protein, 235 aa, Arabidopsis thaliana; identical to SEQ ID NO: 26743
  peptide (1)..(235): Ceres Seq. ID no. 12482240

SEQ ID NO: 30002 - protein, 189 aa, Arabidopsis thaliana; identical to SEQ ID NO: 26744
  peptide (1)..(189): Ceres Seq. ID no. 12482241

SEQ ID NO: 30003 - protein, 185 aa, Arabidopsis thaliana; identical to SEQ ID NO: 26745
  peptide (1)..(185): Ceres Seq. ID no. 12482242

SEQ ID NO: 30004 - DNA, 1055 bp, Arabidopsis thaliana
  misc_feature (1)..(1055): Ceres Seq. ID no. 13503881
  misc_feature (1)..(1055): Ortholog of  Ceres SEQ ID NO 14311568 as cited in SEQ ID NO 51732
  misc_feature (1)..(1055): Ortholog of  Ceres SEQ ID NO 14303877 as cited in SEQ ID NO 53500
  misc_feature (1)..(1055): Ortholog of  Ceres SEQ ID NO 15169781 as cited in SEQ ID NO 54829
  misc_feature (1)..(1055): Ortholog of  Ceres SEQ ID NO 15173757 as cited in SEQ ID NO 57537
  misc_feature (1)..(1055): Ortholog of  Ceres SEQ ID NO 13597743 as cited in SEQ ID NO 65452
  misc_feature (1)..(1055): Ortholog of  Ceres SEQ ID NO 13654231 as cited in SEQ ID NO 68285
agcactataccatatctcttttttcttccgtttttccacacattgtctctacctttccctttttcagatttgaccctttgttttcaaaagaaacgatttttagtagccgccggggaatcaggagaatggtgtctccggagaatacgaactggcttagtgattaccctttgattgaaggtgctttctctgatcagaaccccactttcccttggcagatagatggctcagctactgtcagtgttgaagtggatggcttcctttgtgatgcagatgtgatcaaagaaccaagttcaaggaagaggatcaaaactgaatcttgcactggttctaactcgaaagcttgtagggagaaacaaagacgtgatagactaaatgacaagtttacggagttgagttccgtattggaacctgggagaactccaaaaacagacaaggttgctattatcaatgatgcaattcgcatggtgaatcaagcaagagatgaagcgcagaaactaaaggacttgaactcaagcctccaggagaaaatcaaggagttgaaggatgagaagaacgagctgcgtgatgagaaacagaagcttaaggtcgagaaggagagaatcgatcagcaactgaaagctattaagacacagcctcagcctcaaccttgtttcttaccaaatccgcaaacactctctcaagctcaagctcctggaagcaagcttgtccctttcacaacttatcccggctttgcaatgtggcaattcatgcctcctgctgctgttgatacctcacaggaccatgtccttcgtcctccagttgcttaaagctgctgcttctctctactactattaacggttctgtaagattacttcttacgcgcttttttctgatgtaatgattctcacattctgtgattggtgacatagtccactgcaacttaaaatgtaaaattgaaataagcttgcactaaaaatcaaatctcattgtgcaaaaagttggataatttggaaatcattgttttacagattgtggattcagaggaatatgtaaatgtgtaggaagtttctttgaat

SEQ ID NO: 30005 - protein, 267 aa, Arabidopsis thaliana
  peptide (1)..(267): Ceres Seq. ID no. 13503882
HYTISLFSSVFPHIVSTFPFFRFDPLFSKETIFSSRRGIRRMVSPENTNWLSDYPLIEGAFSDQNPTFPWQIDGSATVSVEVDGFLCDADVIKEPSSRKRIKTESCTGSNSKACREKQRRDRLNDKFTELSSVLEPGRTPKTDKVAIINDAIRMVNQARDEAQKLKDLNSSLQEKIKELKDEKNELRDEKQKLKVEKERIDQQLKAIKTQPQPQPCFLPNPQTLSQAQAPGSKLVPFTTYPGFAMWQFMPPAAVDTSQDHVLRPPVA

SEQ ID NO: 30006 - protein, 226 aa, Arabidopsis thaliana
  peptide (1)..(226): Ceres Seq. ID no. 13503883
MVSPENTNWLSDYPLIEGAFSDQNPTFPWQIDGSATVSVEVDGFLCDADVIKEPSSRKRIKTESCTGSNSKACREKQRRDRLNDKFTELSSVLEPGRTPKTDKVAIINDAIRMVNQARDEAQKLKDLNSSLQEKIKELKDEKNELRDEKQKLKVEKERIDQQLKAIKTQPQPQPCFLPNPQTLSQAQAPGSKLVPFTTYPGFAMWQFMPPAAVDTSQDHVLRPPVA

SEQ ID NO: 30007 - DNA, 810 bp, Arabidopsis thaliana
  misc_feature (1)..(810): Ceres Seq. ID no. 12332907
  misc_feature (1)..(810): Ortholog of  Ceres SEQ ID NO 15179603 as cited in SEQ ID NO 0
aagaaaacattcgtagatctatttccgcatctgcttaaacacctacatcgtcgtagatcgcaaaccatggccgtcgctgtagctaagcttctgatctccgccatggcggttttcatgcttgtttctgcttcgttcgcgacctcggaagtgccgttcatggtggttcacaagaaagccactctcaacaggctcaaatctggcgccgaacgcgtctccgtttcctacgacatctataaccaaggatcctcgtcggcgtatgatgtgactctgacagataatagctgggataaaaagacttttgaagttgttaatggaaacacttcaaaatcatgggaaagacttgatgcaggaggtattctgtctcattctatcgaattggaggccaaggttaaaggagtcttctacggtgctcctgctgtcgttactttccgcatccccactaagccagctcttcaggaagcatactcaactccactactacctctagatatcctcgcagacaaacctccaacgaaacctttggacgtggccaagaggttgctggcgaaatatggatcactcgtctccgtgatctccatggtggtttgtttcatatacttggtggcaacacctaagtccaacgtatcaaaggcaagcagcaagaagaagcgttaagttagtgaaatgaaaggtgagaaaggttggtacggtgctgttttctgtttaacagttaaacacagtttcaaaacttgtaagaattagagaacacactttaattttggtgttgcagaggacatacttcaagttcaaagagttattttggttttactt

SEQ ID NO: 30008 - protein, 217 aa, Arabidopsis thaliana
  peptide (1)..(217): Ceres Seq. ID no. 12332908
KKTFVDLFPHLLKHLHRRRSQTMAVAVAKLLISAMAVFMLVSASFATSEVPFMVVHKKATLNRLKSGAERVSVSYDIYNQGSSSAYDVTLTDNSWDKKTFEVVNGNTSKSWERLDAGGILSHSIELEAKVKGVFYGAPAVVTFRIPTKPALQEAYSTPLLPLDILADKPPTKPLDVAKRLLAKYGSLVSVISMVVCFIYLVATPKSNVSKASSKKKR

SEQ ID NO: 30009 - protein, 195 aa, Arabidopsis thaliana
  peptide (1)..(195): Ceres Seq. ID no. 12332909
MAVAVAKLLISAMAVFMLVSASFATSEVPFMVVHKKATLNRLKSGAERVSVSYDIYNQGSSSAYDVTLTDNSWDKKTFEVVNGNTSKSWERLDAGGILSHSIELEAKVKGVFYGAPAVVTFRIPTKPALQEAYSTPLLPLDILADKPPTKPLDVAKRLLAKYGSLVSVISMVVCFIYLVATPKSNVSKASSKKKR

SEQ ID NO: 30010 - protein, 183 aa, Arabidopsis thaliana
  peptide (1)..(183): Ceres Seq. ID no. 12332910
MAVFMLVSASFATSEVPFMVVHKKATLNRLKSGAERVSVSYDIYNQGSSSAYDVTLTDNSWDKKTFEVVNGNTSKSWERLDAGGILSHSIELEAKVKGVFYGAPAVVTFRIPTKPALQEAYSTPLLPLDILADKPPTKPLDVAKRLLAKYGSLVSVISMVVCFIYLVATPKSNVSKASSKKKR

SEQ ID NO: 30011 - DNA, 688 bp, Arabidopsis thaliana
  misc_feature (1)..(688): Ceres Seq. ID no. 12348526
  misc_feature (1)..(688): Ortholog of  Ceres SEQ ID NO 13594809 as cited in SEQ ID NO 51847
  misc_feature (1)..(688): Ortholog of  Ceres SEQ ID NO 15226273 as cited in SEQ ID NO 64934
  misc_feature (1)..(688): Ortholog of  Ceres SEQ ID NO 12617639 as cited in SEQ ID NO 65219
  misc_feature (1)..(688): Ortholog of  Ceres SEQ ID NO 15173998 as cited in SEQ ID NO 0
  misc_feature (1)..(688): Ortholog of  Ceres SEQ ID NO 15178333 as cited in SEQ ID NO 0
attctacatttcctctgcctctttctcagatcacaaaaccctaatttcgaatctttattcttcagaatggctttctgtaacaaactcggtggtctattgagacagaacatttcttctaacggaaatgttccggttacgtctatgctcggatctctccggttgatgtctaccaagcttttcatcggaggtctctcatggggaaccgatgacgcatccttaagggatgcttttgctcacttcggtgacgttgttgatgctaaagttatcgttgatagagagacaggaagatcaagggggtttggatttgtcaacttcaatgatgagggtgctgcaactgctgccatatcagagatggacggaaaggaactgaatggtcgtcacatccgagtgaatcctgctaatgatagaccaagtgctccacgggcttatggaggtggtggtggatacagtggtggaggtggaggctacggaggaggtggtggtgggtacggaggaggaggtggtggctatggaggaggtggtgatggtggtggtggtttctaaacagaggaggtgcttgtgaagaagaagagttaatggttctgtttagttggtttcttctattgaatcttatgttagtacaaaacctgaatgggatttgctgaaaactctttactctttttttggttaccaatcaattcggtttaat

SEQ ID NO: 30012 - protein, 180 aa, Arabidopsis thaliana
  peptide (1)..(180): Ceres Seq. ID no. 12348527
ILHFLCLFLRSQNPNFESLFFRMAFCNKLGGLLRQNISSNGNVPVTSMLGSLRLMSTKLFIGGLSWGTDDASLRDAFAHFGDVVDAKVIVDRETGRSRGFGFVNFNDEGAATAAISEMDGKELNGRHIRVNPANDRPSAPRAYGGGGGYSGGGGGYGGGGGGYGGGGGGYGGGGDGGGGF

SEQ ID NO: 30013 - protein, 158 aa, Arabidopsis thaliana
  peptide (1)..(158): Ceres Seq. ID no. 12348528
MAFCNKLGGLLRQNISSNGNVPVTSMLGSLRLMSTKLFIGGLSWGTDDASLRDAFAHFGDVVDAKVIVDRETGRSRGFGFVNFNDEGAATAAISEMDGKELNGRHIRVNPANDRPSAPRAYGGGGGYSGGGGGYGGGGGGYGGGGGGYGGGGDGGGGF

SEQ ID NO: 30014 - protein, 133 aa, Arabidopsis thaliana
  peptide (1)..(133): Ceres Seq. ID no. 12348529
MLGSLRLMSTKLFIGGLSWGTDDASLRDAFAHFGDVVDAKVIVDRETGRSRGFGFVNFNDEGAATAAISEMDGKELNGRHIRVNPANDRPSAPRAYGGGGGYSGGGGGYGGGGGGYGGGGGGYGGGGDGGGGF

SEQ ID NO: 30015 - DNA, 927 bp, Arabidopsis thaliana
  misc_feature (1)..(927): Ceres Seq. ID no. 13490173
  misc_feature (1)..(927): Ortholog of  Ceres SEQ ID NO 13661767 as cited in SEQ ID NO 61423
tccctgttttaaaaagaagaatcgagtaatcgcgtggttttgaagacgaagaaggaataagacatcacgaggaacacgatgggtgaagcggtcaaggatgggagagaagaagtgattcaagcttggtatatggatgatagtgaagaggatcagagacttcctcaccacaaggatcctaaagagtttgtatcgttgggcaaacttgcagagctgggagtacttagctggagacttgatgctgataactacgaaaccgatgaggatttgaaaaagatccgtgaatctcgtggttactcttacatggacttttgtgaggtatgcccggaaaagcttccaaactatgaagtgaaagtaaagagctttttcgaagaacatttgcatactgatgaagagatccgttactgcgttgcaggaagtggttactttgatgtgagagatcgcaatgaagcttggattagggtatgggtaaagaagggagctatgagtcttacctgctgggatctatcatcgcttcaccgtggactctgacaactatatcaaggcaatgcggcttttcgtgggtgaaccggtatggacaccatacaatcgcccacacgaccatcttcctgcaaggaaagaatatgtcgataacttcatggtcaatgcctctgcttagagagcttcctctctctatatctggctttctgaaaccaggatctataaacaaggcctacaataaagaaagctttcctgtcaagtattggatatttatatatattcctgtgtagaatgatggcttttggtatgcttgagttgttgtaaacttagttacactctctgatatgtctctctttaccatctttgtcgtatcccatatacgaaaagattacattgggattcatattgtcttacgttcgttcctatgtgcaatatgttgagtttttacac

SEQ ID NO: 30016 - protein, 149 aa, Arabidopsis thaliana
  peptide (1)..(149): Ceres Seq. ID no. 15218712
MGEAVKDGREEVIQAWYMDDSEEDQRLPHHKDPKEFVSLGKLAELGVLSWRLDADNYETDEDLKKIRESRGYSYMDFCEVCPEKLPNYEVKVKSFFEEHLHTDEEIRYCVAGSGYFDVRDRNEAWIRVWVKKGAMSLTCWDLSSLHRGL

SEQ ID NO: 30017 - protein, 132 aa, Arabidopsis thaliana
  peptide (1)..(132): Ceres Seq. ID no. 15218713
MDDSEEDQRLPHHKDPKEFVSLGKLAELGVLSWRLDADNYETDEDLKKIRESRGYSYMDFCEVCPEKLPNYEVKVKSFFEEHLHTDEEIRYCVAGSGYFDVRDRNEAWIRVWVKKGAMSLTCWDLSSLHRGL

SEQ ID NO: 30018 - protein, 101 aa, Arabidopsis thaliana
  peptide (1)..(101): Ceres Seq. ID no. 15218714
MGKEGSYESYLLGSIIASPWTLTTISRQCGFSWVNRYGHHTIAHTTIFLQGKNMSITSWSMPLLRELPLSISGFLKPGSINKAYNKESFPVKYWIFIYIPV

SEQ ID NO: 30019 - DNA, 888 bp, Arabidopsis thaliana
  misc_feature (1)..(888): Ceres Seq. ID no. 12338180
  misc_feature (1)..(888): Ortholog of  Ceres SEQ ID NO 13584593 as cited in SEQ ID NO 65340
aaaaatggcccactggtgggtggagaatggtaataattcagtttaaaagctaagccttctcactgattaactcaatcattcatccgtctctgcaaacaaaggaagaagaatcaagatggctctggaaatctgtgtgaaagctgctgttggtgctcctgatcatctcggcgactgtccgttcagccaacgggctcttctcacactcgaggagaagagtcttacctacaaaatccatctgattaacctctctgacaaaccccagtggttcttggacattagtcctcaagggaaagtaccagtgctcaagatcgacgacaagtgggtgactgattccgacgtcatcgttggtatcctcgaggagaagtatcctgatccacctctcaagactcctgctgaatttgcctctgttggatccaacatttttggtacttttgggacattcttgaagagcaaagactccaatgacggatctgaacatgccttgcttgttgagctagaagccttggagaaccatctcaagagtcacgatggtccttttatcgccggggaaagagtttccgcggtggatctaagcttagcaccaaagctttaccaccttcaagttgctcttggccatttcaaaagctggtctgtccctgagagctttccccatgtccataactacatgaagactctgttctcgctcgactcttttgagaaaactaagaccgaggaaaagtatgtgatctctggatgggctcccaaggttaacccttgaaactatgcaccgttatgcgatcgttggtgtggtaatgttgttcaaggtctctctcttatatcagtcaaataatgtacttggaccttttttatgtaatgtactgtatcaatcaaataagaaagcctattttg

SEQ ID NO: 30020 - protein, 213 aa, Arabidopsis thaliana; identical to SEQ ID NO: 29716
  peptide (1)..(213): Ceres Seq. ID no. 12338181

SEQ ID NO: 30021 - DNA, 796 bp, Arabidopsis thaliana
  misc_feature (1)..(796): Ceres Seq. ID no. 12332827
  misc_feature (1)..(796): Ortholog of  Ceres SEQ ID NO 14307351 as cited in SEQ ID NO 54892
atacactctgctttttcctctttcttctctcactcttactctgtctttcttcatcagaccaaaaacaaaccctaatttctcagctcgatttctctcttactccatttctcaatccttcacaaaatgcaccaacttccatttccgagatcgtaaaaaagcttgtggtactttctgataatagagagggaaaaaacgagagagagagaaaacacaaaatgctggaagctccggtgaacaagtcaagcatcctcaatggaggaggaggaggattctctcagctacagagttgcttcggcgattgcagtagcgaagaagaattgtcagtgttgccacgtcataccaaagttgtcgttactggaaacaaccgtaccaaatctgttctcgtcggtcttcaaggcgtcgttaaaaaagccgtcggactcggtggttggcattggctggttttgactaatggaattgaagtgaagttgcagaggaatgcgcttagtgttcttgaacatcctacagggaacgaagaagacaatgatcttgaagtcgaccattctacacagtggaatcatccctccgatatgacaactgaggacactttgaagcctcataagtcgaagaagagaggacacagatcatcgcggttatctcaaaaggctttgtacagggaagtttcttgtgactcacactcaaaaatctcgagtattactcctcgtctgaacatggttgatcttaccaagttggatatggctgcattactgagatattggcgacattttaacctcgtggatgctcttccgaatcccac

SEQ ID NO: 30022 - protein, 264 aa, Arabidopsis thaliana
  peptide (1)..(264): Ceres Seq. ID no. 12332828
TLCFFLFLLSLLLCLSSSDQKQTLISQLDFSLTPFLNPSQNAPTSISEIVKKLVVLSDNREGKNERERKHKMLEAPVNKSSILNGGGGGFSQLQSCFGDCSSEEELSVLPRHTKVVVTGNNRTKSVLVGLQGVVKKAVGLGGWHWLVLTNGIEVKLQRNALSVLEHPTGNEEDNDLEVDHSTQWNHPSDMTTEDTLKPHKSKKRGHRSSRLSQKALYREVSCDSHSKISSITPRLNMVDLTKLDMAALLRYWRHFNLVDALPNP

SEQ ID NO: 30023 - protein, 193 aa, Arabidopsis thaliana
  peptide (1)..(193): Ceres Seq. ID no. 12332829
MLEAPVNKSSILNGGGGGFSQLQSCFGDCSSEEELSVLPRHTKVVVTGNNRTKSVLVGLQGVVKKAVGLGGWHWLVLTNGIEVKLQRNALSVLEHPTGNEEDNDLEVDHSTQWNHPSDMTTEDTLKPHKSKKRGHRSSRLSQKALYREVSCDSHSKISSITPRLNMVDLTKLDMAALLRYWRHFNLVDALPNP

SEQ ID NO: 30024 - DNA, 589 bp, Arabidopsis thaliana
  misc_feature (1)..(589): Ceres Seq. ID no. 13591389
  misc_feature (1)..(589): Ortholog of  Ceres SEQ ID NO 15174145 as cited in SEQ ID NO 0
aaaacaaaaaatttcagaaacttatcatataatggatcatggtaacatgccaccatcatcaccatcatcaatggtaaatcataccaattccaacatgatcatgatgcatatgactttcttctggggaaagaacacggagatactcttctccggctggcccgggacaagtctcggcatgtacgttctatgtctcatcgtcgtcttcctccttgctgttatcgtcgagtggcttgcccattcttcgatccttcgtggacgtggctccactagccgcgccaaggggctcgttcagaccgcagtctacacactcaagacaggccttgcttatctcgtgatgctcgccgttatgtcctttaacggtggagttttcattgtcgctatcgccggattcgccgtgggtttcatgctcttcggaagcactgctttcaagaacccctctgatgacgagaaacccttcgaacaactatgatcactctttattttacttggaaagaacatttcgtttgtgtgtatttaatttgcgtttctttgaattttgatattttgtgactagaatttggaattttatgaagaatatagccatttttgc

SEQ ID NO: 30025 - protein, 155 aa, Arabidopsis thaliana
  peptide (1)..(155): Ceres Seq. ID no. 13591390
KQKISETYHIMDHGNMPPSSPSSMVNHTNSNMIMMHMTFFWGKNTEILFSGWPGTSLGMYVLCLIVVFLLAVIVEWLAHSSILRGRGSTSRAKGLVQTAVYTLKTGLAYLVMLAVMSFNGGVFIVAIAGFAVGFMLFGSTAFKNPSDDEKPFEQL

SEQ ID NO: 30026 - protein, 145 aa, Arabidopsis thaliana
  peptide (1)..(145): Ceres Seq. ID no. 13591391
MDHGNMPPSSPSSMVNHTNSNMIMMHMTFFWGKNTEILFSGWPGTSLGMYVLCLIVVFLLAVIVEWLAHSSILRGRGSTSRAKGLVQTAVYTLKTGLAYLVMLAVMSFNGGVFIVAIAGFAVGFMLFGSTAFKNPSDDEKPFEQL

SEQ ID NO: 30027 - protein, 140 aa, Arabidopsis thaliana
  peptide (1)..(140): Ceres Seq. ID no. 13591392
MPPSSPSSMVNHTNSNMIMMHMTFFWGKNTEILFSGWPGTSLGMYVLCLIVVFLLAVIVEWLAHSSILRGRGSTSRAKGLVQTAVYTLKTGLAYLVMLAVMSFNGGVFIVAIAGFAVGFMLFGSTAFKNPSDDEKPFEQL

SEQ ID NO: 30028 - DNA, 1466 bp, Arabidopsis thaliana
  misc_feature (1)..(1466): Ceres Seq. ID no. 13486699
  misc_feature (1)..(1466): Ortholog of  Ceres SEQ ID NO 15178909 as cited in SEQ ID NO 0
ataaaaaataaaaaatactgtaaaataaatagatagtcataactagtgtattacaaaaaaaaaataaagtaaataaaagtaatcactagctagtgactaaactaaatcccaattatgggtcgtgtacattttggtgtatcagcattctttgttttttgtttgttaggtttatcagctaatgcaaagatcttcaatattaattctcctccaggttctgatatcactaacgcattgttgaaagcattcaatgaggcatgccaattcccgacaaagagcaccgttatgatcccaaaaggtgaatacaagcttggggagatcgtgatgatgggtccatgcaaagctcctataaggattgctcttctaggtaccgtgaaagctgacggtaacgctaatggaaaggagaaatgggtcgctttccgcaacattaatgggtttaagttgaacggaggtggtgttttcgacggtgaaggaaacgcagcttggagggtcaacaactgccacaagactttcaactgcaagaagctccccatcagcattaggtttgatttcgtcaccgacgcgaaaattagaggcattacctccttagatgcaaagcacttccacattaacgtcattggagcaaagaacgtgacattcgaagacgtcaagatcattgcccctgcagagagtcccaacaccgatggtatccacgttggaagaagtgacggaatcaagatcatcaattcatttatctccacaggagatgactgtgtctctgttggagatgggatgaagaaccttcttgtcgaaagagttacatgcggtccgggacatggaatcagtattggaagtcttggaaggtacagccacgaggaaaacgttagtggcatcaagatcatcaactgcactctccaagagactgacaatggtctaaggatcaagacatggccttctgctgcttgtaccacaaccgcctccgatatccatttcgagaacatcctcctcaagaacgtcagcaaccccatcctcatcgaccaagagtactgcccatggaaccaatgcaacaagcagaaaccatcaacgatcaagttggccaacattagcttcaagaagatcagaggaacatcaggaaacaaagacgcagtgaagcttttgtgtagcaagggatatccatgtcagaacgttgaggttggtgacgtgaacatccagtataccggagcagatggtccagcgactttccaatgctctaacgtatcaccaaagcttgtgggaactcagattccaaaagcgtgtagcagcccggtgacaaagccaccaaagtagaatgtgtatatattataaactcaatacacaatctaaatgtacacccttagtgtatgctgtatgcttcaattgatatctttgtgaaatgacctattttttgagcttttggtatattgtaagaaatgaaccattcttgaaaaaaaaaaacatctaactaatttaat

SEQ ID NO: 30029 - protein, 395 aa, Arabidopsis thaliana
  peptide (1)..(395): Ceres Seq. ID no. 13486700
MGRVHFGVSAFFVFCLLGLSANAKIFNINSPPGSDITNALLKAFNEACQFPTKSTVMIPKGEYKLGEIVMMGPCKAPIRIALLGTVKADGNANGKEKWVAFRNINGFKLNGGGVFDGEGNAAWRVNNCHKTFNCKKLPISIRFDFVTDAKIRGITSLDAKHFHINVIGAKNVTFEDVKIIAPAESPNTDGIHVGRSDGIKIINSFISTGDDCVSVGDGMKNLLVERVTCGPGHGISIGSLGRYSHEENVSGIKIINCTLQETDNGLRIKTWPSAACTTTASDIHFENILLKNVSNPILIDQEYCPWNQCNKQKPSTIKLANISFKKIRGTSGNKDAVKLLCSKGYPCQNVEVGDVNIQYTGADGPATFQCSNVSPKLVGTQIPKACSSPVTKPPK

SEQ ID NO: 30030 - protein, 339 aa, Arabidopsis thaliana
  peptide (1)..(339): Ceres Seq. ID no. 13486701
MIPKGEYKLGEIVMMGPCKAPIRIALLGTVKADGNANGKEKWVAFRNINGFKLNGGGVFDGEGNAAWRVNNCHKTFNCKKLPISIRFDFVTDAKIRGITSLDAKHFHINVIGAKNVTFEDVKIIAPAESPNTDGIHVGRSDGIKIINSFISTGDDCVSVGDGMKNLLVERVTCGPGHGISIGSLGRYSHEENVSGIKIINCTLQETDNGLRIKTWPSAACTTTASDIHFENILLKNVSNPILIDQEYCPWNQCNKQKPSTIKLANISFKKIRGTSGNKDAVKLLCSKGYPCQNVEVGDVNIQYTGADGPATFQCSNVSPKLVGTQIPKACSSPVTKPPK

SEQ ID NO: 30031 - protein, 326 aa, Arabidopsis thaliana
  peptide (1)..(326): Ceres Seq. ID no. 13486702
MMGPCKAPIRIALLGTVKADGNANGKEKWVAFRNINGFKLNGGGVFDGEGNAAWRVNNCHKTFNCKKLPISIRFDFVTDAKIRGITSLDAKHFHINVIGAKNVTFEDVKIIAPAESPNTDGIHVGRSDGIKIINSFISTGDDCVSVGDGMKNLLVERVTCGPGHGISIGSLGRYSHEENVSGIKIINCTLQETDNGLRIKTWPSAACTTTASDIHFENILLKNVSNPILIDQEYCPWNQCNKQKPSTIKLANISFKKIRGTSGNKDAVKLLCSKGYPCQNVEVGDVNIQYTGADGPATFQCSNVSPKLVGTQIPKACSSPVTKPPK

SEQ ID NO: 30032 - DNA, 1558 bp, Arabidopsis thaliana
  misc_feature (1)..(1558): Ceres Seq. ID no. 13497382
  misc_feature (1)..(1558): Ortholog of  Ceres SEQ ID NO 14313155 as cited in SEQ ID NO 54706
  misc_feature (1)..(1558): Ortholog of  Ceres SEQ ID NO 13639022 as cited in SEQ ID NO 59811
ggggaagacaattccgagaaaatagagagtagagagatcctaaagagtcaaaagaggtcaggtgattgattaacccgttgaataatctccttctcccgttgaatcgggtcgaaatagttgaactttaagccaaaccctagcttgaggaggaagaggaatggtcggcgtgatgaacagattgaggaatctggacgcttaccctaaaatcaatgaagatttctacaggcgtactctttctggtggtgttatcaccctcgcctcttctattgtcatgctaattctcttcttctccgagcttcagctgtacattcacccggttactgagactcagcttcgtgttgatacatcaagaggagagaagctacggattaattttgatgttacattccctgcgcttcaatgttcgattattagtcttgattccatggatatcagtggggagaggcaccttgatgtgcgacatgacattattaaaaggagattagactcttctggcaatgtcatcgaggcaaaacaagacggaattggtcatactaagattgaaaaacctttacaaaaacatggtggaaggttggaacacaatgaaacatactgtggttcctgttttggagcagaagcgtcagatgatgcttgttgtaattcatgtgaggaagttcgcgaagcttaccgaaagaaaggttgggccctctcggaccctgaatcaatcgaccagtgtaaaagagaaggctttgtgcaaaaggtaaaagatgaagaaggtgaaggttgtaatgttcacggtttcttggaagttaacaaagttgctgggaactttcatttcattcctgggcaaagctttcatcaatccggttttcaatttcatgatatgttattgttccagcaaggcaactacaatattagccacaaggtcaacaggttggcctttggagactttttccccggtgtagtgaaccctcttgatggtgtgcagtggaatcaggggaaacagagtggcgtctatcaatacttcatcaaggtggtaccaagcatatacaccgatgttcaccagaatacaatacagtcaaaccagttctctgtgacagaacatttccagaacatggaagcaggtcgcatgcaatctccgcctggtgttttcttctactatgatctatcgccaattaaggtgatatttgaggagcaacatgtggagttcttgcacttcctaacaaatgtttgcgctatagtaggaggtatcttcacggtatcgggaatagtagattcgttcatataccatggacaacgagcaattaagaagaaaatggagattggtaaattcaactgagttgtttgatattctccacactttcttgatcagctactggagaatcatctctacgggttttacagttagacattaggtttgaatttgtgacaatgcgatgatttaaagaattttgtagtactgtaagatattccaggatctgaactttgcctttcactattcactatctcttcataggcaacatacaaagtgtaaaatgttgttatcaccgattgaaacgaatgttaatttttcctattc

SEQ ID NO: 30033 - protein, 386 aa, Arabidopsis thaliana
  peptide (1)..(386): Ceres Seq. ID no. 13497383
MVGVMNRLRNLDAYPKINEDFYRRTLSGGVITLASSIVMLILFFSELQLYIHPVTETQLRVDTSRGEKLRINFDVTFPALQCSIISLDSMDISGERHLDVRHDIIKRRLDSSGNVIEAKQDGIGHTKIEKPLQKHGGRLEHNETYCGSCFGAEASDDACCNSCEEVREAYRKKGWALSDPESIDQCKREGFVQKVKDEEGEGCNVHGFLEVNKVAGNFHFIPGQSFHQSGFQFHDMLLFQQGNYNISHKVNRLAFGDFFPGVVNPLDGVQWNQGKQSGVYQYFIKVVPSIYTDVHQNTIQSNQFSVTEHFQNMEAGRMQSPPGVFFYYDLSPIKVIFEEQHVEFLHFLTNVCAIVGGIFTVSGIVDSFIYHGQRAIKKKMEIGKFN

SEQ ID NO: 30034 - protein, 382 aa, Arabidopsis thaliana
  peptide (1)..(382): Ceres Seq. ID no. 13497384
MNRLRNLDAYPKINEDFYRRTLSGGVITLASSIVMLILFFSELQLYIHPVTETQLRVDTSRGEKLRINFDVTFPALQCSIISLDSMDISGERHLDVRHDIIKRRLDSSGNVIEAKQDGIGHTKIEKPLQKHGGRLEHNETYCGSCFGAEASDDACCNSCEEVREAYRKKGWALSDPESIDQCKREGFVQKVKDEEGEGCNVHGFLEVNKVAGNFHFIPGQSFHQSGFQFHDMLLFQQGNYNISHKVNRLAFGDFFPGVVNPLDGVQWNQGKQSGVYQYFIKVVPSIYTDVHQNTIQSNQFSVTEHFQNMEAGRMQSPPGVFFYYDLSPIKVIFEEQHVEFLHFLTNVCAIVGGIFTVSGIVDSFIYHGQRAIKKKMEIGKFN

SEQ ID NO: 30035 - protein, 348 aa, Arabidopsis thaliana
  peptide (1)..(348): Ceres Seq. ID no. 13497385
MLILFFSELQLYIHPVTETQLRVDTSRGEKLRINFDVTFPALQCSIISLDSMDISGERHLDVRHDIIKRRLDSSGNVIEAKQDGIGHTKIEKPLQKHGGRLEHNETYCGSCFGAEASDDACCNSCEEVREAYRKKGWALSDPESIDQCKREGFVQKVKDEEGEGCNVHGFLEVNKVAGNFHFIPGQSFHQSGFQFHDMLLFQQGNYNISHKVNRLAFGDFFPGVVNPLDGVQWNQGKQSGVYQYFIKVVPSIYTDVHQNTIQSNQFSVTEHFQNMEAGRMQSPPGVFFYYDLSPIKVIFEEQHVEFLHFLTNVCAIVGGIFTVSGIVDSFIYHGQRAIKKKMEIGKFN

SEQ ID NO: 30036 - DNA, 1613 bp, Arabidopsis thaliana
  misc_feature (1)..(1613): Ceres Seq. ID no. 13490265
  misc_feature (1)..(1613): Ortholog of  Ceres SEQ ID NO 13655660 as cited in SEQ ID NO 63727
agtctccgtcttcttctccatttcacagtcatcttcttcaacatctaaaaccctaagagaacaacaatggcgttactctctcgaatccgttcatcaacatctctcttccgttacctcaacgcatcaccacaaatccgatcactctcctcggcttcaacaatcctcgcaccagattcaaaaactcctctcacaagcaaagaaaaaagcaaagcagctctttctcttctcaaatccgagaaagatccagatcgtatcctcgaaatctgccgtgcagcttctcttactccagattgtcacattgatcgaatcgctttctccgcagccgtcgagaatctcgccgaaaagaatcatttctccgctgtatcgaatctcctcgacggattcatcgaaaacagacatctcaaatcggaacgtttcgctgctcacgccattgttttgtatgctcaagctaatatgcttgatcattctttaagagtttttcgtgatctcgagaaattcgaaatctctcgtacggttaagtctttaaacgctcttctctttgcttgtttagtagctaaggattacaaagaagctaaaagagtttacattgagatgcctaagatgtatggaattgaacctgatctcgagacttataatcgtatgatcaaagtgttttgtgaatccggttcagcgagttcgtcgtactccattgttgcggagatggagcggaaagggataaagccgaatagttcaagctttggtttgatgatttctgggttttatgcagaggataagagtgatgaagtagggaaagtgttggcgatgatgaaagctcgcggtgttaatatcggtgtttcgacttataacattaggattcagagtttgtgtaagaagaagaaatctaaagaagcaaaggctttgcttgatgggatgttatctgcagggatgaagccgaatacggtaacgtatagccatttgattcacgggttttgtaatgaagatgatttcgaggaagcgaagaagttgtttaaggttatggtgaacagaggatgtaagcctgatagtgagtgttacttcactctcatatattacttgtgcaaaggaggagactttgagacggctttgagtctttgtaaagagagtatggagaagaattgggttccgagttttagtatcatgaagtcgcttgttaacggactagctaaggattcaaaagtcgaagaagcaaaggagcttattgggcaagtgaaagagaagttcactagaaacgtcgagttgtggaacgaagtcgaagccgcattaccgcaatgaatcaaaagatagttcccgagatcggtattttcaaaattttacgaattttctctcttcatttgtcagcaatgaaataagtttatatcttcttagacgatagtaatcttttgctcatcatggtagctatagattaatggtttatcttgttagtttttggatttggaatcagagagatgttgagcagtttatctgtaagatttggtcaaagcattgtagcaatgttaagtgtcttcctatgtttatattatatagtatgatgactatataatatagaaagaagtttaatgtttacatgcttaccacgaactaatgtgttttggagc

SEQ ID NO: 30037 - protein, 407 aa, Arabidopsis thaliana
  peptide (1)..(407): Ceres Seq. ID no. 15218814
MALLSRIRSSTSLFRYLNASPQIRSLSSASTILAPDSKTPLTSKEKSKAALSLLKSEKDPDRILEICRAASLTPDCHIDRIAFSAAVENLAEKNHFSAVSNLLDGFIENRHLKSERFAAHAIVLYAQANMLDHSLRVFRDLEKFEISRTVKSLNALLFACLVAKDYKEAKRVYIEMPKMYGIEPDLETYNRMIKVFCESGSASSSYSIVAEMERKGIKPNSSSFGLMISGFYAEDKSDEVGKVLAMMKARGVNIGVSTYNIRIQSLCKKKKSKEAKALLDGMLSAGMKPNTVTYSHLIHGFCNEDDFEEAKKLFKVMVNRGCKPDSECYFTLIYYLCKGGDFETALSLCKESMEKNWVPSFSIMKSLVNGLAKDSKVEEAKELIGQVKEKFTRNVELWNEVEAALPQ

SEQ ID NO: 30038 - protein, 278 aa, Arabidopsis thaliana
  peptide (1)..(278): Ceres Seq. ID no. 15218815
MLDHSLRVFRDLEKFEISRTVKSLNALLFACLVAKDYKEAKRVYIEMPKMYGIEPDLETYNRMIKVFCESGSASSSYSIVAEMERKGIKPNSSSFGLMISGFYAEDKSDEVGKVLAMMKARGVNIGVSTYNIRIQSLCKKKKSKEAKALLDGMLSAGMKPNTVTYSHLIHGFCNEDDFEEAKKLFKVMVNRGCKPDSECYFTLIYYLCKGGDFETALSLCKESMEKNWVPSFSIMKSLVNGLAKDSKVEEAKELIGQVKEKFTRNVELWNEVEAALPQ

SEQ ID NO: 30039 - protein, 232 aa, Arabidopsis thaliana
  peptide (1)..(232): Ceres Seq. ID no. 15218816
MPKMYGIEPDLETYNRMIKVFCESGSASSSYSIVAEMERKGIKPNSSSFGLMISGFYAEDKSDEVGKVLAMMKARGVNIGVSTYNIRIQSLCKKKKSKEAKALLDGMLSAGMKPNTVTYSHLIHGFCNEDDFEEAKKLFKVMVNRGCKPDSECYFTLIYYLCKGGDFETALSLCKESMEKNWVPSFSIMKSLVNGLAKDSKVEEAKELIGQVKEKFTRNVELWNEVEAALPQ

SEQ ID NO: 30040 - DNA, 1370 bp, Arabidopsis thaliana
  misc_feature (1)..(1370): Ceres Seq. ID no. 13490428
  misc_feature (1)..(1370): Ortholog of  Ceres SEQ ID NO 13595351 as cited in SEQ ID NO 55934
  misc_feature (1)..(1370): Ortholog of  Ceres SEQ ID NO 13595513 as cited in SEQ ID NO 56663
  misc_feature (1)..(1370): Ortholog of  Ceres SEQ ID NO 13639645 as cited in SEQ ID NO 57488
aacaactcatatcaattttttaaaaaaaactctccatatatctattacttctacgctaactagagagggagattattgctcttaagtgatggaggaagtaaagaagagggattgtatggagaaggcaaggccattcatttcaatggtagtgttgcaagtagggctagcaggaatggatattctctcaaaggctgttctaaacaaaggcatgagcaattacgtccttgttgtttaccgtcacgccgttgcaaccatcgttatggccccgttcgccttctatttcgacaagaaggtgagaccgaagatgacactgatgatattcttcaagatatcactccttggtttactcgagccagtgatcgaccagaacttatactatctcgggatgaaatatacgacagctacatttgcaaccgccatgtacaacgtcctacccgcaatcactttcgtccttgcctatatatttggcctcgaaagagtaaagctacggtgcattaggagcacgggtaaggtggttggaacattggctactgttggaggagccatgatcatgacacttgtcaaaggcccagttctcgatctgttttggaccaaaggagtctctgcacataacacagctgggaccgacattcatagcgccatcaaaggcgcagtattggtcacgattggttgttttagctatgcatgtttcatgattctccaagcgataacattaaggacttaccctgctgagctctctctcacagcatggatatgtcttatggggacaatagaaggaaccgccgtggcattagtgatggagaaaggaaatcccagcgcatgggccattggttgggacactaaacttcttacagccacctatagtgggatagtgtgctcagcattggcttactacgttggaggagtggtgatgaaaaccagaggtcctgtgtttgtgacagctttcagtcctctttgtatgatcatagtagcgattatgtcgaccatcatctttgctgagcaaatgtaccttggaagggttcttggtgctgtagttatatgtgcaggattataccttgtgatatggggcaaaggaaaagattacaaatataattccacgctgcaattagatgacgaatcagcacaaccaaagctagaactaagcggaaacgggaaggataatgttgatcatgaagtcattactataagtaagcaaggagaacaaagaagaacagctgtagaaacagtctaacttaacggtatcggcacaaatgtttttcatggaggagtaattaacgtatagcagtttcatttgttgtccattatgtttcagagcaacaatgtcatagaattgctaactaccatgggagaataataattgtctaattaag

SEQ ID NO: 30041 - protein, 380 aa, Arabidopsis thaliana
  peptide (1)..(380): Ceres Seq. ID no. 13490429
MEEVKKRDCMEKARPFISMVVLQVGLAGMDILSKAVLNKGMSNYVLVVYRHAVATIVMAPFAFYFDKKVRPKMTLMIFFKISLLGLLEPVIDQNLYYLGMKYTTATFATAMYNVLPAITFVLAYIFGLERVKLRCIRSTGKVVGTLATVGGAMIMTLVKGPVLDLFWTKGVSAHNTAGTDIHSAIKGAVLVTIGCFSYACFMILQAITLRTYPAELSLTAWICLMGTIEGTAVALVMEKGNPSAWAIGWDTKLLTATYSGIVCSALAYYVGGVVMKTRGPVFVTAFSPLCMIIVAIMSTIIFAEQMYLGRVLGAVVICAGLYLVIWGKGKDYKYNSTLQLDDESAQPKLELSGNGKDNVDHEVITISKQGEQRRTAVETV

SEQ ID NO: 30042 - protein, 371 aa, Arabidopsis thaliana
  peptide (1)..(371): Ceres Seq. ID no. 13490430
MEKARPFISMVVLQVGLAGMDILSKAVLNKGMSNYVLVVYRHAVATIVMAPFAFYFDKKVRPKMTLMIFFKISLLGLLEPVIDQNLYYLGMKYTTATFATAMYNVLPAITFVLAYIFGLERVKLRCIRSTGKVVGTLATVGGAMIMTLVKGPVLDLFWTKGVSAHNTAGTDIHSAIKGAVLVTIGCFSYACFMILQAITLRTYPAELSLTAWICLMGTIEGTAVALVMEKGNPSAWAIGWDTKLLTATYSGIVCSALAYYVGGVVMKTRGPVFVTAFSPLCMIIVAIMSTIIFAEQMYLGRVLGAVVICAGLYLVIWGKGKDYKYNSTLQLDDESAQPKLELSGNGKDNVDHEVITISKQGEQRRTAVETV

SEQ ID NO: 30043 - protein, 362 aa, Arabidopsis thaliana
  peptide (1)..(362): Ceres Seq. ID no. 13490431
MVVLQVGLAGMDILSKAVLNKGMSNYVLVVYRHAVATIVMAPFAFYFDKKVRPKMTLMIFFKISLLGLLEPVIDQNLYYLGMKYTTATFATAMYNVLPAITFVLAYIFGLERVKLRCIRSTGKVVGTLATVGGAMIMTLVKGPVLDLFWTKGVSAHNTAGTDIHSAIKGAVLVTIGCFSYACFMILQAITLRTYPAELSLTAWICLMGTIEGTAVALVMEKGNPSAWAIGWDTKLLTATYSGIVCSALAYYVGGVVMKTRGPVFVTAFSPLCMIIVAIMSTIIFAEQMYLGRVLGAVVICAGLYLVIWGKGKDYKYNSTLQLDDESAQPKLELSGNGKDNVDHEVITISKQGEQRRTAVETV

SEQ ID NO: 30044 - DNA, 1623 bp, Arabidopsis thaliana
  misc_feature (1)..(1623): Ceres Seq. ID no. 12335112
  misc_feature (1)..(1623): Ortholog of  Ceres SEQ ID NO 13600220 as cited in SEQ ID NO 0
aaaaataaaaatgaaacctttctctagagtgttcattattttggtcatcgttttgttaacaagctacatagatgcctttaccagaaacgattttccagaggattttctcttcggagctgccacttctgcttatcagtgggaaggagctgttgatgaagatggaagaactcctagcgtctgggacacgacctctcactgttatagtggaagtaatggagatgtagcatgtgatgggtatcacaagtacaaggaagatgttaagttgatggtagatatgggcttacaagcattcagattctctatctcctggccaagacctaatggaagaggatccatgaacccaaaaggtctattgttttacaagaacctcatcaaagaattacggagccatggaattgaaccacacgttacactttaccactacgatcttccgcagcctcttgaagatgagtacggaggatggatcaaccgaaaaatcatagaagactttactgcttttgcagatgtatgcttcagagagtttggcgatgatgtgaagttatggactacaatcaacgaagctacaatattcgccattgctacttatggcgaaggtgtcacgtttggacattgtactcctaccaaattcaccaattgttcttccgggaattcttgtacagaaacatatattgcagggcataacatgttgctagcacatgcctctgcttcaaatttgtataaactaaagtatcagagtaagcaaagaggatccataggccttagtatatatgcattcgggttatctccttatacaaactccaaggacgatgaaatcgcaactcaaagagctaaagctttcctctatggatggatgttgaagccattggtatttggggactatccggatgaaatgaagagaaccttgggatcgagattaccggttttctcagaggcagagtcggaacaaatgaaagggtcatctgactttgtaggaattattcactacacgacagtctatgtcacaaaccaacccgcaccttatatctttcccagcagcgtcaacaaaggcttctttaaagatatgggcgcatatattatatccactgggaattcttcattatttgagtttgaagcaactccatggggtcttgaaggtgttcttgagtatctaaagcagagctataacaatcctccaatctatattcttgaaaatggtacaccaatgaaacacgattcgatgctacaagacacaccaagagttgaatacattcaagcttacattggtgctgtgctcaacgccatcaagaatggatcggacacgagaggttacttcgtatggtcgctgatagatttgtatgagataataggtggatataaaagcagcttcggaatgtaccatgtcaatttcagcgatcctgctcgcaagaggtcgtcaaagctctctgcttcttggtactcaggttttctcaatggtacaattgatgttgcttctcaaaatattactaagttgcagaacaagttctctggctcttcttcattgtaatgttcttaaactaaagtagcctggtttgattttgatctatctattctatgataaagacctcagggatttgcatatgaataaatgatgtgtcttgtgagacc

SEQ ID NO: 30045 - protein, 506 aa, Arabidopsis thaliana
  peptide (1)..(506): Ceres Seq. ID no. 12335113
KIKMKPFSRVFIILVIVLLTSYIDAFTRNDFPEDFLFGAATSAYQWEGAVDEDGRTPSVWDTTSHCYSGSNGDVACDGYHKYKEDVKLMVDMGLQAFRFSISWPRPNGRGSMNPKGLLFYKNLIKELRSHGIEPHVTLYHYDLPQPLEDEYGGWINRKIIEDFTAFADVCFREFGDDVKLWTTINEATIFAIATYGEGVTFGHCTPTKFTNCSSGNSCTETYIAGHNMLLAHASASNLYKLKYQSKQRGSIGLSIYAFGLSPYTNSKDDEIATQRAKAFLYGWMLKPLVFGDYPDEMKRTLGSRLPVFSEAESEQMKGSSDFVGIIHYTTVYVTNQPAPYIFPSSVNKGFFKDMGAYIISTGNSSLFEFEATPWGLEGVLEYLKQSYNNPPIYILENGTPMKHDSMLQDTPRVEYIQAYIGAVLNAIKNGSDTRGYFVWSLIDLYEIIGGYKSSFGMYHVNFSDPARKRSSKLSASWYSGFLNGTIDVASQNITKLQNKFSGSSSL

SEQ ID NO: 30046 - protein, 503 aa, Arabidopsis thaliana
  peptide (1)..(503): Ceres Seq. ID no. 12335114
MKPFSRVFIILVIVLLTSYIDAFTRNDFPEDFLFGAATSAYQWEGAVDEDGRTPSVWDTTSHCYSGSNGDVACDGYHKYKEDVKLMVDMGLQAFRFSISWPRPNGRGSMNPKGLLFYKNLIKELRSHGIEPHVTLYHYDLPQPLEDEYGGWINRKIIEDFTAFADVCFREFGDDVKLWTTINEATIFAIATYGEGVTFGHCTPTKFTNCSSGNSCTETYIAGHNMLLAHASASNLYKLKYQSKQRGSIGLSIYAFGLSPYTNSKDDEIATQRAKAFLYGWMLKPLVFGDYPDEMKRTLGSRLPVFSEAESEQMKGSSDFVGIIHYTTVYVTNQPAPYIFPSSVNKGFFKDMGAYIISTGNSSLFEFEATPWGLEGVLEYLKQSYNNPPIYILENGTPMKHDSMLQDTPRVEYIQAYIGAVLNAIKNGSDTRGYFVWSLIDLYEIIGGYKSSFGMYHVNFSDPARKRSSKLSASWYSGFLNGTIDVASQNITKLQNKFSGSSSL

SEQ ID NO: 30047 - protein, 418 aa, Arabidopsis thaliana
  peptide (1)..(418): Ceres Seq. ID no. 12335115
MVDMGLQAFRFSISWPRPNGRGSMNPKGLLFYKNLIKELRSHGIEPHVTLYHYDLPQPLEDEYGGWINRKIIEDFTAFADVCFREFGDDVKLWTTINEATIFAIATYGEGVTFGHCTPTKFTNCSSGNSCTETYIAGHNMLLAHASASNLYKLKYQSKQRGSIGLSIYAFGLSPYTNSKDDEIATQRAKAFLYGWMLKPLVFGDYPDEMKRTLGSRLPVFSEAESEQMKGSSDFVGIIHYTTVYVTNQPAPYIFPSSVNKGFFKDMGAYIISTGNSSLFEFEATPWGLEGVLEYLKQSYNNPPIYILENGTPMKHDSMLQDTPRVEYIQAYIGAVLNAIKNGSDTRGYFVWSLIDLYEIIGGYKSSFGMYHVNFSDPARKRSSKLSASWYSGFLNGTIDVASQNITKLQNKFSGSSSL

SEQ ID NO: 30048 - DNA, 1868 bp, Arabidopsis thaliana
  misc_feature (1)..(1868): Ceres Seq. ID no. 12333644
  misc_feature (1)..(1868): Ortholog of  Ceres SEQ ID NO 14310375 as cited in SEQ ID NO 59612
atcgctctttgattttgtttctcattgttttgcttcaaattacgcattcgaatctgatcttcgttgatctctgtggaagaaacagataagagaaaatcgcatgaatttttttagaaaactatgttttaattcttcgattgcaagctacttcactaatacgagtcttctgatctcaattcttagtttttctcctcaattgccgatttctctctttcttttcgagcagaaatcgttagatcctttatcgctgtgtaatagtaatactaattttaataatcttgagaataattactccgttcattgttgaatcatggagtccggaggcaaaactaatcgtcagctgcgtaaagctatttgcgtctcaacagacgagaagatgaagaagaagagatcaccttcagtgatagtaattggaggtggtatggctggaatttcagctgctcgcactcttcaagatgcttcctttcaggttgttgtattggagtctcgtgacagaattggtggacgagttcacactgattactcattcggttttccagttgatctcggtgcatcttggttgcatggtgtctgtaaagagaatcctttggctgcagtaattggtagattaggattacctctttatcgtactagcggtgacaattcggttttgtatgatcacgatcttgagagttatgctctgttcgacaaggctggtaaccaagtttctcaagagttggtgacaaaagttggcgaaaattttgagcacattctggaagagatctgtaaagtcagggatgagcaggacgaagacatgtcaatagctcaagccttttctattgtatttaagaggaaccctgaattgaggttggagggacttgcccataatgtgcttcagtggtacttgtgccgcatggaaggatggtttgctgctgatgctgaaaccatctcggcaaagtgttgggatcaggaagaactgttgcccggtggacatggtcttatggttagagggtatcgccctgtaatcaacactctctcgaaaggtcttgatatacgactaagccacagagttaccaagatttcaaggcgctacagtggtgtgaaggtgactacagagaaaggagacacgtttgttgcggatgctgcagtcattgctcttcctctaggagtcttaaagtcaggaatgataacattcgaaccaaagcttccacagtggaaacaagaagctatcaacgatctcggtgttggaatcgagaacaagatcatattgaattttgacaacgtcttttggccaaacgtagagtttttaggagtcgttgcagaaacttcctacggatgcagttatttcttgaacctgcataaagccacaagccatcctgtccttgtttacatgccggctggtcagctcgctagagacatcgagaaaaattccgatgaagcagctgcaaattttgccttttcgcaactacagaaaattcttccagatgcctcttcaccgataaattatttggtatcaaggtggggatcagacatcaattcaatgggatcatatagctatgacattgtgaacaaacctcacgacctctatgagagactgagagtgccattggataatctattctttgcgggggaagccactagctcgagctacccgggatcagttcacggtgcttattcaaccggagtgctggcagctgaagactgcaggatgcgtgtgcttgagcgctatggagagctcgaacatgagatggaagaggaagctcctgcttctgtccctcttctgatctcccgtatgtaatttaaacctcaggtgttttatatcacctccatatgggaacattgttagatttgattttatgagatatcacgagttggaactcttgtgcctg

SEQ ID NO: 30049 - protein, 488 aa, Arabidopsis thaliana
  peptide (1)..(488): Ceres Seq. ID no. 12333645
MESGGKTNRQLRKAICVSTDEKMKKKRSPSVIVIGGGMAGISAARTLQDASFQVVVLESRDRIGGRVHTDYSFGFPVDLGASWLHGVCKENPLAAVIGRLGLPLYRTSGDNSVLYDHDLESYALFDKAGNQVSQELVTKVGENFEHILEEICKVRDEQDEDMSIAQAFSIVFKRNPELRLEGLAHNVLQWYLCRMEGWFAADAETISAKCWDQEELLPGGHGLMVRGYRPVINTLSKGLDIRLSHRVTKISRRYSGVKVTTEKGDTFVADAAVIALPLGVLKSGMITFEPKLPQWKQEAINDLGVGIENKIILNFDNVFWPNVEFLGVVAETSYGCSYFLNLHKATSHPVLVYMPAGQLARDIEKNSDEAAANFAFSQLQKILPDASSPINYLVSRWGSDINSMGSYSYDIVNKPHDLYERLRVPLDNLFFAGEATSSSYPGSVHGAYSTGVLAAEDCRMRVLERYGELEHEMEEEAPASVPLLISRM

SEQ ID NO: 30050 - protein, 466 aa, Arabidopsis thaliana
  peptide (1)..(466): Ceres Seq. ID no. 12333646
MKKKRSPSVIVIGGGMAGISAARTLQDASFQVVVLESRDRIGGRVHTDYSFGFPVDLGASWLHGVCKENPLAAVIGRLGLPLYRTSGDNSVLYDHDLESYALFDKAGNQVSQELVTKVGENFEHILEEICKVRDEQDEDMSIAQAFSIVFKRNPELRLEGLAHNVLQWYLCRMEGWFAADAETISAKCWDQEELLPGGHGLMVRGYRPVINTLSKGLDIRLSHRVTKISRRYSGVKVTTEKGDTFVADAAVIALPLGVLKSGMITFEPKLPQWKQEAINDLGVGIENKIILNFDNVFWPNVEFLGVVAETSYGCSYFLNLHKATSHPVLVYMPAGQLARDIEKNSDEAAANFAFSQLQKILPDASSPINYLVSRWGSDINSMGSYSYDIVNKPHDLYERLRVPLDNLFFAGEATSSSYPGSVHGAYSTGVLAAEDCRMRVLERYGELEHEMEEEAPASVPLLISRM

SEQ ID NO: 30051 - protein, 451 aa, Arabidopsis thaliana
  peptide (1)..(451): Ceres Seq. ID no. 12333647
MAGISAARTLQDASFQVVVLESRDRIGGRVHTDYSFGFPVDLGASWLHGVCKENPLAAVIGRLGLPLYRTSGDNSVLYDHDLESYALFDKAGNQVSQELVTKVGENFEHILEEICKVRDEQDEDMSIAQAFSIVFKRNPELRLEGLAHNVLQWYLCRMEGWFAADAETISAKCWDQEELLPGGHGLMVRGYRPVINTLSKGLDIRLSHRVTKISRRYSGVKVTTEKGDTFVADAAVIALPLGVLKSGMITFEPKLPQWKQEAINDLGVGIENKIILNFDNVFWPNVEFLGVVAETSYGCSYFLNLHKATSHPVLVYMPAGQLARDIEKNSDEAAANFAFSQLQKILPDASSPINYLVSRWGSDINSMGSYSYDIVNKPHDLYERLRVPLDNLFFAGEATSSSYPGSVHGAYSTGVLAAEDCRMRVLERYGELEHEMEEEAPASVPLLISRM

SEQ ID NO: 30052 - DNA, 872 bp, Arabidopsis thaliana
  misc_feature (1)..(872): Ceres Seq. ID no. 12333983
  misc_feature (1)..(872): Ortholog of  Ceres SEQ ID NO 14302000 as cited in SEQ ID NO 52175
  misc_feature (1)..(872): Ortholog of  Ceres SEQ ID NO 14316371 as cited in SEQ ID NO 60113
acctttgaaagcaatcaattccattccatcaaaggggtttttagggtttcgtcactcgccgataatcctctctctctagaaaacatgactgccgaacagaaagtggagctcgccgccaaattggaagagcagaagatcgatcttgataaacctgaggttgaagatgatgatgacaatgatgaggatgattccgaggacgatgacgaggcggagggacatgatggggaggccggtggccggtcaaagcaaagcagaagtgagaaaaagagtcgtaaagctatgttgaagcttgggatgaaaccaatcactggtgttagccgtgtcaccgtcaaaaagagcaagaatatcttgtttgtgatatcaaaacctgatgtgttcaagagtccagcttcagatacatatgtgatctttggtgaggccaagatagaggatttgagctcgcagctgcagagtcaagccgcagagcagttcaaggctcccaacctcagcaacgtgatttcacagggagaaacatcgagtgctgcaactgcagctgctgttcaagatgatgatgatgaagaggtagacgaggagggagtagagccaaaggacatcgagcttgtgatgacccaagcaggagtgtctaagccaagggcagttaaggcgctcaagctcgctaatggagatatagtctctgccatcatggagcttaccacctaaatccgaaacttttcctactttgatgtgcttttcgtgtttttgttttcccattttcctttcaagtgattttgcatgttgtatcattatatactatacgtttggactcatttcatattttagaaatttgagtggattttcatgagtttatactctgtttattcacttatcatccc

SEQ ID NO: 30053 - protein, 232 aa, Arabidopsis thaliana
  peptide (1)..(232): Ceres Seq. ID no. 12333984
TFESNQFHSIKGVFRVSSLADNPLSLENMTAEQKVELAAKLEEQKIDLDKPEVEDDDDNDEDDSEDDDEAEGHDGEAGGRSKQSRSEKKSRKAMLKLGMKPITGVSRVTVKKSKNILFVISKPDVFKSPASDTYVIFGEAKIEDLSSQLQSQAAEQFKAPNLSNVISQGETSSAATAAAVQDDDDEEVDEEGVEPKDIELVMTQAGVSKPRAVKALKLANGDIVSAIMELTT

SEQ ID NO: 30054 - protein, 204 aa, Arabidopsis thaliana
  peptide (1)..(204): Ceres Seq. ID no. 12333985
MTAEQKVELAAKLEEQKIDLDKPEVEDDDDNDEDDSEDDDEAEGHDGEAGGRSKQSRSEKKSRKAMLKLGMKPITGVSRVTVKKSKNILFVISKPDVFKSPASDTYVIFGEAKIEDLSSQLQSQAAEQFKAPNLSNVISQGETSSAATAAAVQDDDDEEVDEEGVEPKDIELVMTQAGVSKPRAVKALKLANGDIVSAIMELTT

SEQ ID NO: 30055 - protein, 139 aa, Arabidopsis thaliana
  peptide (1)..(139): Ceres Seq. ID no. 12333986
MLKLGMKPITGVSRVTVKKSKNILFVISKPDVFKSPASDTYVIFGEAKIEDLSSQLQSQAAEQFKAPNLSNVISQGETSSAATAAAVQDDDDEEVDEEGVEPKDIELVMTQAGVSKPRAVKALKLANGDIVSAIMELTT

SEQ ID NO: 30056 - DNA, 1436 bp, Arabidopsis thaliana
  misc_feature (1)..(1436): Ceres Seq. ID no. 12333640
  misc_feature (1)..(1436): Ortholog of  Ceres SEQ ID NO 13582297 as cited in SEQ ID NO 56486
  misc_feature (1)..(1436): Ortholog of  Ceres SEQ ID NO 13586936 as cited in SEQ ID NO 0
aacacaaacaaaaaaaaagaactctttcgtcgactaatgtgatttattgttcaccggagtattaaagaagatgatgatcggagaaactcgcaggacttatcccactgttgaaatacctccatggccggtacttgaagagcttacaacgtcggagtttttttctccggtgatgaatagtccagattgtagcatgcttgaagctttggcggggttgcagcgttatttgccgtctaacgaaccggatccggagtcatacccggatctattgggtccggattcaccaatcgatgcttactcatgcgaccatttccgtatgtacgatttcaaagtcaggaggtgtgctcgtggccggagtcatgattggacggagtgtccgtacgctcatcccggagaaaaagctcgccggagagatccgaggaagtaccattactctggtacggcttgtcctgattttcgtaaaggtggctgcaagaaaggtgactcttgtgagtttgctcatggtgttttcgagtgttggcttcatccagctcgttaccgtactcagccgtgtaaagacggtggtaactgtctccggaaaatttgtttctttgctcattcaccggatcagcttaggtttttacatactcggagccctgacagagttgattcttttgacgtttcgtctccgattcgtgctagagcatttcagctgtcgatttctccggtttctggttcgccaccgatgagtccaagagctgactcggagtcttctccgatgactcagtcactgagtcgatctctcgggtcttgttcgataaacgacgtcgttccttcgtttaggaatttacagtttaattcggtaaaatcatttcctcgtaacaatcctttattcggattcgggtcgccccgtggatcgatcttgggtcctgggtttcagtctctgcctacaacaccgacccgaccagggaatctggatatttgggagtatggtttggaggaagaacccgtaatggagcgtgtcgttgagtcgggtcgtgagctacgagaaaagatgcgcgagaaactgcacaaggagaattgcatggatcgagttgcccaggatccggatcagaatttgggtgaggctcctgatgtcgggtgggtatctgacctgctcatgtaaagaaaaaaatctgaccgtatttcgaagtctcattggcttttttggatatcttccaaggaaaagaggaagggatcttagtgtgttcatattattttatttactaatctcgtattttatctgctaataagaattaattatggattttggggcctgatttttctaagatgatcgttgtatagatgtgccttagggttttaattatgaaatagtattaatataatcgtgttttataagactataatgttagattgtaaccacttggtactaatctatgaatgaatgcaaattattatct

SEQ ID NO: 30057 - protein, 356 aa, Arabidopsis thaliana
  peptide (1)..(356): Ceres Seq. ID no. 12333641
MMIGETRRTYPTVEIPPWPVLEELTTSEFFSPVMNSPDCSMLEALAGLQRYLPSNEPDPESYPDLLGPDSPIDAYSCDHFRMYDFKVRRCARGRSHDWTECPYAHPGEKARRRDPRKYHYSGTACPDFRKGGCKKGDSCEFAHGVFECWLHPARYRTQPCKDGGNCLRKICFFAHSPDQLRFLHTRSPDRVDSFDVSSPIRARAFQLSISPVSGSPPMSPRADSESSPMTQSLSRSLGSCSINDVVPSFRNLQFNSVKSFPRNNPLFGFGSPRGSILGPGFQSLPTTPTRPGNLDIWEYGLEEEPVMERVVESGRELREKMREKLHKENCMDRVAQDPDQNLGEAPDVGWVSDLLM

SEQ ID NO: 30058 - protein, 355 aa, Arabidopsis thaliana
  peptide (1)..(355): Ceres Seq. ID no. 12333642
MIGETRRTYPTVEIPPWPVLEELTTSEFFSPVMNSPDCSMLEALAGLQRYLPSNEPDPESYPDLLGPDSPIDAYSCDHFRMYDFKVRRCARGRSHDWTECPYAHPGEKARRRDPRKYHYSGTACPDFRKGGCKKGDSCEFAHGVFECWLHPARYRTQPCKDGGNCLRKICFFAHSPDQLRFLHTRSPDRVDSFDVSSPIRARAFQLSISPVSGSPPMSPRADSESSPMTQSLSRSLGSCSINDVVPSFRNLQFNSVKSFPRNNPLFGFGSPRGSILGPGFQSLPTTPTRPGNLDIWEYGLEEEPVMERVVESGRELREKMREKLHKENCMDRVAQDPDQNLGEAPDVGWVSDLLM

SEQ ID NO: 30059 - protein, 323 aa, Arabidopsis thaliana
  peptide (1)..(323): Ceres Seq. ID no. 12333643
MNSPDCSMLEALAGLQRYLPSNEPDPESYPDLLGPDSPIDAYSCDHFRMYDFKVRRCARGRSHDWTECPYAHPGEKARRRDPRKYHYSGTACPDFRKGGCKKGDSCEFAHGVFECWLHPARYRTQPCKDGGNCLRKICFFAHSPDQLRFLHTRSPDRVDSFDVSSPIRARAFQLSISPVSGSPPMSPRADSESSPMTQSLSRSLGSCSINDVVPSFRNLQFNSVKSFPRNNPLFGFGSPRGSILGPGFQSLPTTPTRPGNLDIWEYGLEEEPVMERVVESGRELREKMREKLHKENCMDRVAQDPDQNLGEAPDVGWVSDLLM

SEQ ID NO: 30060 - DNA, 1349 bp, Arabidopsis thaliana
  misc_feature (1)..(1349): Ceres Seq. ID no. 12334159
  misc_feature (1)..(1349): Ortholog of  Ceres SEQ ID NO 15226049 as cited in SEQ ID NO 55683
  misc_feature (1)..(1349): Ortholog of  Ceres SEQ ID NO 13597225 as cited in SEQ ID NO 63994
atctatcttctccacgttactaccacctaacctctcatccaccttttctcctttaagcatatttcatttcatctccgaaaggaattgtatcgttcctcacacacgcctctcatctcttatccattcttgtccttttttcagctcaacaagaatggataattgtactggagaaaatcccatggcttctcagttgaacattctccgatgcccgttcttgaggaacatcaatgagcccactaacctctctttctcttcatccttgccttttcccatccctgcaagagctgggaaaggacctatatttgaagatggtcccaattttgatacggcgtttaggcttttccatggccaagatggagttgtccctctctctgacaccgctcgaactgaagcccagaagcctgtgcctgtattccatccacttgctgctaaggcggccactattagtctctcatcctttggatctggagggccttttggatttgatgcattttctgacatgtttaaaaatcaaaagaagaagtcagattcatccaaaaataagggaggaaaccacgaagccatgggcgacgaatggcttaaaacaggaaactgcccaatagcaaaatcatatcgagctgtaagtggtgtggcaccacttgtggcaaagatcctgcaaccccctccaggcatgaaatttaaatgccctcaagcaatagtcacagctcgagcagcgatatcaaaaacacctttcgccaagaacctccgtccacaacctttaccagctaaagtactagtgatcgggatgctgggcatggcgttaaatgtgcctttaggggtctggagagagcacactgaaaagttttcggcatcttggtttatagctcttcacgcagcggttccattcataggaatactgagaaagtcagtgttgatgcctaaaacagctatggtattcaccatagcagcatcagttttgggacaggtgattgggtcaagagcagagaggcggagactcaagtctgtagctgagaagaagttgacattggaggtaccaaatccgtcttctgttgaagcagatcagatgcaatttgccggagtttcatcagatggaagatgcggtgataaagtggtgatgaagtggaatcccatgatgcttgatgttgcaagccctgtgtcttccggagcagctactgttgtctgctaaaaggattttgtaattctcttggaggatttatatatataattgtttttcttgtattttttcggctgattgtatttaaaaagtttcttaatgtttgagaaaaacaagaataaagccattttttaaactgttaattgtattttaatgtaaaagacttgtttgatcg

SEQ ID NO: 30061 - protein, 394 aa, Arabidopsis thaliana
  peptide (1)..(394): Ceres Seq. ID no. 12334160
SIFSTLLPPNLSSTFSPLSIFHFISERNCIVPHTRLSSLIHSCPFFSSTRMDNCTGENPMASQLNILRCPFLRNINEPTNLSFSSSLPFPIPARAGKGPIFEDGPNFDTAFRLFHGQDGVVPLSDTARTEAQKPVPVFHPLAAKAATISLSSFGSGGPFGFDAFSDMFKNQKKKSDSSKNKGGNHEAMGDEWLKTGNCPIAKSYRAVSGVAPLVAKILQPPPGMKFKCPQAIVTARAAISKTPFAKNLRPQPLPAKVLVIGMLGMALNVPLGVWREHTEKFSASWFIALHAAVPFIGILRKSVLMPKTAMVFTIAASVLGQVIGSRAERRRLKSVAEKKLTLEVPNPSSVEADQMQFAGVSSDGRCGDKVVMKWNPMMLDVASPVSSGAATVVC

SEQ ID NO: 30062 - protein, 344 aa, Arabidopsis thaliana
  peptide (1)..(344): Ceres Seq. ID no. 12334161
MDNCTGENPMASQLNILRCPFLRNINEPTNLSFSSSLPFPIPARAGKGPIFEDGPNFDTAFRLFHGQDGVVPLSDTARTEAQKPVPVFHPLAAKAATISLSSFGSGGPFGFDAFSDMFKNQKKKSDSSKNKGGNHEAMGDEWLKTGNCPIAKSYRAVSGVAPLVAKILQPPPGMKFKCPQAIVTARAAISKTPFAKNLRPQPLPAKVLVIGMLGMALNVPLGVWREHTEKFSASWFIALHAAVPFIGILRKSVLMPKTAMVFTIAASVLGQVIGSRAERRRLKSVAEKKLTLEVPNPSSVEADQMQFAGVSSDGRCGDKVVMKWNPMMLDVASPVSSGAATVVC

SEQ ID NO: 30063 - protein, 335 aa, Arabidopsis thaliana
  peptide (1)..(335): Ceres Seq. ID no. 12334162
MASQLNILRCPFLRNINEPTNLSFSSSLPFPIPARAGKGPIFEDGPNFDTAFRLFHGQDGVVPLSDTARTEAQKPVPVFHPLAAKAATISLSSFGSGGPFGFDAFSDMFKNQKKKSDSSKNKGGNHEAMGDEWLKTGNCPIAKSYRAVSGVAPLVAKILQPPPGMKFKCPQAIVTARAAISKTPFAKNLRPQPLPAKVLVIGMLGMALNVPLGVWREHTEKFSASWFIALHAAVPFIGILRKSVLMPKTAMVFTIAASVLGQVIGSRAERRRLKSVAEKKLTLEVPNPSSVEADQMQFAGVSSDGRCGDKVVMKWNPMMLDVASPVSSGAATVVC

SEQ ID NO: 30064 - DNA, 1665 bp, Arabidopsis thaliana
  misc_feature (1)..(1665): Ceres Seq. ID no. 13489296
  misc_feature (1)..(1665): Ortholog of  Ceres SEQ ID NO 13648400 as cited in SEQ ID NO 20329
  misc_feature (1)..(1665): Ortholog of  Ceres SEQ ID NO 13659393 as cited in SEQ ID NO 67047
  misc_feature (1)..(1665): Ortholog of  Ceres SEQ ID NO 13654553 as cited in SEQ ID NO 68417
  misc_feature (1)..(1665): Ortholog of  Ceres SEQ ID NO 12635162 as cited in SEQ ID NO 0
  misc_feature (1)..(1665): Ortholog of  Ceres SEQ ID NO 15175178 as cited in SEQ ID NO 0
aacatttgttcgtgtaaggctttttttactatctcttctatttactcaatttcttcttacacatttgttatacgtaaaaggaacatttctttgattctttttttgttgtcactaccaaaacgtactgatttgttttttgaataggtgggttcctagagtaaaaaagagaccgatatttaaacttttgtcccttgactaaaactcaaaacatttctgtttgttttttgttagttaaatatgtttaaaataaataaataatcatatagctatttatgaaagtattaatatacaaataactttcaaaagttattaattaaatttcaaacaataatcctgtgtttcaatatctacttttgcaattgttatttccataattccattaatacaaatttttagatattgatagctacctaactcacactttttaaattttagttatgtcgacaagtttttttttttgttacatgatgttaattacgactaatcaggtttttaaagtaataaatcaatattaaaaagtgcctcaacaaagaaaaagtgttggaccatggtcgtctataattatttatcaaaacatagtcacacacacccttgccgttattgtctagaactctctctcgctctcccaaaaactcatctctcaccaccgtctcaaaccaagttcgatctaaaagccttttcctttagattctctccaacaacaaatctctttgaatcactcagtcatgtcggttttacttcctctctgtctgattatctccatgttcacctattcaaacgcagcgtattgtctttgcaaagaggggaacgagcaagtgcttcagaaggcaatagactacgcttgtggaaatggagctgactgtacccagatccaacccaccggagcttgttaccaacctaacaccgtcaaaaaccactgtgacgtcgccgtcaacagttactaccagaaaaaagcttcttccggtgccacctgtgactttaacggcgccgcctccccctctactacccctccgtcaactgcttcaaactgtttaactggttcaagctctagtggcactcctaccacaggaacaccaactactgggacaccaaccagtgggaccccgactaccggaactccgaccaccggaacccccaccactggaactccaaccagtgggactccaactagtggcttcccaaataccgggactccaaacacagggactaacactgggatgccaaattccaacgggatgccaacttcatcgtcatcttcggtgttcccggggactactcttggcccgactgggagcgggggactaggcgatccaaatgctggagagaagctgtctgttcgaactaacacagtggtcttcttattaaccggtgtagcagcaatgcttgtcatatgagggcttagaagtcacacgcggttatggttgtaattgagttgctgagagatcagatcttgccaacggctcatggttgatagagtcatcttttttttcactcgtctttctaggatttggacttaggttggccgagagacgtaatgctggtagtagctagtattttgggttatgtacaactttaactaagagctttacttttgtaaatccggaggatgagatgctcttttgtttcttatattctttttaatccgtttacttggatctttcatcc

SEQ ID NO: 30065 - protein, 222 aa, Arabidopsis thaliana
  peptide (1)..(222): Ceres Seq. ID no. 13489297
MSVLLPLCLIISMFTYSNAAYCLCKEGNEQVLQKAIDYACGNGADCTQIQPTGACYQPNTVKNHCDVAVNSYYQKKASSGATCDFNGAASPSTTPPSTASNCLTGSSSSGTPTTGTPTTGTPTSGTPTTGTPTTGTPTTGTPTSGTPTSGFPNTGTPNTGTNTGMPNSNGMPTSSSSSVFPGTTLGPTGSGGLGDPNAGEKLSVRTNTVVFLLTGVAAMLVI

SEQ ID NO: 30066 - protein, 210 aa, Arabidopsis thaliana
  peptide (1)..(210): Ceres Seq. ID no. 13489298
MFTYSNAAYCLCKEGNEQVLQKAIDYACGNGADCTQIQPTGACYQPNTVKNHCDVAVNSYYQKKASSGATCDFNGAASPSTTPPSTASNCLTGSSSSGTPTTGTPTTGTPTSGTPTTGTPTTGTPTTGTPTSGTPTSGFPNTGTPNTGTNTGMPNSNGMPTSSSSSVFPGTTLGPTGSGGLGDPNAGEKLSVRTNTVVFLLTGVAAMLVI

SEQ ID NO: 30067 - DNA, 762 bp, Arabidopsis thaliana
  misc_feature (1)..(762): Ceres Seq. ID no. 12482057
  misc_feature (1)..(762): Ortholog of  Ceres SEQ ID NO 15176693 as cited in SEQ ID NO 1078
  misc_feature (1)..(762): Ortholog of  Ceres SEQ ID NO 12615074 as cited in SEQ ID NO 62676
  misc_feature (1)..(762): Ortholog of  Ceres SEQ ID NO 13598819 as cited in SEQ ID NO 0
  misc_feature (1)..(762): Ortholog of  Ceres SEQ ID NO 13600371 as cited in SEQ ID NO 0
catacatacgtagagagatccaaaatacccaacctcgcagagtaaaagcaaaaagaagaagaaatcagagagaatgtcgtggcaagcatacgttgatgagcatttgatgtgtgatgtcggcgacggccaaggtcaccaccttaccgccgccgctatcatcggccatgatggtagcgtttgggctcagagcgctaattttcctcagttcaaacctcaagagatcacagacattatgaaggatttcgatgagcctggtcacctcgctcccacgggtatgttcctcgcagggctaaagtatatggtcatccaaggcgagcctaatgctgtcatccgtggcaagaagggagctgggggaatcacgatcaagaaaacaggacaatcaatggtgtttggtctgtacgaagagccagtgactccaggacaatgcaacatggttgtcgagaggttgggtgattacttgatcgaacagggtctttgaaccatctacaatgttttatatctctttctctataaatcattaaacctttgtttctctttttgggttttggttttccgtttctataatttaattttgggtcttcctggtttctactttagccaagtttaacagaaagcttaagcctaaggttgcagataataacactaagcctgtgtgaagaagccaagacttataagacttttgtttcttttttctctttttcatggttattgattaatttgtgtttaaaaaaaaaaaaaattaattttatagtattgttgcgt

SEQ ID NO: 30068 - protein, 134 aa, Arabidopsis thaliana
  peptide (1)..(134): Ceres Seq. ID no. 12482058
MSWQAYVDEHLMCDVGDGQGHHLTAAAIIGHDGSVWAQSANFPQFKPQEITDIMKDFDEPGHLAPTGMFLAGLKYMVIQGEPNAVIRGKKGAGGITIKKTGQSMVFGLYEEPVTPGQCNMVVERLGDYLIEQGL

SEQ ID NO: 30069 - protein, 123 aa, Arabidopsis thaliana
  peptide (1)..(123): Ceres Seq. ID no. 12482059
MCDVGDGQGHHLTAAAIIGHDGSVWAQSANFPQFKPQEITDIMKDFDEPGHLAPTGMFLAGLKYMVIQGEPNAVIRGKKGAGGITIKKTGQSMVFGLYEEPVTPGQCNMVVERLGDYLIEQGL

SEQ ID NO: 30070 - protein, 81 aa, Arabidopsis thaliana
  peptide (1)..(81): Ceres Seq. ID no. 12482060
MKDFDEPGHLAPTGMFLAGLKYMVIQGEPNAVIRGKKGAGGITIKKTGQSMVFGLYEEPVTPGQCNMVVERLGDYLIEQGL

SEQ ID NO: 30071 - DNA, 1787 bp, Arabidopsis thaliana
  misc_feature (1)..(1787): Ceres Seq. ID no. 13500097
  misc_feature (1)..(1787): Ortholog of  Ceres SEQ ID NO 15168908 as cited in SEQ ID NO 20765
atttgctcacctttcgccgattgattttgtacatcacacgcagacgcagcttttagtatttttttcaacaatcgcttttttttttttctcgatctccgtgaagctctcgaatctctggttttgagttttggagaatggtgtttttccgcagcgtatcggcctttactaggctgaggtctcgcgtcggccaacaatcttcactcagcaattctgtcagatggattcagatgcagagctctaccgacctggacctgaagtcgcagctgcaagagttaattccggaacagcaggaccgtctgaagaaactgaagtcagaacatgggaaggtccaactgggaaacatcactgttgatatggttattggtggaatgagagggatgactggattgctttgggaaacctcattgcttgacccggaagagggtattcgctttaggggattgtcgattcctgagtgccagaaagtattacctactgcccagtctggagctgaaccattaccggagggtcttttgtggcttctcttaactggaaaggtacctagcaaagagcaagttgaagcactgtcgaaagacttggcgaaccgtgctgctgtgccagattatgtgtacaatgccatcgatgctctgccttccacagctcatccaatgactcaatttgctagcggtgttatggccctccaggtgcaaagtgagtttcaaaaggcatatgagaatggaattcataagtcaaagttctgggagccaacatatgaggattgcctcaacctgattgctcgtgttcctgttgtagctgcatatgtttatcgaaggatgtataagaatggtgattccattccctcagataaatctttggattatggtgcaaatttttcccacatgttgggatttgatgatgaaaaggtgaaagagctcatgaggctttacatcaccatccacagtgatcatgaaggtggaaatgttagtgctcacactggtcacctggttggtagtgcactttcagacccatatctgtcatttgcagctgcattaaatggtttagctgggccactccatggtttggctaatcaggaagttttgctttggatcaaatcagtcgtagaggaatgtggagaagatatatcaaaagaacagttgaaagaatatgtttggaaaacattaaacagtggcaaggttattccgggatatggtcacggtgttctgcgcaatactgatccaagatatgtatgccaaagagaatttgccttgaagcatctacctgacgaccctcttttccagctggtgtcaaagctttatgaagttgtgcctcctgttctcactgagcttggaaaggtgaagaacccgtggccaaatgttgatgctcacagtggggtcttgctgaaccactatggtctaaccgaagcaaggtactacaccgtgctctttggtgtttcaaggagtcttggcatctgctctcagcttatatgggaccgagctcttggacttgcacttgagaggccaaagagtgttaccatggactggcttgaagcccattgtaagaaagcttcatctgcttaagtcaccaccgagtcctgagttgtcgcactctctcgtgtttcaacaaaagtcattctcttccacactggatagctttttttgtttttaccttctattgacagaagaaacatttgttcatgtagaaattgttcctgagaaacacatgcttggtgcaaatttgcatttccgggaaactcgtgataataaataaacagttgtattcagtttgcgtaaaaatcaaacatcaatatc

SEQ ID NO: 30072 - protein, 473 aa, Arabidopsis thaliana
  peptide (1)..(473): Ceres Seq. ID no. 13500098
MVFFRSVSAFTRLRSRVGQQSSLSNSVRWIQMQSSTDLDLKSQLQELIPEQQDRLKKLKSEHGKVQLGNITVDMVIGGMRGMTGLLWETSLLDPEEGIRFRGLSIPECQKVLPTAQSGAEPLPEGLLWLLLTGKVPSKEQVEALSKDLANRAAVPDYVYNAIDALPSTAHPMTQFASGVMALQVQSEFQKAYENGIHKSKFWEPTYEDCLNLIARVPVVAAYVYRRMYKNGDSIPSDKSLDYGANFSHMLGFDDEKVKELMRLYITIHSDHEGGNVSAHTGHLVGSALSDPYLSFAAALNGLAGPLHGLANQEVLLWIKSVVEECGEDISKEQLKEYVWKTLNSGKVIPGYGHGVLRNTDPRYVCQREFALKHLPDDPLFQLVSKLYEVVPPVLTELGKVKNPWPNVDAHSGVLLNHYGLTEARYYTVLFGVSRSLGICSQLIWDRALGLALERPKSVTMDWLEAHCKKASSA

SEQ ID NO: 30073 - protein, 442 aa, Arabidopsis thaliana
  peptide (1)..(442): Ceres Seq. ID no. 13500099
MQSSTDLDLKSQLQELIPEQQDRLKKLKSEHGKVQLGNITVDMVIGGMRGMTGLLWETSLLDPEEGIRFRGLSIPECQKVLPTAQSGAEPLPEGLLWLLLTGKVPSKEQVEALSKDLANRAAVPDYVYNAIDALPSTAHPMTQFASGVMALQVQSEFQKAYENGIHKSKFWEPTYEDCLNLIARVPVVAAYVYRRMYKNGDSIPSDKSLDYGANFSHMLGFDDEKVKELMRLYITIHSDHEGGNVSAHTGHLVGSALSDPYLSFAAALNGLAGPLHGLANQEVLLWIKSVVEECGEDISKEQLKEYVWKTLNSGKVIPGYGHGVLRNTDPRYVCQREFALKHLPDDPLFQLVSKLYEVVPPVLTELGKVKNPWPNVDAHSGVLLNHYGLTEARYYTVLFGVSRSLGICSQLIWDRALGLALERPKSVTMDWLEAHCKKASSA

SEQ ID NO: 30074 - protein, 400 aa, Arabidopsis thaliana
  peptide (1)..(400): Ceres Seq. ID no. 13500100
MVIGGMRGMTGLLWETSLLDPEEGIRFRGLSIPECQKVLPTAQSGAEPLPEGLLWLLLTGKVPSKEQVEALSKDLANRAAVPDYVYNAIDALPSTAHPMTQFASGVMALQVQSEFQKAYENGIHKSKFWEPTYEDCLNLIARVPVVAAYVYRRMYKNGDSIPSDKSLDYGANFSHMLGFDDEKVKELMRLYITIHSDHEGGNVSAHTGHLVGSALSDPYLSFAAALNGLAGPLHGLANQEVLLWIKSVVEECGEDISKEQLKEYVWKTLNSGKVIPGYGHGVLRNTDPRYVCQREFALKHLPDDPLFQLVSKLYEVVPPVLTELGKVKNPWPNVDAHSGVLLNHYGLTEARYYTVLFGVSRSLGICSQLIWDRALGLALERPKSVTMDWLEAHCKKASSA

SEQ ID NO: 30075 - DNA, 1556 bp, Arabidopsis thaliana
  misc_feature (1)..(1556): Ceres Seq. ID no. 12334251
  misc_feature (1)..(1556): Ortholog of  Ceres SEQ ID NO 14316553 as cited in SEQ ID NO 20761
accgaactctggttctagagagagaaaccattctctccgactaagagagagaagcgaatttgtttttttttcttttgtgggttcaattcgaattgttttccctgagactcaagttactgtgtcattactctgcattgagcaatgggtagcaacgaagaaggaaaccccactaacaactctgataagccatcgcaagctgctgctcctgagcagagtaatgttcatgtgtatcatcatgactgggctgctatgcaggcatattatgggcctagagttggtatacctcaatattacaactcaaatttggcgcctggtcatgctccaccgccttatatgtgggcgtctccatcgccaatgatggctccttatggagcaccatatccaccattttgccctcctggtggagtttatgctcatcctggtgttcaaatgggctcacaaccacaaggtcctgtttctcaatcagcatctggagttacaacccctttgaccattgatgcaccagctaattcagctggaaactcagatcatgggttcatgaaaaagctgaaagagttcgatggacttgcaatgtcaataagcaataacaaagttgggagtgctgaacatagcagcagtgaacataggagttctcagagctccgagaatgatggctctagcaatggtagtgatggtaatacaactgggggagaacaatctaggaggaaaagaaggcaacaaagatcaccaagcactggtgaaagaccctcatctcaaaacagtctgcctcttagaggtgaaaatgagaaacccgatgtgactatggggactcctgttatgcccacagcaatgagtttccaaaactctgctggcatgaacggtgtgccacagccatggaatgaaaaagaggttaaacgagagaagagaaaacagtcaaaccgagaatctgctaggaggtcaagactgaggaagcaggctgaaacagaacaactatctgtcaaagttgacgcattagtagctgagaacatgtctctgaggtctaaactaggccagctaaacaatgagtctgagaaactacggctggagaacgaagctatattggatcaactgaaagcgcaagcaacagggaaaacagagaacctgatctctcgagttgataagaacaactctgtatcaggtagcaaaactgtgcagcatcaactgttaaatgcaagtccgataaccgatcctgtcgcggctagctgaccgtggccgcaacaatgagaacccgatatttcttcctttgggttgtgattgtaacttaaaaggagactttttgtttttattcttagatttgtagctctctgcatagtgagcagaaattgatgtaatatggtttaagagattcggtgttctctggtgtgtgctgcaaccacataattggtgatagataggtttagttatataagcaaatgtattagagataaggggagacatatttgatggtctttcgtttcgtaaacacacttttcttatgtgatatataaaagaagatttatcacattagtcttcaaaatcgacgtgcttcccttaaccac

SEQ ID NO: 30076 - protein, 360 aa, Arabidopsis thaliana
  peptide (1)..(360): Ceres Seq. ID no. 12334252
MGSNEEGNPTNNSDKPSQAAAPEQSNVHVYHHDWAAMQAYYGPRVGIPQYYNSNLAPGHAPPPYMWASPSPMMAPYGAPYPPFCPPGGVYAHPGVQMGSQPQGPVSQSASGVTTPLTIDAPANSAGNSDHGFMKKLKEFDGLAMSISNNKVGSAEHSSSEHRSSQSSENDGSSNGSDGNTTGGEQSRRKRRQQRSPSTGERPSSQNSLPLRGENEKPDVTMGTPVMPTAMSFQNSAGMNGVPQPWNEKEVKREKRKQSNRESARRSRLRKQAETEQLSVKVDALVAENMSLRSKLGQLNNESEKLRLENEAILDQLKAQATGKTENLISRVDKNNSVSGSKTVQHQLLNASPITDPVAAS

SEQ ID NO: 30077 - protein, 324 aa, Arabidopsis thaliana
  peptide (1)..(324): Ceres Seq. ID no. 12334253
MQAYYGPRVGIPQYYNSNLAPGHAPPPYMWASPSPMMAPYGAPYPPFCPPGGVYAHPGVQMGSQPQGPVSQSASGVTTPLTIDAPANSAGNSDHGFMKKLKEFDGLAMSISNNKVGSAEHSSSEHRSSQSSENDGSSNGSDGNTTGGEQSRRKRRQQRSPSTGERPSSQNSLPLRGENEKPDVTMGTPVMPTAMSFQNSAGMNGVPQPWNEKEVKREKRKQSNRESARRSRLRKQAETEQLSVKVDALVAENMSLRSKLGQLNNESEKLRLENEAILDQLKAQATGKTENLISRVDKNNSVSGSKTVQHQLLNASPITDPVAAS

SEQ ID NO: 30078 - protein, 296 aa, Arabidopsis thaliana
  peptide (1)..(296): Ceres Seq. ID no. 12334254
MWASPSPMMAPYGAPYPPFCPPGGVYAHPGVQMGSQPQGPVSQSASGVTTPLTIDAPANSAGNSDHGFMKKLKEFDGLAMSISNNKVGSAEHSSSEHRSSQSSENDGSSNGSDGNTTGGEQSRRKRRQQRSPSTGERPSSQNSLPLRGENEKPDVTMGTPVMPTAMSFQNSAGMNGVPQPWNEKEVKREKRKQSNRESARRSRLRKQAETEQLSVKVDALVAENMSLRSKLGQLNNESEKLRLENEAILDQLKAQATGKTENLISRVDKNNSVSGSKTVQHQLLNASPITDPVAAS

SEQ ID NO: 30079 - DNA, 465 bp, Arabidopsis thaliana
  misc_feature (1)..(465): Ceres Seq. ID no. 12558719
  misc_feature (1)..(465): Ortholog of  Ceres SEQ ID NO 13656408 as cited in SEQ ID NO 65810
gctcattagggtttctcatctacgacggcgtggtgttcctccttcctgctctgaaaaatggcgaagagaacgaagaaggttggaatcgtcggcaaatacggaacacgttatggtgcgagtatcaggaagcagattaagaagatggaggtcagccagcacagcaagtacttctgtgagttctgtggcaagtacggagtgaagcgaaaggctgttggtatctggggttgcaaggattgtggcaaggtcaaggcaggtggtgcttacacaatgaacaccgccagtgcggtcactgttagaagcacgatcagaaggttgagggagcagatcgagggttaaaagtctgctggctttttatatttggtttccttgttttgacaatttaagttttgcaaactctatgcttgtgattttgaatcaagacttatacattgagcagtttaagcaggtttttattttttgttgagt

SEQ ID NO: 30080 - protein, 92 aa, Arabidopsis thaliana [sequence omitted]

SEQ ID NO: 30081 - protein, 65 aa, Arabidopsis thaliana
  peptide (1)..(65): Ceres Seq. ID no. 12558721
LIRVSHLRRRGVPPSCSEKWRRERRRLESSANTEHVMVRVSGSRLRRWRSASTASTSVSSVASTE

SEQ ID NO: 30082 - protein, 64 aa, Arabidopsis thaliana
  peptide (1)..(64): Ceres Seq. ID no. 12558722
MEVSQHSKYFCEFCGKYGVKRKAVGIWGCKDCGKVKAGGAYTMNTASAVTVRSTIRRLREQIEG

SEQ ID NO: 30083 - DNA, 1120 bp, Arabidopsis thaliana
  misc_feature (1)..(1120): Ceres Seq. ID no. 12335201
  misc_feature (1)..(1120): Ortholog of  Ceres SEQ ID NO 13581579 as cited in SEQ ID NO 58361
  misc_feature (1)..(1120): Ortholog of  Ceres SEQ ID NO 13596474 as cited in SEQ ID NO 62169
  misc_feature (1)..(1120): Ortholog of  Ceres SEQ ID NO 13598714 as cited in SEQ ID NO 62656
  misc_feature (1)..(1120): Ortholog of  Ceres SEQ ID NO 13597519 as cited in SEQ ID NO 64759
  misc_feature (1)..(1120): Ortholog of  Ceres SEQ ID NO 13597870 as cited in SEQ ID NO 64982
  misc_feature (1)..(1120): Ortholog of  Ceres SEQ ID NO 13595926 as cited in SEQ ID NO 67778
  misc_feature (1)..(1120): Ortholog of  Ceres SEQ ID NO 12567001 as cited in SEQ ID NO 0
aaaaatctcatttctatctctctctctcttctcaacaatggcttcactcaaatctctcttcctcctcttcctcttcttcttcacagctcaatctcgcttaaccacaaacttctactcaaaaacatgcccaagattcctcgacatcatccgtgacacaatcacaaacaaacaaatcactaatcccaccaccgcagccgccgttatccgtctcttcttccacgactgtttccctaacggctgcgacgcctccgtcctcatctcctccaccgccttcaacaccgcagaacgtgactcttccatcaacctctcactccccggagacggtttcgacgtcattgtccgagccaaaacagctctcgaactcgcttgtcccaacacagtttcttgctcagacatcatctccgtcgcaacacgtgatcttctaatcaccgtcggtggtccttactacgacgttttcctcggccgtcgtgattcaagaacgtcgaaatcttctcttttaaccgatcttcttcctcttccttccacaccaatctctaaaatcattcaacagtttgaatcaaaaggtttcactgttcaagaaatggttgctcttagtggagcacattctatagggttttcacattgtaaagagtttgtgggtcgggtgggtcggaataataccgggtataacccgagattcgcagtggctttgaagaaagcttgtgctaattaccctaaagatccgactatctctgtgtttaatgatattatgactcctaataagtttgataatatgtattatcagaatcttaaaaagggtcttgggttacttgaatcggatcatggattatattctgaccctagaaccagatattttgttgatctttatgctaagaatcaagatctgtttttcaaagattttgctaaagctatgcagaagttgagtctttttggtatacagactggtagaagaggagagatccgaagaaggtgcgatgctattaattgagtttatgtttttaatttatttaatttttgggttatattggattgtgaatcttctgagttattacactcatatgtttttgtgtaatgtaaaagatatatggttgattgttctaattaagagattggttttggt

SEQ ID NO: 30084 - protein, 328 aa, Arabidopsis thaliana
  peptide (1)..(328): Ceres Seq. ID no. 12335202
KISFLSLSLFSTMASLKSLFLLFLFFFTAQSRLTTNFYSKTCPRFLDIIRDTITNKQITNPTTAAAVIRLFFHDCFPNGCDASVLISSTAFNTAERDSSINLSLPGDGFDVIVRAKTALELACPNTVSCSDIISVATRDLLITVGGPYYDVFLGRRDSRTSKSSLLTDLLPLPSTPISKIIQQFESKGFTVQEMVALSGAHSIGFSHCKEFVGRVGRNNTGYNPRFAVALKKACANYPKDPTISVFNDIMTPNKFDNMYYQNLKKGLGLLESDHGLYSDPRTRYFVDLYAKNQDLFFKDFAKAMQKLSLFGIQTGRRGEIRRRCDAIN

SEQ ID NO: 30085 - protein, 316 aa, Arabidopsis thaliana
  peptide (1)..(316): Ceres Seq. ID no. 12335203
MASLKSLFLLFLFFFTAQSRLTTNFYSKTCPRFLDIIRDTITNKQITNPTTAAAVIRLFFHDCFPNGCDASVLISSTAFNTAERDSSINLSLPGDGFDVIVRAKTALELACPNTVSCSDIISVATRDLLITVGGPYYDVFLGRRDSRTSKSSLLTDLLPLPSTPISKIIQQFESKGFTVQEMVALSGAHSIGFSHCKEFVGRVGRNNTGYNPRFAVALKKACANYPKDPTISVFNDIMTPNKFDNMYYQNLKKGLGLLESDHGLYSDPRTRYFVDLYAKNQDLFFKDFAKAMQKLSLFGIQTGRRGEIRRRCDAIN

SEQ ID NO: 30086 - DNA, 1441 bp, Arabidopsis thaliana
  misc_feature (1)..(1441): Ceres Seq. ID no. 12385648
  misc_feature (1)..(1441): Ortholog of  Ceres SEQ ID NO 13581327 as cited in SEQ ID NO 51165
  misc_feature (1)..(1441): Ortholog of  Ceres SEQ ID NO 12610002 as cited in SEQ ID NO 55823
  misc_feature (1)..(1441): Ortholog of  Ceres SEQ ID NO 14308310 as cited in SEQ ID NO 58573
  misc_feature (1)..(1441): Ortholog of  Ceres SEQ ID NO 14308795 as cited in SEQ ID NO 59140
  misc_feature (1)..(1441): Ortholog of  Ceres SEQ ID NO 14313354 as cited in SEQ ID NO 61520
  misc_feature (1)..(1441): Ortholog of  Ceres SEQ ID NO 13596744 as cited in SEQ ID NO 62765
gaggaccatttcttctctctcattctctcttctgacgtgtttcccttcttcggtttctcatcctcacgtccgccggatttcgaggaaacgaagaagaagaagaacaacaacaacaaaagccttttgagatatggacagcttctggcaattaggtgatgagctacgaggtcagacgagagcatcagaggatcacaaatggtctactgttgcaacgaagctagctgagcaaactagaatgaaaggggagaggatgaacaatcttgatctctccaaaggttacactgagtttagaccaagtgagaaattcagtttccaggagaacaatcttaacttcaacatgttgaatttggatggtaaatttggtgaaagcatcatggggaagacttcgatgcagagcaatgtttataatatgaatactgttttccagaagaatgactttaagagtggaggcaacatgaaagttaacaagtataatggtaatgttgttgctaacaaggagatgagcaacaacaaacataacaacaactgcaatgataatgggaatatgaatttggctgttgacaagaggtttaaaaccttgcctgcttcggagactcttccgaggaatgaagttcttggtggttacatctttgtttgcaacaatgatactatgcaggaggatatgaaacgtcacctctttggtttacctccaagatacagagactctgttcgagctataacacctggattgcctctgtttctttacaactacaccactcaccagcttcatggtatctttgaggcaacaacttttggaggtactaatattgatgctactgcttgggaagacaaaaagtgcaaaggagagtcaaggtttccggctcaggtaaggatcagagtgaggaaaatctgcaaagccttggaagaggactccttcaggccagtacttcaccactatgatggtccaaaattccgccttgagctctctgttcctgagacattggatctgctagatctttgcgaacaagctggttctgcataagccgaaacgatcaaccttgcaatgccacgttgcaaagagggggatgttttgtatgaaatctatctatatatgtaagacctaccgtaagagcgtaagcttttgggatttagttaagagtcggattcaaatgtatgtttactaagaagggatgagagtatgtgtggtcttaaggcaagcaaaagagcgaagaggctctgccgaataagcgactactcttgttctgtgtcgtgtctgatgtgtgagtgtgtgtctgtgtttgtgagagattcgatactctttgaaacaaagatttatgtagaagaatatagagaaagaaagactactataaacagagccaaaaaatgatgtgagctactgtttgtgcttgcttgtgtaaggataaaacaaattgtcctaaatgacaagtttaacttttaagtg

SEQ ID NO: 30087 - protein, 296 aa, Arabidopsis thaliana
  peptide (1)..(296): Ceres Seq. ID no. 12385649
MDSFWQLGDELRGQTRASEDHKWSTVATKLAEQTRMKGERMNNLDLSKGYTEFRPSEKFSFQENNLNFNMLNLDGKFGESIMGKTSMQSNVYNMNTVFQKNDFKSGGNMKVNKYNGNVVANKEMSNNKHNNNCNDNGNMNLAVDKRFKTLPASETLPRNEVLGGYIFVCNNDTMQEDMKRHLFGLPPRYRDSVRAITPGLPLFLYNYTTHQLHGIFEATTFGGTNIDATAWEDKKCKGESRFPAQVRIRVRKICKALEEDSFRPVLHHYDGPKFRLELSVPETLDLLDLCEQAGSA

SEQ ID NO: 30088 - protein, 261 aa, Arabidopsis thaliana
  peptide (1)..(261): Ceres Seq. ID no. 12385650
MKGERMNNLDLSKGYTEFRPSEKFSFQENNLNFNMLNLDGKFGESIMGKTSMQSNVYNMNTVFQKNDFKSGGNMKVNKYNGNVVANKEMSNNKHNNNCNDNGNMNLAVDKRFKTLPASETLPRNEVLGGYIFVCNNDTMQEDMKRHLFGLPPRYRDSVRAITPGLPLFLYNYTTHQLHGIFEATTFGGTNIDATAWEDKKCKGESRFPAQVRIRVRKICKALEEDSFRPVLHHYDGPKFRLELSVPETLDLLDLCEQAGSA

SEQ ID NO: 30089 - protein, 256 aa, Arabidopsis thaliana
  peptide (1)..(256): Ceres Seq. ID no. 12385651
MNNLDLSKGYTEFRPSEKFSFQENNLNFNMLNLDGKFGESIMGKTSMQSNVYNMNTVFQKNDFKSGGNMKVNKYNGNVVANKEMSNNKHNNNCNDNGNMNLAVDKRFKTLPASETLPRNEVLGGYIFVCNNDTMQEDMKRHLFGLPPRYRDSVRAITPGLPLFLYNYTTHQLHGIFEATTFGGTNIDATAWEDKKCKGESRFPAQVRIRVRKICKALEEDSFRPVLHHYDGPKFRLELSVPETLDLLDLCEQAGSA

SEQ ID NO: 30090 - DNA, 893 bp, Arabidopsis thaliana
  misc_feature (1)..(893): Ceres Seq. ID no. 12322897
  misc_feature (1)..(893): Ortholog of  Ceres SEQ ID NO 15176514 as cited in SEQ ID NO 1114
  misc_feature (1)..(893): Ortholog of  Ceres SEQ ID NO 15173688 as cited in SEQ ID NO 61918
  misc_feature (1)..(893): Ortholog of  Ceres SEQ ID NO 13662513 as cited in SEQ ID NO 63303
  misc_feature (1)..(893): Ortholog of  Ceres SEQ ID NO 12616929 as cited in SEQ ID NO 63962
  misc_feature (1)..(893): Ortholog of  Ceres SEQ ID NO 15225803 as cited in SEQ ID NO 67623
  misc_feature (1)..(893): Ortholog of  Ceres SEQ ID NO 15174088 as cited in SEQ ID NO 0
gtcgtcttcgtcgatcatcgccgggaaaccacaccagtctcaatggcgaaaactctatcccgatccaccgcctcatgcgtcgctaagcgtttcttttccacctccaatgccgtcgcctctccttctccgcttccttctcatctcatctctcgtcgattctcaccgacgatcttccacgccgtcggatacatcccagctttgacccgcttcacaacgatccggacccggatggataggtctggcggctcatattcgccgcttaaatccggatcaaacttcagcgatcgaccacccactgaaatggcacctctatttcctggttgcgattacgagcattggcttatcgtcatggagaagcccggaggtgaaaatgctcagaaacagcaaatgatcgattgctatgttcaaaccctagctaaaattgttggcagtgaggaagaggctagaaagaagatctataatgtttcgtgtgagaggtattttgggtttggctgtgagattgatgaggagacatcaaacaaactcgaaggacttcctggtgttctgttcgtgcttccggactcttatgttgatccagagttcaaagattacggagctgaactgtttgtgaatggagaagtagttcctcgtccaccagagagacagaggaggatggtggagttaacgaatcaaagagggtcggataaaccaaagtaccatgaccgaatcagaaatgtccgacggagggagaacatgcgttgactcttattattctcagactttacgctagagcaatcatttcgatttgatctccgatgcttttttttgttggtttgttcttttaatttgctagactcttaatgaataatgtatatgatggtgttttggtcatatcgaatgtatcaattgtttct

SEQ ID NO: 30091 - protein, 246 aa, Arabidopsis thaliana
  peptide (1)..(246): Ceres Seq. ID no. 12322898
VVFVDHRRETTPVSMAKTLSRSTASCVAKRFFSTSNAVASPSPLPSHLISRRFSPTIFHAVGYIPALTRFTTIRTRMDRSGGSYSPLKSGSNFSDRPPTEMAPLFPGCDYEHWLIVMEKPGGENAQKQQMIDCYVQTLAKIVGSEEEARKKIYNVSCERYFGFGCEIDEETSNKLEGLPGVLFVLPDSYVDPEFKDYGAELFVNGEVVPRPPERQRRMVELTNQRGSDKPKYHDRIRNVRRRENMR

SEQ ID NO: 30092 - protein, 232 aa, Arabidopsis thaliana
  peptide (1)..(232): Ceres Seq. ID no. 12322899
MAKTLSRSTASCVAKRFFSTSNAVASPSPLPSHLISRRFSPTIFHAVGYIPALTRFTTIRTRMDRSGGSYSPLKSGSNFSDRPPTEMAPLFPGCDYEHWLIVMEKPGGENAQKQQMIDCYVQTLAKIVGSEEEARKKIYNVSCERYFGFGCEIDEETSNKLEGLPGVLFVLPDSYVDPEFKDYGAELFVNGEVVPRPPERQRRMVELTNQRGSDKPKYHDRIRNVRRRENMR

SEQ ID NO: 30093 - protein, 170 aa, Arabidopsis thaliana
  peptide (1)..(170): Ceres Seq. ID no. 12322900
MDRSGGSYSPLKSGSNFSDRPPTEMAPLFPGCDYEHWLIVMEKPGGENAQKQQMIDCYVQTLAKIVGSEEEARKKIYNVSCERYFGFGCEIDEETSNKLEGLPGVLFVLPDSYVDPEFKDYGAELFVNGEVVPRPPERQRRMVELTNQRGSDKPKYHDRIRNVRRRENMR

SEQ ID NO: 30094 - DNA, 866 bp, Arabidopsis thaliana
  misc_feature (1)..(866): Ceres Seq. ID no. 12396917
  misc_feature (1)..(866): Ortholog of  Ceres SEQ ID NO 12556855 as cited in SEQ ID NO 1
  misc_feature (1)..(866): Ortholog of  Ceres SEQ ID NO 12466413 as cited in SEQ ID NO 20470
  misc_feature (1)..(866): Ortholog of  Ceres SEQ ID NO 13661434 as cited in SEQ ID NO 61387
  misc_feature (1)..(866): Ortholog of  Ceres SEQ ID NO 15178869 as cited in SEQ ID NO 0
attcagttgaatctccaccgacaccataatctgagtgcaagagtccatactctccatcagagagactcaaatccaattctccttactgcaacagctcaaatttggaatcttttgtaaaaacccagatcagcggatctcgaatggcgaagcacacggcagcgttgaaggtgggactagctttactggccctcagcatgattggctacatacttggtccaccgctctactggcacctcacggaagccttagccgtttcagccacttcttgctctgcttgcgtctgtgattgctcttcgttgcctcttctcaccatcccaactggactcagcaatggttcattcactgattgtgcaaagcgtgatccagaggtgaacgaagacacagagaagaactacgctgaacttttaacagaggaactgaagcagcgtgaagcagcatcgatggagaaacacaaacgagtagacacgggtctgctagaggccaagaagataacatcatcttaccaaaaggaggcagataagtgtaactcgggtatggagacttgtgaagaagcaagagagaaggcggagaaagcacttgtggagcagaagaagctgacttctatgtgggaacagagagctcgtcagaaaggatacaaagatggagccaccaagtcaactgttaaatccaaaagcggcactgaggttgcttaaggacacaccaaaggttttgatttcttatcacacgaaagaaaagtttcagtgtatctgtgaatttgattcatactattgtatttaagttttctgatggagataaatcaatcagatggaatgaaaacatgtaaccaaaacaacaaaggattagtggattttgaacaaagttacaac

SEQ ID NO: 30095 - protein, 183 aa, Arabidopsis thaliana
  peptide (1)..(183): Ceres Seq. ID no. 12396918
MAKHTAALKVGLALLALSMIGYILGPPLYWHLTEALAVSATSCSACVCDCSSLPLLTIPTGLSNGSFTDCAKRDPEVNEDTEKNYAELLTEELKQREAASMEKHKRVDTGLLEAKKITSSYQKEADKCNSGMETCEEAREKAEKALVEQKKLTSMWEQRARQKGYKDGATKSTVKSKSGTEVA

SEQ ID NO: 30096 - protein, 165 aa, Arabidopsis thaliana
  peptide (1)..(165): Ceres Seq. ID no. 12396919
MIGYILGPPLYWHLTEALAVSATSCSACVCDCSSLPLLTIPTGLSNGSFTDCAKRDPEVNEDTEKNYAELLTEELKQREAASMEKHKRVDTGLLEAKKITSSYQKEADKCNSGMETCEEAREKAEKALVEQKKLTSMWEQRARQKGYKDGATKSTVKSKSGTEVA

SEQ ID NO: 30097 - DNA, 783 bp, Arabidopsis thaliana
  misc_feature (1)..(783): Ceres Seq. ID no. 12323067
  misc_feature (1)..(783): Ortholog of  Ceres SEQ ID NO 13661969 as cited in SEQ ID NO 61215
  misc_feature (1)..(783): Ortholog of  Ceres SEQ ID NO 12614809 as cited in SEQ ID NO 68808
  misc_feature (1)..(783): Ortholog of  Ceres SEQ ID NO 12634366 as cited in SEQ ID NO 0
  misc_feature (1)..(783): Ortholog of  Ceres SEQ ID NO 14309113 as cited in SEQ ID NO 0
  misc_feature (1)..(783): Ortholog of  Ceres SEQ ID NO 15175257 as cited in SEQ ID NO 0
ataagatttacatatagtttgaaaaggaggaaagttagataaggataaaatgactgcattggagaaacatgtttccttcttcgacaggaacaaagacggcaccgtttatccatgggaaacctaccaaggatttagagcgctcgggacagggcgtcttttggcggcttttgttgctatattcatcaacatgggactcagcaagaaaactcgtccgggaaagggattctcgccgttgtttccaatagacgtgaagaatagtcacctttgcatgcacggtagtgacaccgacgtctatgacgatgacggaagatttgtggaatcaaaattcgaggagatattcaacaagcatgctcgcacacataaagatgctctcactgcagaggaaattcaaaaaatgcttaagactaacagggatcctttcgatatcacaggatggctttcagattatggagaatggaaaatattacatacgttagctcaagacaaaaatggtttgttatcggaaaagagcgtcagggccatctacgatggtagccttttccaccaactggagaaaaaaagatcatcttcttcttctcgtggcaagaaacaaaaactaccttaaatgtttacgtgaatcttcttatattgttatgtggagatcacataactttcgtggtttataattatataattttgtcaaataacttttgtaatgaataattacatagatcaaacactctttaaataattattgtgtatattgaaaaaaaaaaacttatcaaagtatacttcatttaagtt

SEQ ID NO: 30098 - protein, 184 aa, Arabidopsis thaliana
  peptide (1)..(184): Ceres Seq. ID no. 12323068
MTALEKHVSFFDRNKDGTVYPWETYQGFRALGTGRLLAAFVAIFINMGLSKKTRPGKGFSPLFPIDVKNSHLCMHGSDTDVYDDDGRFVESKFEEIFNKHARTHKDALTAEEIQKMLKTNRDPFDITGWLSDYGEWKILHTLAQDKNGLLSEKSVRAIYDGSLFHQLEKKRSSSSSRGKKQKLP

SEQ ID NO: 30099 - protein, 138 aa, Arabidopsis thaliana
  peptide (1)..(138): Ceres Seq. ID no. 12323069
MGLSKKTRPGKGFSPLFPIDVKNSHLCMHGSDTDVYDDDGRFVESKFEEIFNKHARTHKDALTAEEIQKMLKTNRDPFDITGWLSDYGEWKILHTLAQDKNGLLSEKSVRAIYDGSLFHQLEKKRSSSSSRGKKQKLP

SEQ ID NO: 30100 - protein, 111 aa, Arabidopsis thaliana
  peptide (1)..(111): Ceres Seq. ID no. 12323070
MHGSDTDVYDDDGRFVESKFEEIFNKHARTHKDALTAEEIQKMLKTNRDPFDITGWLSDYGEWKILHTLAQDKNGLLSEKSVRAIYDGSLFHQLEKKRSSSSSRGKKQKLP

SEQ ID NO: 30101 - DNA, 1493 bp, Arabidopsis thaliana
  misc_feature (1)..(1493): Ceres Seq. ID no. 13648561
  misc_feature (1)..(1493): Ortholog of  Ceres SEQ ID NO 13598234 as cited in SEQ ID NO 63461
  misc_feature (1)..(1493): Ortholog of  Ceres SEQ ID NO 13597254 as cited in SEQ ID NO 63858
  misc_feature (1)..(1493): Ortholog of  Ceres SEQ ID NO 12622778 as cited in SEQ ID NO 67562
ggcttgacatgacaaatgtacaactgggagagaaagtcagtccgattgtgttggggatgacgatggcaaaagtagtaaataaggaagaaacaggaggggcgttttcgggagaagaaggaggaatatgagtgtgagttgttgttgtaggaatctgggcaagacaataaaaaaggcaataccttcacatcatttgcatctgagaagtcttggtgggagtctctatcgtcgtcgtatccaaagctcttcaatggagaccgatctcaagtcaacctttctcaacgtttattctgttctcaagtctgaccttcttcatgacccttccttcgaattcaccaatgaatctcgtctctgggttgatcggatgctggactacaatgtacgtggagggaaactcaatcggggtctctctgttgttgacagtttcaaacttttgaagcaaggcaatgatttgactgagcaagaggttttcctctcttgtgctctcggttggtgcattgaatggctccaagcttatttccttgtgcttgatgatattatggataactctgtcactcgccgtggtcaaccttgctggttcagagttcctcaggttggtatggttgccatcaatgatgggattctacttcgcaatcacatccacaggattctcaaaaagcatttccgtgataagccttactatgttgaccttgttgatttgtttaatgaggttgagttgcaaacagcttgtggccagatgatagatttgatcaccacctttgaaggagaaaaggatttggccaagtactcattgtcaatccaccgtcgtattgtccagtacaaaacggcttattactcattttatctccctgttgcttgtgcgttgcttatggccggcgaaaatttggaaaaccatattgatgtgaagaatgttcttgttgacatgggaatctacttccaagtgcaggatgattatctggattgttttgctgatcccgagacgcttggcaagataggaacagatatagaagatttcaaatgctcgtggttggtggttaaggcattagagcgctgcagcgaagaacaaactaagatattatatgagaactatggtaaacccgacccatcgaacgttgctaaagtgaaggatctctacaaagagctggatcttgagggagttttcatggagtatgagagcaaaagctacgagaagctgactggagcgattgagggacaccaaagtaaagcaatccaagcagtgctaaaatccttcttggctaagatctacaagaggcagaagtagtagagacagacaaacataagtctcagccctcaaaaatttcctgttatgtctttgattcttggttggtgatttgtgtaattctgttaagtgctctgattttcagggggaataataaacctgcctcacttttattcttgtgttacaattgtatttgtttcatgactatgatcttcttctttcatcagttatatgaatttgagattcttgttggttg

SEQ ID NO: 30102 - protein, 384 aa, Arabidopsis thaliana
  peptide (1)..(384): Ceres Seq. ID no. 13648562
MSVSCCCRNLGKTIKKAIPSHHLHLRSLGGSLYRRRIQSSSMETDLKSTFLNVYSVLKSDLLHDPSFEFTNESRLWVDRMLDYNVRGGKLNRGLSVVDSFKLLKQGNDLTEQEVFLSCALGWCIEWLQAYFLVLDDIMDNSVTRRGQPCWFRVPQVGMVAINDGILLRNHIHRILKKHFRDKPYYVDLVDLFNEVELQTACGQMIDLITTFEGEKDLAKYSLSIHRRIVQYKTAYYSFYLPVACALLMAGENLENHIDVKNVLVDMGIYFQVQDDYLDCFADPETLGKIGTDIEDFKCSWLVVKALERCSEEQTKILYENYGKPDPSNVAKVKDLYKELDLEGVFMEYESKSYEKLTGAIEGHQSKAIQAVLKSFLAKIYKRQK

SEQ ID NO: 30103 - protein, 343 aa, Arabidopsis thaliana
  peptide (1)..(343): Ceres Seq. ID no. 13648563
METDLKSTFLNVYSVLKSDLLHDPSFEFTNESRLWVDRMLDYNVRGGKLNRGLSVVDSFKLLKQGNDLTEQEVFLSCALGWCIEWLQAYFLVLDDIMDNSVTRRGQPCWFRVPQVGMVAINDGILLRNHIHRILKKHFRDKPYYVDLVDLFNEVELQTACGQMIDLITTFEGEKDLAKYSLSIHRRIVQYKTAYYSFYLPVACALLMAGENLENHIDVKNVLVDMGIYFQVQDDYLDCFADPETLGKIGTDIEDFKCSWLVVKALERCSEEQTKILYENYGKPDPSNVAKVKDLYKELDLEGVFMEYESKSYEKLTGAIEGHQSKAIQAVLKSFLAKIYKRQK

SEQ ID NO: 30104 - protein, 305 aa, Arabidopsis thaliana
  peptide (1)..(305): Ceres Seq. ID no. 13648564
MLDYNVRGGKLNRGLSVVDSFKLLKQGNDLTEQEVFLSCALGWCIEWLQAYFLVLDDIMDNSVTRRGQPCWFRVPQVGMVAINDGILLRNHIHRILKKHFRDKPYYVDLVDLFNEVELQTACGQMIDLITTFEGEKDLAKYSLSIHRRIVQYKTAYYSFYLPVACALLMAGENLENHIDVKNVLVDMGIYFQVQDDYLDCFADPETLGKIGTDIEDFKCSWLVVKALERCSEEQTKILYENYGKPDPSNVAKVKDLYKELDLEGVFMEYESKSYEKLTGAIEGHQSKAIQAVLKSFLAKIYKRQK

SEQ ID NO: 30105 - DNA, 716 bp, Arabidopsis thaliana
  misc_feature (1)..(716): Ceres Seq. ID no. 12396924
  misc_feature (1)..(716): Ortholog of  Ceres SEQ ID NO 15226850 as cited in SEQ ID NO 62501
agtataattgtttttgtcggtcgctaagatattttcacagcttcggagacttcaggaaaaaaaaaaatcatttcttctctgaaacgaaaaaccaaagaaacgagaagaagaagctatggcggatcagctaactgatgaacagatctctgagtttaaggaagcttttagcctcttcgacaaagatggagatggttgcatcaccacaaaggagctgggaacagtgatgcggtcactagggcagaacccaacagaagctgagctacaagacatgatcaacgaggttgacgctgatggaaacggaaccattgacttccctgagttcttaaacctaatggctaaaaagatgaaggacacagactcggaggaagagctgaaagaagctttcagggtgttcgacaaagaccagaacggtttcatatccgctgcagagcttcgccatgtgatgacgaatctaggtgagaaactgactgatgaagaggtcgaggagatgattcgtgaagcagatgttgatggagatggtcagataaactacgaggagtttgtcaagattatgatggctaagtgatgatgataagaaaaaaatgaagaataaaagtggcgatgtgatgaccttttaggcttttactatctacaaaagaatgattcgacctttaatgtcttgggtttgatttgagcctagtagtttcttaaggttttaacagactgaatttgtgact

SEQ ID NO: 30106 - protein, 149 aa, Arabidopsis thaliana; identical to SEQ ID NO: 27678
  peptide (1)..(149): Ceres Seq. ID no. 12396925

SEQ ID NO: 30107 - protein, 113 aa, Arabidopsis thaliana; identical to SEQ ID NO: 27679
  peptide (1)..(113): Ceres Seq. ID no. 12396926

SEQ ID NO: 30108 - protein, 98 aa, Arabidopsis thaliana; identical to SEQ ID NO: 27680
  peptide (1)..(98): Ceres Seq. ID no. 12396927

SEQ ID NO: 30109 - DNA, 1578 bp, Arabidopsis thaliana
  misc_feature (1)..(1578): Ceres Seq. ID no. 13487069
  misc_feature (1)..(1578): Ortholog of  Ceres SEQ ID NO 13638402 as cited in SEQ ID NO 60300
  misc_feature (1)..(1578): Ortholog of  Ceres SEQ ID NO 12618349 as cited in SEQ ID NO 64838
  misc_feature (1)..(1578): Ortholog of  Ceres SEQ ID NO 15176161 as cited in SEQ ID NO 0
accgaaaaagataaaaactcacactttctctctctctctctagaaaaagaaagaaagaagaaaaacttattgttattcccatttcgcccctatccgaaaaatggttgaagctcaatcatggacaacgcggcggatgagcaatcctagattcgacgccgccgcaaccgccgcaccaaccatcgtagacatccccggaacaccaccacactcctccgcttcttcaccactcaaacccttcttcctctcttcccccaccgtatcaccaacaatcctcacggcggctataatcgccgcctggtttggctcaaatataggagtcctcctcttaaacaaataccttctcttctactacggtttccgttacccaatcttcctcaccatgacacacatgttatcatgcgccgcctatagctccgccgtaatcaatatcgccggaatcgtgccacgtcagcacatcttatctcgccgtcagtttctaaagatcctctctttgtcagcgatcttttgtctctccgtcgtctgtggcaacacttcgctacgttatatccctgtttcttttaatcaagctattggagctacgacgccgtttttcaccgccgtgttctcttttctcattacttgtaaaacagagtccactgaagtttatttagctcttcttccggttgtctccggcatcgttcttgcttctaactctgaaccttcttttcatctttttggtttccttatctgtgttgcttccaccgccggtagagctctcaaatccgtcgtccaggggattattctgacgtcggaatcggagaagctacattctatgaatcttttgctatacatggctccaatggcggcttgtatcttactaccatttacgctatacattgaaggaaacgttttaagagttctaatcgagaaagcgaggacggatccattgatcatcttcttgttagccgggaatgcgacagtggcatatttagtgaatttgacgaatttcttggtgacaaagcatacaagtgctctcacattgcaggttttggggaacggaaaagctgcggtggctgccggagtctcggttttgatatttaggaatccggtgacggtgatgggaatagccggatttggtgtgacgattatgggtgtggttctctatagcgaagctaggaagagatccaaattgctaaaccagaagtgaaaagtgtgaagagaaagattattggatttaaaccggtgaagtaatttttactttttaatttttacttcttttttttcggtttagtttcttgattctttggaattctgctattgtttggaaccggtttggttcgttttgagagggggaaaatcaatttaattgtaaatggttgagattggggaaaaactatgaaaagaaaagtggagatatatttatgtaacaaaagtgaaaaagtagggagcataattaaaggaaataagattgtatctttattttattttactttcttttagttttttcttttcttgtactattatgttttatagtttgtcttaccaaaattatcgaaacatagtgaggaaaatagtcaaaataataaatttctttctact

SEQ ID NO: 30110 - protein, 361 aa, Arabidopsis thaliana
  peptide (1)..(361): Ceres Seq. ID no. 13487070
MVEAQSWTTRRMSNPRFDAAATAAPTIVDIPGTPPHSSASSPLKPFFLSSPTVSPTILTAAIIAAWFGSNIGVLLLNKYLLFYYGFRYPIFLTMTHMLSCAAYSSAVINIAGIVPRQHILSRRQFLKILSLSAIFCLSVVCGNTSLRYIPVSFNQAIGATTPFFTAVFSFLITCKTESTEVYLALLPVVSGIVLASNSEPSFHLFGFLICVASTAGRALKSVVQGIILTSESEKLHSMNLLLYMAPMAACILLPFTLYIEGNVLRVLIEKARTDPLIIFLLAGNATVAYLVNLTNFLVTKHTSALTLQVLGNGKAAVAAGVSVLIFRNPVTVMGIAGFGVTIMGVVLYSEARKRSKLLNQK

SEQ ID NO: 30111 - protein, 350 aa, Arabidopsis thaliana
  peptide (1)..(350): Ceres Seq. ID no. 13487071
MSNPRFDAAATAAPTIVDIPGTPPHSSASSPLKPFFLSSPTVSPTILTAAIIAAWFGSNIGVLLLNKYLLFYYGFRYPIFLTMTHMLSCAAYSSAVINIAGIVPRQHILSRRQFLKILSLSAIFCLSVVCGNTSLRYIPVSFNQAIGATTPFFTAVFSFLITCKTESTEVYLALLPVVSGIVLASNSEPSFHLFGFLICVASTAGRALKSVVQGIILTSESEKLHSMNLLLYMAPMAACILLPFTLYIEGNVLRVLIEKARTDPLIIFLLAGNATVAYLVNLTNFLVTKHTSALTLQVLGNGKAAVAAGVSVLIFRNPVTVMGIAGFGVTIMGVVLYSEARKRSKLLNQK

SEQ ID NO: 30112 - protein, 268 aa, Arabidopsis thaliana
  peptide (1)..(268): Ceres Seq. ID no. 13487072
MTHMLSCAAYSSAVINIAGIVPRQHILSRRQFLKILSLSAIFCLSVVCGNTSLRYIPVSFNQAIGATTPFFTAVFSFLITCKTESTEVYLALLPVVSGIVLASNSEPSFHLFGFLICVASTAGRALKSVVQGIILTSESEKLHSMNLLLYMAPMAACILLPFTLYIEGNVLRVLIEKARTDPLIIFLLAGNATVAYLVNLTNFLVTKHTSALTLQVLGNGKAAVAAGVSVLIFRNPVTVMGIAGFGVTIMGVVLYSEARKRSKLLNQK

SEQ ID NO: 30113 - DNA, 908 bp, Arabidopsis thaliana
  misc_feature (1)..(908): Ceres Seq. ID no. 12388520
  misc_feature (1)..(908): Ortholog of  Ceres SEQ ID NO 15172691 as cited in SEQ ID NO 56148
  misc_feature (1)..(908): Ortholog of  Ceres SEQ ID NO 15174297 as cited in SEQ ID NO 0
aatagcttcgtacccgataaatacggttgctctctcgttttttccagcagagacactttttctaattttctcttcttcttcttctttctcgttttgagagaaaacaaaaaaattctgaatctacaggtttcacgaaaaggagaagaaaaaaacaatggcggatcagctcaccgacgatcagatctctgagtttaaggaagctttcagcttattcgacaaggatggtgatggttgcattaccaccaaggagctgggtactgtgatgcgttcccttggacaaaacccaaccgaagcagagcttcaagacatgatcaacgaagtggatgctgatggtaacggtaccattgatttcccagagttcttgaaccttatggctcgtaagatgaaggacaccgactctgaggaagagctcaaggaagcattccgggttttcgacaaggaccagaacggtttcatctcagcagctgagctccgccatgtgatgacaaaccttggtgagaagcttactgatgaagaagttgatgagatgatcaaggaagctgatgttgatggtgatggtcagattaactacgaagagtttgttaaggtcatgatggctaagtgatgctgttttagaaccaaacaatggctctataaacttggtttgcatctcttacatataaattcttatgttatgttctataatttttattcatgggactcgaggtatgttttctgcttgtttaagacgcgaatgttttatcccttttatgctctattttgcgtctgaacattttcaaaagtcttgtttttttgttgtcttgctcctgtaatttgtaaccttggtctagttcgcggttttttattaatggtgtctctctagtaaagcattgtatcatggttttgtgaaatgcaaattaggtcctatc

SEQ ID NO: 30114 - protein, 149 aa, Arabidopsis thaliana; identical to SEQ ID NO: 29417
  peptide (1)..(149): Ceres Seq. ID no. 12388521

SEQ ID NO: 30115 - protein, 113 aa, Arabidopsis thaliana; identical to SEQ ID NO: 29418
  peptide (1)..(113): Ceres Seq. ID no. 12388522

SEQ ID NO: 30116 - protein, 98 aa, Arabidopsis thaliana; identical to SEQ ID NO: 29419
  peptide (1)..(98): Ceres Seq. ID no. 12388523

SEQ ID NO: 30117 - DNA, 1356 bp, Arabidopsis thaliana
  misc_feature (1)..(1356): Ceres Seq. ID no. 13504985
  misc_feature (1)..(1356): Ortholog of  Ceres SEQ ID NO 12583469 as cited in SEQ ID NO 51031
  misc_feature (1)..(1356): Ortholog of  Ceres SEQ ID NO 13597389 as cited in SEQ ID NO 63426
  misc_feature (1)..(1356): Ortholog of  Ceres SEQ ID NO 15180463 as cited in SEQ ID NO 0
atattgttttgagccatggaaactcttttccacactcttcttagattattactattcgtagccatctctcatactctgtcccctctcgccggttctttccggatttctaatgactttccggcggttttcaacttcggagactctaactctgacaccggagaacttagctcgggtcttggattccttccacaaccttcctatgaaataaccttctttagatctccaacttccggaagattctgcaatggacgtcttatcgtcgattttctaatggaagcaattgatcgaccatatttgaggccttatttagattcgataagtcgacaaacttaccgaagaggctgcaattttgctgcggctgcgtcaacgattcagaaggcaaatgctgcatcctatagcccctttggttttggtgttcaagtctctcaattcatcacctttaagtccaaagtccttcaattgatacaacaagatgaagagctccaaagatacttaccgtccgaatatttttttagtaatggattgtatatgtttgatatcggacaaaatgatattgccggagcattttacaccaagacagtagatcaagttcttgctctggttcctataatcttagatatatttcaagatggaataaagagattatatgcagagggggcaagaaactattggatacacaacacaggaccacttgggtgtttagcacaagttgtgtcaatttttggggaagacaaatcaaagcttgatgagtttggttgtgtcagtgaccataaccaagctgctaagcttttcaatttgcagcttcatggtcttttcaaaaaactccctcaacaatatcccaattcccgtttcacatacgtagatatcttctctatcaaatccgacctcatcctgaatcattccaaatatggttttgatcattcgataatggtatgttgtggaaccggaggaccaccactgaactacgatgatcaggttggttgcggtaagacagcaagatcaaatggtacgatcataaccgccaaaccttgttatgatagttccaaatatgttaactgggacggcattcattacactgaagctgcaaatcggtttgttgcactacacattctcaccggtaaatactctgagacggcgtcatctttgaatctttagcaatgtaacaaagaaagttacattatcactttctttatggattacatatatatttagttgtatgttaactggtttatttatgattatatgaataatttccataaacttaactgtttcatttccaaaaaaaggcattttccaattttctttcacaaagatagatgctttgtcacaataaaatgaatctttcaaatttcctgc

SEQ ID NO: 30118 - protein, 379 aa, Arabidopsis thaliana
  peptide (1)..(379): Ceres Seq. ID no. 13504986
METLFHTLLRLLLFVAISHTLSPLAGSFRISNDFPAVFNFGDSNSDTGELSSGLGFLPQPSYEITFFRSPTSGRFCNGRLIVDFLMEAIDRPYLRPYLDSISRQTYRRGCNFAAAASTIQKANAASYSPFGFGVQVSQFITFKSKVLQLIQQDEELQRYLPSEYFFSNGLYMFDIGQNDIAGAFYTKTVDQVLALVPIILDIFQDGIKRLYAEGARNYWIHNTGPLGCLAQVVSIFGEDKSKLDEFGCVSDHNQAAKLFNLQLHGLFKKLPQQYPNSRFTYVDIFSIKSDLILNHSKYGFDHSIMVCCGTGGPPLNYDDQVGCGKTARSNGTIITAKPCYDSSKYVNWDGIHYTEAANRFVALHILTGKYSETASSLNL

SEQ ID NO: 30119 - protein, 294 aa, Arabidopsis thaliana
  peptide (1)..(294): Ceres Seq. ID no. 13504987
MEAIDRPYLRPYLDSISRQTYRRGCNFAAAASTIQKANAASYSPFGFGVQVSQFITFKSKVLQLIQQDEELQRYLPSEYFFSNGLYMFDIGQNDIAGAFYTKTVDQVLALVPIILDIFQDGIKRLYAEGARNYWIHNTGPLGCLAQVVSIFGEDKSKLDEFGCVSDHNQAAKLFNLQLHGLFKKLPQQYPNSRFTYVDIFSIKSDLILNHSKYGFDHSIMVCCGTGGPPLNYDDQVGCGKTARSNGTIITAKPCYDSSKYVNWDGIHYTEAANRFVALHILTGKYSETASSLNL

SEQ ID NO: 30120 - protein, 208 aa, Arabidopsis thaliana
  peptide (1)..(208): Ceres Seq. ID no. 13504988
MFDIGQNDIAGAFYTKTVDQVLALVPIILDIFQDGIKRLYAEGARNYWIHNTGPLGCLAQVVSIFGEDKSKLDEFGCVSDHNQAAKLFNLQLHGLFKKLPQQYPNSRFTYVDIFSIKSDLILNHSKYGFDHSIMVCCGTGGPPLNYDDQVGCGKTARSNGTIITAKPCYDSSKYVNWDGIHYTEAANRFVALHILTGKYSETASSLNL

SEQ ID NO: 30121 - DNA, 747 bp, Arabidopsis thaliana
  misc_feature (1)..(747): Ceres Seq. ID no. 12397065
  misc_feature (1)..(747): Ortholog of  Ceres SEQ ID NO 12598105 as cited in SEQ ID NO 61032
ctcttcattatcctcaaaatcgctcgagagtgagaactctgctcttcttcttcttcctccgccatagctacaatgcttagtctctcaatcgctacgccggggacggcggcgatttttcgtagaggaactgcttcggcgacttcaacttcgtcttcattccatggtgtcagaatccagcaccaggtttctgctcgcgtccccgcggcggcgacgatatcgtcgtcgtctcctaaaccgtcggtggtgatgatgtcgaaaagagaggcggaattgaaagagataagatcgaagacgacggagcagttacaagaggaggttgttgaccttaaaggtgagctctttatgcttcgtctccagaaatcggcaaggaatgagttcaaatctagcgactttcgtcgtatgaagaaacaagttgctcggatgttgacggttaaaagagagagggagatcaaagaagggataaagaaaaggttgtcgaggaaacttgacagacaatggaagaaaagcatagtaccaagaccacctccgtctctgaagaaacttcaagaagaagaagctgcagaagaagcagctgaagctgctaaatctgcttgaaaaaacccgctattgatttatggtctcttccttgttgtttcctcgagatgttgttaatctctgttatttgttgctgaaccatcttgtatttgtttttcttttggtgtaaacactttccttatcaagtagtttacatgaatcccttaaagattg

SEQ ID NO: 30122 - protein, 173 aa, Arabidopsis thaliana
  peptide (1)..(173): Ceres Seq. ID no. 12397066
MLSLSIATPGTAAIFRRGTASATSTSSSFHGVRIQHQVSARVPAAATISSSSPKPSVVMMSKREAELKEIRSKTTEQLQEEVVDLKGELFMLRLQKSARNEFKSSDFRRMKKQVARMLTVKREREIKEGIKKRLSRKLDRQWKKSIVPRPPPSLKKLQEEEAAEEAAEAAKSA

SEQ ID NO: 30123 - protein, 115 aa, Arabidopsis thaliana
  peptide (1)..(115): Ceres Seq. ID no. 12397067
MMSKREAELKEIRSKTTEQLQEEVVDLKGELFMLRLQKSARNEFKSSDFRRMKKQVARMLTVKREREIKEGIKKRLSRKLDRQWKKSIVPRPPPSLKKLQEEEAAEEAAEAAKSA

SEQ ID NO: 30124 - protein, 114 aa, Arabidopsis thaliana
  peptide (1)..(114): Ceres Seq. ID no. 12397068
MSKREAELKEIRSKTTEQLQEEVVDLKGELFMLRLQKSARNEFKSSDFRRMKKQVARMLTVKREREIKEGIKKRLSRKLDRQWKKSIVPRPPPSLKKLQEEEAAEEAAEAAKSA

SEQ ID NO: 30125 - DNA, 1654 bp, Arabidopsis thaliana
  misc_feature (1)..(1654): Ceres Seq. ID no. 13496814
  misc_feature (1)..(1654): Ortholog of  Ceres SEQ ID NO 13656177 as cited in SEQ ID NO 64997
atatttaattttcttcagtcagagatttcgaaaccctagtcgatttcgagatccaactaactctgctccttatctcagcttgttgaatttgcgaagtatgggagacgctagagacaacgaagcctacgaggaggagctcttggactatgaagaagaagacgagaaggtcccagattctggaaacaaagttaacggcgaagctgtgaaaaaagggtacgtgggaatacacagttctggattcagagacttccttttgaaaccggagcttctcagagctattgttgactcaggatttgaacatccatctgaagtgcaacacgaatgtatccctcaagctatcttgggtatggatgttatctgccaagcaaagtctggtatggggaagactgctgtgtttgtcctgtctactctacaacagattgaaccatctcctggccaggtttctgcacttgtcttgtgccatacaagagagctagcttaccagatctgcaatgagtttgtgcgattcagtacctatctgcctgatacaaaagtttcggtgttctatggtggagtcaacattaaaattcacaaagacttgctgaagaatgaatgtcctcacattgttgttggtacccctggtcgagtgcttgcacttgccagggagaaagatctctctttgaagaatgtgaggcattttattcttgatgagtgtgataaaatgctcgagtcacttgacatgcgaagggatgtgcaggagattttcaagatgactcctcatgacaaacaagtaatgatgttctcagcaacgctcagcaaagagatacgcccagtctgcaagaagtttatgcaagatccaatggaaatatatgttgatgatgaagccaagttgactcttcatggacttgtccagcactacatcaaactgagcgagatggagaaaaatcgcaagttgaatgaccttcttgatgcgttggacttcaatcaagttgtcatttttgtgaagagcgtgagcagggctgcggagctgaacaagttactggtggaatgcaatttcccctcaatatgcatacactctggcatgtctcaagaagagaggttgactcgatacaaaagtttcaaggaagggcacaagaggatccttgtggcgactgacttggtaggaagagggattgacatagagcgtgtcaacattgttatcaactatgacatgccagattctgcggatacctatcttcatagggttgggagagctggtagatttggaaccaagggtcttgcaatcacatttgttgcatctgcttcagattcagaggtccttaatcaggttcaagagaggtttgaggtcgatataaaggagcttcctgagcagattgatacatcgacttacatgccgtcttaaacaagtagcatcatctctgaggaacgaacctcttcagatttcaaccttttaggtgttcaaaggggtcatggaggtccacaactatctctcacaccgtttgttgcttcgctattttagacttttctatgaggacaagtttttccatatatttagaccgttttgtaactcttgaaaaatgagattgagctactctccaaatcgcgcacagttgagagctctcctgttttttgtactagtgatggttatctttaaaatattaagatttcaggattg

SEQ ID NO: 30126 - protein, 459 aa, Arabidopsis thaliana
  peptide (1)..(459): Ceres Seq. ID no. 13496815
YLIFFSQRFRNPSRFRDPTNSAPYLSLLNLRSMGDARDNEAYEEELLDYEEEDEKVPDSGNKVNGEAVKKGYVGIHSSGFRDFLLKPELLRAIVDSGFEHPSEVQHECIPQAILGMDVICQAKSGMGKTAVFVLSTLQQIEPSPGQVSALVLCHTRELAYQICNEFVRFSTYLPDTKVSVFYGGVNIKIHKDLLKNECPHIVVGTPGRVLALAREKDLSLKNVRHFILDECDKMLESLDMRRDVQEIFKMTPHDKQVMMFSATLSKEIRPVCKKFMQDPMEIYVDDEAKLTLHGLVQHYIKLSEMEKNRKLNDLLDALDFNQVVIFVKSVSRAAELNKLLVECNFPSICIHSGMSQEERLTRYKSFKEGHKRILVATDLVGRGIDIERVNIVINYDMPDSADTYLHRVGRAGRFGTKGLAITFVASASDSEVLNQVQERFEVDIKELPEQIDTSTYMPS

SEQ ID NO: 30127 - protein, 427 aa, Arabidopsis thaliana; identical to SEQ ID NO: 20810
  peptide (1)..(427): Ceres Seq. ID no. 13496816

SEQ ID NO: 30128 - protein, 344 aa, Arabidopsis thaliana; identical to SEQ ID NO: 20811
  peptide (1)..(344): Ceres Seq. ID no. 13496817

SEQ ID NO: 30129 - DNA, 888 bp, Arabidopsis thaliana
  misc_feature (1)..(888): Ceres Seq. ID no. 12488396
  misc_feature (1)..(888): Ortholog of  Ceres SEQ ID NO 13594828 as cited in SEQ ID NO 56431
  misc_feature (1)..(888): Ortholog of  Ceres SEQ ID NO 14316363 as cited in SEQ ID NO 57222
  misc_feature (1)..(888): Ortholog of  Ceres SEQ ID NO 15177754 as cited in SEQ ID NO 57945
  misc_feature (1)..(888): Ortholog of  Ceres SEQ ID NO 13594354 as cited in SEQ ID NO 58082
  misc_feature (1)..(888): Ortholog of  Ceres SEQ ID NO 14316408 as cited in SEQ ID NO 58228
  misc_feature (1)..(888): Ortholog of  Ceres SEQ ID NO 13528075 as cited in SEQ ID NO 60188
  misc_feature (1)..(888): Ortholog of  Ceres SEQ ID NO 13600483 as cited in SEQ ID NO 0
attgttcttgaacatctccgaagctaactccgaacatcaaaactgtatcttcttctcctcctcctctggcccttttcacaaagggacaaagagtttttgttgtcagtaacttcaagctctaagctatggctgtcaccaagatttatattgtgtactattccttgcacggccacgtcgagacaatggcacgagaggtacttcggggagtaaactctgttccagacgtggaagcaacactttggcaagtgccagagacattaccggagaaaatattggagaaagtgaaggccgttccaagaccggacgatgtgccggatattcgaccagaacaactggcggaagccgacggattcatgtttggctttccttctaggtttggagtgatggcatcacaggtcatgactttctttgacaatacaaatgatctctggactacacaggctctcgctgggaaacctgcaggaatcttctggagtacgggtttccacggtggaggccaagaactaactgcgttgacggcagtgacaaaactggctcatcacgggatgatatttgtaccggtaggatacacattcggtaaaagtatgtacgagatgggagaggtgaaaggtggttcgccttatggctcagggacttatgcagctgatggatcacgcgagccaacagagctggagattcagcaggcaaattaccatggcaagtactttgcaggaatagccaagaaactcaagaaacggtctcctgtctaaattctaaaccatatcaactctgtgtttcctatactaaacaatctgtaaatgtaaaggtgaacactgaaaataagatcgacatatacagagcaaaacaccggtgtgtaagctaatggtcaataaatcacattttccattg

SEQ ID NO: 30130 - protein, 207 aa, Arabidopsis thaliana
  peptide (1)..(207): Ceres Seq. ID no. 12488397
MAVTKIYIVYYSLHGHVETMAREVLRGVNSVPDVEATLWQVPETLPEKILEKVKAVPRPDDVPDIRPEQLAEADGFMFGFPSRFGVMASQVMTFFDNTNDLWTTQALAGKPAGIFWSTGFHGGGQELTALTAVTKLAHHGMIFVPVGYTFGKSMYEMGEVKGGSPYGSGTYAADGSREPTELEIQQANYHGKYFAGIAKKLKKRSPV

SEQ ID NO: 30131 - protein, 188 aa, Arabidopsis thaliana
  peptide (1)..(188): Ceres Seq. ID no. 12488398
MAREVLRGVNSVPDVEATLWQVPETLPEKILEKVKAVPRPDDVPDIRPEQLAEADGFMFGFPSRFGVMASQVMTFFDNTNDLWTTQALAGKPAGIFWSTGFHGGGQELTALTAVTKLAHHGMIFVPVGYTFGKSMYEMGEVKGGSPYGSGTYAADGSREPTELEIQQANYHGKYFAGIAKKLKKRSPV

SEQ ID NO: 30132 - protein, 131 aa, Arabidopsis thaliana
  peptide (1)..(131): Ceres Seq. ID no. 12488399
MFGFPSRFGVMASQVMTFFDNTNDLWTTQALAGKPAGIFWSTGFHGGGQELTALTAVTKLAHHGMIFVPVGYTFGKSMYEMGEVKGGSPYGSGTYAADGSREPTELEIQQANYHGKYFAGIAKKLKKRSPV

SEQ ID NO: 30133 - DNA, 843 bp, Arabidopsis thaliana
  misc_feature (1)..(843): Ceres Seq. ID no. 13580431
  misc_feature (1)..(843): Ortholog of  Ceres SEQ ID NO 13661801 as cited in SEQ ID NO 61655
  misc_feature (1)..(843): Ortholog of  Ceres SEQ ID NO 13596450 as cited in SEQ ID NO 68838
aaaaacttgtgcgtgattcatcgtcacatcgccttgatcatggaaactcctatcgatgctccgaataaggacgaacatgaatgccctaggtggaagaaatcaactgtagtttttgtgttgggtggtcctggaagtggaaaaggtactcagtgtgctaatgttgtgaagcactttagctatacccattttagtgctggtgatcttctcagagcagaaattaagtccggttctgaatttggagccatgatccaaagtatgattgcagaggggagaatagtgccgtctgagatcacagtgaaacttttgtgtaaagctatggaggaaagtggtaatgataagttccttattgatggcttccctcgcaatgaagaaaatcgaaacgtattcgaaaatgttgctagaatcgagcctgcttttgttctattctttgattgtccagaagaagaactagaaagacgcattatgagcaggaaccagggaagagaagacgataatatagagaccataaagaagcgatttaaagtgtttgttgaatctaccctcccaattattagctactacgaatcgaaagggaaacttcgaaagatcaatgctgcaaaatccagcgaagaggttttcgaggctgtcagagttctatttgcatctgaaacttgacaagcatcaaggacttggattcaccgaacagaacaaaacagagactccaaagtcaatgatgtgccttgtcgtatacgtaactaagtttacagattcatgctttatttgtatatgtaattatctctacattttacatgttctcatcatacgatatagccaaactttcgtcgcaataaccatatttttagc

SEQ ID NO: 30134 - protein, 217 aa, Arabidopsis thaliana
  peptide (1)..(217): Ceres Seq. ID no. 13580432
KNLCVIHRHIALIMETPIDAPNKDEHECPRWKKSTVVFVLGGPGSGKGTQCANVVKHFSYTHFSAGDLLRAEIKSGSEFGAMIQSMIAEGRIVPSEITVKLLCKAMEESGNDKFLIDGFPRNEENRNVFENVARIEPAFVLFFDCPEEELERRIMSRNQGREDDNIETIKKRFKVFVESTLPIISYYESKGKLRKINAAKSSEEVFEAVRVLFASET

SEQ ID NO: 30135 - protein, 204 aa, Arabidopsis thaliana
  peptide (1)..(204): Ceres Seq. ID no. 13580433
METPIDAPNKDEHECPRWKKSTVVFVLGGPGSGKGTQCANVVKHFSYTHFSAGDLLRAEIKSGSEFGAMIQSMIAEGRIVPSEITVKLLCKAMEESGNDKFLIDGFPRNEENRNVFENVARIEPAFVLFFDCPEEELERRIMSRNQGREDDNIETIKKRFKVFVESTLPIISYYESKGKLRKINAAKSSEEVFEAVRVLFASET

SEQ ID NO: 30136 - protein, 136 aa, Arabidopsis thaliana
  peptide (1)..(136): Ceres Seq. ID no. 13580434
MIQSMIAEGRIVPSEITVKLLCKAMEESGNDKFLIDGFPRNEENRNVFENVARIEPAFVLFFDCPEEELERRIMSRNQGREDDNIETIKKRFKVFVESTLPIISYYESKGKLRKINAAKSSEEVFEAVRVLFASET

SEQ ID NO: 30137 - DNA, 649 bp, Arabidopsis thaliana
  misc_feature (1)..(649): Ceres Seq. ID no. 12324000
  misc_feature (1)..(649): Ortholog of  Ceres SEQ ID NO 12635845 as cited in SEQ ID NO 0
tttagttgtttttccgatcgatctgcgagtcgagtagtttttttatttgccggcgccgggagagatcctttgatctttttccgatggaggagcaattcggcgggagcgatgagagatggaaaggatcattggagaatataacggagatggcatcgaatctcgattcgcttcagaaacttctcctcaagaaagcagtcttcgttgaagaagacactttctctagagcttctctcgtctccgagcaagcccgaacaatcaaggttcttgagcaaagagtacaaacactagaaagagaactagatgctgccattacagctgctgctcatgctcggtctgagaaacgccaagctgagtcctctcaaaaggctgctgaatcacgtgcccaagatgtcacaaaagagcttgaaaacaccacaaaggttttcaagctgcatatggaagagcttcgaggaatgcaagaacagatatccaaacgcgataacgagatcaaactcttagaagctataatccaaacgctcggcggcaaagagcggttgggaaaaagcgacgtgaatggatgatgatgatgcgttttttcacttgtaaaggtttgtactcctgagtttgtggagatgtatcacttcgaagataaatgtatttttgtctgtcc

SEQ ID NO: 30138 - protein, 158 aa, Arabidopsis thaliana
  peptide (1)..(158): Ceres Seq. ID no. 12324001
MEEQFGGSDERWKGSLENITEMASNLDSLQKLLLKKAVFVEEDTFSRASLVSEQARTIKVLEQRVQTLERELDAAITAAAHARSEKRQAESSQKAAESRAQDVTKELENTTKVFKLHMEELRGMQEQISKRDNEIKLLEAIIQTLGGKERLGKSDVNG

SEQ ID NO: 30139 - protein, 137 aa, Arabidopsis thaliana
  peptide (1)..(137): Ceres Seq. ID no. 12324002
MASNLDSLQKLLLKKAVFVEEDTFSRASLVSEQARTIKVLEQRVQTLERELDAAITAAAHARSEKRQAESSQKAAESRAQDVTKELENTTKVFKLHMEELRGMQEQISKRDNEIKLLEAIIQTLGGKERLGKSDVNG

SEQ ID NO: 30140 - DNA, 825 bp, Arabidopsis thaliana
  misc_feature (1)..(825): Ceres Seq. ID no. 12322128
  misc_feature (1)..(825): Ortholog of  Ceres SEQ ID NO 12780822 as cited in SEQ ID NO 67471
aacaaagttgtgtctctctgaagtctgaaccaaaaagataagacgaaaaggagatcaatggaggaagaatacataagagtaataagcataacaacaataggagtaatctcatggggtctcatattcatccttgtaagacgaatcttctcaagctactcgttcgactttagcactcgtatagtctcaacgcttcacgcaacaatcgctgtcactttagcaactctctcgattcaagattggtcttgtcctgtttgtcccattgcttctacatcgtctctccggcagatggaaacgttggctttttcattgtcttacatgatctacgatctcatttgtagccactttgatcaagtccttagcattgataatgcggttcatcattctgtttgcattcttggttttgtagctggacttttctaccaaaagtgtggatccgagatggtggcagcaatatggataacagagatctcaagtccgtttcttcacctcagggagattcttaaagagattggttatagagacaccgacctaaatcttgcagccgatgtgtgttttgcaacaattttctcgttggccagaatggtgggtggaccttacctagtttacgtaacaatatcagccgataatcccattctcatcaaggcaatggcgttggggttacaacttgtgagcgcattctggttctataaaatcctcaaaatgatgagatacaaatttatcaaaagatcaatgtccaacaaaaaatcgacttagttgaaattgcaaaaactctatcatgtaacatttgactcatccttttctatatgtaagttaaatgtgaggaat

SEQ ID NO: 30141 - protein, 231 aa, Arabidopsis thaliana
  peptide (1)..(231): Ceres Seq. ID no. 12322129
MEEEYIRVISITTIGVISWGLIFILVRRIFSSYSFDFSTRIVSTLHATIAVTLATLSIQDWSCPVCPIASTSSLRQMETLAFSLSYMIYDLICSHFDQVLSIDNAVHHSVCILGFVAGLFYQKCGSEMVAAIWITEISSPFLHLREILKEIGYRDTDLNLAADVCFATIFSLARMVGGPYLVYVTISADNPILIKAMALGLQLVSAFWFYKILKMMRYKFIKRSMSNKKST

SEQ ID NO: 30142 - protein, 155 aa, Arabidopsis thaliana
  peptide (1)..(155): Ceres Seq. ID no. 12322130
METLAFSLSYMIYDLICSHFDQVLSIDNAVHHSVCILGFVAGLFYQKCGSEMVAAIWITEISSPFLHLREILKEIGYRDTDLNLAADVCFATIFSLARMVGGPYLVYVTISADNPILIKAMALGLQLVSAFWFYKILKMMRYKFIKRSMSNKKST

SEQ ID NO: 30143 - protein, 145 aa, Arabidopsis thaliana
  peptide (1)..(145): Ceres Seq. ID no. 12322131
MIYDLICSHFDQVLSIDNAVHHSVCILGFVAGLFYQKCGSEMVAAIWITEISSPFLHLREILKEIGYRDTDLNLAADVCFATIFSLARMVGGPYLVYVTISADNPILIKAMALGLQLVSAFWFYKILKMMRYKFIKRSMSNKKST

SEQ ID NO: 30144 - DNA, 2221 bp, Arabidopsis thaliana
  misc_feature (1)..(2221): Ceres Seq. ID no. 13490207
  misc_feature (1)..(2221): Ortholog of  Ceres SEQ ID NO 12584790 as cited in SEQ ID NO 62648
  misc_feature (1)..(2221): Ortholog of  Ceres SEQ ID NO 15178116 as cited in SEQ ID NO 0
attcgcttccgtttcttaaagcataaaaaccaaaactttctctttcgttttgctttcttccaagcatctgcaggagtgaatcgcaaaaccaaatttggaggattctttctgaggggtttctcagtgagaaaatggcttcgaaacggatcttgaaggagctgaaggatctccagaaagaccctccaacctcctgcagtgcaggtccagttgctgaagacatgtttcattggcaagctacaattatgggtcctgcagagagtccgtattcaggcggtgtgtttctcgttaccattcacttccctccggactatcctttcaagccaccaaaggttgcatttaggacgaaggtgtttcaccctaatatcaacagcaacggaagcatttgccttgacattttgaaagaacaatggagccctgccctcaccatttcgaaggtgttgctttcgatatgttcgctgttaacggatccaaatccagatgacccgttagtgccagagattgcacacatgtacaaaaccgacagagccaagtacaaggctactgctagaaactggactcagaagtatgccatgggctaaacaaagattcgtatgcttcagcacctgtttatgctcttatatctgtttatttctttttcttgttttaactctaataaaaatgtctaaaaatatcaacttttttcgtctgtactatatgtttatggttttattatcatcatctttatctgaaatttgaagatggaattccaaagcttgaaggttatttgttaaagtttatttactagtgagtgatgagaaacattgtgttgttgttcatttcattttttctttgtcaggaatattcattgacttgttttctttaaaaaaaaaaaaaaaaaaaaatgaggttctcgagaaccgctcacacaaaaacgttttcgaaatccctaatctactctctcttctctatatctctactcttgagaaatggctcttagaactgtgctcgtctccgacgtccctagcctcccggattctgtctacggtttatccgaagtttagagttgagcaaaccgacgtcgtttaggttaccggggttttcggtgattggacatagaggaatcggtatgaatgtgttgcaatcgtctgatcggagagcgagaggtgttaaagaaaactcgattctttcattcaattccgccgctaagtatccgattgattacattgagttcgatgttcaggtgacaaaagatgattgccctgtcattttccatgatgatttcatctactctgaagaaaatggtattgttaatgagagtagagtgacggatctgagtctgtctgagtttctcctttatggacctcagaaggaaactgagaaaatagggaagacactgatgaggaaatctaaagaagggaaggttttgaaatgggacgttgatttggatgattctctttgtacgttgcaagaagcttttgaacaagttgaacaaactcttgggttcaatatcgagttgaaatttgatgatcagaccgtctatgaacgagagtttcttgtccatatcctgagatcagtactacaggtggtctctaactatgctaaagacagaccagtaatcttctcaagtttccaaccagatgcagctaagcttgttagggaactgcagagcacttaccctgttttctttctgactgatgcgggaaacgagattcacaatgacgagagaagaaactcgctcgaagaagccattcaagtttgcttggaaggaggtcttcaaggtattgtttcagaggtaaaaggagtgttcaggaacccagcagccattagcaagatcaaagaatctaacctctctctcctcacatacggcaaactcaacaatgtcggagaggcagtgtacatgcaatatgtgatggggatcgatggagtgattgtagattttgttgaggagattatagagtccacgacacgcatgatgataagaccaccaccatcatcatcaccattaccatcaccttccaaggatgatgatgttgccattacaagacctgagttttcacagaaggagatttcttttcttctcaagcttctctctcagttgatacaacattgatatctctgtttttccgttttcttttatcccaagtttctttttagggtttgattttcttattgatttaattattattctgggtgtattacccaatagttggaattgtaaataattataaatttatttcttttt

SEQ ID NO: 30145 - protein, 327 aa, Arabidopsis thaliana
  peptide (1)..(327): Ceres Seq. ID no. 15218812
MNVLQSSDRRARGVKENSILSFNSAAKYPIDYIEFDVQVTKDDCPVIFHDDFIYSEENGIVNESRVTDLSLSEFLLYGPQKETEKIGKTLMRKSKEGKVLKWDVDLDDSLCTLQEAFEQVEQTLGFNIELKFDDQTVYEREFLVHILRSVLQVVSNYAKDRPVIFSSFQPDAAKLVRELQSTYPVFFLTDAGNEIHNDERRNSLEEAIQVCLEGGLQGIVSEVKGVFRNPAAISKIKESNLSLLTYGKLNNVGEAVYMQYVMGIDGVIVDFVEEIIESTTRMMIRPPPSSSPLPSPSKDDDVAITRPEFSQKEISFLLKLLSQLIQH

SEQ ID NO: 30146 - protein, 237 aa, Arabidopsis thaliana
  peptide (1)..(237): Ceres Seq. ID no. 15218813
MRKSKEGKVLKWDVDLDDSLCTLQEAFEQVEQTLGFNIELKFDDQTVYEREFLVHILRSVLQVVSNYAKDRPVIFSSFQPDAAKLVRELQSTYPVFFLTDAGNEIHNDERRNSLEEAIQVCLEGGLQGIVSEVKGVFRNPAAISKIKESNLSLLTYGKLNNVGEAVYMQYVMGIDGVIVDFVEEIIESTTRMMIRPPPSSSPLPSPSKDDDVAITRPEFSQKEISFLLKLLSQLIQH

SEQ ID NO: 30147 - DNA, 801 bp, Arabidopsis thaliana
  misc_feature (1)..(801): Ceres Seq. ID no. 12377352
  misc_feature (1)..(801): Ortholog of  Ceres SEQ ID NO 12608953 as cited in SEQ ID NO 51227
  misc_feature (1)..(801): Ortholog of  Ceres SEQ ID NO 12636917 as cited in SEQ ID NO 0
  misc_feature (1)..(801): Ortholog of  Ceres SEQ ID NO 14309430 as cited in SEQ ID NO 0
aaatcactccactcacaaaatcctcagccatctctaatcacattttacaatcgcctcttcaaatttcccgataaacaaaaaatgagttccggcgccggcagtggaacaactaaaggtggcagaggaaagccaaaagctacaaagtccgtctctcgatcttctaaagctggtcttcaatttcccgttggaagaatcgctagattccttaaagccggtaaatacgccgaacgtgttggtgccggtgctcccgtttatctctccgccgttctcgaatacctcgccgctgaggtattggagctagctggaaatgcagcaagagataacaagaagacacgtatcgtaccacggcacattcagcttgcagtgaggaacgatgaagagcttagtaaacttcttggaagtgtaacaattgctaatggaggagttttgcccaacattcatcagactcttctcccatcaaaggttggaaagaacaaaggcgatatcggatctgcttctcaagagttttaattttattttttagcttgtaacatagacatggctctctgttccacaatagttttggtattttcatgttactcaaaaactgtgtttgcaaatccagtaatgaattcggtttgaagaagtgaaatagttaaatttgatgtgttgaaatagcggattcaatggcttcaatacaagtgctaataggtttggctttagccatggtttctgcaagtgagactcttgcttctttgtgagaatgtaataatgagacagtgttggaaacagcccatttgatatgagcctccttttctgatt

SEQ ID NO: 30148 - protein, 169 aa, Arabidopsis thaliana
  peptide (1)..(169): Ceres Seq. ID no. 12377353
KSLHSQNPQPSLITFYNRLFKFPDKQKMSSGAGSGTTKGGRGKPKATKSVSRSSKAGLQFPVGRIARFLKAGKYAERVGAGAPVYLSAVLEYLAAEVLELAGNAARDNKKTRIVPRHIQLAVRNDEELSKLLGSVTIANGGVLPNIHQTLLPSKVGKNKGDIGSASQEF

SEQ ID NO: 30149 - protein, 142 aa, Arabidopsis thaliana
  peptide (1)..(142): Ceres Seq. ID no. 12377354
MSSGAGSGTTKGGRGKPKATKSVSRSSKAGLQFPVGRIARFLKAGKYAERVGAGAPVYLSAVLEYLAAEVLELAGNAARDNKKTRIVPRHIQLAVRNDEELSKLLGSVTIANGGVLPNIHQTLLPSKVGKNKGDIGSASQEF

SEQ ID NO: 30150 - DNA, 897 bp, Arabidopsis thaliana
  misc_feature (1)..(897): Ceres Seq. ID no. 12394147
  misc_feature (1)..(897): Ortholog of  Ceres SEQ ID NO 15224382 as cited in SEQ ID NO 65962
  misc_feature (1)..(897): Ortholog of  Ceres SEQ ID NO 15174380 as cited in SEQ ID NO 0
gacgtgactcttctctctcttcctctccatcaatggcgaccacaaactctctgatgttctaggtaatggtctcacttcggaccaacttctctttccctcaaacaacccacttccgccgcaacattctcactaatctgctctgcttcttccacctcctcctccaccaccgccgtatccgccgtttcaaccacaaacgcctccgccacaactgccgaaaccgcgaccatattcgacgttctggagaaccatctcgtcaatcaaaacttcagacaagccgacgaggagacacggagattactcattcagatatccggagaagccgccgtgaaacgtggctacgttttcttctccgaggtgaaaacaatctcccccgaagatcttcaagctatcgacaatctatggattaaacacagtgatggtagattcggatacagcgtgcaacgcaaaatctggttaaaagtgaagaaagatttcacaagattcttcgttaaagttgagtggatgaagcttcttgacacagaggttgttcaatacaattacagagcgtttcctgacgaattcaagtgggagcttaacgatgaaacgcctttaggacacttaccgctcacaaacgccttgagaggaacgcagcttctgaaatgcgttttaagccatcctgcgtttgcgacagctgatgataacagtggagaaacagaagacgagcttaacagaggtgttgcggtggctaaggaacaggcaggagtaggagcagacaaaagagtgtttaaaacaaattacagcttctgatgtctttctccttcttttttttttttttttttttaatattgattttctgatattgtgaaagtataaacaaatctctgtaatcatatcattaattaaatcggatttctcttc

SEQ ID NO: 30151 - protein, 113 aa, Arabidopsis thaliana
  peptide (1)..(113): Ceres Seq. ID no. 12394148
MVSLRTNFSFPQTTHFRRNILTNLLCFFHLLLHHRRIRRFNHKRLRHNCRNRDHIRRSGEPSRQSKLQTSRRGDTEITHSDIRRSRRETWLRFLLRGENNLPRRSSSYRQSMD

SEQ ID NO: 30152 - protein, 94 aa, Arabidopsis thaliana
  peptide (1)..(94): Ceres Seq. ID no. 12394149
MKLLDTEVVQYNYRAFPDEFKWELNDETPLGHLPLTNALRGTQLLKCVLSHPAFATADDNSGETEDELNRGVAVAKEQAGVGADKRVFKTNYSF

SEQ ID NO: 30153 - DNA, 636 bp, Arabidopsis thaliana
  misc_feature (1)..(636): Ceres Seq. ID no. 12337350
  misc_feature (1)..(636): Ortholog of  Ceres SEQ ID NO 12597253 as cited in SEQ ID NO 62959
aacaacaaattcgattcttataactgtttccctctcatctttacacaaaagtattctaatcgatttcaatggcgggtcgtggtaaaacactcggatctgggtctgcgaagaaggcaacaacaagaagcagcaaagccggtctccaattccctgtgggtcgtatcgctcgtttcttgaagaaaggcaaatacgccgaacgtgttggtgccggagctccggtttacttagccgccgttctcgaatacctcgccgctgaggtattggaattggctggaaacgcagcgagggataacaagaagacgaggattgttccaaggcatattcaattggcggtgaggaacgatgaagaattgagcaaattgcttggagatgtgactattgctaatggaggtgtgatgcctaacattcacaatcttcttcttcctaagaagaccggtgcttccaagccatctgctgaagacgattgattaatcaaccaaatccactctcttgtgttttttgagtttttaaggctttttaagagtaatttagattagatctatggtgaagaaagaatctatcttctgtgttttttgaattgaattgaatgttcatatgctttcaatttcttatggaatcaagattttaacttttctt

SEQ ID NO: 30154 - protein, 132 aa, Arabidopsis thaliana
  peptide (1)..(132): Ceres Seq. ID no. 12337351
MAGRGKTLGSGSAKKATTRSSKAGLQFPVGRIARFLKKGKYAERVGAGAPVYLAAVLEYLAAEVLELAGNAARDNKKTRIVPRHIQLAVRNDEELSKLLGDVTIANGGVMPNIHNLLLPKKTGASKPSAEDD

SEQ ID NO: 30155 - DNA, 1105 bp, Arabidopsis thaliana
  misc_feature (1)..(1105): Ceres Seq. ID no. 12343433
  misc_feature (1)..(1105): Ortholog of  Ceres SEQ ID NO 13639109 as cited in SEQ ID NO 51131
  misc_feature (1)..(1105): Ortholog of  Ceres SEQ ID NO 13596346 as cited in SEQ ID NO 60879
  misc_feature (1)..(1105): Ortholog of  Ceres SEQ ID NO 15178104 as cited in SEQ ID NO 0
aagagctcaagaaacatccctccataatttgcttctcttttctccaattctcacacattcttctgcttcgttaattttctactcgatttcgctcttcagaaatttgacaatgaagcttgacactagtggattggagacaactatgcctgtgattggctttggatcaaacagtgagatgcttgatgggttttcgtctgcaccttcgtttgatcttcctcgtaccaccgattttgatgggtttcagaaaaaagctgtggagatggtgaagcctgcaaagggtacaactacacttgcgtttatctttaaggaaggtgttatggtagctgctgattctcgagctagcatgggaggatatatctcgtcgcaatctgtgaagaagattattgaaattaatccttatatgcttggtacaatggctggtggtgctgctgattgtcaattctggcatagaaatctgggaattaagtgccgtctacatgagctggcaaacaaaaggagaatctctgtttcaggagcttcaaagcttcttgctaacatgctctattcatatcgtggaatgggactttctgttggcacaatgattgctggatgggatgaaacaggccctggattgtactatgttgacaacgaaggaggacggcttaagggagacagattctctgtcggttccggttcaccatacgcttatggtgttctggacagcggatacaaattcgatatgtcggttgaagaagcctcagagttagcaaggagatccatctaccatgctacattccgtgatggagctagtggtggagttgctagcgtgtaccacgttgggccgcaaggatggacgaaactctctggagacgacgttggcgagctacattaccattattaccccgtggctccaatcaccgcggaacatgtgatggaagaggctgccgaataagtactgtgattcttgtctatcttactaagagttttattacatcacttatgttttgttcatcaatgaacagaatcatagattcaagtttcttttgtattgcgaatgatgtagacgttagtttggccacaatgatcacgttgcataatagataacataatagataacctgtttctc

SEQ ID NO: 30156 - protein, 309 aa, Arabidopsis thaliana
  peptide (1)..(309): Ceres Seq. ID no. 12343434
RAQETSLHNLLLFSPILTHSSASLIFYSISLFRNLTMKLDTSGLETTMPVIGFGSNSEMLDGFSSAPSFDLPRTTDFDGFQKKAVEMVKPAKGTTTLAFIFKEGVMVAADSRASMGGYISSQSVKKIIEINPYMLGTMAGGAADCQFWHRNLGIKCRLHELANKRRISVSGASKLLANMLYSYRGMGLSVGTMIAGWDETGPGLYYVDNEGGRLKGDRFSVGSGSPYAYGVLDSGYKFDMSVEEASELARRSIYHATFRDGASGGVASVYHVGPQGWTKLSGDDVGELHYHYYPVAPITAEHVMEEAAE

SEQ ID NO: 30157 - protein, 273 aa, Arabidopsis thaliana
  peptide (1)..(273): Ceres Seq. ID no. 12343435
MKLDTSGLETTMPVIGFGSNSEMLDGFSSAPSFDLPRTTDFDGFQKKAVEMVKPAKGTTTLAFIFKEGVMVAADSRASMGGYISSQSVKKIIEINPYMLGTMAGGAADCQFWHRNLGIKCRLHELANKRRISVSGASKLLANMLYSYRGMGLSVGTMIAGWDETGPGLYYVDNEGGRLKGDRFSVGSGSPYAYGVLDSGYKFDMSVEEASELARRSIYHATFRDGASGGVASVYHVGPQGWTKLSGDDVGELHYHYYPVAPITAEHVMEEAAE

SEQ ID NO: 30158 - protein, 262 aa, Arabidopsis thaliana
  peptide (1)..(262): Ceres Seq. ID no. 12343436
MPVIGFGSNSEMLDGFSSAPSFDLPRTTDFDGFQKKAVEMVKPAKGTTTLAFIFKEGVMVAADSRASMGGYISSQSVKKIIEINPYMLGTMAGGAADCQFWHRNLGIKCRLHELANKRRISVSGASKLLANMLYSYRGMGLSVGTMIAGWDETGPGLYYVDNEGGRLKGDRFSVGSGSPYAYGVLDSGYKFDMSVEEASELARRSIYHATFRDGASGGVASVYHVGPQGWTKLSGDDVGELHYHYYPVAPITAEHVMEEAAE

SEQ ID NO: 30159 - DNA, 805 bp, Arabidopsis thaliana
  misc_feature (1)..(805): Ceres Seq. ID no. 12322655
  misc_feature (1)..(805): Ortholog of  Ceres SEQ ID NO 13594720 as cited in SEQ ID NO 52147
cccttagttacacaattttaaaataaatataccgttacacaaaatacacaaaaatggcaaacttgtgtacacttgttggttttcttgtcatcatcttcttcaatgtgtttgcacctgcctcttctgccagtcaccccgtcgaatggtcgctcgggaaagactatagctcgttggctaccggaaagtccttcgcggtcggcgataccatcgtgttcaactacggtgcgggtcacacggtggacgaagtgagcgaaagtgactacaagagttgcacattggggaacgcaatttcttcggacagtagtggaaccacaagtatagctctcaagacacctggtcctcactacttcatctgcggtatccccggccactgcactggcgggatgaagctctctgtcattgttccagcagcttcatcaggcggcagtactggagacggtaccactgacaaaaatacacccgtacaagacggaaaaactacaccctcagaaggtaaaaaggctagtccttctgcttcggccacggccgtgttgaagccgttggatgctttggttgtgacttgtgtagttgcattgatgtacactttggctctcccttaattagttggtttcttttgttttcctgtggtttgactcgtttgaaggaccaggctagaggcagtgctgttatatgcttcttataattaattatctctcatgatttttcctatgttttgtctcgtatttatcaattttttttgttcgctttcttaaaaaaaaaaaaaaaaagtaaattaaaatacgaagcaccatccataatgattaac

SEQ ID NO: 30160 - protein, 181 aa, Arabidopsis thaliana
  peptide (1)..(181): Ceres Seq. ID no. 12322656
MANLCTLVGFLVIIFFNVFAPASSASHPVEWSLGKDYSSLATGKSFAVGDTIVFNYGAGHTVDEVSESDYKSCTLGNAISSDSSGTTSIALKTPGPHYFICGIPGHCTGGMKLSVIVPAASSGGSTGDGTTDKNTPVQDGKTTPSEGKKASPSASATAVLKPLDALVVTCVVALMYTLALP

SEQ ID NO: 30161 - DNA, 895 bp, Arabidopsis thaliana
  misc_feature (1)..(895): Ceres Seq. ID no. 12321347
  misc_feature (1)..(895): Ortholog of  Ceres SEQ ID NO 15178388 as cited in SEQ ID NO 1097
aaagccaaagcctttcttcttcttcttttcttccgattattcccaaacacaaaaatactgctgaggaaaagcaatccacacgattcgattcaaagttttcattttttctctaaaagtttggattttgatttcgttgctgaacggaaaaagaatcagctcctttcagtttagggttttgggtttctgtttggtctctatcagatgatgtgtgaggagattcttcctctgtttgtgtctgtttcagatggaagacaatgataagtctccccctaaggattactataagattctagaagttgattacgacgcaactgaggaattgatcagactcaattatcggaagcttgcattgaagtggcatcctgataagcacaaaggcgatagtgcagctacagaaaaatttcaagagattaatgaagcttataatgtgctgatggaccctgctaaacgttttgagtatgatttcactggtatatatgagatccacaaatacactttacgggaatatctcgccagatttaagggaatgatactcacttgcaatgggctcggtatcagccaatcctcatcaccatggacacatcaattggctgagaccaccaaacaacagacgagcaaggatactgtataaactgaagcagaagttagaagagggctgtaaaactgtacaaaactggagctatagcgcttttatcgcgcattgatgatatagtgaaatgctttgattaggtctgttgtattgtttctttatcaatgtagaattagagaagcttgtattgtctctggcttctattaatacattcacacattggtgatggttcaaatcttttaccactctactattctcatcattcatggttttccagacttgagacaaagtgaataatacaatcta

SEQ ID NO: 30162 - protein, 128 aa, Arabidopsis thaliana
  peptide (1)..(128): Ceres Seq. ID no. 12321348
MEDNDKSPPKDYYKILEVDYDATEELIRLNYRKLALKWHPDKHKGDSAATEKFQEINEAYNVLMDPAKRFEYDFTGIYEIHKYTLREYLARFKGMILTCNGLGISQSSSPWTHQLAETTKQQTSKDTV

SEQ ID NO: 30163 - protein, 65 aa, Arabidopsis thaliana
  peptide (1)..(65): Ceres Seq. ID no. 12321349
MDPAKRFEYDFTGIYEIHKYTLREYLARFKGMILTCNGLGISQSSSPWTHQLAETTKQQTSKDTV

SEQ ID NO: 30164 - DNA, 2131 bp, Arabidopsis thaliana
  misc_feature (1)..(2131): Ceres Seq. ID no. 12326066
  misc_feature (1)..(2131): Ortholog of  Ceres SEQ ID NO 13597407 as cited in SEQ ID NO 64106
aaacgacaataagctccacagtgagttcttctcagcaatcacaatctatctggtttaagccctcactatcctctctctcaaatcgcggagtctccgaagtttctctggtaattttcaaatctgaagttttgctttggatatcacgatttttgttaatcagccgcgatcgagaagagcgtttttactctctcgttcgcatcaatgcaacatatttcccaatttcgtgatgttgcgtcttcatcgttccttacttctctctttttgagttctgtttggtataaatgcgatccttttttttccttccttgcctaatatttctcgtttccttgcaattacggttataaaaagtcagacaaaatgcagtcgtcaacgtatgcggttaaaggaaacgctgcgtttgcgtttcagagacggaccttctcttctgacagatcggcgacttctaccggaattcgcttcgctggtactaagagcttagccaccaccggatcactctactgttctgattctaaagccatgggagcgacgcttgctcgtgctgatgacgggatccagagcgttatgagtttctcttctgtcaaagctcgatcggtcagagctcaagcctcctctgatggagatgaagaagaagctatacctctgagatctgaagggaaaagctctggaacagttttgccttttgttggtgttgcttgtcttggtgctatactctttggttatcatctcggggtggttaatggtgctcttgaatatcttgctaaggatcttgggatcgccgaaaatactgttttgcaaggatggattgttagttctctgcttgctggtgctacggtaggttcattcactggaggtgcattagctgacaaatttggacgaacaagaacttttcaattggatgctatcccgcttgccattggagctttcttatgtgcaacagctcagagtgtgcagactatgattgtgggacgtctgctcgctggaattggaattggaatctcatcagcgattgtaccactttacatatctgagatatcaccaactgaaatccgtggagcactcggatctgtgaaccagttgttcatctgtataggaatacttgcagccttgatagctggattaccccttgcagcaaaccctctatggtggaggacgatgtttggtgttgcagttatcccttccgttctattggccataggaatggctttttctccagaaagcccaaggtggctcgttcagcaaggaaaagtctctgaagctgaaaaggcgatcaaaactttgtatggtaaagaaagagtggttgaactagttcgcgacttatcagcctctggccaaggttcttctgagccggaggcaggatggtttgatctattcagcagccgctactggaaagttgtaagcgtaggtgcggctctcttcttgtttcaacagttagccgggataaacgcagttgtgtattactccacatcggtattccgtagtgcgggaatccaatcagatgttgcagccagtgctctcgttggagcatcaaatgtctttggcactgctgttgcttcatcgttgatggataaaatgggaaggaaaagtcttttactgacaagctttggtggaatggctttgtcaatgctgttactctccttgtccttcacatggaaggctcttgctgcctattctggaacccttgccgttgttggaactgttctatatgtcctgtcattctcacttggtgctggcccggtaccggctcttcttcttccagagatatttgcatcccgaatcagagcaaaagccgtcgctctttctctcggcatgcactggatatcaaactttgtgatcggactatacttcttaagcgttgtgactaaattcggaatcagcagtgtctacttgggttttgctggagtctgcgtccttgcggtcctctacattgcaggaaacgtcgtcgagactaaaggtcgatcactggaggaaatagagcttgctcttacatctggagcttgaaattaaacaaaagaaatcagcagaacaaaaaccagtttgtttcatcatttagtttgtgagtctttctctaatctgctactcttaaattgtacaatggacgaagttatcaataacgagaaatcttttcatgacc

SEQ ID NO: 30165 - protein, 546 aa, Arabidopsis thaliana
  peptide (1)..(546): Ceres Seq. ID no. 12326067
MQSSTYAVKGNAAFAFQRRTFSSDRSATSTGIRFAGTKSLATTGSLYCSDSKAMGATLARADDGIQSVMSFSSVKARSVRAQASSDGDEEEAIPLRSEGKSSGTVLPFVGVACLGAILFGYHLGVVNGALEYLAKDLGIAENTVLQGWIVSSLLAGATVGSFTGGALADKFGRTRTFQLDAIPLAIGAFLCATAQSVQTMIVGRLLAGIGIGISSAIVPLYISEISPTEIRGALGSVNQLFICIGILAALIAGLPLAANPLWWRTMFGVAVIPSVLLAIGMAFSPESPRWLVQQGKVSEAEKAIKTLYGKERVVELVRDLSASGQGSSEPEAGWFDLFSSRYWKVVSVGAALFLFQQLAGINAVVYYSTSVFRSAGIQSDVAASALVGASNVFGTAVASSLMDKMGRKSLLLTSFGGMALSMLLLSLSFTWKALAAYSGTLAVVGTVLYVLSFSLGAGPVPALLLPEIFASRIRAKAVALSLGMHWISNFVIGLYFLSVVTKFGISSVYLGFAGVCVLAVLYIAGNVVETKGRSLEEIELALTSGA

SEQ ID NO: 30166 - protein, 493 aa, Arabidopsis thaliana
  peptide (1)..(493): Ceres Seq. ID no. 12326068
MGATLARADDGIQSVMSFSSVKARSVRAQASSDGDEEEAIPLRSEGKSSGTVLPFVGVACLGAILFGYHLGVVNGALEYLAKDLGIAENTVLQGWIVSSLLAGATVGSFTGGALADKFGRTRTFQLDAIPLAIGAFLCATAQSVQTMIVGRLLAGIGIGISSAIVPLYISEISPTEIRGALGSVNQLFICIGILAALIAGLPLAANPLWWRTMFGVAVIPSVLLAIGMAFSPESPRWLVQQGKVSEAEKAIKTLYGKERVVELVRDLSASGQGSSEPEAGWFDLFSSRYWKVVSVGAALFLFQQLAGINAVVYYSTSVFRSAGIQSDVAASALVGASNVFGTAVASSLMDKMGRKSLLLTSFGGMALSMLLLSLSFTWKALAAYSGTLAVVGTVLYVLSFSLGAGPVPALLLPEIFASRIRAKAVALSLGMHWISNFVIGLYFLSVVTKFGISSVYLGFAGVCVLAVLYIAGNVVETKGRSLEEIELALTSGA

SEQ ID NO: 30167 - protein, 478 aa, Arabidopsis thaliana
  peptide (1)..(478): Ceres Seq. ID no. 12326069
MSFSSVKARSVRAQASSDGDEEEAIPLRSEGKSSGTVLPFVGVACLGAILFGYHLGVVNGALEYLAKDLGIAENTVLQGWIVSSLLAGATVGSFTGGALADKFGRTRTFQLDAIPLAIGAFLCATAQSVQTMIVGRLLAGIGIGISSAIVPLYISEISPTEIRGALGSVNQLFICIGILAALIAGLPLAANPLWWRTMFGVAVIPSVLLAIGMAFSPESPRWLVQQGKVSEAEKAIKTLYGKERVVELVRDLSASGQGSSEPEAGWFDLFSSRYWKVVSVGAALFLFQQLAGINAVVYYSTSVFRSAGIQSDVAASALVGASNVFGTAVASSLMDKMGRKSLLLTSFGGMALSMLLLSLSFTWKALAAYSGTLAVVGTVLYVLSFSLGAGPVPALLLPEIFASRIRAKAVALSLGMHWISNFVIGLYFLSVVTKFGISSVYLGFAGVCVLAVLYIAGNVVETKGRSLEEIELALTSGA

SEQ ID NO: 30168 - DNA, 1075 bp, Arabidopsis thaliana
  misc_feature (1)..(1075): Ceres Seq. ID no. 12605070
  misc_feature (1)..(1075): Ortholog of  Ceres SEQ ID NO 14304626 as cited in SEQ ID NO 52955
aaacattactcattcacaaaaccatcttaaagcaactacacaagtcttgaaattttctcatattttctatttactatataaacttttaatcaaatcaagattaactatggctgaggagtacaagaacaacgttcccgagcacgagacaccaacggtcgcaacagaggaatcaccagcgacgacaacagaggttacggatcgtggattgtttgatttcttggggaagaaggaagaggaagtgaaacctcaagagacaacgacgctcgagtctgagttcgatcataaggctcagatctctgaaccggagttagctgcggagcacgaggaagtgaaggagaacaagattactctgctagaggagcttcaagaaaagaccgaggaagatgaggagaacaagcctagtgtcatcgaaaagcttcaccgatccaacagctcttcttcctcttcgagcgatgaagaaggtgaggaaaagaaggagaagaagaagaagatcgttgaaggagaggaagataagaaaggactagtggagaagatcaaggagaagctcccaggacaccacgacaagacagcagaggatgatgtaccagtttccactaccatcccggtaccagtgtcggagagtgtggtggagcatgaccatcccgaggaagagaagaaaggattagttgagaagatcaaggagaagcttcctggtcaccacgacgagaaagcagaggattcaccagctgtcacgtccacgccgttggttgtaacggagcatccggtggagcctacgacggagcttccagtggaacatccggaggagaagaaggggattttggaaaagatcaaagagaagcttccaggttatcatgccaagaccactgaagaggaagtgaagaaagaaaaagagtctgatgattaagcaaaatggttaaagaatgaataatgatgtgggagtgggacattcgctgtgttttgtgatcattatctttctcttttaagttgttattgtggctttcgttgattgcatttgatcctttattttgtaatttcattctatcttttatataaagtttgcatatggtttatactt

SEQ ID NO: 30169 - protein, 300 aa, Arabidopsis thaliana
  peptide (1)..(300): Ceres Seq. ID no. 12605071
NITHSQNHLKATTQVLKFSHIFYLLYKLLIKSRLTMAEEYKNNVPEHETPTVATEESPATTTEVTDRGLFDFLGKKEEEVKPQETTTLESEFDHKAQISEPELAAEHEEVKENKITLLEELQEKTEEDEENKPSVIEKLHRSNSSSSSSSDEEGEEKKEKKKKIVEGEEDKKGLVEKIKEKLPGHHDKTAEDDVPVSTTIPVPVSESVVEHDHPEEEKKGLVEKIKEKLPGHHDEKAEDSPAVTSTPLVVTEHPVEPTTELPVEHPEEKKGILEKIKEKLPGYHAKTTEEEVKKEKESDD

SEQ ID NO: 30170 - protein, 265 aa, Arabidopsis thaliana
  peptide (1)..(265): Ceres Seq. ID no. 12605072
MAEEYKNNVPEHETPTVATEESPATTTEVTDRGLFDFLGKKEEEVKPQETTTLESEFDHKAQISEPELAAEHEEVKENKITLLEELQEKTEEDEENKPSVIEKLHRSNSSSSSSSDEEGEEKKEKKKKIVEGEEDKKGLVEKIKEKLPGHHDKTAEDDVPVSTTIPVPVSESVVEHDHPEEEKKGLVEKIKEKLPGHHDEKAEDSPAVTSTPLVVTEHPVEPTTELPVEHPEEKKGILEKIKEKLPGYHAKTTEEEVKKEKESDD

SEQ ID NO: 30171 - DNA, 1139 bp, Arabidopsis thaliana; identical to SEQ ID NO: 22245
  misc_feature (1)..(1139): Ceres Seq. ID no. 12323678
  misc_feature (1)..(1139): Ortholog of  Ceres SEQ ID NO 15178299 as cited in SEQ ID NO 0
  misc_feature (1)..(1139): Ortholog of  Ceres SEQ ID NO 15226331 as cited in SEQ ID NO 0

SEQ ID NO: 30172 - protein, 217 aa, Arabidopsis thaliana; identical to SEQ ID NO: 22246
  peptide (1)..(217): Ceres Seq. ID no. 12323679

SEQ ID NO: 30173 - protein, 133 aa, Arabidopsis thaliana; identical to SEQ ID NO: 22247
  peptide (1)..(133): Ceres Seq. ID no. 12323680

SEQ ID NO: 30174 - DNA, 787 bp, Arabidopsis thaliana
  misc_feature (1)..(787): Ceres Seq. ID no. 12332031
  misc_feature (1)..(787): Ortholog of  Ceres SEQ ID NO 12557654 as cited in SEQ ID NO 12
  misc_feature (1)..(787): Ortholog of  Ceres SEQ ID NO 15175150 as cited in SEQ ID NO 0
gtctaaactctaaactctaaagactttgtcatttcgtgaaccgtcgtcataactgatccttccaaagaatctccaaaatccctaaacttcgaaaatggcagaaaccgccgagacaatcaacaccacgatctcatcgccgccaccggaatccgaaagctccaccactatttctgcaatgacagatccaacatctcaagaagcagcctcaaaagacacagatctgacgaaagaagccgaatcagagaagaaaccaggaggaatctctctccgaatctggccaccgactcagaaaactcgcgacgccgttctgaatcgcctgatcgagaccttatccaccgaatcaatcctctctaagagatacggtactcttaaatctgacgatgcaaccaccgtcgcgaaacttatcgaagaagaggcttatggtgttgcttcgaatgctgtgtcgagtgatgatgatgggattaagattcttgagctttattctaaagagattagtaagaggatgcttgaatctgttaaggctagatctaatgctagtgttggaaatggaagtgtggaggatgctaatactgatgctagtgaggtttctaaagatgatgctggtcctgcttcagaggaggagaagagtgaggcttgagaaatttggttttacttccttattataatctcttgtctcttagggttttgctgttcttgtaatgatgatgatgacttgtggatttggtattatgcatatttgaagatgtttcttcttccttaatatgagtgcaagtgtcttcattttgtt

SEQ ID NO: 30175 - protein, 180 aa, Arabidopsis thaliana
  peptide (1)..(180): Ceres Seq. ID no. 12332032
MAETAETINTTISSPPPESESSTTISAMTDPTSQEAASKDTDLTKEAESEKKPGGISLRIWPPTQKTRDAVLNRLIETLSTESILSKRYGTLKSDDATTVAKLIEEEAYGVASNAVSSDDDGIKILELYSKEISKRMLESVKARSNASVGNGSVEDANTDASEVSKDDAGPASEEEKSEA

SEQ ID NO: 30176 - protein, 153 aa, Arabidopsis thaliana
  peptide (1)..(153): Ceres Seq. ID no. 12332033
MTDPTSQEAASKDTDLTKEAESEKKPGGISLRIWPPTQKTRDAVLNRLIETLSTESILSKRYGTLKSDDATTVAKLIEEEAYGVASNAVSSDDDGIKILELYSKEISKRMLESVKARSNASVGNGSVEDANTDASEVSKDDAGPASEEEKSEA

SEQ ID NO: 30177 - protein, 94 aa, Arabidopsis thaliana
  peptide (1)..(94): Ceres Seq. ID no. 12332034
MQPPSRNLSKKRLMVLLRMLCRVMMMGLRFLSFILKRLVRGCLNLLRLDLMLVLEMEVWRMLILMLVRFLKMMLVLLQRRRRVRLEKFGFTSLL

SEQ ID NO: 30178 - DNA, 897 bp, Arabidopsis thaliana
  misc_feature (1)..(897): Ceres Seq. ID no. 13490026
  misc_feature (1)..(897): Ortholog of  Ceres SEQ ID NO 14314534 as cited in SEQ ID NO 52434
  misc_feature (1)..(897): Ortholog of  Ceres SEQ ID NO 13656436 as cited in SEQ ID NO 69154
aaggggaaagagaaattaaattatttatttatttctgtcatcttctccttttctatttcaaaatcccaaatctaaagcactcctcgagaaaagtgtaacaatggcgagaagaccggacgaagaatacgactacttgtttaaagtggttttgatcggagactccggtgtcggcaagtctaatctcctctctagattcactcgcaacgagttctgcttagaatccaaatccaccattggtgtcgaattcgctactcgtactctccaagtggaaggaaggactgtgaaagctcagatatgggacacggctgggcaagaacgatacagagccataactagcgcctattacagaggtgcacttggagctcttttggtctatgatgtcaccaagccaacaacgtttgagaatgtaagcaggtggttaaaagaactaagagaccatgcagattccaatatagtgatcatgttgattgggaacaagacagatctgaagcatctcagagcagttgccacagaggatgctcagagctatgcagagaaagaaggcttatctttcatcgagacatcggctctcgaggcattaaacgtagaaaaggcttttcagacgattctctcggaggtttataggatcatcagcaagaagtcgatatcttcagaccagacaactgcaaatgccaacatcaaggaaggccaaacaattgatgtggctgctacttctgaatcaaacgctaagaagccttgttgctcatcgtcttgaaaggctttgtttgtgttgcacttaaaaaaagccaaatatctatgagactttatttcaaggcttgcgttgtatttgttttctttcttttttctgttgttgataatataactcaaagataattttttatatcaattgtggagttc

SEQ ID NO: 30179 - protein, 217 aa, Arabidopsis thaliana
  peptide (1)..(217): Ceres Seq. ID no. 13490027
MARRPDEEYDYLFKVVLIGDSGVGKSNLLSRFTRNEFCLESKSTIGVEFATRTLQVEGRTVKAQIWDTAGQERYRAITSAYYRGALGALLVYDVTKPTTFENVSRWLKELRDHADSNIVIMLIGNKTDLKHLRAVATEDAQSYAEKEGLSFIETSALEALNVEKAFQTILSEVYRIISKKSISSDQTTANANIKEGQTIDVAATSESNAKKPCCSSS

SEQ ID NO: 30180 - DNA, 1307 bp, Arabidopsis thaliana
  misc_feature (1)..(1307): Ceres Seq. ID no. 12335859
  misc_feature (1)..(1307): Ortholog of  Ceres SEQ ID NO 13596281 as cited in SEQ ID NO 68146
aaaggaagcttcgaaaccattgaagcagcagcaatgatactacgtcgtttcatctgctacaacgcttcttcaactgtttcatctatagctccatctccgaagaagaagcctctcatcttcttaggctctcctcaggtctccgtgactgtgcttgaagctcttttcaatgcatctaatgctccaaactcttccttcgaggttgcaggtattgttacacagcctccatcaaggagagataggggtaaaaaagtgttgccttcaccagtagcgcaatacgctcttgataaaggcttaccttctgatctcattttctcccctgagaaggcaggagatgaagcattcttatcggctttaagagagttgcaacctgagctttgtattacagcagcttatgggaatattttgcctactaagttccttaagattccggtacatgggacagtgaacatacacccaagtttgttgccgctgtaccgtggtgcagctccagttcaaagagcattacaggacggtgtcccagaaacaggagtatcattagcatttacggtgcgtaagttagatgcaggaccagtgattgcctctaaaaggttccaagtggatgatctaataaaggcaccagaactgctctcgttcctattttctgaaggctctaatcttcttatccgtgaacttccctcaatattcgatgggtctgcaaaatcaaaagcagttcctcaagatgattccaaagctaccttagctccaaagatagctccagatgaggcttggctctcttttgaccaggaagcttttgttctacataacaaggttcgtgcattcgcaggatggccaggaacacgagccaaagttgtagtccttgatgacaaaagcggccagcaaaatgtgctagagcttaaaattatgtccactcgagtttgcaaagatctggaaatccagggtggtgaacaagattatgtaactttcaagaaaggttcattggtgtttccttgtagaggcggtacagctttggaggtactagaagtccagcttcctggtaagaaagcgatcaacgcagctgctttttggaatggcttgagaggtcaaaagctgaagaagctatgaagacagagactggaacagaattaagctttggtcaggaagttagaatcagcaaattagtcatatcaggtctagccactttcaaattgtttctgaatgaaaggtgcctactgatttttggtttcaatttgattttgttcttcaaaatttgattttgtataactcaaatatattccacattcgttggtataatatgattcttctctact

SEQ ID NO: 30181 - protein, 366 aa, Arabidopsis thaliana
  peptide (1)..(366): Ceres Seq. ID no. 12335860
KGSFETIEAAAMILRRFICYNASSTVSSIAPSPKKKPLIFLGSPQVSVTVLEALFNASNAPNSSFEVAGIVTQPPSRRDRGKKVLPSPVAQYALDKGLPSDLIFSPEKAGDEAFLSALRELQPELCITAAYGNILPTKFLKIPVHGTVNIHPSLLPLYRGAAPVQRALQDGVPETGVSLAFTVRKLDAGPVIASKRFQVDDLIKAPELLSFLFSEGSNLLIRELPSIFDGSAKSKAVPQDDSKATLAPKIAPDEAWLSFDQEAFVLHNKVRAFAGWPGTRAKVVVLDDKSGQQNVLELKIMSTRVCKDLEIQGGEQDYVTFKKGSLVFPCRGGTALEVLEVQLPGKKAINAAAFWNGLRGQKLKKL

SEQ ID NO: 30182 - protein, 355 aa, Arabidopsis thaliana
  peptide (1)..(355): Ceres Seq. ID no. 12335861
MILRRFICYNASSTVSSIAPSPKKKPLIFLGSPQVSVTVLEALFNASNAPNSSFEVAGIVTQPPSRRDRGKKVLPSPVAQYALDKGLPSDLIFSPEKAGDEAFLSALRELQPELCITAAYGNILPTKFLKIPVHGTVNIHPSLLPLYRGAAPVQRALQDGVPETGVSLAFTVRKLDAGPVIASKRFQVDDLIKAPELLSFLFSEGSNLLIRELPSIFDGSAKSKAVPQDDSKATLAPKIAPDEAWLSFDQEAFVLHNKVRAFAGWPGTRAKVVVLDDKSGQQNVLELKIMSTRVCKDLEIQGGEQDYVTFKKGSLVFPCRGGTALEVLEVQLPGKKAINAAAFWNGLRGQKLKKL

SEQ ID NO: 30183 - DNA, 1213 bp, Arabidopsis thaliana
  misc_feature (1)..(1213): Ceres Seq. ID no. 12339711
  misc_feature (1)..(1213): Ortholog of  Ceres SEQ ID NO 14306970 as cited in SEQ ID NO 53904
  misc_feature (1)..(1213): Ortholog of  Ceres SEQ ID NO 13597320 as cited in SEQ ID NO 63901
aaagcaaacgcaactcatatccaatcgcttttaaacgccaataatcgcgttacagtaacaactcgaaaaatggtaacactaatcgtggccaccaccgccgatccagcgtcgatcaaccctgcggcggcgcttctcgccatgcccggttggaccgccggacctatcttaccgccggacataaagagttttagtaacaagcaaacgagagtgattcaacacgatagatctatagtaaaagaagacgatctcgatttacgttgggaagaagctaccggtgaagttgttgatgaagtcatcttcctcagccgtcacaccgccgtctcaaatcgtcctgctttaactgttcatccgattggagtgcttcatctaaaggatggagaatcaccgccgcaaggaggaaagcctggatgggcggcgttgcaagcactagaattggtccatggtttcgtcttttgaagaaaatggctgaagctcatggtttagttcctgagtttgagataacataggaagctactcatcatggaccaataactaacaagccaacgatgtttttggagattggtagtaccgaggaatactggaagaggcaagacgcagctcaagtcatggctcttttaatgtgggaaggtcttgggctaggaggcagtgaagaagtagggaagtggaaaagtgaaaccggaaagaggaaagttcttttaggcattggaggtggacattatgctcctcgtcacatggatatagctttgaaagatgatatttgggtaggccatttgctttctggatactcattaccgatggaagatccaactcaaaccaaaacaacgcctggagagaattacattggtggaaattggagacaatcaattaaggcagcatttgaagctactaaagcatcattccccggaggcgagatcttggctcatcttgaccacaagagcttcaaaggatggcaaaagaaggccattacagagtttttagcagaagagagcatcaatgttgggaagccaaacgatttcacatgaactgtgagagacccccttaaaacatatcttgagatctgagtttttggtttattggttcagaatctatcattgatgatgatgggtttagattattttcagctgttacaagtaagtagagattgaaattcatctgtaagctgccctttttaaagttcacattcagatttaagatagaagaagaataaaacatg

SEQ ID NO: 30184 - protein, 158 aa, Arabidopsis thaliana
  peptide (1)..(158): Ceres Seq. ID no. 12339712
MFLEIGSTEEYWKRQDAAQVMALLMWEGLGLGGSEEVGKWKSETGKRKVLLGIGGGHYAPRHMDIALKDDIWVGHLLSGYSLPMEDPTQTKTTPGENYIGGNWRQSIKAAFEATKASFPGGEILAHLDHKSFKGWQKKAITEFLAEESINVGKPNDFT

SEQ ID NO: 30185 - protein, 151 aa, Arabidopsis thaliana
  peptide (1)..(151): Ceres Seq. ID no. 12339713
KANATHIQSLLNANNRVTVTTRKMVTLIVATTADPASINPAAALLAMPGWTAGPILPPDIKSFSNKQTRVIQHDRSIVKEDDLDLRWEEATGEVVDEVIFLSRHTAVSNRPALTVHPIGVLHLKDGESPPQGGKPGWAALQALELVHGFVF

SEQ ID NO: 30186 - protein, 138 aa, Arabidopsis thaliana
  peptide (1)..(138): Ceres Seq. ID no. 12339714
MALLMWEGLGLGGSEEVGKWKSETGKRKVLLGIGGGHYAPRHMDIALKDDIWVGHLLSGYSLPMEDPTQTKTTPGENYIGGNWRQSIKAAFEATKASFPGGEILAHLDHKSFKGWQKKAITEFLAEESINVGKPNDFT

SEQ ID NO: 30187 - DNA, 1224 bp, Arabidopsis thaliana
  misc_feature (1)..(1224): Ceres Seq. ID no. 12333622
  misc_feature (1)..(1224): Ortholog of  Ceres SEQ ID NO 14306797 as cited in SEQ ID NO 53354
  misc_feature (1)..(1224): Ortholog of  Ceres SEQ ID NO 15176525 as cited in SEQ ID NO 54495
  misc_feature (1)..(1224): Ortholog of  Ceres SEQ ID NO 15169519 as cited in SEQ ID NO 67237
atctgattcaaacgcatttggtaggctgagagaaagaaagaaaaagataaagatggatcacgcagcagatgctcaccgtacggatttgatgaccattacaagattcgtgttgaatgaacaatcaaagtatccagaatctcgtggtgatttcaccattttgcttagtcacatcgttttgggttgcaaattcgtttgcagtgctgttaataaggctggtttggctaagttaattggacttgcaggggaaacaaacattcagggtgaagagcaaaagaaacttgatgtgctctctaatgatgtctttgtcaacgctttggttagcagtggtagaacttctgttcttgtctcggaggaagatgaggaagctacgtttgtggagccatccaagcgtggaaagtactgtgttgtttttgatccgcttgatggatcttcaaacattgactgtggtgtttccattggcacaatttttggaatttacacgttggaccacactgatgagccaaccactgcagatgttctgaaacctgggaatgaaatggtggctgcaggttattgtatgtacggaagctcctgcatgcttgtgttgagcactggaaccggtgtccacggatttacactggacccatctctaggagagttcattctaactcacccggacattaagattccaaataagggaaacatttattcggtgaatgaaggcaatgcgcagaactgggatggtccaactacaaagtatgtagagaaatgcaagtttcctaaagatggttctcctgcaaagtctctgagatacgtaggaagtatggtagctgatgttcatcgtacactactttatggaggaatcttcttgtacccggctgacaagaaaagccccaatggaaaattgcgtgtcttgtatgaagttttcccgatgtcgtttttgatggagcaagccggaggtcaggcctttacgggaaagaaaagggcgctagaccttgtcccggagaagatccatgagcgttctccgatatttcttggtagctacgatgatgtagaagagattaaagctctctatgctgaggaggaaaagaagaactaagcttctcattcttcttttattctcttactgtctctgtctctcttatttctatatacagtatcttcttctgatgagaagaacaatataactcatttacaaaaggaagatctttctttatcattaaatgcacataaaaatcttctttc

SEQ ID NO: 30188 - protein, 358 aa, Arabidopsis thaliana
  peptide (1)..(358): Ceres Seq. ID no. 12333623
SDSNAFGRLRERKKKIKMDHAADAHRTDLMTITRFVLNEQSKYPESRGDFTILLSHIVLGCKFVCSAVNKAGLAKLIGLAGETNIQGEEQKKLDVLSNDVFVNALVSSGRTSVLVSEEDEEATFVEPSKRGKYCVVFDPLDGSSNIDCGVSIGTIFGIYTLDHTDEPTTADVLKPGNEMVAAGYCMYGSSCMLVLSTGTGVHGFTLDPSLGEFILTHPDIKIPNKGNIYSVNEGNAQNWDGPTTKYVEKCKFPKDGSPAKSLRYVGSMVADVHRTLLYGGIFLYPADKKSPNGKLRVLYEVFPMSFLMEQAGGQAFTGKKRALDLVPEKIHERSPIFLGSYDDVEEIKALYAEEEKKN

SEQ ID NO: 30189 - protein, 341 aa, Arabidopsis thaliana
  peptide (1)..(341): Ceres Seq. ID no. 12333624
MDHAADAHRTDLMTITRFVLNEQSKYPESRGDFTILLSHIVLGCKFVCSAVNKAGLAKLIGLAGETNIQGEEQKKLDVLSNDVFVNALVSSGRTSVLVSEEDEEATFVEPSKRGKYCVVFDPLDGSSNIDCGVSIGTIFGIYTLDHTDEPTTADVLKPGNEMVAAGYCMYGSSCMLVLSTGTGVHGFTLDPSLGEFILTHPDIKIPNKGNIYSVNEGNAQNWDGPTTKYVEKCKFPKDGSPAKSLRYVGSMVADVHRTLLYGGIFLYPADKKSPNGKLRVLYEVFPMSFLMEQAGGQAFTGKKRALDLVPEKIHERSPIFLGSYDDVEEIKALYAEEEKKN

SEQ ID NO: 30190 - protein, 329 aa, Arabidopsis thaliana
  peptide (1)..(329): Ceres Seq. ID no. 12333625
MTITRFVLNEQSKYPESRGDFTILLSHIVLGCKFVCSAVNKAGLAKLIGLAGETNIQGEEQKKLDVLSNDVFVNALVSSGRTSVLVSEEDEEATFVEPSKRGKYCVVFDPLDGSSNIDCGVSIGTIFGIYTLDHTDEPTTADVLKPGNEMVAAGYCMYGSSCMLVLSTGTGVHGFTLDPSLGEFILTHPDIKIPNKGNIYSVNEGNAQNWDGPTTKYVEKCKFPKDGSPAKSLRYVGSMVADVHRTLLYGGIFLYPADKKSPNGKLRVLYEVFPMSFLMEQAGGQAFTGKKRALDLVPEKIHERSPIFLGSYDDVEEIKALYAEEEKKN

SEQ ID NO: 30191 - DNA, 765 bp, Arabidopsis thaliana
  misc_feature (1)..(765): Ceres Seq. ID no. 12333665
  misc_feature (1)..(765): Ortholog of  Ceres SEQ ID NO 14309365 as cited in SEQ ID NO 0
acctcaaagaaaacatcgaaatcttagagaagaagaaaagaaaaagaagagaaatgacagagaagaaagagatggaagtggtgaaagggctcaacgtggagagatacatgggccgttggtacgagattgcttctttcccatcaaggtttcagccaaagaacggcgtcgacactcgcgccacctacacccttaaccccgacggtaccatacacgtcttgaacgaaacgtggagcaacgggaagaggggttttatcgaaggcagcgcctataaggccgatcctaaaagcgacgaagccaagctcaaagtcaagttctatgtccctcctttcctcccaatcattcccgtcaccggagactactgggtgctctacatcgatcctgactaccagcacgctctcattggccagccttccaggagttatctctggatattgagcaggacggcgcaaatggaggaagagacgtataagcagctggtggagaaggcagtggaggaaggttatgacatcagcaagcttcacaagactcctcagagtgacacaccacctgagtccaacactgcccctgaagactccaagggcgtttggtggttcaaatctctcttcggcaaatagattacacggcacacaaagactttgtttcacctctttgatccttttgtctgtgtaatatactaccccctttgtctactctagttatcttccatcatctgcttttgtctatttacgacatcttcatctagttatgcaaagtcgtctcttttac

SEQ ID NO: 30192 - protein, 203 aa, Arabidopsis thaliana
  peptide (1)..(203): Ceres Seq. ID no. 12333666
LKENIEILEKKKRKRREMTEKKEMEVVKGLNVERYMGRWYEIASFPSRFQPKNGVDTRATYTLNPDGTIHVLNETWSNGKRGFIEGSAYKADPKSDEAKLKVKFYVPPFLPIIPVTGDYWVLYIDPDYQHALIGQPSRSYLWILSRTAQMEEETYKQLVEKAVEEGYDISKLHKTPQSDTPPESNTAPEDSKGVWWFKSLFGK

SEQ ID NO: 30193 - protein, 186 aa, Arabidopsis thaliana
  peptide (1)..(186): Ceres Seq. ID no. 12333667
MTEKKEMEVVKGLNVERYMGRWYEIASFPSRFQPKNGVDTRATYTLNPDGTIHVLNETWSNGKRGFIEGSAYKADPKSDEAKLKVKFYVPPFLPIIPVTGDYWVLYIDPDYQHALIGQPSRSYLWILSRTAQMEEETYKQLVEKAVEEGYDISKLHKTPQSDTPPESNTAPEDSKGVWWFKSLFGK

SEQ ID NO: 30194 - protein, 180 aa, Arabidopsis thaliana
  peptide (1)..(180): Ceres Seq. ID no. 12333668
MEVVKGLNVERYMGRWYEIASFPSRFQPKNGVDTRATYTLNPDGTIHVLNETWSNGKRGFIEGSAYKADPKSDEAKLKVKFYVPPFLPIIPVTGDYWVLYIDPDYQHALIGQPSRSYLWILSRTAQMEEETYKQLVEKAVEEGYDISKLHKTPQSDTPPESNTAPEDSKGVWWFKSLFGK

SEQ ID NO: 30195 - DNA, 1364 bp, Arabidopsis thaliana
  misc_feature (1)..(1364): Ceres Seq. ID no. 12335499
  misc_feature (1)..(1364): Ortholog of  Ceres SEQ ID NO 15177842 as cited in SEQ ID NO 51547
  misc_feature (1)..(1364): Ortholog of  Ceres SEQ ID NO 13594859 as cited in SEQ ID NO 51974
  misc_feature (1)..(1364): Ortholog of  Ceres SEQ ID NO 13597887 as cited in SEQ ID NO 64295
ataattttctaagaggcgtgactttaaaaatctgtaaaaaagcaaatccgaagaaagagagagagagaaggtgattttgaaatttcagataacgcagaatttttttattctcgccggagttttctcctcccaccgtctctgattctcgtcgccgccgtacacagttgttgttctctgccgtttctgcaagatgattggatcgtttcttacaagaggattggtgatggtgttgggctatgcttaccctgcgtatgaatgttacaagactgttgaaaagaataggcctgaaatcgagcaacttcgcttttggtgtcagtactggatattggttgcttgcttgacagtttttgagagagttggtgatgcgtttgtttcatgggttccgatgtacagtgaagctaagttggcattcttcatatacctgtggtatcctaaaaccaggggtactacatatgtctacgagtccttctttaggccatatctctcacagcatgagaatgacatagaccatagtttgctcgagctaaggactagagcaggagatatggctgttatatactggcaacgagttgcaagttatggtcagaccagaatccttgagattttgcagtatgttgctgcacaatcaactccaagaccgcagccacctcagaaacgtggaggtagagctaatcaagctcctgcgaagcctaagaaagcccctgttcccccaatcagaacctgaagaagtatcattgtcctcgtcttctagctcatcttcaagtgaaaatgaaggtaatgagccaacccgtaaagtatcaggcccgtcaagacctagaccaacagtgacatctgtaccagctgcagatcccaaaaacgcgggtaccactcagatagcacagaaatcagtagcttccccaattgtgaacccaccacagtcaaccacccaagtggaaccaatgcagatagaagaagtggaaggagaggcagaatcagggaatgaaaatcccaacccggaaggtccaaaggagacagtgatggaggagacaatcaggatgactcgtgggaggttgaggaagacgcgttcggaagaaagccgttgaaagaagaagaagaagctcaatccaaaaaattgttacttacttgcataacagtggtctctcttctctcttactctatgtttcctgcttctagaattacgttgacaggaactaacaactagtgggaatggttgtatgaaaagttaatctgttggttttgttcttttattcaatttagttgcatctttgacaaaaaaaaaaaaaatcaatttagttgcattaagtgtaaaagataacactcttgttttgtttgttcctttcgataactaattcggtaaaataggc

SEQ ID NO: 30196 - protein, 177 aa, Arabidopsis thaliana
  peptide (1)..(177): Ceres Seq. ID no. 12335500
MIGSFLTRGLVMVLGYAYPAYECYKTVEKNRPEIEQLRFWCQYWILVACLTVFERVGDAFVSWVPMYSEAKLAFFIYLWYPKTRGTTYVYESFFRPYLSQHENDIDHSLLELRTRAGDMAVIYWQRVASYGQTRILEILQYVAAQSTPRPQPPQKRGGRANQAPAKPKKAPVPPIRT

SEQ ID NO: 30197 - protein, 167 aa, Arabidopsis thaliana
  peptide (1)..(167): Ceres Seq. ID no. 12335501
MVRPESLRFCSMLLHNQLQDRSHLRNVEVELIKLLRSLRKPLFPQSEPEEVSLSSSSSSSSSENEGNEPTRKVSGPSRPRPTVTSVPAADPKNAGTTQIAQKSVASPIVNPPQSTTQVEPMQIEEVEGEAESGNENPNPEGPKETVMEETIRMTRGRLRKTRSEESR

SEQ ID NO: 30198 - protein, 166 aa, Arabidopsis thaliana
  peptide (1)..(166): Ceres Seq. ID no. 12335502
MVLGYAYPAYECYKTVEKNRPEIEQLRFWCQYWILVACLTVFERVGDAFVSWVPMYSEAKLAFFIYLWYPKTRGTTYVYESFFRPYLSQHENDIDHSLLELRTRAGDMAVIYWQRVASYGQTRILEILQYVAAQSTPRPQPPQKRGGRANQAPAKPKKAPVPPIRT

SEQ ID NO: 30199 - DNA, 1355 bp, Arabidopsis thaliana
  misc_feature (1)..(1355): Ceres Seq. ID no. 12325051
  misc_feature (1)..(1355): Ortholog of  Ceres SEQ ID NO 12615491 as cited in SEQ ID NO 62838
aatctcttccgttgtcaacaatcgaaaccgcgaaccctttgatttgaccagatgagatcaaaatcgaagcaggtgttgctactatggcttgagggttttcgagaagcttgttctcttcaccgtgttttcattctctgtctcaggtcgagaaagcttctcttaagaactgggcagtgttttcttttgaatggtttgattttcttaggaagtttaggtgtgtttaagtggtttatagatccatcccttcagtggatattacctgatcagtgctctcccctcacttctcaagaattttgttcgtatggtggattttacgcctttctacgtggtggacttttgcagctcttttacgttttttggttctatcctctgtacatgctcagcttcatcttgagtaacatctggtataacgatattgcaaagcatggattcgaggcaattgagatatctgacttaaactcagctgaagcattaagacaaggtgaagctctggcgtccctgaatatggcaaatgctgaaaggccttctggtcttggaggggtgatgatcggtataggagagcaggtgtactcgatacttctcctgacttttttttttcttgaggtttgtgttgttggtgttataccatacattgggaagatattgaatttcttacttctttcatggatgtatgcctactattgttacgaatataagtggaacttctcggggatttctctgaagaaaaggctggacttctttcaatctaactgggcattctttgctggttttggaagcccctgcgtgttggccattttctttctctcgcctcttgtgagcggagctcttatggccatcttgtttccattgtttgtcttaactgctacaggatcaggacctgaaaaattgattggggccccgagaagaacgtggaaatgtgcaggtttaggaaagcttccaatattctatattgctgacactctctcgatgttggcgttgtctatcttccggttggagtcccctcacgagaattaacatgaaaagacaggctgaagttgaaacattatgtctgcatctctcagtcttcgtggctagtcagaagattatatgcatttgtgttgatagtcataatgtcttcttggtgatattgtcaagtacagactcatgcttcagcaatttccgtgcggctttgaggtcatctgacacgcacgctcatggccgacgacatgctgctgcaaactccaaagcaacagacatgaagaatacaagatttatgttaaagtagtgttgattgtaaaataatataatccgtgtttagtgtttcattcattttacttgtacatatccttatctaataaatcacaactcacttcttt

SEQ ID NO: 30200 - protein, 320 aa, Arabidopsis thaliana
  peptide (1)..(320): Ceres Seq. ID no. 12325052
MRSKSKQVLLLWLEGFREACSLHRVFILCLRSRKLLLRTGQCFLLNGLIFLGSLGVFKWFIDPSLQWILPDQCSPLTSQEFCSYGGFYAFLRGGLLQLFYVFWFYPLYMLSFILSNIWYNDIAKHGFEAIEISDLNSAEALRQGEALASLNMANAERPSGLGGVMIGIGEQVYSILLLTFFFLEVCVVGVIPYIGKILNFLLLSWMYAYYCYEYKWNFSGISLKKRLDFFQSNWAFFAGFGSPCVLAIFFLSPLVSGALMAILFPLFVLTATGSGPEKLIGAPRRTWKCAGLGKLPIFYIADTLSMLALSIFRLESPHEN

SEQ ID NO: 30201 - protein, 212 aa, Arabidopsis thaliana
  peptide (1)..(212): Ceres Seq. ID no. 12325053
MLSFILSNIWYNDIAKHGFEAIEISDLNSAEALRQGEALASLNMANAERPSGLGGVMIGIGEQVYSILLLTFFFLEVCVVGVIPYIGKILNFLLLSWMYAYYCYEYKWNFSGISLKKRLDFFQSNWAFFAGFGSPCVLAIFFLSPLVSGALMAILFPLFVLTATGSGPEKLIGAPRRTWKCAGLGKLPIFYIADTLSMLALSIFRLESPHEN

SEQ ID NO: 30202 - protein, 169 aa, Arabidopsis thaliana
  peptide (1)..(169): Ceres Seq. ID no. 12325054
MANAERPSGLGGVMIGIGEQVYSILLLTFFFLEVCVVGVIPYIGKILNFLLLSWMYAYYCYEYKWNFSGISLKKRLDFFQSNWAFFAGFGSPCVLAIFFLSPLVSGALMAILFPLFVLTATGSGPEKLIGAPRRTWKCAGLGKLPIFYIADTLSMLALSIFRLESPHEN

SEQ ID NO: 30203 - DNA, 994 bp, Arabidopsis thaliana
  misc_feature (1)..(994): Ceres Seq. ID no. 13500011
  misc_feature (1)..(994): Ortholog of  Ceres SEQ ID NO 14301994 as cited in SEQ ID NO 56653
  misc_feature (1)..(994): Ortholog of  Ceres SEQ ID NO 13595658 as cited in SEQ ID NO 59888
  misc_feature (1)..(994): Ortholog of  Ceres SEQ ID NO 13661330 as cited in SEQ ID NO 61614
  misc_feature (1)..(994): Ortholog of  Ceres SEQ ID NO 13596025 as cited in SEQ ID NO 62024
  misc_feature (1)..(994): Ortholog of  Ceres SEQ ID NO 13662324 as cited in SEQ ID NO 62162
  misc_feature (1)..(994): Ortholog of  Ceres SEQ ID NO 12625713 as cited in SEQ ID NO 64160
  misc_feature (1)..(994): Ortholog of  Ceres SEQ ID NO 14301782 as cited in SEQ ID NO 66788
  misc_feature (1)..(994): Ortholog of  Ceres SEQ ID NO 14302860 as cited in SEQ ID NO 67667
  misc_feature (1)..(994): Ortholog of  Ceres SEQ ID NO 15174373 as cited in SEQ ID NO 0
ataaagagaaaatctccaaaagcaatgaccaatgagaaatgtgaagttgctcttccactaaagttgaaatcagaaaaaccatcaatggcttcttcatcatctctctttctcctccctctccttcttcttgtctcccaagcttcagcttcaacggttatattttacaacaagtgcacgtacactgtctggcctgggatccaacctagctccggtcagtcattactcgccggcggcggatttaaactgtcgccgaacagagcttacactctccaacttccaccgctctggtccggtcgcttctggggccgccacggttgctcctttgacagatctggccgtggtcgctgcgccaccggagactgtggtggttctttcctctgtaacggagctggcggtgtacctccggctactcttgccgagatcaccctcggtcatgacatggacttttatgacgtcagcctcgttgatggatataacttggcgatgtcgataatgccggtgaagggtacgggaaagtgtacctacgctggttgcgtaagcgacctgaaccggatgtgcccggttggtctacaagtccgttcacgtgacgggacacaggtagtagcctgtaaaagcgcatgctctgcgtttaactcaccacgctattgctgtaccggcttgttcggtaacccacagtcatgcaagccaacggcttactctaagatcttcaaggtagcttgccctaaggcttactcatacgcctacgatgacccaactagcattgcgacatgttctaaagctaattatgtcgtcactttttgccctcaccgcggccgttgattaaagggattgacatctatgaataattttgcttgactatttagtacgagatcttctttttgagttatcgacccgtttttttgttttggaatttagtgatttcatcgatttgttacaaagaacatgcattatttatgcgtcttttaaaaaattagtgatgtctaattcgtttgct

SEQ ID NO: 30204 - protein, 272 aa, Arabidopsis thaliana
  peptide (1)..(272): Ceres Seq. ID no. 13500012
IKRKSPKAMTNEKCEVALPLKLKSEKPSMASSSSLFLLPLLLLVSQASASTVIFYNKCTYTVWPGIQPSSGQSLLAGGGFKLSPNRAYTLQLPPLWSGRFWGRHGCSFDRSGRGRCATGDCGGSFLCNGAGGVPPATLAEITLGHDMDFYDVSLVDGYNLAMSIMPVKGTGKCTYAGCVSDLNRMCPVGLQVRSRDGTQVVACKSACSAFNSPRYCCTGLFGNPQSCKPTAYSKIFKVACPKAYSYAYDDPTSIATCSKANYVVTFCPHRGR

SEQ ID NO: 30205 - protein, 264 aa, Arabidopsis thaliana
  peptide (1)..(264): Ceres Seq. ID no. 13500013
MTNEKCEVALPLKLKSEKPSMASSSSLFLLPLLLLVSQASASTVIFYNKCTYTVWPGIQPSSGQSLLAGGGFKLSPNRAYTLQLPPLWSGRFWGRHGCSFDRSGRGRCATGDCGGSFLCNGAGGVPPATLAEITLGHDMDFYDVSLVDGYNLAMSIMPVKGTGKCTYAGCVSDLNRMCPVGLQVRSRDGTQVVACKSACSAFNSPRYCCTGLFGNPQSCKPTAYSKIFKVACPKAYSYAYDDPTSIATCSKANYVVTFCPHRGR

SEQ ID NO: 30206 - protein, 244 aa, Arabidopsis thaliana
  peptide (1)..(244): Ceres Seq. ID no. 13500014
MASSSSLFLLPLLLLVSQASASTVIFYNKCTYTVWPGIQPSSGQSLLAGGGFKLSPNRAYTLQLPPLWSGRFWGRHGCSFDRSGRGRCATGDCGGSFLCNGAGGVPPATLAEITLGHDMDFYDVSLVDGYNLAMSIMPVKGTGKCTYAGCVSDLNRMCPVGLQVRSRDGTQVVACKSACSAFNSPRYCCTGLFGNPQSCKPTAYSKIFKVACPKAYSYAYDDPTSIATCSKANYVVTFCPHRGR

SEQ ID NO: 30207 - DNA, 1179 bp, Arabidopsis thaliana
  misc_feature (1)..(1179): Ceres Seq. ID no. 12335675
  misc_feature (1)..(1179): Ortholog of  Ceres SEQ ID NO 13594482 as cited in SEQ ID NO 51285
  misc_feature (1)..(1179): Ortholog of  Ceres SEQ ID NO 13655381 as cited in SEQ ID NO 63359
  misc_feature (1)..(1179): Ortholog of  Ceres SEQ ID NO 12617583 as cited in SEQ ID NO 64897
attatcttttgcttcatcttcttcaaaagccatggctttgtgctctatctgtcctcgcatccctcttcgattcaggccaaaacccatttccccttttctctcaaaacctcaaatttgtctcgcttacagggtttactcttccctgcaatctactactccctctaccagagatgaacttggaactgttagcattgggtttctgggtatgggaatcatgggttctccaatggcacagaacctcatcaaagctgggtgtgatgtgactgtatggaatcgaactaagagcaaatgtgatcctctcgttggattaggagcaaagtacaagtcttctcctgaagaagtgactgcaacttgtgatctcacatttgcaatgcttgctgatcctgaaagtgcaattgatgttgcatgtggaaagaatggagccatatttgggattagttcaggaaaagggtatgttgatgtctcaaccgttgatgtggcctcatcaatactaatcagcaagcaaataaaggataccggagccttgttcttggaggcaccagtttcaggttccaaaaagcctgccgaagatgggcagttaatatttctcactgcaggtgacaagccgctatacgaaaaagctgctcctttcttagacatcatgggaaagtcaaaattctatttgggtgaagttggtaatggagcagcaatgaaacttgtcgtcaacatgatcatgggaagtatgatggcatcattcgcggagggaatacttctaagccagaaagttggactcgatccaaatgtacttgtcgaggttgtctcacagggagctatcaatgcgccaatgtactcactaaagggtccttcaatgatcaagtcagtgtacccgacggcttttccattaaagcatcagcagaaggatatgagactcgcacttggactagcggaatccgtatcgcaatctactccgattgcagccgctgcgaacgagctttacaaggttgcaaaatcttatgggttgagcgatgaagatttctctgcagtaattgaagcactaaaagctgcaaaatcccgagaagcttagctaaagatttgttcaatgtgaaaatgtgtttttttttgctgttgtatgaaaaatttcatctttacaacatgtcaattgataattgttaattttatatgagagcaagttaaaagtgc

SEQ ID NO: 30208 - protein, 353 aa, Arabidopsis thaliana
  peptide (1)..(353): Ceres Seq. ID no. 12335676
LSFASSSSKAMALCSICPRIPLRFRPKPISPFLSKPQICLAYRVYSSLQSTTPSTRDELGTVSIGFLGMGIMGSPMAQNLIKAGCDVTVWNRTKSKCDPLVGLGAKYKSSPEEVTATCDLTFAMLADPESAIDVACGKNGAIFGISSGKGYVDVSTVDVASSILISKQIKDTGALFLEAPVSGSKKPAEDGQLIFLTAGDKPLYEKAAPFLDIMGKSKFYLGEVGNGAAMKLVVNMIMGSMMASFAEGILLSQKVGLDPNVLVEVVSQGAINAPMYSLKGPSMIKSVYPTAFPLKHQQKDMRLALGLAESVSQSTPIAAAANELYKVAKSYGLSDEDFSAVIEALKAAKSREA

SEQ ID NO: 30209 - protein, 343 aa, Arabidopsis thaliana
  peptide (1)..(343): Ceres Seq. ID no. 12335677
MALCSICPRIPLRFRPKPISPFLSKPQICLAYRVYSSLQSTTPSTRDELGTVSIGFLGMGIMGSPMAQNLIKAGCDVTVWNRTKSKCDPLVGLGAKYKSSPEEVTATCDLTFAMLADPESAIDVACGKNGAIFGISSGKGYVDVSTVDVASSILISKQIKDTGALFLEAPVSGSKKPAEDGQLIFLTAGDKPLYEKAAPFLDIMGKSKFYLGEVGNGAAMKLVVNMIMGSMMASFAEGILLSQKVGLDPNVLVEVVSQGAINAPMYSLKGPSMIKSVYPTAFPLKHQQKDMRLALGLAESVSQSTPIAAAANELYKVAKSYGLSDEDFSAVIEALKAAKSREA

SEQ ID NO: 30210 - protein, 285 aa, Arabidopsis thaliana
  peptide (1)..(285): Ceres Seq. ID no. 12335678
MGIMGSPMAQNLIKAGCDVTVWNRTKSKCDPLVGLGAKYKSSPEEVTATCDLTFAMLADPESAIDVACGKNGAIFGISSGKGYVDVSTVDVASSILISKQIKDTGALFLEAPVSGSKKPAEDGQLIFLTAGDKPLYEKAAPFLDIMGKSKFYLGEVGNGAAMKLVVNMIMGSMMASFAEGILLSQKVGLDPNVLVEVVSQGAINAPMYSLKGPSMIKSVYPTAFPLKHQQKDMRLALGLAESVSQSTPIAAAANELYKVAKSYGLSDEDFSAVIEALKAAKSREA

SEQ ID NO: 30211 - DNA, 1132 bp, Arabidopsis thaliana
  misc_feature (1)..(1132): Ceres Seq. ID no. 13490255
  misc_feature (1)..(1132): Ortholog of  Ceres SEQ ID NO 13504447 as cited in SEQ ID NO 57609
tcccccccccgaagagcccgtcgtttctcccattaccctccaattaatacactattttttttatttttttgtctttccctttttaaaatgatcatcatcttcttcttcactcgcctcaatttttgttcccttcttcttctataattcaactgtgaatttcaccgacgaaacaaaaaagagagagagagagagagaaacgatgagttctcagatttcggagattgaacaagagcagctgatcgagaagcttgagatcttcaagatccatggcagagacaaacgtggccgtaagatccttcgtattatcggaaaattcttcccagctcgatttctgtcactggatgtgttgaagaagtatctagaggagaagatatttcctcgattaggtagaaaaccattcgccgtactctacgtccacaccggcgtacagagaagcgagaacttcccaggtatctcagctctacgagcgatctacgacgcaattccggtaaacgtcagagacaatcttcaggaggtttacttcctccatccaggtcttcaatcacgtctcttcctcgccacctgcggccgatttctattttccggcgggttgtacgggaagctgaggtacataagcagagttgattatctgtgggaacatgtgaggaggaatgagatagagatgccggagtttgtatacgatcacgatgatgatctggagtatcgtccgatgatggattacggtcaagaaagcgatcacgcgagggttttcgccggagccgccgtggattcatcagtctcaagtttctccatgaggtgtatctcatagcgtaaaaggctaaaactccacccactagatatcggatcgtatcttataaaccatataatatacgaatacgattaataatatatcaaaaagattggaaataggtgtgctttttgaaattagtgagcgttttttatggaaaagaaaagaaaagaaagcagttggcgtctggataaagggaaggaggagaatctttagattttttctttaatctgtttttcttttgtcttgattagttttttctttagtggtggtggttgtgagttagtgtgtaaaatgtatattgtcatatgtgaatttaataataagtccttttgtaagatgatc

SEQ ID NO: 30212 - protein, 202 aa, Arabidopsis thaliana
  peptide (1)..(202): Ceres Seq. ID no. 13490256
MSSQISEIEQEQLIEKLEIFKIHGRDKRGRKILRIIGKFFPARFLSLDVLKKYLEEKIFPRLGRKPFAVLYVHTGVQRSENFPGISALRAIYDAIPVNVRDNLQEVYFLHPGLQSRLFLATCGRFLFSGGLYGKLRYISRVDYLWEHVRRNEIEMPEFVYDHDDDLEYRPMMDYGQESDHARVFAGAAVDSSVSSFSMRCIS

SEQ ID NO: 30213 - DNA, 1440 bp, Arabidopsis thaliana
  misc_feature (1)..(1440): Ceres Seq. ID no. 13488422
  misc_feature (1)..(1440): Ortholog of  Ceres SEQ ID NO 15175775 as cited in SEQ ID NO 57075
aaaacgagttgctacaatggcctcacactaggatcttcactttctcgcactttccctctcattttcccgatcatagaaacagcattgtacagagatttcaaagaatgtcactttgctcttccttcaacgtattcgcttcctactcaccaaaacccaaaaccatcttcaaagattccaaattcatttcacaatttcaggtaaagtcgtctcctttagcttcaacattccacacaaatgaatcctcaacgagtcttaagtataagagagcgagactcaaaccaatttcatctctagactcgggaatttcagaaatcgctacatcaccttcattcaggaacaaaagccctaaagatataaacgttttagtggttggttcaactgggtacataggtagatttgtagtgaaagagatgatcaaaagagggttcaatgtgattgctgttgcgagagagaagagtgggattagaggcaaaaacgacaaggaagagactttgaagcaattacaaggcgccaatgtgtgtttctctgatgttactgagttagatgttcttgagaaatctattgagaatctaggatttggtgttgatgttgttgtttcctgtctcgctagtcgtaatggagggattaaagattcgtggaagattgattatgaagctaccaaaaacagtcttgtagctgggaagaagtttggtgctaagcattttgttttgctctctgcgatttgtgtgcagaagcctttactggagtttcagagagcgaaactgaagttcgaagcagagttgatggatttggctgagcaacaagactctagctttacatacagcattgtgagaccaacggcttttttcaagagcttaggtggtcaagttgagattgtgaaagatgggaaaccttacgtgatgtttggagatggtaagctatgcgcttgtaaaccgatcagcgaacaagatttagcagcgtttatagcggattgcgtgttggaagagaacaagatcaatcaagttttgccaattggtggaccaggcaaggcattaacgccattagagcaaggagagattctgtttaagattcttgggagagagcctaagttcttgaaagtacctatcgagattatggattttgtgattggtgttctcgattctattgcaaagatctttccttcggttggagaggctgccgaatttgggaagattggaaggtattacgccgcagagagtatgttgattcttgatccagagactggagggtatagcgaggagaagacaccgagttacgggaaagacacgcttgaggatttctttgcgaaagtgatcagagaaggcatggcgggtcaagaactcggtgaacagttcttctagtatgaattgtttttgtgcgaaatgagtttgctgtgtagtttgtaactgatgagattataaatataaaacctgtgaatttgag

SEQ ID NO: 30214 - protein, 451 aa, Arabidopsis thaliana
  peptide (1)..(451): Ceres Seq. ID no. 13488423
NELLQWPHTRIFTFSHFPSHFPDHRNSIVQRFQRMSLCSSFNVFASYSPKPKTIFKDSKFISQFQVKSSPLASTFHTNESSTSLKYKRARLKPISSLDSGISEIATSPSFRNKSPKDINVLVVGSTGYIGRFVVKEMIKRGFNVIAVAREKSGIRGKNDKEETLKQLQGANVCFSDVTELDVLEKSIENLGFGVDVVVSCLASRNGGIKDSWKIDYEATKNSLVAGKKFGAKHFVLLSAICVQKPLLEFQRAKLKFEAELMDLAEQQDSSFTYSIVRPTAFFKSLGGQVEIVKDGKPYVMFGDGKLCACKPISEQDLAAFIADCVLEENKINQVLPIGGPGKALTPLEQGEILFKILGREPKFLKVPIEIMDFVIGVLDSIAKIFPSVGEAAEFGKIGRYYAAESMLILDPETGGYSEEKTPSYGKDTLEDFFAKVIREGMAGQELGEQFF

SEQ ID NO: 30215 - protein, 417 aa, Arabidopsis thaliana
  peptide (1)..(417): Ceres Seq. ID no. 13488424
MSLCSSFNVFASYSPKPKTIFKDSKFISQFQVKSSPLASTFHTNESSTSLKYKRARLKPISSLDSGISEIATSPSFRNKSPKDINVLVVGSTGYIGRFVVKEMIKRGFNVIAVAREKSGIRGKNDKEETLKQLQGANVCFSDVTELDVLEKSIENLGFGVDVVVSCLASRNGGIKDSWKIDYEATKNSLVAGKKFGAKHFVLLSAICVQKPLLEFQRAKLKFEAELMDLAEQQDSSFTYSIVRPTAFFKSLGGQVEIVKDGKPYVMFGDGKLCACKPISEQDLAAFIADCVLEENKINQVLPIGGPGKALTPLEQGEILFKILGREPKFLKVPIEIMDFVIGVLDSIAKIFPSVGEAAEFGKIGRYYAAESMLILDPETGGYSEEKTPSYGKDTLEDFFAKVIREGMAGQELGEQFF

SEQ ID NO: 30216 - protein, 315 aa, Arabidopsis thaliana
  peptide (1)..(315): Ceres Seq. ID no. 13488425
MIKRGFNVIAVAREKSGIRGKNDKEETLKQLQGANVCFSDVTELDVLEKSIENLGFGVDVVVSCLASRNGGIKDSWKIDYEATKNSLVAGKKFGAKHFVLLSAICVQKPLLEFQRAKLKFEAELMDLAEQQDSSFTYSIVRPTAFFKSLGGQVEIVKDGKPYVMFGDGKLCACKPISEQDLAAFIADCVLEENKINQVLPIGGPGKALTPLEQGEILFKILGREPKFLKVPIEIMDFVIGVLDSIAKIFPSVGEAAEFGKIGRYYAAESMLILDPETGGYSEEKTPSYGKDTLEDFFAKVIREGMAGQELGEQFF

SEQ ID NO: 30217 - DNA, 716 bp, Arabidopsis thaliana
  misc_feature (1)..(716): Ceres Seq. ID no. 13499521
  misc_feature (1)..(716): Ortholog of  Ceres SEQ ID NO 12624943 as cited in SEQ ID NO 67802
ctctgcaagtttgcgcaacaatggcgactacgattccactcttcgcctctttcaaatacgccgatagcttaacggtcgtaggaatctccttctgcaccgcgttggtctgcgaagccatctcatggatcttaatctaccgtaccagctcatacaaatccttgaaatactccattgacaaggccacgaagaaactcgagacaatgaagacagagaatccatcgtcaaagctatccataaagaaatcaaagacgaagaagatcgatcgcgttgaaaccagcttaaaggaatcgagccgagatctgtcactcttcaagttcaaatccggcgccgttgtggcactggttctcttcgtcgtcttcggattgctcaattcactattcgaaggtaaagtcgtcgcgaagcttcctttccatccgatcacgatagtgaagaagatgagtcacaggggactgaaaggtgatgatccgacggattgttccatggcttttctctatctgctgtgttcaattagtatcagaaccaatctacagaaatttctagggttttctccgccgcgaggagctgctggtgctggtggtttgttccccatgcctgatcctaagaccaactgatcactcctttgaggtttttttttttttgtttttgttgagatttttggaacaattttcatataaacacacagttacaagtttttgcaatcatctgatgattttggc

SEQ ID NO: 30218 - protein, 202 aa, Arabidopsis thaliana
  peptide (1)..(202): Ceres Seq. ID no. 13499522
LQVCATMATTIPLFASFKYADSLTVVGISFCTALVCEAISWILIYRTSSYKSLKYSIDKATKKLETMKTENPSSKLSIKKSKTKKIDRVETSLKESSRDLSLFKFKSGAVVALVLFVVFGLLNSLFEGKVVAKLPFHPITIVKKMSHRGLKGDDPTDCSMAFLYLLCSISIRTNLQKFLGFSPPRGAAGAGGLFPMPDPKTN

SEQ ID NO: 30219 - protein, 196 aa, Arabidopsis thaliana
  peptide (1)..(196): Ceres Seq. ID no. 13499523
MATTIPLFASFKYADSLTVVGISFCTALVCEAISWILIYRTSSYKSLKYSIDKATKKLETMKTENPSSKLSIKKSKTKKIDRVETSLKESSRDLSLFKFKSGAVVALVLFVVFGLLNSLFEGKVVAKLPFHPITIVKKMSHRGLKGDDPTDCSMAFLYLLCSISIRTNLQKFLGFSPPRGAAGAGGLFPMPDPKTN

SEQ ID NO: 30220 - protein, 136 aa, Arabidopsis thaliana
  peptide (1)..(136): Ceres Seq. ID no. 13499524
MKTENPSSKLSIKKSKTKKIDRVETSLKESSRDLSLFKFKSGAVVALVLFVVFGLLNSLFEGKVVAKLPFHPITIVKKMSHRGLKGDDPTDCSMAFLYLLCSISIRTNLQKFLGFSPPRGAAGAGGLFPMPDPKTN

SEQ ID NO: 30221 - DNA, 1022 bp, Arabidopsis thaliana
  misc_feature (1)..(1022): Ceres Seq. ID no. 12393636
  misc_feature (1)..(1022): Ortholog of  Ceres SEQ ID NO 13595782 as cited in SEQ ID NO 57677
  misc_feature (1)..(1022): Ortholog of  Ceres SEQ ID NO 13596009 as cited in SEQ ID NO 68258
cctcttcaccaatcggatccacgaaaaattcgataaacctcgattgatcccaaattcccaatggaggtttctgttctcacctaatttagctccatatccctcgcagtccgattcaagtgagattcttctaagttttttggaagaataatggtgttgccgttgatgaaactgggcacactcgccgtcaaaaccataagtaaaccattggctagtcagctcaagcaccaagctaaggttcatcccaagtttcgtcaatctatcatcaacttcgctcagaggaatcatcgaatcactacgcaaatgcaaagaaggatatatggtcatgccactgatgtagagattcgtcccttagatgaggaaaaggctgttcaagctgctgttgacctcattggagagatctttctctttggggtcggtggagctgttgttgtttttgaggtgcagagaagttcgcggtcagaagcaagaaaagaggaagcacgtaagcaagaactagaggagttgagaataaaagatgaagaactagaaaagcaagtggcagatctcaagagcaagctagaggagcttgaacaacttgctaaggcacgaggactgagcggtattttccagttaaaaccacagcctggtactaccgctagtgggaaaccagacaaatccagttgaatcatcatcatcatcatcttattcaatctagaagattcaaaccaaagttaacaatacggtaatgattctttttcacaagagttgaggagtttctgattctctcctctatatacatgtaccatccatcatcaaaaacaatctgcttttaaattatcaaattaggtgacaaataaaaaaagttttgatgttgaggttttgtcttttcaacatttgttgcttagatttggtcttttgagaccaatggctcgattttaggtaatgttggataatgacgaattcattatgaaagagacattgagatgtaccaaattacttctttctccagattacaaaatgtacatcatatttatccatgaaat

SEQ ID NO: 30222 - protein, 171 aa, Arabidopsis thaliana
  peptide (1)..(171): Ceres Seq. ID no. 12393637
MVLPLMKLGTLAVKTISKPLASQLKHQAKVHPKFRQSIINFAQRNHRITTQMQRRIYGHATDVEIRPLDEEKAVQAAVDLIGEIFLFGVGGAVVVFEVQRSSRSEARKEEARKQELEELRIKDEELEKQVADLKSKLEELEQLAKARGLSGIFQLKPQPGTTASGKPDKSS

SEQ ID NO: 30223 - protein, 166 aa, Arabidopsis thaliana
  peptide (1)..(166): Ceres Seq. ID no. 12393638
MKLGTLAVKTISKPLASQLKHQAKVHPKFRQSIINFAQRNHRITTQMQRRIYGHATDVEIRPLDEEKAVQAAVDLIGEIFLFGVGGAVVVFEVQRSSRSEARKEEARKQELEELRIKDEELEKQVADLKSKLEELEQLAKARGLSGIFQLKPQPGTTASGKPDKSS

SEQ ID NO: 30224 - protein, 120 aa, Arabidopsis thaliana
  peptide (1)..(120): Ceres Seq. ID no. 12393639
MQRRIYGHATDVEIRPLDEEKAVQAAVDLIGEIFLFGVGGAVVVFEVQRSSRSEARKEEARKQELEELRIKDEELEKQVADLKSKLEELEQLAKARGLSGIFQLKPQPGTTASGKPDKSS

SEQ ID NO: 30225 - DNA, 1072 bp, Arabidopsis thaliana
  misc_feature (1)..(1072): Ceres Seq. ID no. 12394892
  misc_feature (1)..(1072): Ortholog of  Ceres SEQ ID NO 13594416 as cited in SEQ ID NO 51058
  misc_feature (1)..(1072): Ortholog of  Ceres SEQ ID NO 13596609 as cited in SEQ ID NO 63070
  misc_feature (1)..(1072): Ortholog of  Ceres SEQ ID NO 12616895 as cited in SEQ ID NO 63909
  misc_feature (1)..(1072): Ortholog of  Ceres SEQ ID NO 14302096 as cited in SEQ ID NO 68356
  misc_feature (1)..(1072): Ortholog of  Ceres SEQ ID NO 13598574 as cited in SEQ ID NO 69083
atttcaaaccaaacagatttcaagaacacaaaaacagagttaaaactctcccaaaaaagatgcctttaagcaacaatgtaatcggttgcataaatttcatcaccgtcctcctctccattccggtcatcggcgccggaatctggctagccataggaacagtaaactcatgcgtcaagcttcttcaatggccagtaataatcctcggagtcttaatcctcttagtgggtctcgctggtttcattggagggttttggagaatcacatggcttcttgttgtttacttaatcgccatgcttattctcattgtacttttgggttgccttgtcggatttatttacatggttaccataagaggctctggtcatccagaaccaagtagagcttatcttgagtataatcttcaagatttctctggttggttacgtagaagagttcagagatcttataaatgggaaaggattcgtacttgtttgagtacaactaccatttgccctgaactaaatcagagatacactttggctcaagatttcttcaatgctcatcttgatcccattcaatctggttgctgcaagcccccaacaaaatgtggattcacatttgttaatcctacttattggataagtcccatagatatgtctgctgatatggattgtctaaattggagcaatgaccaaaacactttgtgttacacttgtgattcttgtaaagccggcttgctcgcaaatattaaggtagattggttaaaagcggatatctttctactcttggcgcttatcggattgattatcgtctacattatcgggtgctgcgcattccgtaatgcggaaactgaggatattttcaggaagtacaagcagggttatacttgatcaagatgagaagtttagtggcaaaactgcgaggaattttaatatttactggattcctgtattttagtttctctacgttttggcccctgtagtctgtgtttttatgtgaactaccagaacattcgttgtaactggaagattatgttgtatatctctctccgtgatttgggtttgtgaaacttaacttattatctattattgtt

SEQ ID NO: 30226 - protein, 288 aa, Arabidopsis thaliana
  peptide (1)..(288): Ceres Seq. ID no. 12394893
FKPNRFQEHKNRVKTLPKKMPLSNNVIGCINFITVLLSIPVIGAGIWLAIGTVNSCVKLLQWPVIILGVLILLVGLAGFIGGFWRITWLLVVYLIAMLILIVLLGCLVGFIYMVTIRGSGHPEPSRAYLEYNLQDFSGWLRRRVQRSYKWERIRTCLSTTTICPELNQRYTLAQDFFNAHLDPIQSGCCKPPTKCGFTFVNPTYWISPIDMSADMDCLNWSNDQNTLCYTCDSCKAGLLANIKVDWLKADIFLLLALIGLIIVYIIGCCAFRNAETEDIFRKYKQGYT

SEQ ID NO: 30227 - protein, 269 aa, Arabidopsis thaliana
  peptide (1)..(269): Ceres Seq. ID no. 12394894
MPLSNNVIGCINFITVLLSIPVIGAGIWLAIGTVNSCVKLLQWPVIILGVLILLVGLAGFIGGFWRITWLLVVYLIAMLILIVLLGCLVGFIYMVTIRGSGHPEPSRAYLEYNLQDFSGWLRRRVQRSYKWERIRTCLSTTTICPELNQRYTLAQDFFNAHLDPIQSGCCKPPTKCGFTFVNPTYWISPIDMSADMDCLNWSNDQNTLCYTCDSCKAGLLANIKVDWLKADIFLLLALIGLIIVYIIGCCAFRNAETEDIFRKYKQGYT

SEQ ID NO: 30228 - protein, 192 aa, Arabidopsis thaliana
  peptide (1)..(192): Ceres Seq. ID no. 12394895
MLILIVLLGCLVGFIYMVTIRGSGHPEPSRAYLEYNLQDFSGWLRRRVQRSYKWERIRTCLSTTTICPELNQRYTLAQDFFNAHLDPIQSGCCKPPTKCGFTFVNPTYWISPIDMSADMDCLNWSNDQNTLCYTCDSCKAGLLANIKVDWLKADIFLLLALIGLIIVYIIGCCAFRNAETEDIFRKYKQGYT

SEQ ID NO: 30229 - DNA, 1209 bp, Arabidopsis thaliana
  misc_feature (1)..(1209): Ceres Seq. ID no. 12334293
  misc_feature (1)..(1209): Ortholog of  Ceres SEQ ID NO 14311074 as cited in SEQ ID NO 53253
acaagcaaaaaaaattcactttttgtttttgttaacactcacgtgaaagcttcgttcttcttcaaaccttttgaacaatttctcccgatgccggtaaatcaccggtttacgtttagctaccggttactcttcctcatcttccttttgagtttcgaaacggcacagcgtttggtcaccggtgacccaaacgacgaagcatgcttgacgaatctccgtcggagtttagaagatcccgcgaataatctccgtaactggacaaaatccttcttcataaatccttgctccggcttctcttcttatcttcatggagtcatttgcaacaatggcagaatttacaaactctccttaacaaatctctctctccgtggctcaatctctccgtttctctctaattgcacaaatctccaatccctagatctatcttccaaccagatctccggcgagatcccgccgcaattacagtttctcgttaacctagccgttcttaatctctcttctaatcgtctctccggtcaaatctcaccacaaatcgctctctgcgcttacttaaacgtcatcgatcttcacgataaccaactctccggtcaaattccgtttcagttcgggcttctcgctagattaacggcgtttgatgtctctaataacaaattatccggtcagattccctcgaatctggcgatgcgtaacggaaacttgccgagatttaacgcgagctcgtttatagggaacaagaaattgttcgggtatccgttggaggagatgaagaacaaaggattgtcgataatggcgattgttgggattggacttggaagtggaatcgcgagcttagtgattagcttcactggagtttgtatatggttgaagattacagagaagaagatggaggaagaagaaggaaagataagtcactccatgcctgtttactaaacacaaacatttcgttttttttcttcttaagtataattaacggtttcttttatcacataattagttttttttttccattttgatcaaaagcatacagcaatagggagggttcaattaagcgaatttagggttaattaatgctttgatcatatatacatgtttctttggttatctttggatacatattaacaaaaatcacaaggtttaagcatgaggtactaagttattgttgtatagtttttgtagttatgaaagtgtaatttatagtgacatcatttatgc

SEQ ID NO: 30230 - protein, 308 aa, Arabidopsis thaliana
  peptide (1)..(308): Ceres Seq. ID no. 12334294
TSKKNSLFVFVNTHVKASFFFKPFEQFLPMPVNHRFTFSYRLLFLIFLLSFETAQRLVTGDPNDEACLTNLRRSLEDPANNLRNWTKSFFINPCSGFSSYLHGVICNNGRIYKLSLTNLSLRGSISPFLSNCTNLQSLDLSSNQISGEIPPQLQFLVNLAVLNLSSNRLSGQISPQIALCAYLNVIDLHDNQLSGQIPFQFGLLARLTAFDVSNNKLSGQIPSNLAMRNGNLPRFNASSFIGNKKLFGYPLEEMKNKGLSIMAIVGIGLGSGIASLVISFTGVCIWLKITEKKMEEEEGKISHSMPVY

SEQ ID NO: 30231 - protein, 279 aa, Arabidopsis thaliana
  peptide (1)..(279): Ceres Seq. ID no. 12334295
MPVNHRFTFSYRLLFLIFLLSFETAQRLVTGDPNDEACLTNLRRSLEDPANNLRNWTKSFFINPCSGFSSYLHGVICNNGRIYKLSLTNLSLRGSISPFLSNCTNLQSLDLSSNQISGEIPPQLQFLVNLAVLNLSSNRLSGQISPQIALCAYLNVIDLHDNQLSGQIPFQFGLLARLTAFDVSNNKLSGQIPSNLAMRNGNLPRFNASSFIGNKKLFGYPLEEMKNKGLSIMAIVGIGLGSGIASLVISFTGVCIWLKITEKKMEEEEGKISHSMPVY

SEQ ID NO: 30232 - DNA, 1609 bp, Arabidopsis thaliana
  misc_feature (1)..(1609): Ceres Seq. ID no. 13491644
  misc_feature (1)..(1609): Ortholog of  Ceres SEQ ID NO 15178767 as cited in SEQ ID NO 55317
  misc_feature (1)..(1609): Ortholog of  Ceres SEQ ID NO 13657647 as cited in SEQ ID NO 66399
aacttttgcttcttcttcgcattcactcaaaccaaagtagaagacggaatccggccaagtcacttccgcaatcctttcgaaatttagattttagggttacttcgtcggagattgttaatttgtagtatctggagattggcaacaatgtctgaactcaaagagcgtttgcttcctccaagacctgcttcggctattaaccttagaggtgatgcaggctctcgtccttctccttcagggagacaaccactccttggagttgatgttttgggtctcaagaagcgtggacaaggccttaagtcgtggattcgtgttgatacttctgccaattctcaggtcattgaggttgataagttcactatgatgcgtagatgtgatttaccagcacgggatttaaggctgctcgatcctttgtttgtgtatccgtcaactattcttggtagagagaaggctattgttgttaacttagagcagatccgttgtattattactgcggatgaggttttgctcttgaattcccttgacaactatgtccttcgctatgttgttgagctgcagcagagactaaaggcaagttctgttactgaggtttggaatcaggacagtctcgaattgagcaggaggaggagtaggagtttagacaatgtgtttcagaactcatcccctgattatttacctttcgagttcagggctcttgaagttgcccttgaagctgcttgtaccttccttgattcccaggcttcagagttagagattgaggcatacccattattggatgagcttacctcaaagatcagtactctaaacttggagcgtgctcgtagactaaagagcagacttgtagcattgacgagacgagttcagaaggttcgggatgagattgaacagctaatggacgatgatggggatatggcagaaatgtatctaacagagaagaagaagagaatggaaggatctttatatggtgatcaatctttacctgtttatcgaacaaatgattgtttttctctgtctgcgccagtttctcctgtttcttctccccctgagtcccgtagacttgagaaaagcttgagcattgtaaggagccggcatgacagtgctaggagctcagaagacgcaaccgagaatatagaggagctagagatgttgctggaagcatactttgttgtcattgatagcactctcaacaagctaacctcgttaaaggagtacatcgatgataccgaagatttcatcaacattcaattggataacgtacggaatcagctgatccaattcgagctgctgctaactactgccacattcgttgtagccatcttcggggttgtagccgggatctttgggatgaattttgagatagacttctttgaaaagcctggtgctttcaaatgggttttagccattactggagtgtgtggccttgttgtatttttggcattcctctggttctacaaacgtagaagactcatgcctctgtgaagacataactaccctgacacgtagacgattgttttactgtttatgttgcttaaatctatacattaatcgcctgtgacctttacaagataaaaccccgtgtatttttttttgggttactgaaagattattaagc

SEQ ID NO: 30233 - protein, 443 aa, Arabidopsis thaliana
  peptide (1)..(443): Ceres Seq. ID no. 13491645
MSELKERLLPPRPASAINLRGDAGSRPSPSGRQPLLGVDVLGLKKRGQGLKSWIRVDTSANSQVIEVDKFTMMRRCDLPARDLRLLDPLFVYPSTILGREKAIVVNLEQIRCIITADEVLLLNSLDNYVLRYVVELQQRLKASSVTEVWNQDSLELSRRRSRSLDNVFQNSSPDYLPFEFRALEVALEAACTFLDSQASELEIEAYPLLDELTSKISTLNLERARRLKSRLVALTRRVQKVRDEIEQLMDDDGDMAEMYLTEKKKRMEGSLYGDQSLPVYRTNDCFSLSAPVSPVSSPPESRRLEKSLSIVRSRHDSARSSEDATENIEELEMLLEAYFVVIDSTLNKLTSLKEYIDDTEDFINIQLDNVRNQLIQFELLLTTATFVVAIFGVVAGIFGMNFEIDFFEKPGAFKWVLAITGVCGLVVFLAFLWFYKRRRLMPL

SEQ ID NO: 30234 - protein, 372 aa, Arabidopsis thaliana
  peptide (1)..(372): Ceres Seq. ID no. 13491646
MMRRCDLPARDLRLLDPLFVYPSTILGREKAIVVNLEQIRCIITADEVLLLNSLDNYVLRYVVELQQRLKASSVTEVWNQDSLELSRRRSRSLDNVFQNSSPDYLPFEFRALEVALEAACTFLDSQASELEIEAYPLLDELTSKISTLNLERARRLKSRLVALTRRVQKVRDEIEQLMDDDGDMAEMYLTEKKKRMEGSLYGDQSLPVYRTNDCFSLSAPVSPVSSPPESRRLEKSLSIVRSRHDSARSSEDATENIEELEMLLEAYFVVIDSTLNKLTSLKEYIDDTEDFINIQLDNVRNQLIQFELLLTTATFVVAIFGVVAGIFGMNFEIDFFEKPGAFKWVLAITGVCGLVVFLAFLWFYKRRRLMPL

SEQ ID NO: 30235 - protein, 371 aa, Arabidopsis thaliana
  peptide (1)..(371): Ceres Seq. ID no. 13491647
MRRCDLPARDLRLLDPLFVYPSTILGREKAIVVNLEQIRCIITADEVLLLNSLDNYVLRYVVELQQRLKASSVTEVWNQDSLELSRRRSRSLDNVFQNSSPDYLPFEFRALEVALEAACTFLDSQASELEIEAYPLLDELTSKISTLNLERARRLKSRLVALTRRVQKVRDEIEQLMDDDGDMAEMYLTEKKKRMEGSLYGDQSLPVYRTNDCFSLSAPVSPVSSPPESRRLEKSLSIVRSRHDSARSSEDATENIEELEMLLEAYFVVIDSTLNKLTSLKEYIDDTEDFINIQLDNVRNQLIQFELLLTTATFVVAIFGVVAGIFGMNFEIDFFEKPGAFKWVLAITGVCGLVVFLAFLWFYKRRRLMPL

SEQ ID NO: 30236 - DNA, 677 bp, Arabidopsis thaliana; identical to SEQ ID NO: 23436
  misc_feature (1)..(677): Ceres Seq. ID no. 12561632
  misc_feature (1)..(677): Ortholog of  Ceres SEQ ID NO 13599506 as cited in SEQ ID NO 334
  misc_feature (1)..(677): Ortholog of  Ceres SEQ ID NO 13598157 as cited in SEQ ID NO 61570
  misc_feature (1)..(677): Ortholog of  Ceres SEQ ID NO 15175549 as cited in SEQ ID NO 0

SEQ ID NO: 30237 - protein, 153 aa, Arabidopsis thaliana; identical to SEQ ID NO: 23437
  peptide (1)..(153): Ceres Seq. ID no. 12561633

SEQ ID NO: 30238 - protein, 134 aa, Arabidopsis thaliana; identical to SEQ ID NO: 23438
  peptide (1)..(134): Ceres Seq. ID no. 12561634

SEQ ID NO: 30239 - DNA, 2764 bp, Arabidopsis thaliana; identical to SEQ ID NO: 27071
  misc_feature (1)..(2764): Ceres Seq. ID no. 13491797
  misc_feature (1)..(2764): Ortholog of  Ceres SEQ ID NO 13598926 as cited in SEQ ID NO 0

SEQ ID NO: 30240 - protein, 873 aa, Arabidopsis thaliana; identical to SEQ ID NO: 27072
  peptide (1)..(873): Ceres Seq. ID no. 13491798

SEQ ID NO: 30241 - protein, 858 aa, Arabidopsis thaliana; identical to SEQ ID NO: 27073
  peptide (1)..(858): Ceres Seq. ID no. 13491799

SEQ ID NO: 30242 - protein, 721 aa, Arabidopsis thaliana; identical to SEQ ID NO: 27074
  peptide (1)..(721): Ceres Seq. ID no. 13491800

SEQ ID NO: 30243 - DNA, 1515 bp, Arabidopsis thaliana
  misc_feature (1)..(1515): Ceres Seq. ID no. 12334769
  misc_feature (1)..(1515): Ortholog of  Ceres SEQ ID NO 15177674 as cited in SEQ ID NO 52629
  misc_feature (1)..(1515): Ortholog of  Ceres SEQ ID NO 13596541 as cited in SEQ ID NO 62372
taacatagatatctgaaatttccctcgatttgattagtgggatcaccaataccaagataaaatctgaagtttagttcattgactcaatagtatttgagtcttggggctcgaaatgattttgattttgatttcttaccgatcttcgagtttccaaagctaagcacttttatcaaatttagggtctttttacttttccaaattatatttttctgtttttggggacgaatttggctttctttctatataacccgcgagcgagacagagaccttgaccctcacctaaacctcaaaaaccaaattttgaccccaaaagccatctcttttagcaatcagattactttgaaactttctctgggtatctgagatttcttcattatttatataaatcatctaatcgaaatctactgcgacgatcggcgaagaatcggaaacacaaaaatggggtgttgcgcgagcaatacagctggtggttcaaaggctaatcggatctcacgctggcgatctacaggcattgttggtctccgcgactccaaattgaagacatttcctgatgaagtgattgaaatggagagagcagtgcgaacacttgatctaacacacaataagattgctgatgttcctggagaaatcagcaagttaatcaatatgcagcgtctgttaatagctgataatctagttgagcgccttccggggaatctagggaagcttcaatctctcaaagttttgatgcttgatggaaaccgcatcagctgtttgcctgatgaattgggccagttggtaaggcttgagcaactatcaatctcaagaaatatgctcatatacttgcccgatactattggtagtctccgcaatctactgctgttgaatgtctcaaataacagattgaaatcccttcctgaatcagtagggagctgtgcttctttagaagaagtacaggctaatgccttgcagataacgttgttgaagagcttcctgcatcactctgcaatctgattcagttaaagtcgctttccttagacaataatcaagtgaaccagattccagatggattgctgatacattgcaagagtctgcaaaacctttctttgcataacaatcctatttccatggatcagtttcagctgatggaaggataccaagactttgaagagaggagaaagaagaaatttgataagcaaatcgattcgaatgtgatgatgggctctaaagcacttgatgtaggcgttgataaatgaaaactgtcttcacatctccttactttgtcggttcggtgaatgaggatcatcgtttcgtgtaagaaatattgttgtaaaactctctctctctctttctctcgtctgcaagatttagaatctctgttactgtcacaccaattcttatgaacacatacatatgtacgtttgtatactctatcaaggcgtgtctgtatatgtatatgtgcgtgtgtgtatacaaatcatataggcagaccgattcttggctttggcccttatattgagatgacgattctacttc

SEQ ID NO: 30244 - protein, 184 aa, Arabidopsis thaliana
  peptide (1)..(184): Ceres Seq. ID no. 12334770
MGCCASNTAGGSKANRISRWRSTGIVGLRDSKLKTFPDEVIEMERAVRTLDLTHNKIADVPGEISKLINMQRLLIADNLVERLPGNLGKLQSLKVLMLDGNRISCLPDELGQLVRLEQLSISRNMLIYLPDTIGSLRNLLLLNVSNNRLKSLPESVGSCASLEEVQANALQITLLKSFLHHSAI

SEQ ID NO: 30245 - protein, 142 aa, Arabidopsis thaliana
  peptide (1)..(142): Ceres Seq. ID no. 12334771
MERAVRTLDLTHNKIADVPGEISKLINMQRLLIADNLVERLPGNLGKLQSLKVLMLDGNRISCLPDELGQLVRLEQLSISRNMLIYLPDTIGSLRNLLLLNVSNNRLKSLPESVGSCASLEEVQANALQITLLKSFLHHSAI

SEQ ID NO: 30246 - protein, 115 aa, Arabidopsis thaliana
  peptide (1)..(115): Ceres Seq. ID no. 12334772
MQRLLIADNLVERLPGNLGKLQSLKVLMLDGNRISCLPDELGQLVRLEQLSISRNMLIYLPDTIGSLRNLLLLNVSNNRLKSLPESVGSCASLEEVQANALQITLLKSFLHHSAI

SEQ ID NO: 30247 - DNA, 1758 bp, Arabidopsis thaliana
  misc_feature (1)..(1758): Ceres Seq. ID no. 12324212
  misc_feature (1)..(1758): Ortholog of  Ceres SEQ ID NO 13581563 as cited in SEQ ID NO 58942
  misc_feature (1)..(1758): Ortholog of  Ceres SEQ ID NO 13658707 as cited in SEQ ID NO 66286
  misc_feature (1)..(1758): Ortholog of  Ceres SEQ ID NO 13654528 as cited in SEQ ID NO 68080
cttcctctggtctttttttcttttgttgcgacttttcttcttcttcttcctcaggaacttaagtttctgagtccatgaagatgccagtggcattggtctggctactggcattcactattctactgatcagtggggaaggcaataatgccatctgcaaggagaattttaagttagaccctagacctcatagtgtttcgatcctcgagtttggagcggttggtgatgggaagacgctcaacactattgctttccagaacgctgttttctatctcaagtcttttgcggataaaggcggtgctcagctttatgttccaccagggaaatggctcaccggaagcttcaatctcacaagccatctcactctcttcttggagaaaggagcaacaattcttgcatcaccggatccgtcgcattgggacgttgtcagtcctctaccgtcctatggtcgcggaattgaacttcctggaaagcggtacagaagtttgatcaatggagacaatctaatagacgtagtcatcaccggtgaaaatgggacatttgacggtcaaggtgcggcatggtgggagtggcttgagtccgggtccttgaactatagccgacctcatatcatcgaattcgtctcctctaaacacatcctcatatcgaatctaaccttcttaaacgcgcccgcaatcaacattcaccctgtttattgcagtcagattcatatccgcaaagttttgatcgaaacatccgttgattctccccacgttcttggagttgccccagattcttcggacaatgtttgtatcgaggactcaacaatcaacgttggccacgacgcggtttctctcaagagtggttgggaccaatacggtatacactacggccgtccaaccaccgctgttcatattcggaatctcagattaaagtctcccaccggtgctggaatctccttcgggagcgagatgtcaggcggagtctcggatgtgaccgttgagcgtcttaacatacacagctcactcataggtgtagccttcagaaccaccagaggcagaggaggatacatccgtaatatcacaatctccgacgtcgatctcacaagcgttgacacagccatagtagccaacggacacaccgggtcacacccggatgataaattcgaccgggacgcactcccagtcgtgacacacattgttatgcggaatttcaccggagttgatataggagtagccgggaatctcaccgggatcggagaatctcccttcacgtcgatatgcctcgcggatattcatttacaaacgcgatcagaagaatcttggatatgctccaacgtctctggtttctcagacgacgtatcaccggagccttgtcaagaactcatgagttctccttcgtcttgcttcgccggtggtagcatatacgagggtgatgcgacggctcagtcgtattacagttggtaattatagtaaaataaaatggtgatgaagaagaagaagaagaaaaagaagaagagagtgcatgaggttacgatacgattggattttcgaattttttttgtcaataagttcataaaatttgttgtcagagagcgagaggaagaagataaaaaaagaaaaattacgttttaaggtggtgagtttcaagaacagagcgagcttttctattgtattaatgtacagcttccatttctttcattcatggtgtaacaaaattcatctttttttctttctgtgaagaagaaaataaaaaattatatgtgaaatgattagttatggc

SEQ ID NO: 30248 - protein, 455 aa, Arabidopsis thaliana
  peptide (1)..(455): Ceres Seq. ID no. 12324213
MKMPVALVWLLAFTILLISGEGNNAICKENFKLDPRPHSVSILEFGAVGDGKTLNTIAFQNAVFYLKSFADKGGAQLYVPPGKWLTGSFNLTSHLTLFLEKGATILASPDPSHWDVVSPLPSYGRGIELPGKRYRSLINGDNLIDVVITGENGTFDGQGAAWWEWLESGSLNYSRPHIIEFVSSKHILISNLTFLNAPAINIHPVYCSQIHIRKVLIETSVDSPHVLGVAPDSSDNVCIEDSTINVGHDAVSLKSGWDQYGIHYGRPTTAVHIRNLRLKSPTGAGISFGSEMSGGVSDVTVERLNIHSSLIGVAFRTTRGRGGYIRNITISDVDLTSVDTAIVANGHTGSHPDDKFDRDALPVVTHIVMRNFTGVDIGVAGNLTGIGESPFTSICLADIHLQTRSEESWICSNVSGFSDDVSPEPCQELMSSPSSCFAGGSIYEGDATAQSYYSW

SEQ ID NO: 30249 - protein, 453 aa, Arabidopsis thaliana
  peptide (1)..(453): Ceres Seq. ID no. 12324214
MPVALVWLLAFTILLISGEGNNAICKENFKLDPRPHSVSILEFGAVGDGKTLNTIAFQNAVFYLKSFADKGGAQLYVPPGKWLTGSFNLTSHLTLFLEKGATILASPDPSHWDVVSPLPSYGRGIELPGKRYRSLINGDNLIDVVITGENGTFDGQGAAWWEWLESGSLNYSRPHIIEFVSSKHILISNLTFLNAPAINIHPVYCSQIHIRKVLIETSVDSPHVLGVAPDSSDNVCIEDSTINVGHDAVSLKSGWDQYGIHYGRPTTAVHIRNLRLKSPTGAGISFGSEMSGGVSDVTVERLNIHSSLIGVAFRTTRGRGGYIRNITISDVDLTSVDTAIVANGHTGSHPDDKFDRDALPVVTHIVMRNFTGVDIGVAGNLTGIGESPFTSICLADIHLQTRSEESWICSNVSGFSDDVSPEPCQELMSSPSSCFAGGSIYEGDATAQSYYSW

SEQ ID NO: 30250 - DNA, 1235 bp, Arabidopsis thaliana
  misc_feature (1)..(1235): Ceres Seq. ID no. 12371716
  misc_feature (1)..(1235): Ortholog of  Ceres SEQ ID NO 14311854 as cited in SEQ ID NO 51455
attaagttctcttgatgatgtctggttcaagattagcctctagactaataatcatcttctcaataatctccacatctttcttcaccgttgaatcgattcgactattccctgattcattcgacgatgcatcttcagatttcatggaagctccagcatatcaaaacggtcttgattgctctgttttagccaaaaacagactcttgttagcttgtgatccatcagctgttcatatagctatgactctagatccagcttacttgcgtggcacggtatctgcagtacattccatcctcaaacacacttcttgccctgaaaacatcttcttccacttcattgcttcgggtacaagtcagggttccctcgccaagaccctatcctctgtttttccttctttgagtttcaaagtctatacctttgaagaaaccacggtcaagaatctaatctcttcttctataagacaagctcttgatagtcctttgaattacgcaagaagctacttatccgagattctttcttcgtgtgttagtcgagtgatttatctcgattcggatgtgattgtggtcgatgatattcagaaactatggaagatttctttatccgggtcaagaacaatcggtgcaccagagtattgccacgcaaatttcaccaaatacttcacagatagtttctggtccgatcgaaaactctcgagcgtcttcgattccaagactccttgttatttcaacacaggagtgatggttattgatttagagcggtggagagaaggagattacacgagaaagatcgaaaactggatgaagattcagaaagaagataagagaatctacgaattgggttctttaccaccgtttcttctagtgtttggtggtgatattgaagctattgatcatcaatggaaccaacacggtctcggtggagacaacattgtgagtagttgtagatctttgcatcctggtccggttagtttgatacattggagtggtaaagggaagccatgggttaggcttgatgatggtaagccttgtccaattgattatctttgggctccttatgatcttcacaagtcacagaggcagtatcttcaatacaatcaagagttagaaattctttgatttattcatttttgggggttttggtatggtaaattttgtgaactcattacatggattctatgttttttgttattccttttttaatgtacatacaacataaatacatcgaggattttgttcaag

SEQ ID NO: 30251 - protein, 365 aa, Arabidopsis thaliana
  peptide (1)..(365): Ceres Seq. ID no. 12371717
MMSGSRLASRLIIIFSIISTSFFTVESIRLFPDSFDDASSDFMEAPAYQNGLDCSVLAKNRLLLACDPSAVHIAMTLDPAYLRGTVSAVHSILKHTSCPENIFFHFIASGTSQGSLAKTLSSVFPSLSFKVYTFEETTVKNLISSSIRQALDSPLNYARSYLSEILSSCVSRVIYLDSDVIVVDDIQKLWKISLSGSRTIGAPEYCHANFTKYFTDSFWSDRKLSSVFDSKTPCYFNTGVMVIDLERWREGDYTRKIENWMKIQKEDKRIYELGSLPPFLLVFGGDIEAIDHQWNQHGLGGDNIVSSCRSLHPGPVSLIHWSGKGKPWVRLDDGKPCPIDYLWAPYDLHKSQRQYLQYNQELEIL

SEQ ID NO: 30252 - protein, 364 aa, Arabidopsis thaliana
  peptide (1)..(364): Ceres Seq. ID no. 12371718
MSGSRLASRLIIIFSIISTSFFTVESIRLFPDSFDDASSDFMEAPAYQNGLDCSVLAKNRLLLACDPSAVHIAMTLDPAYLRGTVSAVHSILKHTSCPENIFFHFIASGTSQGSLAKTLSSVFPSLSFKVYTFEETTVKNLISSSIRQALDSPLNYARSYLSEILSSCVSRVIYLDSDVIVVDDIQKLWKISLSGSRTIGAPEYCHANFTKYFTDSFWSDRKLSSVFDSKTPCYFNTGVMVIDLERWREGDYTRKIENWMKIQKEDKRIYELGSLPPFLLVFGGDIEAIDHQWNQHGLGGDNIVSSCRSLHPGPVSLIHWSGKGKPWVRLDDGKPCPIDYLWAPYDLHKSQRQYLQYNQELEIL

SEQ ID NO: 30253 - protein, 323 aa, Arabidopsis thaliana
  peptide (1)..(323): Ceres Seq. ID no. 12371719
MEAPAYQNGLDCSVLAKNRLLLACDPSAVHIAMTLDPAYLRGTVSAVHSILKHTSCPENIFFHFIASGTSQGSLAKTLSSVFPSLSFKVYTFEETTVKNLISSSIRQALDSPLNYARSYLSEILSSCVSRVIYLDSDVIVVDDIQKLWKISLSGSRTIGAPEYCHANFTKYFTDSFWSDRKLSSVFDSKTPCYFNTGVMVIDLERWREGDYTRKIENWMKIQKEDKRIYELGSLPPFLLVFGGDIEAIDHQWNQHGLGGDNIVSSCRSLHPGPVSLIHWSGKGKPWVRLDDGKPCPIDYLWAPYDLHKSQRQYLQYNQELEIL

SEQ ID NO: 30254 - DNA, 1325 bp, Arabidopsis thaliana
  misc_feature (1)..(1325): Ceres Seq. ID no. 13500101
  misc_feature (1)..(1325): Ortholog of  Ceres SEQ ID NO 13664220 as cited in SEQ ID NO 61151
  misc_feature (1)..(1325): Ortholog of  Ceres SEQ ID NO 13597477 as cited in SEQ ID NO 65160
accttattattttatatatatatatgtgcatatacacccacatagagatcattcgtgtactaattttaccttcatagacttaattaagatacgatcatggcgtcgtttgtctttgtgatttctcttcttcttctctctttttcgtcggctgttttctccgatgatgcttcttttcagaaacttccggtgcctgacaagaggtcaggccctgaatctttcgcctttgactctaccggcggattctacaccggagtctccggtggtaaaatcctcaagtacgttcctgggaagggttatgtcgattttgcccagatcacagattcctcgaactcggcatggtgcaacggagcattaggaaccgctttcgccggaaagtgtggtcgaccagcgggaatagccttaaacagcaaaacaggtgatctctatgtcgccgatgctccgttgggtcttcacgttatctctcccgcaggaggtttggccacaaagctggccgacagtgttgacggaaagcctttcaagtttcttgacggtcttgatgttgatcccaccaccggcgtcgtctacttcacttccttcagttccaagtttggaccccgggaagtgttaatcgcagtgggattaaaagacgcgagcggaaagctgttcaaatacgacccagcgaccaaagccgtgactgagttaatggaaggtctaagtggtgctgctggttgtgcagtgagctcagatggttcattcgtgctagttagcgagttcataaagagtaacatcaagaaatattggattaaagggcccaaagctggaactattgaagacttctcaagtcttgtctcgaaccccgacaacatcaggagggtaggttctaccggaaatttctgggtcgcctctgtcgtgaacaaggttgttatgcctaccgaccctagggcggtcaaactagacgctaatggaaaagtgctccagaccattttcctcaagaatgagtttgggaatactttgcttagtgaagtcaacgagttcaacggccatctttacatcggaactcttactggacctttcgccggagtcatgaaactttaaattggtatcaactatatggttctttggtgattaccatttttgatatcattttgaaaggtctgtttacagttattttaaccataataatatcccctcaaatgtcctgcttgttacgtgggtgacacaattgttcggtgattccttgaataggctactactacttattgtttcatattttcgaagagattatctctagttcttaaggctttggttttctttgttttcaccctttgttttacttcataaagacg

SEQ ID NO: 30255 - protein, 325 aa, Arabidopsis thaliana
  peptide (1)..(325): Ceres Seq. ID no. 13500102
MASFVFVISLLLLSFSSAVFSDDASFQKLPVPDKRSGPESFAFDSTGGFYTGVSGGKILKYVPGKGYVDFAQITDSSNSAWCNGALGTAFAGKCGRPAGIALNSKTGDLYVADAPLGLHVISPAGGLATKLADSVDGKPFKFLDGLDVDPTTGVVYFTSFSSKFGPREVLIAVGLKDASGKLFKYDPATKAVTELMEGLSGAAGCAVSSDGSFVLVSEFIKSNIKKYWIKGPKAGTIEDFSSLVSNPDNIRRVGSTGNFWVASVVNKVVMPTDPRAVKLDANGKVLQTIFLKNEFGNTLLSEVNEFNGHLYIGTLTGPFAGVMKL

SEQ ID NO: 30256 - DNA, 1628 bp, Arabidopsis thaliana
  misc_feature (1)..(1628): Ceres Seq. ID no. 12395605
  misc_feature (1)..(1628): Ortholog of  Ceres SEQ ID NO 15174513 as cited in SEQ ID NO 58979
  misc_feature (1)..(1628): Ortholog of  Ceres SEQ ID NO 13584616 as cited in SEQ ID NO 65234
  misc_feature (1)..(1628): Ortholog of  Ceres SEQ ID NO 15178939 as cited in SEQ ID NO 0
atttttctcgaacaccgaaaacactttcgaaccctaaaagacagaacactgtgtcaattttcattacctgggaacaaaacgcaaaatcaaagacaataattttttccccgagagagaaaatgcagaggttgaagcagcagcagcagcagcaacaagttatgatgcagcaagctcttatgcagcaacagtctctctaccatcctggtctccttgccccgccacagatagaaccaatcccaagtggaaatctcccccctggttttgatccaagtacttgccgcagtgtgtacgttggaaacatccatattcaggtgacggaacctctgcttcaagaggtttttgctggcactggtcctgtagaaagctgtaaactaattaggaaagaaaagtcttcttatgggtttgtgcactactttgatcgaagatcggctggtcttgcaatcctttctctcaatggaaggcatttgtttgggcaacctatcaaggttaactgggcttatgcgagtggccagagggaggatacatcaagtcacttcaatatatttgttggggatttgagtccggaggttactgatgcaatgctgtttacttgcttctctgtctacccgacttgctcggatgcaagagttatgtgggatcagaaaactgggcgttcaagaggatttggatttgtttccttccgtaaccaacaggatgcccagactgcaatagatgagataactgggaaatggcttggttccaggcagatacgttgcaactgggcgacaaagggagccacttctggtgaggacaaacagagctctgattccaaaagcgtcgtggaacttaccagtggtgtctcggaggatggtaaagatactactaatggtgaagctcctgagaacaatgctcagtacacaactgtttacgtcggtaatcttgctccagaggtgtcccaggttgatcttcaccgccacttccattcccttggtgctggggtcatagaggaagtccgtgttcaaagagacaaaggtttcggatttgtgagatactctactcatgtagaggcagccctcgctattcagatgggaaacacacattcctaccttagtggcaggcaaatgaagtgttcttggggaagcaagccaactccagcaggaacagcttcaaacccgcttcctccaccagctcctgcaccaatcccgggattctcagcgagtgatctcttggcttacgagaggcaactagcgatgagcaagatggcaggaatgaatccgatgatgcatcacccgcagggacaacatgcttttaaacaagctgcaatgggagccactggttcaaaccaggcaatatatgacggtggttaccagaacgcgcagcagctcatgtactaccagtaagatcttcctcggagccgttacttgagcgaagagttctttcttttcttcttttttgttatgtaacgtctttattgtatctttttcttttcttctaacttatgttcttgttataatgttatcatgtagctgtgggtttgtggtttgtgttccacgttttttcttttgttaactactacggtttacgtttttgcacatcttcaacttctttctctttctctttctctaacttaatcttatttattgggtcgc

SEQ ID NO: 30257 - protein, 458 aa, Arabidopsis thaliana
  peptide (1)..(458): Ceres Seq. ID no. 12395606
FSRTPKTLSNPKRQNTVSIFITWEQNAKSKTIIFSPREKMQRLKQQQQQQQVMMQQALMQQQSLYHPGLLAPPQIEPIPSGNLPPGFDPSTCRSVYVGNIHIQVTEPLLQEVFAGTGPVESCKLIRKEKSSYGFVHYFDRRSAGLAILSLNGRHLFGQPIKVNWAYASGQREDTSSHFNIFVGDLSPEVTDAMLFTCFSVYPTCSDARVMWDQKTGRSRGFGFVSFRNQQDAQTAIDEITGKWLGSRQIRCNWATKGATSGEDKQSSDSKSVVELTSGVSEDGKDTTNGEAPENNAQYTTVYVGNLAPEVSQVDLHRHFHSLGAGVIEEVRVQRDKGFGFVRYSTHVEAALAIQMGNTHSYLSGRQMKCSWGSKPTPAGTASNPLPPPAPAPIPGFSASDLLAYERQLAMSKMAGMNPMMHHPQGQHAFKQAAMGATGSNQAIYDGGYQNAQQLMYYQ

SEQ ID NO: 30258 - protein, 419 aa, Arabidopsis thaliana
  peptide (1)..(419): Ceres Seq. ID no. 12395607
MQRLKQQQQQQQVMMQQALMQQQSLYHPGLLAPPQIEPIPSGNLPPGFDPSTCRSVYVGNIHIQVTEPLLQEVFAGTGPVESCKLIRKEKSSYGFVHYFDRRSAGLAILSLNGRHLFGQPIKVNWAYASGQREDTSSHFNIFVGDLSPEVTDAMLFTCFSVYPTCSDARVMWDQKTGRSRGFGFVSFRNQQDAQTAIDEITGKWLGSRQIRCNWATKGATSGEDKQSSDSKSVVELTSGVSEDGKDTTNGEAPENNAQYTTVYVGNLAPEVSQVDLHRHFHSLGAGVIEEVRVQRDKGFGFVRYSTHVEAALAIQMGNTHSYLSGRQMKCSWGSKPTPAGTASNPLPPPAPAPIPGFSASDLLAYERQLAMSKMAGMNPMMHHPQGQHAFKQAAMGATGSNQAIYDGGYQNAQQLMYYQ

SEQ ID NO: 30259 - protein, 406 aa, Arabidopsis thaliana
  peptide (1)..(406): Ceres Seq. ID no. 12395608
MMQQALMQQQSLYHPGLLAPPQIEPIPSGNLPPGFDPSTCRSVYVGNIHIQVTEPLLQEVFAGTGPVESCKLIRKEKSSYGFVHYFDRRSAGLAILSLNGRHLFGQPIKVNWAYASGQREDTSSHFNIFVGDLSPEVTDAMLFTCFSVYPTCSDARVMWDQKTGRSRGFGFVSFRNQQDAQTAIDEITGKWLGSRQIRCNWATKGATSGEDKQSSDSKSVVELTSGVSEDGKDTTNGEAPENNAQYTTVYVGNLAPEVSQVDLHRHFHSLGAGVIEEVRVQRDKGFGFVRYSTHVEAALAIQMGNTHSYLSGRQMKCSWGSKPTPAGTASNPLPPPAPAPIPGFSASDLLAYERQLAMSKMAGMNPMMHHPQGQHAFKQAAMGATGSNQAIYDGGYQNAQQLMYYQ

SEQ ID NO: 30260 - DNA, 1823 bp, Arabidopsis thaliana
  misc_feature (1)..(1823): Ceres Seq. ID no. 12337378
  misc_feature (1)..(1823): Ortholog of  Ceres SEQ ID NO 14314945 as cited in SEQ ID NO 58031
  misc_feature (1)..(1823): Ortholog of  Ceres SEQ ID NO 13595833 as cited in SEQ ID NO 59877
  misc_feature (1)..(1823): Ortholog of  Ceres SEQ ID NO 13654452 as cited in SEQ ID NO 65792
  misc_feature (1)..(1823): Ortholog of  Ceres SEQ ID NO 13573778 as cited in SEQ ID NO 0
aaatcttctgatgcacactagttcgaaggatcctttaatgggagagagaatgttctacttcttcttcttcttcttcttcttcttcttcttcctcctctctcgtcggatctctctgatttagtgatttttcaaatttcaagttttcttcacctttaattttgtgtctcgttgatctctctttggacattctgctttggattctggaggcttctcattagatctctattagtgggtttaggtcaagttcttgaaatggataaggagaaatctcctgcaccaccacctagtggaggtcttcctccaccatcgggtcgttactctgcgttttcacctaatggaagtagctttgcaatgaaagctgaatcatcttttcctcctttgactccaagtggaagcaatagctcagatgctaaccgattcagccatgatattagccgaatgccggataatccacctaagaacctaggccatcgccgagctcattcagagattcttactcttcctgatgacttaagctttgatagtgatcttggtgtggttggtgctgctgatggaccttctttctctgatgatactgacgaggacttactctatatgtatcttgatatggaaaaattcaattcttctgctacatcgacttctcaaatgggtgagccatcagaaccgacttggaggaatgaattagcctcgacttctaaccttcagagtacacccggtagctctagtgaaagaccgagaattagacaccaacacagccaatcgatggatggttcaacaactatcaagcctgagatgcttatgtcagggaatgaagatgtgtctggagttgactctaagaaagccatctctgctgctaaactttctgagcttgctctcattgatccaaaacgcgccaagaggatatgggcaaacagtcagtctgctgcgaggtcaaaagaaaggaagatgagatacattgcagagctcgagagaaaagtacagactttacaaacagaggccacatctctctcagcccagttgactctcttacagagagatacaaatggcctgggtgttgaaaacaatgagcttaaactgcgagtacaaactatggagcaacaggtccacctacaggatgctttaaatgatgcactaaaggaggaagtccagcatcttaaggtattgacggggcaaggtccatcaaatggtacatcaatgaactacggttcttttggatcaaaccagcaattctatcccaataatcagtcgatgcacactatcttagccgcacaacagttacagcagctccagatccagtcacagaaacagcaacaacaacaacagcaacaccagcaacaacaacagcagcagcagcagcaatttcactttcaacagcagcaactgtaccagcttcagcagcagcaacggcttcaacaacaggaacaacaaagcggggcttcagagctaagaagacccatgccttctcctggtcagaaagagagtgtgacatcgcctgatcgtgaaactcccttgacaaaagactgagtctagactgtgctaatgtccaatttagtaagttactcttggaaaatcttctttttcatcgcaggctcatggatttgggatttactgcattatagagttaaaaacaagacagcttagaagttgcggatttagaagttgttagtgaagcttttgttctcgtctgttggtagtttacaatcttctctttgtatgatcctaagctcttaaaaagttcttggatttggtcatttggttagaaatgggttcttagtccaagtctgtagtcgtttaaccatattcatattctttgccttttgttc

SEQ ID NO: 30261 - protein, 423 aa, Arabidopsis thaliana
  peptide (1)..(423): Ceres Seq. ID no. 12337379
MDKEKSPAPPPSGGLPPPSGRYSAFSPNGSSFAMKAESSFPPLTPSGSNSSDANRFSHDISRMPDNPPKNLGHRRAHSEILTLPDDLSFDSDLGVVGAADGPSFSDDTDEDLLYMYLDMEKFNSSATSTSQMGEPSEPTWRNELASTSNLQSTPGSSSERPRIRHQHSQSMDGSTTIKPEMLMSGNEDVSGVDSKKAISAAKLSELALIDPKRAKRIWANSQSAARSKERKMRYIAELERKVQTLQTEATSLSAQLTLLQRDTNGLGVENNELKLRVQTMEQQVHLQDALNDALKEEVQHLKVLTGQGPSNGTSMNYGSFGSNQQFYPNNQSMHTILAAQQLQQLQIQSQKQQQQQQQHQQQQQQQQQQFHFQQQQLYQLQQQQRLQQQEQQSGASELRRPMPSPGQKESVTSPDRETPLTKD

SEQ ID NO: 30262 - protein, 390 aa, Arabidopsis thaliana
  peptide (1)..(390): Ceres Seq. ID no. 12337380
MKAESSFPPLTPSGSNSSDANRFSHDISRMPDNPPKNLGHRRAHSEILTLPDDLSFDSDLGVVGAADGPSFSDDTDEDLLYMYLDMEKFNSSATSTSQMGEPSEPTWRNELASTSNLQSTPGSSSERPRIRHQHSQSMDGSTTIKPEMLMSGNEDVSGVDSKKAISAAKLSELALIDPKRAKRIWANSQSAARSKERKMRYIAELERKVQTLQTEATSLSAQLTLLQRDTNGLGVENNELKLRVQTMEQQVHLQDALNDALKEEVQHLKVLTGQGPSNGTSMNYGSFGSNQQFYPNNQSMHTILAAQQLQQLQIQSQKQQQQQQQHQQQQQQQQQQFHFQQQQLYQLQQQQRLQQQEQQSGASELRRPMPSPGQKESVTSPDRETPLTKD

SEQ ID NO: 30263 - protein, 361 aa, Arabidopsis thaliana
  peptide (1)..(361): Ceres Seq. ID no. 12337381
MPDNPPKNLGHRRAHSEILTLPDDLSFDSDLGVVGAADGPSFSDDTDEDLLYMYLDMEKFNSSATSTSQMGEPSEPTWRNELASTSNLQSTPGSSSERPRIRHQHSQSMDGSTTIKPEMLMSGNEDVSGVDSKKAISAAKLSELALIDPKRAKRIWANSQSAARSKERKMRYIAELERKVQTLQTEATSLSAQLTLLQRDTNGLGVENNELKLRVQTMEQQVHLQDALNDALKEEVQHLKVLTGQGPSNGTSMNYGSFGSNQQFYPNNQSMHTILAAQQLQQLQIQSQKQQQQQQQHQQQQQQQQQQFHFQQQQLYQLQQQQRLQQQEQQSGASELRRPMPSPGQKESVTSPDRETPLTKD

SEQ ID NO: 30264 - DNA, 1663 bp, Arabidopsis thaliana
  misc_feature (1)..(1663): Ceres Seq. ID no. 13591657
  misc_feature (1)..(1663): Ortholog of  Ceres SEQ ID NO 15179007 as cited in SEQ ID NO 1038
  misc_feature (1)..(1663): Ortholog of  Ceres SEQ ID NO 15226449 as cited in SEQ ID NO 58879
  misc_feature (1)..(1663): Ortholog of  Ceres SEQ ID NO 13597146 as cited in SEQ ID NO 63311
gtcatcattatctctatctaataaatggcgttacaaaggcaactcctgaagagagctacttccgatatctatcaccgccgtgcgatctctctcctccgtactgatttctctacttctccttcgattgctgatgctccaccgcacattccgccgttcgttcaccagccacggccgtataaaggtccttccgccgatgaggttttacagaaacggaagaagtttctcggaccttctcttttccactactaccagaagcctcttaacatcgttgaagggaagatgcagtacttgtatgatgagagtggtaggcgatatctggatgcctttgctggaatagtcactgtgtcgtgcggtcactgccatccggatattcttaatgcgattacggaacagagcaagctacttcagcacgcgactactatttacctgcatcatgccattggtgattttgctgaagcattggctgccaagatgcccggaaatcttaaggttgtgtactttgtgaattctggctcagaagctaatgagctagcaatgatgatggctaggctttacactggtagccttgagatgatttccttgagaaatgcttatcatggtggaagttccaatactattggactaactgctcttaacacatggaagtacccattacctcagggggaaatccatcacgtagtaaatccagatccataccgtggagtttttggctctgatggttctctttatgctaaagatgttcaagaccacatcgagtatggtacctctggaaaagtagctggatttatcgcagagaccatccagggggtcggaggagctgtagaattggctcctggttacttaaagtcggtttatgaaattgttcgcaacgctggtggtgtatgcattgctgatgaagtccaaactggatttgggcgaacaggaagccactattggggtttccagactcaagatgtggttcctgacatagtcacaatggcaaagggaattggaaatggattgccattaggagctgtggtgactacaccagaaatcgcaagtgttttagctagcaagattctgttcaacacttttggtgggaacccggtttgttcagctggtggacttgcggttctaaacgttattgataaggagaaacgccaagaacattgtgctgaagttggttcacaccttatacaacgtttgaaagatgtgcagaaaagacatgatatcattggagacgtgagaggaagagggttaatggttgggattgagcttgtgagtgaccggaaagacaagacaccagccaaggctgaaacatctgtcttgtttgagcaacttagagaacttggcattctcgtcggaaaaggaggacttcatgggaacgttttcaggataaagccaccaatgtgtttcactaaagatgatgcagatttcttggtagatgcattggactattccatctccaggttgtgaacaaggatgaaacaaagccaacgagagtttttaaccatatgaaccgttttaatgtttccgcgtctttgtaacgaaaaccaagccaagtctcatctcctttgatttcagaataaataaataaaatttatttatttctcagtgttgctatgacataatacaaatacattagaaaagcccaattatttttgttttctttgttaaaattccc

SEQ ID NO: 30265 - protein, 476 aa, Arabidopsis thaliana
  peptide (1)..(476): Ceres Seq. ID no. 13591658
MALQRQLLKRATSDIYHRRAISLLRTDFSTSPSIADAPPHIPPFVHQPRPYKGPSADEVLQKRKKFLGPSLFHYYQKPLNIVEGKMQYLYDESGRRYLDAFAGIVTVSCGHCHPDILNAITEQSKLLQHATTIYLHHAIGDFAEALAAKMPGNLKVVYFVNSGSEANELAMMMARLYTGSLEMISLRNAYHGGSSNTIGLTALNTWKYPLPQGEIHHVVNPDPYRGVFGSDGSLYAKDVQDHIEYGTSGKVAGFIAETIQGVGGAVELAPGYLKSVYEIVRNAGGVCIADEVQTGFGRTGSHYWGFQTQDVVPDIVTMAKGIGNGLPLGAVVTTPEIASVLASKILFNTFGGNPVCSAGGLAVLNVIDKEKRQEHCAEVGSHLIQRLKDVQKRHDIIGDVRGRGLMVGIELVSDRKDKTPAKAETSVLFEQLRELGILVGKGGLHGNVFRIKPPMCFTKDDADFLVDALDYSISRL

SEQ ID NO: 30266 - protein, 391 aa, Arabidopsis thaliana
  peptide (1)..(391): Ceres Seq. ID no. 13591659
MQYLYDESGRRYLDAFAGIVTVSCGHCHPDILNAITEQSKLLQHATTIYLHHAIGDFAEALAAKMPGNLKVVYFVNSGSEANELAMMMARLYTGSLEMISLRNAYHGGSSNTIGLTALNTWKYPLPQGEIHHVVNPDPYRGVFGSDGSLYAKDVQDHIEYGTSGKVAGFIAETIQGVGGAVELAPGYLKSVYEIVRNAGGVCIADEVQTGFGRTGSHYWGFQTQDVVPDIVTMAKGIGNGLPLGAVVTTPEIASVLASKILFNTFGGNPVCSAGGLAVLNVIDKEKRQEHCAEVGSHLIQRLKDVQKRHDIIGDVRGRGLMVGIELVSDRKDKTPAKAETSVLFEQLRELGILVGKGGLHGNVFRIKPPMCFTKDDADFLVDALDYSISRL

SEQ ID NO: 30267 - protein, 327 aa, Arabidopsis thaliana
  peptide (1)..(327): Ceres Seq. ID no. 13591660
MPGNLKVVYFVNSGSEANELAMMMARLYTGSLEMISLRNAYHGGSSNTIGLTALNTWKYPLPQGEIHHVVNPDPYRGVFGSDGSLYAKDVQDHIEYGTSGKVAGFIAETIQGVGGAVELAPGYLKSVYEIVRNAGGVCIADEVQTGFGRTGSHYWGFQTQDVVPDIVTMAKGIGNGLPLGAVVTTPEIASVLASKILFNTFGGNPVCSAGGLAVLNVIDKEKRQEHCAEVGSHLIQRLKDVQKRHDIIGDVRGRGLMVGIELVSDRKDKTPAKAETSVLFEQLRELGILVGKGGLHGNVFRIKPPMCFTKDDADFLVDALDYSISRL

SEQ ID NO: 30268 - DNA, 1476 bp, Arabidopsis thaliana
  misc_feature (1)..(1476): Ceres Seq. ID no. 12422615
  misc_feature (1)..(1476): Ortholog of  Ceres SEQ ID NO 13661504 as cited in SEQ ID NO 61294
  misc_feature (1)..(1476): Ortholog of  Ceres SEQ ID NO 13596227 as cited in SEQ ID NO 68750
  misc_feature (1)..(1476): Ortholog of  Ceres SEQ ID NO 15179068 as cited in SEQ ID NO 0
gtgtatctctttctaccttctctgaacctatagagccaacgaaaccagaggacagtgaacaaagaattgtataattcgatctcagctcgttcctttgttgattctttactccgactattatgaggattgtacgtgcgacggagacgttctcggcggagcttaaagagttcatgtgcgccgctgtgcaaaggaggaaagacgacgacggattcagaggctctcgtggcggtggtaaatctagaaatgccatggatcttgattctgacgccggaaacagattggtttgtgttactggtggtgtttcttaccttggtcgtgccattgttaaacgtcttcttgttcatggatactccgttagaatcgtcgttgattgtccagaggacaaagagaaagtgagtgagatggaagctgacgctgaaacggcgtcgtttagcaacatgattacttcagtggtttctcgattaacagagatcgatagcttaattaaagcgtttgatggttgtgctggcgttttccacacttctgcgtttgttgatcctgctggagtctctggatattcgaaatcaatggcggagttagaagcaaaagtgagcgagagtgtaatcgaagcgtgtacaagaacagcctcagtgagaaaatgtgtcttcacatcatctctcttagcctgcgcttggcaaaaaaatccctgtaatagtcttgaccactctgttatcaatgaagaaagctggagcgatgaacaactctgcatcgataataagctttggtatgcacttggaaaactaaaagccgagaaagctgcgtggagaatagctgattcaaaaggattaaagcttgcaactatatgtcctgctcttataactggtcctgacttcttcaaccgtaactccacttcaaccttggcttatctcaaaggagcaaaagagatgtatagtaacggattattagcgacaatggatgtgaacaggttggctaaagctcacgtatgtttgtgggaaggtttgggtaataaaactgcgtttggtagatacatttgtttcgacaccattctctctagagatggtgctgaaaagcttgcaaaagatatcgatgttcaaatcgaaaagatttgcggtaacagcaacgattcagatgcaaacacagaaacagaagcttctttacaaatatcagataaaaagctattagatcttatgtcaagaactctacgaagttgctaccatgagagttagctaggcacgacgacaaaaattaaacagagcagttctaagctattgacgtaacgttttgctcttattcttttcttcttttaaattatgctttatttatttgtttagtgtaatgataaatcattatgaaataaaaaaaatgagaatcattgttatttgtaattgtacgaatgtggtttgcgtggagggtggttgttgtaaagggcggtagagttggtgttcgtggaaaatttataaattcttcctatttcgg

SEQ ID NO: 30269 - protein, 368 aa, Arabidopsis thaliana
  peptide (1)..(368): Ceres Seq. ID no. 12422616
MRIVRATETFSAELKEFMCAAVQRRKDDDGFRGSRGGGKSRNAMDLDSDAGNRLVCVTGGVSYLGRAIVKRLLVHGYSVRIVVDCPEDKEKVSEMEADAETASFSNMITSVVSRLTEIDSLIKAFDGCAGVFHTSAFVDPAGVSGYSKSMAELEAKVSESVIEACTRTASVRKCVFTSSLLACAWQKNPCNSLDHSVINEESWSDEQLCIDNKLWYALGKLKAEKAAWRIADSKGLKLATICPALITGPDFFNRNSTSTLAYLKGAKEMYSNGLLATMDVNRLAKAHVCLWEGLGNKTAFGRYICFDTILSRDGAEKLAKDIDVQIEKICGNSNDSDANTETEASLQISDKKLLDLMSRTLRSCYHES

SEQ ID NO: 30270 - protein, 351 aa, Arabidopsis thaliana
  peptide (1)..(351): Ceres Seq. ID no. 12422617
MCAAVQRRKDDDGFRGSRGGGKSRNAMDLDSDAGNRLVCVTGGVSYLGRAIVKRLLVHGYSVRIVVDCPEDKEKVSEMEADAETASFSNMITSVVSRLTEIDSLIKAFDGCAGVFHTSAFVDPAGVSGYSKSMAELEAKVSESVIEACTRTASVRKCVFTSSLLACAWQKNPCNSLDHSVINEESWSDEQLCIDNKLWYALGKLKAEKAAWRIADSKGLKLATICPALITGPDFFNRNSTSTLAYLKGAKEMYSNGLLATMDVNRLAKAHVCLWEGLGNKTAFGRYICFDTILSRDGAEKLAKDIDVQIEKICGNSNDSDANTETEASLQISDKKLLDLMSRTLRSCYHES

SEQ ID NO: 30271 - protein, 325 aa, Arabidopsis thaliana
  peptide (1)..(325): Ceres Seq. ID no. 12422618
MDLDSDAGNRLVCVTGGVSYLGRAIVKRLLVHGYSVRIVVDCPEDKEKVSEMEADAETASFSNMITSVVSRLTEIDSLIKAFDGCAGVFHTSAFVDPAGVSGYSKSMAELEAKVSESVIEACTRTASVRKCVFTSSLLACAWQKNPCNSLDHSVINEESWSDEQLCIDNKLWYALGKLKAEKAAWRIADSKGLKLATICPALITGPDFFNRNSTSTLAYLKGAKEMYSNGLLATMDVNRLAKAHVCLWEGLGNKTAFGRYICFDTILSRDGAEKLAKDIDVQIEKICGNSNDSDANTETEASLQISDKKLLDLMSRTLRSCYHES

SEQ ID NO: 30272 - DNA, 1201 bp, Arabidopsis thaliana
  misc_feature (1)..(1201): Ceres Seq. ID no. 12384927
  misc_feature (1)..(1201): Ortholog of  Ceres SEQ ID NO 15174752 as cited in SEQ ID NO 53279
  misc_feature (1)..(1201): Ortholog of  Ceres SEQ ID NO 15226087 as cited in SEQ ID NO 58655
aatgaacgtataaagtaggatttcataatgcaacgtctaatagctagaacataagtgattcaaaataagttttctcaagtttggcgcatgtagttgagtttcatggagatgtatgtactttaaatttttaaattttggcagataacatcattcaagtgcggtggatttgcaatgggaatctcaacaaaccataccacgttcgatggacttagtttcaaaacattcctcgaaaacttagcttctctacttcacgagaagcccttatcaacacctccatgcaacgaccgtactcttctcaaagctcgtgatccaccaagtgtcgcattcccacaccacgagcttgtcaagttccaagactgtgagacaacaacagtcttcgaagctacttcagagcacttagacttcaagatcttcaagctatcctctgaacaaatcaagaagctcaaggagagagcctcagagactagtaacggtaatgttcgcgtgacgggtttcaacgttgtaaccgctttggtctggaggtgcaaggcactctctgtagcagcagaggaaggagaagaaaccaatcttgaaagagaatcaacgattctttatgctgtggacattagagggaggctgaatcctgagcttccaccgtcttacactggaaacgcggttttaacggcatacgcaaaggagaaatgcaaggcattgcttgaagagccgtttgggaggattgtagaaatggtaggagaagggtcaaagaggataacggatgagtatgcgcggtctgctatagattggggagagttatacaaagggtttccccatggggaagttttggtttcttcttggtggaaactcggattcgcagaggttgagtatccttggggaaagcctaagtatagctgtcccgttgtctatcatcgaaaagacattgttttgctgtttccggacatcgatggagatagtaaaggtgtttatgtcttggctgctttgccttctaaggagatgtccaagtttcagcactggtttgaagacactctgtgctgatttcgtgatggcttcactttgcattgctattgctttattttacttctttgacgattataaacacattatggtattttatatttgtatacggttgaaaagtgaacgttataaaacatctattttctgctactttctctaagtataaacaagcacaaaagatttaaaggtg

SEQ ID NO: 30273 - protein, 286 aa, Arabidopsis thaliana
  peptide (1)..(286): Ceres Seq. ID no. 12384928
MGISTNHTTFDGLSFKTFLENLASLLHEKPLSTPPCNDRTLLKARDPPSVAFPHHELVKFQDCETTTVFEATSEHLDFKIFKLSSEQIKKLKERASETSNGNVRVTGFNVVTALVWRCKALSVAAEEGEETNLERESTILYAVDIRGRLNPELPPSYTGNAVLTAYAKEKCKALLEEPFGRIVEMVGEGSKRITDEYARSAIDWGELYKGFPHGEVLVSSWWKLGFAEVEYPWGKPKYSCPVVYHRKDIVLLFPDIDGDSKGVYVLAALPSKEMSKFQHWFEDTLC

SEQ ID NO: 30274 - DNA, 2221 bp, Arabidopsis thaliana; identical to SEQ ID NO: 30144
  misc_feature (1)..(2221): Ceres Seq. ID no. 13490207
  misc_feature (1)..(2221): Ortholog of  Ceres SEQ ID NO 12584790 as cited in SEQ ID NO 62648
  misc_feature (1)..(2221): Ortholog of  Ceres SEQ ID NO 15178116 as cited in SEQ ID NO 0

SEQ ID NO: 30275 - protein, 327 aa, Arabidopsis thaliana; identical to SEQ ID NO: 30145
  peptide (1)..(327): Ceres Seq. ID no. 15218812

SEQ ID NO: 30276 - protein, 237 aa, Arabidopsis thaliana; identical to SEQ ID NO: 30146
  peptide (1)..(237): Ceres Seq. ID no. 15218813

SEQ ID NO: 30277 - DNA, 1766 bp, Arabidopsis thaliana
  misc_feature (1)..(1766): Ceres Seq. ID no. 12348549
  misc_feature (1)..(1766): Ortholog of  Ceres SEQ ID NO 15171245 as cited in SEQ ID NO 52264
  misc_feature (1)..(1766): Ortholog of  Ceres SEQ ID NO 14303576 as cited in SEQ ID NO 68428
aaaaaatgtctcattgcttctctcgttctaaaaaaaatcttgctgctatctctctataagtccactcctccttcaagcaaagcaccttcctcttctttttgctcctctgagattggtttaagattaaaccagacccatctaagggatctggaacaagcttcgtctctggttccactctgatcatcagagtattaaaaatggagtctttcttctccagatccacctccatcgtctccaaattgagtttcttggccttatggatcgtcttcttgatttcttcatcttcttttacttcgacagaagcatatgatgcgcttgatccagaaggcaacattacaatgaaatgggatgttatgagctggactcctgatggctatgttgccgtggttacgatgttcaacttccagaaatacagacacattcaatctccaggatggacattaggttggaaatgggcaaagaaggaagttatatggagtatggttggagcacaaacaactgaacaaggtgattgttcaaagtacaaaggaaacataccacattgttgtaagaaggatccaacagttgtagacttgcttccagggactccttataatcagcagattgctaattgctgcaagggtggtgttatgaactcatgggttcaagaccctgccactgcggctagctccttccagattagtgttggtgctgctggaaccacaaacaaaaccgttagggtcccaagaaacttcactctcatgggacctggtccaggttacacttgtggtccagcaaagattgtcagaccaacaaaatttgtcacgactgacacacgcagaaccactcaagctatgatgacatggaacattacgtgcacatactcgcagttccttgctcaaagaactccaacttgctgtgtttctttatcttctttctacaatgaaaccattgttggatgtccaacttgtgcttgcggatgtcaaaacaacagaacagaatccggtgcctgcctcgacccggacacaccacacttagcctcggttgtgtcaccaccaacaaagaaaggaacggttttaccaccattagtgcaatgcacgagacacatgtgcccgatcagagtgcattggcatgtaaagcagaactacaaagagtattggcgtgtgaagatcacaatcacaaacttcaactatcgcttgaactacacacaatggaaccttgttgctcaacatccaaatctcgacaacatcactcaaatcttcagcttcaactacaaatctcttactccttacgctggactaaacgatacggcgatgttatggggagtgaagttctacaacgatttcttatcagaagcaggtcctcttgggaatgttcaatcagagattttgttccgtaaagaccaatcaaccttcacattcgagaaaggttgggcttttccacgaaggatttactttaatggagacaattgcgtcatgcctcctccagactcttacccttttcttcccaacggtggttcccggtcacaattctcattcgtcgccgccgtgctcctccctcttcttgtctttttcttcttctctgcctaatctcggatttacggttttgccactggtttgcttagggttacggcggagtggtataaacgtttatttatgattcttttgtgtcccacaaaaattataatcttttgatactttttaaaaatataaatagttttcaacttccttgtttttaaaagaaatttatatccttgtgttctgttggtccgtcgttgtagaatatcg

SEQ ID NO: 30278 - protein, 456 aa, Arabidopsis thaliana
  peptide (1)..(456): Ceres Seq. ID no. 12348550
MESFFSRSTSIVSKLSFLALWIVFLISSSSFTSTEAYDALDPEGNITMKWDVMSWTPDGYVAVVTMFNFQKYRHIQSPGWTLGWKWAKKEVIWSMVGAQTTEQGDCSKYKGNIPHCCKKDPTVVDLLPGTPYNQQIANCCKGGVMNSWVQDPATAASSFQISVGAAGTTNKTVRVPRNFTLMGPGPGYTCGPAKIVRPTKFVTTDTRRTTQAMMTWNITCTYSQFLAQRTPTCCVSLSSFYNETIVGCPTCACGCQNNRTESGACLDPDTPHLASVVSPPTKKGTVLPPLVQCTRHMCPIRVHWHVKQNYKEYWRVKITITNFNYRLNYTQWNLVAQHPNLDNITQIFSFNYKSLTPYAGLNDTAMLWGVKFYNDFLSEAGPLGNVQSEILFRKDQSTFTFEKGWAFPRRIYFNGDNCVMPPPDSYPFLPNGGSRSQFSFVAAVLLPLLVFFFFSA

SEQ ID NO: 30279 - protein, 409 aa, Arabidopsis thaliana
  peptide (1)..(409): Ceres Seq. ID no. 12348551
MKWDVMSWTPDGYVAVVTMFNFQKYRHIQSPGWTLGWKWAKKEVIWSMVGAQTTEQGDCSKYKGNIPHCCKKDPTVVDLLPGTPYNQQIANCCKGGVMNSWVQDPATAASSFQISVGAAGTTNKTVRVPRNFTLMGPGPGYTCGPAKIVRPTKFVTTDTRRTTQAMMTWNITCTYSQFLAQRTPTCCVSLSSFYNETIVGCPTCACGCQNNRTESGACLDPDTPHLASVVSPPTKKGTVLPPLVQCTRHMCPIRVHWHVKQNYKEYWRVKITITNFNYRLNYTQWNLVAQHPNLDNITQIFSFNYKSLTPYAGLNDTAMLWGVKFYNDFLSEAGPLGNVQSEILFRKDQSTFTFEKGWAFPRRIYFNGDNCVMPPPDSYPFLPNGGSRSQFSFVAAVLLPLLVFFFFSA

SEQ ID NO: 30280 - protein, 404 aa, Arabidopsis thaliana
  peptide (1)..(404): Ceres Seq. ID no. 12348552
MSWTPDGYVAVVTMFNFQKYRHIQSPGWTLGWKWAKKEVIWSMVGAQTTEQGDCSKYKGNIPHCCKKDPTVVDLLPGTPYNQQIANCCKGGVMNSWVQDPATAASSFQISVGAAGTTNKTVRVPRNFTLMGPGPGYTCGPAKIVRPTKFVTTDTRRTTQAMMTWNITCTYSQFLAQRTPTCCVSLSSFYNETIVGCPTCACGCQNNRTESGACLDPDTPHLASVVSPPTKKGTVLPPLVQCTRHMCPIRVHWHVKQNYKEYWRVKITITNFNYRLNYTQWNLVAQHPNLDNITQIFSFNYKSLTPYAGLNDTAMLWGVKFYNDFLSEAGPLGNVQSEILFRKDQSTFTFEKGWAFPRRIYFNGDNCVMPPPDSYPFLPNGGSRSQFSFVAAVLLPLLVFFFFSA

SEQ ID NO: 30281 - DNA, 1015 bp, Arabidopsis thaliana
  misc_feature (1)..(1015): Ceres Seq. ID no. 12481977
  misc_feature (1)..(1015): Ortholog of  Ceres SEQ ID NO 14305357 as cited in SEQ ID NO 60046
  misc_feature (1)..(1015): Ortholog of  Ceres SEQ ID NO 14313511 as cited in SEQ ID NO 64459
  misc_feature (1)..(1015): Ortholog of  Ceres SEQ ID NO 14303006 as cited in SEQ ID NO 67498
  misc_feature (1)..(1015): Ortholog of  Ceres SEQ ID NO 13599627 as cited in SEQ ID NO 0
aaaacacgcctttatcatagtttctatctccgatgacacaaaacgaggaagattatttgacattttaagctgaattgctctgaaatctcaattgtataatcatctcctgggtcgtcgttatcgtgatcatctagaagaaagcatgactacactagatttgaccagagccgagcttgctcttattgttctctatttgaacaaagctgaggctagagataagatatgcagagctatccaatatggttccaaattcttgagcggtggccaacctggtactgctcaaactgtcgacaaaaacaccagcttggcgagaaaagttttccgtcttttcaagtttgtcaatgattttcacggtcttatcagccccgtgcctaaagggactccacttcctcttgtcttactcgggaagtcgaagaatgcgctcttgtctacctttttgtttcttgatcaaatcgtctggcttggtagatccggcatatacaagaacaaagaacgaactgaattgcttggacgtatatcacttttctgctggctgggatcatccgtttgtacaagtgcagtcgagattggtgagcttggaaggctctcttcatctatgaagaagatggaaaaggaactcaaagctgatgatgagctgtatcgtgctaagcttcagaaatcaaacgacagaactctagctttgattaaatcaagcatggacattattgtagccattggtctccttcagttagctccaaagacgattagtcctcgtgtcactggtgctttcgggtttaccacctcacttatctcttgttatcagttgcttccatcgcgccccaagttgaagacaccttgaagaaggaataagcttgttctctagactttcagaataattgtttcatattcatcagtaaacctattgtgttcaggtattctaaggagtctatgttcctcctttgaatgaatttgctgctcttataacgcgtttgcaagaataatgataagttttagaataagattattatgatacatc

SEQ ID NO: 30282 - protein, 231 aa, Arabidopsis thaliana; identical to SEQ ID NO: 23905
  peptide (1)..(231): Ceres Seq. ID no. 12481978

SEQ ID NO: 30283 - DNA, 1941 bp, Arabidopsis thaliana
  misc_feature (1)..(1941): Ceres Seq. ID no. 13490571
  misc_feature (1)..(1941): Ortholog of  Ceres SEQ ID NO 15176081 as cited in SEQ ID NO 65838
  misc_feature (1)..(1941): Ortholog of  Ceres SEQ ID NO 13660287 as cited in SEQ ID NO 67316
aatgtccacccataattcctcctcagtctttttataaacaaaccattttcttgcttttgctcgcaaaactttaaccttaaaaaccaaaccaaaaaaaaaaaaactaaattaaacttatggatgtgtcaaatgagacagtggaaagaaccgatctccggacacctttagtagatccggcagacacggaggtgaaacctctaccagaggtcgggctcgagagcgtattaacggagagtagcttgtcataccggaggcgtgtgtacttaggagccggtatagagttgaaagtacttttccggttggcactaccggcgatacttatctatttagtcaactccggaatgggtatatccgctcgtgtcttcgccggtcatgttggtagtcaagaacttgcggccgcgtccatcggaaatagctgcttcaatctcgtctatggacttatgttaggtatgggcagtgcagtcgaaacactatgtggacaagcctatggagcccatcgttacgagatgcttgggatctatctccaaagagcaacaatagtcctcgctctagttggcttgcccatgacattactatacaccttctcgtaccctattctaatcctactaggggaacccaaaacggtgtcgtacatgggatccaaatacatcgccgggctcatccctcaaatcttcgcttacgccgtcaacttcacggcccaaaagttcctccaggcccaaagcgtggttgccccgagcgccttcatctcagccgccgccctcatcctccagatattgttgacgtggatcaccgtttatgtaatggacatgggctttatgggcatagcttatgttcttacaatttcttggtgggtcattgttggatcccagtgtttttacattgcggttagtcccaagtttagacacacgtggactggtcttagctggagatcgctccaaggtctttggagcttctttaaactctctgctggctcagctgttatgatttgtctggaaatgtggtattcgcagattcttgttcttcttgctggtttgctcgaaaatcctgctcgctctctagattctctttccatctgtatgtcaatttcagcattatcattcatggtctctgtcggctttaatgctgctgtaagtgtacggacaagtaatgagcttggagcaggaaatccgaaatcagcatggttctctacatggacggctacttttgtatccttcgtgatctccgtgacggaagccctcgccgtgatttggtttcgtgattacgttagctacattttcacggaggatgctgacgtggctaaagccgtctctgacctctgtccttttcttgccatcaccatcattctcaacggaattcaacctgtcttgtccggagtggcagtgggatgtggatggcaaacatacgtggcatatgtgaatgttggttgttactacgttgttggtattccggttgggtgtattctcggcttcactttcgattttcaagccaagggaatatggaccgggatgattggaggtaccctcatgcaaacactcattttactttacgtcacgtaccgaacagattgggataaagaggtggaaaaagcgaggaaacgtttggatctgtgggacgacaagaaggagcctctccaaaactagttataacaagtttggtggagtgatagacaataaagaaaaggaaataagtgtcgtgtgtgcaggtgatttcaatgtacgtagcttttcatggttattatgcttgttctatggaaatagaacaattaaaatatatttttgtctgatggattattctttatttacgaaaagttgttcttaaattgatgtttctttcctttctcagaatgatttattatgtcttcactctatagacagttattaattatttattatggaattttgatgtaattgggtgtagtaagtaaagtagcacatcaatgcg

SEQ ID NO: 30284 - protein, 507 aa, Arabidopsis thaliana
  peptide (1)..(507): Ceres Seq. ID no. 13490572
MDVSNETVERTDLRTPLVDPADTEVKPLPEVGLESVLTESSLSYRRRVYLGAGIELKVLFRLALPAILIYLVNSGMGISARVFAGHVGSQELAAASIGNSCFNLVYGLMLGMGSAVETLCGQAYGAHRYEMLGIYLQRATIVLALVGLPMTLLYTFSYPILILLGEPKTVSYMGSKYIAGLIPQIFAYAVNFTAQKFLQAQSVVAPSAFISAAALILQILLTWITVYVMDMGFMGIAYVLTISWWVIVGSQCFYIAVSPKFRHTWTGLSWRSLQGLWSFFKLSAGSAVMICLEMWYSQILVLLAGLLENPARSLDSLSICMSISALSFMVSVGFNAAVSVRTSNELGAGNPKSAWFSTWTATFVSFVISVTEALAVIWFRDYVSYIFTEDADVAKAVSDLCPFLAITIILNGIQPVLSGVAVGCGWQTYVAYVNVGCYYVVGIPVGCILGFTFDFQAKGIWTGMIGGTLMQTLILLYVTYRTDWDKEVEKARKRLDLWDDKKEPLQN

SEQ ID NO: 30285 - protein, 432 aa, Arabidopsis thaliana
  peptide (1)..(432): Ceres Seq. ID no. 13490573
MGISARVFAGHVGSQELAAASIGNSCFNLVYGLMLGMGSAVETLCGQAYGAHRYEMLGIYLQRATIVLALVGLPMTLLYTFSYPILILLGEPKTVSYMGSKYIAGLIPQIFAYAVNFTAQKFLQAQSVVAPSAFISAAALILQILLTWITVYVMDMGFMGIAYVLTISWWVIVGSQCFYIAVSPKFRHTWTGLSWRSLQGLWSFFKLSAGSAVMICLEMWYSQILVLLAGLLENPARSLDSLSICMSISALSFMVSVGFNAAVSVRTSNELGAGNPKSAWFSTWTATFVSFVISVTEALAVIWFRDYVSYIFTEDADVAKAVSDLCPFLAITIILNGIQPVLSGVAVGCGWQTYVAYVNVGCYYVVGIPVGCILGFTFDFQAKGIWTGMIGGTLMQTLILLYVTYRTDWDKEVEKARKRLDLWDDKKEPLQN

SEQ ID NO: 30286 - protein, 399 aa, Arabidopsis thaliana
  peptide (1)..(399): Ceres Seq. ID no. 13490574
MLGMGSAVETLCGQAYGAHRYEMLGIYLQRATIVLALVGLPMTLLYTFSYPILILLGEPKTVSYMGSKYIAGLIPQIFAYAVNFTAQKFLQAQSVVAPSAFISAAALILQILLTWITVYVMDMGFMGIAYVLTISWWVIVGSQCFYIAVSPKFRHTWTGLSWRSLQGLWSFFKLSAGSAVMICLEMWYSQILVLLAGLLENPARSLDSLSICMSISALSFMVSVGFNAAVSVRTSNELGAGNPKSAWFSTWTATFVSFVISVTEALAVIWFRDYVSYIFTEDADVAKAVSDLCPFLAITIILNGIQPVLSGVAVGCGWQTYVAYVNVGCYYVVGIPVGCILGFTFDFQAKGIWTGMIGGTLMQTLILLYVTYRTDWDKEVEKARKRLDLWDDKKEPLQN

SEQ ID NO: 30287 - DNA, 632 bp, Arabidopsis thaliana
  misc_feature (1)..(632): Ceres Seq. ID no. 13490432
  misc_feature (1)..(632): Ortholog of  Ceres SEQ ID NO 14305840 as cited in SEQ ID NO 52339
gatttctgatctttgccctcttttcataagatagttagggttttagtcttttgtgtaataattcattgatcatgaacaagggagaagaaggaggagaagacaaggaagtggtttctcttcaaactctgagtaagaaaatggatgattttgcaaaagctagagattgggagaagtatcacagtccaaggaatctccttcttgctatggtgggtgaagtgggagagctatcagagatattccaatggaaaggagaagtagcaagaggatgtccagattggaaagaagaagagaaagtccatcttggagaagagttatcagatgttttgttgtatttggtgaggctttcggatgcgtgtggtgtcgatttaggcaaagccgctctgcgcaagatcgagcttaatgctattaagtatccagttcccaaaaagactgatgatcattgtgttggtgatggtgaagattcaagcagcaagattaagttgaatgaagaaaactaatctctcttattagtggttttgtgagtaagtttattgtgggtattttcttgttatgaagtaggagcatgatcaagaacatataatcttcgaaggcctctaattatatttcagatgaatctacttagtaccactttt

SEQ ID NO: 30288 - protein, 141 aa, Arabidopsis thaliana
  peptide (1)..(141): Ceres Seq. ID no. 13490433
MNKGEEGGEDKEVVSLQTLSKKMDDFAKARDWEKYHSPRNLLLAMVGEVGELSEIFQWKGEVARGCPDWKEEEKVHLGEELSDVLLYLVRLSDACGVDLGKAALRKIELNAIKYPVPKKTDDHCVGDGEDSSSKIKLNEEN

SEQ ID NO: 30289 - protein, 119 aa, Arabidopsis thaliana
  peptide (1)..(119): Ceres Seq. ID no. 13490434
MDDFAKARDWEKYHSPRNLLLAMVGEVGELSEIFQWKGEVARGCPDWKEEEKVHLGEELSDVLLYLVRLSDACGVDLGKAALRKIELNAIKYPVPKKTDDHCVGDGEDSSSKIKLNEEN

SEQ ID NO: 30290 - protein, 97 aa, Arabidopsis thaliana
  peptide (1)..(97): Ceres Seq. ID no. 13490435
MVGEVGELSEIFQWKGEVARGCPDWKEEEKVHLGEELSDVLLYLVRLSDACGVDLGKAALRKIELNAIKYPVPKKTDDHCVGDGEDSSSKIKLNEEN

SEQ ID NO: 30291 - DNA, 1072 bp, Arabidopsis thaliana
  misc_feature (1)..(1072): Ceres Seq. ID no. 13495755
  misc_feature (1)..(1072): Ortholog of  Ceres SEQ ID NO 12563124 as cited in SEQ ID NO 57104
  misc_feature (1)..(1072): Ortholog of  Ceres SEQ ID NO 13598373 as cited in SEQ ID NO 62185
  misc_feature (1)..(1072): Ortholog of  Ceres SEQ ID NO 12617639 as cited in SEQ ID NO 65219
acacatctcactgctcactactctcactgtaatcccttagatcttcttttcaaatttcaatggcgtccggtgatgttgagtatcggtgcttcgttggaggtctagcatgggccactgatgacagagctcttgagactgccttcgctcaatacggcgacgttattgattccaaggtctgttacacgccgagatcggactccgagtgatatcgatgatctcatcctcgacggatctgttccgatcttgtgtttctctgttacttgattcgattactctgttactattctcgttctttgttactactactactactactgttacttgtattttcccaaatcggtacgttcatcttcctgcttctgtgagcccggagatcgatcggatttttttgtattttgtatatttgttgtagatctaaatgcttttgttcagttttgttggattgttttgctgatctggtttttgtattatttggataacagatcattaacgatcgtgagactggaagatcaaggggattcggattcgtcaccttcaaggatgagaaagccatgaaggatgcgattgagggaatgaacggacaagatctcgatggccgtagcatcactgttaacgaggctcagtcacgaggaagcggtggcggcggaggccaccgtggaggtggtggcggtggataccgcagcggcggtggtggaggttactccggtggaggtggtagctacggaggtggcggcggtagacgcgagggtggaggaggatacagcggcggcggcggttactcctcaagaggtggtggtggcggaagctacggtggtggaagacgtgagggaggaggaggatacggtggtggtgaaggaggaggttacggaggaagcggtggtggtggaggatggtaattcctttaattaggtttgggattaccaatgaatgttctctctctcgcttgttatgcttctacttggttttgtgtgttctctattttgttctggttctgctttagatttgatgtaacagttcgtgattaggtattttggtatctggaaacgtaatgttaagtcacttgtcattctcc

SEQ ID NO: 30292 - protein, 114 aa, Arabidopsis thaliana; identical to SEQ ID NO: 27779
  peptide (1)..(114): Ceres Seq. ID no. 13495756

SEQ ID NO: 30293 - protein, 107 aa, Arabidopsis thaliana; identical to SEQ ID NO: 27780
  peptide (1)..(107): Ceres Seq. ID no. 13495757

SEQ ID NO: 30294 - protein, 105 aa, Arabidopsis thaliana
  peptide (1)..(105): Ceres Seq. ID no. 13495758
MAVASLLTRLSHEEAVAAEATVEVVAVDTAAAVVEVTPVEVVATEVAAVDARVEEDTAAAAVTPQEVVVAEATVVEDVREEEDTVVVKEEVTEEAVVVEDGNSFN

SEQ ID NO: 30295 - DNA, 1321 bp, Arabidopsis thaliana
  misc_feature (1)..(1321): Ceres Seq. ID no. 13497165
  misc_feature (1)..(1321): Ortholog of  Ceres SEQ ID NO 14310616 as cited in SEQ ID NO 55699
  misc_feature (1)..(1321): Ortholog of  Ceres SEQ ID NO 13596519 as cited in SEQ ID NO 62572
  misc_feature (1)..(1321): Ortholog of  Ceres SEQ ID NO 12625108 as cited in SEQ ID NO 68102
accatcctcatctctcaatcaacaaacctaactctttctctatacaagagcgcaagctcgaaggcgctcttgttctttcttcattttctccttaacaatcaccctcatagtaactttaaaactctctgtttctagtaattcacacacaaaatggctattaaactagcaattctatttaccacatttgttctttttagcctcgccgacgctagaatccccggtatttactccggcggcgcatggcaaaacgcacacgccactttttacggtggcagcgacgcctccggcacaatgggaggagcttgtggttacggtaacctatacagccaagggtacgggaccaacacggctgctttgagtacggcgctgtttaacaatggtatgagttgtggagcctgctttgagctaaaatgcgccaacgaccctcaatggtgtcactcaggtagtccttcgatcctcatcaccgcaaccaatttctgcccaccaaacttggctcagcctagcgacaacggaggatggtgcaacccaccacgtgaacactttgacctagccatgcctgtcttccttaagatcgctcaatatcgcgccggcattgtccccgtctcataccgcagggtgccatgtagaaagagaggaggcataaggttcacaatcaacggtcaccgttacttcaacttggttctgatcactaacgtggctggagcaggagacatcgtgagggctagtgtgaaaggatcacggactggttggatgagtttgagcagaaactggggacaaaactggcaatctaatgctgttttggttggtcaagcactctctttccgtgtcacaggcagtgaccgtagaacatctacttcctggaacatggttccttctaactggcagtttggtcaaacctttgtcgggaagaatttcagggtttaaggcgagtttcgagaaactaaaatttggaggaaattcgagaaattaaagtggttcgagacaaaagaaaactctccgctaatttcgctattcctcctcctttttttttactaaattttatatatggaaaggagagaaaaatcaggggaaagtatctttgacttttgtgtgtgttttcacttttttaatgtttttttttttgggtttggtgttttaattgtgagtgataaagggggaaatgagggagaaagagaaagtgagtagctgaagtggctgtgagaacattttgtaacagcccgcagctattaaagtattttacatggtttggttgtaagttacaacttgtaacgtttaatctcgtgtaatcttaaaacatggttgtattattgatacttaatac

SEQ ID NO: 30296 - protein, 257 aa, Arabidopsis thaliana
  peptide (1)..(257): Ceres Seq. ID no. 13497166
MAIKLAILFTTFVLFSLADARIPGIYSGGAWQNAHATFYGGSDASGTMGGACGYGNLYSQGYGTNTAALSTALFNNGMSCGACFELKCANDPQWCHSGSPSILITATNFCPPNLAQPSDNGGWCNPPREHFDLAMPVFLKIAQYRAGIVPVSYRRVPCRKRGGIRFTINGHRYFNLVLITNVAGAGDIVRASVKGSRTGWMSLSRNWGQNWQSNAVLVGQALSFRVTGSDRRTSTSWNMVPSNWQFGQTFVGKNFRV

SEQ ID NO: 30297 - protein, 210 aa, Arabidopsis thaliana
  peptide (1)..(210): Ceres Seq. ID no. 13497167
MGGACGYGNLYSQGYGTNTAALSTALFNNGMSCGACFELKCANDPQWCHSGSPSILITATNFCPPNLAQPSDNGGWCNPPREHFDLAMPVFLKIAQYRAGIVPVSYRRVPCRKRGGIRFTINGHRYFNLVLITNVAGAGDIVRASVKGSRTGWMSLSRNWGQNWQSNAVLVGQALSFRVTGSDRRTSTSWNMVPSNWQFGQTFVGKNFRV

SEQ ID NO: 30298 - protein, 180 aa, Arabidopsis thaliana
  peptide (1)..(180): Ceres Seq. ID no. 13497168
MSCGACFELKCANDPQWCHSGSPSILITATNFCPPNLAQPSDNGGWCNPPREHFDLAMPVFLKIAQYRAGIVPVSYRRVPCRKRGGIRFTINGHRYFNLVLITNVAGAGDIVRASVKGSRTGWMSLSRNWGQNWQSNAVLVGQALSFRVTGSDRRTSTSWNMVPSNWQFGQTFVGKNFRV

SEQ ID NO: 30299 - DNA, 836 bp, Arabidopsis thaliana
  misc_feature (1)..(836): Ceres Seq. ID no. 13490390
  misc_feature (1)..(836): Ortholog of  Ceres SEQ ID NO 15173624 as cited in SEQ ID NO 60470
atcttacatatattactcatcatcaagttcctactttctctctgacaaacatcacagagtaagtaagaatggtacagacgaagaagttcagaggtgtcaggcaacgccattggggttcttgggtcgctgagattcgtcatcctctcttgaaacggaggatttggctagggacgttcgagaccgcagaggaggcagcaagagcatacgacgaggccgccgttttaatgagcggccgcaacgccaaaaccaactttcccctcaacaacaacaacaccggagaaacttccgagggcaaaaccgatatttcagcttcgtccacaatgtcatcctcaacatcatcttcatcgctctcttccatcctcagcgccaaactgaggaaatgctgcaagtctccttccccatccctcacctgcctccgtcttgacacagccagctcccatatcggcgtctggcagaaacgggccggttcaaagtctgactccagctgggtcatgacggtggagctaggtcccgcaagctcctcccaagagactactagtaaagcttcacaagacgctattcttgctccgaccactgaagttgaaattggtggcagcagagaagaagtattggatgaggaagaaaaggttgctttgcaaatgatagaggagcttctcaatacaaactaaatcttatttgcttatatatatgtacctattttcattgctgatttacagccaaaataatcaattataccgtgtattttatagatgttttatattaaaaggttgttagctatatattgtttctctttttccacatttgtatctaataaagtattggtgtttgtaactaag

SEQ ID NO: 30300 - protein, 199 aa, Arabidopsis thaliana
  peptide (1)..(199): Ceres Seq. ID no. 13490391
MVQTKKFRGVRQRHWGSWVAEIRHPLLKRRIWLGTFETAEEAARAYDEAAVLMSGRNAKTNFPLNNNNTGETSEGKTDISASSTMSSSTSSSSLSSILSAKLRKCCKSPSPSLTCLRLDTASSHIGVWQKRAGSKSDSSWVMTVELGPASSSQETTSKASQDAILAPTTEVEIGGSREEVLDEEEKVALQMIEELLNTN

SEQ ID NO: 30301 - protein, 147 aa, Arabidopsis thaliana
  peptide (1)..(147): Ceres Seq. ID no. 13490392
MSGRNAKTNFPLNNNNTGETSEGKTDISASSTMSSSTSSSSLSSILSAKLRKCCKSPSPSLTCLRLDTASSHIGVWQKRAGSKSDSSWVMTVELGPASSSQETTSKASQDAILAPTTEVEIGGSREEVLDEEEKVALQMIEELLNTN

SEQ ID NO: 30302 - protein, 115 aa, Arabidopsis thaliana
  peptide (1)..(115): Ceres Seq. ID no. 13490393
MSSSTSSSSLSSILSAKLRKCCKSPSPSLTCLRLDTASSHIGVWQKRAGSKSDSSWVMTVELGPASSSQETTSKASQDAILAPTTEVEIGGSREEVLDEEEKVALQMIEELLNTN

SEQ ID NO: 30303 - DNA, 762 bp, Arabidopsis thaliana
  misc_feature (1)..(762): Ceres Seq. ID no. 13490575
  misc_feature (1)..(762): Ortholog of  Ceres SEQ ID NO 14313370 as cited in SEQ ID NO 67252
acctaccttctccaatctcttttcgatttcgaattttccatctttcgattctcagtagtttcgtctcaatttcataattccattgtagccgataatgaattccgctttagattttgcttttccggctacatttccggttaaatcgagttctgttggcggacatcggattgcttcccctggattcagttcccgcttaagattgtgctctcttcctccttcttcatctatcaaggctgagtcatgtttaaaaagagacgtgcacaggcaaagaagcagtcttgagtcaatgttctgttatgataaaccaataccagaggaaataatcgaggagccagttggattatccatgtcagagagagagattggtgataatcagcgttgcacttgttgtgaagctaaaggtgcattgctttgttccacttgttctggaactggtctatatgtagattccattatggagagtcaaggcatcattgttaaagtccgttgcttaggttgtggtggaagtggtaatattatgtgcaaactttgtggtgggcgtggtcacgtaggacactgatgactccgtgtttcacttgtttgcactcatggttctgttttacctattcgccactttttctagctctgatcttattgtaaaagcctacttttttgagttccatacatagatttgtgttcttgtactgatgtaatctctagctaaactatgcacaatcttgtcccagactattcattttctgttgttatataaaatggtttccc

SEQ ID NO: 30304 - protein, 154 aa, Arabidopsis thaliana
  peptide (1)..(154): Ceres Seq. ID no. 13490576
MNSALDFAFPATFPVKSSSVGGHRIASPGFSSRLRLCSLPPSSSIKAESCLKRDVHRQRSSLESMFCYDKPIPEEIIEEPVGLSMSEREIGDNQRCTCCEAKGALLCSTCSGTGLYVDSIMESQGIIVKVRCLGCGGSGNIMCKLCGGRGHVGH

SEQ ID NO: 30305 - protein, 90 aa, Arabidopsis thaliana
  peptide (1)..(90): Ceres Seq. ID no. 13490577
MFCYDKPIPEEIIEEPVGLSMSEREIGDNQRCTCCEAKGALLCSTCSGTGLYVDSIMESQGIIVKVRCLGCGGSGNIMCKLCGGRGHVGH

SEQ ID NO: 30306 - DNA, 1910 bp, Arabidopsis thaliana
  misc_feature (1)..(1910): Ceres Seq. ID no. 13509014
  misc_feature (1)..(1910): Ortholog of  Ceres SEQ ID NO 15177320 as cited in SEQ ID NO 52645
  misc_feature (1)..(1910): Ortholog of  Ceres SEQ ID NO 15171359 as cited in SEQ ID NO 57279
  misc_feature (1)..(1910): Ortholog of  Ceres SEQ ID NO 15168502 as cited in SEQ ID NO 60095
  misc_feature (1)..(1910): Ortholog of  Ceres SEQ ID NO 14314084 as cited in SEQ ID NO 63256
  misc_feature (1)..(1910): Ortholog of  Ceres SEQ ID NO 15169466 as cited in SEQ ID NO 66135
  misc_feature (1)..(1910): Ortholog of  Ceres SEQ ID NO 14303091 as cited in SEQ ID NO 66369
acttaactcatatcaaccttcgccggaaataatggctttcccgcgatttctttctctcctcgccgtcgtcactctctctcttttcctcaccaccactgatgcttcctctcgctctctatccactccacctaaaacgaacgtactcgacgtcgtttcatctctccagcaaacacaaactatcctctcactcgacccgactcgttcctcactcaccaccaccaaacccgaatccctatccgacccggttttcttcaattcatcttcaccactatctctagagcttcactctcgagacactttcgtcgcgtcacagcacaaagactacaaaagcttaacactcagtcgactcgagcgcgactcatcccgagtcgccggaatcgtcgcgaagatccgtttcgccgtcgaaggagtcgatagatccgatctcaaacccgtttacaacgaagatacacgataccaaaccgaggatctaacgacacctgtcgtctccggagcctctcaaggaagcggcgagtatttctcaagaatcggtgtcggaactccggcgaaagagatgtacttggttctcgacaccggaagcgacgtaaattggatccagtgtgaaccttgcgccgactgttaccaacagtccgacccggtttttaacccgacttcgtcttccacatacaaatctctcacttgctctgctccacagtgctctcttctcgaaacctccgcttgtcggtcaaacaaatgtctctaccaagttagttacggagacggatctttcaccgtcggtgaactcgctaccgatacggtgacgtttggtaactctggtaaaataaacaacgtcgctttgggttgtggtcacgacaacgaaggtctctttaccggagcagccggtttactcggtttaggcggtggtgttttatcgataaccaatcaaatgaaagcgacgtcgttttcttactgcctcgttgaccgtgactcgggaaagtcctcaagtcttgatttcaactcggtccaactcggtggcggagacgcgacggcgccgcttctacgtaacaaaaagatcgacactttctactacgtcggactcagtggattcagcgtcggtggtgaaaaagtcgtgctgcctgatgcgatcttcgatgtcgatgcttcgggaagcggaggagtgatcttggattgtggaaccgccgtgactcgtcttcagacgcaggcttataactcgctgcgtgacgcgtttcttaaactcaccgtgaatctcaaaaaaggatcttcgagcatctctctgttcgacacgtgttacgatttctcgtctctctccactgtgaaagtaccgacggttgcgtttcatttcacgggagggaagtcgcttgatttgccggcgaagaattatctgatccctgtggatgatagtggaacgttttgcttcgcttttgctccgacgtcgtcgtcgttgtcgatcatcgggaatgtgcagcagcaagggacacgtatcacttacgatctatccaaaaatgttatcggattgtcagggaataaatgctaaacatgtcaaagtagaaaaattaatagttttacgggtaatcagtaaaactttttatggtactagctagctacggtaacaagatgaaaacaaaatccttaagtgtgaatttttctaccttttttttaattaatcataagttattgtcgtcttttatcgaataataataggattaattaattttattataaagttgaaagtgttgttgtctcagcaagaagttttcagtagtgaagaagaagaagagtcaataaagtaagaagttacaaaaaagaagggtctttttgtaacaaaagtttagtcttcaaagaaacaaacagacttttgttgttgtggccctttaatgtccttcaatattttaaattatagtctgaatttt

SEQ ID NO: 30307 - protein, 510 aa, Arabidopsis thaliana
  peptide (1)..(510): Ceres Seq. ID no. 13509015
LNSYQPSPEIMAFPRFLSLLAVVTLSLFLTTTDASSRSLSTPPKTNVLDVVSSLQQTQTILSLDPTRSSLTTTKPESLSDPVFFNSSSPLSLELHSRDTFVASQHKDYKSLTLSRLERDSSRVAGIVAKIRFAVEGVDRSDLKPVYNEDTRYQTEDLTTPVVSGASQGSGEYFSRIGVGTPAKEMYLVLDTGSDVNWIQCEPCADCYQQSDPVFNPTSSSTYKSLTCSAPQCSLLETSACRSNKCLYQVSYGDGSFTVGELATDTVTFGNSGKINNVALGCGHDNEGLFTGAAGLLGLGGGVLSITNQMKATSFSYCLVDRDSGKSSSLDFNSVQLGGGDATAPLLRNKKIDTFYYVGLSGFSVGGEKVVLPDAIFDVDASGSGGVILDCGTAVTRLQTQAYNSLRDAFLKLTVNLKKGSSSISLFDTCYDFSSLSTVKVPTVAFHFTGGKSLDLPAKNYLIPVDDSGTFCFAFAPTSSSLSIIGNVQQQGTRITYDLSKNVIGLSGNKC

SEQ ID NO: 30308 - protein, 500 aa, Arabidopsis thaliana [sequence omitted]

SEQ ID NO: 30309 - protein, 326 aa, Arabidopsis thaliana
  peptide (1)..(326): Ceres Seq. ID no. 13509017
MYLVLDTGSDVNWIQCEPCADCYQQSDPVFNPTSSSTYKSLTCSAPQCSLLETSACRSNKCLYQVSYGDGSFTVGELATDTVTFGNSGKINNVALGCGHDNEGLFTGAAGLLGLGGGVLSITNQMKATSFSYCLVDRDSGKSSSLDFNSVQLGGGDATAPLLRNKKIDTFYYVGLSGFSVGGEKVVLPDAIFDVDASGSGGVILDCGTAVTRLQTQAYNSLRDAFLKLTVNLKKGSSSISLFDTCYDFSSLSTVKVPTVAFHFTGGKSLDLPAKNYLIPVDDSGTFCFAFAPTSSSLSIIGNVQQQGTRITYDLSKNVIGLSGNKC

SEQ ID NO: 30310 - DNA, 1448 bp, Arabidopsis thaliana
  misc_feature (1)..(1448): Ceres Seq. ID no. 13490608
  misc_feature (1)..(1448): Ortholog of  Ceres SEQ ID NO 12582068 as cited in SEQ ID NO 51073
  misc_feature (1)..(1448): Ortholog of  Ceres SEQ ID NO 14303255 as cited in SEQ ID NO 0
tgggagaagctattctcagattcacgacaccagttcgtcacaagcttcgagcccagctcggaaaacaaaattggaacttgctgcataaagtttagtttttttattgaatttggaaggatgattgggaatccagtaattcaagttccatcatcactaatgccatcatcctccatgattgcttgtcctcgagtttcacccaatggggttccttatcttccaccaaaacctagaactaggcatttagtggtcagagctgcatccaattccgatgctgctcatggtcaaccatcgtctgatggggggaagaatcctctcaccgttgttttggatgtgcccaggaatatatggagacagactttaaaacctttgagtgattttgggtttggtaagagaagtatttgggaaggtggtgttggtttgtttattgtctctggagctactcttcttgctcttagctgggcttggttgcgaggttttcaaatgcggtcgaagtttaggaaatatcagactgtgtttgagcttagtcatgcttctggtatttgcacgggaacaccggttaggatccgtggggttactgttggtacgattatccgtgttaatccttccttgaagaatattgaagctgttgctgagatagaagatgataagattattatcccgaggaattcattggttgaggtgaatcagtctggtcttctaatggaaactatgatcgacattatgcctaggaatccgataccagaaccttcagtaggacctctgcatcctgaatgtggtaaggaaggtctgatcgtttgtgataggcagacaataaaaggagtgcaaggagttagtttagatgaattagttggaattttcactcgtattggacgcgaagttgaggccattggtgttgccaatacgtattcgcttgctgagagagctgcttcggttattgaggaagcaaggccattgctcaaaaagattcaagccatggctgaagatgctcaacctttgctctctgagtttcgtgatagcggcttgctcaaggaagttgagtgtcttactcgaagccttacccaagcttctgacgatttgagaaaggttaattcgtcaattatgactcctgagaatacagaactcatacagaagtcaatctacactctggtttatactttgaagaacgtcgagagtataagctcagatattctgggattcacaggagatgaagccacaagaaaaaaccttaaactactcatcaaatccctaagcaggctactatgatcagcctgtagattttagactggataaataaaatccagaattttatggtaagcaagttttaaaaattcgaaaaatgtgttgtttcttctttagagttatttttgttttcgttttgtgttctgagattggggtttaatggagagacataattcagtttttataagaacaaaaatgtttgtttctct

SEQ ID NO: 30311 - protein, 420 aa, Arabidopsis thaliana
  peptide (1)..(420): Ceres Seq. ID no. 13490609
WEKLFSDSRHQFVTSFEPSSENKIGTCCIKFSFFIEFGRMIGNPVIQVPSSLMPSSSMIACPRVSPNGVPYLPPKPRTRHLVVRAASNSDAAHGQPSSDGGKNPLTVVLDVPRNIWRQTLKPLSDFGFGKRSIWEGGVGLFIVSGATLLALSWAWLRGFQMRSKFRKYQTVFELSHASGICTGTPVRIRGVTVGTIIRVNPSLKNIEAVAEIEDDKIIIPRNSLVEVNQSGLLMETMIDIMPRNPIPEPSVGPLHPECGKEGLIVCDRQTIKGVQGVSLDELVGIFTRIGREVEAIGVANTYSLAERAASVIEEARPLLKKIQAMAEDAQPLLSEFRDSGLLKEVECLTRSLTQASDDLRKVNSSIMTPENTELIQKSIYTLVYTLKNVESISSDILGFTGDEATRKNLKLLIKSLSRLL

SEQ ID NO: 30312 - protein, 381 aa, Arabidopsis thaliana
  peptide (1)..(381): Ceres Seq. ID no. 13490610
MIGNPVIQVPSSLMPSSSMIACPRVSPNGVPYLPPKPRTRHLVVRAASNSDAAHGQPSSDGGKNPLTVVLDVPRNIWRQTLKPLSDFGFGKRSIWEGGVGLFIVSGATLLALSWAWLRGFQMRSKFRKYQTVFELSHASGICTGTPVRIRGVTVGTIIRVNPSLKNIEAVAEIEDDKIIIPRNSLVEVNQSGLLMETMIDIMPRNPIPEPSVGPLHPECGKEGLIVCDRQTIKGVQGVSLDELVGIFTRIGREVEAIGVANTYSLAERAASVIEEARPLLKKIQAMAEDAQPLLSEFRDSGLLKEVECLTRSLTQASDDLRKVNSSIMTPENTELIQKSIYTLVYTLKNVESISSDILGFTGDEATRKNLKLLIKSLSRLL

SEQ ID NO: 30313 - protein, 368 aa, Arabidopsis thaliana
  peptide (1)..(368): Ceres Seq. ID no. 13490611
MPSSSMIACPRVSPNGVPYLPPKPRTRHLVVRAASNSDAAHGQPSSDGGKNPLTVVLDVPRNIWRQTLKPLSDFGFGKRSIWEGGVGLFIVSGATLLALSWAWLRGFQMRSKFRKYQTVFELSHASGICTGTPVRIRGVTVGTIIRVNPSLKNIEAVAEIEDDKIIIPRNSLVEVNQSGLLMETMIDIMPRNPIPEPSVGPLHPECGKEGLIVCDRQTIKGVQGVSLDELVGIFTRIGREVEAIGVANTYSLAERAASVIEEARPLLKKIQAMAEDAQPLLSEFRDSGLLKEVECLTRSLTQASDDLRKVNSSIMTPENTELIQKSIYTLVYTLKNVESISSDILGFTGDEATRKNLKLLIKSLSRLL

SEQ ID NO: 30314 - DNA, 1121 bp, Arabidopsis thaliana
  misc_feature (1)..(1121): Ceres Seq. ID no. 12377558
  misc_feature (1)..(1121): Ortholog of  Ceres SEQ ID NO 14307351 as cited in SEQ ID NO 54892
aaatcatctgatctttccctctctcagcaatgcatgatcttcgattttctatcagtgttcaaagctgaaaaaaatcgaactgggtctgttgatttcttcaggtctaaaatcagattagattagagaagaagaagaagaatgctggaagctgtagatagctcaggagtggtgaatggaggattcccgcagattcagagcttttacggcgattgcagtagtgaagaagagttatcggtattgccacgtcatacaaaagtggtggtcaccggaaacaaccggacgaaatcggtgcttgttggtcttcaaggtgttgtcaaaaaagctgtcggtctcggtggttggcattggctggttttgacaaatggaatagaagtaaagttgcagaggaatgcgcttagtgtccttgaacctcctactggaaacgaagaagacgatgatcttgatttcgaaaacacacagaggaatggctctgatatgacatctgaggacacactgaagcctcataagtcgaagctaagagggcagagatcatctcggtcatctcacaagacgatgagcaggtctctatcatctgactcgcaatcaaaaagttcgggttttactcctcctgaaaacatgaaggttgatcttagcaaattggaaatgcctgctttactgaattattggcgacattttaaccttgtggatgcaattccaaatccatcaaaggagcaactaattgacattgttcaaaggcacttcatgtctcagcaaatggatgagcttcaggttattgtggggtttgtccaagctgcaaagagaatgaagaaggcttgcaagtttcaatccaaagaatccagaaacactgatcttaactgcatcagctaaagaaaagccctgactcttaacaaatcctgtatgtacggtacatcaacttgtttaaccatttgtggcttgctaagtttagttcttctagtgatgtttggctaaagggtagatgttgtttcttctttgcttctgttgtttagccaatgtaagtaccatcaaaaaacccaaataactctctaaagctccctattggaaactatcttgtctgatacgatctggagtgaccggtatgttagaatgtaaatatgtttggt

SEQ ID NO: 30315 - protein, 242 aa, Arabidopsis thaliana; identical to SEQ ID NO: 24833
  peptide (1)..(242): Ceres Seq. ID no. 12377559

SEQ ID NO: 30316 - protein, 130 aa, Arabidopsis thaliana; identical to SEQ ID NO: 24834
  peptide (1)..(130): Ceres Seq. ID no. 12377560

SEQ ID NO: 30317 - DNA, 1066 bp, Arabidopsis thaliana
  misc_feature (1)..(1066): Ceres Seq. ID no. 13488512
  misc_feature (1)..(1066): Ortholog of  Ceres SEQ ID NO 15178847 as cited in SEQ ID NO 1145
  misc_feature (1)..(1066): Ortholog of  Ceres SEQ ID NO 14311253 as cited in SEQ ID NO 56483
  misc_feature (1)..(1066): Ortholog of  Ceres SEQ ID NO 13597435 as cited in SEQ ID NO 64073
  misc_feature (1)..(1066): Ortholog of  Ceres SEQ ID NO 13656209 as cited in SEQ ID NO 64393
aagactctgttttttcccaagatgtctggtttcctcttttgtttcgtccaaatctctactttttagggatcttgtccttctcttttctgctgattaaaaccctcgaatttgctccaattcgacgcgaaaaagggcattgagatggtgaatggagaatcatcaactagtacgtcttactctgatagtaacaatgacacaaatgatcaaggaggagactttgaatgtaacatttgtttcgaactagctcaagatccgattgtcactctctgtggccatctcttttgctggccttgcttataccgttggcttcaccaccattcacattctcaagaatgtccggtttgtaaagccgtggttcaagacgataagcttgttcctctttacggtagaggcaagaaccagactgacccgagatcaaaacgttatccgggtttacggattcctaaccgaccaacaggtcaaagacctgagactgctgctcctcctcctcagcctgaagctgcgagtaattttttcaactacggtattggtttgatgggtggaattatgccgatgatggcgactacgaggtttgggaatttcagtatggggtttggtggtttgttaccttctttgtttaactttcagtttcatggatttcatgatgctacgctttatggttcaacaccgggttatccttacggtggttatcataacggtttccgtggagttcctcctcgtggacaagagcgtcctatggctcgtggaggaaaccaaagtgatgcatttctgaagaatatcctcttttttgttggaatctgtgtggtgatatttctcatctggtgaaaacgaatcacatttggtgtatttccaggtatgatcaaacttacttacttggtgcaagttgtgtatgtaaatatggtaatagctgagtgtacttgtctgctatttcgacgttgttattgtatttttgttttgaagatgaaccgtgagtctacaagcttttttacacaactcttttgttgcttttgtgttttgtctaagcatcttatgaaaactagttgtgaaataaatggtgcgtgttatg

SEQ ID NO: 30318 - protein, 227 aa, Arabidopsis thaliana
  peptide (1)..(227): Ceres Seq. ID no. 13488513
MVNGESSTSTSYSDSNNDTNDQGGDFECNICFELAQDPIVTLCGHLFCWPCLYRWLHHHSHSQECPVCKAVVQDDKLVPLYGRGKNQTDPRSKRYPGLRIPNRPTGQRPETAAPPPQPEAASNFFNYGIGLMGGIMPMMATTRFGNFSMGFGGLLPSLFNFQFHGFHDATLYGSTPGYPYGGYHNGFRGVPPRGQERPMARGGNQSDAFLKNILFFVGICVVIFLIW

SEQ ID NO: 30319 - DNA, 934 bp, Arabidopsis thaliana
  misc_feature (1)..(934): Ceres Seq. ID no. 12340180
  misc_feature (1)..(934): Ortholog of  Ceres SEQ ID NO 13583408 as cited in SEQ ID NO 62616
  misc_feature (1)..(934): Ortholog of  Ceres SEQ ID NO 15179752 as cited in SEQ ID NO 63074
gttttgtcctccttctacgccgcacactatcttttcctctcactcagacttcctcttcatctcaagagaaatggctgaatccaaggtagtggttccagagtctgtgctaaagaagatcaagaggcaagaggaatgggcattggccaagaaagatgaagctgtagctgctaagaagaagagtgttgaggcccgcaagcttatcttcaagagagctgagcagtatgccaaagaatacgctgagaaggataacgagttgatccgattgaagcgggaggctaagttgaaaggaggtttctacgttgaccctgaggctaagttgctctttatcattcgtatccgtggtatcaatgccattgacccaaaaaccaagaagattctgcagctcctgcgtttgagacagatcttcaatggtgtgtttcttaaggtgaacaaggcaacagtaaacatgctgcgccgagttgaaccatacgtgacttacggatacccaaacttgaagagcgttaaggaactgatctacaaaagaggttatggaaagctgaaccaccagaggatagcacttactgacaactccattgtggatcaggctctcggaaagcatgggatcatctgcgttgaggatctcatccacgagatcatgactgttggacctcacttcaaggaagccaacaacttcctgtggccattccaattgaaggcaccactcggtggccttaagaagaagagaaaccactacgtcgaaggtggtgatgctggaaacagggagaatttcatcaacgagcttgtcaggagaatgaattgatgaaagcttccttctttatctttgcaaatttcaaagattttgggaccgagtttttttttttttttgttcaagttatcagagacttgtgatcttttatccgagataggctttttatgactaatcatgttattttcc

SEQ ID NO: 30320 - protein, 265 aa, Arabidopsis thaliana
  peptide (1)..(265): Ceres Seq. ID no. 12340181
FCPPSTPHTIFSSHSDFLFISREMAESKVVVPESVLKKIKRQEEWALAKKDEAVAAKKKSVEARKLIFKRAEQYAKEYAEKDNELIRLKREAKLKGGFYVDPEAKLLFIIRIRGINAIDPKTKKILQLLRLRQIFNGVFLKVNKATVNMLRRVEPYVTYGYPNLKSVKELIYKRGYGKLNHQRIALTDNSIVDQALGKHGIICVEDLIHEIMTVGPHFKEANNFLWPFQLKAPLGGLKKKRNHYVEGGDAGNRENFINELVRRMN

SEQ ID NO: 30321 - protein, 242 aa, Arabidopsis thaliana; identical to SEQ ID NO: 23649
  peptide (1)..(242): Ceres Seq. ID no. 12340182

SEQ ID NO: 30322 - DNA, 1512 bp, Arabidopsis thaliana
  misc_feature (1)..(1512): Ceres Seq. ID no. 13487654
  misc_feature (1)..(1512): Ortholog of  Ceres SEQ ID NO 15177652 as cited in SEQ ID NO 56858
tggcatgtgatatagaaatcaagatgggaagccaaggcatgagttcaccgagtcccttggtggtgaagaaatcgcaagtggttatagtgaaaccctcaaaggctacacctgatgtctctctttctctctccacactcgacaacgatccttatctcgaaaccctcgccaaaaccatctatgtctacgctccaccatccccaaacgaccacgtccacgatccagcttccctttttcagcaagctctctctgacgcccttgtctattactaccctctcgctggaaaacttcaccggggatcacacgaccatagactagaattgaggtgcagtcccgcggaaggagtcccctttgttagggcaaccgcagactgtactctctcttccctcaactatttgaaggacatggacactgacttataccaactcgtaccttgtgatgtagctgcgccctctggcgattacaaccctctggctttgcagatcactttgtttgcatgcggagggctcactcttgctacggccctctctcattccttgtgtgatggttttggagcgtctcagtttttcaaaaccttaactgagctcgccgcgggaaaaacacaacctagcatcatccccgtctgggacagacatcgtctcacttctaacaactttagcttaaacgaccaagtggaggagggacaagctcccaagctagttgattttggagaggcttgctcttctgcggcaacttctccctacacacccagcaacgacatggtatgtgagatcctcaacgtgacatccgaagatattactcagctcaaggagaaagttgcgggggtggtcacgactctagagattcttgcggcccacgtctggagagcaaggtgccgggccttgaagttaagtccagatgggacttctcttttcggaatggctgtgggtatacgccgcattgtggagccaccattaccggaagggtactacggaaacgcatttgtcaaagccaacgtagcaatgaaggctggagagttaagcaactcaccgttgtctcacgttgttcagctcattaaagaggcaaagaaagcggcacaggagaagaggtacgtgttggagcagttaagagagacagagaaaacgttgaagatgaatgtagcgtgtgaaggagggaaaggagcgttcatgttgcttactgattggaggcaacttggattgctagacgaaattgattttgggtatggaggatcagtgaatattataccattggtgcccaagtatctgccggatatttgtattttcttgccgaggaagcaaggtggtgttagagtgctagtcacgctgcccaaatctgtaatggtcaacttcaaggaacacataaatcccctaaatacatgaaattaataagcaggtgaatgtaattcacagtgtttctttaaaatatgaaaaggacctcatgcgattgtatatttaaagcttttgtttgctgtttgtttaagtttttcacatttggaaagtaatattttacaaaccg

SEQ ID NO: 30323 - protein, 457 aa, Arabidopsis thaliana
  peptide (1)..(457): Ceres Seq. ID no. 13487655
ACDIEIKMGSQGMSSPSPLVVKKSQVVIVKPSKATPDVSLSLSTLDNDPYLETLAKTIYVYAPPSPNDHVHDPASLFQQALSDALVYYYPLAGKLHRGSHDHRLELRCSPAEGVPFVRATADCTLSSLNYLKDMDTDLYQLVPCDVAAPSGDYNPLALQITLFACGGLTLATALSHSLCDGFGASQFFKTLTELAAGKTQPSIIPVWDRHRLTSNNFSLNDQVEEGQAPKLVDFGEACSSAATSPYTPSNDMVCEILNVTSEDITQLKEKVAGVVTTLEILAAHVWRARCRALKLSPDGTSLFGMAVGIRRIVEPPLPEGYYGNAFVKANVAMKAGELSNSPLSHVVQLIKEAKKAAQEKRYVLEQLRETEKTLKMNVACEGGKGAFMLLTDWRQLGLLDEIDFGYGGSVNIIPLVPKYLPDICIFLPRKQGGVRVLVTLPKSVMVNFKEHINPLNT

SEQ ID NO: 30324 - protein, 450 aa, Arabidopsis thaliana
  peptide (1)..(450): Ceres Seq. ID no. 13487656
MGSQGMSSPSPLVVKKSQVVIVKPSKATPDVSLSLSTLDNDPYLETLAKTIYVYAPPSPNDHVHDPASLFQQALSDALVYYYPLAGKLHRGSHDHRLELRCSPAEGVPFVRATADCTLSSLNYLKDMDTDLYQLVPCDVAAPSGDYNPLALQITLFACGGLTLATALSHSLCDGFGASQFFKTLTELAAGKTQPSIIPVWDRHRLTSNNFSLNDQVEEGQAPKLVDFGEACSSAATSPYTPSNDMVCEILNVTSEDITQLKEKVAGVVTTLEILAAHVWRARCRALKLSPDGTSLFGMAVGIRRIVEPPLPEGYYGNAFVKANVAMKAGELSNSPLSHVVQLIKEAKKAAQEKRYVLEQLRETEKTLKMNVACEGGKGAFMLLTDWRQLGLLDEIDFGYGGSVNIIPLVPKYLPDICIFLPRKQGGVRVLVTLPKSVMVNFKEHINPLNT

SEQ ID NO: 30325 - protein, 445 aa, Arabidopsis thaliana
  peptide (1)..(445): Ceres Seq. ID no. 13487657
MSSPSPLVVKKSQVVIVKPSKATPDVSLSLSTLDNDPYLETLAKTIYVYAPPSPNDHVHDPASLFQQALSDALVYYYPLAGKLHRGSHDHRLELRCSPAEGVPFVRATADCTLSSLNYLKDMDTDLYQLVPCDVAAPSGDYNPLALQITLFACGGLTLATALSHSLCDGFGASQFFKTLTELAAGKTQPSIIPVWDRHRLTSNNFSLNDQVEEGQAPKLVDFGEACSSAATSPYTPSNDMVCEILNVTSEDITQLKEKVAGVVTTLEILAAHVWRARCRALKLSPDGTSLFGMAVGIRRIVEPPLPEGYYGNAFVKANVAMKAGELSNSPLSHVVQLIKEAKKAAQEKRYVLEQLRETEKTLKMNVACEGGKGAFMLLTDWRQLGLLDEIDFGYGGSVNIIPLVPKYLPDICIFLPRKQGGVRVLVTLPKSVMVNFKEHINPLNT

SEQ ID NO: 30326 - DNA, 1190 bp, Arabidopsis thaliana
  misc_feature (1)..(1190): Ceres Seq. ID no. 12385283
  misc_feature (1)..(1190): Ortholog of  Ceres SEQ ID NO 15179676 as cited in SEQ ID NO 52442
  misc_feature (1)..(1190): Ortholog of  Ceres SEQ ID NO 13582807 as cited in SEQ ID NO 67806
agaaaccctaaaaatccttattgtagcagctggagcaatatatatcccaatttgccgcaactagggttttctcttcctcacgcaaagcaatacatcgcagtctcccactgattcagcagctctttgaactactcttcgacaatggccgaacgtggtggagaacgtggtgttgagcgtggtggagaacgtggtgatttcggacgaggattcggaggccgtggaggtcgtggagatcgtggagggcgtggacgtggaggccgtggtggtcgtcgtggagggcgtgccagtgaagaagagaaatgggttccagtgaccaagcttggtcgtctcgtggcggctggtcatatcaagcagatagagcagatctatcttcattcactcccggttaaggagtaccagatcattgatatgctcatcggtccaacattgaaggatgaggtaatgaaaatcatgccggttcagaaacaaaccagggctggtcaaaggactagattcaaggcctttgttgtcgttggagatggtaatggtcatgttgggttgggagtgaaatgctctaaggaagttgctacggccattagaggagcgattattctcgctaagctgtctgttgttccagtgaggagaggttactggggtaacaagattgggaagccacatacggttccttgtaaggtgactgggaagtgtggatctgtgacagtgaggatggttccagctcctagaggttctggtattgtggctgctagagttcctaagaaggttcttcaattcgctggaattgatgatgttttcacttcctccaggggatccaccaaaactcttggaaacttcgtcaaggctacattcgattgccttcagaagacttacggattccttaccccagagttctggaaggagacaagattctctagatcaccataccaagagcacactgatttcctggcgtccaaggctctttcgaccagcaaacccgacccagtggttgaagaccaagcctaaacaatgcttccaccttgtgttctttttggattataatccttcatgagttaattttggttgaacctttggtagtatatgttgctggattgtgcaccttctgttttcatctcctcttccaaactactttatttttgcttatggatcttaatgttctagttttgcttttacttttgttgagaaaagttaaatcc

SEQ ID NO: 30327 - protein, 285 aa, Arabidopsis thaliana
  peptide (1)..(285): Ceres Seq. ID no. 12385284
MAERGGERGVERGGERGDFGRGFGGRGGRGDRGGRGRGGRGGRRGGRASEEEKWVPVTKLGRLVAAGHIKQIEQIYLHSLPVKEYQIIDMLIGPTLKDEVMKIMPVQKQTRAGQRTRFKAFVVVGDGNGHVGLGVKCSKEVATAIRGAIILAKLSVVPVRRGYWGNKIGKPHTVPCKVTGKCGSVTVRMVPAPRGSGIVAARVPKKVLQFAGIDDVFTSSRGSTKTLGNFVKATFDCLQKTYGFLTPEFWKETRFSRSPYQEHTDFLASKALSTSKPDPVVEDQA

SEQ ID NO: 30328 - protein, 196 aa, Arabidopsis thaliana
  peptide (1)..(196): Ceres Seq. ID no. 12385285
MLIGPTLKDEVMKIMPVQKQTRAGQRTRFKAFVVVGDGNGHVGLGVKCSKEVATAIRGAIILAKLSVVPVRRGYWGNKIGKPHTVPCKVTGKCGSVTVRMVPAPRGSGIVAARVPKKVLQFAGIDDVFTSSRGSTKTLGNFVKATFDCLQKTYGFLTPEFWKETRFSRSPYQEHTDFLASKALSTSKPDPVVEDQA

SEQ ID NO: 30329 - protein, 185 aa, Arabidopsis thaliana
  peptide (1)..(185): Ceres Seq. ID no. 12385286
MKIMPVQKQTRAGQRTRFKAFVVVGDGNGHVGLGVKCSKEVATAIRGAIILAKLSVVPVRRGYWGNKIGKPHTVPCKVTGKCGSVTVRMVPAPRGSGIVAARVPKKVLQFAGIDDVFTSSRGSTKTLGNFVKATFDCLQKTYGFLTPEFWKETRFSRSPYQEHTDFLASKALSTSKPDPVVEDQA

SEQ ID NO: 30330 - DNA, 821 bp, Arabidopsis thaliana
  misc_feature (1)..(821): Ceres Seq. ID no. 12482404
  misc_feature (1)..(821): Ortholog of  Ceres SEQ ID NO 13595022 as cited in SEQ ID NO 51963
  misc_feature (1)..(821): Ortholog of  Ceres SEQ ID NO 15178123 as cited in SEQ ID NO 52030
  misc_feature (1)..(821): Ortholog of  Ceres SEQ ID NO 14302532 as cited in SEQ ID NO 56531
  misc_feature (1)..(821): Ortholog of  Ceres SEQ ID NO 13598382 as cited in SEQ ID NO 62325
  misc_feature (1)..(821): Ortholog of  Ceres SEQ ID NO 15173967 as cited in SEQ ID NO 63578
  misc_feature (1)..(821): Ortholog of  Ceres SEQ ID NO 13591023 as cited in SEQ ID NO 67961
  misc_feature (1)..(821): Ortholog of  Ceres SEQ ID NO 12637935 as cited in SEQ ID NO 0
agtggactctctgtctttttatgtattccttcacctaatctctcatcctttcttcatcggtcaacattttctcaaactctctctaatccataaaaatggaagcagtaacggcgattaagccacttatcagagtcgctgctctctctggttctctccggaaaacctccttccatactggtctcctccgcgctgcgattgatttgacgaaagaatcggttccgggattgcaaattgagtatatagatatatcaccgttaccgttaattaacacggatcttgaagtcaacggtacttatcctccagttgttgaagctttccgacagaagattcttgaagctgatagtatcttgtttgcttctcctgagtataacttctctgtttcagctccacttaagaatgctcttgactgggcttcaagaccacctaatgtttgggcggacaaaccagctgctattataagcaccggtggaggttttggtggaggaagatcgcagtaccatcttcgacaaatcggagtcttccttgatcttcatttcatcaacaaacccgagtttactctcaatgcatttcagccacctcagaaatttgatgcagaaggaaaccttgtcgatgaagtgactaaggagaggttgaaacaagtccttctctcgttacaagcattcacacttcgacttcaaggtaagtaaatgaagtggattaattcttgatcatttgagattggtcgtgtgataaaaataatgccaattgttgtgataataaacagtgtataacactctatttctcattcatttatgttttattaaacgattggtgaactggtg

SEQ ID NO: 30331 - protein, 196 aa, Arabidopsis thaliana
  peptide (1)..(196): Ceres Seq. ID no. 12482405
MEAVTAIKPLIRVAALSGSLRKTSFHTGLLRAAIDLTKESVPGLQIEYIDISPLPLINTDLEVNGTYPPVVEAFRQKILEADSILFASPEYNFSVSAPLKNALDWASRPPNVWADKPAAIISTGGGFGGGRSQYHLRQIGVFLDLHFINKPEFTLNAFQPPQKFDAEGNLVDEVTKERLKQVLLSLQAFTLRLQGK

SEQ ID NO: 30332 - DNA, 1033 bp, Arabidopsis thaliana
  misc_feature (1)..(1033): Ceres Seq. ID no. 12327338
  misc_feature (1)..(1033): Ortholog of  Ceres SEQ ID NO 14312391 as cited in SEQ ID NO 55070
agttctcagtttgtcaccatcctcgagcagcttttgagctttgaaggttcgaaaatggatcgaattgcgtctgcgactttctcttgccctgcgatttcattgtcccgcgtctgtagaatcagcccttttggcttaaacattaaaaccaaccatagaaagagattctcgtgtcgagtagctgtagcttctggagagacttcggccagggtcgtcgtcgacaatgaacttgacttagaacacaagaaacacgatctactgagagctgttcaagacactcaacgaggactcactgccacttctgatcaacgatctatcattgaggaggctctggtgactgtggaagggtttaatggcggtgaagaaattgatccagtgaagttagatggaacatggaggctacaatatacatctgcacctgatgttgttgttctgtttgaagctgcttcaagacttcccttctttcaggtagggcaggtctttcagaagtttgagtgcagagatagatccgacggtgggatcattcggaatgttgttcagtggagtcttccaagcttgttggaggagcaagaaggtgcaacacttgttgttaccgcgaaatttgataaggtctctagtcgaaacatctaccttcagtttgaagagataagtgttagaaacattaacatcaatgagcagcttcaagctcttatcgcacctgcaatacttccacgctcatttctaagcctacagcttttgcagtttatccgtactttcaaagctcagattccagtaaacgcaaccagcccaggaaggagatctgtaggtggattgtattacctatcgtatctcgataacaacatgcttttgggacggtctgtaggaggaggaggagtatttgtctttacaaaatctcaacccctcgagctgtgagcatcagacaaatctataaaactctgtttttgactgtataatcacagaaaaaagaagaacattatgttagcagattctgtttatgtacaatctattcgggttttattgaagatcttgtacaatt

SEQ ID NO: 30333 - protein, 302 aa, Arabidopsis thaliana
  peptide (1)..(302): Ceres Seq. ID no. 12327339
SSQFVTILEQLLSFEGSKMDRIASATFSCPAISLSRVCRISPFGLNIKTNHRKRFSCRVAVASGETSARVVVDNELDLEHKKHDLLRAVQDTQRGLTATSDQRSIIEEALVTVEGFNGGEEIDPVKLDGTWRLQYTSAPDVVVLFEAASRLPFFQVGQVFQKFECRDRSDGGIIRNVVQWSLPSLLEEQEGATLVVTAKFDKVSSRNIYLQFEEISVRNININEQLQALIAPAILPRSFLSLQLLQFIRTFKAQIPVNATSPGRRSVGGLYYLSYLDNNMLLGRSVGGGGVFVFTKSQPLEL

SEQ ID NO: 30334 - protein, 284 aa, Arabidopsis thaliana
  peptide (1)..(284): Ceres Seq. ID no. 12327340
MDRIASATFSCPAISLSRVCRISPFGLNIKTNHRKRFSCRVAVASGETSARVVVDNELDLEHKKHDLLRAVQDTQRGLTATSDQRSIIEEALVTVEGFNGGEEIDPVKLDGTWRLQYTSAPDVVVLFEAASRLPFFQVGQVFQKFECRDRSDGGIIRNVVQWSLPSLLEEQEGATLVVTAKFDKVSSRNIYLQFEEISVRNININEQLQALIAPAILPRSFLSLQLLQFIRTFKAQIPVNATSPGRRSVGGLYYLSYLDNNMLLGRSVGGGGVFVFTKSQPLEL

SEQ ID NO: 30335 - DNA, 1929 bp, Arabidopsis thaliana
  misc_feature (1)..(1929): Ceres Seq. ID no. 12324454
  misc_feature (1)..(1929): Ortholog of  Ceres SEQ ID NO 12635836 as cited in SEQ ID NO 0
  misc_feature (1)..(1929): Ortholog of  Ceres SEQ ID NO 13599004 as cited in SEQ ID NO 0
atcaatggctgcttttgcttctggtttggctataatcttcaactctccttcactaaaccctgtcacaactcaagcgaccttcctttcttcgaatcggattcgttcctctcctcgcgttttcagtggatttcacagcctccgacgtcgcggcttccggcgattctctcaaaatgttatccccgaccggtttaatagcttctcatgtaattgcttatccgccgtatccaccagcactatcgattacgagttcacggatggtggcaaagaggtggaattaagattgaggttaaagacaggtgagatactttctccaaaggatatatctgttgacgcagatggaacatcgttagccgttaaagaaaagcggaatggattgctgattacacttctagagactaaccatctctttgagaagattatgccctctgaaacaatatggtacatagacgaagatcagttggttgtgaatatgaagaaggtggatggggaattgaagtggcctgatattgtcgagtcctgggagtctttgactgcaggaatgatgcaacttcttaaaggtgcatcaatctacattgttggagattcaactgaaatcaaccaaaaagtgtctcgagagctagccgttggccttgggtacagtcctttagattcaaaggaattgctggaaagcttttccaagcaaacaatcgattcttggattcttgcagaagggccggattctgtagctgaagcagagagttcggtattggaaagcttgagcagccatgtgcgtactgttgtctcaactttgggaggtaaacatggagctgcggggagagctgatcagtggagacatctttactccggatttaccgtttgggtatcacagactgaagccacagatgaagagtcagctaaagaagaagcgaggagaagtaagcaagagagggagattgggtattcaaacgccgacgttgtggtgaagctccaaggttgggacccgacgcatgcaaagagcgtggctcaggcttccttgagtgcacttaagcaactgatcatctcagacaagggacttccaggtaagaagagtttgtacatacgcttgggatgccgtggcgattggcccaatataaaaccgccgggatgggatccatcgtctgacactggacctcatccacagtttacataaacagtgtcaagacatgctttttgctctctcctacaaacgaatgctcttgaagaaattttctgttattgttgtcattgtcaatggtatttaattgttaaagaagttgtatattggataatttgagaattgactaccaatctgagttttaaatggcacaaagcgcaccatggcacagagagtcctttagtgcgctatgtgccatggctcaccaaagcgcgcgctttttggatctgtggcgttctcttaacagattctctgcatatggttttagccttcaagcttatatcgtctatggtgttctatttagaaaaattagggattttacatcttctaactggttaaaatgtcgtgggttaagagagttttcgcctgaacacaagaggcgatcgctttgccaccttgtgcatcggccaaggctcacgtatggcgtgcgcatcatagatgtcgcctcgcctccacgtcttgttgccctattcttagagcatcggtgcgctatgcgccatggcacgccattagcgcgctttttaaaaccaaggattgaactgaaaactgctcctgctgattttcggtttccaacaacaaaccaaacgaggcactgcttcacccgttacattgagttccacaggtgcacaactgcaaaaggtgaggatgcaaatgaatgcgagaggttcgccaagtactaccgcgctctctgccctggggaatgggttgacaagtggaatgagcagagggagactggaacattccctggccctctttga

SEQ ID NO: 30336 - protein, 388 aa, Arabidopsis thaliana
  peptide (1)..(388): Ceres Seq. ID no. 12324455
SMAAFASGLAIIFNSPSLNPVTTQATFLSSNRIRSSPRVFSGFHSLRRRGFRRFSQNVIPDRFNSFSCNCLSAVSTSTIDYEFTDGGKEVELRLRLKTGEILSPKDISVDADGTSLAVKEKRNGLLITLLETNHLFEKIMPSETIWYIDEDQLVVNMKKVDGELKWPDIVESWESLTAGMMQLLKGASIYIVGDSTEINQKVSRELAVGLGYSPLDSKELLESFSKQTIDSWILAEGPDSVAEAESSVLESLSSHVRTVVSTLGGKHGAAGRADQWRHLYSGFTVWVSQTEATDEESAKEEARRSKQEREIGYSNADVVVKLQGWDPTHAKSVAQASLSALKQLIISDKGLPGKKSLYIRLGCRGDWPNIKPPGWDPSSDTGPHPQFT

SEQ ID NO: 30337 - protein, 387 aa, Arabidopsis thaliana
  peptide (1)..(387): Ceres Seq. ID no. 12324456
MAAFASGLAIIFNSPSLNPVTTQATFLSSNRIRSSPRVFSGFHSLRRRGFRRFSQNVIPDRFNSFSCNCLSAVSTSTIDYEFTDGGKEVELRLRLKTGEILSPKDISVDADGTSLAVKEKRNGLLITLLETNHLFEKIMPSETIWYIDEDQLVVNMKKVDGELKWPDIVESWESLTAGMMQLLKGASIYIVGDSTEINQKVSRELAVGLGYSPLDSKELLESFSKQTIDSWILAEGPDSVAEAESSVLESLSSHVRTVVSTLGGKHGAAGRADQWRHLYSGFTVWVSQTEATDEESAKEEARRSKQEREIGYSNADVVVKLQGWDPTHAKSVAQASLSALKQLIISDKGLPGKKSLYIRLGCRGDWPNIKPPGWDPSSDTGPHPQFT

SEQ ID NO: 30338 - protein, 249 aa, Arabidopsis thaliana
  peptide (1)..(249): Ceres Seq. ID no. 12324457
MPSETIWYIDEDQLVVNMKKVDGELKWPDIVESWESLTAGMMQLLKGASIYIVGDSTEINQKVSRELAVGLGYSPLDSKELLESFSKQTIDSWILAEGPDSVAEAESSVLESLSSHVRTVVSTLGGKHGAAGRADQWRHLYSGFTVWVSQTEATDEESAKEEARRSKQEREIGYSNADVVVKLQGWDPTHAKSVAQASLSALKQLIISDKGLPGKKSLYIRLGCRGDWPNIKPPGWDPSSDTGPHPQFT

SEQ ID NO: 30339 - DNA, 1267 bp, Arabidopsis thaliana
  misc_feature (1)..(1267): Ceres Seq. ID no. 13487841
  misc_feature (1)..(1267): Ortholog of  Ceres SEQ ID NO 15172792 as cited in SEQ ID NO 52134
  misc_feature (1)..(1267): Ortholog of  Ceres SEQ ID NO 13502622 as cited in SEQ ID NO 56443
  misc_feature (1)..(1267): Ortholog of  Ceres SEQ ID NO 12624901 as cited in SEQ ID NO 62597
aataatgtgttgcaaaagaggcaaactatacaacgtgaaagtggtaggtctaccagatcccataccctcattttaatggcggagattacaagggaaagagacaactccaattcaaagctctgattttttccaccaatccccattttttcccttttacaattcttaagctagttttatacttttcttcttcctttcatttgggttaagagaagccatggataccgagtttctccgaaccctagatcgtcagattcttttgggtgtcttcgttgctttcgtcgccgttggtgctggtgctgcttattttcttacatcctccaagaaacgcagagtgtgtttggatccagagaatttcaaggagttcaagcttgttaagagacatcagcttagtcacaatgtggccaagttcgtttttgaactcccaacttctacttctgtgttgggtcttcccattggacaacacatcagttgcaggggaaaggatggtcaaggagaggatgttattaagccatacaccccgactacgttagactctgacgttggacgtttcgaacttgtcattaagatgtatccgcaaggacggatgtctcatcatttcagggagatgcgtgttggagaccatcttgccgtaaagggaccaaagggtaggttcaagtatcaaccaggtcagtttagggcatttggaatgcttgctggaggttcaggcatcactcccatgttccaagtggccagagcaattctagaaaacccaacagacaagacaaaggtgcatctcatttacgccaacgtcacatacgacgacattctcttgaaggaagaattggagggtcttactaccaattaccctgaacaatttaaaatcttctatgttttgaaccagcctccggaagtatgggatggtggtgttggatttgtatcaaaggaaatgattcagactcattgccctgcacctgcatctgatattcagatcctaagatgcggaccaccgccaatgaacaaggccatggctgcaaaccttgaagctctgggatactctccggagatgcaattccagttctgatctgaatatcttcttttggttgctctgaaacggaactcataataatttagttacaatcccaactacgagagttgtgtcttaactgagtgagagttgtatttctgttgtgtgtttgttagcccacttgaaagtttccattgattggtttacgaattggttagacattttggttcacctataccggtttggtgcaaacactttgatgct

SEQ ID NO: 30340 - protein, 281 aa, Arabidopsis thaliana
  peptide (1)..(281): Ceres Seq. ID no. 13487842
MDTEFLRTLDRQILLGVFVAFVAVGAGAAYFLTSSKKRRVCLDPENFKEFKLVKRHQLSHNVAKFVFELPTSTSVLGLPIGQHISCRGKDGQGEDVIKPYTPTTLDSDVGRFELVIKMYPQGRMSHHFREMRVGDHLAVKGPKGRFKYQPGQFRAFGMLAGGSGITPMFQVARAILENPTDKTKVHLIYANVTYDDILLKEELEGLTTNYPEQFKIFYVLNQPPEVWDGGVGFVSKEMIQTHCPAPASDIQILRCGPPPMNKAMAANLEALGYSPEMQFQF

SEQ ID NO: 30341 - protein, 164 aa, Arabidopsis thaliana
  peptide (1)..(164): Ceres Seq. ID no. 13487843
MYPQGRMSHHFREMRVGDHLAVKGPKGRFKYQPGQFRAFGMLAGGSGITPMFQVARAILENPTDKTKVHLIYANVTYDDILLKEELEGLTTNYPEQFKIFYVLNQPPEVWDGGVGFVSKEMIQTHCPAPASDIQILRCGPPPMNKAMAANLEALGYSPEMQFQF

SEQ ID NO: 30342 - protein, 158 aa, Arabidopsis thaliana
  peptide (1)..(158): Ceres Seq. ID no. 13487844
MSHHFREMRVGDHLAVKGPKGRFKYQPGQFRAFGMLAGGSGITPMFQVARAILENPTDKTKVHLIYANVTYDDILLKEELEGLTTNYPEQFKIFYVLNQPPEVWDGGVGFVSKEMIQTHCPAPASDIQILRCGPPPMNKAMAANLEALGYSPEMQFQF

SEQ ID NO: 30343 - DNA, 1139 bp, Arabidopsis thaliana
  misc_feature (1)..(1139): Ceres Seq. ID no. 12396159
  misc_feature (1)..(1139): Ortholog of  Ceres SEQ ID NO 13598488 as cited in SEQ ID NO 63862
  misc_feature (1)..(1139): Ortholog of  Ceres SEQ ID NO 13659640 as cited in SEQ ID NO 67101
gactccattattatccctctctctacaaaaaaaacagtagagagagatatagagagcatcaatggcgtcgtcgtcaagactttgcgattcgtgcaaatcgacggcagcaactctattctgccgcgcagacgccgcgtttctctgcggcgactgcgacggtaagatccacacagctaacaaactcgcatcacgtcacgaacgagtttggctatgtgaagtatgcgaacaagcaccagcacacgtcacgtgcaaagctgacgccgctgcgttatgcgtcacgtgcgaccgtgatatccactcagctaatccactctctcgccgccacgagcgcgtaccaatcactcctttctacgacgctgtaggtccagcaaaatccgcttcctcctccgtcaatttcgtagatgaagatggcggtgacgtcactgcttcgtggcttttagctaaagaaggaatcgaaatcactaatttgttctccgatcttgattatccgaagattgaggtaacgtcggaggagaatagctccggtaacgacggagttgttcctgtgcagaataagttgtttcttaacgaagattacttcaatttcgatctctctgcttccaaaatttctcaacaaggattcaatttcatcaaccaaactgtttcgacgagaacgatagatgtaccgttggtgcctgaaagtggaggagtgacggcggagatgacgaacacggagacgccagctgtgcagttatcaccggcggagagggaagcaagggttttgaggtatagagagaagaggaagaatcggaaatttgagaagacgattaggtatgcgtcgcgtaaagcttacgctgagatgaggccgagaatcaaaggacgttttgctaagagaacagattcgagagagaatgatggtggagacgtcggagtttatggcggattcggtgttgttccgagtttctgatattttccggtgaaagaaacatggtagtagtatatcggttaatagcagattaaggataattaaaactaaaatgtttcctgatttaatcaggggctaagttattgttagaagattgttgttttttgaattaattctcacaattgtatcctaaattatatagtttacttaatgttgaactaataaattttgattt

SEQ ID NO: 30344 - protein, 294 aa, Arabidopsis thaliana
  peptide (1)..(294): Ceres Seq. ID no. 12396160
MASSSRLCDSCKSTAATLFCRADAAFLCGDCDGKIHTANKLASRHERVWLCEVCEQAPAHVTCKADAAALCVTCDRDIHSANPLSRRHERVPITPFYDAVGPAKSASSSVNFVDEDGGDVTASWLLAKEGIEITNLFSDLDYPKIEVTSEENSSGNDGVVPVQNKLFLNEDYFNFDLSASKISQQGFNFINQTVSTRTIDVPLVPESGGVTAEMTNTETPAVQLSPAEREARVLRYREKRKNRKFEKTIRYASRKAYAEMRPRIKGRFAKRTDSRENDGGDVGVYGGFGVVPSF

SEQ ID NO: 30345 - DNA, 1082 bp, Arabidopsis thaliana
  misc_feature (1)..(1082): Ceres Seq. ID no. 13500301
  misc_feature (1)..(1082): Ortholog of  Ceres SEQ ID NO 13599324 as cited in SEQ ID NO 0
gatgaagaagaaggtggtgaacttgtatttggaggtgttgatccaaatcatttcaagggcaaacatacatatgttcctgtgacacaaaagggctactggcagtttgacatgggtgatgttcttattggcggtgcacccactgggttctgtgaaagtggctgttctgcgatagcagattctggtacatctttgcttgccggtccaacgactataatcaccatgataaaccatgctattggagcagctggagttgttagccagcagtgcaagactgttgtggatcaatacgggcagaccattttggatttacttttgtctgagacccaaccgaagaaaatctgctcgcagattggtctgtgtacttttgatggtacccgtggtgtcagtatgggcattgagtcggtggtggacaaggaaaacgccaaattgtctaatggtgttggagatgctgcgtgttctgcatgtgagatggctgttgtgtggatccagagccagttgaggcaaaacatgactcaagagcgcatattgaactacgtcaacgagctatgtgaacgcctccccagcccaatgggagagtctgcagttgactgtgcacaactgtcaacaatgcccactgtttcacttaccattggaggcaaagtatttgatcttgctccagaagagtatgttctgaaagttggtgagggacctgtggcacagtgcatcagtggttttattgctcttgacgttgctccacctcgtggacctctctggatcttgggagatgtgttcatgggcaaataccacaccgtatttgactttggtaacgaacaggtcgggtttgcagaggcagcctaaacacgatctggttggtgtcgcgtatggttttagtatgaacaatctgcgtctcaagtgttgtttgtatgttttctggagttgaggactttgagtcgtagtagaaatggtggcgcagttccttttaagttgtttcctaacgaaaaaaggcctttgtagttttgaaggcattggctttgtaaataccttctaagtaagttcgatggtgaaaaaactgaaaactttaataaagcctgcctcttttgttt

SEQ ID NO: 30346 - protein, 278 aa, Arabidopsis thaliana
  peptide (1)..(278): Ceres Seq. ID no. 13500302
DEEEGGELVFGGVDPNHFKGKHTYVPVTQKGYWQFDMGDVLIGGAPTGFCESGCSAIADSGTSLLAGPTTIITMINHAIGAAGVVSQQCKTVVDQYGQTILDLLLSETQPKKICSQIGLCTFDGTRGVSMGIESVVDKENAKLSNGVGDAACSACEMAVVWIQSQLRQNMTQERILNYVNELCERLPSPMGESAVDCAQLSTMPTVSLTIGGKVFDLAPEEYVLKVGEGPVAQCISGFIALDVAPPRGPLWILGDVFMGKYHTVFDFGNEQVGFAEAA

SEQ ID NO: 30347 - protein, 242 aa, Arabidopsis thaliana
  peptide (1)..(242): Ceres Seq. ID no. 13500303
MGDVLIGGAPTGFCESGCSAIADSGTSLLAGPTTIITMINHAIGAAGVVSQQCKTVVDQYGQTILDLLLSETQPKKICSQIGLCTFDGTRGVSMGIESVVDKENAKLSNGVGDAACSACEMAVVWIQSQLRQNMTQERILNYVNELCERLPSPMGESAVDCAQLSTMPTVSLTIGGKVFDLAPEEYVLKVGEGPVAQCISGFIALDVAPPRGPLWILGDVFMGKYHTVFDFGNEQVGFAEAA

SEQ ID NO: 30348 - protein, 205 aa, Arabidopsis thaliana
  peptide (1)..(205): Ceres Seq. ID no. 13500304
MINHAIGAAGVVSQQCKTVVDQYGQTILDLLLSETQPKKICSQIGLCTFDGTRGVSMGIESVVDKENAKLSNGVGDAACSACEMAVVWIQSQLRQNMTQERILNYVNELCERLPSPMGESAVDCAQLSTMPTVSLTIGGKVFDLAPEEYVLKVGEGPVAQCISGFIALDVAPPRGPLWILGDVFMGKYHTVFDFGNEQVGFAEAA

SEQ ID NO: 30349 - DNA, 962 bp, Arabidopsis thaliana
  misc_feature (1)..(962): Ceres Seq. ID no. 12322291
  misc_feature (1)..(962): Ortholog of  Ceres SEQ ID NO 13594296 as cited in SEQ ID NO 57764
acacataacacacacacatcttcttcctctctttatcttcttcttctctgtttctctaagaagatagaacaatcccaagattctcctcttatttgatcaaccatgtcgaatgtcttgctatccccaaacggctacgtatttgcatcgcctaaacctcttggcagattcatcaattcaaagtccggcggacggaaacttttcttctccgtcgttagagcttcttccgatgatgctgattgtaatgccgaagaatgtgctcccgagaaggaggtaggaacagtgagtatggaatggttagctggagagaagacgaaagtggtgggaacatttcctcctcggaagccgcgtggttggactggctatgttgagaaagatactgctggtcagactaatgtttactccattgagcctgcagtatatgttgcagagagcgcgattagctcaggtactgcaggatcatcggctgatggggctgagaacacagcagcaatcgtagcaggcattgctcttatcgcagtcgctgcagcttcctctatactcctccaagtcgggaaagatgccccaactcgacccaaagcagtggattacagtggaccgtctcttagctactacatcaacaagttcaagccttctgaaattgttcaaccttctaccccctccgtcacagaagccccaccggtggccgagctagaaacttcactgccagaaactccatcggtggctcagcaagaaacctcactgccggaaactatggctagtgaggctcagccagaggcgtcttctgttccaacaacaagtagtacctcttaggggcttagcctaggattatatctttgtgtaaaaatgagatgaagcatataccaagattatgcattctgttaatattcggatatacctatatgtatgtatacactctgtcactcttctctttgagtgaatgattatatcaaatctcaaatccc

SEQ ID NO: 30350 - protein, 235 aa, Arabidopsis thaliana
  peptide (1)..(235): Ceres Seq. ID no. 12322292
MSNVLLSPNGYVFASPKPLGRFINSKSGGRKLFFSVVRASSDDADCNAEECAPEKEVGTVSMEWLAGEKTKVVGTFPPRKPRGWTGYVEKDTAGQTNVYSIEPAVYVAESAISSGTAGSSADGAENTAAIVAGIALIAVAAASSILLQVGKDAPTRPKAVDYSGPSLSYYINKFKPSEIVQPSTPSVTEAPPVAELETSLPETPSVAQQETSLPETMASEAQPEASSVPTTSSTS

SEQ ID NO: 30351 - protein, 174 aa, Arabidopsis thaliana
  peptide (1)..(174): Ceres Seq. ID no. 12322293
MEWLAGEKTKVVGTFPPRKPRGWTGYVEKDTAGQTNVYSIEPAVYVAESAISSGTAGSSADGAENTAAIVAGIALIAVAAASSILLQVGKDAPTRPKAVDYSGPSLSYYINKFKPSEIVQPSTPSVTEAPPVAELETSLPETPSVAQQETSLPETMASEAQPEASSVPTTSSTS

SEQ ID NO: 30352 - DNA, 1886 bp, Arabidopsis thaliana
  misc_feature (1)..(1886): Ceres Seq. ID no. 13492392
  misc_feature (1)..(1886): Ortholog of  Ceres SEQ ID NO 14303109 as cited in SEQ ID NO 66330
aacacaaaacagtaatctctctagactacaactttactcacttcaccagctctcacttgatgacaatgggcgactctgacctccgtaaacctaccaatttcggcaccggacatctatctcgccgacgatcatggtgttgctctttcgccgtacctccagcgagtcctgatgctcgttcgatttcatctcgtaaccacattccagctaaatctcagcagcagagacctaaactggttccttgctcaccgcaaagctctaaatctgctttaaacatcgtaaatcggatcgacccgcgtcggatcttatcaccgggtcgggtttctcccatagattcggatccgaccttcactacaatgcaagaagctgataccactcaggaagaagaagatgatgcggttgttgtagattcgacaccgaatctgcgttctgagagttatagagctccgaagattgaggttacgggttcgggtttgagtgagggttacgatgctaggttgagtttgaagggaagaaatggtggtggggttttggtgttggagcttagctcggaggttttggctgcgaattcggatgtgttctcgggtttgattgcggaggagaagaagtgttcttcttcttcttcatcgtctttaggattgaagaacacatgcaggattgaagtatgtgatgtggagaatcttggtgtttttagggaaactgttgagctcatgtttgaggagagtaatgttattatcaagaagtttatgaaaatgggtgtctacagagccattgatgtacttgaggtagcgactggaatcaaattttcaagagctgtcttatcgtgtctgaaatatcttgaagctgttccttggacagaggatgaagaggaaaaactgaggagacttcttggaatttatagctttgatgatgctgcagttagtgaaattttggcaagatttaattcaaacgagacagaaaactcgcaagacagtttatcgaagaaactggtttggtcaattacttcctgtagtgatgtaaatcctagaaacgaactcaaatctttggtgaagggtcttctttgcaaaagctcagtgtacgagaaagaacagcctgagatcaacaaggaagacatatatagagcaggcaagtgttgtgtggattcattagctaagctgtttgaagagggcagtagtagtagtagtagcaataaagaaaagccattgattgaaagtatttcgagggaggttgagaacataaactggctgctggagatcatgatagatcgggaaatagcagaagaatttgtggagatatgggggaagcaaagaaggctagtggagatgcatgagagagtgtcaccaatggtgaggtatgaagtaagcagagtaacaggagcgatatttattgcaatggggaaaaggagagtgcaatgcggaggagaagcaagggcggggctagtagaagtgtggttcaagccaatgttagtagattttgggtggctacagagatgcaagaagggactagacatgagggaagtagaagaagggatggggcaaacgctgttaacactaccagtaaaacagcagtatcaagtgttcatggaatggttcaggtggttctcaaagcatgggactgagtgccctaatctcagcaaggcgtttcagatatggtggcgtaggtcattccttagaggtgtagaatcatctacttgtaggtaaacaaattattccaagtgttcaagaggctatgtatgttaggtttaagcttttatggaaatttagactgtaatataattctctccttttgtctcctcccacatgatatgttcgtttcggatgttttttggagctaaatcagtcgtaaggtttgaaaaagcaagtacaaaacacaaactggtactttcttcc

SEQ ID NO: 30353 - protein, 564 aa, Arabidopsis thaliana
  peptide (1)..(564): Ceres Seq. ID no. 15222883
HKTVISLDYNFTHFTSSHLMTMGDSDLRKPTNFGTGHLSRRRSWCCSFAVPPASPDARSISSRNHIPAKSQQQRPKLVPCSPQSSKSALNIVNRIDPRRILSPGRVSPIDSDPTFTTMQEADTTQEEEDDAVVVDSTPNLRSESYRAPKIEVTGSGLSEGYDARLSLKGRNGGGVLVLELSSEVLAANSDVFSGLIAEEKKCSSSSSSSLGLKNTCRIEVCDVENLGVFRETVELMFEESNVIIKKFMKMGVYRAIDVLEVATGIKFSRAVLSCLKYLEAVPWTEDEEEKLRRLLGIYSFDDAAVSEILARFNSNETENSQDSLSKKLVWSITSCSDVNPRNELKSLVKGLLCKSSVYEKEQPEINKEDIYRAGKCCVDSLAKLFEEGSSSSSSNKEKPLIESISREVENINWLLEIMIDREIAEEFVEIWGKQRRLVEMHERVSPMVRYEVSRVTGAIFIAMGKRRVQCGGEARAGLVEVWFKPMLVDFGWLQRCKKGLDMREVEEGMGQTLLTLPVKQQYQVFMEWFRWFSKHGTECPNLSKAFQIWWRRSFLRGVESSTCR

SEQ ID NO: 30354 - protein, 545 aa, Arabidopsis thaliana
  peptide (1)..(545): Ceres Seq. ID no. 15222884
MTMGDSDLRKPTNFGTGHLSRRRSWCCSFAVPPASPDARSISSRNHIPAKSQQQRPKLVPCSPQSSKSALNIVNRIDPRRILSPGRVSPIDSDPTFTTMQEADTTQEEEDDAVVVDSTPNLRSESYRAPKIEVTGSGLSEGYDARLSLKGRNGGGVLVLELSSEVLAANSDVFSGLIAEEKKCSSSSSSSLGLKNTCRIEVCDVENLGVFRETVELMFEESNVIIKKFMKMGVYRAIDVLEVATGIKFSRAVLSCLKYLEAVPWTEDEEEKLRRLLGIYSFDDAAVSEILARFNSNETENSQDSLSKKLVWSITSCSDVNPRNELKSLVKGLLCKSSVYEKEQPEINKEDIYRAGKCCVDSLAKLFEEGSSSSSSNKEKPLIESISREVENINWLLEIMIDREIAEEFVEIWGKQRRLVEMHERVSPMVRYEVSRVTGAIFIAMGKRRVQCGGEARAGLVEVWFKPMLVDFGWLQRCKKGLDMREVEEGMGQTLLTLPVKQQYQVFMEWFRWFSKHGTECPNLSKAFQIWWRRSFLRGVESSTCR

SEQ ID NO: 30355 - protein, 543 aa, Arabidopsis thaliana
  peptide (1)..(543): Ceres Seq. ID no. 15222885
MGDSDLRKPTNFGTGHLSRRRSWCCSFAVPPASPDARSISSRNHIPAKSQQQRPKLVPCSPQSSKSALNIVNRIDPRRILSPGRVSPIDSDPTFTTMQEADTTQEEEDDAVVVDSTPNLRSESYRAPKIEVTGSGLSEGYDARLSLKGRNGGGVLVLELSSEVLAANSDVFSGLIAEEKKCSSSSSSSLGLKNTCRIEVCDVENLGVFRETVELMFEESNVIIKKFMKMGVYRAIDVLEVATGIKFSRAVLSCLKYLEAVPWTEDEEEKLRRLLGIYSFDDAAVSEILARFNSNETENSQDSLSKKLVWSITSCSDVNPRNELKSLVKGLLCKSSVYEKEQPEINKEDIYRAGKCCVDSLAKLFEEGSSSSSSNKEKPLIESISREVENINWLLEIMIDREIAEEFVEIWGKQRRLVEMHERVSPMVRYEVSRVTGAIFIAMGKRRVQCGGEARAGLVEVWFKPMLVDFGWLQRCKKGLDMREVEEGMGQTLLTLPVKQQYQVFMEWFRWFSKHGTECPNLSKAFQIWWRRSFLRGVESSTCR

SEQ ID NO: 30356 - DNA, 1999 bp, Arabidopsis thaliana; identical to SEQ ID NO: 26468
  misc_feature (1)..(1999): Ceres Seq. ID no. 12327028
  misc_feature (1)..(1999): Ortholog of  Ceres SEQ ID NO 14314404 as cited in SEQ ID NO 57421
  misc_feature (1)..(1999): Ortholog of  Ceres SEQ ID NO 13493536 as cited in SEQ ID NO 58515
  misc_feature (1)..(1999): Ortholog of  Ceres SEQ ID NO 12618461 as cited in SEQ ID NO 64349

SEQ ID NO: 30357 - protein, 567 aa, Arabidopsis thaliana; identical to SEQ ID NO: 26469
  peptide (1)..(567): Ceres Seq. ID no. 12327029

SEQ ID NO: 30358 - protein, 530 aa, Arabidopsis thaliana; identical to SEQ ID NO: 26470
  peptide (1)..(530): Ceres Seq. ID no. 12327030

SEQ ID NO: 30359 - protein, 394 aa, Arabidopsis thaliana; identical to SEQ ID NO: 26471
  peptide (1)..(394): Ceres Seq. ID no. 12327031

SEQ ID NO: 30360 - DNA, 613 bp, Arabidopsis thaliana
  misc_feature (1)..(613): Ceres Seq. ID no. 12579948
  misc_feature (1)..(613): Ortholog of  Ceres SEQ ID NO 14303201 as cited in SEQ ID NO 67304
catctgggttggtgatcactgatggcgtggagcttacagaactaaacagcccaagagataaagtatttgtgtggctagttggacccttactgataatgaaggagcagataaaaaacctgaagcttactgaggatgaagagttttgtctgaggaaattggtaatggtatgcaaaaatgaaagaaccgaggactgggacaacaccgggttcccgtcaagtgatacagtaagaaaagcacaattgcaagccataatcagaaggctgcaaggaatggtagcatcaatgtctagaataccaacgtttcgacgcagattcatgaacttggttaaagtgttgtacatagaagctcttgaaatgggtgcatcaggtaatcgagctggtgggatacttaaacccaacagcgaccaaacaggaaatctggatcggactgaaacaccggacatggatgttgtctaagtagttatgatatcttgtctttttccttcttccctctgtctaagcggtttcagtagtattttaggatttgttttatattccaatatgtatgttaattaaatcctcaaaaagagcactctttgtcaagaataacatatattcataactttactttaatc

SEQ ID NO: 30361 - protein, 150 aa, Arabidopsis thaliana
  peptide (1)..(150): Ceres Seq. ID no. 12579949
SGLVITDGVELTELNSPRDKVFVWLVGPLLIMKEQIKNLKLTEDEEFCLRKLVMVCKNERTEDWDNTGFPSSDTVRKAQLQAIIRRLQGMVASMSRIPTFRRRFMNLVKVLYIEALEMGASGNRAGGILKPNSDQTGNLDRTETPDMDVV

SEQ ID NO: 30362 - protein, 119 aa, Arabidopsis thaliana
  peptide (1)..(119): Ceres Seq. ID no. 12579950
MKEQIKNLKLTEDEEFCLRKLVMVCKNERTEDWDNTGFPSSDTVRKAQLQAIIRRLQGMVASMSRIPTFRRRFMNLVKVLYIEALEMGASGNRAGGILKPNSDQTGNLDRTETPDMDVV

SEQ ID NO: 30363 - protein, 97 aa, Arabidopsis thaliana
  peptide (1)..(97): Ceres Seq. ID no. 12579951
MVCKNERTEDWDNTGFPSSDTVRKAQLQAIIRRLQGMVASMSRIPTFRRRFMNLVKVLYIEALEMGASGNRAGGILKPNSDQTGNLDRTETPDMDVV

SEQ ID NO: 30364 - DNA, 720 bp, Arabidopsis thaliana
  misc_feature (1)..(720): Ceres Seq. ID no. 12389149
  misc_feature (1)..(720): Ortholog of  Ceres SEQ ID NO 12609656 as cited in SEQ ID NO 51891
  misc_feature (1)..(720): Ortholog of  Ceres SEQ ID NO 13664337 as cited in SEQ ID NO 61267
  misc_feature (1)..(720): Ortholog of  Ceres SEQ ID NO 15224278 as cited in SEQ ID NO 63590
  misc_feature (1)..(720): Ortholog of  Ceres SEQ ID NO 12635152 as cited in SEQ ID NO 0
acaggcggagaaatcaaaatcttttgattcttacttctacgatttgtgtttcctcaaacccaaatgtctcgtctcccgattttaatcgcttcgtttctcttcctctcttcacgcgccgtcgccgtcactgccgtagaatccgatactccgacggcgtattcactcctccaaagctacaacttccccgtcggaatccttccaaaaggagtcgtagcttatgatttagacacaacgacaggcaaattccatgcgtatttcaacgattcatgtagcttcaatcttgttggttcttaccaattgaattacaaatcaacaatcagtggttacatctccgagaacaagctcaagaaattgactggtgttaaagtcaaagttttgttcttgtggcttaacatcgtcgaggttattagaaacggtgacgagatggagttttccgttgggatcacatcggcgaatttcgcgatccaagagtttttggaatcgcctcagtgtggttgtggctttgagtgcaaggattcgaaattggacatgattgagagaaacccttttgtttcttcgtcttgaaattgaaaaaggtacaatctttttttgtaatttgtccccaaaaaatcttacctttcgaaaagatcgcatcttttatgtattgtccaataatatgagcgtagtgtctggaatttgtaattgtttactttagttctatttattggattcaagttctgc

SEQ ID NO: 30365 - protein, 166 aa, Arabidopsis thaliana
  peptide (1)..(166): Ceres Seq. ID no. 12389150
MSRLPILIASFLFLSSRAVAVTAVESDTPTAYSLLQSYNFPVGILPKGVVAYDLDTTTGKFHAYFNDSCSFNLVGSYQLNYKSTISGYISENKLKKLTGVKVKVLFLWLNIVEVIRNGDEMEFSVGITSANFAIQEFLESPQCGCGFECKDSKLDMIERNPFVSSS

SEQ ID NO: 30366 - DNA, 710 bp, Arabidopsis thaliana
  misc_feature (1)..(710): Ceres Seq. ID no. 12332093
  misc_feature (1)..(710): Ortholog of  Ceres SEQ ID NO 13598617 as cited in SEQ ID NO 65391
  misc_feature (1)..(710): Ortholog of  Ceres SEQ ID NO 13623093 as cited in SEQ ID NO 0
atcttgtcgaagcacacttctctgtttcaggagaacaatggcttcgacggctacgaacactgatttcttcaagactttgctttctcctttctcaaatgggaatgcggcgcaacgaagtagtagacagaacattgtttggttaaatcggaagcaatctggaaataataacagatctcttcgtgttaatggattattcggaggcggaaaaaaggacaataaagaggatggacaatcaaaggcaggaattctaggtaacatgcagaatttgtatgagacagtgaagaaagctcaaatggttgttcaagtagaggctgttagagtgcagaaggagcttgctgttgctgaatttgatggttattgtcaaggcgagcttgtcaaggttacattatcaggtaaccagcaaccaattcgcactgatatcactgatgcagcaatggagttaggttctgaaaaactttcactgctggtcacagaagcatacaaagacgcacattcaaagagtgtactggctatgaaagaaagaatgagtgatcttgcgcagagcttagggatgccaccaggccttgatggattaaagtaacaaaacttaatcttttttgtgatttctttcaacttataggtatgagaagtccagttctttttgttgtatatcgatcaggcagagagaaatagagctctgttctactgaatcagagagagatatttgaacc

SEQ ID NO: 30367 - protein, 192 aa, Arabidopsis thaliana
  peptide (1)..(192): Ceres Seq. ID no. 12332094
SCRSTLLCFRRTMASTATNTDFFKTLLSPFSNGNAAQRSSRQNIVWLNRKQSGNNNRSLRVNGLFGGGKKDNKEDGQSKAGILGNMQNLYETVKKAQMVVQVEAVRVQKELAVAEFDGYCQGELVKVTLSGNQQPIRTDITDAAMELGSEKLSLLVTEAYKDAHSKSVLAMKERMSDLAQSLGMPPGLDGLK

SEQ ID NO: 30368 - protein, 180 aa, Arabidopsis thaliana
  peptide (1)..(180): Ceres Seq. ID no. 12332095
MASTATNTDFFKTLLSPFSNGNAAQRSSRQNIVWLNRKQSGNNNRSLRVNGLFGGGKKDNKEDGQSKAGILGNMQNLYETVKKAQMVVQVEAVRVQKELAVAEFDGYCQGELVKVTLSGNQQPIRTDITDAAMELGSEKLSLLVTEAYKDAHSKSVLAMKERMSDLAQSLGMPPGLDGLK

SEQ ID NO: 30369 - protein, 107 aa, Arabidopsis thaliana
  peptide (1)..(107): Ceres Seq. ID no. 12332096
MQNLYETVKKAQMVVQVEAVRVQKELAVAEFDGYCQGELVKVTLSGNQQPIRTDITDAAMELGSEKLSLLVTEAYKDAHSKSVLAMKERMSDLAQSLGMPPGLDGLK

SEQ ID NO: 30370 - DNA, 958 bp, Arabidopsis thaliana
  misc_feature (1)..(958): Ceres Seq. ID no. 13489828
  misc_feature (1)..(958): Ortholog of  Ceres SEQ ID NO 12473977 as cited in SEQ ID NO 133
  misc_feature (1)..(958): Ortholog of  Ceres SEQ ID NO 12585294 as cited in SEQ ID NO 63023
agatcttaaatcgatgcaaaagaaaacgataaatctcgtttggttaaaaaattaaccagaaaacgagatctgacttctaacttctacttctacttagatctcctcaaaattcaaatcggaaaaaagtttgagaaaaatctcgatgaagaagaagatgattccgacgacgatcttactctcagctctcattttctctctatcaccgatctgtgaagctgtgtggcttactgtacctcacaccggatcaaagtgcgtctccgaagaaatccaaagcaacgtcatcgttttagctgattaccttgttatctccgaggaacattctatcttccctactgtctccgttaaggttacagcaccttatggcaccgtgttacaccacagggaaaatacaacaaacggtcagtttgcattcacaacccaagaatcaggaacttacttggcgtgttttgaggccgatgctaaaagtcatggtaacaaagattttagcatcaacatcgactggaaaactggaatcgcagctaaagattgggactccattgctagaaaagaaaagatcgagggtgtagagctggagtttaagaaacttgaaggtgcagttgaagcaatccatgaaaatctgatttacctcagaaacagagaagcagagatgaggattgtgagtgaaaaaacaaactcgagagtcgcatggtacagtataatgtcgctggggatttgcattgtggtctctggtttacagattttgtacttgaagcaatactttgaaaagaagaagcttatttagatcatggatagtttcttgttgaagattactagaaccaacagtttgctctgctttctttctcttgatcttctctttggaactgttagtgtaaaattttgttcactcatttaacttgtaatttgtctcctattattacatataacatataactagactctaattataggaattgcaact

SEQ ID NO: 30371 - protein, 212 aa, Arabidopsis thaliana
  peptide (1)..(212): Ceres Seq. ID no. 13489829
MKKKMIPTTILLSALIFSLSPICEAVWLTVPHTGSKCVSEEIQSNVIVLADYLVISEEHSIFPTVSVKVTAPYGTVLHHRENTTNGQFAFTTQESGTYLACFEADAKSHGNKDFSINIDWKTGIAAKDWDSIARKEKIEGVELEFKKLEGAVEAIHENLIYLRNREAEMRIVSEKTNSRVAWYSIMSLGICIVVSGLQILYLKQYFEKKKLI

SEQ ID NO: 30372 - protein, 208 aa, Arabidopsis thaliana
  peptide (1)..(208): Ceres Seq. ID no. 13489830
MIPTTILLSALIFSLSPICEAVWLTVPHTGSKCVSEEIQSNVIVLADYLVISEEHSIFPTVSVKVTAPYGTVLHHRENTTNGQFAFTTQESGTYLACFEADAKSHGNKDFSINIDWKTGIAAKDWDSIARKEKIEGVELEFKKLEGAVEAIHENLIYLRNREAEMRIVSEKTNSRVAWYSIMSLGICIVVSGLQILYLKQYFEKKKLI

SEQ ID NO: 30373 - DNA, 644 bp, Arabidopsis thaliana
  misc_feature (1)..(644): Ceres Seq. ID no. 12369950
  misc_feature (1)..(644): Ortholog of  Ceres SEQ ID NO 13581902 as cited in SEQ ID NO 52223
  misc_feature (1)..(644): Ortholog of  Ceres SEQ ID NO 12585528 as cited in SEQ ID NO 62991
atcgatcgcattctcaccgaattaaatccaaaggagcaaatttacaatcttgcgaactcctaaaatggctcgtaccaagcaaacagctcgtaaatccaccggaggaaaggcaccaaggaagcaactcgcgaccaaagctgcgaggaaatcagctccagccaccggaggagtgaagaagccacacagattccgtccaggaacggtggcgttgagagaaatcaggaagtatcagaagagtactgagcttttgatccgtaagcttccgttccagagattggttcgtgagattgctcaagatttcaagacggatctgaggttccagagcagtgccgtcgcagctcttcaggaagcagctgaggcttatcttgttgggctctttgaagatactaatctctgtgcgattcatgctaagagggttacgattatgcctaaggatatccagcttgcgaggagaatcaggggagagagggcttaagtgaacgaagatgatgaagattaagaagactagtcgtttagttatggattagcttgtttggtttcaatggatatgtaaagctgtctcttttcgttttcgagtgttattagttttttacttagatgtgtcttccagatgttcgatgaaatgcctaaaggaaattttaacc

SEQ ID NO: 30374 - protein, 136 aa, Arabidopsis thaliana; identical to SEQ ID NO: 8709
  peptide (1)..(136): Ceres Seq. ID no. 12369951

SEQ ID NO: 30375 - DNA, 1071 bp, Arabidopsis thaliana
  misc_feature (1)..(1071): Ceres Seq. ID no. 12385474
  misc_feature (1)..(1071): Ortholog of  Ceres SEQ ID NO 13599448 as cited in SEQ ID NO 521
  misc_feature (1)..(1071): Ortholog of  Ceres SEQ ID NO 14311918 as cited in SEQ ID NO 51684
  misc_feature (1)..(1071): Ortholog of  Ceres SEQ ID NO 14307472 as cited in SEQ ID NO 54559
  misc_feature (1)..(1071): Ortholog of  Ceres SEQ ID NO 13596408 as cited in SEQ ID NO 62028
acattgcccataaaacctaaattccaaacaaatcattactactctctctctctctctctttctctcttggtttctccagcaatcttgcctccattttcaactccataaactcaagttccaaacacaaagcttccctttatctatctctatctctctctctccccccatctcgctctatatatagttgataagaaagattgctggagataacaacgaagaacgaaagagagagagagagagagagatatgatggacggcgttgaagacggcacggcgatgtacggtggtctcgagacggtgcaatacgtacggacgcatcatcaacatctgtgcagagaaaaccagtgtacctctgctcttgtcaaacacatcaaagctcctcttcatctcgtttggtcacttgtacggagatttgatcaaccgcagaaatacaaaccgtttgtgagcagatgtacagtaatcggtgatcctgaaatcggcagtcttagagaagtcaatgttaaatctggtcttcctgcaacaacatctactgagagattagaacttcttgatgatgaagaacacatcctcggtatcaaaatcatcggtggtgatcacagacttaagaattactcgtcgattttgacggttcatccggagataatcgagggaagagcaggaacgatggtgattgaatcgtttgtagttgatgttcctcaaggtaacacaaaggatgagacttgctactttgttgaagcacttatcagatgtaatctcaagtcactagcagatgtttctgaaagattggcttctcaggacattactcagtgaactacataatcaatgaacaagggcattgaagtgaagtatcaattccagtttgtgatataatcaatattcttcaggatttttttggtttggcctagatatatatatagatatctatcctcggtaatgaccagtctaaaaagatgtacatattgtcccaatggtgaagttttgatgtaagatatctcctggtggtttgttatttgtagatatttttgtaaacaatgtaaatgtgaatggtttatgatgtataatatatagttc

SEQ ID NO: 30376 - protein, 187 aa, Arabidopsis thaliana; identical to SEQ ID NO: 26831
  peptide (1)..(187): Ceres Seq. ID no. 12385475

SEQ ID NO: 30377 - protein, 186 aa, Arabidopsis thaliana; identical to SEQ ID NO: 26832
  peptide (1)..(186): Ceres Seq. ID no. 12385476

SEQ ID NO: 30378 - protein, 177 aa, Arabidopsis thaliana; identical to SEQ ID NO: 26833
  peptide (1)..(177): Ceres Seq. ID no. 12385477

SEQ ID NO: 30379 - DNA, 1266 bp, Arabidopsis thaliana
  misc_feature (1)..(1266): Ceres Seq. ID no. 12357583
  misc_feature (1)..(1266): Ortholog of  Ceres SEQ ID NO 13597538 as cited in SEQ ID NO 64966
aaaatctcatctttttccctcgacgacaaccaccttagggttaggtttattttctcgcttattctctctaactctttttccctattccgatttcgatttgtcttctccgattcgcttttcctttcgctctctagactctagagtcaatttgatttctactctcgtatcggatctatacttaatcatggatactcgtaagagaggacggcctgaagctggctcattcaactccaatggcggcggatacaagaagtctaagcaagagatggaatcatattcaactggtttaggaagcaaatcgaagccatgcacaaaatttttcagtacttctggctgtcctttcggagagaattgccatttcttgcattatgttcccggaggatacaatgctgtatcgcagatgacaaatatgggaccacccattcctcaagtttccagaaacatgcaaggttctggtaatggaggccgattctcagggaggggagagtctgggcctggccatgtctctaactttggtgactcagccactgccagattcagtgttgatgcctctttagccggtgcaatcattgggaaaggcggagtcagttcaaagcagatatgtcgtcagacgggagtaaaattatcaattcaagatcacgagagagacccaaacttgaagaacattgtgcttgaaggaacacttgagcagataagcgaagcgagtgcaatggtaaaagatttgattgggaggcttaattcagcagctaagaaaccacctggtggtggtcttggtggtggtggtggcatgggttctgaagggaaaccacatccagggagcaacttcaagactaagatatgtgagagattctcaaaaggaaactgtacatttggtgatagatgtcactttgctcatggggaagcagagctacgcaagtcaggaatcgtctagttgttgcttgcagatagagaatttgctggtaaaactagtttcttatttagtggtggtgatatctgatatcatcttcacctactttgtttttgtttgttatgagagaatacaattttagtttcattatcattgtaagtctatttggtgtttttttttaatagctttagtttttggttaattctgagtatgaattgagatgggaggaagcttgaagagaatgattgacaaaactcagaaacagtggttaggattgtatgacgccttttattcatattcttgttatctccgttatgtcatgtgtgtgaatcacttatataattttcgtaagattttcc

SEQ ID NO: 30380 - protein, 309 aa, Arabidopsis thaliana
  peptide (1)..(309): Ceres Seq. ID no. 12357584
KSHLFPSTTTTLGLGLFSRLFSLTLFPYSDFDLSSPIRFSFRSLDSRVNLISTLVSDLYLIMDTRKRGRPEAGSFNSNGGGYKKSKQEMESYSTGLGSKSKPCTKFFSTSGCPFGENCHFLHYVPGGYNAVSQMTNMGPPIPQVSRNMQGSGNGGRFSGRGESGPGHVSNFGDSATARFSVDASLAGAIIGKGGVSSKQICRQTGVKLSIQDHERDPNLKNIVLEGTLEQISEASAMVKDLIGRLNSAAKKPPGGGLGGGGGMGSEGKPHPGSNFKTKICERFSKGNCTFGDRCHFAHGEAELRKSGIV

SEQ ID NO: 30381 - protein, 248 aa, Arabidopsis thaliana
  peptide (1)..(248): Ceres Seq. ID no. 12357585
MDTRKRGRPEAGSFNSNGGGYKKSKQEMESYSTGLGSKSKPCTKFFSTSGCPFGENCHFLHYVPGGYNAVSQMTNMGPPIPQVSRNMQGSGNGGRFSGRGESGPGHVSNFGDSATARFSVDASLAGAIIGKGGVSSKQICRQTGVKLSIQDHERDPNLKNIVLEGTLEQISEASAMVKDLIGRLNSAAKKPPGGGLGGGGGMGSEGKPHPGSNFKTKICERFSKGNCTFGDRCHFAHGEAELRKSGIV

SEQ ID NO: 30382 - protein, 221 aa, Arabidopsis thaliana
  peptide (1)..(221): Ceres Seq. ID no. 12357586
MESYSTGLGSKSKPCTKFFSTSGCPFGENCHFLHYVPGGYNAVSQMTNMGPPIPQVSRNMQGSGNGGRFSGRGESGPGHVSNFGDSATARFSVDASLAGAIIGKGGVSSKQICRQTGVKLSIQDHERDPNLKNIVLEGTLEQISEASAMVKDLIGRLNSAAKKPPGGGLGGGGGMGSEGKPHPGSNFKTKICERFSKGNCTFGDRCHFAHGEAELRKSGIV

SEQ ID NO: 30383 - DNA, 764 bp, Arabidopsis thaliana
  misc_feature (1)..(764): Ceres Seq. ID no. 12385516
  misc_feature (1)..(764): Ortholog of  Ceres SEQ ID NO 15172705 as cited in SEQ ID NO 56069
  misc_feature (1)..(764): Ortholog of  Ceres SEQ ID NO 12635657 as cited in SEQ ID NO 0
  misc_feature (1)..(764): Ortholog of  Ceres SEQ ID NO 12635879 as cited in SEQ ID NO 0
  misc_feature (1)..(764): Ortholog of  Ceres SEQ ID NO 13599649 as cited in SEQ ID NO 0
  misc_feature (1)..(764): Ortholog of  Ceres SEQ ID NO 14309205 as cited in SEQ ID NO 0
  misc_feature (1)..(764): Ortholog of  Ceres SEQ ID NO 15177492 as cited in SEQ ID NO 0
ctaatcgaaaaatcatcactttcacaatcttcttcatcgatttctctcttccaaatctcccaaaagatgtcgaaccctagagttttcttcgacatgagtctcagcggtactcccatcggacggatcgagatggagcttttcgctgatacaaccccaaacacggcggagaatttccgtgctctctgtaccggcgagaaaggaatgggaaagctaggtaagccacttcacttcaaaggatcgatcttccaccgtgtgattcccggattcatgtgtcaaggaggtgatttcaccgccaagaacggaaccggtggtgaatcgatctacggtgctaagttcaaggacgagaactttatcaagaagcatacaggagctgggattctctcaatggctaactctggtcctaacactaacggatctcagttcttcatctgtaccgataagacgtcgtggttagatggtaagcacgttgtgtttggacaagttgttaaaggcttggacgtcgtgaaggcgattgagaaagttggatctgattctggaaagacttccaaagtcgttaccatcactgattgtggtcagctttcttagatctaagtgagaaagtgagagactttgatctttatgagtaataatggtgtcttttgctttcggttgttcttcctcttaccttaatggattattctgtttagggtttgagttttcgtttcagagtttgtaacaaaacccttttgtgttttctggggtttgaaataattatgagcttactc

SEQ ID NO: 30384 - protein, 194 aa, Arabidopsis thaliana
  peptide (1)..(194): Ceres Seq. ID no. 12385517
LIEKSSLSQSSSSISLFQISQKMSNPRVFFDMSLSGTPIGRIEMELFADTTPNTAENFRALCTGEKGMGKLGKPLHFKGSIFHRVIPGFMCQGGDFTAKNGTGGESIYGAKFKDENFIKKHTGAGILSMANSGPNTNGSQFFICTDKTSWLDGKHVVFGQVVKGLDVVKAIEKVGSDSGKTSKVVTITDCGQLS

SEQ ID NO: 30385 - protein, 172 aa, Arabidopsis thaliana; identical to SEQ ID NO: 25632
  peptide (1)..(172): Ceres Seq. ID no. 12385518

SEQ ID NO: 30386 - protein, 163 aa, Arabidopsis thaliana; identical to SEQ ID NO: 25633
  peptide (1)..(163): Ceres Seq. ID no. 12385519

SEQ ID NO: 30387 - DNA, 1281 bp, Arabidopsis thaliana
  misc_feature (1)..(1281): Ceres Seq. ID no. 12321331
  misc_feature (1)..(1281): Ortholog of  Ceres SEQ ID NO 14316124 as cited in SEQ ID NO 50904
  misc_feature (1)..(1281): Ortholog of  Ceres SEQ ID NO 13585382 as cited in SEQ ID NO 63889
tttttatgtattcttctccttgtccttccttactctctatatttttctcaattctccgatttgatccaacgatttcacagatctctgatctaaatggcatccaacggtgataaaggactgatcgttagcttcggcgagatgctaatcgatttcgtccctaccgaatcaggcgtctctctcgccgaagctcctggattcctcaaagctccaggcggtgctcccgctaacgtcgcaatcgctgtttctcgtctcggtggacgatctgctttcgtcggaaaacttggagacgacgagttcggtcatatgttggctgggattttgaggaagaacggtgttgatgatcaggggattaacttcgatactggagctagaactgctttagctttcgttacgttacgtgctgatggagatcgtgagtttatgttttaccgcaatcctagcgccgatatgcttcttcgtcctgatgaactcaatctcgacctcatcagatccgcgaaagtgtttcactatggatcaataagtttgatagtggagccgtgtaggtcagctcatttgaaggccatggaagtggcgaaagaagcaggagctcttctttcctatgacccaaacctcagggagcctctgtggccatcaaaagaagaagccaaaacacagatcatgagcatttgggacaaagctgagatcatcaaggtgagcgatgttgagcttgagtttctaactggaagcaacaagattgatgatgagaccgcgttgaccttgtggcatcccaacttgaagctgttgttagtcactcttggtgaaaagggctgtcggtattacaccaagactttcaaaggagccgttgaccctttccatgtgaacgctgtggacacaaccggagctggagattcctttgtcggtgctcttctaaaccagattgtcgatgatcgatccgttctcgaggacgaagagagattgaggaaagtgctgagattcgcaaatgcttgtggagcaatcacaacgaccaaaaaaggagccattccagctcttccctcagatgctgaagttcggagctttctcgaaaagaaatagaaacaaaacaactcaagcttctattacgtaatctgtttccgcgattatcttctctttttgtattcttgttttcggatggttgaatcgagaagagaaacaaattcggcattccgctctgtttttgtttctcttcttcaaatgtaatgatttagaaaagacgtatgttgcaatttaaggcttcacttgctaataaaatgataaggttttttc

SEQ ID NO: 30388 - protein, 325 aa, Arabidopsis thaliana
  peptide (1)..(325): Ceres Seq. ID no. 12321332
MASNGDKGLIVSFGEMLIDFVPTESGVSLAEAPGFLKAPGGAPANVAIAVSRLGGRSAFVGKLGDDEFGHMLAGILRKNGVDDQGINFDTGARTALAFVTLRADGDREFMFYRNPSADMLLRPDELNLDLIRSAKVFHYGSISLIVEPCRSAHLKAMEVAKEAGALLSYDPNLREPLWPSKEEAKTQIMSIWDKAEIIKVSDVELEFLTGSNKIDDETALTLWHPNLKLLLVTLGEKGCRYYTKTFKGAVDPFHVNAVDTTGAGDSFVGALLNQIVDDRSVLEDEERLRKVLRFANACGAITTTKKGAIPALPSDAEVRSFLEKK

SEQ ID NO: 30389 - protein, 310 aa, Arabidopsis thaliana
  peptide (1)..(310): Ceres Seq. ID no. 12321333
MLIDFVPTESGVSLAEAPGFLKAPGGAPANVAIAVSRLGGRSAFVGKLGDDEFGHMLAGILRKNGVDDQGINFDTGARTALAFVTLRADGDREFMFYRNPSADMLLRPDELNLDLIRSAKVFHYGSISLIVEPCRSAHLKAMEVAKEAGALLSYDPNLREPLWPSKEEAKTQIMSIWDKAEIIKVSDVELEFLTGSNKIDDETALTLWHPNLKLLLVTLGEKGCRYYTKTFKGAVDPFHVNAVDTTGAGDSFVGALLNQIVDDRSVLEDEERLRKVLRFANACGAITTTKKGAIPALPSDAEVRSFLEKK

SEQ ID NO: 30390 - protein, 255 aa, Arabidopsis thaliana
  peptide (1)..(255): Ceres Seq. ID no. 12321334
MLAGILRKNGVDDQGINFDTGARTALAFVTLRADGDREFMFYRNPSADMLLRPDELNLDLIRSAKVFHYGSISLIVEPCRSAHLKAMEVAKEAGALLSYDPNLREPLWPSKEEAKTQIMSIWDKAEIIKVSDVELEFLTGSNKIDDETALTLWHPNLKLLLVTLGEKGCRYYTKTFKGAVDPFHVNAVDTTGAGDSFVGALLNQIVDDRSVLEDEERLRKVLRFANACGAITTTKKGAIPALPSDAEVRSFLEKK

SEQ ID NO: 30391 - DNA, 1231 bp, Arabidopsis thaliana
  misc_feature (1)..(1231): Ceres Seq. ID no. 13500315
  misc_feature (1)..(1231): Ortholog of  Ceres SEQ ID NO 12617391 as cited in SEQ ID NO 64114
  misc_feature (1)..(1231): Ortholog of  Ceres SEQ ID NO 13595922 as cited in SEQ ID NO 69293
  misc_feature (1)..(1231): Ortholog of  Ceres SEQ ID NO 12635496 as cited in SEQ ID NO 0
aaccaaaagaatcacgacattgaatcttctttcatttctctcctcaagacatagtagcataagaaaatgaagatatcatcactaggatgggtcttagtccttatcttcatctctattaccattgtttcgagtgcaccagcacctaaacctcctaaacctaagcctgcaccagcacctacacctcctaaacctaagcccacaccagcacctacacctcctaaacctaagcccaaaccagcacctacacctcctaaacctaagcccacaccagcacctacacctcctaaacctaagcctgcaccagcaccagcaccagcaccaacaccagcaccgaaacctaaacctgcacctaaaccagcaccaggtggagaagttgaggacgaaaccgagtttagctacgagacgaaaggaaacaaggggccagcgaaatggggaacactacatgcagagtggaaaatgtgtggaataggcaaaatgcaatctcctattgatcttcgggacaaaaatgtggtagttagtaataaatttggattgcttcgtagccagtatctgccttctaataccaccattaagaacagaggtcatgatatcatgttgaaattcaaaggaggcaataaaggtattggtgtcactatccgtggtactagatatcaacttcaacaacttcattggcactctccttccgaacatacaatcaatggcaaaaggtttgcgctagaggaacacttggttcatgagagtaaagataaacgctacgctgttgtcgctttcttatacaatctcggagcatctgacccttttctcttttcgttggaaaaacaattgaagaagataactgatacacatgcgtccgaggaacatgtcggaatcattgatcccaaaaaactcagttttgaatcaaaacattattatagatattccggatcacttactgctcctccatgttctgaaaatgttatttggtccgtttccaaagagattcgcactgtgtcaagtaaacaagtgaagcttctccgtgtggctgtacacgatgcttcagattcaaatgccaggccgcttcaagcagtcaataagcgcaaggtatatttatacaaaccaaaggttaagttaatgaagaaatactgtaatataagttcttactagtaatctttaattctttatatatgtacattatgaattgtacactaaaatgatgtttttagggataaactgatgacttggttttgttatt

SEQ ID NO: 30392 - protein, 358 aa, Arabidopsis thaliana
  peptide (1)..(358): Ceres Seq. ID no. 13500316
MKISSLGWVLVLIFISITIVSSAPAPKPPKPKPAPAPTPPKPKPTPAPTPPKPKPKPAPTPPKPKPTPAPTPPKPKPAPAPAPAPTPAPKPKPAPKPAPGGEVEDETEFSYETKGNKGPAKWGTLHAEWKMCGIGKMQSPIDLRDKNVVVSNKFGLLRSQYLPSNTTIKNRGHDIMLKFKGGNKGIGVTIRGTRYQLQQLHWHSPSEHTINGKRFALEEHLVHESKDKRYAVVAFLYNLGASDPFLFSLEKQLKKITDTHASEEHVGIIDPKKLSFESKHYYRYSGSLTAPPCSENVIWSVSKEIRTVSSKQVKLLRVAVHDASDSNARPLQAVNKRKVYLYKPKVKLMKKYCNISSY

SEQ ID NO: 30393 - protein, 228 aa, Arabidopsis thaliana
  peptide (1)..(228): Ceres Seq. ID no. 13500317
MCGIGKMQSPIDLRDKNVVVSNKFGLLRSQYLPSNTTIKNRGHDIMLKFKGGNKGIGVTIRGTRYQLQQLHWHSPSEHTINGKRFALEEHLVHESKDKRYAVVAFLYNLGASDPFLFSLEKQLKKITDTHASEEHVGIIDPKKLSFESKHYYRYSGSLTAPPCSENVIWSVSKEIRTVSSKQVKLLRVAVHDASDSNARPLQAVNKRKVYLYKPKVKLMKKYCNISSY

SEQ ID NO: 30394 - protein, 222 aa, Arabidopsis thaliana
  peptide (1)..(222): Ceres Seq. ID no. 13500318
MQSPIDLRDKNVVVSNKFGLLRSQYLPSNTTIKNRGHDIMLKFKGGNKGIGVTIRGTRYQLQQLHWHSPSEHTINGKRFALEEHLVHESKDKRYAVVAFLYNLGASDPFLFSLEKQLKKITDTHASEEHVGIIDPKKLSFESKHYYRYSGSLTAPPCSENVIWSVSKEIRTVSSKQVKLLRVAVHDASDSNARPLQAVNKRKVYLYKPKVKLMKKYCNISSY

SEQ ID NO: 30395 - DNA, 997 bp, Arabidopsis thaliana
  misc_feature (1)..(997): Ceres Seq. ID no. 12336034
  misc_feature (1)..(997): Ortholog of  Ceres SEQ ID NO 12558659 as cited in SEQ ID NO 20727
  misc_feature (1)..(997): Ortholog of  Ceres SEQ ID NO 14301475 as cited in SEQ ID NO 62936
  misc_feature (1)..(997): Ortholog of  Ceres SEQ ID NO 12619999 as cited in SEQ ID NO 66123
  misc_feature (1)..(997): Ortholog of  Ceres SEQ ID NO 13656436 as cited in SEQ ID NO 69154
atcgagaaacctcgaaatcaaaaagcacgtcggtgacttgtactcttcaatctcttcttcctctctttcacatctccttctctcgaacccatcgacctgcgctaattcatcatcgaccttgctcaaattcatcaaccatgtcttacgattatctcttcaagtacataatcatcggagacacaggtgtgggaaaatcgtgtctgcttctgcaatttactgataagaggttccaaccagtccacgatctcaccattggtgttgagttcggtgctcggatggtcaccgtcgatggacgccccatcaaactccaaatttgggacaccgctggacaagaatcttttagatccatcaccagatcatactacagaggagcagccggagctttactggtttatgacatcaccaggagagagacgtttaaccatctggcaagctggttggaggatgctcggcaacatgcaaatcctaacatgagtattatgctgattgggaacaaatgtgatcttgctcacaagagagctgttagcaaagaggaaggtcaacagtttgccaaagaacatggcctgctattcttagaagcatctgcaagaactgctcaaaacgttgaggaggccttcatagagactgctgccaagatcctccagaacattcaggatggtgtctttgatgtatccaacgagtcatcaggtatcaagattggttacgggcgtactcaaggtgcagctggaggaagagatggtacgatctctcagggaggtggctgttgtggttaaaaaatcctcgagagaggtgtcacatatctgctgtaatctggtgattcagaaactactattgcttctatttacctctgcaaatggatacaccagaatgtatagtttctctttctttctttctttttttctctttttcccagattgtcttttatcaaaaaaccaaacgggtgcatttaagagtgaacaggctgatctttataaaccaaacaggcgttggcttattt

SEQ ID NO: 30396 - protein, 256 aa, Arabidopsis thaliana
  peptide (1)..(256): Ceres Seq. ID no. 12336035
RETSKSKSTSVTCTLQSLLPLFHISFSRTHRPALIHHRPCSNSSTMSYDYLFKYIIIGDTGVGKSCLLLQFTDKRFQPVHDLTIGVEFGARMVTVDGRPIKLQIWDTAGQESFRSITRSYYRGAAGALLVYDITRRETFNHLASWLEDARQHANPNMSIMLIGNKCDLAHKRAVSKEEGQQFAKEHGLLFLEASARTAQNVEEAFIETAAKILQNIQDGVFDVSNESSGIKIGYGRTQGAAGGRDGTISQGGGCCG

SEQ ID NO: 30397 - protein, 211 aa, Arabidopsis thaliana
  peptide (1)..(211): Ceres Seq. ID no. 12336036
MSYDYLFKYIIIGDTGVGKSCLLLQFTDKRFQPVHDLTIGVEFGARMVTVDGRPIKLQIWDTAGQESFRSITRSYYRGAAGALLVYDITRRETFNHLASWLEDARQHANPNMSIMLIGNKCDLAHKRAVSKEEGQQFAKEHGLLFLEASARTAQNVEEAFIETAAKILQNIQDGVFDVSNESSGIKIGYGRTQGAAGGRDGTISQGGGCCG

SEQ ID NO: 30398 - protein, 165 aa, Arabidopsis thaliana
  peptide (1)..(165): Ceres Seq. ID no. 12336037
MVTVDGRPIKLQIWDTAGQESFRSITRSYYRGAAGALLVYDITRRETFNHLASWLEDARQHANPNMSIMLIGNKCDLAHKRAVSKEEGQQFAKEHGLLFLEASARTAQNVEEAFIETAAKILQNIQDGVFDVSNESSGIKIGYGRTQGAAGGRDGTISQGGGCCG

SEQ ID NO: 30399 - DNA, 1718 bp, Arabidopsis thaliana
  misc_feature (1)..(1718): Ceres Seq. ID no. 12324349
  misc_feature (1)..(1718): Ortholog of  Ceres SEQ ID NO 13655298 as cited in SEQ ID NO 68914
  misc_feature (1)..(1718): Ortholog of  Ceres SEQ ID NO 13656501 as cited in SEQ ID NO 69206
attcttattattattattcatcagaccaacaacaaaaaggagataaagagaagaggattcatcatcatcaatcaatccttcattttatggatctactcatatcttgattcttccttctatctctcccttttcttccatctctttttctctgggtttccccggattgagttttttaatctctgattgacagatttgaagagcgtgacaaaggaagaatcttttattaaaacaaattcttctgttttaatcttgggatggcctcggtgggcatagagcctagtgccgcggttagagaatctactggaaacgttactgatgctgatagattacccgaggagatgaaggacatgaaaattcaagatgataaagaaatggaagctacgattgttaatggcaatgtgactgagactggccatataatagtaactactataggaggaagaaatggccagccaaaacagacaatcagttacatggcggagcgagttgttggacatggctcctttggtgttgtgtttcaggccaaatgtttagaaacaggagaaactgttgctataaagaaagttctacaagatcggaggtacaagaatcgtgagcttcaaacaatgaggctacttgaccatccaaatgttgtgtctttgaaacattgtttcttctctacaaccgaaaaagatgagctttatctcaacttggttctggaatacgttccggaaactgtgcaccgcgtcatcaaacactacaacaaacttaaccaacgaatgcctctcgtttacgtcaaactttacacttatcagatttttaggtccttatcctacattcaccgatgtatcggcgtatgtcatcgagacatcaaacctcaaaacttgttggtaaatccacacactcatcaagtgaaactatgcgattttggaagtgcgaaagtattggttaaaggagagccaaacatttcatacatttgctcgaggtattacagagcacctgagctcatttttggagccaccgagtatactacagccattgatgtctggtctgcaggatgtgttctcgccgagcttcttctcgggcagccattgttcccgggtgagagcggtgttgatcaacttgtagagattataaaggttttgggaacaccaacaagggaagaaatcaaatgcatgaacccgaattacacagagttcaaatttcctcagattaaagctcatccatggcataagattttccacaagagaatgcctccagaagctgttgatttggtctcaaggcttcttcaatactctcccaatctccgttgtgctgctcttgattcattggtccacccattctttgacgagctaagagatccgaatgcgcgattacccaacggacgtttccttccaccgctctttaactttaagcctcatgaacttaaaggtgtgcctgtggagatggtggcgaagttagttccagaacatgcgaggaagcaatgtccgtggctcagtttgtgatttgttctcacctgcaaacacgaaaactagagcaaagcagtcgagatattcatctcttctcttctctctccttctctgtattaatattattataatgatcatatctcaatctgatgatttagtaaccctttgtttgttgtatgagtagagaaagagtgaatcatttgtgggggttatgatattgtataagccaacaaagattattttttaaagagagtttggtgttttctgtct

SEQ ID NO: 30400 - protein, 409 aa, Arabidopsis thaliana
  peptide (1)..(409): Ceres Seq. ID no. 12324350
MASVGIEPSAAVRESTGNVTDADRLPEEMKDMKIQDDKEMEATIVNGNVTETGHIIVTTIGGRNGQPKQTISYMAERVVGHGSFGVVFQAKCLETGETVAIKKVLQDRRYKNRELQTMRLLDHPNVVSLKHCFFSTTEKDELYLNLVLEYVPETVHRVIKHYNKLNQRMPLVYVKLYTYQIFRSLSYIHRCIGVCHRDIKPQNLLVNPHTHQVKLCDFGSAKVLVKGEPNISYICSRYYRAPELIFGATEYTTAIDVWSAGCVLAELLLGQPLFPGESGVDQLVEIIKVLGTPTREEIKCMNPNYTEFKFPQIKAHPWHKIFHKRMPPEAVDLVSRLLQYSPNLRCAALDSLVHPFFDELRDPNARLPNGRFLPPLFNFKPHELKGVPVEMVAKLVPEHARKQCPWLSL

SEQ ID NO: 30401 - protein, 381 aa, Arabidopsis thaliana
  peptide (1)..(381): Ceres Seq. ID no. 12324351
MKDMKIQDDKEMEATIVNGNVTETGHIIVTTIGGRNGQPKQTISYMAERVVGHGSFGVVFQAKCLETGETVAIKKVLQDRRYKNRELQTMRLLDHPNVVSLKHCFFSTTEKDELYLNLVLEYVPETVHRVIKHYNKLNQRMPLVYVKLYTYQIFRSLSYIHRCIGVCHRDIKPQNLLVNPHTHQVKLCDFGSAKVLVKGEPNISYICSRYYRAPELIFGATEYTTAIDVWSAGCVLAELLLGQPLFPGESGVDQLVEIIKVLGTPTREEIKCMNPNYTEFKFPQIKAHPWHKIFHKRMPPEAVDLVSRLLQYSPNLRCAALDSLVHPFFDELRDPNARLPNGRFLPPLFNFKPHELKGVPVEMVAKLVPEHARKQCPWLSL

SEQ ID NO: 30402 - protein, 378 aa, Arabidopsis thaliana
  peptide (1)..(378): Ceres Seq. ID no. 12324352
MKIQDDKEMEATIVNGNVTETGHIIVTTIGGRNGQPKQTISYMAERVVGHGSFGVVFQAKCLETGETVAIKKVLQDRRYKNRELQTMRLLDHPNVVSLKHCFFSTTEKDELYLNLVLEYVPETVHRVIKHYNKLNQRMPLVYVKLYTYQIFRSLSYIHRCIGVCHRDIKPQNLLVNPHTHQVKLCDFGSAKVLVKGEPNISYICSRYYRAPELIFGATEYTTAIDVWSAGCVLAELLLGQPLFPGESGVDQLVEIIKVLGTPTREEIKCMNPNYTEFKFPQIKAHPWHKIFHKRMPPEAVDLVSRLLQYSPNLRCAALDSLVHPFFDELRDPNARLPNGRFLPPLFNFKPHELKGVPVEMVAKLVPEHARKQCPWLSL

SEQ ID NO: 30403 - DNA, 1511 bp, Arabidopsis thaliana
  misc_feature (1)..(1511): Ceres Seq. ID no. 12371675
  misc_feature (1)..(1511): Ortholog of  Ceres SEQ ID NO 14304502 as cited in SEQ ID NO 53212
  misc_feature (1)..(1511): Ortholog of  Ceres SEQ ID NO 15179323 as cited in SEQ ID NO 0
aactttattttatttgtttcttagaatctttttcacgcaaatgcaaaccaccaacaaatctatattctagcatgatgatgaagtagctacttgcttcttcttcttcttcttcttaaattttggggtttttactttttggtgaagacagccatgtttcaaagattattactcttccttctcattgctcttctgctccaatcttctttccttttagagatttcctctgctctcaaggaaggaaaaacatgtataacaaacagcaactgtgacgctggattacactgcgaaacatgtatagccaacactgattttagacctagatgctccagaacccaacccatcaaccccatcaccaaggcaaaggggttgccttttaacaagtattcatggttaaccacacacaactcttttgctcgtttgggggaagtatcacggaccggttctgctattttggctcctactaaccagcaagattcaatcacaagccaactcaataatggtgtaagagggtttatgctcgacatgtatgacttccaaaacgatatctggctttgccattctttcgatggaacatgtttcaatttcaccgcttttcaaccggctattaacattttaagggagtttcaagtgtttctagagaagaacaaagaggaagttgtaacgattatcatcgaagattatgtgaaatcgcctaaaggtctcacaaaagtgtttgatgcggctggcttacgaaagttcatgtttccagtatctagaatgcccaaaaatggaggggactggccaaggcttgatgacatggtgcgaaaaaaccaacggttgctagtttttacatccgattcacataaagaagcaaccgaagggatcgcctatcaatggaagtatatggttgagaatcaatatggaaatggagggttgaaggtaggagtgtgtccaaatagagctcaatcagcgccaatgagcgataaatcaaaatctcttgttcttgtgaaccatttccctgatgctgcggatgtgatagtagcatgtaagcaaaactcagcttctcttcttgaatccataaagacatgttaccaagccgcgggacagcgatggcctaacttcatagcagtcgatttctacaagagaagcgatggtggaggagctccgcaagcggttgatgttgcgaatggcaatttgatatgcggttgcgataactttgcagcgtgcaaggctgacggcaaatgtggatagtaagaaagactgagccaccagaagcaactcccataaccaaaggctttctgcgtttgttgtcacctttgtgtcatcttttccataaagttttagctagtgtagtaacggttagtttttgttttagattatttagagattagtactgtactggttagtttcattactctaaatttcctaatcatatatgaactagtcaccgaataatctatatatactgaaaacactggtgactaaaaatgttaaacacaaagttatttaatagctaaaaatctaaattaggg

SEQ ID NO: 30404 - protein, 359 aa, Arabidopsis thaliana
  peptide (1)..(359): Ceres Seq. ID no. 12371676
MFQRLLLFLLIALLLQSSFLLEISSALKEGKTCITNSNCDAGLHCETCIANTDFRPRCSRTQPINPITKAKGLPFNKYSWLTTHNSFARLGEVSRTGSAILAPTNQQDSITSQLNNGVRGFMLDMYDFQNDIWLCHSFDGTCFNFTAFQPAINILREFQVFLEKNKEEVVTIIIEDYVKSPKGLTKVFDAAGLRKFMFPVSRMPKNGGDWPRLDDMVRKNQRLLVFTSDSHKEATEGIAYQWKYMVENQYGNGGLKVGVCPNRAQSAPMSDKSKSLVLVNHFPDAADVIVACKQNSASLLESIKTCYQAAGQRWPNFIAVDFYKRSDGGGAPQAVDVANGNLICGCDNFAACKADGKCG

SEQ ID NO: 30405 - protein, 238 aa, Arabidopsis thaliana
  peptide (1)..(238): Ceres Seq. ID no. 12371677
MLDMYDFQNDIWLCHSFDGTCFNFTAFQPAINILREFQVFLEKNKEEVVTIIIEDYVKSPKGLTKVFDAAGLRKFMFPVSRMPKNGGDWPRLDDMVRKNQRLLVFTSDSHKEATEGIAYQWKYMVENQYGNGGLKVGVCPNRAQSAPMSDKSKSLVLVNHFPDAADVIVACKQNSASLLESIKTCYQAAGQRWPNFIAVDFYKRSDGGGAPQAVDVANGNLICGCDNFAACKADGKCG

SEQ ID NO: 30406 - protein, 235 aa, Arabidopsis thaliana
  peptide (1)..(235): Ceres Seq. ID no. 12371678
MYDFQNDIWLCHSFDGTCFNFTAFQPAINILREFQVFLEKNKEEVVTIIIEDYVKSPKGLTKVFDAAGLRKFMFPVSRMPKNGGDWPRLDDMVRKNQRLLVFTSDSHKEATEGIAYQWKYMVENQYGNGGLKVGVCPNRAQSAPMSDKSKSLVLVNHFPDAADVIVACKQNSASLLESIKTCYQAAGQRWPNFIAVDFYKRSDGGGAPQAVDVANGNLICGCDNFAACKADGKCG

SEQ ID NO: 30407 - DNA, 1070 bp, Arabidopsis thaliana
  misc_feature (1)..(1070): Ceres Seq. ID no. 12327436
  misc_feature (1)..(1070): Ortholog of  Ceres SEQ ID NO 13581092 as cited in SEQ ID NO 54771
  misc_feature (1)..(1070): Ortholog of  Ceres SEQ ID NO 13594298 as cited in SEQ ID NO 57803
  misc_feature (1)..(1070): Ortholog of  Ceres SEQ ID NO 13503476 as cited in SEQ ID NO 61978
  misc_feature (1)..(1070): Ortholog of  Ceres SEQ ID NO 12578438 as cited in SEQ ID NO 62201
  misc_feature (1)..(1070): Ortholog of  Ceres SEQ ID NO 12617675 as cited in SEQ ID NO 64656
ttcattgagtcaagtgctcgagactgtagagtgaagtttgatttatttagagagataagttaaaaaaaaaatggtcggtatggatttgttcaaatgtgtaatgatgataatggtgttggttgtctcttgtggtgaagctgtttctggagctaagttcgatgagctttatcggtcaagctgggctatggatcattgtgtcaacgaaggcgaagtcacaaaactcaagcttgacaattactctggagctgggtttgaatcaagaagcaaatacttgtttggtaaagtctctatccagattaagcttgttgagggtgattcagcaggaacagtcactgctttctacatgtcttcagatggtccgaaccacaacgaattcgattttgagttcttagggaacactaccggcgagccttacatagtccagaccaatatctacgtgaacggagttggaaacagagaacaaagactcaacctttggttcgatcccaccactgagtttcacacttactcaatcctctggagtaaacgcagtgttgtattcatggtagacgaaacaccgattcgagttcagaagaatcttgaagagaaaggtatcccatttgctaaagatcaagcaatgggtgtttacagctccatttggaatgcagatgattgggctacacaaggaggtcttgttaaaactgattggagtcacgctcctttcgttgcttcttacaaagaattccaaatcgatgcatgtgagattccaacaactactgatctaagcaagtgtaatggagaccagaagttttggtgggatgaaccaactgtctctgagcttagccttcatcagaatcatcagcttatttgggttcgagctaatcatatgatttatgattattgttttgatgctactaggtttcctgttactcctcttgagtgccaacatcatcgtcatttgtagtttagagattagtcaagaataaaaatggatcaagagaacacatgtggttactctttgatgattctgttttaatgtataaataatcaatcttctattgattttggtgaagtttttaagttcggatttt

SEQ ID NO: 30408 - protein, 290 aa, Arabidopsis thaliana
  peptide (1)..(290): Ceres Seq. ID no. 12327437
MVGMDLFKCVMMIMVLVVSCGEAVSGAKFDELYRSSWAMDHCVNEGEVTKLKLDNYSGAGFESRSKYLFGKVSIQIKLVEGDSAGTVTAFYMSSDGPNHNEFDFEFLGNTTGEPYIVQTNIYVNGVGNREQRLNLWFDPTTEFHTYSILWSKRSVVFMVDETPIRVQKNLEEKGIPFAKDQAMGVYSSIWNADDWATQGGLVKTDWSHAPFVASYKEFQIDACEIPTTTDLSKCNGDQKFWWDEPTVSELSLHQNHQLIWVRANHMIYDYCFDATRFPVTPLECQHHRHL

SEQ ID NO: 30409 - protein, 287 aa, Arabidopsis thaliana
  peptide (1)..(287): Ceres Seq. ID no. 12327438
MDLFKCVMMIMVLVVSCGEAVSGAKFDELYRSSWAMDHCVNEGEVTKLKLDNYSGAGFESRSKYLFGKVSIQIKLVEGDSAGTVTAFYMSSDGPNHNEFDFEFLGNTTGEPYIVQTNIYVNGVGNREQRLNLWFDPTTEFHTYSILWSKRSVVFMVDETPIRVQKNLEEKGIPFAKDQAMGVYSSIWNADDWATQGGLVKTDWSHAPFVASYKEFQIDACEIPTTTDLSKCNGDQKFWWDEPTVSELSLHQNHQLIWVRANHMIYDYCFDATRFPVTPLECQHHRHL

SEQ ID NO: 30410 - protein, 280 aa, Arabidopsis thaliana
  peptide (1)..(280): Ceres Seq. ID no. 12327439
MMIMVLVVSCGEAVSGAKFDELYRSSWAMDHCVNEGEVTKLKLDNYSGAGFESRSKYLFGKVSIQIKLVEGDSAGTVTAFYMSSDGPNHNEFDFEFLGNTTGEPYIVQTNIYVNGVGNREQRLNLWFDPTTEFHTYSILWSKRSVVFMVDETPIRVQKNLEEKGIPFAKDQAMGVYSSIWNADDWATQGGLVKTDWSHAPFVASYKEFQIDACEIPTTTDLSKCNGDQKFWWDEPTVSELSLHQNHQLIWVRANHMIYDYCFDATRFPVTPLECQHHRHL

SEQ ID NO: 30411 - DNA, 1350 bp, Arabidopsis thaliana
  misc_feature (1)..(1350): Ceres Seq. ID no. 13580471
  misc_feature (1)..(1350): Ortholog of  Ceres SEQ ID NO 15171556 as cited in SEQ ID NO 59687
  misc_feature (1)..(1350): Ortholog of  Ceres SEQ ID NO 15177935 as cited in SEQ ID NO 60258
  misc_feature (1)..(1350): Ortholog of  Ceres SEQ ID NO 13659033 as cited in SEQ ID NO 66372
  misc_feature (1)..(1350): Ortholog of  Ceres SEQ ID NO 12625899 as cited in SEQ ID NO 69079
  misc_feature (1)..(1350): Ortholog of  Ceres SEQ ID NO 15180051 as cited in SEQ ID NO 0
gtttaaacatcctaatcgaaaacatgtgatgtgaacaatctcactctctttctctatctctctttcgagtttctttggagtattatataacaaatcagtccaagacacctcttttctcacaccaatctcgctctcaccacaaaacagagaatctcagatcgaagaagcaaagaaagagagaatgggtttcacttcccgaggaaacccttcttttctcttcttcttctttttcttcctctgtctctccacagtctctgcttacatcaacaacacaagtagcaacaatgaagaagtaagaagagagctagcttcttggagatgtaattggtttagagggaattgggtttatgatgtaaagtacccactttatgatccttacaaatgtccattcatagatccacagtttaactgtaagaagtatggtcgtcctgacaatgcttaccttaagtatcgatggcaaccatcttcttgctctctccccagattcaatgggttgtatttcttgaggaggatgagagggaagaagataatgttcgttggagattcactaagcacaaacatgtggcaatctcttgcttgtctaattcactcttgggttcctaacactcgttacactcttattcgccaaaagggtctagcttcacttacctttgaggaatacggagtgacgttgttgctatacagaacacagttcttggtagatttgaatgtggagaaagttgggagagtgcttaagcttgattccattaagcaagggaatatgtggagaggcatggacgttttgattttcaactcgtggcattggtggacacacacaacacattcagccgtgggattacatggaagatgggaataggttgtacaaagacatgaaccggctcgttgctttctacaaaggaatgaccacttgggctcgatgggttaatgcttacgtcgatccttctaagactaaagtcttcttcaacggcgtgtctcctactcattacgagggaaaggattggggagagccaatgaactcatgtaggagtcaaacgcagccattttacggaaggaagtatccaggagggacaccaatggcttgggtgattctaaacaaagtgatgaggagattgaagaaaccggtccattggctcgatataaccggtctgtctcagcttcgtaaagatgctcatccttctgctttcagtgggaaccatcctggtaatgactgtagccattggtgtctccctggtttgcctgatacttggaacttgctcttttactctactcttttctcttcttaattaattcctttctcatcaatgtataagttaacttaaaacaacaatcaattatttttagtcatctttc

SEQ ID NO: 30412 - protein, 224 aa, Arabidopsis thaliana
  peptide (1)..(224): Ceres Seq. ID no. 15222720
MGFTSRGNPSFLFFFFFFLCLSTVSAYINNTSSNNEEVRRELASWRCNWFRGNWVYDVKYPLYDPYKCPFIDPQFNCKKYGRPDNAYLKYRWQPSSCSLPRFNGLYFLRRMRGKKIMFVGDSLSTNMWQSLACLIHSWVPNTRYTLIRQKGLASLTFEEYGVTLLLYRTQFLVDLNVEKVGRVLKLDSIKQGNMWRGMDVLIFNSWHWWTHTTHSAVGLHGRWE

SEQ ID NO: 30413 - protein, 147 aa, Arabidopsis thaliana
  peptide (1)..(147): Ceres Seq. ID no. 15222721
MEDGNRLYKDMNRLVAFYKGMTTWARWVNAYVDPSKTKVFFNGVSPTHYEGKDWGEPMNSCRSQTQPFYGRKYPGGTPMAWVILNKVMRRLKKPVHWLDITGLSQLRKDAHPSAFSGNHPGNDCSHWCLPGLPDTWNLLFYSTLFSS

SEQ ID NO: 30414 - protein, 137 aa, Arabidopsis thaliana
  peptide (1)..(137): Ceres Seq. ID no. 15222722
MNRLVAFYKGMTTWARWVNAYVDPSKTKVFFNGVSPTHYEGKDWGEPMNSCRSQTQPFYGRKYPGGTPMAWVILNKVMRRLKKPVHWLDITGLSQLRKDAHPSAFSGNHPGNDCSHWCLPGLPDTWNLLFYSTLFSS

SEQ ID NO: 30415 - DNA, 1286 bp, Arabidopsis thaliana
  misc_feature (1)..(1286): Ceres Seq. ID no. 12326413
  misc_feature (1)..(1286): Ortholog of  Ceres SEQ ID NO 12615296 as cited in SEQ ID NO 62724
  misc_feature (1)..(1286): Ortholog of  Ceres SEQ ID NO 15225093 as cited in SEQ ID NO 65177
  misc_feature (1)..(1286): Ortholog of  Ceres SEQ ID NO 15179532 as cited in SEQ ID NO 0
acagagatttgtgtagaactctctctctctctataacaaaattggacagaattgggcaatcgagagagaaagatgcaagccatctccaaagtttcttctgcagcatcattctttagatgttctaggctagttagtcagccatgtgtgaggccttgcgtgagacagcttcacgtcagaaagggtcttgtctctggtgtcatgaagctgttctcttcacctcttaggactttgcgtgatgctggtaaatccgttcgcatttcaagattctgcagtgtctccaatgtctcttcctcattgcaaattgaactggtgccatgtcttacggacaactatgcttatatcttacatgatgaggataccggtacagttggtgtggttgacccttctgaagctgtacctgttatggatgccctccagaagaatagtcgaaatctaacttatatattaaatacacatcaccattatgatcacactggtggcaatttggaattaaaagacaggtatggtgcaaaggtgatcggctcagctgcagatagggaccggattcctggaattgatgtagccttgaaagatgctgacaaatggatgtttgctggccatgaagtccatattatggaaactcctggccacaccagaggccatattagtttctactttccaggggcacgagcaattttcaccggggacaccttgtttagcttatcatgtggtaaactcttcgaaggtactccagagcagatgctagcttctctacagaggataattgcgttgccagatgacacaagcgtatactgtggccatgaatatacactgagtaattccaagtttgcattgtctatagaaccaacaaacgaagtgctccagtcttatgcagcctacgttgcagaactccgtgacaagaaattaccaacgattccaacgacgatgaagatggagaaagcttgtaacccgtttctccgcactgagaacacagatatccgtcgagctttaggtattccagagacagcagatgaagcagaagctctgggtattataagaagagcaaaggacaatttcaaagcttagctaaaatataataagaatggttcctctgtacagtgatgatgcgatcctggtttaatctgtaataaggtgttttgagttttgaccgtgacgttacgtctcctagtagttttcatggtcatactcgaaatgattttttttttccttttgatcaaacggtcctaagtacccaagtttctactttgatgaaccctcgaattttgttattatttgtttttggatct

SEQ ID NO: 30416 - protein, 330 aa, Arabidopsis thaliana
  peptide (1)..(330): Ceres Seq. ID no. 12326414
MQAISKVSSAASFFRCSRLVSQPCVRPCVRQLHVRKGLVSGVMKLFSSPLRTLRDAGKSVRISRFCSVSNVSSSLQIELVPCLTDNYAYILHDEDTGTVGVVDPSEAVPVMDALQKNSRNLTYILNTHHHYDHTGGNLELKDRYGAKVIGSAADRDRIPGIDVALKDADKWMFAGHEVHIMETPGHTRGHISFYFPGARAIFTGDTLFSLSCGKLFEGTPEQMLASLQRIIALPDDTSVYCGHEYTLSNSKFALSIEPTNEVLQSYAAYVAELRDKKLPTIPTTMKMEKACNPFLRTENTDIRRALGIPETADEAEALGIIRRAKDNFKA

SEQ ID NO: 30417 - protein, 288 aa, Arabidopsis thaliana
  peptide (1)..(288): Ceres Seq. ID no. 12326415
MKLFSSPLRTLRDAGKSVRISRFCSVSNVSSSLQIELVPCLTDNYAYILHDEDTGTVGVVDPSEAVPVMDALQKNSRNLTYILNTHHHYDHTGGNLELKDRYGAKVIGSAADRDRIPGIDVALKDADKWMFAGHEVHIMETPGHTRGHISFYFPGARAIFTGDTLFSLSCGKLFEGTPEQMLASLQRIIALPDDTSVYCGHEYTLSNSKFALSIEPTNEVLQSYAAYVAELRDKKLPTIPTTMKMEKACNPFLRTENTDIRRALGIPETADEAEALGIIRRAKDNFKA

SEQ ID NO: 30418 - protein, 220 aa, Arabidopsis thaliana
  peptide (1)..(220): Ceres Seq. ID no. 12326416
MDALQKNSRNLTYILNTHHHYDHTGGNLELKDRYGAKVIGSAADRDRIPGIDVALKDADKWMFAGHEVHIMETPGHTRGHISFYFPGARAIFTGDTLFSLSCGKLFEGTPEQMLASLQRIIALPDDTSVYCGHEYTLSNSKFALSIEPTNEVLQSYAAYVAELRDKKLPTIPTTMKMEKACNPFLRTENTDIRRALGIPETADEAEALGIIRRAKDNFKA

SEQ ID NO: 30419 - DNA, 1267 bp, Arabidopsis thaliana
  misc_feature (1)..(1267): Ceres Seq. ID no. 12334784
  misc_feature (1)..(1267): Ortholog of  Ceres SEQ ID NO 12607455 as cited in SEQ ID NO 55208
gtattggactaatttagtagactgctccctgaaatattgattttctcatgctaacaaaggcagacgaacagaagggtttggaggataaatgtgctaaacagatggcggaaattaaatctctcaaggctctaattgagaaactactcaaagaaaaactacagctgcaaaatctagcaagcatctgtacgcgtgaatgtaatgatgacaggggactggcagaaatcaaggattcacaacggaaagcccaagctcaggctgaagagctgaaaaacgttttggatgaacactttcttgaattgagagtgaaagcggctcatgagactgagagtgcttgccaagaaaggcttgctaccgccaaggctgaaattgctgaattgaggactcagttagatctttctgagagggaggttttggaacttaaggagggtattaaagttaaagagcaggaggcagaggcatccattgctgaaatggagactataggtcaagcctatgaagacatgcagacacagaaccaacatttgttgcagcaggtggctgagcgggacgattataatatcaagcttgtttccgaaagtgtcaagacaaagcatgcttacaacactcacttatctgagaagcaagtaatggaaaagcagctccatcaggttaatgcatccgtagagaattttaaagcaaggattgcacataatgaggaacagatgaaaggctgtttttctgaggcttataaattgattcaagaagatcgtcacctcgttatcagcctcgaaaccaccaaatgggaagtagctgatgctgacaaggaattcagatggctcaagtcggccgtgtcttcatccgaaaaggaatatgaacagatcagtaggaggacagacgacatcaaactggaactggatgatgaaaggagggagaagaagaagcttgaggaagagcttatggagttgaacaaagagcttgaagagttggattctgagagtgtagaagctgcaattgtgaggctccaggaagaagttaagaattgcaaaaacatcctcaaatgtggtgtatgttttgatcggcctaaagaggtggtaattgtgaaatgttatcatctgttctgccagcaatgcatccaacgtagcttagagatccgacaccggaaatgtccaggctgcggtaccgcctttggccagaatgacgtccggcttgtcaaaatgtaactcaaaacattcacacaaatgcactatgtgttggtacataacaaacttaattaaggtccacacagtcc

SEQ ID NO: 30420 - protein, 383 aa, Arabidopsis thaliana
  peptide (1)..(383): Ceres Seq. ID no. 12334785
MLTKADEQKGLEDKCAKQMAEIKSLKALIEKLLKEKLQLQNLASICTRECNDDRGLAEIKDSQRKAQAQAEELKNVLDEHFLELRVKAAHETESACQERLATAKAEIAELRTQLDLSEREVLELKEGIKVKEQEAEASIAEMETIGQAYEDMQTQNQHLLQQVAERDDYNIKLVSESVKTKHAYNTHLSEKQVMEKQLHQVNASVENFKARIAHNEEQMKGCFSEAYKLIQEDRHLVISLETTKWEVADADKEFRWLKSAVSSSEKEYEQISRRTDDIKLELDDERREKKKLEEELMELNKELEELDSESVEAAIVRLQEEVKNCKNILKCGVCFDRPKEVVIVKCYHLFCQQCIQRSLEIRHRKCPGCGTAFGQNDVRLVKM

SEQ ID NO: 30421 - protein, 365 aa, Arabidopsis thaliana
  peptide (1)..(365): Ceres Seq. ID no. 12334786
MAEIKSLKALIEKLLKEKLQLQNLASICTRECNDDRGLAEIKDSQRKAQAQAEELKNVLDEHFLELRVKAAHETESACQERLATAKAEIAELRTQLDLSEREVLELKEGIKVKEQEAEASIAEMETIGQAYEDMQTQNQHLLQQVAERDDYNIKLVSESVKTKHAYNTHLSEKQVMEKQLHQVNASVENFKARIAHNEEQMKGCFSEAYKLIQEDRHLVISLETTKWEVADADKEFRWLKSAVSSSEKEYEQISRRTDDIKLELDDERREKKKLEEELMELNKELEELDSESVEAAIVRLQEEVKNCKNILKCGVCFDRPKEVVIVKCYHLFCQQCIQRSLEIRHRKCPGCGTAFGQNDVRLVKM

SEQ ID NO: 30422 - protein, 242 aa, Arabidopsis thaliana
  peptide (1)..(242): Ceres Seq. ID no. 12334787
METIGQAYEDMQTQNQHLLQQVAERDDYNIKLVSESVKTKHAYNTHLSEKQVMEKQLHQVNASVENFKARIAHNEEQMKGCFSEAYKLIQEDRHLVISLETTKWEVADADKEFRWLKSAVSSSEKEYEQISRRTDDIKLELDDERREKKKLEEELMELNKELEELDSESVEAAIVRLQEEVKNCKNILKCGVCFDRPKEVVIVKCYHLFCQQCIQRSLEIRHRKCPGCGTAFGQNDVRLVKM

SEQ ID NO: 30423 - DNA, 1182 bp, Arabidopsis thaliana
  misc_feature (1)..(1182): Ceres Seq. ID no. 12482670
  misc_feature (1)..(1182): Ortholog of  Ceres SEQ ID NO 13594560 as cited in SEQ ID NO 51329
  misc_feature (1)..(1182): Ortholog of  Ceres SEQ ID NO 12613701 as cited in SEQ ID NO 67983
aaaaattcaaggctctttggcttcttctttcttctctgcacttgaatcaggttctcattgtttatacactaaaaaaaccttttttgcttactcggtgttgaaaaactgcttctctgtttttaactttggaaagaaaaaagtagaagcttttctcagaatgggttggtcgttgagaatgtggattgtgagtatactcgtgcttacacagctcgttaatggagctctctgttggggagacgctggtcattacgctgtctgcaaaatagctcagagttattttgaggaagatactgtagttgctgtgaagaaacttctgcctgaatctgcaaatggtgagctagcagctgtttgctcatggcctgatgaaatcaaaaagctcccgcaatggcgatggactagtgctttgcattttgctgatacgcctgattacaaatgcaactatgagtactctcgggactgtcctaaagactggtgtgtgacaggggcaatcttcaattacactaaccaactaatgtctacttctgaaaactcacagagtatagtccactataacttaacagaggctctcatgttcttatcacattatatgggagatatccatcagcctttacatgaaggttttattggagatctaggtggtaacaagataaaagttcactggtacaatcaggaaactaatttgcaccgtgtgtgggatgatatgataattgagtctgctctagaaacatactacaattcaagccttccacgcatgattcatgaacttcaagccaaactcaagaacggctggtcaaacgatgtaccttcatgggagtcatgtcaacttaaccaaacggcctgcccaaatccgtatgcttctgaaagcattgatcttgcctgcaagtatgcttacaggaacgccaccgcagggactactttaggagattactatttcgtctctcggttaccggtggtagagaagagacttgcacaaggcggaattcgcttggcagggactcttaaccgaatattttctgcaaaacggaagcttgctagagcatgaaaaaagatccaggagaatcacttgaacatccatgaacactcttatgtattaataatgtgtaatggtagtagttaaggttatggtttggtattgttcctgcgttttaactataataagtatgaaacgaaaactgtacgtct

SEQ ID NO: 30424 - protein, 346 aa, Arabidopsis thaliana
  peptide (1)..(346): Ceres Seq. ID no. 12482671
KIQGSLASSFFSALESGSHCLYTKKTFFAYSVLKNCFSVFNFGKKKVEAFLRMGWSLRMWIVSILVLTQLVNGALCWGDAGHYAVCKIAQSYFEEDTVVAVKKLLPESANGELAAVCSWPDEIKKLPQWRWTSALHFADTPDYKCNYEYSRDCPKDWCVTGAIFNYTNQLMSTSENSQSIVHYNLTEALMFLSHYMGDIHQPLHEGFIGDLGGNKIKVHWYNQETNLHRVWDDMIIESALETYYNSSLPRMIHELQAKLKNGWSNDVPSWESCQLNQTACPNPYASESIDLACKYAYRNATAGTTLGDYYFVSRLPVVEKRLAQGGIRLAGTLNRIFSAKRKLARA

SEQ ID NO: 30425 - protein, 294 aa, Arabidopsis thaliana
  peptide (1)..(294): Ceres Seq. ID no. 12482672
MGWSLRMWIVSILVLTQLVNGALCWGDAGHYAVCKIAQSYFEEDTVVAVKKLLPESANGELAAVCSWPDEIKKLPQWRWTSALHFADTPDYKCNYEYSRDCPKDWCVTGAIFNYTNQLMSTSENSQSIVHYNLTEALMFLSHYMGDIHQPLHEGFIGDLGGNKIKVHWYNQETNLHRVWDDMIIESALETYYNSSLPRMIHELQAKLKNGWSNDVPSWESCQLNQTACPNPYASESIDLACKYAYRNATAGTTLGDYYFVSRLPVVEKRLAQGGIRLAGTLNRIFSAKRKLARA

SEQ ID NO: 30426 - protein, 288 aa, Arabidopsis thaliana
  peptide (1)..(288): Ceres Seq. ID no. 12482673
MWIVSILVLTQLVNGALCWGDAGHYAVCKIAQSYFEEDTVVAVKKLLPESANGELAAVCSWPDEIKKLPQWRWTSALHFADTPDYKCNYEYSRDCPKDWCVTGAIFNYTNQLMSTSENSQSIVHYNLTEALMFLSHYMGDIHQPLHEGFIGDLGGNKIKVHWYNQETNLHRVWDDMIIESALETYYNSSLPRMIHELQAKLKNGWSNDVPSWESCQLNQTACPNPYASESIDLACKYAYRNATAGTTLGDYYFVSRLPVVEKRLAQGGIRLAGTLNRIFSAKRKLARA

SEQ ID NO: 30427 - DNA, 1375 bp, Arabidopsis thaliana
  misc_feature (1)..(1375): Ceres Seq. ID no. 13491061
  misc_feature (1)..(1375): Ortholog of  Ceres SEQ ID NO 12781552 as cited in SEQ ID NO 51997
  misc_feature (1)..(1375): Ortholog of  Ceres SEQ ID NO 13597237 as cited in SEQ ID NO 64136
  misc_feature (1)..(1375): Ortholog of  Ceres SEQ ID NO 13598601 as cited in SEQ ID NO 69129
aaaaaactaaacacaaaaatagaaaatatcgaaaatgagatgagagagagaggaggagtctctcatcgtgagtagggcttttgactccctccctactttgcctacttcttcttcttcctctgtggccactctacacagtccacacctacttcaagacacctttctcatccttgagatcggcgtcagatcctccgccgcttctcctcttcactatctccgtgttaaagatgatggaatctggcgctggtttcgtggccatggaagagaggatctctcctggaagtttcttccagtatcctctttctggattccgtgcttctcctaatcgatccccttgtcctccctctgatcgtgaaaggtacttgactgaattattgcaagagagacaaaagttgggtccctttttgcaagttatgccaaattgctgcagactgcttaatcatgaaatcaggagggtctctagttttcctgatcttgatagatatgagcatggcagtccatttagatcgcttggtcagccgacaaatggaaagcttgatttagagggatggtcgatgatgcaagccgaggaaaactgtcacctccagagagcttctccatttcgcggtccttccccagtgggctggattgggatgccgggactccctaacccacccattgtgaaaaaagtgattagacttgatgtcccagtggataaatatccaagctataattttgttgggaggattcttgggccacgtggaaactccctaaaaagagttgagctagcaacccactgcagggtgtttatcagaggacgaggatctgtgaaggatactgtcaaggaggaaaaattaaaaggtaagccagggtacgagcatctctgcgagccactacatgtactgatcgaggccgagcttccagaagacataataaactctcgattggagcatgcagtgcatttcctggaatcactcctgaagccgatggacgagtcaatggatcactacaagagggaacagctgaaggagttagcggctttgaatggtacactaagggaggagagtccgagtccgagcttgagcccttgtttgagccccagcatgtcccctttcaacagcaagcgtgctaagacagagatatgatcaagagaaaccactagtgcatgggtcttgtgggcaggatcatgagtttgctaagttctaacgtttggactcttgaattaatttattttgtcattaactttattctttatttttgttggttagctgagatgaccattaaccagtgggtaataaactaataatggtgtttatgaaattgtaatctccttctcaatcattgtaacctttatttaagttttaaaccccaaacgtttatttcattttaagttttg

SEQ ID NO: 30428 - protein, 298 aa, Arabidopsis thaliana
  peptide (1)..(298): Ceres Seq. ID no. 13491062
MMESGAGFVAMEERISPGSFFQYPLSGFRASPNRSPCPPSDRERYLTELLQERQKLGPFLQVMPNCCRLLNHEIRRVSSFPDLDRYEHGSPFRSLGQPTNGKLDLEGWSMMQAEENCHLQRASPFRGPSPVGWIGMPGLPNPPIVKKVIRLDVPVDKYPSYNFVGRILGPRGNSLKRVELATHCRVFIRGRGSVKDTVKEEKLKGKPGYEHLCEPLHVLIEAELPEDIINSRLEHAVHFLESLLKPMDESMDHYKREQLKELAALNGTLREESPSPSLSPCLSPSMSPFNSKRAKTEI

SEQ ID NO: 30429 - protein, 297 aa, Arabidopsis thaliana
  peptide (1)..(297): Ceres Seq. ID no. 13491063
MESGAGFVAMEERISPGSFFQYPLSGFRASPNRSPCPPSDRERYLTELLQERQKLGPFLQVMPNCCRLLNHEIRRVSSFPDLDRYEHGSPFRSLGQPTNGKLDLEGWSMMQAEENCHLQRASPFRGPSPVGWIGMPGLPNPPIVKKVIRLDVPVDKYPSYNFVGRILGPRGNSLKRVELATHCRVFIRGRGSVKDTVKEEKLKGKPGYEHLCEPLHVLIEAELPEDIINSRLEHAVHFLESLLKPMDESMDHYKREQLKELAALNGTLREESPSPSLSPCLSPSMSPFNSKRAKTEI

SEQ ID NO: 30430 - protein, 288 aa, Arabidopsis thaliana
  peptide (1)..(288): Ceres Seq. ID no. 13491064
MEERISPGSFFQYPLSGFRASPNRSPCPPSDRERYLTELLQERQKLGPFLQVMPNCCRLLNHEIRRVSSFPDLDRYEHGSPFRSLGQPTNGKLDLEGWSMMQAEENCHLQRASPFRGPSPVGWIGMPGLPNPPIVKKVIRLDVPVDKYPSYNFVGRILGPRGNSLKRVELATHCRVFIRGRGSVKDTVKEEKLKGKPGYEHLCEPLHVLIEAELPEDIINSRLEHAVHFLESLLKPMDESMDHYKREQLKELAALNGTLREESPSPSLSPCLSPSMSPFNSKRAKTEI

SEQ ID NO: 30431 - DNA, 1358 bp, Arabidopsis thaliana
  misc_feature (1)..(1358): Ceres Seq. ID no. 12423111
  misc_feature (1)..(1358): Ortholog of  Ceres SEQ ID NO 15178096 as cited in SEQ ID NO 52497
aaaaaaacccttctctgcttattatcaaaattctctctttttcccaaaaagattcacaaatttgttgtagtctcgccgttaagatggcgccggcgacggagcatcagagctcgttcttgagtcgactaagccgtcgcaatcaagtggtttccatggaggttaaccacgagcaagagcaagaagaactcgaagattttcaaaaacacgtagctgaacgtttcgcggagctcttaccaccgtcggattcgccggaatcttacccgattctttcgatccagtggctaaggaagcttcttgatgttttcatgtctatagaatcggagtttcattcggttttaacatcgaatccgtctcagatctcgaaacctccgttggataagcttgtaccggagatgcttgatcggattgttaaagctcttgatatttgtaccgccgtagtcaacggcgttgactcagtcagacaaatccaacgttgtgcggagattgctgttacggcgttgaaacaaacgccgttaagtgacggaagcgttaggagagctaaaagagctcttacaagcctcctcgccgctttaaacgctgataaaaacagcggtagcagcggcggaggaagtggtaggaggtcatcgacggatcagtggtcgtcgtttggtcgacgtagcggcggaagcagcggaggaggaggaggaggagcagggtgtgtgagtaagaattggtcagcggcgaagcagattcaagcaatgacggcgaatcttgtagcgccacgtggaggagaggcgtcgccgatgtatataatgagtagtgtgatggtaatggtgatgtggacgttagttgtagcggttccttgtcagacaagtaacggcttaatggttcatgtaccgctgccgaagaatcaggtatgggctagcgcggccgtgagtatctcggagagggtcggagaagagatgaaacggaaggagacgcgtggtggtggactgatggaggagatgcagaggatggagaggatctggttgaagctgatggagttcagtgaagggtttaggtttaatggggaggaggatgtggtggcggaagtggcggagatggaggagatttgccggaaaatggaagatgggcttgaggggttacagagaagagttagagaagtgtttcataggttggtgaaaagcagaagtgagatacttgaagtgattgatcactgattgtaatcttttaactttgttgttgtgaaaatttaatctttgagttaactcttttgattaagaaaagagaacaaattacaggttttttttgttttatttatgtgataatctttgatgtatataaattacaattcgtaattaaagaaagataatgtatgc

SEQ ID NO: 30432 - protein, 398 aa, Arabidopsis thaliana
  peptide (1)..(398): Ceres Seq. ID no. 12423112
KNPSLLIIKILSFSQKDSQICCSLAVKMAPATEHQSSFLSRLSRRNQVVSMEVNHEQEQEELEDFQKHVAERFAELLPPSDSPESYPILSIQWLRKLLDVFMSIESEFHSVLTSNPSQISKPPLDKLVPEMLDRIVKALDICTAVVNGVDSVRQIQRCAEIAVTALKQTPLSDGSVRRAKRALTSLLAALNADKNSGSSGGGSGRRSSTDQWSSFGRRSGGSSGGGGGGAGCVSKNWSAAKQIQAMTANLVAPRGGEASPMYIMSSVMVMVMWTLVVAVPCQTSNGLMVHVPLPKNQVWASAAVSISERVGEEMKRKETRGGGLMEEMQRMERIWLKLMEFSEGFRFNGEEDVVAEVAEMEEICRKMEDGLEGLQRRVREVFHRLVKSRSEILEVIDH

SEQ ID NO: 30433 - protein, 371 aa, Arabidopsis thaliana
  peptide (1)..(371): Ceres Seq. ID no. 12423113
MAPATEHQSSFLSRLSRRNQVVSMEVNHEQEQEELEDFQKHVAERFAELLPPSDSPESYPILSIQWLRKLLDVFMSIESEFHSVLTSNPSQISKPPLDKLVPEMLDRIVKALDICTAVVNGVDSVRQIQRCAEIAVTALKQTPLSDGSVRRAKRALTSLLAALNADKNSGSSGGGSGRRSSTDQWSSFGRRSGGSSGGGGGGAGCVSKNWSAAKQIQAMTANLVAPRGGEASPMYIMSSVMVMVMWTLVVAVPCQTSNGLMVHVPLPKNQVWASAAVSISERVGEEMKRKETRGGGLMEEMQRMERIWLKLMEFSEGFRFNGEEDVVAEVAEMEEICRKMEDGLEGLQRRVREVFHRLVKSRSEILEVIDH

SEQ ID NO: 30434 - protein, 348 aa, Arabidopsis thaliana
  peptide (1)..(348): Ceres Seq. ID no. 12423114
MEVNHEQEQEELEDFQKHVAERFAELLPPSDSPESYPILSIQWLRKLLDVFMSIESEFHSVLTSNPSQISKPPLDKLVPEMLDRIVKALDICTAVVNGVDSVRQIQRCAEIAVTALKQTPLSDGSVRRAKRALTSLLAALNADKNSGSSGGGSGRRSSTDQWSSFGRRSGGSSGGGGGGAGCVSKNWSAAKQIQAMTANLVAPRGGEASPMYIMSSVMVMVMWTLVVAVPCQTSNGLMVHVPLPKNQVWASAAVSISERVGEEMKRKETRGGGLMEEMQRMERIWLKLMEFSEGFRFNGEEDVVAEVAEMEEICRKMEDGLEGLQRRVREVFHRLVKSRSEILEVIDH

SEQ ID NO: 30435 - DNA, 711 bp, Arabidopsis thaliana
  misc_feature (1)..(711): Ceres Seq. ID no. 12482108
  misc_feature (1)..(711): Ortholog of  Ceres SEQ ID NO 13583388 as cited in SEQ ID NO 62058
aaacccatttagcttttgacttgtgttgttcttcgtcgctctgtcttaatattccctcaccaactcgtttcatttggggacaagcttcttcgattttcctctcagaccaatcgggctttcgaatcccatcagtagaaatggctacatcaaggttccaagcattcttgaacagtcccattggcccaaaaacaactcatttctgggggcctatcgctaattggggttttgttgctgctggtttggtggatatgcaaaagccccctgaaatgatttctggaaacatgtcgtcagctatgtgcgtttactctgcattgttcatgaggtttgcctggatggtgcaaccacgtaactatttgctacttgcgtgccatgcatcaaacgagactgtacaactctatcagctctcacgttgggctagagcccaggggtatttatcctccaagaaagaagaggagaaaccatctcagtaaaccaaaatgaggaaaggtttcttcaacgctgcttcagaatttgttcgtgggaattactgaatccatccatttgattttctttcgaaacgtgttttgtattgtgtccccaagctatggttgctttacttgttggatcattcactaacattatatcctttgttttcataagtaaccgcttgtaataaaatttgggaccagtcgtcattccacattcgtgttcacacaaaaaaggggttcaaac

SEQ ID NO: 30436 - protein, 155 aa, Arabidopsis thaliana
  peptide (1)..(155): Ceres Seq. ID no. 12482109
THLAFDLCCSSSLCLNIPSPTRFIWGQASSIFLSDQSGFRIPSVEMATSRFQAFLNSPIGPKTTHFWGPIANWGFVAAGLVDMQKPPEMISGNMSSAMCVYSALFMRFAWMVQPRNYLLLACHASNETVQLYQLSRWARAQGYLSSKKEEEKPSQ

SEQ ID NO: 30437 - protein, 110 aa, Arabidopsis thaliana
  peptide (1)..(110): Ceres Seq. ID no. 12482110
MATSRFQAFLNSPIGPKTTHFWGPIANWGFVAAGLVDMQKPPEMISGNMSSAMCVYSALFMRFAWMVQPRNYLLLACHASNETVQLYQLSRWARAQGYLSSKKEEEKPSQ

SEQ ID NO: 30438 - DNA, 2369 bp, Arabidopsis thaliana
  misc_feature (1)..(2369): Ceres Seq. ID no. 12327544
  misc_feature (1)..(2369): Ortholog of  Ceres SEQ ID NO 14315309 as cited in SEQ ID NO 53998
  misc_feature (1)..(2369): Ortholog of  Ceres SEQ ID NO 13638213 as cited in SEQ ID NO 57275
atctacgtgcatccacctctctcttcttcttcttgtgaccactcttcctgtctgttcactggaggtgaattttgatttttttggccgatcggatttgagtttttgaatctctgattgctgagaaaatgccggcgttttacggaggaaagcttacgaccttcgaggacgatgagaaggagagcgagtatggttacgttcgtaaggtttcaggtcctgttgttgttgccgatggtatggccggtgctgctatgtatgagttagtgcgtgttggtcatgataatttgattggtgaaatcatccgtcttgaaggagattctgccaccatccaagtttacgaggaaacagctggattgacagttaatgatcccgttcttcgaacacacaagccactttctgtggagctcgggccaggaatattgggaaatatctttgatggaattcagaggcctttgaagactattgcaagaatatccggtgatgtgtacattcctcggggtgtgtctgttccagctcttgacaaagattgtctttgggagttccagcccaataaatttgtcgagggagacacaataactggtggtgacttgtatgctactgtctttgagaacactttgatgaatcacctcgttgcccttcctccggatgccatggggaagatcacttacattgctccagctggtcaatattcgcttaaggataccgtgatagagcttgaattccaggggatcaagaaatcttacaccatgcttcagagctggcctgtacgtacgcctaggccagttgcatcaaagcttgctgccgatactcctctacttacggggcagcgtgttcttgatgcccttttcccttctgttcttggtggaacctgtgccattcctggtgcttttggctgtgggaaaactgttatcagtcaggcactttccaagtactccaactctgatgctgttgtgtatgttggttgtggagagagaggaaatgaaatggctgaggttcttatggacttcccacaattgacaatgacgttgcctgatggccgtgaggaatctgtcatgaaacgtaccacacttgttgctaacacctctaacatgcctgtggctgctcgtgaagcctcaatttacacaggaatcacaatcgctgaatattttagagatatgggctacaatgttagtatgatggcagactcaacttcccgttgggcagaagcattaagagaaatttcaggacggctggctgaaatgcctgctgacagtggatatccagcctatctagcagcacgtttagcatctttctatgaacgtgctggtaaagtaaaatgtcttggtggaccagaacgtaacggaagtgttacaattgttggtgcagtttcgcctcctggaggagacttttcagatcctgtgacttcagcaacccttagtattgtgcaggtcttctggggtttggacaaaaagcttgcccagagaaaacattttccctctgttaattggttgatttcttactcaaagtattcaacggcactggaatctttctatgagaagttcgatccagatttcatcaacatcaggacaaaggccagagaggtgttgcagagggaagacgatcttaatgaaattgtccagcttgtaggaaaagatgcgctagcagaaggggacaaaatcacattggaaacagctaagctattgagggaagattaccttgctcaaaacgcgtttacaccatatgacaaattctgtcctttctacaagtccgtgtggatgatgcgtaacattatccatttctacaacctagccaaccaggcggttgagagagcagctggaatggacggtcaaaagattacctacactcttatcaagcatcgcttaggagatcttttctaccgtttagtgtctcagaagttcgaagacccagcagaaggggaggatacactggtggaaaaattcaagaaattgtacgacgatctcaatgctggattccgtgctttggaagatgaaactcggtaagctgtcgagtctccaccgcaagtaaaaaaaatccacagaattgggttgtttttggagaaagagggtttcattcatggtctctttcttgtgtttttgaaccaacaactatcatagtggtcggtattttatttatcggtttggtcgatcgattgagttttagctctgtgagcgtcatgattctccggctgtgctgtgctgtgtaatatgtttgattcgttgttttcatgtttttatttcggtggtaataaggtacagccaatgtgagtcatatatttgatttgatgtaccctctcaattcaataagttaattttatgtccaaaaacatattggggataccgttatttttctcataataaataccatcattttgt

SEQ ID NO: 30439 - protein, 623 aa, Arabidopsis thaliana
  peptide (1)..(623): Ceres Seq. ID no. 12327545
MPAFYGGKLTTFEDDEKESEYGYVRKVSGPVVVADGMAGAAMYELVRVGHDNLIGEIIRLEGDSATIQVYEETAGLTVNDPVLRTHKPLSVELGPGILGNIFDGIQRPLKTIARISGDVYIPRGVSVPALDKDCLWEFQPNKFVEGDTITGGDLYATVFENTLMNHLVALPPDAMGKITYIAPAGQYSLKDTVIELEFQGIKKSYTMLQSWPVRTPRPVASKLAADTPLLTGQRVLDALFPSVLGGTCAIPGAFGCGKTVISQALSKYSNSDAVVYVGCGERGNEMAEVLMDFPQLTMTLPDGREESVMKRTTLVANTSNMPVAAREASIYTGITIAEYFRDMGYNVSMMADSTSRWAEALREISGRLAEMPADSGYPAYLAARLASFYERAGKVKCLGGPERNGSVTIVGAVSPPGGDFSDPVTSATLSIVQVFWGLDKKLAQRKHFPSVNWLISYSKYSTALESFYEKFDPDFINIRTKAREVLQREDDLNEIVQLVGKDALAEGDKITLETAKLLREDYLAQNAFTPYDKFCPFYKSVWMMRNIIHFYNLANQAVERAAGMDGQKITYTLIKHRLGDLFYRLVSQKFEDPAEGEDTLVEKFKKLYDDLNAGFRALEDETR

SEQ ID NO: 30440 - protein, 587 aa, Arabidopsis thaliana
  peptide (1)..(587): Ceres Seq. ID no. 12327546
MAGAAMYELVRVGHDNLIGEIIRLEGDSATIQVYEETAGLTVNDPVLRTHKPLSVELGPGILGNIFDGIQRPLKTIARISGDVYIPRGVSVPALDKDCLWEFQPNKFVEGDTITGGDLYATVFENTLMNHLVALPPDAMGKITYIAPAGQYSLKDTVIELEFQGIKKSYTMLQSWPVRTPRPVASKLAADTPLLTGQRVLDALFPSVLGGTCAIPGAFGCGKTVISQALSKYSNSDAVVYVGCGERGNEMAEVLMDFPQLTMTLPDGREESVMKRTTLVANTSNMPVAAREASIYTGITIAEYFRDMGYNVSMMADSTSRWAEALREISGRLAEMPADSGYPAYLAARLASFYERAGKVKCLGGPERNGSVTIVGAVSPPGGDFSDPVTSATLSIVQVFWGLDKKLAQRKHFPSVNWLISYSKYSTALESFYEKFDPDFINIRTKAREVLQREDDLNEIVQLVGKDALAEGDKITLETAKLLREDYLAQNAFTPYDKFCPFYKSVWMMRNIIHFYNLANQAVERAAGMDGQKITYTLIKHRLGDLFYRLVSQKFEDPAEGEDTLVEKFKKLYDDLNAGFRALEDETR

SEQ ID NO: 30441 - protein, 582 aa, Arabidopsis thaliana
  peptide (1)..(582): Ceres Seq. ID no. 12327547
MYELVRVGHDNLIGEIIRLEGDSATIQVYEETAGLTVNDPVLRTHKPLSVELGPGILGNIFDGIQRPLKTIARISGDVYIPRGVSVPALDKDCLWEFQPNKFVEGDTITGGDLYATVFENTLMNHLVALPPDAMGKITYIAPAGQYSLKDTVIELEFQGIKKSYTMLQSWPVRTPRPVASKLAADTPLLTGQRVLDALFPSVLGGTCAIPGAFGCGKTVISQALSKYSNSDAVVYVGCGERGNEMAEVLMDFPQLTMTLPDGREESVMKRTTLVANTSNMPVAAREASIYTGITIAEYFRDMGYNVSMMADSTSRWAEALREISGRLAEMPADSGYPAYLAARLASFYERAGKVKCLGGPERNGSVTIVGAVSPPGGDFSDPVTSATLSIVQVFWGLDKKLAQRKHFPSVNWLISYSKYSTALESFYEKFDPDFINIRTKAREVLQREDDLNEIVQLVGKDALAEGDKITLETAKLLREDYLAQNAFTPYDKFCPFYKSVWMMRNIIHFYNLANQAVERAAGMDGQKITYTLIKHRLGDLFYRLVSQKFEDPAEGEDTLVEKFKKLYDDLNAGFRALEDETR

SEQ ID NO: 30442 - DNA, 903 bp, Arabidopsis thaliana
  misc_feature (1)..(903): Ceres Seq. ID no. 12372123
  misc_feature (1)..(903): Ortholog of  Ceres SEQ ID NO 12466413 as cited in SEQ ID NO 20470
  misc_feature (1)..(903): Ortholog of  Ceres SEQ ID NO 13594684 as cited in SEQ ID NO 52062
  misc_feature (1)..(903): Ortholog of  Ceres SEQ ID NO 13661434 as cited in SEQ ID NO 61387
  misc_feature (1)..(903): Ortholog of  Ceres SEQ ID NO 15178869 as cited in SEQ ID NO 0
gtcgttttattgtagtttctccgcgtttggtacatcaacacttgtagctgtgtatctttctaattcttcctttctttcgctgacagtgcttgctcacacactaatcgcaattgttgctgcattgccgactctgattcgttcgatttcagcattttgttcttccgaagcgatgcctcgtcgatccggagattgcatgagatgtctggtgattttcgcggttgtatcagctttagttgtgtgtggacctgctctttattggaaattcaacaagggtttcgttggatccacacgtgccaactctctttgtcctccttgcgtttgtgattgtcctcctcctttgtctcttctccagattgctcctgggctcgcaaatctctctattacagattgtggaagcgacgatccagagcttaaacaagagatggagaagcaatttgtggaccttctgactgaggagctgaagctgcaagaagcagttgcagatgagcatagccgtcatatgaatgttacccttgcagaagctaaaagggttgcatctcagtatcaaaaggaggctgagaagtgcaatgccgccactgagatttgtgaatcagctagagagagagctgaagctttgttgatcaaggagaggaagattacttctttgtgggagaagagagctcggcaatcaggttgggaaggtgagtaaactgattgcacttctcagtctaccttaaagtgtttctctctgagaaatcgaattgtcacagctctaaaaggaaattgtttagttgtcaaggcaaagtcctatcttccacgtttctctatatacagtatgtagttttttgttttgcccttgatcggaatgtagctaaagaaaggccttgtatcaacttttattcatatataattgtccatttcttt

SEQ ID NO: 30443 - protein, 228 aa, Arabidopsis thaliana
  peptide (1)..(228): Ceres Seq. ID no. 12372124
SFYCSFSAFGTSTLVAVYLSNSSFLSLTVLAHTLIAIVAALPTLIRSISAFCSSEAMPRRSGDCMRCLVIFAVVSALVVCGPALYWKFNKGFVGSTRANSLCPPCVCDCPPPLSLLQIAPGLANLSITDCGSDDPELKQEMEKQFVDLLTEELKLQEAVADEHSRHMNVTLAEAKRVASQYQKEAEKCNAATEICESARERAEALLIKERKITSLWEKRARQSGWEGE

SEQ ID NO: 30444 - protein, 172 aa, Arabidopsis thaliana
  peptide (1)..(172): Ceres Seq. ID no. 12372125
MPRRSGDCMRCLVIFAVVSALVVCGPALYWKFNKGFVGSTRANSLCPPCVCDCPPPLSLLQIAPGLANLSITDCGSDDPELKQEMEKQFVDLLTEELKLQEAVADEHSRHMNVTLAEAKRVASQYQKEAEKCNAATEICESARERAEALLIKERKITSLWEKRARQSGWEGE

SEQ ID NO: 30445 - protein, 164 aa, Arabidopsis thaliana
  peptide (1)..(164): Ceres Seq. ID no. 12372126
MRCLVIFAVVSALVVCGPALYWKFNKGFVGSTRANSLCPPCVCDCPPPLSLLQIAPGLANLSITDCGSDDPELKQEMEKQFVDLLTEELKLQEAVADEHSRHMNVTLAEAKRVASQYQKEAEKCNAATEICESARERAEALLIKERKITSLWEKRARQSGWEGE

SEQ ID NO: 30446 - DNA, 675 bp, Arabidopsis thaliana
  misc_feature (1)..(675): Ceres Seq. ID no. 12322124
  misc_feature (1)..(675): Ortholog of  Ceres SEQ ID NO 15224286 as cited in SEQ ID NO 62627
aataaagtttttatttatctatctatccaattggagacgaatcatatcgagcgatggatttggcagaactgtgggcgattttcggacccggattctccggcgccgttttcggaaccgggtggtggttttgggtcgacgccgtcgtttgcagttccatccaagttcccttcgtccattaccttcccggcatattcgcttctctcggagctttgatgttcaattgcgtcagaaaagaagacattgattactctccttacgacgaaggcgagtggagattgaagctgtggcttttcatagcgtatgtcgtagcatttgtttccttagctgcttctgttggcttgctgattcaagattcggttgtgaagactgggccttcaacttggactggtgtggctggtgtctttcaatgtgtatttgtattgataagtgggctaatgtattggacatcgcactcagagtagcgcacaggcacatacttcatctccgactcagattcatactgtgacaacttacaagttcctctcgtttctctactatgtaaattcctgtgtcttgtcttgtcaccttggcattgtgtgcgagattcctctgttgcatcagtgtgtgtttctgttaaaactttgtgtgaatgttattgaaaatactccaaatcaatcagttgtccaaagagaacgc

SEQ ID NO: 30447 - protein, 135 aa, Arabidopsis thaliana
  peptide (1)..(135): Ceres Seq. ID no. 12322125
MDLAELWAIFGPGFSGAVFGTGWWFWVDAVVCSSIQVPFVHYLPGIFASLGALMFNCVRKEDIDYSPYDEGEWRLKLWLFIAYVVAFVSLAASVGLLIQDSVVKTGPSTWTGVAGVFQCVFVLISGLMYWTSHSE

SEQ ID NO: 30448 - protein, 82 aa, Arabidopsis thaliana; identical to SEQ ID NO: 26444
  peptide (1)..(82): Ceres Seq. ID no. 12322126

SEQ ID NO: 30449 - protein, 80 aa, Arabidopsis thaliana
  peptide (1)..(80): Ceres Seq. ID no. 12322127
IKFLFIYLSNWRRIISSDGFGRTVGDFRTRILRRRFRNRVVVLGRRRRLQFHPSSLRPLPSRHIRFSRSFDVQLRQKRRH

SEQ ID NO: 30450 - DNA, 1040 bp, Arabidopsis thaliana
  misc_feature (1)..(1040): Ceres Seq. ID no. 13492462
  misc_feature (1)..(1040): Ortholog of  Ceres SEQ ID NO 14312281 as cited in SEQ ID NO 59172
  misc_feature (1)..(1040): Ortholog of  Ceres SEQ ID NO 14302299 as cited in SEQ ID NO 68665
  misc_feature (1)..(1040): Ortholog of  Ceres SEQ ID NO 15174396 as cited in SEQ ID NO 0
aaacattgaaacactttgtcccactctctctctttctctttcttgtaccaaaagctttttgaatctccaagattatagcaaaaccaaagataaaatactaacttaaaaagatttctgaaaataatgagttgcaatggttgtcgagttctacgaaaaggttgcagtgagaattgcatcctccgtccatgtattcaatggatcgaatcacctgaagctcaaggccacgccaccgtcttcgtcgctaagttcttcggccgtgccggtttaatgtctttcatctccgccgtaccggaatctcaatgccctgctttgtttcagtctttgctatacgaagcttgtgggagaactgtgaatccggtgaacggagccgtcggattgttgtggacggggaattggaatgtttgtcaagcggcggttgagacggtgcttcgtggtggttctttaaaaccaataccggagcttcttaacggcggtggattcgccgggtttccgtctcctacttccgacgaagcttcggagatctgtacggaaatgttgaatctacgaaaagctgatgattccggtgatcggaacatttatcatcactgccgattctcaagctctagatctagatcaagatcaacagcttctccgccgaaacggaaacgattatcgtcggaacaacaaccttcgtcggagcttgatctctctcttattcctatttatccgattaaaaccttgccgtttaaggaagatacaccgtcgatgtactcggaggagtctgttaccacggtttcgtttcaaaacaacaacgccggtgatcggtacgtacgctgcggcggaggaggaggaggagcaacgacaaagttgctcaatctcttcgcttgaacggcgtcgtttttgttatgagggttaaaaatgtaatttcgagtaactttttgttgtggccttttttggattaatagcccttaatattttgtgaaatgtagcaaattacgtgatttatttctctctttaattatgagaaattatccaaagtaatagagaataatgatataatt

SEQ ID NO: 30451 - protein, 247 aa, Arabidopsis thaliana
  peptide (1)..(247): Ceres Seq. ID no. 13492463
MSCNGCRVLRKGCSENCILRPCIQWIESPEAQGHATVFVAKFFGRAGLMSFISAVPESQCPALFQSLLYEACGRTVNPVNGAVGLLWTGNWNVCQAAVETVLRGGSLKPIPELLNGGGFAGFPSPTSDEASEICTEMLNLRKADDSGDRNIYHHCRFSSSRSRSRSTASPPKRKRLSSEQQPSSELDLSLIPIYPIKTLPFKEDTPSMYSEESVTTVSFQNNNAGDRYVRCGGGGGGATTKLLNLFA

SEQ ID NO: 30452 - protein, 199 aa, Arabidopsis thaliana
  peptide (1)..(199): Ceres Seq. ID no. 13492464
MSFISAVPESQCPALFQSLLYEACGRTVNPVNGAVGLLWTGNWNVCQAAVETVLRGGSLKPIPELLNGGGFAGFPSPTSDEASEICTEMLNLRKADDSGDRNIYHHCRFSSSRSRSRSTASPPKRKRLSSEQQPSSELDLSLIPIYPIKTLPFKEDTPSMYSEESVTTVSFQNNNAGDRYVRCGGGGGGATTKLLNLFA

SEQ ID NO: 30453 - DNA, 662 bp, Arabidopsis thaliana
  misc_feature (1)..(662): Ceres Seq. ID no. 12579870
  misc_feature (1)..(662): Ortholog of  Ceres SEQ ID NO 13600689 as cited in SEQ ID NO 0
  misc_feature (1)..(662): Ortholog of  Ceres SEQ ID NO 15178120 as cited in SEQ ID NO 0
atttgctttttctttcatatcttttcgttaattgttgttgttatcttcaacgatagcgttgtgctctggagaagtgtttgatcgcagaaaagcttcgttctttgtagtctacaggcgtggaaggaatggcaaaaagctcgttcaagcaagagcatgacttagagaagagaagggcagaggctgctaggattagagagaagtatcctgataggattccggtgattgttgagaaggctgagaagagtgatataccaaccatcgacaagaaaaagtacctagtcccggctgatctgactgtgggacagtttgtgtatgtcattcgcaaaagaatcaaattgagtgcagaaaaggctatcttcatattcgtggacaatgttcttcctccaacaggtgcgctcatgtcttctgtgtacgaagagaaaaaggatgatgatgggttcctctatgtcacttaaagcggagaaaacacatttggatttggatctccataatagagacctcttgctggatatttcattttactcctctctattttcaccaaatatttcatcttcttattaattactaagcaagcaagccacctatgtacttattctctaaggacctttggtcgggcgttaatatgtacagaaaacataaaataatgtatataatcttctttc

SEQ ID NO: 30454 - protein, 109 aa, Arabidopsis thaliana
  peptide (1)..(109): Ceres Seq. ID no. 12579871
MAKSSFKQEHDLEKRRAEAARIREKYPDRIPVIVEKAEKSDIPTIDKKKYLVPADLTVGQFVYVIRKRIKLSAEKAIFIFVDNVLPPTGALMSSVYEEKKDDDGFLYVT

SEQ ID NO: 30455 - protein, 62 aa, Arabidopsis thaliana
  peptide (1)..(62): Ceres Seq. ID no. 12579872
MFFLQQVRSCLLCTKRKRMMMGSSMSLKAEKTHLDLDLHNRDLLLDISFYSSLFSPNISSSY

SEQ ID NO: 30456 - DNA, 737 bp, Arabidopsis thaliana
  misc_feature (1)..(737): Ceres Seq. ID no. 13653789
  misc_feature (1)..(737): Ortholog of  Ceres SEQ ID NO 12610954 as cited in SEQ ID NO 55930
  misc_feature (1)..(737): Ortholog of  Ceres SEQ ID NO 12625335 as cited in SEQ ID NO 63326
  misc_feature (1)..(737): Ortholog of  Ceres SEQ ID NO 12566590 as cited in SEQ ID NO 0
  misc_feature (1)..(737): Ortholog of  Ceres SEQ ID NO 14305152 as cited in SEQ ID NO 0
  misc_feature (1)..(737): Ortholog of  Ceres SEQ ID NO 15179949 as cited in SEQ ID NO 0
ctcgcattaagtccaaacactttcatttgtctcctttcgtcaactccacagagatctcctcatggctccaattgctgtcggcgatgtcgtaccagacggaactatctccttcttcgatgagaatgatcaacttcagaccgcctccgttcactctctcgccgccggtaaaaaagtcattctctttggtgttcctggtgctttcactcccacttgcagcatgaagcatgttcctgggttcattgagaaagcagaggagctgaagtcaaagggtgttgatgagatcatttgctttagcgtgaacaatccgtttgtgatgaaagcatgggggaaaacatacccagagaacaaacatgtgaagtttgtagctgatgggtctggagaatacacacaccttctcggacttgagcttgaccttaaagacaagggtcttggtgttaggtcaaggagatttgctctgttacttgatgatctcaaagtgactgtagccaatgtcgaatctggtggcgaattcacagtttccagcgccgatgatatcctcaaggctctctaagaaatgtaccacttgtgttgtctatgtaaaccgctgtatgtgtagtagaggattctatagcttgttctcagacattaaccaaggttgtaataaagcggtttcattgtgacttgtttggcataacaaagtatttggttttgttgtttttctgtgcgttgattaatgaaagatgtgactcattgacgtc

SEQ ID NO: 30457 - protein, 162 aa, Arabidopsis thaliana
  peptide (1)..(162): Ceres Seq. ID no. 13653790
MAPIAVGDVVPDGTISFFDENDQLQTASVHSLAAGKKVILFGVPGAFTPTCSMKHVPGFIEKAEELKSKGVDEIICFSVNNPFVMKAWGKTYPENKHVKFVADGSGEYTHLLGLELDLKDKGLGVRSRRFALLLDDLKVTVANVESGGEFTVSSADDILKAL

SEQ ID NO: 30458 - protein, 110 aa, Arabidopsis thaliana
  peptide (1)..(110): Ceres Seq. ID no. 13653791
MKHVPGFIEKAEELKSKGVDEIICFSVNNPFVMKAWGKTYPENKHVKFVADGSGEYTHLLGLELDLKDKGLGVRSRRFALLLDDLKVTVANVESGGEFTVSSADDILKAL

SEQ ID NO: 30459 - DNA, 706 bp, Arabidopsis thaliana
  misc_feature (1)..(706): Ceres Seq. ID no. 12325438
  misc_feature (1)..(706): Ortholog of  Ceres SEQ ID NO 15172974 as cited in SEQ ID NO 67643
gtacaagtggaattttgaaaaaagaagcagagagcgatggagaaagtggttgatctcttcggagtcggagaagctaattcccagaagctactcgaaggaggcaaagatctcagcgagatccaacagggattgttcataggatcagtagctgaagcgaataacaaggattttctcaaaagctctaatatcactcatgtcttaaccgttgctgtggccttggctcctccttatcctgatgattttgtctacaaagtcattgaagtatatttcgatgagtgttatagcttcatcgaccaagctattcaatctggtggtggtgttttggttcattgcttcatgggaatgtctaggagtgtgactatagtggtggcttacctgatgaaaaagcatggaatgggattctctaaagctatggaacttgtaaggagccgacgacatcaggcatatcctaatcccggtttcatttcgcagctccagcaatttgaaaaatccatccaaggtaatgcatgattgcttcacctgataagaagattcaagaaagtggcatgatgaactctcatgaaattccggcaagtgtcttcagccccatgttggccaaaaaagttgattggtttcgtgctgtgaaggattttttcttgtgaactattgatggtgagcactttgccatgtccattagccaattgaaattaatgataacgcagaattt

SEQ ID NO: 30460 - protein, 157 aa, Arabidopsis thaliana
  peptide (1)..(157): Ceres Seq. ID no. 12325439
MEKVVDLFGVGEANSQKLLEGGKDLSEIQQGLFIGSVAEANNKDFLKSSNITHVLTVAVALAPPYPDDFVYKVIEVYFDECYSFIDQAIQSGGGVLVHCFMGMSRSVTIVVAYLMKKHGMGFSKAMELVRSRRHQAYPNPGFISQLQQFEKSIQGNA

SEQ ID NO: 30461 - DNA, 904 bp, Arabidopsis thaliana
  misc_feature (1)..(904): Ceres Seq. ID no. 12323499
  misc_feature (1)..(904): Ortholog of  Ceres SEQ ID NO 13638855 as cited in SEQ ID NO 52073
  misc_feature (1)..(904): Ortholog of  Ceres SEQ ID NO 15179503 as cited in SEQ ID NO 0
aaacaaaacgtagacacttcatcttcctctctctcctgcgcttttctttactcaggttcacattacttgctgatttggatttttttcatctgcggttttctcttccaagcaacaatggtgtcggcgaacagagaaatggctgtttactgtttcgacactttggtctctcactacaacaatgaagagactccaccacctgcctttgaagaggccaatcatccattgtttgttacctggaagaaaatagtgaatggtggagagcctcggttgcgtggatgtattggtacactggaagcacgccgcttgatcagtggcttcaaggattatgccttgacaagtgccttgagggatcgcaggttcccacctatacaggccaaagaattgccatctctgcagtgtacggtgtctgtcttgactgattatgaagatgcagaagattaccttgattgggaggttggtaagcatggtataatcattgagtttactgaacctgagactaatacaaagcgaagcgccacatatttgcctgaggtgccagctcatgaaggctggacaaagatagaggcaatcgattcgctggtgcgtaaagcaggatacaatggtgtaataacagaagcagtgcgtaggcgaatcaatctaacgcgttaccagagtacattattcagcatgcattatagcgaatacctttcatatgtgaaggcgaccaggggcgttgttggcccggttattaatgggatcaacaagcacgcctttgcctgatttgcacctgcaaatggatgccattgattatgtttggctacctcctaatttatcctctgtcttgttgtctggctctcataaaagaaacgagacttcgaacttggctgtttcactattgtaacattaattaaatcactttcatccc

SEQ ID NO: 30462 - protein, 252 aa, Arabidopsis thaliana
  peptide (1)..(252): Ceres Seq. ID no. 12323500
KQNVDTSSSSLSCAFLYSGSHYLLIWIFFICGFLFQATMVSANREMAVYCFDTLVSHYNNEETPPPAFEEANHPLFVTWKKIVNGGEPRLRGCIGTLEARRLISGFKDYALTSALRDRRFPPIQAKELPSLQCTVSVLTDYEDAEDYLDWEVGKHGIIIEFTEPETNTKRSATYLPEVPAHEGWTKIEAIDSLVRKAGYNGVITEAVRRRINLTRYQSTLFSMHYSEYLSYVKATRGVVGPVINGINKHAFA

SEQ ID NO: 30463 - protein, 214 aa, Arabidopsis thaliana
  peptide (1)..(214): Ceres Seq. ID no. 12323501
MVSANREMAVYCFDTLVSHYNNEETPPPAFEEANHPLFVTWKKIVNGGEPRLRGCIGTLEARRLISGFKDYALTSALRDRRFPPIQAKELPSLQCTVSVLTDYEDAEDYLDWEVGKHGIIIEFTEPETNTKRSATYLPEVPAHEGWTKIEAIDSLVRKAGYNGVITEAVRRRINLTRYQSTLFSMHYSEYLSYVKATRGVVGPVINGINKHAFA

SEQ ID NO: 30464 - protein, 207 aa, Arabidopsis thaliana
  peptide (1)..(207): Ceres Seq. ID no. 12323502
MAVYCFDTLVSHYNNEETPPPAFEEANHPLFVTWKKIVNGGEPRLRGCIGTLEARRLISGFKDYALTSALRDRRFPPIQAKELPSLQCTVSVLTDYEDAEDYLDWEVGKHGIIIEFTEPETNTKRSATYLPEVPAHEGWTKIEAIDSLVRKAGYNGVITEAVRRRINLTRYQSTLFSMHYSEYLSYVKATRGVVGPVINGINKHAFA

SEQ ID NO: 30465 - DNA, 1243 bp, Arabidopsis thaliana; identical to SEQ ID NO: 20950
  misc_feature (1)..(1243): Ceres Seq. ID no. 12394450
  misc_feature (1)..(1243): Ortholog of  Ceres SEQ ID NO 13581579 as cited in SEQ ID NO 58361
  misc_feature (1)..(1243): Ortholog of  Ceres SEQ ID NO 13596474 as cited in SEQ ID NO 62169
  misc_feature (1)..(1243): Ortholog of  Ceres SEQ ID NO 13596969 as cited in SEQ ID NO 63375
  misc_feature (1)..(1243): Ortholog of  Ceres SEQ ID NO 13584480 as cited in SEQ ID NO 64751
  misc_feature (1)..(1243): Ortholog of  Ceres SEQ ID NO 13597519 as cited in SEQ ID NO 64759
  misc_feature (1)..(1243): Ortholog of  Ceres SEQ ID NO 13597870 as cited in SEQ ID NO 64982
  misc_feature (1)..(1243): Ortholog of  Ceres SEQ ID NO 13595926 as cited in SEQ ID NO 67778
  misc_feature (1)..(1243): Ortholog of  Ceres SEQ ID NO 13596362 as cited in SEQ ID NO 67877

SEQ ID NO: 30466 - protein, 345 aa, Arabidopsis thaliana; identical to SEQ ID NO: 20951
  peptide (1)..(345): Ceres Seq. ID no. 12394451

SEQ ID NO: 30467 - protein, 322 aa, Arabidopsis thaliana; identical to SEQ ID NO: 20952
  peptide (1)..(322): Ceres Seq. ID no. 12394452

SEQ ID NO: 30468 - protein, 312 aa, Arabidopsis thaliana; identical to SEQ ID NO: 20953
  peptide (1)..(312): Ceres Seq. ID no. 12394453

SEQ ID NO: 30469 - DNA, 950 bp, Arabidopsis thaliana
  misc_feature (1)..(950): Ceres Seq. ID no. 13499517
  misc_feature (1)..(950): Ortholog of  Ceres SEQ ID NO 14306349 as cited in SEQ ID NO 59320
actacacccaaaagaacatctttccttcgaattttctttcaattaacatttcttttacttgtctccttgtgtcttcacttcacatcacaacatggctttgaagacagttttcgtagcttttatgattctccttgccatctattcgcaaacgacgtttggggacgatgtgaagtgcgagaatctggatgaaaacacgtgtgccttcgcggtctcgtccactggaaaacgttgcgttttggagaagagcatgaagaggagcgggatcgaggtgtacacatgtcgatcatcggagatagaagctaacaaggtcacaaacattattgaatcggacgagtgcattaaagcgtgtggtctagaccggaaagctttaggtatatcttcggacgcattgttggaatctcagttcacacataaactctgctcggttaaatgcttaaaccaatgtcctaacgtagtcgatctctacttcaaccttgctgctggtgaaggagtgtatttaccaaagctatgtgaatcacaagaagggaagtcaagaagagcaatgtcggaaattaggagctcgggaattgcaatggacactcttgcaccggttggaccagtcatgttgggcgagatagcacctgagccggctacttcaatggacaacatgccttacgtgccggcaccttcaccgtattaattaaggcaagggaaaatggagaggacacgtatgatatcatgagttttcgacgagaataattaagagatttatgtttagttcgacggttttagtattacatcgtttattgcgtccttatatatatgtacttcataaaaacacaccacgacacattaagagatggtgaaagtaggctgcgttctggtgtaacttttacacaagtaacgtcttataatatatatgattcgaataaaatgttgagttttggtgaaaatatataatatgtttctgc

SEQ ID NO: 30470 - protein, 195 aa, Arabidopsis thaliana
  peptide (1)..(195): Ceres Seq. ID no. 13499518
MALKTVFVAFMILLAIYSQTTFGDDVKCENLDENTCAFAVSSTGKRCVLEKSMKRSGIEVYTCRSSEIEANKVTNIIESDECIKACGLDRKALGISSDALLESQFTHKLCSVKCLNQCPNVVDLYFNLAAGEGVYLPKLCESQEGKSRRAMSEIRSSGIAMDTLAPVGPVMLGEIAPEPATSMDNMPYVPAPSPY

SEQ ID NO: 30471 - protein, 185 aa, Arabidopsis thaliana
  peptide (1)..(185): Ceres Seq. ID no. 13499519
MILLAIYSQTTFGDDVKCENLDENTCAFAVSSTGKRCVLEKSMKRSGIEVYTCRSSEIEANKVTNIIESDECIKACGLDRKALGISSDALLESQFTHKLCSVKCLNQCPNVVDLYFNLAAGEGVYLPKLCESQEGKSRRAMSEIRSSGIAMDTLAPVGPVMLGEIAPEPATSMDNMPYVPAPSPY

SEQ ID NO: 30472 - protein, 143 aa, Arabidopsis thaliana
  peptide (1)..(143): Ceres Seq. ID no. 13499520
MKRSGIEVYTCRSSEIEANKVTNIIESDECIKACGLDRKALGISSDALLESQFTHKLCSVKCLNQCPNVVDLYFNLAAGEGVYLPKLCESQEGKSRRAMSEIRSSGIAMDTLAPVGPVMLGEIAPEPATSMDNMPYVPAPSPY

SEQ ID NO: 30473 - DNA, 687 bp, Arabidopsis thaliana
  misc_feature (1)..(687): Ceres Seq. ID no. 12580320
  misc_feature (1)..(687): Ortholog of  Ceres SEQ ID NO 13661089 as cited in SEQ ID NO 61053
aacaataaaacaaagtgattttattatggcgttaagagagatgataatagatgagagtgatgacatagagagctacagtgatcaatctctttgtcttgataaagccaaggagcttcttgctctcatcaaactacccacgggattgttgccattgaaggatatgacggaagttgggtacaacaaaacaaaagggtttgtgtggatgaggctgagaagcaagattgagcatacattccgtgagataggtcgcagagttttatatgacacggcagataactgcgtttgttgaggaccgccgtatgaggagacttaccggagtcaaaagcaaagagctcatgatctgggttcctgtgaatgatatcttcatcaaagagaaagatcctgagaagatcacctttgctaataccaccggcctgtcacgaacatttaaagtttcagcatttcaatgtgaaggttgataaataaaaagaaaagaggagtaaccagacttccttgatgaaagcaaccaataaagaacagaagttgttccatactcaataagagatagtttaattaaatatcaaggacacgcctttcttacaatgaattgcttatggatcatcacagtaaataaacaggttctgcaattgatgccttgatgtataacagtgagtttccaatcaacatattagaatcgattcattggtt

SEQ ID NO: 30474 - protein, 95 aa, Arabidopsis thaliana
  peptide (1)..(95): Ceres Seq. ID no. 12580321
TIKQSDFIMALREMIIDESDDIESYSDQSLCLDKAKELLALIKLPTGLLPLKDMTEVGYNKTKGFVWMRLRSKIEHTFREIGRRVLYDTADNCVC

SEQ ID NO: 30475 - protein, 87 aa, Arabidopsis thaliana
  peptide (1)..(87): Ceres Seq. ID no. 12580322
MALREMIIDESDDIESYSDQSLCLDKAKELLALIKLPTGLLPLKDMTEVGYNKTKGFVWMRLRSKIEHTFREIGRRVLYDTADNCVC

SEQ ID NO: 30476 - protein, 82 aa, Arabidopsis thaliana
  peptide (1)..(82): Ceres Seq. ID no. 12580323
MIIDESDDIESYSDQSLCLDKAKELLALIKLPTGLLPLKDMTEVGYNKTKGFVWMRLRSKIEHTFREIGRRVLYDTADNCVC

SEQ ID NO: 30477 - DNA, 2852 bp, Arabidopsis thaliana
  misc_feature (1)..(2852): Ceres Seq. ID no. 12422999
  misc_feature (1)..(2852): Ortholog of  Ceres SEQ ID NO 15180432 as cited in SEQ ID NO 0
aaaaaccggcgagacggaaaatttcagcgtttccgaactttccattagagtcgcgagacgatagatgagactcgttccagaaatttaatcgttgcttctcttcccagctgatctgcgtccaacatcactgtttccaggatcttcagaatcagcgaaggaagaagataagaggacgacgaagtaattgaagttggagaatcgcacatttggctctcgatatttgctcaatgacttcttattcgaggtagccttcaatttaggatcggagttcgtaaataaggtgatttagcgaagatgatggtcgaagatcttggtgtggaagcgaaggaagcggctgtgcgagaagtggcgaagctcttacccttacctgaacttttgcagtctatttcttcaatcaaggccgattacatcgctcgtcaacaggcaaatgatgcacagctcagtactatggttgctgagcaggttgaacaagctcaagctgggttagagtcactttcatcatctgagaaaaccatttatgaactgcgggataatttcatttctatcgacaagctttgtcaggaatgtcaaactttgattgacaatcatgaccaaataaagctgctgagtaacgccaggaataatctaaacaaaactctaaaggatgtagaaggtatgatgtcaatttctgttgaagctgctgcggctagggattctttgagtgatgataaagaaatcgttaacacttatgagagattaacagcacttgatggtaaacgaagatttgcattagcagctgctggagaggaggttgggaggctgagggagtattttgaagatgttgatagaacatgggaaacattcgagaagacactatggggtcatgtttccaactattacaaactttctaaagaaagtccgcaaacactggttcgtgctttgagggttgttgagatgcaagaaattctagaccaacagcttgctgaagaagcagcagaggctgagggagaaggtgcgatggcatctgtagcaaatcctcgaaggcctggcaagaaatctactacaacgtcagcgtcgtcaaagggtcttgctcaacagaaattaaaagtccaagggaaaggctacaaggacaaatgctacgagcaaattcggaaggcggttgaagatcgattcaacaggcttttgacgcttgtctttgaagatctaaaagcagctttggaagaagctagaatgattggagaggaacttggagatatttatgactatgtggctccttgttttcctccaagatacgagatatttcagcttatggtgaacctgtataccgagagattcatacaaatgctcagattgctcagtgacagagcaaacgatctgacaaatatagagattttaaaggtgactggttgggtggtagagtaccaagaaaacttgattgcacttggtgttgatgattcactagctcaagtgtgttctgagagcggttcaatggatcctctaatgaatgcatatgttgaaagaatgcaagctacaacgaagaaatggtacatgaatatcctagaggcggataaggtgcaaccacctaaaaaaactgaggaaggaaaattatatacaccggctgctgtagatttattcagaatacttggagagcaagtgcaaattgtcagagataacagcacggatgttatgttgtacaggattgctttagctattattcaggttatgattgatttccaagcagctgaaaagaagagagttgatgaacctgcatctgatattggtctggaacctctatgcgctatgataaacaacaaccttcgctgctacgaccttgccatggagttaagtaatagcactttagaagctcttccacaaaattatgcagagcaggtgaattttgaagacacttgcaaaggtttcttggaggtggctaaggaagcagtgcatcaaacagttcgcgttatctttgaggatccaggagttcaggaattacttgtcaagctttaccagaaagaatggtgcgagggacaggttaccgagtacctcgtggcaactttcggtgattatttcacagatgtgaaaatgtatgtcgaagaaagatcatttagaagatttgtcgaagcatgtttggaagaaacagtcgttgtctatgttgaccatctcctaactcagaaaaactacatcaaggaagaaactattgaacggatgaggctagatgaagaggttctcatggatttctttagggagtatataagtgcatctaaagtggagagcagaatcagaataatgagcgatctgagagaacttgcatctgcagagagtctagatgcatttacactcgtgtactcgaatattctagagcaccagcctgactgcccggccgaggtcgtagagaagcttgttagtctgcgtgaaggcataccacggaaggacacaaaagaggtggtacaagagtgcaaagagatatatgagaacacactggtagatggtaatcctccaaagacaggatttgtattcccgagagtcaagtgcttaactgcttccaaaggatctatgtggcgaaaactcacttaatctgtaaaacagcgttcagcgtttgcgtccgtaactgcttttctagttgagatgatgttctttctccaaattatggcgtttgcgtccatgtcttctttttctttgcatggtatctttcctctgtaaattctgtgttttctcttgttttgttctttttcttacctttattcctggatttgaaagttgaaacgctcggtggccacttgcactaggatattatcccgttgtatttaggaggcgtatttttttgtcgcaaattttaattctactgtttcatttaattttgataaaatcttctt

SEQ ID NO: 30478 - protein, 752 aa, Arabidopsis thaliana
  peptide (1)..(752): Ceres Seq. ID no. 12423000
MMVEDLGVEAKEAAVREVAKLLPLPELLQSISSIKADYIARQQANDAQLSTMVAEQVEQAQAGLESLSSSEKTIYELRDNFISIDKLCQECQTLIDNHDQIKLLSNARNNLNKTLKDVEGMMSISVEAAAARDSLSDDKEIVNTYERLTALDGKRRFALAAAGEEVGRLREYFEDVDRTWETFEKTLWGHVSNYYKLSKESPQTLVRALRVVEMQEILDQQLAEEAAEAEGEGAMASVANPRRPGKKSTTTSASSKGLAQQKLKVQGKGYKDKCYEQIRKAVEDRFNRLLTLVFEDLKAALEEARMIGEELGDIYDYVAPCFPPRYEIFQLMVNLYTERFIQMLRLLSDRANDLTNIEILKVTGWVVEYQENLIALGVDDSLAQVCSESGSMDPLMNAYVERMQATTKKWYMNILEADKVQPPKKTEEGKLYTPAAVDLFRILGEQVQIVRDNSTDVMLYRIALAIIQVMIDFQAAEKKRVDEPASDIGLEPLCAMINNNLRCYDLAMELSNSTLEALPQNYAEQVNFEDTCKGFLEVAKEAVHQTVRVIFEDPGVQELLVKLYQKEWCEGQVTEYLVATFGDYFTDVKMYVEERSFRRFVEACLEETVVVYVDHLLTQKNYIKEETIERMRLDEEVLMDFFREYISASKVESRIRIMSDLRELASAESLDAFTLVYSNILEHQPDCPAEVVEKLVSLREGIPRKDTKEVVQECKEIYENTLVDGNPPKTGFVFPRVKCLTASKGSMWRKLT

SEQ ID NO: 30479 - protein, 751 aa, Arabidopsis thaliana
  peptide (1)..(751): Ceres Seq. ID no. 12423001
MVEDLGVEAKEAAVREVAKLLPLPELLQSISSIKADYIARQQANDAQLSTMVAEQVEQAQAGLESLSSSEKTIYELRDNFISIDKLCQECQTLIDNHDQIKLLSNARNNLNKTLKDVEGMMSISVEAAAARDSLSDDKEIVNTYERLTALDGKRRFALAAAGEEVGRLREYFEDVDRTWETFEKTLWGHVSNYYKLSKESPQTLVRALRVVEMQEILDQQLAEEAAEAEGEGAMASVANPRRPGKKSTTTSASSKGLAQQKLKVQGKGYKDKCYEQIRKAVEDRFNRLLTLVFEDLKAALEEARMIGEELGDIYDYVAPCFPPRYEIFQLMVNLYTERFIQMLRLLSDRANDLTNIEILKVTGWVVEYQENLIALGVDDSLAQVCSESGSMDPLMNAYVERMQATTKKWYMNILEADKVQPPKKTEEGKLYTPAAVDLFRILGEQVQIVRDNSTDVMLYRIALAIIQVMIDFQAAEKKRVDEPASDIGLEPLCAMINNNLRCYDLAMELSNSTLEALPQNYAEQVNFEDTCKGFLEVAKEAVHQTVRVIFEDPGVQELLVKLYQKEWCEGQVTEYLVATFGDYFTDVKMYVEERSFRRFVEACLEETVVVYVDHLLTQKNYIKEETIERMRLDEEVLMDFFREYISASKVESRIRIMSDLRELASAESLDAFTLVYSNILEHQPDCPAEVVEKLVSLREGIPRKDTKEVVQECKEIYENTLVDGNPPKTGFVFPRVKCLTASKGSMWRKLT

SEQ ID NO: 30480 - protein, 701 aa, Arabidopsis thaliana
  peptide (1)..(701): Ceres Seq. ID no. 12423002
MVAEQVEQAQAGLESLSSSEKTIYELRDNFISIDKLCQECQTLIDNHDQIKLLSNARNNLNKTLKDVEGMMSISVEAAAARDSLSDDKEIVNTYERLTALDGKRRFALAAAGEEVGRLREYFEDVDRTWETFEKTLWGHVSNYYKLSKESPQTLVRALRVVEMQEILDQQLAEEAAEAEGEGAMASVANPRRPGKKSTTTSASSKGLAQQKLKVQGKGYKDKCYEQIRKAVEDRFNRLLTLVFEDLKAALEEARMIGEELGDIYDYVAPCFPPRYEIFQLMVNLYTERFIQMLRLLSDRANDLTNIEILKVTGWVVEYQENLIALGVDDSLAQVCSESGSMDPLMNAYVERMQATTKKWYMNILEADKVQPPKKTEEGKLYTPAAVDLFRILGEQVQIVRDNSTDVMLYRIALAIIQVMIDFQAAEKKRVDEPASDIGLEPLCAMINNNLRCYDLAMELSNSTLEALPQNYAEQVNFEDTCKGFLEVAKEAVHQTVRVIFEDPGVQELLVKLYQKEWCEGQVTEYLVATFGDYFTDVKMYVEERSFRRFVEACLEETVVVYVDHLLTQKNYIKEETIERMRLDEEVLMDFFREYISASKVESRIRIMSDLRELASAESLDAFTLVYSNILEHQPDCPAEVVEKLVSLREGIPRKDTKEVVQECKEIYENTLVDGNPPKTGFVFPRVKCLTASKGSMWRKLT

SEQ ID NO: 30481 - DNA, 2330 bp, Arabidopsis thaliana
  misc_feature (1)..(2330): Ceres Seq. ID no. 13494306
  misc_feature (1)..(2330): Ortholog of  Ceres SEQ ID NO 14307164 as cited in SEQ ID NO 54775
  misc_feature (1)..(2330): Ortholog of  Ceres SEQ ID NO 13654989 as cited in SEQ ID NO 63117
  misc_feature (1)..(2330): Ortholog of  Ceres SEQ ID NO 13655640 as cited in SEQ ID NO 63844
  misc_feature (1)..(2330): Ortholog of  Ceres SEQ ID NO 13584744 as cited in SEQ ID NO 69137
tcagatcactcctcctctctcttctcctacctttttcacattctcttcttcttcttctcgtgagaaaaagaaagagagattctttattcattagatcgaagcaaaaatgtccacagcgccgtctccaggcactactccatcaccatctccaccgtctcctcccacaaactcgacaaccaccactcctcctccagcagcctcttctcctcctcccaccacaactccttcttctcctcctccgtcgccgtcaactaattcaacctctcctcctccttcttctcctttacctccttctcttcctcctccatctcctcctggatctttaactcctcctcttcctcaaccttccccctccgctcccatcactccttctccaccgtctcccaccacaccctcaaaccctcgaagccctccatctcctaaccaaggaccaccaaacactccctcaggatctactcctagaactccatcaaacactaaaccgtcgccgccgtctgattcttccgatggattgtctaccggagttgtggtaggaatcgccattggaggagtcgctattcttgttatactgactctgatttgtcttctctgtaagaagaaacgaagaagaagacacgacgatgaagctgcttactatgttcctcctcctcctccatctggtcccaaagctggaggaccttacggtggtcaacaacagtattggcaacaacaaaacgcgtcacggccgtcagataatcatgtagtgacgtcattgccaccacctaagcctccatctccaccacgaaaacctcctccgccacctccaccaccagcattcatgagtagcagtggtggttctgactattcggatcttccggttcttcctccaccatctccagggcttgtgttaggcttttctaaaagcactttcacttatgaggagttgtcgagagctactaatggcttctctgaggctaatttgttaggacaaggagggtttggttatgtgcataaaggtatattgcctagtgggaaagaagttgctgtgaaacagttgaaagctggtagtggtcagggagagagagagtttcaggctgaggttgagatcattagcagagttcatcacaggcatttggtttctcttattggttattgtatggccggtgttcaaagattacttgtctatgagtttgttccaaacaacaatcttgagtttcacctccatggtaagggacggcctacgatggaatggagtactagattgaagattgctcttggatctgctaaaggactttcatatcttcatgaagattgcaatccgaaaatcattcaccgtgatattaaggcgtcaaacatattgattgatttcaaatttgaagctaaggttgctgactttggtcttgccaagattgcttctgatacaaacactcatgtatctacacgcgtgatgggaacctttgggtatttggctccggaatatgctgcaagtggaaagctcacagaaaagtctgacgttttctcatttggcgttgtacttttggaacttattactgggaggcgccctgttgatgcgaacaatgtctatgtagatgacagcttagttgactgggcacgaccattgcttaaccgagcatctgaggaaggagattttgagggtttggctgattcaaagatgggtaatgagtatgacagagaggagatggctcgcatggttgcttgcgctgcggcttgtgttcgccattcagctcgccgcagacctcgcatgagccagatagtacgggcgttagaaggaaatgtatcgctgtctgatcttaacgaagggatgagaccgggtcacagcaacgtatacagctcatatggaggaagcacagactatgacacgagccaatacaacgacgacatgataaagtttaggaaaatggctcttggaactcaagaatacggcacaaccggcgagtacagtaatccaaccagtgactacggactgtacccgtctggttcaagcagtgaaggtcaagccacacgagaaatggagatgggaaagattaagaaaaccggtcaaggttatagtggaccctctctttaaaccataagagtggagaaattgcaggttttttttggattctttttcttattaactgtaaagatttgaggaaattgccttactctctaattgatttactacgatatatgatacgtttaaaattgttttgctttggtttcttctttagatgttgtgatgttgattgattctggtttgaatattattctttcattcttttttctatttttcttctgaagaatttgtttgttatgtcttttgagcttttggcctagtttggttaagttcc

SEQ ID NO: 30482 - protein, 652 aa, Arabidopsis thaliana
  peptide (1)..(652): Ceres Seq. ID no. 13494307
MSTAPSPGTTPSPSPPSPPTNSTTTTPPPAASSPPPTTTPSSPPPSPSTNSTSPPPSSPLPPSLPPPSPPGSLTPPLPQPSPSAPITPSPPSPTTPSNPRSPPSPNQGPPNTPSGSTPRTPSNTKPSPPSDSSDGLSTGVVVGIAIGGVAILVILTLICLLCKKKRRRRHDDEAAYYVPPPPPSGPKAGGPYGGQQQYWQQQNASRPSDNHVVTSLPPPKPPSPPRKPPPPPPPPAFMSSSGGSDYSDLPVLPPPSPGLVLGFSKSTFTYEELSRATNGFSEANLLGQGGFGYVHKGILPSGKEVAVKQLKAGSGQGEREFQAEVEIISRVHHRHLVSLIGYCMAGVQRLLVYEFVPNNNLEFHLHGKGRPTMEWSTRLKIALGSAKGLSYLHEDCNPKIIHRDIKASNILIDFKFEAKVADFGLAKIASDTNTHVSTRVMGTFGYLAPEYAASGKLTEKSDVFSFGVVLLELITGRRPVDANNVYVDDSLVDWARPLLNRASEEGDFEGLADSKMGNEYDREEMARMVACAAACVRHSARRRPRMSQIVRALEGNVSLSDLNEGMRPGHSNVYSSYGGSTDYDTSQYNDDMIKFRKMALGTQEYGTTGEYSNPTSDYGLYPSGSSSEGQATREMEMGKIKKTGQGYSGPSL

SEQ ID NO: 30483 - protein, 415 aa, Arabidopsis thaliana
  peptide (1)..(415): Ceres Seq. ID no. 13494308
MSSSGGSDYSDLPVLPPPSPGLVLGFSKSTFTYEELSRATNGFSEANLLGQGGFGYVHKGILPSGKEVAVKQLKAGSGQGEREFQAEVEIISRVHHRHLVSLIGYCMAGVQRLLVYEFVPNNNLEFHLHGKGRPTMEWSTRLKIALGSAKGLSYLHEDCNPKIIHRDIKASNILIDFKFEAKVADFGLAKIASDTNTHVSTRVMGTFGYLAPEYAASGKLTEKSDVFSFGVVLLELITGRRPVDANNVYVDDSLVDWARPLLNRASEEGDFEGLADSKMGNEYDREEMARMVACAAACVRHSARRRPRMSQIVRALEGNVSLSDLNEGMRPGHSNVYSSYGGSTDYDTSQYNDDMIKFRKMALGTQEYGTTGEYSNPTSDYGLYPSGSSSEGQATREMEMGKIKKTGQGYSGPSL

SEQ ID NO: 30484 - DNA, 750 bp, Arabidopsis thaliana
  misc_feature (1)..(750): Ceres Seq. ID no. 13497622
  misc_feature (1)..(750): Ortholog of  Ceres SEQ ID NO 15227036 as cited in SEQ ID NO 61662
  misc_feature (1)..(750): Ortholog of  Ceres SEQ ID NO 12635268 as cited in SEQ ID NO 0
aaacacaaaacctctcgtcttctcaaatccactctcatacacagtcacaacaatggctctttcttctggaatcttctctactacttttctctgcgtcgatacggcgccgttgcgcagctcaatgttgtctccatcttcgctccgtttgtcccctaatcatccgactaacctgcgcatggttcgagctgtaacttccgcggcggcggcttcctccgacccgacaaccacgaccaagactcgggagccacgtggcatcatgaagcctcgtccagtgtcccaggcgatgcaggatgtcgttggcgttcctgaaatccctcgtactcaagctctcaaacgcatttgggcttacatcaaggaacatgaccttcaagacccacaaaacaagagggatatactctgcgacgagaagctgaagaagatatttgaaggcaaagaacgtgttgggttcttggagattgcaaaactcattggtcctcactttctctgaatgaattttggctgagagaagacaatcattggcctatgttttcctgagctactaaaggccatgaaagatcagattacatattagtaaatttagggtttaagaagtttttatgcaaccaagtagtttataagcctttggaggatatcttatgtcggttatgtgctcatttgctttcccaatgcagttaaaatattcctctctttttttttttttttttgtcttaggacttgaaatctctctaatgcatgaagtaatgcttttat

SEQ ID NO: 30485 - protein, 161 aa, Arabidopsis thaliana
  peptide (1)..(161): Ceres Seq. ID no. 13497623
NTKPLVFSNPLSYTVTTMALSSGIFSTTFLCVDTAPLRSSMLSPSSLRLSPNHPTNLRMVRAVTSAAAASSDPTTTTKTREPRGIMKPRPVSQAMQDVVGVPEIPRTQALKRIWAYIKEHDLQDPQNKRDILCDEKLKKIFEGKERVGFLEIAKLIGPHFL

SEQ ID NO: 30486 - protein, 144 aa, Arabidopsis thaliana
  peptide (1)..(144): Ceres Seq. ID no. 13497624
MALSSGIFSTTFLCVDTAPLRSSMLSPSSLRLSPNHPTNLRMVRAVTSAAAASSDPTTTTKTREPRGIMKPRPVSQAMQDVVGVPEIPRTQALKRIWAYIKEHDLQDPQNKRDILCDEKLKKIFEGKERVGFLEIAKLIGPHFL

SEQ ID NO: 30487 - protein, 121 aa, Arabidopsis thaliana
  peptide (1)..(121): Ceres Seq. ID no. 13497625
MLSPSSLRLSPNHPTNLRMVRAVTSAAAASSDPTTTTKTREPRGIMKPRPVSQAMQDVVGVPEIPRTQALKRIWAYIKEHDLQDPQNKRDILCDEKLKKIFEGKERVGFLEIAKLIGPHFL

SEQ ID NO: 30488 - DNA, 1386 bp, Arabidopsis thaliana
  misc_feature (1)..(1386): Ceres Seq. ID no. 12337305
  misc_feature (1)..(1386): Ortholog of  Ceres SEQ ID NO 14310616 as cited in SEQ ID NO 55699
  misc_feature (1)..(1386): Ortholog of  Ceres SEQ ID NO 13596519 as cited in SEQ ID NO 62572
  misc_feature (1)..(1386): Ortholog of  Ceres SEQ ID NO 12625108 as cited in SEQ ID NO 68102
acctctctatacccttccctacacacatggagacactccaataaactcttcttctgcctcctctgcccatttctcccaatctctctctattttctcagtctctctctcagataatggcaatgttgggcttggttttatctgttcttactacaattcttgcattgtctgaagcaagaatcccaggagtttacaatggtggtggttgggaaactgctcacgccactttctacggtggctctgatgcttctggaacaatgggaggagcttgtggttatggtaacttatacagccaaggctatggtgtgaacacggcggctttaagcacggctctgttcaacaatggttttagctgtggtgcttgttttgagctcaaatgtgctagtgatccaaaatggtgccattctggtagtccttcaatcttcatcactgcgactaatttctgtcctccgaactttgctcagcctagtgacaatggtggttggtgtaaccctcctagacctcactttgatcttgctatgcctatgtttctcaagatcgctgagtatcgtgccggaatcgtccccgtctctttccgccgagtgccatgccggaagagaggaggaataaggttcacaatcaacggtttccgttattttaacttggttctagtcactaacgtcgctggcgccggaaacatagtgcggctaggtgtgaaaggaacacatacttcgtggatgaccatgagtcgtaactggggacaaaactggcaatctaactcagttttggttggtcagtcactttcttttagagtcacaagcagtgaccgtagaagctcgacgtcgtggaacattgctccggcgaattggaagtttggtcagactttcatgggaaagaacttcagagtctgagggcattatcggaaactcatctatcaatattagtattttcattattactattaaaatttccagccgaaggcattagtaatttgagaaattttaatatatatatttatgttttttaagagaccactaaaattccaaattttcttacctctcatgggtttgtgtttttttactgatgtgttcgttggagagtgtgaaacgtgggacagtggtgtctttttttagttcttcaatgttaaatgtgtaatctttaggggtgaaattagaagtttgtttaaagtagaaggagctgtgaagcagatgtgaagagtacttctggtttcagcgtattatagtaaaagaagcagtaatagttgtgtttgtaatgcttcttgtagaactccatattgtaatttatatataaatgtgtgtatgtttatggtttattatcttctttttttctgaaaagtaaacatcattttgttacaaaccaaattttgatattaaatggaaaaaacttctg

SEQ ID NO: 30489 - protein, 257 aa, Arabidopsis thaliana
  peptide (1)..(257): Ceres Seq. ID no. 12337306
MAMLGLVLSVLTTILALSEARIPGVYNGGGWETAHATFYGGSDASGTMGGACGYGNLYSQGYGVNTAALSTALFNNGFSCGACFELKCASDPKWCHSGSPSIFITATNFCPPNFAQPSDNGGWCNPPRPHFDLAMPMFLKIAEYRAGIVPVSFRRVPCRKRGGIRFTINGFRYFNLVLVTNVAGAGNIVRLGVKGTHTSWMTMSRNWGQNWQSNSVLVGQSLSFRVTSSDRRSSTSWNIAPANWKFGQTFMGKNFRV

SEQ ID NO: 30490 - protein, 255 aa, Arabidopsis thaliana
  peptide (1)..(255): Ceres Seq. ID no. 12337307
MLGLVLSVLTTILALSEARIPGVYNGGGWETAHATFYGGSDASGTMGGACGYGNLYSQGYGVNTAALSTALFNNGFSCGACFELKCASDPKWCHSGSPSIFITATNFCPPNFAQPSDNGGWCNPPRPHFDLAMPMFLKIAEYRAGIVPVSFRRVPCRKRGGIRFTINGFRYFNLVLVTNVAGAGNIVRLGVKGTHTSWMTMSRNWGQNWQSNSVLVGQSLSFRVTSSDRRSSTSWNIAPANWKFGQTFMGKNFRV

SEQ ID NO: 30491 - protein, 210 aa, Arabidopsis thaliana
  peptide (1)..(210): Ceres Seq. ID no. 12337308
MGGACGYGNLYSQGYGVNTAALSTALFNNGFSCGACFELKCASDPKWCHSGSPSIFITATNFCPPNFAQPSDNGGWCNPPRPHFDLAMPMFLKIAEYRAGIVPVSFRRVPCRKRGGIRFTINGFRYFNLVLVTNVAGAGNIVRLGVKGTHTSWMTMSRNWGQNWQSNSVLVGQSLSFRVTSSDRRSSTSWNIAPANWKFGQTFMGKNFRV

SEQ ID NO: 30492 - DNA, 669 bp, Arabidopsis thaliana
  misc_feature (1)..(669): Ceres Seq. ID no. 12340323
  misc_feature (1)..(669): Ortholog of  Ceres SEQ ID NO 13600689 as cited in SEQ ID NO 0
ataatcctaccctttctcttgatattgacttctctctcgattcttcttctccagtttcaatcaaactcaatttcttctcaacgaaccctaatttccaacgaatcggattcagtttcttcttcggagactaatcgaatcgccatggctaagagctccttcaagatctctaaccctctcgaggcaaggatgagtgaatcttctcgaatcagagagaagtaccctgacaaattcccgtgattgtggagaaggctggacaaagtgatgttcctgacattgacaagaagaagtatcttgtaccagctgatctaacagtgggacaatttgtatacgttgttcgtaaaagaatcaagcttggagctgagaaagctatttttgtctttgttaagaacacattgcctccaactgctgcattgatgtctgcgatctatgaagaacacaaagatgaggatgggttcctctacatgacttacagtggagagaacacttttggatctcttaccgttgcttgaataaaaatcgatctttggatgactttgatgtacatacataaatcaggaagataaagatgtacattgcttccttcttttctctggcttttaactttgctttggatgtttggatatctttccctttgggtttattaatcgtcagaaacttctccttttctcc

SEQ ID NO: 30493 - protein, 78 aa, Arabidopsis thaliana
  peptide (1)..(78): Ceres Seq. ID no. 12340324
IILPFLLILTSLSILLLQFQSNSISSQRTLISNESDSVSSSETNRIAMAKSSFKISNPLEARMSESSRIREKYPDKFP

SEQ ID NO: 30494 - protein, 42 aa, Arabidopsis thaliana
  peptide (1)..(42): Ceres Seq. ID no. 12340325
NPTLSLDIDFSLDSSSPVSIKLNFFSTNPNFQRIGFSFFFGD

SEQ ID NO: 30495 - DNA, 612 bp, Arabidopsis thaliana
  misc_feature (1)..(612): Ceres Seq. ID no. 12325571
  misc_feature (1)..(612): Ortholog of  Ceres SEQ ID NO 12556948 as cited in SEQ ID NO 54
aaccccatttctgcttagagacagagaaatagagagagatcgcgtcggcacaatctgcaatttccaacatcgacatgtttaactctacagcgttggtgattttcgccattcttttcctctcaatctccgccgatgtgttcccgattccgtctcccaacggagagatcgacgcaatgttgatccgaaacagtatcatcggagaagatgaagatctaatgccaactgagatcagccggagagtactgatggcgcagaaacggtacatcggctacgaaacgctaaggagagacatggttccttgtcagaaaccaggagcttcttactacgattgtcgctctggacaagctaattcttacagcagaggctgtgacaccattacaagatgcgctagagacacaaacgacatcaacacatgaaggtaagatccaagaaattgccaaaattggaagctttttggccgaggcaagtaaattatatgattaagcttttgcattgctgttgttatatatgtgtttttgacataagaattgttataatatatgtaactctgccactagttggttatcaatgttcaattattgagatctataaattatattaagtttttttggc

SEQ ID NO: 30496 - protein, 113 aa, Arabidopsis thaliana
  peptide (1)..(113): Ceres Seq. ID no. 12325572
MFNSTALVIFAILFLSISADVFPIPSPNGEIDAMLIRNSIIGEDEDLMPTEISRRVLMAQKRYIGYETLRRDMVPCQKPGASYYDCRSGQANSYSRGCDTITRCARDTNDINT

SEQ ID NO: 30497 - protein, 80 aa, Arabidopsis thaliana
  peptide (1)..(80): Ceres Seq. ID no. 12325573
MLIRNSIIGEDEDLMPTEISRRVLMAQKRYIGYETLRRDMVPCQKPGASYYDCRSGQANSYSRGCDTITRCARDTNDINT

SEQ ID NO: 30498 - protein, 66 aa, Arabidopsis thaliana
  peptide (1)..(66): Ceres Seq. ID no. 12325574
MPTEISRRVLMAQKRYIGYETLRRDMVPCQKPGASYYDCRSGQANSYSRGCDTITRCARDTNDINT

SEQ ID NO: 30499 - DNA, 2535 bp, Arabidopsis thaliana
  misc_feature (1)..(2535): Ceres Seq. ID no. 12327659
  misc_feature (1)..(2535): Ortholog of  Ceres SEQ ID NO 15168464 as cited in SEQ ID NO 59187
aatcaaattcaatttaatttttcttctgcaaatggaaccaccgccttcttctctgtcctccaccgcggtggcttccacctccatctccgccgccactgctcctgttcctcctcctctacctcctcacgtgacttcttcttaccccgaatctctcgactcctcccctcgttctcgcaccaccgatggctgggatgaccttcctgctccttctggcggcggcggtggcggtggtggtagcgccgtctcttctaaacttcgttttatgtgtagctacggcggtcatatccttcctcgccctcacgataagtctctctgctacatgggcggtgacactcgcatcgttgtcgtcgaccgtaactcctctctcccttctctcatcgctcgtctctccaacacgcttctcgacggtcgttccttcaccctcaagtaccagttacctagcgaagaccttgactctctcatctccgtcactaccgacgaagatctcgacaacatgatcgaagagtatgaccgtaccatttccgcttccaattccaccaaaccttcgcgtctccggttgtttctattcacctccaagcctgaggctactcaatctatgggtcagatccttgagagctctgccaagagcgacgattggttcctcaacgcactcaatagcgccggtcttctcaatcgaggattctcagattctgatactaacgtcaatcgtttacttggtttggatgatgctcttgctctccgttctaattccggtgacaacaacaatcgagatggtgatgatggctctgttaaaagcgccaagcaacagcaacctccaccgccgcagcagcaagaacaacagcaaggaggccaagatgtgaactgcttaccggattctccgatgttagatacatcctcttctttcggctccacttcttcgtctccctcgctcgccaatttgcctccgatccgtgtccatgtagaggaaccaggcggagtaaggactttgccagatcagagaaatctgggaattgaagaacagttcgcacgattcaacgtcgggaacaagcatcagctacatgacgacggatttgctgcgatctcttcaccaccgccgatgcctgtcacaatcgcccttcctgctgcgcctgtgactgcagccaccgtctctaatgagttccaggccagggtttactcagatgacgagagatccgatcacggcgtgcaggctggatacaggaagcctccgactccgcgatcgcagccgcagaatctaccgcctcagcaggctcatcagctgaaatcaaatagcggtggtggacacgagctgccatcacccaattccgtttccagtgatagcagtatgagcaacccaatgtttcaccaaagaccatctgtctatcaagaaccaattgctcagataccttctggctctaccgttgttactggtatgatcaatccctcagatccaagcacacttttgtcacagcatcagaatcaggacccagcctatatccttcacccccagtttgagcaacaatctgcacaatctcagccacagcagcagttcatacacactgctgctcctcctcaatacattcatcaccatccgtctagcggccttcctgtcccgacttacatccaggtttacccttcgcaacagcctcaacagtccttccatcaacacgcaggtcgactggatcagcagccttatcctgtttattatgtcactgctcctgtcccacctaggccctacagtatgcctgtgccacaatctccaagtgtgagcgatgctgcagggtctatcccctctaaccatcccaactctaccatgatgcctccacctcctaacaaccacatgagaagtgttagcagtggcaaacctgagatgggacaggctggggtttacacaacagccccaggtgtgggcggtgctcagatggttcaccagattcccacaaaccagcagcaattcatggggtattcgcagatccgtcaccctcctcagtctggttcagctgggaatccaaactatggatatgaatatgtcgacaatgctcatacacagatatactacactcaacctatgggacatgcacagtaccagacaatgactgggcctccacctgccatggtgatgcctgatggttctgctgctgctaagcttccagctgagaacatgactcaacagatccggagttcacagccattgtgacacacacaaggaacacatgaagatgaaccacaaaattttggaggaagaaaaccccgggttggtttttaaacgtataaatatataacttttacttcttttttcttctcttcttttacaagttgctgcatcaaaaaaagagtctggtgtcatgttaagtttggtattatgggttgtgtttaaaagtgttgtgtgagtaaattaaaaaaacaaataaatagtgcttcttggtgggattttacattatatagttgcaattgatacatgtagtgctttaccattttcctggatcttatatcatattattatcattcatttcattttgtaaatgtatcacttttttg

SEQ ID NO: 30500 - protein, 730 aa, Arabidopsis thaliana
  peptide (1)..(730): Ceres Seq. ID no. 12327660
IKFNLIFLLQMEPPPSSLSSTAVASTSISAATAPVPPPLPPHVTSSYPESLDSSPRSRTTDGWDDLPAPSGGGGGGGGSAVSSKLRFMCSYGGHILPRPHDKSLCYMGGDTRIVVVDRNSSLPSLIARLSNTLLDGRSFTLKYQLPSEDLDSLISVTTDEDLDNMIEEYDRTISASNSTKPSRLRLFLFTSKPEATQSMGQILESSAKSDDWFLNALNSAGLLNRGFSDSDTNVNRLLGLDDALALRSNSGDNNNRDGDDGSVKSAKQQQPPPPQQQEQQQGGQDVNCLPDSPMLDTSSSFGSTSSSPSLANLPPIRVHVEEPGGVRTLPDQRNLGIEEQFARFNVGNKHQLHDDGFAAISSPPPMPVTIALPAAPVTAATVSNEFQARVYSDDERSDHGVQAGYRKPPTPRSQPQNLPPQQAHQLKSNSGGGHELPSPNSVSSDSSMSNPMFHQRPSVYQEPIAQIPSGSTVVTGMINPSDPSTLLSQHQNQDPAYILHPQFEQQSAQSQPQQQFIHTAAPPQYIHHHPSSGLPVPTYIQVYPSQQPQQSFHQHAGRLDQQPYPVYYVTAPVPPRPYSMPVPQSPSVSDAAGSIPSNHPNSTMMPPPPNNHMRSVSSGKPEMGQAGVYTTAPGVGGAQMVHQIPTNQQQFMGYSQIRHPPQSGSAGNPNYGYEYVDNAHTQIYYTQPMGHAQYQTMTGPPPAMVMPDGSAAAKLPAENMTQQIRSSQPL

SEQ ID NO: 30501 - protein, 720 aa, Arabidopsis thaliana
  peptide (1)..(720): Ceres Seq. ID no. 12327661
MEPPPSSLSSTAVASTSISAATAPVPPPLPPHVTSSYPESLDSSPRSRTTDGWDDLPAPSGGGGGGGGSAVSSKLRFMCSYGGHILPRPHDKSLCYMGGDTRIVVVDRNSSLPSLIARLSNTLLDGRSFTLKYQLPSEDLDSLISVTTDEDLDNMIEEYDRTISASNSTKPSRLRLFLFTSKPEATQSMGQILESSAKSDDWFLNALNSAGLLNRGFSDSDTNVNRLLGLDDALALRSNSGDNNNRDGDDGSVKSAKQQQPPPPQQQEQQQGGQDVNCLPDSPMLDTSSSFGSTSSSPSLANLPPIRVHVEEPGGVRTLPDQRNLGIEEQFARFNVGNKHQLHDDGFAAISSPPPMPVTIALPAAPVTAATVSNEFQARVYSDDERSDHGVQAGYRKPPTPRSQPQNLPPQQAHQLKSNSGGGHELPSPNSVSSDSSMSNPMFHQRPSVYQEPIAQIPSGSTVVTGMINPSDPSTLLSQHQNQDPAYILHPQFEQQSAQSQPQQQFIHTAAPPQYIHHHPSSGLPVPTYIQVYPSQQPQQSFHQHAGRLDQQPYPVYYVTAPVPPRPYSMPVPQSPSVSDAAGSIPSNHPNSTMMPPPPNNHMRSVSSGKPEMGQAGVYTTAPGVGGAQMVHQIPTNQQQFMGYSQIRHPPQSGSAGNPNYGYEYVDNAHTQIYYTQPMGHAQYQTMTGPPPAMVMPDGSAAAKLPAENMTQQIRSSQPL

SEQ ID NO: 30502 - protein, 643 aa, Arabidopsis thaliana
  peptide (1)..(643): Ceres Seq. ID no. 12327662
MCSYGGHILPRPHDKSLCYMGGDTRIVVVDRNSSLPSLIARLSNTLLDGRSFTLKYQLPSEDLDSLISVTTDEDLDNMIEEYDRTISASNSTKPSRLRLFLFTSKPEATQSMGQILESSAKSDDWFLNALNSAGLLNRGFSDSDTNVNRLLGLDDALALRSNSGDNNNRDGDDGSVKSAKQQQPPPPQQQEQQQGGQDVNCLPDSPMLDTSSSFGSTSSSPSLANLPPIRVHVEEPGGVRTLPDQRNLGIEEQFARFNVGNKHQLHDDGFAAISSPPPMPVTIALPAAPVTAATVSNEFQARVYSDDERSDHGVQAGYRKPPTPRSQPQNLPPQQAHQLKSNSGGGHELPSPNSVSSDSSMSNPMFHQRPSVYQEPIAQIPSGSTVVTGMINPSDPSTLLSQHQNQDPAYILHPQFEQQSAQSQPQQQFIHTAAPPQYIHHHPSSGLPVPTYIQVYPSQQPQQSFHQHAGRLDQQPYPVYYVTAPVPPRPYSMPVPQSPSVSDAAGSIPSNHPNSTMMPPPPNNHMRSVSSGKPEMGQAGVYTTAPGVGGAQMVHQIPTNQQQFMGYSQIRHPPQSGSAGNPNYGYEYVDNAHTQIYYTQPMGHAQYQTMTGPPPAMVMPDGSAAAKLPAENMTQQIRSSQPL

SEQ ID NO: 30503 - DNA, 940 bp, Arabidopsis thaliana
  misc_feature (1)..(940): Ceres Seq. ID no. 12385730
  misc_feature (1)..(940): Ortholog of  Ceres SEQ ID NO 13599568 as cited in SEQ ID NO 509
  misc_feature (1)..(940): Ortholog of  Ceres SEQ ID NO 13638595 as cited in SEQ ID NO 52050
  misc_feature (1)..(940): Ortholog of  Ceres SEQ ID NO 13594748 as cited in SEQ ID NO 52114
  misc_feature (1)..(940): Ortholog of  Ceres SEQ ID NO 12623490 as cited in SEQ ID NO 61136
  misc_feature (1)..(940): Ortholog of  Ceres SEQ ID NO 12583993 as cited in SEQ ID NO 68098
  misc_feature (1)..(940): Ortholog of  Ceres SEQ ID NO 13654535 as cited in SEQ ID NO 68227
actctcaacaactacttgtttagagagagtcccaccaccaccactaccacaatcccaatggcttcaccaactcttactctcctcctcctcctcaccaccgtctccttcttcatctcctcctccgcagatcctgacatgcttcaagatctctgcgtcgctgatcttccctctggaatcaaaatcaatggcttcccttgcaaagacgcagctacagtcacatcagccgatttcttctcacaaggattagctaaaccaggtcttaccaacaacacattcggtgccttagtcacaggagctaacgttatgacaatcccaggactcaacacacttggtgtctccctctctcgtatcgactacgcaccaggaggcttaaacccacctcacacccacccacgtgccactgaggtcgttttcgtcctcgaaggaacacttgacgttgggtttctcactactgccaataagctaatctctcaatctctcaagaaaggagatgtctttgctttccccaaaggacttgtccatttccagaagaacaatggtgatgtccctgcttctgttattgcagctttcaatagtcagcttcctggaactcaatctcttggtgctactttgtttggttctactcctcctgttcctgacaacatcttggctcaagcctttcagacttctccaggaactgttaaacacatcaaatccaagttccaacccaagaaatgatcatcacccttcctttatattcattactacagttctgtttttttctaaagggaagatctttttatcttctttgatttgtcttctgtaataaaaaaggaacaataactgatgatcttcagtgtgcatttgagctccatagtctcatgtattcgtcttcttgtataatccatattattttttgttcaaagttgactaaagacaggtaagaagtcgaggttgatct

SEQ ID NO: 30504 - protein, 238 aa, Arabidopsis thaliana
  peptide (1)..(238): Ceres Seq. ID no. 12385731
TLNNYLFRESPTTTTTTIPMASPTLTLLLLLTTVSFFISSSADPDMLQDLCVADLPSGIKINGFPCKDAATVTSADFFSQGLAKPGLTNNTFGALVTGANVMTIPGLNTLGVSLSRIDYAPGGLNPPHTHPRATEVVFVLEGTLDVGFLTTANKLISQSLKKGDVFAFPKGLVHFQKNNGDVPASVIAAFNSQLPGTQSLGATLFGSTPPVPDNILAQAFQTSPGTVKHIKSKFQPKK

SEQ ID NO: 30505 - protein, 219 aa, Arabidopsis thaliana
  peptide (1)..(219): Ceres Seq. ID no. 12385732
MASPTLTLLLLLTTVSFFISSSADPDMLQDLCVADLPSGIKINGFPCKDAATVTSADFFSQGLAKPGLTNNTFGALVTGANVMTIPGLNTLGVSLSRIDYAPGGLNPPHTHPRATEVVFVLEGTLDVGFLTTANKLISQSLKKGDVFAFPKGLVHFQKNNGDVPASVIAAFNSQLPGTQSLGATLFGSTPPVPDNILAQAFQTSPGTVKHIKSKFQPKK

SEQ ID NO: 30506 - protein, 193 aa, Arabidopsis thaliana
  peptide (1)..(193): Ceres Seq. ID no. 12385733
MLQDLCVADLPSGIKINGFPCKDAATVTSADFFSQGLAKPGLTNNTFGALVTGANVMTIPGLNTLGVSLSRIDYAPGGLNPPHTHPRATEVVFVLEGTLDVGFLTTANKLISQSLKKGDVFAFPKGLVHFQKNNGDVPASVIAAFNSQLPGTQSLGATLFGSTPPVPDNILAQAFQTSPGTVKHIKSKFQPKK

SEQ ID NO: 30507 - DNA, 735 bp, Arabidopsis thaliana
  misc_feature (1)..(735): Ceres Seq. ID no. 13489816
  misc_feature (1)..(735): Ortholog of  Ceres SEQ ID NO 14309339 as cited in SEQ ID NO 0
ggtttcagttcagagtaagagagacagagagagagatgagtagcttcacgattccatctccttcctccttctctctttccaattcatataatcaaacctctcctcattccttcactctccgcaattctcgttccaattttgagttccaccggttacgattagatgtggagtctcgaagaagaagcacttctttacggtccaattgctccaccaaaggtacagattcaggtgaaaatgagaacaaaagtgtgttagatgctttctttttggggaaagcattagctgaggttatcaatgagagaattgagtctactgttggagaagtgttgagtactattggaaagtttcaagctgagcaacagaaacaagttcaagagattcaggaagaggttcttgaaagagctaagaaagctaaggaaagagcagctcgagaaactatggaggaacaaggacttgttgcttccaaaccagtagccattactcgaaatccggatgctgttgttgttgcctctgtaacttctacatcgaccgttgagagcaagactataatggttgatgtagaggaaagctcgagttccagtgatgaagactgaacgatggtttcaagggtttaagttgaagatttggtaatagcagcagagacttgtctaaaagggttaagatatatgtacttgaaaaaacgatgtaaacaatgtaagttgatataaatcaaggttaaaccagcattgatacatg

SEQ ID NO: 30508 - protein, 196 aa, Arabidopsis thaliana
  peptide (1)..(196): Ceres Seq. ID no. 13489817
FQFRVRETEREMSSFTIPSPSSFSLSNSYNQTSPHSFTLRNSRSNFEFHRLRLDVESRRRSTSLRSNCSTKGTDSGENENKSVLDAFFLGKALAEVINERIESTVGEVLSTIGKFQAEQQKQVQEIQEEVLERAKKAKERAARETMEEQGLVASKPVAITRNPDAVVVASVTSTSTVESKTIMVDVEESSSSSDED

SEQ ID NO: 30509 - protein, 185 aa, Arabidopsis thaliana
  peptide (1)..(185): Ceres Seq. ID no. 13489818
MSSFTIPSPSSFSLSNSYNQTSPHSFTLRNSRSNFEFHRLRLDVESRRRSTSLRSNCSTKGTDSGENENKSVLDAFFLGKALAEVINERIESTVGEVLSTIGKFQAEQQKQVQEIQEEVLERAKKAKERAARETMEEQGLVASKPVAITRNPDAVVVASVTSTSTVESKTIMVDVEESSSSSDED

SEQ ID NO: 30510 - DNA, 713 bp, Arabidopsis thaliana
  misc_feature (1)..(713): Ceres Seq. ID no. 12562391
  misc_feature (1)..(713): Ortholog of  Ceres SEQ ID NO 14315388 as cited in SEQ ID NO 54357
  misc_feature (1)..(713): Ortholog of  Ceres SEQ ID NO 14312886 as cited in SEQ ID NO 57142
gagaaaccgggtcatgaaacggatattgcgggttcaagacgaacccatctgaaaaaatcattcaaatccactcttcgacatcttctcactgcttgctccaaacaggattttgttgacattttctcgaaattcagtggggctgagcaagaactgctttttcagttgtatactcgggttgttgtgaatttgcatcagacaatagaggaagagtttgatgaacaatgtcacgaaactcaggtcggaccaattcttgatacagttgaggagctggtcgaagaacagagtttggatcccttgttttcagataagactgatgtaatggcgatagcaaatgatcttacaacagcgaagaagaacgagatacaaaagttaacaattttgctccaaagggctgaagaacagaatcgccagaaggaagcccggatcagcctgctcaaaaaacaaacacaagatctctcaggcacagctgacagaatcgaaaaggtgaaagccggggtctcgggctactttgaaggaaaagacaagctacctccaatatagtttcgagaaaattgcaatgaagaagcgtgtcatttccattccctgcatttgtatatagtttaatatagagtcttaacaagctagtcacaactagtacttgcttcttgtgtaaaccactgagaatcttggttaaatcgcttttatgcattaagttccagttaagtggttgaatt

SEQ ID NO: 30511 - protein, 179 aa, Arabidopsis thaliana
  peptide (1)..(179): Ceres Seq. ID no. 12562392
EKPGHETDIAGSRRTHLKKSFKSTLRHLLTACSKQDFVDIFSKFSGAEQELLFQLYTRVVVNLHQTIEEEFDEQCHETQVGPILDTVEELVEEQSLDPLFSDKTDVMAIANDLTTAKKNEIQKLTILLQRAEEQNRQKEARISLLKKQTQDLSGTADRIEKVKAGVSGYFEGKDKLPPI

SEQ ID NO: 30512 - DNA, 645 bp, Arabidopsis thaliana
  misc_feature (1)..(645): Ceres Seq. ID no. 12333415
  misc_feature (1)..(645): Ortholog of  Ceres SEQ ID NO 13655287 as cited in SEQ ID NO 63004
  misc_feature (1)..(645): Ortholog of  Ceres SEQ ID NO 15173178 as cited in SEQ ID NO 64574
gatttgtgtagtatcgtcgggattttttgaccggagaaatggggaggaggattttgaacgatgcgttgaggacgattgtgaatgctgagagacgaggaaaagcttcggtggagctcaaaccaatctccaccgttatgtcttcgttcttgagaatcatgaaggagaaaggttatatcaagaactttcaagtgtatgatccacatagagttgggagaataacagttgatctgcaagggagggttaatgactgcaaagctcttacctacaggcaagacgttagggcaaaagagattgagaaatacactgaacgcacacttccaacacgtcagtggggttatgttgtaatcacaactccggatgggattttggaccatgaagaagcaatcaaacggaatgtgggtggtcaggttcttggcttcttttactgaatagcttgagctagcacatggcaagaaccttctagtgtcaaaggattcaacaaaagattgaagtttcggtccttctcctgttgctttttgttttttgtaacttgcattgtctttgaacagattggcaattattagataacacatttgttgctaaattcaaagatcttgttgttagtttatattttggacgagaaatttgttcttccatagctatctg

SEQ ID NO: 30513 - protein, 129 aa, Arabidopsis thaliana
  peptide (1)..(129): Ceres Seq. ID no. 12333416
MGRRILNDALRTIVNAERRGKASVELKPISTVMSSFLRIMKEKGYIKNFQVYDPHRVGRITVDLQGRVNDCKALTYRQDVRAKEIEKYTERTLPTRQWGYVVITTPDGILDHEEAIKRNVGGQVLGFFY

SEQ ID NO: 30514 - protein, 97 aa, Arabidopsis thaliana
  peptide (1)..(97): Ceres Seq. ID no. 12333417
MSSFLRIMKEKGYIKNFQVYDPHRVGRITVDLQGRVNDCKALTYRQDVRAKEIEKYTERTLPTRQWGYVVITTPDGILDHEEAIKRNVGGQVLGFFY

SEQ ID NO: 30515 - protein, 90 aa, Arabidopsis thaliana
  peptide (1)..(90): Ceres Seq. ID no. 12333418
MKEKGYIKNFQVYDPHRVGRITVDLQGRVNDCKALTYRQDVRAKEIEKYTERTLPTRQWGYVVITTPDGILDHEEAIKRNVGGQVLGFFY

SEQ ID NO: 30516 - DNA, 903 bp, Arabidopsis thaliana
  misc_feature (1)..(903): Ceres Seq. ID no. 12422995
  misc_feature (1)..(903): Ortholog of  Ceres SEQ ID NO 14316300 as cited in SEQ ID NO 59995
  misc_feature (1)..(903): Ortholog of  Ceres SEQ ID NO 13662758 as cited in SEQ ID NO 64912
  misc_feature (1)..(903): Ortholog of  Ceres SEQ ID NO 13595881 as cited in SEQ ID NO 67709
  misc_feature (1)..(903): Ortholog of  Ceres SEQ ID NO 12614145 as cited in SEQ ID NO 67937
aacacaaaaaaaatggcgactcttgtacgtcgcgcagcttctcggtttgtgggaagttattggaaaaaccgttctttcgtttactcattgttggaccagtccgcttctggccggaggcgacatctgacgccgtcggttgaccggaatgttccatttaccacatcgaccaaaaagagagcttctccaactgatccgcttcttcgaatcattgaagaggagattggatacgccgagaaagctgatgattatcatcgagttgaagaaactccaagtggcttccctttcgaaatggaagacaaaccaggagggaagattgtgacattgactagagaatatgaaggagagactgttaaagttgaagtacacatgactaatcttgtgactggtgacaaagaagatgatgaagatgatgaggaagaagcagagaatgaagaagatgaagatgaggataagccattgaagcctaagcaatcgaatgtgcctctcttagtaactctttccaagaagacaggaccaagtttggaatttagatgtactgcttttccagacaggattgcgatcaaggacatgtgggttacatttcctgatgatccttccaaagatgagcttgcttatgaaggaccttccttcagggttttggatgaaaagctaaggaaggctttccataggtacattgagattagagggataaagccgagcatgatcaacttcttgcacgagtacatgatcaacaaggatagtagagagcacttactgtggttgaaatctctcaagaactttgtcaagtattgaaataagaaaacaatgttattttccgatgctctttgtcttccaaattttgtacttgaaacaccattcaattatgtttggatctatttatataaaaaaagagtattgtgagac

SEQ ID NO: 30517 - protein, 263 aa, Arabidopsis thaliana
  peptide (1)..(263): Ceres Seq. ID no. 12422996
NTKKMATLVRRAASRFVGSYWKNRSFVYSLLDQSASGRRRHLTPSVDRNVPFTTSTKKRASPTDPLLRIIEEEIGYAEKADDYHRVEETPSGFPFEMEDKPGGKIVTLTREYEGETVKVEVHMTNLVTGDKEDDEDDEEEAENEEDEDEDKPLKPKQSNVPLLVTLSKKTGPSLEFRCTAFPDRIAIKDMWVTFPDDPSKDELAYEGPSFRVLDEKLRKAFHRYIEIRGIKPSMINFLHEYMINKDSREHLLWLKSLKNFVKY

SEQ ID NO: 30518 - protein, 259 aa, Arabidopsis thaliana
  peptide (1)..(259): Ceres Seq. ID no. 12422997
MATLVRRAASRFVGSYWKNRSFVYSLLDQSASGRRRHLTPSVDRNVPFTTSTKKRASPTDPLLRIIEEEIGYAEKADDYHRVEETPSGFPFEMEDKPGGKIVTLTREYEGETVKVEVHMTNLVTGDKEDDEDDEEEAENEEDEDEDKPLKPKQSNVPLLVTLSKKTGPSLEFRCTAFPDRIAIKDMWVTFPDDPSKDELAYEGPSFRVLDEKLRKAFHRYIEIRGIKPSMINFLHEYMINKDSREHLLWLKSLKNFVKY

SEQ ID NO: 30519 - protein, 167 aa, Arabidopsis thaliana
  peptide (1)..(167): Ceres Seq. ID no. 12422998
MEDKPGGKIVTLTREYEGETVKVEVHMTNLVTGDKEDDEDDEEEAENEEDEDEDKPLKPKQSNVPLLVTLSKKTGPSLEFRCTAFPDRIAIKDMWVTFPDDPSKDELAYEGPSFRVLDEKLRKAFHRYIEIRGIKPSMINFLHEYMINKDSREHLLWLKSLKNFVKY

SEQ ID NO: 30520 - DNA, 871 bp, Arabidopsis thaliana
  misc_feature (1)..(871): Ceres Seq. ID no. 13621946
  misc_feature (1)..(871): Ortholog of  Ceres SEQ ID NO 13661994 as cited in SEQ ID NO 60568
  misc_feature (1)..(871): Ortholog of  Ceres SEQ ID NO 12584790 as cited in SEQ ID NO 62648
attcattcatcacttatacgatcacttcccaaattattgattttttttacccatttctctcatcgcacggtgatattgagaatcgccgacctgaatcgatcggaaaactttctctgattaccggcggtcaacaccgctgaacacatatgtttgtttgacgacctcttctctccgcgatctttacctcaacaacgagatctgtttccacgaaagaaaggaggatgtcgacgccagcaaggaagaggttaatgagggatttcaagaggttgcagcaagacccacctgcgggtattagtggtgctccacaggacaacaacattatgctctggaatgctgtcatatttgggcctgatgacacaccatgggatggaggtactttcaaactctcactgcagttctctgaagattatcccaataaaccaccaacagttcggtttgtgtcacggatgtttcatcctaatatttatgcagatgggagtatctgcttggacattctacaaaaccagtggagtccaatctatgatgttgctgctatacttacctccatccagtccttgctctgtgaccctaatccgaattctcctgcaaactcggaagctgctcggatgtacagcgaaagcaagcgcgagtacaacaggagagtgcgtgatgttgttgagcaaagctggactgctgactagtagtagtttgttgtaagcgttgtagctctctctactttctctcaatcacgattcagcaacagctttcttctcttttcattcatgtcttgtgtttccaaaactatttaagtgattccatgctttgatgtaacccaacatccttaaaaaaacaactttgtaccaaaccatctgaattattcacttttgtgtat

SEQ ID NO: 30521 - protein, 152 aa, Arabidopsis thaliana
  peptide (1)..(152): Ceres Seq. ID no. 13621947
MSTPARKRLMRDFKRLQQDPPAGISGAPQDNNIMLWNAVIFGPDDTPWDGGTFKLSLQFSEDYPNKPPTVRFVSRMFHPNIYADGSICLDILQNQWSPIYDVAAILTSIQSLLCDPNPNSPANSEAARMYSESKREYNRRVRDVVEQSWTAD

SEQ ID NO: 30522 - protein, 143 aa, Arabidopsis thaliana
  peptide (1)..(143): Ceres Seq. ID no. 13621948
MRDFKRLQQDPPAGISGAPQDNNIMLWNAVIFGPDDTPWDGGTFKLSLQFSEDYPNKPPTVRFVSRMFHPNIYADGSICLDILQNQWSPIYDVAAILTSIQSLLCDPNPNSPANSEAARMYSESKREYNRRVRDVVEQSWTAD

SEQ ID NO: 30523 - protein, 121 aa, Arabidopsis thaliana
  peptide (1)..(121): Ceres Seq. ID no. 13621949
MLSYLGLMTHHGMEVLSNSHCSSLKIIPINHQQFGLCHGCFILIFMQMGVSAWTFYKTSGVQSMMLLLYLPPSSPCSVTLIRILLQTRKLLGCTAKASASTTGECVMLLSKAGLLTSSSLL

SEQ ID NO: 30524 - DNA, 1076 bp, Arabidopsis thaliana
  misc_feature (1)..(1076): Ceres Seq. ID no. 13495712
  misc_feature (1)..(1076): Ortholog of  Ceres SEQ ID NO 13662949 as cited in SEQ ID NO 64276
aatttgccgttgaaggggctcgcaggacttctgtctgcgtctccgaaccaattctcttcttcttctctcgatccgatccgttttctacttctctcaatttcgaaccaattggatcgcatcttacgggggcgaggacgaggaagaagaatttttgctccgggataattgtctcatctgatttatatcggaaaaaaggtcgcttgccggataggacacgatccactttcataaaggagatatttttacagattcagtggacgccatggatgtgcctagctcttgggatgctttacggaaacaggctagaaagattgaagctcagcttgacgagcagatgcattcatatcgtagacttgtttcaactaaggctttatcaaagtcagatggttctgagagtgatattgaagctggaattgacttacttcttaggcaactgcaacaagttaatgctcagatgcaagcatgggtttcttctggtggatcagaaatggtctcccatactttaactcgacatcaagagatccttcaagatctgacacaggagttttatcgacatcgctccagtcttagagcaaaacaagagcatgcttcacttcttgaggactttagagaatttgatcggactagattagatttagaagatggatatgggtctgaacaagccctgatcaaggaacatatgggaatcaaccgcaatacagctcagatggacggtgtcatttcacaagctcaggcaacactcggtacacttgtgtttcaacgttcaacttttggaggcatcaactcaaagcttagcaatgtcgccagccgtctacctacggtgaacactattctggcagcgataaagaggaaaaagtcgatggatacaatcattctttcactcgttgcggctgtatgcacatttctcatattcatttactggataaccaagtagaatttgcccatttctttcgtttcatctttatgttgggccacgtctggttttcccatgatgtcaatttgttctgcaattatcggtgttctagtaaagaatctaaagatcaaaaacataaatattgtgtacagaaaatttcagc

SEQ ID NO: 30525 - protein, 223 aa, Arabidopsis thaliana
  peptide (1)..(223): Ceres Seq. ID no. 13495713
MDVPSSWDALRKQARKIEAQLDEQMHSYRRLVSTKALSKSDGSESDIEAGIDLLLRQLQQVNAQMQAWVSSGGSEMVSHTLTRHQEILQDLTQEFYRHRSSLRAKQEHASLLEDFREFDRTRLDLEDGYGSEQALIKEHMGINRNTAQMDGVISQAQATLGTLVFQRSTFGGINSKLSNVASRLPTVNTILAAIKRKKSMDTIILSLVAAVCTFLIFIYWITK

SEQ ID NO: 30526 - protein, 199 aa, Arabidopsis thaliana
  peptide (1)..(199): Ceres Seq. ID no. 13495714
MHSYRRLVSTKALSKSDGSESDIEAGIDLLLRQLQQVNAQMQAWVSSGGSEMVSHTLTRHQEILQDLTQEFYRHRSSLRAKQEHASLLEDFREFDRTRLDLEDGYGSEQALIKEHMGINRNTAQMDGVISQAQATLGTLVFQRSTFGGINSKLSNVASRLPTVNTILAAIKRKKSMDTIILSLVAAVCTFLIFIYWITK

SEQ ID NO: 30527 - protein, 167 aa, Arabidopsis thaliana
  peptide (1)..(167): Ceres Seq. ID no. 13495715
FAVEGARRTSVCVSEPILFFFSRSDPFSTSLNFEPIGSHLTGARTRKKNFCSGIIVSSDLYRKKGRLPDRTRSTFIKEIFLQIQWTPWMCLALGMLYGNRLERLKLSLTSRCIHIVDLFQLRLYQSQMVLRVILKLELTYFLGNCNKLMLRCKHGFLLVDQKWSPIL

SEQ ID NO: 30528 - DNA, 1000 bp, Arabidopsis thaliana
  misc_feature (1)..(1000): Ceres Seq. ID no. 12332107
  misc_feature (1)..(1000): Ortholog of  Ceres SEQ ID NO 15169849 as cited in SEQ ID NO 53636
  misc_feature (1)..(1000): Ortholog of  Ceres SEQ ID NO 14307300 as cited in SEQ ID NO 54107
taggttaaaacttattgttgattcttctctattcgtcgtcgacctattttcctcagccatggccgtcgggaaaaacaagagaatctctaagggtaggaagggaggaaagaagaaggctgttgatcctttctccaagaaagattggtatgatgttaaggctccttcaatcttcactcacaggaatgttggaaagacacttgtttccagaactcagggtaccaaaattgcctcagaaggcttgaaacacagagtttttgaggtttctcttgctgatcttcaaggtgatgaggataacgcttacaggaagatccgtctcagagctgaagatgtccagggcaggaacgttctgtgccaattctggggcatggacttcaccaccgataaacttaggtcattggttaagaagtggcagactttgattgaggctcatgttgatgttaaaaccaccgacagttacactctcaggctattctgtatcgccttcaccaagagacgtgctaaccaggtcaagaggacttgctacgctcaatccagccaaatccgtcagatccgcaggaagatgagggacatcatggttagggaagcttcctcatgtgaccttaaggatcttgttgctaagttcattcctgaagctattggcagggagattgagaaggcaactcagggcatctaccctcttcagaatgttttcatccgtaaagtcaagatcctcaaggcccctaaattcgaccttggcaagctcatggatgttcacggagattactcagcagaagatgttggtgttaaggtagacaggccggctgatgagatggctgttgaggaacctactgaaatcatcggagcttaagaaatcgagagatgtctttttcttctaaactttagctttttgatgctctgtcgtttcacacactcttttgttcccggtttaattttgctgtattgatgacttttctcagtgtaaacttgcgagtttttgataatttatggaacaccttttctc

SEQ ID NO: 30529 - protein, 281 aa, Arabidopsis thaliana
  peptide (1)..(281): Ceres Seq. ID no. 12332108
RLKLIVDSSLFVVDLFSSAMAVGKNKRISKGRKGGKKKAVDPFSKKDWYDVKAPSIFTHRNVGKTLVSRTQGTKIASEGLKHRVFEVSLADLQGDEDNAYRKIRLRAEDVQGRNVLCQFWGMDFTTDKLRSLVKKWQTLIEAHVDVKTTDSYTLRLFCIAFTKRRANQVKRTCYAQSSQIRQIRRKMRDIMVREASSCDLKDLVAKFIPEAIGREIEKATQGIYPLQNVFIRKVKILKAPKFDLGKLMDVHGDYSAEDVGVKVDRPADEMAVEEPTEIIGA

SEQ ID NO: 30530 - protein, 262 aa, Arabidopsis thaliana
  peptide (1)..(262): Ceres Seq. ID no. 12332109
MAVGKNKRISKGRKGGKKKAVDPFSKKDWYDVKAPSIFTHRNVGKTLVSRTQGTKIASEGLKHRVFEVSLADLQGDEDNAYRKIRLRAEDVQGRNVLCQFWGMDFTTDKLRSLVKKWQTLIEAHVDVKTTDSYTLRLFCIAFTKRRANQVKRTCYAQSSQIRQIRRKMRDIMVREASSCDLKDLVAKFIPEAIGREIEKATQGIYPLQNVFIRKVKILKAPKFDLGKLMDVHGDYSAEDVGVKVDRPADEMAVEEPTEIIGA

SEQ ID NO: 30531 - protein, 160 aa, Arabidopsis thaliana
  peptide (1)..(160): Ceres Seq. ID no. 12332110
MDFTTDKLRSLVKKWQTLIEAHVDVKTTDSYTLRLFCIAFTKRRANQVKRTCYAQSSQIRQIRRKMRDIMVREASSCDLKDLVAKFIPEAIGREIEKATQGIYPLQNVFIRKVKILKAPKFDLGKLMDVHGDYSAEDVGVKVDRPADEMAVEEPTEIIGA

SEQ ID NO: 30532 - DNA, 698 bp, Arabidopsis thaliana
  misc_feature (1)..(698): Ceres Seq. ID no. 12333385
  misc_feature (1)..(698): Ortholog of  Ceres SEQ ID NO 15178329 as cited in SEQ ID NO 52153
agggttttttgggggtttggttcaagcttcatcgtcgtctctctgtctcttcaatttcattcgttttctgagataaaagtgagagagaaatctaaattcgagaggagaagttttaatttttctgagttagattcaatggaagagatcacggaaggagttaacaacatgaacttggctgttgatacccagaagaagaatcggattcaagtttccaacactaagaaaccattgttcttctacgtcaatctcgccaagaggtacatgcagcagtacactgatgtcgaattgtctgcactaggaatggctattgccactgttgttacggtcgctgagatattgaagaacaatggctttgctgttgaaaagaagatcatgacatcgactgtggatatcaaggatgattcaaggggtcgtcctgtgcagaaagctaagattgagatcacgcttgccaagtctgagaagtttgatgaactaatggctgcagctaatgaagagaaggaggctgcagaagcccaagagcaaaactagattgtttcaagttttttctgttcaacgatcttatttcttcgttccctatctctatctgcttaattttaagacacttctatttcgttaatttttggttcacttttttatttcaccttggattgtgtcctctgtacctctgagcatttttatttaaagatcgtaggaagtat

SEQ ID NO: 30533 - protein, 175 aa, Arabidopsis thaliana
  peptide (1)..(175): Ceres Seq. ID no. 12333386
RVFWGFGSSFIVVSLSLQFHSFSEIKVREKSKFERRSFNFSELDSMEEITEGVNNMNLAVDTQKKNRIQVSNTKKPLFFYVNLAKRYMQQYTDVELSALGMAIATVVTVAEILKNNGFAVEKKIMTSTVDIKDDSRGRPVQKAKIEITLAKSEKFDELMAAANEEKEAAEAQEQN

SEQ ID NO: 30534 - protein, 130 aa, Arabidopsis thaliana
  peptide (1)..(130): Ceres Seq. ID no. 12333387
MEEITEGVNNMNLAVDTQKKNRIQVSNTKKPLFFYVNLAKRYMQQYTDVELSALGMAIATVVTVAEILKNNGFAVEKKIMTSTVDIKDDSRGRPVQKAKIEITLAKSEKFDELMAAANEEKEAAEAQEQN

SEQ ID NO: 30535 - protein, 120 aa, Arabidopsis thaliana
  peptide (1)..(120): Ceres Seq. ID no. 12333388
MNLAVDTQKKNRIQVSNTKKPLFFYVNLAKRYMQQYTDVELSALGMAIATVVTVAEILKNNGFAVEKKIMTSTVDIKDDSRGRPVQKAKIEITLAKSEKFDELMAAANEEKEAAEAQEQN

SEQ ID NO: 30536 - DNA, 592 bp, Arabidopsis thaliana
  misc_feature (1)..(592): Ceres Seq. ID no. 12339207
  misc_feature (1)..(592): Ortholog of  Ceres SEQ ID NO 13662984 as cited in SEQ ID NO 64419
ttttaccgaacaaggcgatgcgataacttttgaatccgaagttgacaagatttatctaagcacgccaacaaagattgctattttggatcacgagaaaaagaggactttcgttattcgcaaggacgggcttgctgatgctgtggtgtggaatccttgggataagaaatcaaagacgatctctgacttgggagatgaagactataagcatatgctttgtgtggaagctgcgtctatcgagagaccgatcacattgaaacccggtgaagaatggaaaggaagactcgaactctctgcagttccttctagttactccagtggacagcttgaccccaagaaagtccttgagtgactctttcaaactccaaaaacagcatctttctcccctctttaattgcagtactataaagaaacgagtgaaggagagcttaaagatcatcggatatactatttaaagaaactgagatattgaataaaaattgttgcttcttagttctcttttgtaaccacagacaataacgatttgcgaactgcgaaccaagcatgcctggtctagcatttgtctggtcagagtccaaaaggaattacaactttt

SEQ ID NO: 30537 - protein, 115 aa, Arabidopsis thaliana
  peptide (1)..(115): Ceres Seq. ID no. 12339208
FTEQGDAITFESEVDKIYLSTPTKIAILDHEKKRTFVIRKDGLADAVVWNPWDKKSKTISDLGDEDYKHMLCVEAASIERPITLKPGEEWKGRLELSAVPSSYSSGQLDPKKVLE

SEQ ID NO: 30538 - DNA, 855 bp, Arabidopsis thaliana
  misc_feature (1)..(855): Ceres Seq. ID no. 13489834
  misc_feature (1)..(855): Ortholog of  Ceres SEQ ID NO 13663563 as cited in SEQ ID NO 66853
actaacttctacataaacaaactcgttgcgctcttctcaattccacgaatcacacactcttcttcttcttctgttcatcaaagaaaacgaaacccatttctcaaaatccaaaattttcaaaaactcaaaactcatcatgggtttcatttcttcttcatcaccagtagaagagtctcattaccatacacacaagatcttccttttctccaactacatccttctcggcgctgcttcaagttgtatcttcctcacactctctctccgtctaatcccttccatctgcggattcctcctcatcctcctccacgccaccacaatcgccgccgcagtctcaggctgcgctgctgcatcttgcggaagaaaccgttggtacgccgctcacatggttgcaactgtgctcactgctatattccaaggctctgtctctgttctcatcttcaccaacacgtctaaattcctcgggagtcttaagtcgtatgtgcgtgacgaagatgctgctgtgattttgaaactcggtggtggtctttgtattgtgatcttttgtcttgattggatcgttcttgtgtgtgctttcttcttgaagtactatgcttatgtcgatggtggtgatggcgttgcgatgaagagaactggtaaggttcagagtgaggagaatccgaaggactggccatggccgttccaagtttaaagtttgtgtccttttgttttgtggtgagaactgttgagttagatcaatatcaaatgttggttttatggttctgtttcggtgggtattattgtgatttgttcatttgttttttgagtgtttgatgtaattcgtcaatgatctgttacatatataaagtcttttcttat

SEQ ID NO: 30539 - protein, 183 aa, Arabidopsis thaliana
  peptide (1)..(183): Ceres Seq. ID no. 13489835
MGFISSSSPVEESHYHTHKIFLFSNYILLGAASSCIFLTLSLRLIPSICGFLLILLHATTIAAAVSGCAAASCGRNRWYAAHMVATVLTAIFQGSVSVLIFTNTSKFLGSLKSYVRDEDAAVILKLGGGLCIVIFCLDWIVLVCAFFLKYYAYVDGGDGVAMKRTGKVQSEENPKDWPWPFQV

SEQ ID NO: 30540 - protein, 150 aa, Arabidopsis thaliana
  peptide (1)..(150): Ceres Seq. ID no. 13489836
TNFYINKLVALFSIPRITHSSSSSVHQRKRNPFLKIQNFQKLKTHHGFHFFFITSRRVSLPYTQDLPFLQLHPSRRCFKLYLPHTLSPSNPFHLRIPPHPPPRHHNRRRSLRLRCCILRKKPLVRRSHGCNCAHCYIPRLCLCSHLHQHV

SEQ ID NO: 30541 - protein, 101 aa, Arabidopsis thaliana
  peptide (1)..(101): Ceres Seq. ID no. 13489837
MVATVLTAIFQGSVSVLIFTNTSKFLGSLKSYVRDEDAAVILKLGGGLCIVIFCLDWIVLVCAFFLKYYAYVDGGDGVAMKRTGKVQSEENPKDWPWPFQV

SEQ ID NO: 30542 - DNA, 901 bp, Arabidopsis thaliana
  misc_feature (1)..(901): Ceres Seq. ID no. 12332065
  misc_feature (1)..(901): Ortholog of  Ceres SEQ ID NO 14316436 as cited in SEQ ID NO 59213
aacgaatctctatctctctctagattttggggattttgctctctctccctctctgtctctctttggtgctcgtagctttctgtctcccaattgagagaaggagggagatagaaacgtcgatgggcttaattgtggatgatgataacgatggagaagttttgattccgccgccgaatttttcaatggtagaagatggaatttaccgatctgggtttcctgagctggagaatttcggattcttatcaaccctaaatcttcgatccatcatttatctgtgtcctgagccataccctgaggacaatctcaagtctcttgcatccaacaacattaagcttttccagttcgggattgaaggcaaaacggatcctccaactcctatgccaaaggatacagtgttgagtgctcttagagtactagttgatgttcgaaatcatccaattcttatccactgtaagcgcggaaagcataggacaggttgtcttgtgggatgcttgaggaaagtgcagaactggtgcttgtcatcggttctcgaggaataccagaagtgtgcgggtttgaaatggagacaaagagatttaaggttcattgaggatttcgatgtgctcagattgaagcaatgtctatacagcatcatatatcagtacaatgggtatggtctcaagagaagaaagttgctgtatcaagaagagaatgttgttcaagaacagcaaaaacctcaagccaccaaaggataaagaaagagatttgaaatcggatttttttttgtttctttacattttgtcgtgatgatgatgatgatttttttgagaataggatagttctttaaaaagcttgagaaaacagaggatttgatttggtctctctctatcttttttttacggttagagaaatttacagattg

SEQ ID NO: 30543 - protein, 204 aa, Arabidopsis thaliana
  peptide (1)..(204): Ceres Seq. ID no. 12332066
MGLIVDDDNDGEVLIPPPNFSMVEDGIYRSGFPELENFGFLSTLNLRSIIYLCPEPYPEDNLKSLASNNIKLFQFGIEGKTDPPTPMPKDTVLSALRVLVDVRNHPILIHCKRGKHRTGCLVGCLRKVQNWCLSSVLEEYQKCAGLKWRQRDLRFIEDFDVLRLKQCLYSIIYQYNGYGLKRRKLLYQEENVVQEQQKPQATKG

SEQ ID NO: 30544 - protein, 183 aa, Arabidopsis thaliana
  peptide (1)..(183): Ceres Seq. ID no. 12332067
MVEDGIYRSGFPELENFGFLSTLNLRSIIYLCPEPYPEDNLKSLASNNIKLFQFGIEGKTDPPTPMPKDTVLSALRVLVDVRNHPILIHCKRGKHRTGCLVGCLRKVQNWCLSSVLEEYQKCAGLKWRQRDLRFIEDFDVLRLKQCLYSIIYQYNGYGLKRRKLLYQEENVVQEQQKPQATKG

SEQ ID NO: 30545 - protein, 118 aa, Arabidopsis thaliana
  peptide (1)..(118): Ceres Seq. ID no. 12332068
MPKDTVLSALRVLVDVRNHPILIHCKRGKHRTGCLVGCLRKVQNWCLSSVLEEYQKCAGLKWRQRDLRFIEDFDVLRLKQCLYSIIYQYNGYGLKRRKLLYQEENVVQEQQKPQATKG

SEQ ID NO: 30546 - DNA, 1052 bp, Arabidopsis thaliana
  misc_feature (1)..(1052): Ceres Seq. ID no. 12327211
  misc_feature (1)..(1052): Ortholog of  Ceres SEQ ID NO 13658132 as cited in SEQ ID NO 66758
acattttcgtcttcgtctccaatgattgctctctcactctcagtctcactcacatcattaccattctccttcgcgctttcatcgactccgtgcaaatcacgcgcctctcctccacgtagcaccgtctcgttgagttcttccaggagacgacaagatcgccggcgatcaattgaggctatgtctcaggtgatggaattggaagatgaatccgatttcgagaagcttctctcatcggataatcggatctcgatcactggattcggttctcttctctccgagagaagcgcgaggagtacattcccagatttggagaatttcagaatcgcgaaattgcaaggattcagaagagttttcgctcattctgctccgatcttcttcgagcgtggcatcgcgaatcctgaaactaaggagatctcaagcttgagtgttgagccatgtgaaggagagagccttgtggttactgtcttcgagatcaaaagctcagagattccggcttttattggaagggagcttgagttccggtttctcgctgttgttcctgaaacattggaaggcaaaccttacaccaattctgcggtactttgtggtcgatacagtgatgaggagtttttccagattagatgcaaaggaaacaaagagatttactttcaacattatggaagattcaagatcgataagatatggcgggacgacatcttaccttgtcgtctctatctaagacactgtgtgttggctgctaagaatctgggagatgaagcttataataactttctggatcatacattcttgggagatcgaaaaacaaccatcagagagtatttaagcagcacagggtctggtatcatggaagaagaaccaccggaggctctaaagtctagatatggaggttgatcaaaaaccaacaaaaaaagttaaactgatttttatcaagcttcaaacgttatcgaagctagttataaaattaagaaaacaaaaatcaacaaatgtcccacatcgggagtcttagagaagggtagcgtttctttgggctatataagagaatgagttttgtc

SEQ ID NO: 30547 - protein, 296 aa, Arabidopsis thaliana
  peptide (1)..(296): Ceres Seq. ID no. 12327212
TFSSSSPMIALSLSVSLTSLPFSFALSSTPCKSRASPPRSTVSLSSSRRRQDRRRSIEAMSQVMELEDESDFEKLLSSDNRISITGFGSLLSERSARSTFPDLENFRIAKLQGFRRVFAHSAPIFFERGIANPETKEISSLSVEPCEGESLVVTVFEIKSSEIPAFIGRELEFRFLAVVPETLEGKPYTNSAVLCGRYSDEEFFQIRCKGNKEIYFQHYGRFKIDKIWRDDILPCRLYLRHCVLAAKNLGDEAYNNFLDHTFLGDRKTTIREYLSSTGSGIMEEEPPEALKSRYGG

SEQ ID NO: 30548 - protein, 289 aa, Arabidopsis thaliana
  peptide (1)..(289): Ceres Seq. ID no. 12327213
MIALSLSVSLTSLPFSFALSSTPCKSRASPPRSTVSLSSSRRRQDRRRSIEAMSQVMELEDESDFEKLLSSDNRISITGFGSLLSERSARSTFPDLENFRIAKLQGFRRVFAHSAPIFFERGIANPETKEISSLSVEPCEGESLVVTVFEIKSSEIPAFIGRELEFRFLAVVPETLEGKPYTNSAVLCGRYSDEEFFQIRCKGNKEIYFQHYGRFKIDKIWRDDILPCRLYLRHCVLAAKNLGDEAYNNFLDHTFLGDRKTTIREYLSSTGSGIMEEEPPEALKSRYGG

SEQ ID NO: 30549 - protein, 237 aa, Arabidopsis thaliana
  peptide (1)..(237): Ceres Seq. ID no. 12327214
MSQVMELEDESDFEKLLSSDNRISITGFGSLLSERSARSTFPDLENFRIAKLQGFRRVFAHSAPIFFERGIANPETKEISSLSVEPCEGESLVVTVFEIKSSEIPAFIGRELEFRFLAVVPETLEGKPYTNSAVLCGRYSDEEFFQIRCKGNKEIYFQHYGRFKIDKIWRDDILPCRLYLRHCVLAAKNLGDEAYNNFLDHTFLGDRKTTIREYLSSTGSGIMEEEPPEALKSRYGG

SEQ ID NO: 30550 - DNA, 955 bp, Arabidopsis thaliana
  misc_feature (1)..(955): Ceres Seq. ID no. 12579911
  misc_feature (1)..(955): Ortholog of  Ceres SEQ ID NO 13596601 as cited in SEQ ID NO 62486
atgattgatctacacagaatccatttccgcaaatcggattcatgtttttgctttatcgtaggcttccttcatttgcacgaacaacaacaacaacccttctctgcaaatctatggagcctgcgataacagcgacttcttcttcttctttcggtggtggctcttctcgtctcgccgctttagcccagcaacttcgccaatacaagcccccaccttcttcatcgttcgatgactccgaggagatgcagacagatcaggagaccgctgggaaagtcgtttctcaggttgggtttcaggaatctattgctcctctttcgaaagaccctgataggtttaaacccaagagagccgctgtgttgatctgtctctttgaaggagatgatggtgatttgcgtgttattcttactaagagatcttccaaattgtctactcactcaggagaagtttcattgccaggtggtaaagcggaggaggatgataaagatgatgggatgactgctaccagagaggctgaggaagagattggattggacccttctcttgttgatgttgttacttctcttgaaccatttctgtctaagcatcttcttagagtaattcctgtgataggcatcttgagggacaaaaataaattcaatccgataccaaatcctggggaagtggaagctgtgtttgatgcacccttggaaatgttccttaaggatgagaatcgaagatctgaagagagagagtggatgggtgaaaagtatttgatccattactttgactacagaacaggagataaggattatatgatatggggttaaactgctgggattttgatcagagctgcatctgtgacttatgaacgaccacctgcttttatcgagcagtgccctaagtttaagtaccctaaaatggtagaaaaacatacttgtatgccttaatgaacataatttttcgaatgatgctttcctag

SEQ ID NO: 30551 - protein, 253 aa, Arabidopsis thaliana
  peptide (1)..(253): Ceres Seq. ID no. 12579912
MFLLYRRLPSFARTTTTTLLCKSMEPAITATSSSSFGGGSSRLAALAQQLRQYKPPPSSSFDDSEEMQTDQETAGKVVSQVGFQESIAPLSKDPDRFKPKRAAVLICLFEGDDGDLRVILTKRSSKLSTHSGEVSLPGGKAEEDDKDDGMTATREAEEEIGLDPSLVDVVTSLEPFLSKHLLRVIPVIGILRDKNKFNPIPNPGEVEAVFDAPLEMFLKDENRRSEEREWMGEKYLIHYFDYRTGDKDYMIWG

SEQ ID NO: 30552 - protein, 230 aa, Arabidopsis thaliana
  peptide (1)..(230): Ceres Seq. ID no. 12579913
MEPAITATSSSSFGGGSSRLAALAQQLRQYKPPPSSSFDDSEEMQTDQETAGKVVSQVGFQESIAPLSKDPDRFKPKRAAVLICLFEGDDGDLRVILTKRSSKLSTHSGEVSLPGGKAEEDDKDDGMTATREAEEEIGLDPSLVDVVTSLEPFLSKHLLRVIPVIGILRDKNKFNPIPNPGEVEAVFDAPLEMFLKDENRRSEEREWMGEKYLIHYFDYRTGDKDYMIWG

SEQ ID NO: 30553 - protein, 187 aa, Arabidopsis thaliana
  peptide (1)..(187): Ceres Seq. ID no. 12579914
MQTDQETAGKVVSQVGFQESIAPLSKDPDRFKPKRAAVLICLFEGDDGDLRVILTKRSSKLSTHSGEVSLPGGKAEEDDKDDGMTATREAEEEIGLDPSLVDVVTSLEPFLSKHLLRVIPVIGILRDKNKFNPIPNPGEVEAVFDAPLEMFLKDENRRSEEREWMGEKYLIHYFDYRTGDKDYMIWG

SEQ ID NO: 30554 - DNA, 836 bp, Arabidopsis thaliana
  misc_feature (1)..(836): Ceres Seq. ID no. 13489838
  misc_feature (1)..(836): Ortholog of  Ceres SEQ ID NO 12609339 as cited in SEQ ID NO 51780
acaatcgctggactctgctactgcgaagaacaacaaattccttgtttatcatggcgaattccggcgaagagaagttgaagctctactcttactggagaagctcgtgtgctcatcgtgtccgtatcgccctcgctttgaaagggcttgattatgagtatataccagtgaatttgctcaagggtgatcaattcgattcagatttcaagaagatcaatccaatgggaactgtaccagctctggtggatggagatgttgtgattaatgattcttttgcgataataatgtatctggatgagaagtaccctgagccacctttgttacctcgtgacctccataaacgagctgtgaattaccaggcaatgagtattgtcttgtctggcatacagcctcatcaaaatctggctgttattaggtatatcgaggaaaagataaatgtggaggagaagactgcttgggttaataatgctatcacaaaaggatttacagctctcgagaaactgttggtgaattgcgctgggaaacttgcgactggtgatgaaatttacctggctgatctctttctagcaccacagatccacggagcaatcaacagattccagattaacatggaaccatacccaaatcttgcaaaatgttacgaatcatacaaggaactgcctgtgtttcaaaatgcactaccggaaaagcagccagatgctccttcttccaccaactgattccgtgaacccgtaagctacgctcagcttaataaaacctcagacaacaacaacaatgatgagagtaataccttgtactcgtacatgtatcatataaaccagttacatcttagttcctcc

SEQ ID NO: 30555 - protein, 237 aa, Arabidopsis thaliana
  peptide (1)..(237): Ceres Seq. ID no. 13489839
NRWTLLLRRTTNSLFIMANSGEEKLKLYSYWRSSCAHRVRIALALKGLDYEYIPVNLLKGDQFDSDFKKINPMGTVPALVDGDVVINDSFAIIMYLDEKYPEPPLLPRDLHKRAVNYQAMSIVLSGIQPHQNLAVIRYIEEKINVEEKTAWVNNAITKGFTALEKLLVNCAGKLATGDEIYLADLFLAPQIHGAINRFQINMEPYPNLAKCYESYKELPVFQNALPEKQPDAPSSTN

SEQ ID NO: 30556 - protein, 221 aa, Arabidopsis thaliana
  peptide (1)..(221): Ceres Seq. ID no. 13489840
MANSGEEKLKLYSYWRSSCAHRVRIALALKGLDYEYIPVNLLKGDQFDSDFKKINPMGTVPALVDGDVVINDSFAIIMYLDEKYPEPPLLPRDLHKRAVNYQAMSIVLSGIQPHQNLAVIRYIEEKINVEEKTAWVNNAITKGFTALEKLLVNCAGKLATGDEIYLADLFLAPQIHGAINRFQINMEPYPNLAKCYESYKELPVFQNALPEKQPDAPSSTN

SEQ ID NO: 30557 - protein, 165 aa, Arabidopsis thaliana
  peptide (1)..(165): Ceres Seq. ID no. 13489841
MGTVPALVDGDVVINDSFAIIMYLDEKYPEPPLLPRDLHKRAVNYQAMSIVLSGIQPHQNLAVIRYIEEKINVEEKTAWVNNAITKGFTALEKLLVNCAGKLATGDEIYLADLFLAPQIHGAINRFQINMEPYPNLAKCYESYKELPVFQNALPEKQPDAPSSTN

SEQ ID NO: 30558 - DNA, 691 bp, Arabidopsis thaliana
  misc_feature (1)..(691): Ceres Seq. ID no. 12332112
  misc_feature (1)..(691): Ortholog of  Ceres SEQ ID NO 15170007 as cited in SEQ ID NO 51348
aaccttattcttatgattaaaattgttcggtcctgattatctctgtgtttttgggaactgagaagcatccactcgacaatggagactgcgatttgtgggagattagctctcgcaccatcctctctcttcaattctaaatcaggggacaaacatttagtctcaaaaggaccatgtgtgaatcgtagcattctcatgaccttgtctacatctgctgcattgggtaaaggaggtggtgtcttagacaaaccaattatagagaaaaccactcctggtcgtgaatccgagtttgatttaaggaaatcaaagaagatagctccaccttacagggtgatactacacaatgacaacttcaacaagagggaatatgtggttcaggtgttgatgaaggtaatacccggcatgactgtagacaacgcggttaacattatgcaagaagctcatatcaacggtttggcagttgtgattgtttgtgctcaggctgatgcagagcaacactgtatgcagctgcgcggtaacggccttctcagttctgttgaacctgatggtggaggctgctgaaactaattaaactcagtatagattttcccaccttccaggactctctatttagtcaaaaacatttgttgttttaatgtatataatatcagaaatttggtacaagactgttactatatgcaatgaaccttgcccc

SEQ ID NO: 30559 - protein, 159 aa, Arabidopsis thaliana
  peptide (1)..(159): Ceres Seq. ID no. 12332113
METAICGRLALAPSSLFNSKSGDKHLVSKGPCVNRSILMTLSTSAALGKGGGVLDKPIIEKTTPGRESEFDLRKSKKIAPPYRVILHNDNFNKREYVVQVLMKVIPGMTVDNAVNIMQEAHINGLAVVIVCAQADAEQHCMQLRGNGLLSSVEPDGGGC

SEQ ID NO: 30560 - protein, 121 aa, Arabidopsis thaliana
  peptide (1)..(121): Ceres Seq. ID no. 12332114
MTLSTSAALGKGGGVLDKPIIEKTTPGRESEFDLRKSKKIAPPYRVILHNDNFNKREYVVQVLMKVIPGMTVDNAVNIMQEAHINGLAVVIVCAQADAEQHCMQLRGNGLLSSVEPDGGGC

SEQ ID NO: 30561 - DNA, 618 bp, Arabidopsis thaliana
  misc_feature (1)..(618): Ceres Seq. ID no. 13497742
  misc_feature (1)..(618): Ortholog of  Ceres SEQ ID NO 15174406 as cited in SEQ ID NO 0
ccacgtccgatccatcacatctcctcttgcaaaccaacgtaaaacactaactaagagatcaatatggctggagtgatgaagttggcatgcatggtcttggcttgcatgattgtggccggtccaatcacagcgaacgcgcttatgagttgtggcaccgtcaacggcaacctggcagggtgcattgcctacttgacccgaggtgctccacttacccaagggtgctgcaacggcgttactaaccttaaaaacatggccagtacaaccccagaccgtcagcaagcttgccgttgccttcaatctgccgctaaagccgttggtcccggtctcaacactgcccgtgcagctggacttcctagcgcatgcaaagtcaatattccttacaaaatcagcgccagcaccaactgcaacaccgtgaggtgatgagcgacggtcaaatgaagctactagcggatgtttcgaatattatataatcgatgagataatattaaataaagatgttcgaatggctgtactcttttcaatttcctgtctttttttatcgtggcgtttctattatgtgatcgtctgtactatgttcgcaaacaacgttctttgaatttcagacttgaagtttaagtt

SEQ ID NO: 30562 - protein, 118 aa, Arabidopsis thaliana
  peptide (1)..(118): Ceres Seq. ID no. 13497743
MAGVMKLACMVLACMIVAGPITANALMSCGTVNGNLAGCIAYLTRGAPLTQGCCNGVTNLKNMASTTPDRQQACRCLQSAAKAVGPGLNTARAAGLPSACKVNIPYKISASTNCNTVR

SEQ ID NO: 30563 - protein, 114 aa, Arabidopsis thaliana
  peptide (1)..(114): Ceres Seq. ID no. 13497744
MKLACMVLACMIVAGPITANALMSCGTVNGNLAGCIAYLTRGAPLTQGCCNGVTNLKNMASTTPDRQQACRCLQSAAKAVGPGLNTARAAGLPSACKVNIPYKISASTNCNTVR

SEQ ID NO: 30564 - protein, 109 aa, Arabidopsis thaliana
  peptide (1)..(109): Ceres Seq. ID no. 13497745
MVLACMIVAGPITANALMSCGTVNGNLAGCIAYLTRGAPLTQGCCNGVTNLKNMASTTPDRQQACRCLQSAAKAVGPGLNTARAAGLPSACKVNIPYKISASTNCNTVR

SEQ ID NO: 30565 - DNA, 1065 bp, Arabidopsis thaliana
  misc_feature (1)..(1065): Ceres Seq. ID no. 12370948
  misc_feature (1)..(1065): Ortholog of  Ceres SEQ ID NO 14311950 as cited in SEQ ID NO 51677
actgtagcttcagatgcaactcctcgaaaacccgtagaaccggcattgagccaatcgtttacattctctgattcatatccttagcgttttcagaaacaaaatggtgggttggaagaggaatttgcagactgttattcgtcaagttggtagaagagtgaagaacagtcacatttctacagcaaattactcttcttctactcggaatttagaatcccctttctcacaaggttacttgcagagtctcctgagaccatcctactcctccagaccactgtatcatcatctacaacaactggggatctctacctcgagacaattgcaggcgagtgaagagcctgtatcatcacctttgtcatctccagctctgttgggtagtggaaaagaagaagagcagaagattatcccaaagcgtcagaaagttcaggctgtcctcaagtctataaagcagagtcctaagaaggtcaacctggttgcagcactagtccgtggcatgcgtgttgaagatgctttgatccaattgcaggtcacagtcaaacgagctgcacaaactgtgtaccgggttatccacgctgcccgggcaaatgctactcataaccatggactagatcctgaccgtctccttgttgcggaagcatttgttgggaagggactgtttgggaagaaggtagcttaccatgcaaaaggaagaagcgggattatatcaataccccggtgtcgcctaacagtcatagttagagagacgactccagaggaagaagctgagattgcaaggctcaaagttcacaattttaagaagaaaagcaaacgggagagacagcttgtaccacacaagctcatcgagacaagtccaatatggaaccgcagaggtaccaaagccaatcatcggtcctcagagttggtacggtcgtctcactagtatctttgttcccgcaattgcaacaagagcttctctgttatggtaaattgcttttttttttggttttggtttgatattgtattggaactctataggacctgtttgcttcttgtattcaataaacatgttcccagagaggaaacttcact

SEQ ID NO: 30566 - protein, 271 aa, Arabidopsis thaliana
  peptide (1)..(271): Ceres Seq. ID no. 12370949
MVGWKRNLQTVIRQVGRRVKNSHISTANYSSSTRNLESPFSQGYLQSLLRPSYSSRPLYHHLQQLGISTSRQLQASEEPVSSPLSSPALLGSGKEEEQKIIPKRQKVQAVLKSIKQSPKKVNLVAALVRGMRVEDALIQLQVTVKRAAQTVYRVIHAARANATHNHGLDPDRLLVAEAFVGKGLFGKKVAYHAKGRSGIISIPRCRLTVIVRETTPEEEAEIARLKVHNFKKKSKRERQLVPHKLIETSPIWNRRGTKANHRSSELVRSSH

SEQ ID NO: 30567 - protein, 141 aa, Arabidopsis thaliana
  peptide (1)..(141): Ceres Seq. ID no. 12370950
MRVEDALIQLQVTVKRAAQTVYRVIHAARANATHNHGLDPDRLLVAEAFVGKGLFGKKVAYHAKGRSGIISIPRCRLTVIVRETTPEEEAEIARLKVHNFKKKSKRERQLVPHKLIETSPIWNRRGTKANHRSSELVRSSH

SEQ ID NO: 30568 - DNA, 1580 bp, Arabidopsis thaliana
  misc_feature (1)..(1580): Ceres Seq. ID no. 12334488
  misc_feature (1)..(1580): Ortholog of  Ceres SEQ ID NO 14313288 as cited in SEQ ID NO 67419
aataggttcagtgtttctgacatattgttccctctctgaatgaaactctcccaaatagagaatggcctaaccacctatccaaccgcatcaaggcacttggtttcatccccttgatttctctctttttttcttttcctatcgcaggattttgtgttcttgttttgaatatgaaatgttcgtcgatgtgttgtttgatcctcttggccctttctctcctcaccgccttcactcttgcttcttcgtcaaatggtatagatggacctttctacgactctactgcctacacagagtgtagagccgaagcagagaagccactatacaatggaggaatgctgaaggaccaaaagccttccgtcccaggcaaagactctctcacaggcattggtgctcggttacacaccaacttacatattgcacaatctcacacagaacaccatctattgcttctccatatgggtgaagatagaggctggtgctgcatcagctcatgtaagagcaaggctgagagcagacaacgccacattaaactgcgtcggttctgtaactgccaaacatggttgctggtctttcctcaaaggaggattccttcttgattctccttgtaaacaatccatcctcttctttgagacatcagaggacgatggtaagatccaattacaagtgacgagtgcctctcttcagccattcacgcaggagcaatggaggaacaaccaagattacttcataaataccgcgagaaaacgagcagtgacaattcacgtgtcaaaagaaaacggagagagcgttgaaggagcagaggtgacagtagagcagatctctaaagacttctccattggttctgccatctccaaaactatccttggaaacattccttaccaagaatggttcgtcaagagattcgacgccacggtattcgagaacgagctgaaatggtacgcgacggagcccgatcaaggcaaactcaactacacattggctgataagatgatgaatttcgtcagagccaacagaatcatcgctcgcggtcacaacatattctgggaggatcccaaatacaatcccgattgggttcgtaatctaaccggcgaagatctccggtcggcggttaaccggcgaatcaagagtctgatgactcggtacagaggagagttcgtgcattgggacgtgagcaacgagatgcttcactttgacttctacgagactcgactggggaagaacgcgtcgtacggattcttcgccgcggctcgtgagattgactcattggcgactctgttcttcaatgatttcaacgtggtggagacttgcagcgacgagaagtcaacggttgacgaatacatcgcgagggtgagggaactccaacggtacgacggcgtaaggatggacggaataggtctcgagggtcacttcacgacgccaaacgtagcgctgatgagagccatcctcgataaactcgctacgctccagctcccaatctggctcaccgagattgatatcagcagcagcctcgaccaccgctctcaggcgatttatttggagcaagtgttacgtgaaggattctcgcacccatcggtaaacggtat

SEQ ID NO: 30569 - protein, 198 aa, Arabidopsis thaliana
  peptide (1)..(198): Ceres Seq. ID no. 12334489
MMNFVRANRIIARGHNIFWEDPKYNPDWVRNLTGEDLRSAVNRRIKSLMTRYRGEFVHWDVSNEMLHFDFYETRLGKNASYGFFAAAREIDSLATLFFNDFNVVETCSDEKSTVDEYIARVRELQRYDGVRMDGIGLEGHFTTPNVALMRAILDKLATLQLPIWLTEIDISSSLDHRSQAIYLEQVLREGFSHPSVNG

SEQ ID NO: 30570 - protein, 197 aa, Arabidopsis thaliana
  peptide (1)..(197): Ceres Seq. ID no. 12334490
MNFVRANRIIARGHNIFWEDPKYNPDWVRNLTGEDLRSAVNRRIKSLMTRYRGEFVHWDVSNEMLHFDFYETRLGKNASYGFFAAAREIDSLATLFFNDFNVVETCSDEKSTVDEYIARVRELQRYDGVRMDGIGLEGHFTTPNVALMRAILDKLATLQLPIWLTEIDISSSLDHRSQAIYLEQVLREGFSHPSVNG

SEQ ID NO: 30571 - protein, 150 aa, Arabidopsis thaliana
  peptide (1)..(150): Ceres Seq. ID no. 12334491
MTRYRGEFVHWDVSNEMLHFDFYETRLGKNASYGFFAAAREIDSLATLFFNDFNVVETCSDEKSTVDEYIARVRELQRYDGVRMDGIGLEGHFTTPNVALMRAILDKLATLQLPIWLTEIDISSSLDHRSQAIYLEQVLREGFSHPSVNG

SEQ ID NO: 30572 - DNA, 1205 bp, Arabidopsis thaliana
  misc_feature (1)..(1205): Ceres Seq. ID no. 12348519
  misc_feature (1)..(1205): Ortholog of  Ceres SEQ ID NO 14303324 as cited in SEQ ID NO 54563
  misc_feature (1)..(1205): Ortholog of  Ceres SEQ ID NO 14308575 as cited in SEQ ID NO 58782
cacttgtaacatttccacaactgtagccaaacttttgtgttctgatagtgatgatcatgatcatcacatgaataagtagaagatatctcttaccttctccttcttctaataagatcagagttttggttcttatttctttgctctcaaaacaatgggtagatcaccgtgttgtgacaaattgggtttgaagaaaggaccttggacaccagaggaggatcagaaacttttagcttatattgaagaacatggtcatggaagttggcgttcattgcctgagaaagctggtctccatcgatgcggaaagagttgtagactaagatggactaactacctaagacctgacatcaaaagaggcaaattcaacttacaagaagaacaaaccattatccaactccatgctctgttaggaaacagatggtcagcgattgctactcatttgccaaagagaacagacaacgagatcaagaactattggaacactcatttgaagaaacggttagtgaaaatggggattgatccagtgactcataaacccaaaaacgagactcctttatcttctcttggtctatccaagaacgcagctatacttagccacactgcaatgggaaagtgcaatgcttgaagctgaagcaagactagctagagaatcaaagcttcttcatttacaacattaccaaaccaaaacatcatctcaacctcatcatcatcatggattcactcacaagtcattgttacctaattggacaacaaaaccacacgaagtgtcattctctgagatgaaggaatcaatcccggcgaagatagagtttgtcggatcatcaactggtgtgactctgatgaaagaacctgaacacgattggatcaattcaacgatgcacgagtttgaaactacgcagatgggagaaggaatcgaagaagggttcacgggtctcttgctcggtggtgattcaatcgaccggagtttctccggcgataaaaacgagacggccggcgagagtagtggtggtgactgcaactactatgaggacaacaagaactacttggacagcatttttaactttgtagatccttcaccgtcggattcaccgatgttctgaatctaagggttgatatttgttgggaatgtttttgattcttttttagtttctagtttttgtgcttaaactctgattagacaatttttaaactaatccaatttttgcgcc

SEQ ID NO: 30573 - protein, 160 aa, Arabidopsis thaliana
  peptide (1)..(160): Ceres Seq. ID no. 12348520
MLEAEARLARESKLLHLQHYQTKTSSQPHHHHGFTHKSLLPNWTTKPHEVSFSEMKESIPAKIEFVGSSTGVTLMKEPEHDWINSTMHEFETTQMGEGIEEGFTGLLLGGDSIDRSFSGDKNETAGESSGGDCNYYEDNKNYLDSIFNFVDPSPSDSPMF

SEQ ID NO: 30574 - protein, 156 aa, Arabidopsis thaliana
  peptide (1)..(156): Ceres Seq. ID no. 12348521
MGRSPCCDKLGLKKGPWTPEEDQKLLAYIEEHGHGSWRSLPEKAGLHRCGKSCRLRWTNYLRPDIKRGKFNLQEEQTIIQLHALLGNRWSAIATHLPKRTDNEIKNYWNTHLKKRLVKMGIDPVTHKPKNETPLSSLGLSKNAAILSHTAMGKCNA

SEQ ID NO: 30575 - protein, 106 aa, Arabidopsis thaliana
  peptide (1)..(106): Ceres Seq. ID no. 12348522
MKESIPAKIEFVGSSTGVTLMKEPEHDWINSTMHEFETTQMGEGIEEGFTGLLLGGDSIDRSFSGDKNETAGESSGGDCNYYEDNKNYLDSIFNFVDPSPSDSPMF

SEQ ID NO: 30576 - DNA, 1812 bp, Arabidopsis thaliana
  misc_feature (1)..(1812): Ceres Seq. ID no. 12327219
  misc_feature (1)..(1812): Ortholog of  Ceres SEQ ID NO 14311183 as cited in SEQ ID NO 58495
  misc_feature (1)..(1812): Ortholog of  Ceres SEQ ID NO 13502874 as cited in SEQ ID NO 66298
  misc_feature (1)..(1812): Ortholog of  Ceres SEQ ID NO 12614124 as cited in SEQ ID NO 68392
atccgaagctaaaagaaaacactagaggaggtgaagatttttaaaaatgtcattcttatcattttctcctatttctctggacttattatctagtaatgtcttcttaaccattctagcgattatcatatccggtttacttaaaaccattacgtaccggaaacacaattcgaaccatttaaatctcccgcccggcccaccaggatggccggtgatcggaaacttatttcagttcacgcgctccgggaaacagtttttcgagtacgtcgaggatctcgtaaagatctacggtccgattcttactctcaggcttggtactcgaacaatgatcatcatctccgacgccagtctcgcccacgaagcgttaatcgaacgtggagcacaattcgcgacccgacccgttgaaactccgacccggaaaatcttcagctccagtgaaatcacagttcattccgctatgtatggacctgtgtggaggtcattgagacggaacatggttcagaacatgcttagctcgaatcggctcaaggagtttggttctgttagaaaatccgccatggataaactcatcgagagaatcaaatctgaagctagagacaacgatggactcgtctgggttctgcaaaacagcagatacgctgcgttttgtgttttattagatatctgttttggagttgagatggaagaggaatcaattgagaagatggatcagttgatgacggcgatattaaacgccgttgatccaaaactccacgattaccttccgatcttaacgccgtttaactacaatgagagaaatcgtgctcttaagcttcgtcgggaacttgtagatttcgtcgtcggattcatcgagaaacgacggaaggcgattcggaccgcaacggtatcgtctttctcgtatcttgatacactctttgatcttagaatcatcgaaggaagtgaaacgacgccgtctgatgaagatcttgtaacgctctgttcggagtttctcaatgccggtacggacacgactggggcggcgatcgagtgtgaatcgcagagttgatagcgaatcccgagattcaatctcgactgtacgatgagattaaatcaacggttggagatcgtgcggtcgatgaaagagacgtggacaaaatggtcttgttacaagctgtagtcaaagagattctccggcgacatccaccgacttactttacattaagtcacggtgtaacggaaccaacgactctctctggctataacatccctgtcggggtcaacattgagttttatcttcccggaattagtgaagacccgaagatctggtcagagccaaaaaagttcgaccctgaccggttcttatcagggcgggaagacgccgatataacaggagttgctggagtgaagatgatgccttttggtgttggccgtaggatctgtccggggatgggaatggcgacggtacatgtgcatttgatgatagcgaggatggttcaagagttcgagtggttagcctatccaccgcagagcgagatggattttgccgggaagttggtgtttgcggttgtgatgaagaagccgttgagggccatggtgagacctagggtacaatgaaagccgcaggtttgtagcatatccaacttttaaaaatgaataaatgctgtatggaatacatgcataaactgataaacactctcatgtaaaaatgaatacaagaagcatattggtactcaagtcatgttttccattaagaatcttttagaattctgttatctttgagggtaaaaacttaactatgtttgtaataaaagcttagaatgagaatttggtaaaact

SEQ ID NO: 30577 - protein, 331 aa, Arabidopsis thaliana
  peptide (1)..(331): Ceres Seq. ID no. 12327220
MSFLSFSPISLDLLSSNVFLTILAIIISGLLKTITYRKHNSNHLNLPPGPPGWPVIGNLFQFTRSGKQFFEYVEDLVKIYGPILTLRLGTRTMIIISDASLAHEALIERGAQFATRPVETPTRKIFSSSEITVHSAMYGPVWRSLRRNMVQNMLSSNRLKEFGSVRKSAMDKLIERIKSEARDNDGLVWVLQNSRYAAFCVLLDICFGVEMEEESIEKMDQLMTAILNAVDPKLHDYLPILTPFNYNERNRALKLRRELVDFVVGFIEKRRKAIRTATVSSFSYLDTLFDLRIIEGSETTPSDEDLVTLCSEFLNAGTDTTGAAIECESQS

SEQ ID NO: 30578 - protein, 239 aa, Arabidopsis thaliana
  peptide (1)..(239): Ceres Seq. ID no. 12327221
MIIISDASLAHEALIERGAQFATRPVETPTRKIFSSSEITVHSAMYGPVWRSLRRNMVQNMLSSNRLKEFGSVRKSAMDKLIERIKSEARDNDGLVWVLQNSRYAAFCVLLDICFGVEMEEESIEKMDQLMTAILNAVDPKLHDYLPILTPFNYNERNRALKLRRELVDFVVGFIEKRRKAIRTATVSSFSYLDTLFDLRIIEGSETTPSDEDLVTLCSEFLNAGTDTTGAAIECESQS

SEQ ID NO: 30579 - protein, 195 aa, Arabidopsis thaliana
  peptide (1)..(195): Ceres Seq. ID no. 12327222
MYGPVWRSLRRNMVQNMLSSNRLKEFGSVRKSAMDKLIERIKSEARDNDGLVWVLQNSRYAAFCVLLDICFGVEMEEESIEKMDQLMTAILNAVDPKLHDYLPILTPFNYNERNRALKLRRELVDFVVGFIEKRRKAIRTATVSSFSYLDTLFDLRIIEGSETTPSDEDLVTLCSEFLNAGTDTTGAAIECESQS

SEQ ID NO: 30580 - DNA, 1370 bp, Arabidopsis thaliana
  misc_feature (1)..(1370): Ceres Seq. ID no. 13574978
  misc_feature (1)..(1370): Ortholog of  Ceres SEQ ID NO 12364737 as cited in SEQ ID NO 51089
  misc_feature (1)..(1370): Ortholog of  Ceres SEQ ID NO 14311515 as cited in SEQ ID NO 51680
  misc_feature (1)..(1370): Ortholog of  Ceres SEQ ID NO 13582301 as cited in SEQ ID NO 56509
  misc_feature (1)..(1370): Ortholog of  Ceres SEQ ID NO 14315035 as cited in SEQ ID NO 56880
  misc_feature (1)..(1370): Ortholog of  Ceres SEQ ID NO 13594276 as cited in SEQ ID NO 57728
  misc_feature (1)..(1370): Ortholog of  Ceres SEQ ID NO 13594147 as cited in SEQ ID NO 58975
  misc_feature (1)..(1370): Ortholog of  Ceres SEQ ID NO 13655302 as cited in SEQ ID NO 63307
  misc_feature (1)..(1370): Ortholog of  Ceres SEQ ID NO 13597380 as cited in SEQ ID NO 64054
  misc_feature (1)..(1370): Ortholog of  Ceres SEQ ID NO 12625474 as cited in SEQ ID NO 64169
  misc_feature (1)..(1370): Ortholog of  Ceres SEQ ID NO 13597502 as cited in SEQ ID NO 64681
aaaactatattatataaacacatttttcgtttcttcacattcacaaaacatctctctctttcttctcccattcactcactatcttgctcctagaaaaagatggcgagaatgagtttgatgatcatgatgattatggttgctgtgaccatgattaacattgctaagagtgatcccattgcaccatgttacttcatatttggtgactctttggttgataatggcaacaataatcagcttcagtcattagctagagctaattactttccttacggtattgactttgctgccggtccaaccggtcggtttagcaacggcttaaccactgtcgatgttatcgctcagcttttgggtttcgaggactacattacaccttacgcttctgcaagaggacaagacattctccgaggagttaactatgcttccgctgctgccggaatccgagacgaaaccggcagacaattgggaggtcgaatagcatttgcagggcaagtagcaaatcacgtgaacactgtgtcacaagtagtgaacatacttggtgatcaaaacgaagcctcgaattacctcagcaaatgcatttactctatcggattaggcagtaacgattatcttaacaactacttcatgcctactttttactctaccggtaaccagttctcccccgaatcctatgccgacgatctcgttgcccgttacaccgaacaactcagggtactgtataccaatggagcgaggaagtttgcgttgataggagtcggggcaatcggttgcagcccgaacgagctagctcaaaacagcagagacggaagaacgtgtgacgaaagaatcaactcagcgaacagaatctttaacagcaaactcatatctatagtcgacgcttttaaccagaacacaccagatgcaaaattcacttacatcaacgcttatggcatcttccaagacattattacaaaccctgctcgctacgggtttagagtgacaaatgcaggatgttgtggagttgggaggaacaatggacagataacttgtcttccaggtcaagcaccatgtctaaataggaatgagtatgtgttttgggatgcgtttcatcccggtgaagctgcgaatattgttattggaagacgatcttttaagcgagaagctgcttctgatgctcatccttatgatattcagcagctagcatctctctaaagagagaaagatcttttggttgtctaagtattttgatagttcttcaatggcagctgagttttggactcaagaagaagtgatttggtttgtgttgtgtgatgtcataactgtttatgtaatgatttggagttactgtttatctctttttctcttaacagttttataaatttgattctttcact

SEQ ID NO: 30581 - protein, 362 aa, Arabidopsis thaliana
  peptide (1)..(362): Ceres Seq. ID no. 13574979
MARMSLMIMMIMVAVTMINIAKSDPIAPCYFIFGDSLVDNGNNNQLQSLARANYFPYGIDFAAGPTGRFSNGLTTVDVIAQLLGFEDYITPYASARGQDILRGVNYASAAAGIRDETGRQLGGRIAFAGQVANHVNTVSQVVNILGDQNEASNYLSKCIYSIGLGSNDYLNNYFMPTFYSTGNQFSPESYADDLVARYTEQLRVLYTNGARKFALIGVGAIGCSPNELAQNSRDGRTCDERINSANRIFNSKLISIVDAFNQNTPDAKFTYINAYGIFQDIITNPARYGFRVTNAGCCGVGRNNGQITCLPGQAPCLNRNEYVFWDAFHPGEAANIVIGRRSFKREAASDAHPYDIQQLASL

SEQ ID NO: 30582 - protein, 359 aa, Arabidopsis thaliana
  peptide (1)..(359): Ceres Seq. ID no. 13574980
MSLMIMMIMVAVTMINIAKSDPIAPCYFIFGDSLVDNGNNNQLQSLARANYFPYGIDFAAGPTGRFSNGLTTVDVIAQLLGFEDYITPYASARGQDILRGVNYASAAAGIRDETGRQLGGRIAFAGQVANHVNTVSQVVNILGDQNEASNYLSKCIYSIGLGSNDYLNNYFMPTFYSTGNQFSPESYADDLVARYTEQLRVLYTNGARKFALIGVGAIGCSPNELAQNSRDGRTCDERINSANRIFNSKLISIVDAFNQNTPDAKFTYINAYGIFQDIITNPARYGFRVTNAGCCGVGRNNGQITCLPGQAPCLNRNEYVFWDAFHPGEAANIVIGRRSFKREAASDAHPYDIQQLASL

SEQ ID NO: 30583 - protein, 356 aa, Arabidopsis thaliana
  peptide (1)..(356): Ceres Seq. ID no. 13574981
MIMMIMVAVTMINIAKSDPIAPCYFIFGDSLVDNGNNNQLQSLARANYFPYGIDFAAGPTGRFSNGLTTVDVIAQLLGFEDYITPYASARGQDILRGVNYASAAAGIRDETGRQLGGRIAFAGQVANHVNTVSQVVNILGDQNEASNYLSKCIYSIGLGSNDYLNNYFMPTFYSTGNQFSPESYADDLVARYTEQLRVLYTNGARKFALIGVGAIGCSPNELAQNSRDGRTCDERINSANRIFNSKLISIVDAFNQNTPDAKFTYINAYGIFQDIITNPARYGFRVTNAGCCGVGRNNGQITCLPGQAPCLNRNEYVFWDAFHPGEAANIVIGRRSFKREAASDAHPYDIQQLASL

SEQ ID NO: 30584 - DNA, 1592 bp, Arabidopsis thaliana
  misc_feature (1)..(1592): Ceres Seq. ID no. 13487835
  misc_feature (1)..(1592): Ortholog of  Ceres SEQ ID NO 13596512 as cited in SEQ ID NO 62074
atcgccgagtctgcttcttcttctctctctctctctctagtggtcacactcacttcacacccgtgaaaaaaccctaggaaccaaatatggtgaacctctcgagatccgtcgcgttgatctctgtattcctccttcctttacttagcttctctttctccgtcgataatccgacggatcggcgtgttcttgttcttctcgatgatttatcactcaaatcctctcattctatcttcttcaacactctcaagtctcgtggattcgatctcgatttcaagttagctgaagattcgaagcttgcgcttcaacgatacggccagtacttgtacgatgggttgatcatcttcgccccatcaacagaacggtttggaggatccttggattcgaaatccattgctgattttgttgattccggtcgtgacttgatcttatcggcggatactgctgcatctgatttgattaggggtattgccacagagtgtggggttgatttcgatgaggattcttcagctatggttattgatcatactagcttctccgtctctgatgttgacggcgaccacaccttgattgctgccgacgatttagtgaaatccgatgtcattttgggaaaaaccaagattgaggctcccgtgctcttcagaggagttgcacattcgttgaaccctactaacaatctggttttgaaagttctttcagcctctccatcagcttattctgctaacccaagctcgaagttgtctagtcccccccagctcactgggtcttcaatttcgctagtctcggtcatgcaggccaggaacaatgctagggttgtgatctcaggctcagtgcagttgtttagcgataggttaatcagatctggtgtccagaaagcagggagtccgaaccaatacgaaaaatctggcaacgaacagtttgtgactgaactaagcaaatgggtcttccacgaaaggggccatctgaaggctggtaatcttgtacaccatagggttggagaaacagatgagccagctatatataggataaaggatgacctggaattttctgtagagatatatgagtggtcaggaaagagctgggagccgtatgttgctaacgatgtgcaggttcagttttacatgatgagcccgtatgtgttgaaaaccctgtcaacagacaagaagggtctgtttcatacatctttcaaggttcctgatgtctacggtgtattccagtttaaggttgaatatgaaaagctaggctacactacattatctctttcgaagcagattccggtgcggccttacagacacaatgagtatgagagatttatcccaactgcgtatccttattatggagcctgctttacgacgatggctggtttcttcgtcttcagcttcgtctacctctaccataagtagaatcccttaaatggtggccaagtcccataaagtaagccaaacctccatatttagatgagaaaaaacaactttcgaactagagaccaatatttttgggcagcaaggttttcatatgtttctagttttagccaaacagttgcaaccttctttttgtttcccagatatttctatgttaacgtaactttacacccc

SEQ ID NO: 30585 - protein, 437 aa, Arabidopsis thaliana; identical to SEQ ID NO: 23044
  peptide (1)..(437): Ceres Seq. ID no. 13487836

SEQ ID NO: 30586 - protein, 296 aa, Arabidopsis thaliana; identical to SEQ ID NO: 23045
  peptide (1)..(296): Ceres Seq. ID no. 13487837

SEQ ID NO: 30587 - DNA, 1337 bp, Arabidopsis thaliana
  misc_feature (1)..(1337): Ceres Seq. ID no. 12396217
  misc_feature (1)..(1337): Ortholog of  Ceres SEQ ID NO 13595222 as cited in SEQ ID NO 56312
  misc_feature (1)..(1337): Ortholog of  Ceres SEQ ID NO 13654209 as cited in SEQ ID NO 62121
  misc_feature (1)..(1337): Ortholog of  Ceres SEQ ID NO 13596965 as cited in SEQ ID NO 63363
gactactcatatgtgtcgcccagatttgaagatcggagatatgaatctcttctttctctggatttgaaagttcgataaaaatctactgatacatcgacttctggaagcgatctcgatctctctagaattgtttcgacgacgaagatgaagaagattcaaattggtgcggtggcgctattggtgtttctatctgtggtctctctctttgaaatcggattggcttctccgaacacagttcctgctttcctctggtctccgcatctccagtctgctaatggtgaattggatgaggctgtaaattatcaggtcatgtctgcaaaggatctagttggttctgttttcactcaaggaggttggtcaaactttctgtgctcagagaagaagcttgagcaacctgttgatgttgcacttgtgttcataggcagagagttactgtcttctgatgtttcttcaaaaaggaactcagatcctgcccttgttaacacattgaataatctatttacagcttccaacttctcattggcattcccatatattgctgctccagaggaagaaaggatggagaatttgttactttcagggcttaaagaagcttgtcccaacaatgtaggagtcagcaatatcgtgttctcagattcgtgctttgttgaggatggaacaattcagaaactttcagacttgcagtctttcaaagatcatttgcttgctagaagagaaacaaggaaagaaggagaaactgacttggttgtgctctgttccgagggttctgaatcgaatagtcaagctggacagtcacattcagagcgtgaaagcatcttggaacttgttagttctgtagaacaatccggcagtaaatatacagctctttatgtttctgatccttattggtacacatcttacaaaactctccaaaggtttctagctgaaactgctaaaggaaacagtactcctgaaattgctactggctgtgatgaactctgcaaatttaagtcatcacttttggagggcatactagtgggaatcgtttttcttctcatcttgatcagtggactttgctgtatggcgggtatcgatacaccgactagattcgagactcctcaagattcttaagctgttgaccttaagagccatccccaccttttgctttgcttttgacgagtcttttcttgtgcatagtgcgcattgtggaaggtacttcaatgtcgatttgttacattattacttcaaaacaaaatctgcatatgccataaaatccccttgtatcatttattcatcttgtttgtgagtctttcttaaacgtcataaattaataatggagaacgagtaaaaaaccagag

SEQ ID NO: 30588 - protein, 321 aa, Arabidopsis thaliana
  peptide (1)..(321): Ceres Seq. ID no. 12396218
MKKIQIGAVALLVFLSVVSLFEIGLASPNTVPAFLWSPHLQSANGELDEAVNYQVMSAKDLVGSVFTQGGWSNFLCSEKKLEQPVDVALVFIGRELLSSDVSSKRNSDPALVNTLNNLFTASNFSLAFPYIAAPEEERMENLLLSGLKEACPNNVGVSNIVFSDSCFVEDGTIQKLSDLQSFKDHLLARRETRKEGETDLVVLCSEGSESNSQAGQSHSERESILELVSSVEQSGSKYTALYVSDPYWYTSYKTLQRFLAETAKGNSTPEIATGCDELCKFKSSLLEGILVGIVFLLILISGLCCMAGIDTPTRFETPQDS

SEQ ID NO: 30589 - protein, 266 aa, Arabidopsis thaliana
  peptide (1)..(266): Ceres Seq. ID no. 12396219
MSAKDLVGSVFTQGGWSNFLCSEKKLEQPVDVALVFIGRELLSSDVSSKRNSDPALVNTLNNLFTASNFSLAFPYIAAPEEERMENLLLSGLKEACPNNVGVSNIVFSDSCFVEDGTIQKLSDLQSFKDHLLARRETRKEGETDLVVLCSEGSESNSQAGQSHSERESILELVSSVEQSGSKYTALYVSDPYWYTSYKTLQRFLAETAKGNSTPEIATGCDELCKFKSSLLEGILVGIVFLLILISGLCCMAGIDTPTRFETPQDS

SEQ ID NO: 30590 - protein, 183 aa, Arabidopsis thaliana
  peptide (1)..(183): Ceres Seq. ID no. 12396220
MENLLLSGLKEACPNNVGVSNIVFSDSCFVEDGTIQKLSDLQSFKDHLLARRETRKEGETDLVVLCSEGSESNSQAGQSHSERESILELVSSVEQSGSKYTALYVSDPYWYTSYKTLQRFLAETAKGNSTPEIATGCDELCKFKSSLLEGILVGIVFLLILISGLCCMAGIDTPTRFETPQDS

SEQ ID NO: 30591 - DNA, 1378 bp, Arabidopsis thaliana
  misc_feature (1)..(1378): Ceres Seq. ID no. 12738505
  misc_feature (1)..(1378): Ortholog of  Ceres SEQ ID NO 13597325 as cited in SEQ ID NO 63935
cttcttcctcgattcaatcggagatttcgaagtctcactatcacttcttcttctacaacttcttcaaacaatttcagtagtaattgtggcgatgatggcttctctctcgatgatttcactctccattctgattctcgatcacctaaaaaatgtgtcctttctgatcttatacaagagattgagccattagatgtgagtttgattcagaaggatgttccagtgactactttggatgcaatgaaaagaacaatctcaggcatgttgggtcttcttccatctgataggtttcaggttcatattgagtcactttgggaacctttgtctaagcttttggtatcttcaatgatgactgggtatacattgaggaatgctgaatatcggctttttcttgaaaaaaaccttgatatgagtggtggaggcttggacagccacgcttcggaaaacactgaatatgatatggaagggacgtttcctgatgaagatcatgtttcatccaaaagggatagcagaactcagaacctttctgaaacgattgatgaagaaggtttgggcagagtatcctctgaagctcaagaatatatcttacgtttgcagtcacaattgtcttctgtgaaaaaggaattacaagaaatgagacgaaagaacgctgccctacaaatgcaacaatttgttggcgaagagaagaatgatttgttggactatttacgatctttgcaacctgagaaggtagctgagttgtcagaacctgcggctcctgaggtgaaagagactattcattctgttgttcacggtcttttggcaactctatcaccgaagatgcactctaagtttccagcatcagaagttccacctactgaaacggtgaaagcaaaaagtgatgaagattgtgctgaacttgtagagaacacttcgttgcagtttcagcctcttatctcactgactcgagactaccttgctcgtcttctcttctggtgcatgctattgggacattatctcagaggtttggaatatcgaatggaactgatggaggtcctgtctttgacatgcgatgccaatgggtctgagaacgtcgcttgaagctatctttatacatctcaacattgtcttacatgcgtatcagcggccttgacactcttaaaccaacaaagtgggcaagtgactaggagacaggccagcctttgagctttagctcttgcacatatatgcagctttgtgctggcctgaaaattcatgggcgaggtaaagtgtaacataagaaatcacttctactaaaattatttttcgttgcattatcgtgtgatggatctgcaaagcaataaagctaagtgtaattgtattcaggaatatactcgtttggtcattaagtatagtttgtcct

SEQ ID NO: 30592 - protein, 358 aa, Arabidopsis thaliana
  peptide (1)..(358): Ceres Seq. ID no. 12738506
LLPRFNRRFRSLTITSSSTTSSNNFSSNCGDDGFSLDDFTLHSDSRSPKKCVLSDLIQEIEPLDVSLIQKDVPVTTLDAMKRTISGMLGLLPSDRFQVHIESLWEPLSKLLVSSMMTGYTLRNAEYRLFLEKNLDMSGGGLDSHASENTEYDMEGTFPDEDHVSSKRDSRTQNLSETIDEEGLGRVSSEAQEYILRLQSQLSSVKKELQEMRRKNAALQMQQFVGEEKNDLLDYLRSLQPEKVAELSEPAAPEVKETIHSVVHGLLATLSPKMHSKFPASEVPPTETVKAKSDEDCAELVENTSLQFQPLISLTRDYLARLLFWCMLLGHYLRGLEYRMELMEVLSLTCDANGSENVA

SEQ ID NO: 30593 - protein, 279 aa, Arabidopsis thaliana
  peptide (1)..(279): Ceres Seq. ID no. 12738507
MKRTISGMLGLLPSDRFQVHIESLWEPLSKLLVSSMMTGYTLRNAEYRLFLEKNLDMSGGGLDSHASENTEYDMEGTFPDEDHVSSKRDSRTQNLSETIDEEGLGRVSSEAQEYILRLQSQLSSVKKELQEMRRKNAALQMQQFVGEEKNDLLDYLRSLQPEKVAELSEPAAPEVKETIHSVVHGLLATLSPKMHSKFPASEVPPTETVKAKSDEDCAELVENTSLQFQPLISLTRDYLARLLFWCMLLGHYLRGLEYRMELMEVLSLTCDANGSENVA

SEQ ID NO: 30594 - protein, 272 aa, Arabidopsis thaliana
  peptide (1)..(272): Ceres Seq. ID no. 12738508
MLGLLPSDRFQVHIESLWEPLSKLLVSSMMTGYTLRNAEYRLFLEKNLDMSGGGLDSHASENTEYDMEGTFPDEDHVSSKRDSRTQNLSETIDEEGLGRVSSEAQEYILRLQSQLSSVKKELQEMRRKNAALQMQQFVGEEKNDLLDYLRSLQPEKVAELSEPAAPEVKETIHSVVHGLLATLSPKMHSKFPASEVPPTETVKAKSDEDCAELVENTSLQFQPLISLTRDYLARLLFWCMLLGHYLRGLEYRMELMEVLSLTCDANGSENVA

SEQ ID NO: 30595 - DNA, 843 bp, Arabidopsis thaliana
  misc_feature (1)..(843): Ceres Seq. ID no. 12338037
  misc_feature (1)..(843): Ortholog of  Ceres SEQ ID NO 12610930 as cited in SEQ ID NO 55892
tgataatgaagatgaagatgatgatgacagcgaagaagatgaaagaccgactaagctgaagaattggcagcttaaaagattggcttatgcattgaaagctgggcgccgtaaaactagtattaaaaatctggcagctgaagtttgtcttgacagggcttatgttcttgaattgcttcgtgacccgcctccaaagctgctaatgctaagtgctacattaccagatgaaaaaccaccagtagcagcacctgagaactcctcacctgatccaagtcctgtggaatcatcatcagctgaagatgttgtggtcgaacctaaggaaaaagtaaaagatgaagcagtccatgtgatgcaacagagatggtctgctcagaaaagagtgaagaaagctcacattgaaacgctagagaaagtttacagaagatcaaaacgacccactaatgctgtggttagcagcattgttcaagtgaccaatcttccaaggaagcgagttttgaagtggtttgaagataaaagagcagaagacggagttccagataagcgagctccatatcaagctccggtttgatctaatattaacgttgagatgggcaatgattttgtatacttgattctcagaaactcatcaacattgtcgtcaaggacaatttgttttggtgatacgaggagtctttatattagtagattctgtccgaatccaatggtgtggctggatatgttagagtactactgtacttaagaaattttaggatatcttgtattcagtttttagttatttccttgctgagattgtgtcttgtagaaaaccgtttcaactttgtttggtttatggcggctataaagttt

SEQ ID NO: 30596 - protein, 187 aa, Arabidopsis thaliana
  peptide (1)..(187): Ceres Seq. ID no. 12338038
DNEDEDDDDSEEDERPTKLKNWQLKRLAYALKAGRRKTSIKNLAAEVCLDRAYVLELLRDPPPKLLMLSATLPDEKPPVAAPENSSPDPSPVESSSAEDVVVEPKEKVKDEAVHVMQQRWSAQKRVKKAHIETLEKVYRRSKRPTNAVVSSIVQVTNLPRKRVLKWFEDKRAEDGVPDKRAPYQAPV

SEQ ID NO: 30597 - protein, 121 aa, Arabidopsis thaliana
  peptide (1)..(121): Ceres Seq. ID no. 12338039
MLSATLPDEKPPVAAPENSSPDPSPVESSSAEDVVVEPKEKVKDEAVHVMQQRWSAQKRVKKAHIETLEKVYRRSKRPTNAVVSSIVQVTNLPRKRVLKWFEDKRAEDGVPDKRAPYQAPV

SEQ ID NO: 30598 - DNA, 1262 bp, Arabidopsis thaliana
  misc_feature (1)..(1262): Ceres Seq. ID no. 12395955
  misc_feature (1)..(1262): Ortholog of  Ceres SEQ ID NO 15225131 as cited in SEQ ID NO 65974
agattcagagataaggctcattaaaatcacctgcttcacccatcacgctaagatcgtggaatcttatatcactagactctcccagatcatgacacgtcatcatcttcatcatgagacccataattttttgaaactgttttatttcactccccaataatattttctgcttttagctctttttaaggctcttcaaaaatctccgtcaacgtcgagaacaaaatttggagaaatcgaacagacgatcgagatcgaggaaaatggcgtcgtggaattcgattccgctggagatctcgtacgaaatcgttggatggatcgcgtttgcttcgtggtcaattagcttttacccacagctgattttgaatttccgtaggagaagtgttgttggattgaacttcgacttcgtgatgttgaatttgacaaagcactcgtcgtatatgatctacaatgtctgcctctactttagtcctgttattcaaaagcagtactttgacacttatggcgataaagagatgatacctgtggctgcaaatgatgttgcattctcgatccatgcagttgtaatgacagctgttacactgttccagatctttatctatgaacgtggacctcaaaaagtatccagacttgctataggtattgtggttgttgtgtggggatttgcagctatctgtttcttcatagcattacctacacactcttggctatggctcatttcaatcttcaattcgattcaggtcttcatgacatgcgtcaagtacatcccacaggcaaagatgaacttcactaggaagagcacagtcgggtggagcatcgggaatattcttctcgattttactggaggacttgctaactatctgcaaatggttatacaatctattgaccaaaattcttggaagaatttctatgggaacatgggaaagactcttctctcacttatatcaatatttttcgacatcctcttcatgtttcaacactatgtgttatacccagagaagaaagtctcaaaatctccggaaactggtgaggaatcgaacgaaccactcattgattcttctcatgaacatgtttaaagatcagattctcaagagtcattagtttcagcgttcccactgtatatgtttatatcacaaaaaggtacaaatgtgagaactcttcagattgtcgtaatatcagtctaatgtatcaaatcaattatcacagaaacagcaaatgtataatacaatgttcgatcttgggttatattttaagaaacaagatgaaag

SEQ ID NO: 30599 - protein, 270 aa, Arabidopsis thaliana
  peptide (1)..(270): Ceres Seq. ID no. 12395956
MASWNSIPLEISYEIVGWIAFASWSISFYPQLILNFRRRSVVGLNFDFVMLNLTKHSSYMIYNVCLYFSPVIQKQYFDTYGDKEMIPVAANDVAFSIHAVVMTAVTLFQIFIYERGPQKVSRLAIGIVVVVWGFAAICFFIALPTHSWLWLISIFNSIQVFMTCVKYIPQAKMNFTRKSTVGWSIGNILLDFTGGLANYLQMVIQSIDQNSWKNFYGNMGKTLLSLISIFFDILFMFQHYVLYPEKKVSKSPETGEESNEPLIDSSHEHV

SEQ ID NO: 30600 - protein, 221 aa, Arabidopsis thaliana
  peptide (1)..(221): Ceres Seq. ID no. 12395957
MLNLTKHSSYMIYNVCLYFSPVIQKQYFDTYGDKEMIPVAANDVAFSIHAVVMTAVTLFQIFIYERGPQKVSRLAIGIVVVVWGFAAICFFIALPTHSWLWLISIFNSIQVFMTCVKYIPQAKMNFTRKSTVGWSIGNILLDFTGGLANYLQMVIQSIDQNSWKNFYGNMGKTLLSLISIFFDILFMFQHYVLYPEKKVSKSPETGEESNEPLIDSSHEHV

SEQ ID NO: 30601 - protein, 211 aa, Arabidopsis thaliana
  peptide (1)..(211): Ceres Seq. ID no. 12395958
MIYNVCLYFSPVIQKQYFDTYGDKEMIPVAANDVAFSIHAVVMTAVTLFQIFIYERGPQKVSRLAIGIVVVVWGFAAICFFIALPTHSWLWLISIFNSIQVFMTCVKYIPQAKMNFTRKSTVGWSIGNILLDFTGGLANYLQMVIQSIDQNSWKNFYGNMGKTLLSLISIFFDILFMFQHYVLYPEKKVSKSPETGEESNEPLIDSSHEHV

SEQ ID NO: 30602 - DNA, 756 bp, Arabidopsis thaliana
  misc_feature (1)..(756): Ceres Seq. ID no. 12562490
  misc_feature (1)..(756): Ortholog of  Ceres SEQ ID NO 15173608 as cited in SEQ ID NO 57605
aatcacaacaacaacaattcgacctcaattgaaattagggtttctctgcaactccacaaacatacgcctaacaaaacttcgcttcccaatttcaacaatggcttgcgtaaacgaaccatcacctaaactccaaaagctcgaccgaaacggaatccatggcgattcatcaccatcaccattcttcaaagtgaagaaactctccgagaaagctgttataccaacacgcggctcaccactctccgctggatacgatctctcaagtgcggtggattcaaaagttccagcgagaggtaaagcgcttatcccaacggatctaagtatcgctgttcccgaaggaacttacgcgagaattgcgccgagatctggtttggcttggaaacattcgattgatgttggtgctggtgtgattgatgctgattatagaggacctgttggtgtgattttgtttaatcattctgatgctgattttgaggttaagttcggtgatcgaatcgcgcagttgattatcgagaagattgtgactcctgatgttgttgaggttgatgatttggatgagactgttcgtggtgatggtggttttggttctactggtgtctaagtgataatcatcttcttcgtttatgaatgtgttttggttttttaatttcgtcgaacagtttgtgggcattattattgtactacctctttgcttcatctttagacaattcaaacaaatttcaccaaacaaactctcacttttttttttttttgggctac

SEQ ID NO: 30603 - protein, 198 aa, Arabidopsis thaliana
  peptide (1)..(198): Ceres Seq. ID no. 12562491
ITTTTIRPQLKLGFLCNSTNIRLTKLRFPISTMACVNEPSPKLQKLDRNGIHGDSSPSPFFKVKKLSEKAVIPTRGSPLSAGYDLSSAVDSKVPARGKALIPTDLSIAVPEGTYARIAPRSGLAWKHSIDVGAGVIDADYRGPVGVILFNHSDADFEVKFGDRIAQLIIEKIVTPDVVEVDDLDETVRGDGGFGSTGV

SEQ ID NO: 30604 - protein, 166 aa, Arabidopsis thaliana
  peptide (1)..(166): Ceres Seq. ID no. 12562492
MACVNEPSPKLQKLDRNGIHGDSSPSPFFKVKKLSEKAVIPTRGSPLSAGYDLSSAVDSKVPARGKALIPTDLSIAVPEGTYARIAPRSGLAWKHSIDVGAGVIDADYRGPVGVILFNHSDADFEVKFGDRIAQLIIEKIVTPDVVEVDDLDETVRGDGGFGSTGV

SEQ ID NO: 30605 - DNA, 1086 bp, Arabidopsis thaliana
  misc_feature (1)..(1086): Ceres Seq. ID no. 12333091
  misc_feature (1)..(1086): Ortholog of  Ceres SEQ ID NO 14314390 as cited in SEQ ID NO 57717
acattaaaaactgtgcttaatgatcccagaatcccagtagtagctctactcaaagtcaacacagctaccggaagaagattcgagtctctcggaaatggcatcacacgaccaccatcatcatcatcacgatcatgagcatgaccacgagaaatcagacggcggagaagggaaggcgtcgtgggtggggaaggacgggaaggtgtaccatagccacgatggactcgcacctcactcacacgaacccatctactctcctggctacttcagtcgccgagctcctccgcttcacgaccgtaacttctctgagagagcttttaccgtcggtattggcggtcccgttggcactgggaaaacggcattgatgcttgctctttgtagattcttgagggacaaatatagtcttgctgctgtgacaaatgatatattcacgaaagaggatggtgagtttctggtgaagaatggggctcttcctgaggaaaggattagagctgttgaaacaggtggatgtccacacgctgctatccgtgaagatatcagtatcaatttgggtcctcttgaggagttatctaacttattcaaggctgatttgcttctttgtgaatccggtggagataatttagctgctaatttcagtagagaactagctgactatatcatctacatcatcgatgtatcggctggtgataaaataccccgtaaaggcggccctggaatcactcaagctgatcttctggtgataaacaagactgaccttgcagcagctgttggggctgacttatcggtcatggaaagggattcactacgcatgcgtgatggagggccatttgtctttgctcaggtgaagcatgggcttggagtcgaggaaatcgtgaaccatgtcatgcactcatgggaacatgcgaccgggaagaagcgccagtgatgatggggttcttaagacccaaaatggataagatatgaaactgaatggaactctttcaatacttatcttgaactcaatttatgcgcaaaagtctatgtaatctgtttgttgtactcaagacataagagaaataaaaggtttgagcatgagactcattacattct

SEQ ID NO: 30606 - protein, 275 aa, Arabidopsis thaliana
  peptide (1)..(275): Ceres Seq. ID no. 12333092
MASHDHHHHHHDHEHDHEKSDGGEGKASWVGKDGKVYHSHDGLAPHSHEPIYSPGYFSRRAPPLHDRNFSERAFTVGIGGPVGTGKTALMLALCRFLRDKYSLAAVTNDIFTKEDGEFLVKNGALPEERIRAVETGGCPHAAIREDISINLGPLEELSNLFKADLLLCESGGDNLAANFSRELADYIIYIIDVSAGDKIPRKGGPGITQADLLVINKTDLAAAVGADLSVMERDSLRMRDGGPFVFAQVKHGLGVEEIVNHVMHSWEHATGKKRQ

SEQ ID NO: 30607 - protein, 186 aa, Arabidopsis thaliana
  peptide (1)..(186): Ceres Seq. ID no. 12333093
MLALCRFLRDKYSLAAVTNDIFTKEDGEFLVKNGALPEERIRAVETGGCPHAAIREDISINLGPLEELSNLFKADLLLCESGGDNLAANFSRELADYIIYIIDVSAGDKIPRKGGPGITQADLLVINKTDLAAAVGADLSVMERDSLRMRDGGPFVFAQVKHGLGVEEIVNHVMHSWEHATGKKRQ

SEQ ID NO: 30608 - DNA, 657 bp, Arabidopsis thaliana
  misc_feature (1)..(657): Ceres Seq. ID no. 13504784
  misc_feature (1)..(657): Ortholog of  Ceres SEQ ID NO 13663563 as cited in SEQ ID NO 66853
atgtatgcatataaaccccaaatcaaagtgaacttatcaagaaacacaaaaacaaacatcaaaaccccaaaaaaaaaccaaagttctcttcttgaattcgagaaaatgggaatgtcgaaatcgaaaggcaacacacacaacatcttccttctctgcaactacatcctcttaggctcagcctcaagttgcatcttcctcacaatctccctccgtctcttcccatctctctccggtctctcccttatcttcctctacactctcacaatcgcaaccgcggtatccggctgctcgatcttcgcctcctccacatccgccaccgcgagcgatagattatacggttcacacatggtagccacagtcctcacggccattttccaaggcgctgtctctgttctgatattcacgagaacaggggatttccttaggttcttgaaatcttatgttcgggaagaagacggtgaagtgatacttaaactctctggtggtttgtgtgtattgatgttttgcttagagtggattgttcttgtgttagcgtttttgttgaagtatagtgattatttggatgagagtgttgtagatgatgatgattttaaggtgaggaggcaagaagaagatctcaaggattggccttcttacccatttcaactcaagatttaa

SEQ ID NO: 30609 - protein, 218 aa, Arabidopsis thaliana
  peptide (1)..(218): Ceres Seq. ID no. 13504785
MYAYKPQIKVNLSRNTKTNIKTPKKNQSSLLEFEKMGMSKSKGNTHNIFLLCNYILLGSASSCIFLTISLRLFPSLSGLSLIFLYTLTIATAVSGCSIFASSTSATASDRLYGSHMVATVLTAIFQGAVSVLIFTRTGDFLRFLKSYVREEDGEVILKLSGGLCVLMFCLEWIVLVLAFLLKYSDYLDESVVDDDDFKVRRQEEDLKDWPSYPFQLKI

SEQ ID NO: 30610 - protein, 183 aa, Arabidopsis thaliana
  peptide (1)..(183): Ceres Seq. ID no. 13504786
MGMSKSKGNTHNIFLLCNYILLGSASSCIFLTISLRLFPSLSGLSLIFLYTLTIATAVSGCSIFASSTSATASDRLYGSHMVATVLTAIFQGAVSVLIFTRTGDFLRFLKSYVREEDGEVILKLSGGLCVLMFCLEWIVLVLAFLLKYSDYLDESVVDDDDFKVRRQEEDLKDWPSYPFQLKI

SEQ ID NO: 30611 - protein, 181 aa, Arabidopsis thaliana
  peptide (1)..(181): Ceres Seq. ID no. 13504787
MSKSKGNTHNIFLLCNYILLGSASSCIFLTISLRLFPSLSGLSLIFLYTLTIATAVSGCSIFASSTSATASDRLYGSHMVATVLTAIFQGAVSVLIFTRTGDFLRFLKSYVREEDGEVILKLSGGLCVLMFCLEWIVLVLAFLLKYSDYLDESVVDDDDFKVRRQEEDLKDWPSYPFQLKI

SEQ ID NO: 30612 - DNA, 821 bp, Arabidopsis thaliana
  misc_feature (1)..(821): Ceres Seq. ID no. 12333094
  misc_feature (1)..(821): Ortholog of  Ceres SEQ ID NO 14301603 as cited in SEQ ID NO 67721
  misc_feature (1)..(821): Ortholog of  Ceres SEQ ID NO 13596128 as cited in SEQ ID NO 67831
acaccgacagctaaaaatggaggaagagattatcctattggattattgggcgagtatgtacgggatgaggacaaggattgctttggaggagaaaaaagtgaaatatgagtatagagaagaagatctgagtaacaaaagccctttacttcttcagatgaaccctattcacaagaagattccggttttaattcatgaaggtaaaccgatctgcgaatcgataatccaagttcagtatatcgacgagctttggcctgacacaaacccgattcttccttcagatccttaccagagagctcaagctagattttgggcagattacatcgacaagaagacatacgtgccatgcaaggcattatggtcagaatcaggggagaagcaagaggcagcgaagatagagtttatagaagtactcaagacacttgattcagagcttggagacaaatattattttggaggaaacgaatttggactcgttgacattgcctttatcggattctatagttggtttcgtacgtacgaggaggtagcgaatctcagcatcgtgttagagtttcctaagctaatggcgtgggcacagaggtgtttgaagagagagagtgtggctaaggccttgcctgactctgataaggttcttaagtcagtctctgatcatcggaagattattttaggaatcgattaagttcacttacccctgttctgtttttcatgttttttctcattttaaaatgtggcgtgtatttcaagtttgtcaataagtatggtatagaccaaggtatgtttgtggtgggatttgagtgaagctatgatctatttttatttgc

SEQ ID NO: 30613 - protein, 225 aa, Arabidopsis thaliana
  peptide (1)..(225): Ceres Seq. ID no. 12333095
HRQLKMEEEIILLDYWASMYGMRTRIALEEKKVKYEYREEDLSNKSPLLLQMNPIHKKIPVLIHEGKPICESIIQVQYIDELWPDTNPILPSDPYQRAQARFWADYIDKKTYVPCKALWSESGEKQEAAKIEFIEVLKTLDSELGDKYYFGGNEFGLVDIAFIGFYSWFRTYEEVANLSIVLEFPKLMAWAQRCLKRESVAKALPDSDKVLKSVSDHRKIILGID

SEQ ID NO: 30614 - protein, 220 aa, Arabidopsis thaliana
  peptide (1)..(220): Ceres Seq. ID no. 12333096
MEEEIILLDYWASMYGMRTRIALEEKKVKYEYREEDLSNKSPLLLQMNPIHKKIPVLIHEGKPICESIIQVQYIDELWPDTNPILPSDPYQRAQARFWADYIDKKTYVPCKALWSESGEKQEAAKIEFIEVLKTLDSELGDKYYFGGNEFGLVDIAFIGFYSWFRTYEEVANLSIVLEFPKLMAWAQRCLKRESVAKALPDSDKVLKSVSDHRKIILGID

SEQ ID NO: 30615 - protein, 207 aa, Arabidopsis thaliana
  peptide (1)..(207): Ceres Seq. ID no. 12333097
MYGMRTRIALEEKKVKYEYREEDLSNKSPLLLQMNPIHKKIPVLIHEGKPICESIIQVQYIDELWPDTNPILPSDPYQRAQARFWADYIDKKTYVPCKALWSESGEKQEAAKIEFIEVLKTLDSELGDKYYFGGNEFGLVDIAFIGFYSWFRTYEEVANLSIVLEFPKLMAWAQRCLKRESVAKALPDSDKVLKSVSDHRKIILGID

SEQ ID NO: 30616 - DNA, 2185 bp, Arabidopsis thaliana
  misc_feature (1)..(2185): Ceres Seq. ID no. 13591907
  misc_feature (1)..(2185): Ortholog of  Ceres SEQ ID NO 15171235 as cited in SEQ ID NO 52469
  misc_feature (1)..(2185): Ortholog of  Ceres SEQ ID NO 15172705 as cited in SEQ ID NO 56069
  misc_feature (1)..(2185): Ortholog of  Ceres SEQ ID NO 12635657 as cited in SEQ ID NO 0
  misc_feature (1)..(2185): Ortholog of  Ceres SEQ ID NO 12635879 as cited in SEQ ID NO 0
  misc_feature (1)..(2185): Ortholog of  Ceres SEQ ID NO 13599649 as cited in SEQ ID NO 0
  misc_feature (1)..(2185): Ortholog of  Ceres SEQ ID NO 14309205 as cited in SEQ ID NO 0
  misc_feature (1)..(2185): Ortholog of  Ceres SEQ ID NO 15177492 as cited in SEQ ID NO 0
agattccggtgagaaacgagcaggtcctgtcttcttaagaactcaatttcttcatttctgattctataaaacatccttaaaaacatgtctaccacattgttgagaacaattcagctaaaccagttctcacttctcggaactagcttgttaagaaggagaaggagtaacaacttctccgtgaggtcttgtggaagccaaacaacgacgacccatgaagctaaacagtcttctccaacaagggttgctccaaaaaaccacaaaagcaaccaacttgataagattctgagagattacgaagctgtaattgggatagagactcatgttcagctctctacattgacaaaagccttttgtagttgctctaacaattacgtttcttatccaaacacaagtatttgtcctgtttgtatgggtttgcctggtgctttgcctgttttgaattccaaagttgttgaatttggtgttagattgggtttagctttgaattgtgatttgtctcttaagtctaaattcgataggaagcagtatttttatccagatcttcctaaaggttatcagatttctcagtttgatattcctattgcatctggtggttatgtggatgtggatattcctcttgagtttggtggtggacataggagatttggtattactagggttcatatggaagaagatgctggcaagttacttcattcagacacagtagattactctcaggtagatttgaatagagcaggtgttcctttacttgagattgtttctgaacctgatatgagaagtggtatagaagctgctgaatacgcttgtgaaatgcaacggattgcgaggtatttgggagtcagtaatgggaatatgcaagaaggctctcttcgctgcgatgtcaatatctcaatccgtcctattgggcaagctgagtttggcaccaaggtagaaataaagaatttgaacgcgttttcagcaattagcagagcaatagactttgagatatcaagacaagcacttctctataatcaggggaaagcagaccagattgtaacggagactcggctatgggaagaaggcgctcagaaaacagtaacaatgaggaaaaaggaagggcttgctgattaccgctactttccagaaccagatcttccagaagttatccttacccaagaatatgttgatagcattcgtgcttctttaccggaactccctgaagcaaagcgcaggagatatgaggcgatgggtctaggcatgcaagatgtgcttttcctcgcgaatgacgtcagtgttgcagaatatttcgatgcagtcattggtaagggtgctgaagtgaagttggcagcaaattggataatgagtgatattgcagctatcagttcagccaactcttggggagtgagtttaatatcattgatagaaagtttctcatttttcaagtaagcagcaatatcatcactttcacaatcttcttcatcgatttctctcttccaaatctcccaaaagatgtcgaaccctagagttttcttcgacatgagtctcagcggtactcccatcggacggatcgagatggagcttttcgctgatacaaccccaaacacggcggagaatttccgtgctctctgtaccggcgagaaaggaatgggaaagctaggtaagccacttcacttcaaaggatcgatcttccaccgtgtgattcccggattcatgtgtcaaggaggtgatttcaccgccaagaacggaaccggtggtgaatcgatctacggtgctaagttcaaggacgagaactttatcaagaagcatacaggagctgggattctctcaatggctaactctggtcctaacactaacggatctcagttcttcatctgtaccgataagacgtcgtggttagatggtaagcacgttgtgtttggacaagttgttaaaggcttggacgtcgtgaaggcgattgagaaagttggatctgattctggaaagacttccaaagtcgttaccatcactgattgtggtcagctttcttagatctgagtgagaaagtgagagactttgatctttatgagtaataatggtgtcttttgctttcggttgttcttcctcttaccttaatggattattctgtttagggtttgagttttcgtttcagagtttgtaacaaaacccttttgtgttttctggggtttgaaataattatgagcttacc

SEQ ID NO: 30617 - protein, 446 aa, Arabidopsis thaliana
  peptide (1)..(446): Ceres Seq. ID no. 13591908
MSTTLLRTIQLNQFSLLGTSLLRRRRSNNFSVRSCGSQTTTTHEAKQSSPTRVAPKNHKSNQLDKILRDYEAVIGIETHVQLSTLTKAFCSCSNNYVSYPNTSICPVCMGLPGALPVLNSKVVEFGVRLGLALNCDLSLKSKFDRKQYFYPDLPKGYQISQFDIPIASGGYVDVDIPLEFGGGHRRFGITRVHMEEDAGKLLHSDTVDYSQVDLNRAGVPLLEIVSEPDMRSGIEAAEYACEMQRIARYLGVSNGNMQEGSLRCDVNISIRPIGQAEFGTKVEIKNLNAFSAISRAIDFEISRQALLYNQGKADQIVTETRLWEEGAQKTVTMRKKEGLADYRYFPEPDLPEVILTQEYVDSIRASLPELPEAKRRRYEAMGLGMQDVLFLANDVSVAEYFDAVIGKGAEVKLAANWIMSDIAAISSANSWGVSLISLIESFSFFK

SEQ ID NO: 30618 - protein, 338 aa, Arabidopsis thaliana
  peptide (1)..(338): Ceres Seq. ID no. 13591909
MGLPGALPVLNSKVVEFGVRLGLALNCDLSLKSKFDRKQYFYPDLPKGYQISQFDIPIASGGYVDVDIPLEFGGGHRRFGITRVHMEEDAGKLLHSDTVDYSQVDLNRAGVPLLEIVSEPDMRSGIEAAEYACEMQRIARYLGVSNGNMQEGSLRCDVNISIRPIGQAEFGTKVEIKNLNAFSAISRAIDFEISRQALLYNQGKADQIVTETRLWEEGAQKTVTMRKKEGLADYRYFPEPDLPEVILTQEYVDSIRASLPELPEAKRRRYEAMGLGMQDVLFLANDVSVAEYFDAVIGKGAEVKLAANWIMSDIAAISSANSWGVSLISLIESFSFFK

SEQ ID NO: 30619 - protein, 253 aa, Arabidopsis thaliana
  peptide (1)..(253): Ceres Seq. ID no. 13591910
MEEDAGKLLHSDTVDYSQVDLNRAGVPLLEIVSEPDMRSGIEAAEYACEMQRIARYLGVSNGNMQEGSLRCDVNISIRPIGQAEFGTKVEIKNLNAFSAISRAIDFEISRQALLYNQGKADQIVTETRLWEEGAQKTVTMRKKEGLADYRYFPEPDLPEVILTQEYVDSIRASLPELPEAKRRRYEAMGLGMQDVLFLANDVSVAEYFDAVIGKGAEVKLAANWIMSDIAAISSANSWGVSLISLIESFSFFK

SEQ ID NO: 30620 - DNA, 1056 bp, Arabidopsis thaliana
  misc_feature (1)..(1056): Ceres Seq. ID no. 12396833
  misc_feature (1)..(1056): Ortholog of  Ceres SEQ ID NO 13656486 as cited in SEQ ID NO 69202
atttaatcacacatttgatctgagcgagggagagagagaaagagatcttgtccgaacgatgaaggcggagaagaatccgattcagtccgtaatggcgtggattcgccggcaaccgccaaaagtaaaggcttttcttggcgtggtaacggcaatgacggtgcttgttctcctcagggtgattgttcatgaacacgacaatcttttcgtcgcttctgaggctgtacatgccgttggtatcgctgttcttatctataagctcacaaaggagaagacttgtgctgggatatctctcaagacacaggagctaacggctttgtttctggctgtgagattgtattgtagctttgtaatgtagtttgatcttcatacatttcttgattcagctactttggtgaccactctttgggtcgtttatatgatccgtttcaagcttagacctacttatatggaagataaagacaattttgctatctatttcgtcgtaatcccatgtgctgttctgtctttcttcattcatccatcaacacgtcaccacatcataaacaggatttcttgggcattctgtgtttatcttgaagctgtttcagttcttcctcaattaagagtcatgcagaacactaagattgtggaaccattcactgcacattacgtatttgctttgggaattgctaggttcttgagttgtgcacactggatccttcaggtgttggatacgcgagggcggttactgactgcattagggtctggactgtggcctgtaatggtcctcatctctgaaatagtccaaaccttcattcttgcagatttctgctattactatgttcagagtttaatgggtggacagctcgttcttcgactcccgtctggtgtggtgtaaaaagctctgcgaaaatggagtgcttgagcttgtggagaggtttaatgattagggattttgagacactcgtatgatttaaaagtttttgatagcaaagaagcattaatgttaattcagattttagttgtgatgacgtttgactccacgatcatatgatttgatacacaacgcttacagtt

SEQ ID NO: 30621 - protein, 153 aa, Arabidopsis thaliana
  peptide (1)..(153): Ceres Seq. ID no. 12396834
MIRFKLRPTYMEDKDNFAIYFVVIPCAVLSFFIHPSTRHHIINRISWAFCVYLEAVSVLPQLRVMQNTKIVEPFTAHYVFALGIARFLSCAHWILQVLDTRGRLLTALGSGLWPVMVLISEIVQTFILADFCYYYVQSLMGGQLVLRLPSGVV

SEQ ID NO: 30622 - protein, 143 aa, Arabidopsis thaliana
  peptide (1)..(143): Ceres Seq. ID no. 12396835
MEDKDNFAIYFVVIPCAVLSFFIHPSTRHHIINRISWAFCVYLEAVSVLPQLRVMQNTKIVEPFTAHYVFALGIARFLSCAHWILQVLDTRGRLLTALGSGLWPVMVLISEIVQTFILADFCYYYVQSLMGGQLVLRLPSGVV

SEQ ID NO: 30623 - protein, 117 aa, Arabidopsis thaliana
  peptide (1)..(117): Ceres Seq. ID no. 12396836
FNHTFDLSEGERERDLVRTMKAEKNPIQSVMAWIRRQPPKVKAFLGVVTAMTVLVLLRVIVHEHDNLFVASEAVHAVGIAVLIYKLTKEKTCAGISLKTQELTALFLAVRLYCSFVM

SEQ ID NO: 30624 - DNA, 1657 bp, Arabidopsis thaliana
  misc_feature (1)..(1657): Ceres Seq. ID no. 13487118
  misc_feature (1)..(1657): Ortholog of  Ceres SEQ ID NO 15224473 as cited in SEQ ID NO 66479
gaagacgacgaagtcgagagaaagaaataatggcggaggagacgatggagaacgaagagagggtgaagctgttcgtcggacaagttccgaagcacatgacggagattcagctcctcacattgtttcgagaattctccatcgtcaatgaagtcaacatcattaaagagaagacaacacgagctcctcgaggatgttgttttctgacatgtcctacaagggaagatgctgacaaggtgatcaatagttttcataacaagaagacattgcctggggcatctagtccgttgcaagttaagtatgcagatggcgagttggaaagactagagcacaaacttttcgtcggtatgcttccaaagaatgtctctgaaactgaagtccagtccttattctctgaatacggaaccattaaggatctacagattctaagagggtctctacaaactagcaaaggctgtctgtttctaaagtacgagtctaaagaacaagcggtcgcagctatggaagccctcaacggaagacatataatggagggagcaaatgttcctttgattgttaaatgggcagacacagaaaaggaaagacaagctcgaagacttctaaaagttcaatctcatgtctccagactcgatccgcaaaacccctccatgtttggagcattacctatgagttatgttcctccttacaatggatatggctatcatgtgcctggaacttatggctacatgctaccacctatccagactcaacatgcatttcacaatgtgatttcacctaaccaaggtaacggcagggcattgcagggaaccgctttgacagagtctgtcccaccacgtttggccccccgcagaaacttcccaacggctcttggaaattacggttaccatggtcttcaatatcctatggcatttcctagagggatgatacctcctcgccttcctctaaccacagtttcacctggaatttctaataacggcacatcgataccttcctcgcttcaaacagaaggaccagcaggtgcgaatctatttatttataacatacctcgggaattcgaggatcaagaactcgcggctacgtttcaaccttttggtaaggttctaagcgccaaggtgtttgtagacaaggccactggtataagcaaatgtttcggattcattagttatgactcacaggcagctgctcagaacgctattaacacaatgaacggttgccaattaagcggtaagaaattgaaagtccagcttaagagagacaacggtcaacagcagcaacaacaacagagtaaaaacccgttatttaacggtttattaaactcgtaaaaaccactgacatctcttcatcattaagagttcgctgtgcggttaacggcaaatccggttgagacactaagatggatcttgatggaactggagaacaaaaagttgatggccgtaattaactaacatttgccaagtctgatcatgtgggtcagaaattctcaatcactcagaaaagctgtatcttcatgcaaaaggattctcttccactcactcttcttctatttttctcttttctaaactttgtcaatttgtgacttatgtctatcattgaaaagttcatgtataaatgttatgattattaaccattataatttcatttattaatcttgttcattctc

SEQ ID NO: 30625 - protein, 438 aa, Arabidopsis thaliana
  peptide (1)..(438): Ceres Seq. ID no. 13487119
RRRSREKEIMAEETMENEERVKLFVGQVPKHMTEIQLLTLFREFSIVNEVNIIKEKTTRAPRGCCFLTCPTREDADKVINSFHNKKTLPGASSPLQVKYADGELERLEHKLFVGMLPKNVSETEVQSLFSEYGTIKDLQILRGSLQTSKGCLFLKYESKEQAVAAMEALNGRHIMEGANVPLIVKWADTEKERQARRLLKVQSHVSRLDPQNPSMFGALPMSYVPPYNGYGYHVPGTYGYMLPPIQTQHAFHNVISPNQGNGRALQGTALTESVPPRLAPRRNFPTALGNYGYHGLQYPMAFPRGMIPPRLPLTTVSPGISNNGTSIPSSLQTEGPAGANLFIYNIPREFEDQELAATFQPFGKVLSAKVFVDKATGISKCFGFISYDSQAAAQNAINTMNGCQLSGKKLKVQLKRDNGQQQQQQQSKNPLFNGLLNS

SEQ ID NO: 30626 - protein, 429 aa, Arabidopsis thaliana
  peptide (1)..(429): Ceres Seq. ID no. 13487120
MAEETMENEERVKLFVGQVPKHMTEIQLLTLFREFSIVNEVNIIKEKTTRAPRGCCFLTCPTREDADKVINSFHNKKTLPGASSPLQVKYADGELERLEHKLFVGMLPKNVSETEVQSLFSEYGTIKDLQILRGSLQTSKGCLFLKYESKEQAVAAMEALNGRHIMEGANVPLIVKWADTEKERQARRLLKVQSHVSRLDPQNPSMFGALPMSYVPPYNGYGYHVPGTYGYMLPPIQTQHAFHNVISPNQGNGRALQGTALTESVPPRLAPRRNFPTALGNYGYHGLQYPMAFPRGMIPPRLPLTTVSPGISNNGTSIPSSLQTEGPAGANLFIYNIPREFEDQELAATFQPFGKVLSAKVFVDKATGISKCFGFISYDSQAAAQNAINTMNGCQLSGKKLKVQLKRDNGQQQQQQQSKNPLFNGLLNS

SEQ ID NO: 30627 - protein, 424 aa, Arabidopsis thaliana
  peptide (1)..(424): Ceres Seq. ID no. 13487121
MENEERVKLFVGQVPKHMTEIQLLTLFREFSIVNEVNIIKEKTTRAPRGCCFLTCPTREDADKVINSFHNKKTLPGASSPLQVKYADGELERLEHKLFVGMLPKNVSETEVQSLFSEYGTIKDLQILRGSLQTSKGCLFLKYESKEQAVAAMEALNGRHIMEGANVPLIVKWADTEKERQARRLLKVQSHVSRLDPQNPSMFGALPMSYVPPYNGYGYHVPGTYGYMLPPIQTQHAFHNVISPNQGNGRALQGTALTESVPPRLAPRRNFPTALGNYGYHGLQYPMAFPRGMIPPRLPLTTVSPGISNNGTSIPSSLQTEGPAGANLFIYNIPREFEDQELAATFQPFGKVLSAKVFVDKATGISKCFGFISYDSQAAAQNAINTMNGCQLSGKKLKVQLKRDNGQQQQQQQSKNPLFNGLLNS

SEQ ID NO: 30628 - DNA, 757 bp, Arabidopsis thaliana
  misc_feature (1)..(757): Ceres Seq. ID no. 12396975
  misc_feature (1)..(757): Ortholog of  Ceres SEQ ID NO 12624607 as cited in SEQ ID NO 61454
aatgttgttgtttgagagagatgatggctgcgaagcttcagaaatggcgaaatctggcaggtcgtctagatctgatgaatcggagcggcgctgtgtcgacgaggcggttcctgcacgaaggtccagataccgtggaggagcttctcgaaagacatctagcgaagaaagagaaaccaataatcgatgacgatgaggctgagtttctgaatagacggcgtctgacgagcacgcgccgggaaacgttgagtttgtacagagacatattaagagcgactcggttcttcacgtggattgattccaggggaaatctatggagggacgtgttgagagagaacgcgaggaaggagtttgaagcggcgcgatttgagacagatccggaggttatcacaaggcttctgattggtggaagcgacgccgtttcttctgctttagataagcttgcggagaagcaaagagagatgattgagaaacaacgccgtggtgatcaacgctgatttgacggatcatagggcatgaatgtttcaacagaatgatccatcgagtttaaagtggttggtgtttgaaattcttgctgtaaaatggttgcgagaagaagaagcgagatcatttagaaacgtgcttacagaattttgggtttgatgtttgagtgttgtaattcacttgcacaacttacacacttcgtttctgaaattatcattcatgacattgtagagtttgtatacactgccacagagctataaacaaggcttttgatttt

SEQ ID NO: 30629 - protein, 163 aa, Arabidopsis thaliana
  peptide (1)..(163): Ceres Seq. ID no. 12396976
CCCLREMMAAKLQKWRNLAGRLDLMNRSGAVSTRRFLHEGPDTVEELLERHLAKKEKPIIDDDEAEFLNRRRLTSTRRETLSLYRDILRATRFFTWIDSRGNLWRDVLRENARKEFEAARFETDPEVITRLLIGGSDAVSSALDKLAEKQREMIEKQRRGDQR

SEQ ID NO: 30630 - protein, 157 aa, Arabidopsis thaliana
  peptide (1)..(157): Ceres Seq. ID no. 12396977
MMAAKLQKWRNLAGRLDLMNRSGAVSTRRFLHEGPDTVEELLERHLAKKEKPIIDDDEAEFLNRRRLTSTRRETLSLYRDILRATRFFTWIDSRGNLWRDVLRENARKEFEAARFETDPEVITRLLIGGSDAVSSALDKLAEKQREMIEKQRRGDQR

SEQ ID NO: 30631 - protein, 156 aa, Arabidopsis thaliana
  peptide (1)..(156): Ceres Seq. ID no. 12396978
MAAKLQKWRNLAGRLDLMNRSGAVSTRRFLHEGPDTVEELLERHLAKKEKPIIDDDEAEFLNRRRLTSTRRETLSLYRDILRATRFFTWIDSRGNLWRDVLRENARKEFEAARFETDPEVITRLLIGGSDAVSSALDKLAEKQREMIEKQRRGDQR

SEQ ID NO: 30632 - DNA, 1828 bp, Arabidopsis thaliana
  misc_feature (1)..(1828): Ceres Seq. ID no. 13612923
  misc_feature (1)..(1828): Ortholog of  Ceres SEQ ID NO 13503610 as cited in SEQ ID NO 62416
  misc_feature (1)..(1828): Ortholog of  Ceres SEQ ID NO 13657610 as cited in SEQ ID NO 66165
  misc_feature (1)..(1828): Ortholog of  Ceres SEQ ID NO 13598312 as cited in SEQ ID NO 68448
  misc_feature (1)..(1828): Ortholog of  Ceres SEQ ID NO 13596100 as cited in SEQ ID NO 68573
aggccattctcttttctcctctctctctctctcacacaacacaaacaactcttgagagagagaaacaaatctttcacttgacacttctctccaaatcctcatctcattcttcatcctaaacatttgctcattctcacgatgagccataaccaaaaccaacctcaccggccagtcccggtccatgtcacaaacgccgagccaaaccctaacccaaacaacctcccaaactttctattatccgtccgtctcaaatacgtaaaactcggttaccactacctaatctccaacgctctctacatcctcctccttcctctcctcgccgcaacaatcgctaacctctcttctttcaccatcaacgacctctctctcctctacaacacactccgtttccatttcctctccgccacactcgccaccgcactcttaatctctctctccaccgcttacttcaccacccgtccccgccgtgtcttcctcctcgacttctcgtgttacaaaccagacccttcactgatctgcactcgtgaaacattcatggacagatctcaacgtgtaggcatcttcacagaagacaacttagctttccaacaaaagatcctcgaaagatccggtctaggtcagaaaacttacttccctgaagctcttcttcgtgttcctcctaatccttgtatggaagaagcgagaaaagaggcagaaacagttatgttcggagctattgacgcggttcttgagaagaccggtgtgaaacctaaagatattggaatccttgtggtgaattgtagcttgtttaatccaacaccgtcactttctgctatgattgtgaataagtataagcttagaggcaacattttgagctataatcttggtggaatgggatgtagtgctggccttatctccattgatctcgctaaacagatgcttcaggtgcaaccaaactcatacgcactagtggtgagcacagagaacataaccctaaactggtacttaggcaacgaccgatcaatgcttctatctaactgtatcttccgtatgggcggagccgcggtacttctctcgaaccgctcctctgatcgcagccgttcaaaatatcagctcatccataccgtccgtacccacaaaggagctgatgacaacgcatttggctgtgtttaccaacgagaagacaacaacgcagaagaaaccggcaaaatcggagtgtccctctctaaaaacctaatggcgatagctggagaagctctcaagacaaacatcacaactctcggaccactagttctaccaatgtccgaacaacttctctttttcgcgactcttgtggcccgaaaagtcttcaaagtcaagaaaataaagccttacattcctgatttcaagctagctttcgagcatttctgtatccacgcgggaggtagagccgtgctcgacgagattgagaagaacttggatttatccgaatggcacatggagccatcgaggatgacgttgaaccggtttggtaacacttcgagtagctcactttggtatgagcttgcgtatagtgaagctaaaggaaggattaagagaggagataggacttggcagattgcttttggatcgggttttaagtgtaatagtgcagtttggaaagctttgagaacgattgatccaatggacgagaagactaatccatggattgatgagattgatgactttcctgttcaagttcctaggatcactcccattacatcgtcgtagtgttttaaattcttttggagaactaatttgttatgttttattaaatgtaataacttacgtgatttgatatttttttattatcttaatatatatgattgcc

SEQ ID NO: 30633 - protein, 529 aa, Arabidopsis thaliana [sequence omitted]

SEQ ID NO: 30634 - protein, 397 aa, Arabidopsis thaliana
  peptide (1)..(397): Ceres Seq. ID no. 13612925
MDRSQRVGIFTEDNLAFQQKILERSGLGQKTYFPEALLRVPPNPCMEEARKEAETVMFGAIDAVLEKTGVKPKDIGILVVNCSLFNPTPSLSAMIVNKYKLRGNILSYNLGGMGCSAGLISIDLAKQMLQVQPNSYALVVSTENITLNWYLGNDRSMLLSNCIFRMGGAAVLLSNRSSDRSRSKYQLIHTVRTHKGADDNAFGCVYQREDNNAEETGKIGVSLSKNLMAIAGEALKTNITTLGPLVLPMSEQLLFFATLVARKVFKVKKIKPYIPDFKLAFEHFCIHAGGRAVLDEIEKNLDLSEWHMEPSRMTLNRFGNTSSSSLWYELAYSEAKGRIKRGDRTWQIAFGSGFKCNSAVWKALRTIDPMDEKTNPWIDEIDDFPVQVPRITPITSS

SEQ ID NO: 30635 - protein, 352 aa, Arabidopsis thaliana
  peptide (1)..(352): Ceres Seq. ID no. 13612926
MEEARKEAETVMFGAIDAVLEKTGVKPKDIGILVVNCSLFNPTPSLSAMIVNKYKLRGNILSYNLGGMGCSAGLISIDLAKQMLQVQPNSYALVVSTENITLNWYLGNDRSMLLSNCIFRMGGAAVLLSNRSSDRSRSKYQLIHTVRTHKGADDNAFGCVYQREDNNAEETGKIGVSLSKNLMAIAGEALKTNITTLGPLVLPMSEQLLFFATLVARKVFKVKKIKPYIPDFKLAFEHFCIHAGGRAVLDEIEKNLDLSEWHMEPSRMTLNRFGNTSSSSLWYELAYSEAKGRIKRGDRTWQIAFGSGFKCNSAVWKALRTIDPMDEKTNPWIDEIDDFPVQVPRITPITSS

SEQ ID NO: 30636 - DNA, 1214 bp, Arabidopsis thaliana
  misc_feature (1)..(1214): Ceres Seq. ID no. 12333327
  misc_feature (1)..(1214): Ortholog of  Ceres SEQ ID NO 14315440 as cited in SEQ ID NO 57161
acctctttcccattcactcatctcctcttccttatctccttaaaaatcttcccctgtttcttttttttaatatttagagctcctctgtttcctctccaataacaatattcataaccagaaaaaaaaactctcttcctctgtttgttttctagttctgacatcataaattcagaccgagaaaacataaaaatttgagtcttttgatgatcggaaacggatgactcccgttctctgcgaaatcctgctctctgggctcacggtcaaatctgctctctgccgtagaacccatctcgttcaatctttctccgtcgtcttcctctactggtttatacaacgtttcatgaattgctacaaactctaattaattttttcgacagatcataaaaaaaaaaccaaacataaaacataaaactctgtcctttttttgtcttcttgtaacttttcttgttaaaaatcaatggcgtcatctagcagcacataccggagctcaagctcttccgacggtggtaataataacccgtcggactccgtcgtcaccgtcgacgaacgaaaacgtaaaagaatgttatcgaacagagaatctgcacgtaggtcaaggatgcgtaaacagaaacacgttgatgatctaacggctcagatcaatcagctatcaaacgacaaccgtcagatcttgaacagcctcaccgtaacatctcagctttacatgaagatccaagccgagaactctgttctcaccgctcagatggaggagcttagcaccagactccaatctctcaacgagatcgttgatcttgttcaatccaacggtgcaggatttggtgttgaccagatcgacggctgtggttttgatgatcgtacggttgggatcgacggatattacgatgatatgaatatgatgagtaatgttaatcattggggtggttcggtttacactaaccaacccattatggctaatgatatcaatatgtattgattaataataaaattaattaaaataattagatgccccttttttgtctttttattttaaaatttagcccattttggtgtttttgggttggtgtgatgatgtaattatagtacatgcatctttgattggttggaaggataaatataaactttatatatatattggggcatatatatatgagttgtactttgtcatgtattggtgtgtgttttgttataattatatgattatatatgtttatgtt

SEQ ID NO: 30637 - protein, 171 aa, Arabidopsis thaliana
  peptide (1)..(171): Ceres Seq. ID no. 12333328
MASSSSTYRSSSSSDGGNNNPSDSVVTVDERKRKRMLSNRESARRSRMRKQKHVDDLTAQINQLSNDNRQILNSLTVTSQLYMKIQAENSVLTAQMEELSTRLQSLNEIVDLVQSNGAGFGVDQIDGCGFDDRTVGIDGYYDDMNMMSNVNHWGGSVYTNQPIMANDINMY

SEQ ID NO: 30638 - protein, 136 aa, Arabidopsis thaliana
  peptide (1)..(136): Ceres Seq. ID no. 12333329
MLSNRESARRSRMRKQKHVDDLTAQINQLSNDNRQILNSLTVTSQLYMKIQAENSVLTAQMEELSTRLQSLNEIVDLVQSNGAGFGVDQIDGCGFDDRTVGIDGYYDDMNMMSNVNHWGGSVYTNQPIMANDINMY

SEQ ID NO: 30639 - protein, 124 aa, Arabidopsis thaliana
  peptide (1)..(124): Ceres Seq. ID no. 12333330
MRKQKHVDDLTAQINQLSNDNRQILNSLTVTSQLYMKIQAENSVLTAQMEELSTRLQSLNEIVDLVQSNGAGFGVDQIDGCGFDDRTVGIDGYYDDMNMMSNVNHWGGSVYTNQPIMANDINMY

SEQ ID NO: 30640 - DNA, 1093 bp, Arabidopsis thaliana
  misc_feature (1)..(1093): Ceres Seq. ID no. 12357818
  misc_feature (1)..(1093): Ortholog of  Ceres SEQ ID NO 14315553 as cited in SEQ ID NO 60445
  misc_feature (1)..(1093): Ortholog of  Ceres SEQ ID NO 13598045 as cited in SEQ ID NO 66822
cttgaagacaaagaaagctttcttctataatacatctttctctacagatcacacagaagcaaaaattccatctccgatttcggaagagagttgttctcttctctgagaagaagaagatgagcagaggaagcggcgctggttacgatcgtcacatcactattttctcaccggaaggtcgtctcttccaagtcgagtatgctttcaaagccgtgaaagcagctggaatcacatcgatcggtgtccgagggaaagattcagtatgcgtcgttacgcagaagaaagttccggacaagcttttggatcagtctagtgtatctcaccttttccctgttaccaagtaccttggattgttagccactggcatgacagctgattcaaggtcattggtacaacaagctaggaatgaggctgctgagtttaggttccaatatggttatgagatgcctgcagatattcttgctaaatggattgcagataagtctcaggtttacacacaacatgcttacatgagaccccttggagtagttgccatggttctaggtattgatgaagagagaggacctctactttacaagtgtgacccagctggacatttttacggtcacaaggcaactagtgctggtatgaaagaacaagaagcagtcaatttcttggagaagaaaatgaaagaaaaccctgccttcacatatgatgaaacagtacagactgctatatccgctctccaatctgttcttcaagaagacttcaaagcaactgaaattgaggtgggagttgtgagagctgatgaccctctcttccgttccctgagaacagaggagatcgacgagcacttgacggccattagtgaacgtgactgatcactttcactggaacattcagtcgggactttgcatctctttcttttgctttaaatctatctaagatgattcacgtttcagagaaacgtgtttccattagtcatgagtcgtgtagttttcatttgaatcatctgcttcctcctaataggagttacatgtaagggtgtcaaattaaggtcgaatgagatggtttaaggttttgaattttaaaaggcaaaacaaagaaagttatttac

SEQ ID NO: 30641 - protein, 246 aa, Arabidopsis thaliana; identical to SEQ ID NO: 26243
  peptide (1)..(246): Ceres Seq. ID no. 12357819

SEQ ID NO: 30642 - protein, 164 aa, Arabidopsis thaliana; identical to SEQ ID NO: 26244
  peptide (1)..(164): Ceres Seq. ID no. 12357820

SEQ ID NO: 30643 - protein, 138 aa, Arabidopsis thaliana
  peptide (1)..(138): Ceres Seq. ID no. 12357821
MPADILAKWIADKSQVYTQHAYMRPLGVVAMVLGIDEERGPLLYKCDPAGHFYGHKATSAGMKEQEAVNFLEKKMKENPAFTYDETVQTAISALQSVLQEDFKATEIEVGVVRADDPLFRSLRTEEIDEHLTAISERD

SEQ ID NO: 30644 - DNA, 1590 bp, Arabidopsis thaliana
  misc_feature (1)..(1590): Ceres Seq. ID no. 13580307
  misc_feature (1)..(1590): Ortholog of  Ceres SEQ ID NO 14311535 as cited in SEQ ID NO 51559
  misc_feature (1)..(1590): Ortholog of  Ceres SEQ ID NO 15176200 as cited in SEQ ID NO 55188
aaggatgttgcaagtcggtggtcctggttacgcgactcctctcgccgctatgtctggtccatcggagaaacttatctacgtaaccgccgtctacaccggaactggaatagataaaccggattatttggcgacggtggatgtagatccaagctcgccttcgtattcaagtgttattcatagattaccaatgccttttgttggtgatgagcttcatcattctggttggaactcttgtagttcttgccatggtgatgcttctgttgatagacgttatctcgtgttaccgtctcttatatctggtcgcatttatgcgattgatactaaggaaaacccgagggctccgtctttgtataagtatgttgatcctaaagagattgctgataagactggattggcgtttcctcacacggctcattgccgcacgggcgagatcttggtgtcctgtcttggagatgaagaggggaatgctaaggggaatgggcttcttcttcttgactctgattttaacatcaagaataggtgggagaaaccagacatcagtcctttgtatgggtatcatttttggtaccaacctcggcacaagaccatgatcagcacatcttggggagcacctaaagccttctctaaaggtttcaatcttcagcacgttgctgatggcttgtatggaagtcatctacatgtttatagttggccaggaggtgaaataaaacaattaattgaccttggaccgactggtctcttacctttggagattagattcttgcatgatccatctaaagatacagggtttgttgggagtgccttgtcgagtaatatgataagatttttcaagaacagtgatgaaacatggagccatgaggttgttatatcggttaaaccgttgaaagtcgaaaactggatacttccagaaatgccggggctaatcaccgacttcttgatctccctcgatgaccgatttatttactttgtgaactggctccatggagacattcgtcagtacaacatagaggaccctaaaaaccctgtattaacagggcaaatttgggttggaggattactacaaaagggcagtcctgttaaggcggttggagaagacggaaacactttccaattcgaggttcctcagatcaaggggaaatctttacgaggtggacctcaaatgattcagctgagcctcgatgggaaacgattgtatgcaacaaactcgctgtttagcgcatgggtcgtcagtttttatcctgaaatcatggagaaaggctcacacataattcagattgatggtgatacagaaaaaggtggtctcaccataaaccctgatttctttgtggactttggtgatgaaccagacggtccttcactagcccacgagatgagatatccaggtggagactgcacttccgatatctggatttgaatttggctttgtttagagtgtgttttgtgttaagtttaaattgagttttattatttgttgtgtgtttagtagagttgaataaaaaacccactaagatgactcagacaattaacacttgtttggtacattttgactcctatgtgtcttaagtaataaaactttctacaattcgactt

SEQ ID NO: 30645 - protein, 470 aa, Arabidopsis thaliana
  peptide (1)..(470): Ceres Seq. ID no. 13580308
RMLQVGGPGYATPLAAMSGPSEKLIYVTAVYTGTGIDKPDYLATVDVDPSSPSYSSVIHRLPMPFVGDELHHSGWNSCSSCHGDASVDRRYLVLPSLISGRIYAIDTKENPRAPSLYKYVDPKEIADKTGLAFPHTAHCRTGEILVSCLGDEEGNAKGNGLLLLDSDFNIKNRWEKPDISPLYGYHFWYQPRHKTMISTSWGAPKAFSKGFNLQHVADGLYGSHLHVYSWPGGEIKQLIDLGPTGLLPLEIRFLHDPSKDTGFVGSALSSNMIRFFKNSDETWSHEVVISVKPLKVENWILPEMPGLITDFLISLDDRFIYFVNWLHGDIRQYNIEDPKNPVLTGQIWVGGLLQKGSPVKAVGEDGNTFQFEVPQIKGKSLRGGPQMIQLSLDGKRLYATNSLFSAWVVSFYPEIMEKGSHIIQIDGDTEKGGLTINPDFFVDFGDEPDGPSLAHEMRYPGGDCTSDIWI

SEQ ID NO: 30646 - protein, 469 aa, Arabidopsis thaliana
  peptide (1)..(469): Ceres Seq. ID no. 13580309
MLQVGGPGYATPLAAMSGPSEKLIYVTAVYTGTGIDKPDYLATVDVDPSSPSYSSVIHRLPMPFVGDELHHSGWNSCSSCHGDASVDRRYLVLPSLISGRIYAIDTKENPRAPSLYKYVDPKEIADKTGLAFPHTAHCRTGEILVSCLGDEEGNAKGNGLLLLDSDFNIKNRWEKPDISPLYGYHFWYQPRHKTMISTSWGAPKAFSKGFNLQHVADGLYGSHLHVYSWPGGEIKQLIDLGPTGLLPLEIRFLHDPSKDTGFVGSALSSNMIRFFKNSDETWSHEVVISVKPLKVENWILPEMPGLITDFLISLDDRFIYFVNWLHGDIRQYNIEDPKNPVLTGQIWVGGLLQKGSPVKAVGEDGNTFQFEVPQIKGKSLRGGPQMIQLSLDGKRLYATNSLFSAWVVSFYPEIMEKGSHIIQIDGDTEKGGLTINPDFFVDFGDEPDGPSLAHEMRYPGGDCTSDIWI

SEQ ID NO: 30647 - protein, 454 aa, Arabidopsis thaliana
  peptide (1)..(454): Ceres Seq. ID no. 13580310
MSGPSEKLIYVTAVYTGTGIDKPDYLATVDVDPSSPSYSSVIHRLPMPFVGDELHHSGWNSCSSCHGDASVDRRYLVLPSLISGRIYAIDTKENPRAPSLYKYVDPKEIADKTGLAFPHTAHCRTGEILVSCLGDEEGNAKGNGLLLLDSDFNIKNRWEKPDISPLYGYHFWYQPRHKTMISTSWGAPKAFSKGFNLQHVADGLYGSHLHVYSWPGGEIKQLIDLGPTGLLPLEIRFLHDPSKDTGFVGSALSSNMIRFFKNSDETWSHEVVISVKPLKVENWILPEMPGLITDFLISLDDRFIYFVNWLHGDIRQYNIEDPKNPVLTGQIWVGGLLQKGSPVKAVGEDGNTFQFEVPQIKGKSLRGGPQMIQLSLDGKRLYATNSLFSAWVVSFYPEIMEKGSHIIQIDGDTEKGGLTINPDFFVDFGDEPDGPSLAHEMRYPGGDCTSDIWI

SEQ ID NO: 30648 - DNA, 1508 bp, Arabidopsis thaliana
  misc_feature (1)..(1508): Ceres Seq. ID no. 12388503
  misc_feature (1)..(1508): Ortholog of  Ceres SEQ ID NO 15178228 as cited in SEQ ID NO 58330
  misc_feature (1)..(1508): Ortholog of  Ceres SEQ ID NO 13596635 as cited in SEQ ID NO 62488
gtgtttgtgtatgtgtggaaaattaatttcttctcccgacgaatcccaaaagtttgttgaaatttgcctccaagaaatctgcaattagaaatttcatttcgccgtcatcgtcttcttcttctgattctgattaattccagatgtcttcctgagtcttacggagattaggtcattttcgcctcgactcgaactctgtctcgcagcttccgtgagagagtcatggacacgccaccgacttctcgtatcgcatcttttggtcagacggagattaactgggacaaacttgacaaaaggaggttctacattaatggagctggcctcttcactggtgttacagtagctctgtatcctgtatccgttgtgaaaacaaggcttcaagttgcttctaaagagattgctgagagaagtgccttttctgtagttaaaggaattttaaagaatgatggtgttcctggtctgtaccgaggttttggtactgtcattacaggtgctgtacctgcaagaatcatatttctaactgctcttgagaccactaagatttctgcttttaagttggttgcacctttggagttaagtgaacctacacaagccgccattgcaaatggaattgctggcatgacagcatctcttttctcacaggctgtgtttgtcccaattgatgttgttagccaaaagttgatggtacaaggatactcaggtcatgctacatatactggtggtatcgatgttgccacaaaaatcattaagtcatatggtgtaaggggattatacagagggtttggtctgtctgttatgacctattctccttcaagtgccgcttggtgggctagctatggatcaagccaacgtgttatctggagattcttaggttatggtggtgactcggatgcaactgctgctcctagtaagtcaaaaattgttatggtccaggctgctggaggaattattgctggtgcaacagcatcctcaattacaacaccattagacacaatcaaaacgcgactgcaggtcatgggacatcaagaaaatagaccttcagcgaaacaagtggtgaaaaaactgctagcagaagatggctggaaaggattctataggggtttgggcccaagattctttagcatgtcggcttggggaacctcgatgatattgacttacgaatacttaaagcgtctgtgtgcaatagaagattagaaagcttcactactgttcgttggtttttctccttctactaactcgagtagacggcatcaccttgattcaaatctcggctattgggagcttccatgttgacaattggaccattctttcaactttgaagtctgagttccgttattgtaatcattctttcaacttaatttgcgtattggagtgtattcttacagcagaagaaattctagcttacgttcttctgctttatgtagcttctgagatttaagaagcttcaaaacaatgcaatcacttcatgaaatcttatagtcgtacggatgtacgtgttatcgtaacagttg

SEQ ID NO: 30649 - protein, 323 aa, Arabidopsis thaliana
  peptide (1)..(323): Ceres Seq. ID no. 12388504
MDTPPTSRIASFGQTEINWDKLDKRRFYINGAGLFTGVTVALYPVSVVKTRLQVASKEIAERSAFSVVKGILKNDGVPGLYRGFGTVITGAVPARIIFLTALETTKISAFKLVAPLELSEPTQAAIANGIAGMTASLFSQAVFVPIDVVSQKLMVQGYSGHATYTGGIDVATKIIKSYGVRGLYRGFGLSVMTYSPSSAAWWASYGSSQRVIWRFLGYGGDSDATAAPSKSKIVMVQAAGGIIAGATASSITTPLDTIKTRLQVMGHQENRPSAKQVVKKLLAEDGWKGFYRGLGPRFFSMSAWGTSMILTYEYLKRLCAIED

SEQ ID NO: 30650 - protein, 191 aa, Arabidopsis thaliana
  peptide (1)..(191): Ceres Seq. ID no. 12388505
MTASLFSQAVFVPIDVVSQKLMVQGYSGHATYTGGIDVATKIIKSYGVRGLYRGFGLSVMTYSPSSAAWWASYGSSQRVIWRFLGYGGDSDATAAPSKSKIVMVQAAGGIIAGATASSITTPLDTIKTRLQVMGHQENRPSAKQVVKKLLAEDGWKGFYRGLGPRFFSMSAWGTSMILTYEYLKRLCAIED

SEQ ID NO: 30651 - protein, 170 aa, Arabidopsis thaliana
  peptide (1)..(170): Ceres Seq. ID no. 12388506
MVQGYSGHATYTGGIDVATKIIKSYGVRGLYRGFGLSVMTYSPSSAAWWASYGSSQRVIWRFLGYGGDSDATAAPSKSKIVMVQAAGGIIAGATASSITTPLDTIKTRLQVMGHQENRPSAKQVVKKLLAEDGWKGFYRGLGPRFFSMSAWGTSMILTYEYLKRLCAIED

SEQ ID NO: 30652 - DNA, 1196 bp, Arabidopsis thaliana
  misc_feature (1)..(1196): Ceres Seq. ID no. 13509751
  misc_feature (1)..(1196): Ortholog of  Ceres SEQ ID NO 13598413 as cited in SEQ ID NO 68934
aatgataacactaataaaaaaaagaagaagaaggttacggtctcgtaaagctttcaaaagtccgcaacgatcacacacgtctttctccgaaactcgtctgagagaggctctgagattcgatgtcgttcgaggaagaagaagaggaggaaacattcgagcatacacttctcgtggtgcgtgaggtctccgtttacaagatcccgccgcgaaccacatccggcggatacaagtgcggcgaatggcttcaatccgataagatctggtctggtagactccgcgtcgtatcgtgcaaggatcgatgcgagatccgcctcgaggattcgaattccggtgatcttttcgcagcttgttttgtggatcctggacgtagagagaactctgtagagccgtctctcgattcgtctaggtatttcgttctcaggatcgatgacgggagagggaagtatgcgtttatcgggctaggattcgctgagaggaacgaagcgtttgatttcaatgttgcgttatcggatcatgaaaagtacgttaggagggagaaagagaaggagacaggggaaacgagtgagagcgataatcatattgatatccatcctgccgttaatcacagattgaaggaaggtgaaaccataagaatcaacgtgaagccgaaaccaacaacaaatggcactgggatgctctcagctgctctttcaggaacggggaagccaaaacctctagcacttgccccaccccccaaagctgccggagtaaccaggtctcctttacctcctcctccaaacgatcccgtcgcttcaaggattgcatctgatggctgcaaggaatcacgcaggaacgagcctctatctgatctatctcagctcaagaaaaatcttccttcaacggcgggatcaggatcgagcaagtcaacaggagctgcatcaggttgggcagctttctgatgaatggagtgtaaaatttaagttattggacaagtccggcttcatcttcttgtgacttgagagcacgagacaatagacaacaatggtggtcagccaacagtctttttgatgtatgttaatggtaagttgatgtgtgtttctttgtaatcctcccacactccctgttttaattatttttcttccttataatcatcgttgttacattatcgattatcatttgtatcactgagatattaatatatacaaaaaggctttttc

SEQ ID NO: 30653 - protein, 272 aa, Arabidopsis thaliana
  peptide (1)..(272): Ceres Seq. ID no. 13509752
MSFEEEEEEETFEHTLLVVREVSVYKIPPRTTSGGYKCGEWLQSDKIWSGRLRVVSCKDRCEIRLEDSNSGDLFAACFVDPGRRENSVEPSLDSSRYFVLRIDDGRGKYAFIGLGFAERNEAFDFNVALSDHEKYVRREKEKETGETSESDNHIDIHPAVNHRLKEGETIRINVKPKPTTNGTGMLSAALSGTGKPKPLALAPPPKAAGVTRSPLPPPPNDPVASRIASDGCKESRRNEPLSDLSQLKKNLPSTAGSGSSKSTGAASGWAAF

SEQ ID NO: 30654 - DNA, 2435 bp, Arabidopsis thaliana
  misc_feature (1)..(2435): Ceres Seq. ID no. 12327293
  misc_feature (1)..(2435): Ortholog of  Ceres SEQ ID NO 12627433 as cited in SEQ ID NO 61601
atctcactttcctttctattcccggatttgccgctttcttcttcttcatcatctctctctcaaaatcaccccttttaaagttgtttcctttatacgcaaaagtgaacgcagatcttaatgcagctactgtgatttcgattcttagggtaaatatattcttttactcattggattggcactcctcagcatctgggtttttgcaaagcattcttattacttccactgattcaaacatgtggaagtttaaaccttttgctcaaaaagaacctgcgggtctcgaaggtcgatttctcgagataggaaatctgaaagttcaagttagaaatgtcattgcggaaggaggtttctccagtgtttacttagctcaagatgtaaatcacgcgtcaaagcaatatgctttgaagcacatgatatgcaatgacgaggagtcacttgaactcgtaatgaaagagatctcggttctgaaatccctcaagggacatccaaatgttgtcacgctctacgcacatggtatcttggatatggggaggaataaaaaagaagctcttttggctatggatttttgtggtaaatctcttgtggatgtgcttgagaatagaggtgctggttactttgaagagaaacaagctcttacgatttttagagatgtgtgtaatgctgtctttgcaatgcattgtcaatccccacgcattgctcacagagacttgaaggctgagaatcttctattgagctcagatggacaatggaaattgtgtgattttggaagcgtttcgacaaatcacaagatttttgaaagagcagaagagatgggaattgaagaagataatattagaaaatacacaacaccaacatatagagctcctgagatgtgggatctctttcgaagggagatgataagcgagaaggtcgatatatgggctcttggatgtctcttgtttcggatatgctatttcaagaatgcatttgatggagaatcaaagctgcaaatcttaaacgggaattatcgtattccagaatcgcctaaatacagtgtatttattacggatctcatcaaagaaatgctccaagcttcacccgatgaacgaccagatattacacagatttggtttcgtgtcaatgagcagcttcctgctaatttacagaaatcattaccggatcgaccacctgaaatgcaatctactggagtccatgatggctcatcaaaatcagcaactaaaccttctccagcacctcgtagaagtccgccaccgccgccaccatcttctggagaatcagatagtggaggaccgctcggtgccttttgggcgactcagcatgctaaaacctcagttgtatcagaagataacaaaaacatgcctaaatttgatgaaccaaacagtaacacatctaaatctgaaagagttcgtgtggatagtcatcaacccaaaaaaccaagtcctgtgagaggagaggctcgtggtattcaaagaaataaagatcttgaaactacgatttctcagaagaatacaactcctgctgcagccaataacatgacaagagtgtccaaggatgatgccttcaactcgtttgttgctgactttgataccacaaagttcgataatggtaataaacctggcaaagaagaggcattggaagctgagatacagaggttaaaagacgagttgaagcaaacaaaatcagagaaggcagaaataactgctaagtttgaaaagctttctgctatctgcagatcgcaaaggcaagagttgcaggatctcaaacaaacacttgcctctaaaagtgcctcaccgtcaccgagcagagactcttcacaaaatcaaccctctccagggatgcattccatgtcatcaactccatcgagagataagatggaaggaacaatgtgggaacttcaacaggacagatctaactggtcaactggcagctctgatacaaattcatggcaaccttttagtgatgaagcgaaacccgtgatggaatctgcatcaaagggtactcaaggttttgagccatggggtttcgagacagaatcctttagagccgctgcaacgtctgcagctgctacttctgcatctggaacacaaagatctatgggctctggaaacagcacttcacagagatatgggaactcaaagatgagagaaaaccagaaaacagctcaacctgctggatgggccggcttctaaaactcactcagatgcgcattgctatttcttcctcatgcaacaacaacagcttcatgttgctgccattacagaatcttgaatctttttgtagatgatgatcatcccctgtttttgtgctgctgctaaatataccccacccatatccattatgttttatgtagagtcttaaactttacacattctctgagctgtggccagatatctcagcttatggattattattggaaaaataaataattcaagattcag

SEQ ID NO: 30655 - protein, 727 aa, Arabidopsis thaliana
  peptide (1)..(727): Ceres Seq. ID no. 12327294
LTFLSIPGFAAFFFFIISLSKSPLLKLFPLYAKVNADLNAATVISILRVNIFFYSLDWHSSASGFLQSILITSTDSNMWKFKPFAQKEPAGLEGRFLEIGNLKVQVRNVIAEGGFSSVYLAQDVNHASKQYALKHMICNDEESLELVMKEISVLKSLKGHPNVVTLYAHGILDMGRNKKEALLAMDFCGKSLVDVLENRGAGYFEEKQALTIFRDVCNAVFAMHCQSPRIAHRDLKAENLLLSSDGQWKLCDFGSVSTNHKIFERAEEMGIEEDNIRKYTTPTYRAPEMWDLFRREMISEKVDIWALGCLLFRICYFKNAFDGESKLQILNGNYRIPESPKYSVFITDLIKEMLQASPDERPDITQIWFRVNEQLPANLQKSLPDRPPEMQSTGVHDGSSKSATKPSPAPRRSPPPPPPSSGESDSGGPLGAFWATQHAKTSVVSEDNKNMPKFDEPNSNTSKSERVRVDSHQPKKPSPVRGEARGIQRNKDLETTISQKNTTPAAANNMTRVSKDDAFNSFVADFDTTKFDNGNKPGKEEALEAEIQRLKDELKQTKSEKAEITAKFEKLSAICRSQRQELQDLKQTLASKSASPSPSRDSSQNQPSPGMHSMSSTPSRDKMEGTMWELQQDRSNWSTGSSDTNSWQPFSDEAKPVMESASKGTQGFEPWGFETESFRAAATSAAATSASGTQRSMGSGNSTSQRYGNSKMRENQKTAQPAGWAGF

SEQ ID NO: 30656 - protein, 650 aa, Arabidopsis thaliana
  peptide (1)..(650): Ceres Seq. ID no. 12327295
MWKFKPFAQKEPAGLEGRFLEIGNLKVQVRNVIAEGGFSSVYLAQDVNHASKQYALKHMICNDEESLELVMKEISVLKSLKGHPNVVTLYAHGILDMGRNKKEALLAMDFCGKSLVDVLENRGAGYFEEKQALTIFRDVCNAVFAMHCQSPRIAHRDLKAENLLLSSDGQWKLCDFGSVSTNHKIFERAEEMGIEEDNIRKYTTPTYRAPEMWDLFRREMISEKVDIWALGCLLFRICYFKNAFDGESKLQILNGNYRIPESPKYSVFITDLIKEMLQASPDERPDITQIWFRVNEQLPANLQKSLPDRPPEMQSTGVHDGSSKSATKPSPAPRRSPPPPPPSSGESDSGGPLGAFWATQHAKTSVVSEDNKNMPKFDEPNSNTSKSERVRVDSHQPKKPSPVRGEARGIQRNKDLETTISQKNTTPAAANNMTRVSKDDAFNSFVADFDTTKFDNGNKPGKEEALEAEIQRLKDELKQTKSEKAEITAKFEKLSAICRSQRQELQDLKQTLASKSASPSPSRDSSQNQPSPGMHSMSSTPSRDKMEGTMWELQQDRSNWSTGSSDTNSWQPFSDEAKPVMESASKGTQGFEPWGFETESFRAAATSAAATSASGTQRSMGSGNSTSQRYGNSKMRENQKTAQPAGWAGF

SEQ ID NO: 30657 - protein, 592 aa, Arabidopsis thaliana
  peptide (1)..(592): Ceres Seq. ID no. 12327296
MICNDEESLELVMKEISVLKSLKGHPNVVTLYAHGILDMGRNKKEALLAMDFCGKSLVDVLENRGAGYFEEKQALTIFRDVCNAVFAMHCQSPRIAHRDLKAENLLLSSDGQWKLCDFGSVSTNHKIFERAEEMGIEEDNIRKYTTPTYRAPEMWDLFRREMISEKVDIWALGCLLFRICYFKNAFDGESKLQILNGNYRIPESPKYSVFITDLIKEMLQASPDERPDITQIWFRVNEQLPANLQKSLPDRPPEMQSTGVHDGSSKSATKPSPAPRRSPPPPPPSSGESDSGGPLGAFWATQHAKTSVVSEDNKNMPKFDEPNSNTSKSERVRVDSHQPKKPSPVRGEARGIQRNKDLETTISQKNTTPAAANNMTRVSKDDAFNSFVADFDTTKFDNGNKPGKEEALEAEIQRLKDELKQTKSEKAEITAKFEKLSAICRSQRQELQDLKQTLASKSASPSPSRDSSQNQPSPGMHSMSSTPSRDKMEGTMWELQQDRSNWSTGSSDTNSWQPFSDEAKPVMESASKGTQGFEPWGFETESFRAAATSAAATSASGTQRSMGSGNSTSQRYGNSKMRENQKTAQPAGWAGF

SEQ ID NO: 30658 - DNA, 1582 bp, Arabidopsis thaliana
  misc_feature (1)..(1582): Ceres Seq. ID no. 12339796
  misc_feature (1)..(1582): Ortholog of  Ceres SEQ ID NO 12586556 as cited in SEQ ID NO 64667
  misc_feature (1)..(1582): Ortholog of  Ceres SEQ ID NO 13660894 as cited in SEQ ID NO 67475
tgagaaaatgcctgagagaaatgcagtgtcatggagtgctatgatcactgggctttgtcagaacggtgaagtggatcgcgcggttgtgttgtttcggaaaatgcctgtgaaggattcgtctcctctatgtgcacttgtggctggtcttattaaaaacgagagactttcagaagctgcgtgggttttgggtcagtatgggagtttagtttcaggaagggaagatttggtgtatgcttataacactttgattgttggatatggacagcgaggacaagtagaagcagctcgatgtctgtttgatcagattcctgatctctgtggtgatgatcatggtggagagtttagagagaggttctgtaaaaatgttgtgtcatggaattctatgatcaaagcttacttgaaagtgggtgatgtggtctctgctaggttgctatttgatcagatgaaagaccgcgatacaatttcttggaacacaatgattgatggatacgtacatgtttccaggatggaagatgcttttgctctgttttcggaaatgccgaaccgtgatgcacattcgtggaacatgatggtctcgggttatgctagtgttggcaatgtagagcttgctcgccactactttgaaaaaacacctgagaaacatacagtctcgtggaactcgataatagcagcttatgagaaaaacaaggactacaaagaagctgttgatttgtttatccggatgaacattgaaggagagaagcctgacccacatactttaacttctcttctcagtgcatctaccgggcttgtaaatctgcgtttaggaatgcagatgcaccaaatcgttgtcaagactgtgatccccgatgttccagtccacaatgcccttatcactatgtattcaagatgcggtgaaataatggagtcgaggagaatcttcgatgaaatgaaactcaaaagagaagtaatcacatggaatgcaatgataggaggatatgcatttcatggtaatgcctcagaggccttgaatctgttcgggtcgatgaaaagcaacgggatatatccttctcacataacattcgtctcagttctgaacgcttgtgctcacgcgggacttgttgatgaggctaaagcacagtttgtgtccatgatgagtgtgtacaagatcgagccgatgatggaacattattcttccctggtcaacgttaccagtggacaagggcagtttgaagaggccatgtatatcataaagagtatgccttttgagccagacaaaacggtatggggtgcattattggatgcttgtaggatataacaatgtagggcttgcacatgttgcagctgaagcaatgtcgagactcgaaccagagagctcaacaccttatgtactgttatacaacatgtacgcggatatgggactatgggacgaagcttctcaagtgagaatgaacatggagagtaaaagaatcaagaaggaaagaggatccagttgggttgactcctcaacgtaaaaagcagcctttatttatgtttacttaaacataaaaattgatttgggatcagaattgagatagaaattgataaggtactcttgaaagtt

SEQ ID NO: 30659 - protein, 431 aa, Arabidopsis thaliana
  peptide (1)..(431): Ceres Seq. ID no. 12339797
EKMPERNAVSWSAMITGLCQNGEVDRAVVLFRKMPVKDSSPLCALVAGLIKNERLSEAAWVLGQYGSLVSGREDLVYAYNTLIVGYGQRGQVEAARCLFDQIPDLCGDDHGGEFRERFCKNVVSWNSMIKAYLKVGDVVSARLLFDQMKDRDTISWNTMIDGYVHVSRMEDAFALFSEMPNRDAHSWNMMVSGYASVGNVELARHYFEKTPEKHTVSWNSIIAAYEKNKDYKEAVDLFIRMNIEGEKPDPHTLTSLLSASTGLVNLRLGMQMHQIVVKTVIPDVPVHNALITMYSRCGEIMESRRIFDEMKLKREVITWNAMIGGYAFHGNASEALNLFGSMKSNGIYPSHITFVSVLNACAHAGLVDEAKAQFVSMMSVYKIEPMMEHYSSLVNVTSGQGQFEEAMYIIKSMPFEPDKTVWGALLDACRI

SEQ ID NO: 30660 - protein, 429 aa, Arabidopsis thaliana
  peptide (1)..(429): Ceres Seq. ID no. 12339798
MPERNAVSWSAMITGLCQNGEVDRAVVLFRKMPVKDSSPLCALVAGLIKNERLSEAAWVLGQYGSLVSGREDLVYAYNTLIVGYGQRGQVEAARCLFDQIPDLCGDDHGGEFRERFCKNVVSWNSMIKAYLKVGDVVSARLLFDQMKDRDTISWNTMIDGYVHVSRMEDAFALFSEMPNRDAHSWNMMVSGYASVGNVELARHYFEKTPEKHTVSWNSIIAAYEKNKDYKEAVDLFIRMNIEGEKPDPHTLTSLLSASTGLVNLRLGMQMHQIVVKTVIPDVPVHNALITMYSRCGEIMESRRIFDEMKLKREVITWNAMIGGYAFHGNASEALNLFGSMKSNGIYPSHITFVSVLNACAHAGLVDEAKAQFVSMMSVYKIEPMMEHYSSLVNVTSGQGQFEEAMYIIKSMPFEPDKTVWGALLDACRI

SEQ ID NO: 30661 - protein, 418 aa, Arabidopsis thaliana
  peptide (1)..(418): Ceres Seq. ID no. 12339799
MITGLCQNGEVDRAVVLFRKMPVKDSSPLCALVAGLIKNERLSEAAWVLGQYGSLVSGREDLVYAYNTLIVGYGQRGQVEAARCLFDQIPDLCGDDHGGEFRERFCKNVVSWNSMIKAYLKVGDVVSARLLFDQMKDRDTISWNTMIDGYVHVSRMEDAFALFSEMPNRDAHSWNMMVSGYASVGNVELARHYFEKTPEKHTVSWNSIIAAYEKNKDYKEAVDLFIRMNIEGEKPDPHTLTSLLSASTGLVNLRLGMQMHQIVVKTVIPDVPVHNALITMYSRCGEIMESRRIFDEMKLKREVITWNAMIGGYAFHGNASEALNLFGSMKSNGIYPSHITFVSVLNACAHAGLVDEAKAQFVSMMSVYKIEPMMEHYSSLVNVTSGQGQFEEAMYIIKSMPFEPDKTVWGALLDACRI

SEQ ID NO: 30662 - DNA, 1274 bp, Arabidopsis thaliana
  misc_feature (1)..(1274): Ceres Seq. ID no. 12394774
  misc_feature (1)..(1274): Ortholog of  Ceres SEQ ID NO 15176230 as cited in SEQ ID NO 58796
  misc_feature (1)..(1274): Ortholog of  Ceres SEQ ID NO 14308156 as cited in SEQ ID NO 59006
  misc_feature (1)..(1274): Ortholog of  Ceres SEQ ID NO 13596321 as cited in SEQ ID NO 67976
acttcacaccaaaatcaccacctctcacaaaccctagttcctcctctctctcatttctcggagatattcaccagagcaataaccatggacgctaaagaaacctctgccaccgatttgaaaagaccgagagaagaggatgataacggcggcgccgctaccatggagacggagaacggagatcagaaaaaggaacctgcttgtttctccactgttattcctgggtggttctctgaaatgagtcctatgtggccaggagaggcacactcattgaaggttgagaaagttttgtttcaagggaaatcagattatcaggatgttattgttttccagtctgcaacatatggaaaagttttggttttggatggagtaatccaacttacggagagagatgaatgtgcttatcaggaaatgatcactcatcttcctttgtgttctatccctaaccctaagaaggttttggtcattggaggaggagatggaggtgtcctgcgggaagttgcacgccatgcttctattgagcagattgacatgtgtgaaattgataaaatggtggtcgacgtgtctaagcaatttttccctgatgtagcaattggatatgaggatcctcgcgtgaaccttgtcattggcgatggtgttgctttcttgaagaatgctgctgaaggatcatacgatgcagttattgttgactcttcagatccaatcggtcctgcaaaggagctgtttgagaaacccttcttccaatctgtggctagagctcttcgtcctggtggagttgtgtgcactcaagctgaaagcttgtggcttcacatggacatcatcgaagacattgtttccaactgccgtgagatcttcaagggttctgtgaactatgcttggaccagcgttccaacataccccagtggggtcattggatttatgctttgttcaactgaaggacctgatgttgacttcaaacacccactgaacccaattgacgagagctccagcaaatcaaatggacctttgaagttttacaatgccgagattcattcagctgcattctgcttgccttctttcgccaagaaggtcattgagtcaaaagccaattgaaaagggaaagaaaactaatctggaggatcgttgaatttatcaaaaaataaaagctttttacagtttttagaatgttctgttgtttcactcatgtttctgtaacacaatgcaagagcgactatgtcttcttttagcattacacattcgcatagtagcaaatcctatttacaacatgttcttatgct

SEQ ID NO: 30663 - protein, 362 aa, Arabidopsis thaliana
  peptide (1)..(362): Ceres Seq. ID no. 12394775
TSHQNHHLSQTLVPPLSHFSEIFTRAITMDAKETSATDLKRPREEDDNGGAATMETENGDQKKEPACFSTVIPGWFSEMSPMWPGEAHSLKVEKVLFQGKSDYQDVIVFQSATYGKVLVLDGVIQLTERDECAYQEMITHLPLCSIPNPKKVLVIGGGDGGVLREVARHASIEQIDMCEIDKMVVDVSKQFFPDVAIGYEDPRVNLVIGDGVAFLKNAAEGSYDAVIVDSSDPIGPAKELFEKPFFQSVARALRPGGVVCTQAESLWLHMDIIEDIVSNCREIFKGSVNYAWTSVPTYPSGVIGFMLCSTEGPDVDFKHPLNPIDESSSKSNGPLKFYNAEIHSAAFCLPSFAKKVIESKAN

SEQ ID NO: 30664 - protein, 334 aa, Arabidopsis thaliana
  peptide (1)..(334): Ceres Seq. ID no. 12394776
MDAKETSATDLKRPREEDDNGGAATMETENGDQKKEPACFSTVIPGWFSEMSPMWPGEAHSLKVEKVLFQGKSDYQDVIVFQSATYGKVLVLDGVIQLTERDECAYQEMITHLPLCSIPNPKKVLVIGGGDGGVLREVARHASIEQIDMCEIDKMVVDVSKQFFPDVAIGYEDPRVNLVIGDGVAFLKNAAEGSYDAVIVDSSDPIGPAKELFEKPFFQSVARALRPGGVVCTQAESLWLHMDIIEDIVSNCREIFKGSVNYAWTSVPTYPSGVIGFMLCSTEGPDVDFKHPLNPIDESSSKSNGPLKFYNAEIHSAAFCLPSFAKKVIESKAN

SEQ ID NO: 30665 - protein, 309 aa, Arabidopsis thaliana
  peptide (1)..(309): Ceres Seq. ID no. 12394777
METENGDQKKEPACFSTVIPGWFSEMSPMWPGEAHSLKVEKVLFQGKSDYQDVIVFQSATYGKVLVLDGVIQLTERDECAYQEMITHLPLCSIPNPKKVLVIGGGDGGVLREVARHASIEQIDMCEIDKMVVDVSKQFFPDVAIGYEDPRVNLVIGDGVAFLKNAAEGSYDAVIVDSSDPIGPAKELFEKPFFQSVARALRPGGVVCTQAESLWLHMDIIEDIVSNCREIFKGSVNYAWTSVPTYPSGVIGFMLCSTEGPDVDFKHPLNPIDESSSKSNGPLKFYNAEIHSAAFCLPSFAKKVIESKAN

SEQ ID NO: 30666 - DNA, 865 bp, Arabidopsis thaliana
  misc_feature (1)..(865): Ceres Seq. ID no. 12603611
  misc_feature (1)..(865): Ortholog of  Ceres SEQ ID NO 14303437 as cited in SEQ ID NO 54411
  misc_feature (1)..(865): Ortholog of  Ceres SEQ ID NO 12611816 as cited in SEQ ID NO 56754
  misc_feature (1)..(865): Ortholog of  Ceres SEQ ID NO 15170943 as cited in SEQ ID NO 59454
aacggaggatataaaaactctttaactcattattgtcctaaaatctcaattttatccattttcacggaaaaaacataaaatctgttcttcttcttcggctgagagacaatggcggaggagcaaaagacgagtaaggttgacgtagaatctccggctgttttagctccggcgaaggaaccgactcctgctccggtggaagtcgcggatgagaaaattcataatccacctcccgtcgagtccaaagctcttgccgttgtagaaaaacccatcgaggagcatacacctaagaaagcttcatctggttcggccgatagagatgtgatacttgccgacttggaaaaagagaagaaaacgtcattcatcaaagcatgggaagagagtgagaagtcaaaggctgagaacagggcacaaaagaagatctctgatgtgcatgcttgggaaaatagcaagaaagcagccgtagaagctcaacttaggaagatcgaggaaaaattagagaagaaaaaagcgcagtacggtgagaaaatgaagaacaaagtagctgcaatccacaagttagcagaagagaagagagcaatggttgaagctaaaaaaggagaagagcttctcaaagctgaagaaatgggtgctaagtatagagccactggtgtagtaccaaaggcaacgtgtggatgtttctaagcctttattgaatttgtatctttgtaacaattcatctctgtttctttcttcttcttttgtttttgtgtgattcaacaactctttttagtttttgttatttgtttggtcgtttgtgtcttgtttacatattgggtgattgtgtgtaaaagtgaaagattaatggagtataattgtatgaagcatc

SEQ ID NO: 30667 - protein, 190 aa, Arabidopsis thaliana
  peptide (1)..(190): Ceres Seq. ID no. 12603612
MAEEQKTSKVDVESPAVLAPAKEPTPAPVEVADEKIHNPPPVESKALAVVEKPIEEHTPKKASSGSADRDVILADLEKEKKTSFIKAWEESEKSKAENRAQKKISDVHAWENSKKAAVEAQLRKIEEKLEKKKAQYGEKMKNKVAAIHKLAEEKRAMVEAKKGEELLKAEEMGAKYRATGVVPKATCGCF

SEQ ID NO: 30668 - DNA, 1371 bp, Arabidopsis thaliana
  misc_feature (1)..(1371): Ceres Seq. ID no. 12722627
  misc_feature (1)..(1371): Ortholog of  Ceres SEQ ID NO 15179015 as cited in SEQ ID NO 0
  misc_feature (1)..(1371): Ortholog of  Ceres SEQ ID NO 15179613 as cited in SEQ ID NO 0
gacgagacattgaaaactcccatctaccttttctctttctctctctctccctcccaaagtcgaacctgcaatccctaaatccccaatttgagaccatctccagttcgtcatcgtacgacgactctctctctctctctcctcttctctgtatagtcgaattatattacaagttagatagatagcatgaattggttacctgaagctgaagctgaggatgacttcaaaggtcttctctctggtgatttctttgatgatctcatcaatcaccttgacgtccctcttgatgacattgataccaccaatggtgaaggagattgggttgacaggtttcaagaccttgagcctcctcccatggatatgttccccactttgccttctgacctcacctcttgcggctctggcatggccaaggcccctcgtgtggatattcaaaggaacattcctgctttgaaacagtcctattcttctgaagccttgtccagcactctccaccaatcttcagctcctcctgaaatcaaagtttcgaaactatttcagtctttaagtccagtgtcagttctcgagaacagttatggttctctctcgacccacaacaatggatctcagagattggctttccctgtgaaaggcatgagaagcaagcgcaaacgccccacaacactgagacttagctaccttttcccctctgaaccccgaaagcccgagaagtcaaccccgggcaaacctgaatccgagtgttacttttcttctgagcaacatgccaagaagaaacgcaagatccacctgaccacccgcacggtctcttccactctggaggcaagcaactcggatgggatagtccgcaaatgcactcattgcgagacaaccaagaccccacagtggagggaaggacccagtggaccgaagaccctctgcaatgcttgcggagtgaggttcagatctggtcgcctagttccagaataccgaccagcctcaagccccaccttcatcccagctgtgcattcaaactcacacaggaagatcattgagatgagaaggaaggacgacgaacagtttgatagcagcatgattcgggcagtgatatccagagggtaaagcagttttttttttaaagtttggtctctgatccgcagaaatgggaagtcagtggaggaagaagatggtataaaagtagggtttagtgactgttttcaaatctgatgaagagagtttagtggtttagttcaagttagggatatgaaatattttgttgtttcattatgtgtttttatctttatctcttggctgacatttgtgtatcagaggaaaacaggtgaagccaaagtttgctctctttttttcgctatttcaaatctattctttttattcttc

SEQ ID NO: 30669 - protein, 303 aa, Arabidopsis thaliana
  peptide (1)..(303): Ceres Seq. ID no. 12722628
MNWLPEAEAEDDFKGLLSGDFFDDLINHLDVPLDDIDTTNGEGDWVDRFQDLEPPPMDMFPTLPSDLTSCGSGMAKAPRVDIQRNIPALKQSYSSEALSSTLHQSSAPPEIKVSKLFQSLSPVSVLENSYGSLSTHNNGSQRLAFPVKGMRSKRKRPTTLRLSYLFPSEPRKPEKSTPGKPESECYFSSEQHAKKKRKIHLTTRTVSSTLEASNSDGIVRKCTHCETTKTPQWREGPSGPKTLCNACGVRFRSGRLVPEYRPASSPTFIPAVHSNSHRKIIEMRRKDDEQFDSSMIRAVISRG

SEQ ID NO: 30670 - protein, 247 aa, Arabidopsis thaliana
  peptide (1)..(247): Ceres Seq. ID no. 12722629
MDMFPTLPSDLTSCGSGMAKAPRVDIQRNIPALKQSYSSEALSSTLHQSSAPPEIKVSKLFQSLSPVSVLENSYGSLSTHNNGSQRLAFPVKGMRSKRKRPTTLRLSYLFPSEPRKPEKSTPGKPESECYFSSEQHAKKKRKIHLTTRTVSSTLEASNSDGIVRKCTHCETTKTPQWREGPSGPKTLCNACGVRFRSGRLVPEYRPASSPTFIPAVHSNSHRKIIEMRRKDDEQFDSSMIRAVISRG

SEQ ID NO: 30671 - protein, 245 aa, Arabidopsis thaliana
  peptide (1)..(245): Ceres Seq. ID no. 12722630
MFPTLPSDLTSCGSGMAKAPRVDIQRNIPALKQSYSSEALSSTLHQSSAPPEIKVSKLFQSLSPVSVLENSYGSLSTHNNGSQRLAFPVKGMRSKRKRPTTLRLSYLFPSEPRKPEKSTPGKPESECYFSSEQHAKKKRKIHLTTRTVSSTLEASNSDGIVRKCTHCETTKTPQWREGPSGPKTLCNACGVRFRSGRLVPEYRPASSPTFIPAVHSNSHRKIIEMRRKDDEQFDSSMIRAVISRG

SEQ ID NO: 30672 - DNA, 1359 bp, Arabidopsis thaliana
  misc_feature (1)..(1359): Ceres Seq. ID no. 12384828
  misc_feature (1)..(1359): Ortholog of  Ceres SEQ ID NO 13503476 as cited in SEQ ID NO 61978
  misc_feature (1)..(1359): Ortholog of  Ceres SEQ ID NO 12578438 as cited in SEQ ID NO 62201
  misc_feature (1)..(1359): Ortholog of  Ceres SEQ ID NO 12617675 as cited in SEQ ID NO 64656
atattcactctctcttcttcattagcctttcgtctccttcttctcttctctatctctctttagcttctctacgcaagcttattatctctttctcttaaagctttttctatatacaaacagaagcgtttgatactgtaaaaaagatttagaaatggagactctgagtcgtttattggttttcatgtctctgttttccggtttagtttctggatttgctctgcaaaatcttccaatcacatcttttgaagaaagttacactcaactttttggtgacaagaacttatttgttcatcaagatggcaaatctgtccggttaacgctcgatgaaagaaccggttccggttttgtttcaaatgattattacttgcatggattcttcagtgcttcaattaaattaccttctgattatacagctggagttgttgttgccttttatatgtctaatggagatatgtatgagaagaatcatgatgagatagattttgagtttcttggtaacattagagaaaaagaatggagagttcagacaaacatttacggtaatggaagtactcattcaggaagagaagagagatataatctctggtttgatcctactgaagattttcatcaatacagtatcctctggtctgattctcacatcatattctttgtagacaatgttcctattagagaggtcaaacgtactgcggaaatgggtggtcactttccatcaaagccgatgtctctctacacaacaatatgggacggttctaaatgggcaactaacggtggaaagtacggtgtaaactacaaatatgcgccttacattgcgcggttctcggatctagtcctgcacggctgccccgtggaccctatcgagcagtttccgaggtgcgatgaaggcgcggctgaggatatgcgtgcggcgcaagagattactccttcacaaaggagtaaaatggatgttttcagacggagactcatgacatattcatattgctatgatcgggctaggtacaatgttgctttatcggagtgtgtggtgaatcccgctgaggctcaaaggcttagggtttatgatccggtcagatttggcggcattccgaggcgccaccgcaatggaaagcaccggagcaagagaagccgggttgatggaaccgagtcgatatgataacatatataggcaaaatagtatgggtgagatttgggggttctataataagtccattattttggttatttatgattcaatgcattttcacatatagaggaggcatttttgtcatttgttagttgtatatcattataagaaaagaaaaaataattaatttatttatttgtgatattttttttatatatgataaattgtttcttgct

SEQ ID NO: 30673 - protein, 333 aa, Arabidopsis thaliana
  peptide (1)..(333): Ceres Seq. ID no. 12384829
METLSRLLVFMSLFSGLVSGFALQNLPITSFEESYTQLFGDKNLFVHQDGKSVRLTLDERTGSGFVSNDYYLHGFFSASIKLPSDYTAGVVVAFYMSNGDMYEKNHDEIDFEFLGNIREKEWRVQTNIYGNGSTHSGREERYNLWFDPTEDFHQYSILWSDSHIIFFVDNVPIREVKRTAEMGGHFPSKPMSLYTTIWDGSKWATNGGKYGVNYKYAPYIARFSDLVLHGCPVDPIEQFPRCDEGAAEDMRAAQEITPSQRSKMDVFRRRLMTYSYCYDRARYNVALSECVVNPAEAQRLRVYDPVRFGGIPRRHRNGKHRSKRSRVDGTESI

SEQ ID NO: 30674 - protein, 323 aa, Arabidopsis thaliana
  peptide (1)..(323): Ceres Seq. ID no. 12384830
MSLFSGLVSGFALQNLPITSFEESYTQLFGDKNLFVHQDGKSVRLTLDERTGSGFVSNDYYLHGFFSASIKLPSDYTAGVVVAFYMSNGDMYEKNHDEIDFEFLGNIREKEWRVQTNIYGNGSTHSGREERYNLWFDPTEDFHQYSILWSDSHIIFFVDNVPIREVKRTAEMGGHFPSKPMSLYTTIWDGSKWATNGGKYGVNYKYAPYIARFSDLVLHGCPVDPIEQFPRCDEGAAEDMRAAQEITPSQRSKMDVFRRRLMTYSYCYDRARYNVALSECVVNPAEAQRLRVYDPVRFGGIPRRHRNGKHRSKRSRVDGTESI

SEQ ID NO: 30675 - protein, 238 aa, Arabidopsis thaliana
  peptide (1)..(238): Ceres Seq. ID no. 12384831
MSNGDMYEKNHDEIDFEFLGNIREKEWRVQTNIYGNGSTHSGREERYNLWFDPTEDFHQYSILWSDSHIIFFVDNVPIREVKRTAEMGGHFPSKPMSLYTTIWDGSKWATNGGKYGVNYKYAPYIARFSDLVLHGCPVDPIEQFPRCDEGAAEDMRAAQEITPSQRSKMDVFRRRLMTYSYCYDRARYNVALSECVVNPAEAQRLRVYDPVRFGGIPRRHRNGKHRSKRSRVDGTESI

SEQ ID NO: 30676 - DNA, 1810 bp, Arabidopsis thaliana
  misc_feature (1)..(1810): Ceres Seq. ID no. 12327223
  misc_feature (1)..(1810): Ortholog of  Ceres SEQ ID NO 15169264 as cited in SEQ ID NO 55026
  misc_feature (1)..(1810): Ortholog of  Ceres SEQ ID NO 15224709 as cited in SEQ ID NO 68627
aatctctctttatctctctttctctgtttactaaatcgccagtattcgccgcaagaaagatgtctccggcgaagaagagccgaagttttcctccgataagcgagtgtaaaagcagagagtatgattcgatcgctgcggatctcgacgggactctgcttctgtcaagaagctctttcccttacttcatgctggtggccattgaagcaggtagtctcttccgtggattgatccttcttctttctcttcccatcgtcatcatcgcttatctcttcgtctccgaatctctcggaatccaaatccttatcttcatctccttcgccggtatcaagatcaagaacatcgaactcgtctctcgcgccgttcttacacggttttacgcggcggatgtgaggaaagatagttttgaggtgtttgataaatgtaagaagaggaaagtagtggtgactgcgaatccgatagtgatggttgagccattcgtcaaagactatttgggaggagataaagttttgggaacagagattgaagttaaccccaaaacgatgaaagctactggttttgtgaaaaagcctggtgttcttgttggtgatctcaagagattagccatcttgaaagagttcggcgatgactcaccggatcttggcctcggtgaccgcacctccgatcacgatttcaagtccatttgcaaggaaggttacatggtgcatgagaccaaatcagccacaacagtccctatagagagtctcaagaaccgcataatcttccatgatggccgtcttgtccaacgtccgaccccattaaacgccttaatcatttacctttggcttcctttcggcttcatgctctctgtcttccgcgtctacttcaacctccctttacccgaacgcttcgtccgctacacttacgagatcctcggcattcacctcacaatccgtggccaccgtcctccacctccttcccccggaaaacctggaaacctctacgttctcaaccaccgcaccgcccttgaccccattatcatcgccattgctctcggccgtaagatcacatgtgtcacttatagtgtctctcgcctctccctgatgctctcacccattcctgctgttgctctgacccgagaccgtgtcgctgacgcagcccgcatgaggcaactcctcgagaaaggtgatttggtgatctgtcctgaaggcacaacgtgtagagaaccatatctactaaggttcagtgctctatttgcagagctgagcgaccggatcgtgcctgtggccatgaactgcaagcaagggatgttcaacgggacgacagttagaggtgtgaaattctgggatccgtacttcttcttcatgaacccccgacctagctacgaggccactttcttggaccgtttgcccgaagaaatgacggtaaacggtggtggcaagactccttttgaggtggctaattacgttcagaaggtgatcggtggagttttggggttcgaatgtactgaacttacaaggaaggataagtatctgttgcttggaggcaacgacggaaaggttgagtctatcaataagaccaagtccatggagtaataatccagctagtctggttgctgctattttgcttgggagtgaagttaggtctttcgggttttcccaattacttttttttttgttttttttcatgtattgttcgaggaaaatgttttgttgaatatgcactggataatgaaactacatttgaatcaaagtacgtacatgtagtgtaccatttccccttgccttaactatgaatgatttgtaaactcaccttgtattataagatatcctgg

SEQ ID NO: 30677 - protein, 522 aa, Arabidopsis thaliana
  peptide (1)..(522): Ceres Seq. ID no. 12327224
SLFISLSLFTKSPVFAARKMSPAKKSRSFPPISECKSREYDSIAADLDGTLLLSRSSFPYFMLVAIEAGSLFRGLILLLSLPIVIIAYLFVSESLGIQILIFISFAGIKIKNIELVSRAVLTRFYAADVRKDSFEVFDKCKKRKVVVTANPIVMVEPFVKDYLGGDKVLGTEIEVNPKTMKATGFVKKPGVLVGDLKRLAILKEFGDDSPDLGLGDRTSDHDFKSICKEGYMVHETKSATTVPIESLKNRIIFHDGRLVQRPTPLNALIIYLWLPFGFMLSVFRVYFNLPLPERFVRYTYEILGIHLTIRGHRPPPPSPGKPGNLYVLNHRTALDPIIIAIALGRKITCVTYSVSRLSLMLSPIPAVALTRDRVADAARMRQLLEKGDLVICPEGTTCREPYLLRFSALFAELSDRIVPVAMNCKQGMFNGTTVRGVKFWDPYFFFMNPRPSYEATFLDRLPEEMTVNGGGKTPFEVANYVQKVIGGVLGFECTELTRKDKYLLLGGNDGKVESINKTKSME

SEQ ID NO: 30678 - protein, 503 aa, Arabidopsis thaliana
  peptide (1)..(503): Ceres Seq. ID no. 12327225
MSPAKKSRSFPPISECKSREYDSIAADLDGTLLLSRSSFPYFMLVAIEAGSLFRGLILLLSLPIVIIAYLFVSESLGIQILIFISFAGIKIKNIELVSRAVLTRFYAADVRKDSFEVFDKCKKRKVVVTANPIVMVEPFVKDYLGGDKVLGTEIEVNPKTMKATGFVKKPGVLVGDLKRLAILKEFGDDSPDLGLGDRTSDHDFKSICKEGYMVHETKSATTVPIESLKNRIIFHDGRLVQRPTPLNALIIYLWLPFGFMLSVFRVYFNLPLPERFVRYTYEILGIHLTIRGHRPPPPSPGKPGNLYVLNHRTALDPIIIAIALGRKITCVTYSVSRLSLMLSPIPAVALTRDRVADAARMRQLLEKGDLVICPEGTTCREPYLLRFSALFAELSDRIVPVAMNCKQGMFNGTTVRGVKFWDPYFFFMNPRPSYEATFLDRLPEEMTVNGGGKTPFEVANYVQKVIGGVLGFECTELTRKDKYLLLGGNDGKVESINKTKSME

SEQ ID NO: 30679 - protein, 461 aa, Arabidopsis thaliana
  peptide (1)..(461): Ceres Seq. ID no. 12327226
MLVAIEAGSLFRGLILLLSLPIVIIAYLFVSESLGIQILIFISFAGIKIKNIELVSRAVLTRFYAADVRKDSFEVFDKCKKRKVVVTANPIVMVEPFVKDYLGGDKVLGTEIEVNPKTMKATGFVKKPGVLVGDLKRLAILKEFGDDSPDLGLGDRTSDHDFKSICKEGYMVHETKSATTVPIESLKNRIIFHDGRLVQRPTPLNALIIYLWLPFGFMLSVFRVYFNLPLPERFVRYTYEILGIHLTIRGHRPPPPSPGKPGNLYVLNHRTALDPIIIAIALGRKITCVTYSVSRLSLMLSPIPAVALTRDRVADAARMRQLLEKGDLVICPEGTTCREPYLLRFSALFAELSDRIVPVAMNCKQGMFNGTTVRGVKFWDPYFFFMNPRPSYEATFLDRLPEEMTVNGGGKTPFEVANYVQKVIGGVLGFECTELTRKDKYLLLGGNDGKVESINKTKSME

SEQ ID NO: 30680 - DNA, 921 bp, Arabidopsis thaliana
  misc_feature (1)..(921): Ceres Seq. ID no. 12385734
  misc_feature (1)..(921): Ortholog of  Ceres SEQ ID NO 13582619 as cited in SEQ ID NO 56520
  misc_feature (1)..(921): Ortholog of  Ceres SEQ ID NO 13660872 as cited in SEQ ID NO 60830
  misc_feature (1)..(921): Ortholog of  Ceres SEQ ID NO 12616221 as cited in SEQ ID NO 63291
tttcaataatctctcatcttctttcgtctctctttctacggttcaaacattaaaaagatagatggagaagaggagctctattaaaaacagaggagtacttagattaccaccagggttccgatttcacccgaccgatgaagagctagtggttcaatatttacgtcgaaaagtaaccggtttacccttaccagcttctgtaataccggaaaccgatgtttgtaaatccgatccatgggatttaccaggtgattgtgaatcagagatgtatttttttagcacgagggaagctaaatacccgaacggaaaccggtcgaaccggtctaccggttcgggttattggaaagcgactggtctcgataagcagatcggtaagaagaagcttgtcgtggggatgaagaaaactcttgttttctacaaaggtaaaccaccaaacggaacaagaactaactgggttcttcatgaatatcgtcttgttgattcacaacaagattcattatatggacagaacatgaattgggttttgtgtagagtgttcttgaagaagagaagcaatagtaatagtaagaggaaagaagatgagaaagaagaggtggagaatgagaaagagacagagacagagagagaacgtgaggaggagaacaagaagagtacttgtcccatattttatgactttatgagaaaagacacgaagaaaaagagaaggagaagaagatgctgtgatttgaatttgactcctgctacttgttgttgttgctcttcttcgacttcttcgtcgtctgtttgctcaagtgctttaactcacacatcttctaatgataatcgtcaagaaatcagttatcgggaaaataagttttgtttgtttctatagattaacaaacttgggaacaacttctattaactttaataaattagattatgatt

SEQ ID NO: 30681 - protein, 268 aa, Arabidopsis thaliana
  peptide (1)..(268): Ceres Seq. ID no. 12385735
MEKRSSIKNRGVLRLPPGFRFHPTDEELVVQYLRRKVTGLPLPASVIPETDVCKSDPWDLPGDCESEMYFFSTREAKYPNGNRSNRSTGSGYWKATGLDKQIGKKKLVVGMKKTLVFYKGKPPNGTRTNWVLHEYRLVDSQQDSLYGQNMNWVLCRVFLKKRSNSNSKRKEDEKEEVENEKETETEREREEENKKSTCPIFYDFMRKDTKKKRRRRRCCDLNLTPATCCCCSSSTSSSSVCSSALTHTSSNDNRQEISYRENKFCLFL

SEQ ID NO: 30682 - protein, 201 aa, Arabidopsis thaliana
  peptide (1)..(201): Ceres Seq. ID no. 12385736
MYFFSTREAKYPNGNRSNRSTGSGYWKATGLDKQIGKKKLVVGMKKTLVFYKGKPPNGTRTNWVLHEYRLVDSQQDSLYGQNMNWVLCRVFLKKRSNSNSKRKEDEKEEVENEKETETEREREEENKKSTCPIFYDFMRKDTKKKRRRRRCCDLNLTPATCCCCSSSTSSSSVCSSALTHTSSNDNRQEISYRENKFCLFL

SEQ ID NO: 30683 - protein, 158 aa, Arabidopsis thaliana
  peptide (1)..(158): Ceres Seq. ID no. 12385737
MKKTLVFYKGKPPNGTRTNWVLHEYRLVDSQQDSLYGQNMNWVLCRVFLKKRSNSNSKRKEDEKEEVENEKETETEREREEENKKSTCPIFYDFMRKDTKKKRRRRRCCDLNLTPATCCCCSSSTSSSSVCSSALTHTSSNDNRQEISYRENKFCLFL

SEQ ID NO: 30684 - DNA, 1781 bp, Arabidopsis thaliana
  misc_feature (1)..(1781): Ceres Seq. ID no. 12372041
  misc_feature (1)..(1781): Ortholog of  Ceres SEQ ID NO 13659971 as cited in SEQ ID NO 67565
  misc_feature (1)..(1781): Ortholog of  Ceres SEQ ID NO 13500385 as cited in SEQ ID NO 67583
cttctttcatctctttcttttattaatcccctttcttttctaactttctcgattcatcagagccatgggtgtctgtttctccgccattagagtcactggtgctagcagcagtagacgaagcagtcagaccaaatccaaggctgctcctactcccatcgataccaaggcctctaccaaacgccgaaccggctccatcccctgcggcaagcgtaccgattttggctactccaaagacttccacgatcactacaccatcggcaagttgctcggccatggtcaattcggctacacctacgtcgccatccacagacccaatggagatcgcgtcgccgtcaaaagactcgataagtctaagatggttcttcctattgctgttgaggatgtcaagcgtgaggttcagattcttattgctctctctggccacgagaatgttgttcagtttcacaatgcctttgaggatgacgattacgtctatattgttatggagttgtgcgaaggaggcgaattgctggataggatattatccaagaaaggtaatcggtactccgagaaagatgcagccgttgtcgttaggcagatgctcaaagttgcaggagaatgtcatctacacgatcttgtacatagagatatgaaaccagagaactttttgttcaaatcagctcaactagattcgcctctaaaggctacggattttggtttatcggattttatcaaaccagggaaaaggttccatgacattgttggtagcgcctattatgtggctcctgaggtattaaagcgcagatcagggcctgaatcagatgtatggagcattggtgtgattacgtatatattactttgtgggaggcggcctttttgggatagaactgaagatggtatatttaaagaggttttaagaaataaacctgacttcagccgtaaaccttgggcaactataagtgacagcgccaaagattttgtgaaaaagttacttgtaaaagacccacgagcacggctaactgctgcacaagcactatcacatgcgtgggttagagaaggcgggaatgctactgatatccctgtcgacatttcagttctgaacaacttaagacaatttgtgagatacagccgtctaaagcaatttgctttaagggcgcttgctagcacacttgacgaggcagagatctctgacctcagagatcaatttgatgcgattgatgtggataaaaatggcgtcattagtcttgaagagatgagacaggcacttgccaaagatcttccttggaaactgaaagactcacgagttgctgagatccttgaagcgattgatagcaacactgatgggttagtggacttcacagagtttgtagcagcagctctacatgttcatcaactagaagaacatgattcagagaaatggcagctaaggtcaagagcagcttttgagaaattcgacctagacaaagacgggtacataacgcctgaggaacttcgaatgcacacggggttaagaggatcaatagatccactgctggatgaagcagacatagacagagatgggaaaataagcctgcatgagttcaggagacttctaagaacagcgagcataagttcacagagagcaccaagccctgcaggtcacaggaatcttcgatagtatatactagaagaggagtaagtaaaggatacagaatgtaatttgttgggatgtgatatgtcttatcttcttatatgtaatgttggttgtaagataagtggggtattttggcgtttgtagtgataagtaagtaatactttggttg

SEQ ID NO: 30685 - protein, 523 aa, Arabidopsis thaliana
  peptide (1)..(523): Ceres Seq. ID no. 12372042
MGVCFSAIRVTGASSSRRSSQTKSKAAPTPIDTKASTKRRTGSIPCGKRTDFGYSKDFHDHYTIGKLLGHGQFGYTYVAIHRPNGDRVAVKRLDKSKMVLPIAVEDVKREVQILIALSGHENVVQFHNAFEDDDYVYIVMELCEGGELLDRILSKKGNRYSEKDAAVVVRQMLKVAGECHLHDLVHRDMKPENFLFKSAQLDSPLKATDFGLSDFIKPGKRFHDIVGSAYYVAPEVLKRRSGPESDVWSIGVITYILLCGRRPFWDRTEDGIFKEVLRNKPDFSRKPWATISDSAKDFVKKLLVKDPRARLTAAQALSHAWVREGGNATDIPVDISVLNNLRQFVRYSRLKQFALRALASTLDEAEISDLRDQFDAIDVDKNGVISLEEMRQALAKDLPWKLKDSRVAEILEAIDSNTDGLVDFTEFVAAALHVHQLEEHDSEKWQLRSRAAFEKFDLDKDGYITPEELRMHTGLRGSIDPLLDEADIDRDGKISLHEFRRLLRTASISSQRAPSPAGHRNLR

SEQ ID NO: 30686 - protein, 426 aa, Arabidopsis thaliana
  peptide (1)..(426): Ceres Seq. ID no. 12372043
MVLPIAVEDVKREVQILIALSGHENVVQFHNAFEDDDYVYIVMELCEGGELLDRILSKKGNRYSEKDAAVVVRQMLKVAGECHLHDLVHRDMKPENFLFKSAQLDSPLKATDFGLSDFIKPGKRFHDIVGSAYYVAPEVLKRRSGPESDVWSIGVITYILLCGRRPFWDRTEDGIFKEVLRNKPDFSRKPWATISDSAKDFVKKLLVKDPRARLTAAQALSHAWVREGGNATDIPVDISVLNNLRQFVRYSRLKQFALRALASTLDEAEISDLRDQFDAIDVDKNGVISLEEMRQALAKDLPWKLKDSRVAEILEAIDSNTDGLVDFTEFVAAALHVHQLEEHDSEKWQLRSRAAFEKFDLDKDGYITPEELRMHTGLRGSIDPLLDEADIDRDGKISLHEFRRLLRTASISSQRAPSPAGHRNLR

SEQ ID NO: 30687 - protein, 384 aa, Arabidopsis thaliana
  peptide (1)..(384): Ceres Seq. ID no. 12372044
MELCEGGELLDRILSKKGNRYSEKDAAVVVRQMLKVAGECHLHDLVHRDMKPENFLFKSAQLDSPLKATDFGLSDFIKPGKRFHDIVGSAYYVAPEVLKRRSGPESDVWSIGVITYILLCGRRPFWDRTEDGIFKEVLRNKPDFSRKPWATISDSAKDFVKKLLVKDPRARLTAAQALSHAWVREGGNATDIPVDISVLNNLRQFVRYSRLKQFALRALASTLDEAEISDLRDQFDAIDVDKNGVISLEEMRQALAKDLPWKLKDSRVAEILEAIDSNTDGLVDFTEFVAAALHVHQLEEHDSEKWQLRSRAAFEKFDLDKDGYITPEELRMHTGLRGSIDPLLDEADIDRDGKISLHEFRRLLRTASISSQRAPSPAGHRNLR

SEQ ID NO: 30688 - DNA, 711 bp, Arabidopsis thaliana
  misc_feature (1)..(711): Ceres Seq. ID no. 12321740
  misc_feature (1)..(711): Ortholog of  Ceres SEQ ID NO 13594809 as cited in SEQ ID NO 51847
  misc_feature (1)..(711): Ortholog of  Ceres SEQ ID NO 12617639 as cited in SEQ ID NO 65219
  misc_feature (1)..(711): Ortholog of  Ceres SEQ ID NO 14309033 as cited in SEQ ID NO 0
  misc_feature (1)..(711): Ortholog of  Ceres SEQ ID NO 15173998 as cited in SEQ ID NO 0
  misc_feature (1)..(711): Ortholog of  Ceres SEQ ID NO 15178333 as cited in SEQ ID NO 0
acatcctctcactgcctcttttctcactcactgttacttcgctaaaaccctaatttcgccattcccttctctaagttttgtgtgtagacatttagaaatggctttctgcaacaaacttagcggtatcttgagacaaggggtttctcagagctcaaatggtccagttacatctatgcttggctctcttcgttacatgtcctctaagctttttgttggtggtctctcttggggaactgatgacagctccttaaagcaagctttcactagctttggtgaagtcacagaagcaacggtgattgcagacagagagacagggaggtcgaggggattcggatttgttagcttcagctgtgaggattctgctaacaatgccataaaagaaatggatggaaaggagctgaatggtaggcaaatccgtgtgaatcttgcaaccgaaagatcgagtgccccgagatcatcatttggtggtggtggcggttacggtggtggcggtggtggtggctactaaagcaaacaagccagaggatttgagagagagaggagcctcagaactttcagtagttagttagtttgtttgtttcctctttgtttaactgcaaataaccttaactggttttgttaaacttatttagccctgttttttggttgtgtctgaataccgtagtattgttgctccatcttctgcaaatctattagcatcgagttcgattc

SEQ ID NO: 30689 - protein, 168 aa, Arabidopsis thaliana
  peptide (1)..(168): Ceres Seq. ID no. 12321741
HPLTASFLTHCYFAKTLISPFPSLSFVCRHLEMAFCNKLSGILRQGVSQSSNGPVTSMLGSLRYMSSKLFVGGLSWGTDDSSLKQAFTSFGEVTEATVIADRETGRSRGFGFVSFSCEDSANNAIKEMDGKELNGRQIRVNLATERSSAPRSSFGGGGGYGGGGGGGY

SEQ ID NO: 30690 - protein, 136 aa, Arabidopsis thaliana; identical to SEQ ID NO: 25481
  peptide (1)..(136): Ceres Seq. ID no. 12321742

SEQ ID NO: 30691 - protein, 111 aa, Arabidopsis thaliana; identical to SEQ ID NO: 25482
  peptide (1)..(111): Ceres Seq. ID no. 12321743

SEQ ID NO: 30692 - DNA, 1207 bp, Arabidopsis thaliana
  misc_feature (1)..(1207): Ceres Seq. ID no. 13486911
  misc_feature (1)..(1207): Ortholog of  Ceres SEQ ID NO 14308107 as cited in SEQ ID NO 59030
  misc_feature (1)..(1207): Ortholog of  Ceres SEQ ID NO 15226612 as cited in SEQ ID NO 62700
gaagcggataacgaaaagctcgccgagaaagcacaaatggcgggcgtgaaatctctgcaacctagactcatatcttcctttctcggcaacaattctattagatcaacgcaaccacttattcatctctttcgcttcgatttaggaagaagacatgtttcgatgcaattatcaagaaccttttctggattaaccgatctcctgtttaatagaagaaatgaagatgaagttattgatggcaagagaaaacgtctgagaccgggaaatgtatctcctcgtcgtcctgttccgggtcatataacaaaacctccttatgttgattctcttcaagctcccggaatctcaagtggacttgaagttcatgataagaaaggtatagaatgcatgagagcttctggaatacttgcagctagggttcgagattacgctggcactttggttaagccaggcgtaaccactgatgaaatcgatgaagcagttcacaatatgattattgagaatggagcttatccttcgcctcttggttatggaggtttcccgaaaagtgtttgcacatctgtgaatgaatgcatttgccatggtataccagattcaagaccacttgaggatggggatattatcaacatcgatgtcacagtttatttgaatggttatcatggtgatacttcagcaactttcttctgtggaaatgttgacgagaaggctaaaaagctagtcgaggtgacgaaagagtctctcgacaaagcaatatcaatatgtggtcccggagttgagtacaagaaaatcggcaaagtcattcatgatcttgcagataaacataaatatggagttgttcgacaatttgtaggccacggggttggcagcgtcttccacgctgatccagttgttctgcatttccggaacaatgaagctggacgtatggtcttgaatcaaaccttcaccattgaaccgatgcttacaataggaagcagaaacccgataatgtgggatgataactggaccgtggtaacagaagatgcaagcctctcggcgcaattcgagcataccattcttataaccaaagatggtgctgagattctaaccaagtgttaaaaaaatgattctgaaaaattgatcttcttggaatgaaacccaaagccttaaggtatgtaagaatcatattcttattcaaatattgttttgctcacaagcagatgcgaacagttactaa

SEQ ID NO: 30693 - protein, 362 aa, Arabidopsis thaliana
  peptide (1)..(362): Ceres Seq. ID no. 13486912
EADNEKLAEKAQMAGVKSLQPRLISSFLGNNSIRSTQPLIHLFRFDLGRRHVSMQLSRTFSGLTDLLFNRRNEDEVIDGKRKRLRPGNVSPRRPVPGHITKPPYVDSLQAPGISSGLEVHDKKGIECMRASGILAARVRDYAGTLVKPGVTTDEIDEAVHNMIIENGAYPSPLGYGGFPKSVCTSVNECICHGIPDSRPLEDGDIINIDVTVYLNGYHGDTSATFFCGNVDEKAKKLVEVTKESLDKAISICGPGVEYKKIGKVIHDLADKHKYGVVRQFVGHGVGSVFHADPVVLHFRNNEAGRMVLNQTFTIEPMLTIGSRNPIMWDDNWTVVTEDASLSAQFEHTILITKDGAEILTKC

SEQ ID NO: 30694 - protein, 350 aa, Arabidopsis thaliana
  peptide (1)..(350): Ceres Seq. ID no. 13486913
MAGVKSLQPRLISSFLGNNSIRSTQPLIHLFRFDLGRRHVSMQLSRTFSGLTDLLFNRRNEDEVIDGKRKRLRPGNVSPRRPVPGHITKPPYVDSLQAPGISSGLEVHDKKGIECMRASGILAARVRDYAGTLVKPGVTTDEIDEAVHNMIIENGAYPSPLGYGGFPKSVCTSVNECICHGIPDSRPLEDGDIINIDVTVYLNGYHGDTSATFFCGNVDEKAKKLVEVTKESLDKAISICGPGVEYKKIGKVIHDLADKHKYGVVRQFVGHGVGSVFHADPVVLHFRNNEAGRMVLNQTFTIEPMLTIGSRNPIMWDDNWTVVTEDASLSAQFEHTILITKDGAEILTKC

SEQ ID NO: 30695 - protein, 309 aa, Arabidopsis thaliana
  peptide (1)..(309): Ceres Seq. ID no. 13486914
MQLSRTFSGLTDLLFNRRNEDEVIDGKRKRLRPGNVSPRRPVPGHITKPPYVDSLQAPGISSGLEVHDKKGIECMRASGILAARVRDYAGTLVKPGVTTDEIDEAVHNMIIENGAYPSPLGYGGFPKSVCTSVNECICHGIPDSRPLEDGDIINIDVTVYLNGYHGDTSATFFCGNVDEKAKKLVEVTKESLDKAISICGPGVEYKKIGKVIHDLADKHKYGVVRQFVGHGVGSVFHADPVVLHFRNNEAGRMVLNQTFTIEPMLTIGSRNPIMWDDNWTVVTEDASLSAQFEHTILITKDGAEILTKC

SEQ ID NO: 30696 - DNA, 2350 bp, Arabidopsis thaliana
  misc_feature (1)..(2350): Ceres Seq. ID no. 13488462
  misc_feature (1)..(2350): Ortholog of  Ceres SEQ ID NO 15169346 as cited in SEQ ID NO 53994
aaaagctatagatcgatcctaggcttacctcaaacctcagtctccgttgactactgagactcgtcgacctctgatccgcttcttcgactatacggatctacttccgatcttgatgatggccggaggtaacgtacggtttctggttttgatactcgccgtagcaatttgcggtgctgcttctgttttccagccgatctcagactctcaccgatctgcggctctggatgtcttcgtaccagtcgatggatcatacaaaagcttggaggaggcatatgaagcattaaagactttggagattcttggaattgataaaaagtctgatcttagctcaaagacttgtgagaatgtggttaaagttcttcagtcgtcttcttctactcttaaggatgcattttatgcgttaaacgttaatgggattctaaaatgtaaaattggtgaagctggtcctaaggacattgtttctcaacttcaagctggtgttaaagatgcgaagctattgcttgatttctattattctgtcagaggcttggtgctggctaaggagcaatttcctggaactcatataagtcttggagatgccgaagccattttccgttccatcaagtctcttagccagagtgatggaagatggcgctacagctccaacaatcccgaatcaagcacttttgctgctggcttagcctatgaaacgcttgctggagtgatttcattagcaccttcagagtttgatccatctttgatccagtcggtgaagacgggtatcctgaagctttctgacagtatccaaaaatatgatgatgggacattttattttgatgagaagtctgttgatgcaagtcaaggcccgatctcaacaactgcatcagttattagagggctcacgtcatttgcagcttcagaatccacaggattgaaccttccaggtgataagatagttggtctggccaaattctttctgggtgttggaattcctggtgatgccaaggacttcttcaaccaaatagatgcactagcttgtttggaagacaacaagttttctgttccactcatcttgtctcttccatccactgtcatttcattgacaaagaaagagcctctgaaggttaaagttagcactgtactgggttcgaaggcaccagctcttagtgtgaagcttacacaagctctaagttctaagtcagtggattcatctgtaattaataaccaggagcttaagtttgacgctgacagtgcaacgtacttcctggactcctttcccaagaactttgacattggaaaatatacttttgtatttaagattgtgctggatgaatcagcacatgagaaagtatacataactgaagctcaaacaaaagtgcctatagctgccacaggagctattagcattgaaaatgcagaaattgctgtacttgacagtgacattggaagcgttgaatctcagaaaaagctagatttaactaaagatggagcggtatcattatcagcaaaccaccttcaaaagctacgcctgtcattccagttaactactccacttggcaatgcgtttaagccacaccaggcatttttcaagctgaaacatgagtcacaggtcgagcatatctttctcgtgaaaacttctggaaagaagtctgaattagttctagattttcttggattggttgagaagctctactacctctctggtaaatatgagatacagctaaccattggagatgcttctatggagaactctttactgagtaatattggtcacattgaactagacctaccagagcgtccagagaaggcgactcgtcctcctctacagtctactgagccttactcaagatatgggccaaaagctgaaatatcacacatattcaggattcctgaaaagcttccagcaaagcagctctcactagttttcttgggtgttatcgttctcccattcatcggtttcctgattgggcttacgcggttgggagtgaacataaagagcttcccatcgtcgactggatctgcaatatccgctttacttttccactgcggaattggagctgttttgcttctatatgtgctattctggttgaagttggatctattcacgactctcaaggcactttctttgttgggagtgtttctgttgttcgtgggacacagaacactatctcaacttgcatcagcatcaaacaagttgaaatctgcttgaagaagaagaactcactatgaaggatctttttttggtttatgcgtattttcagttttgtagtattgcttatagattatggtgatagacaaattcaaaagaagttcagagtttacatactctctcagtttagtcttaaaaagtaatcaagagtctctttccttg

SEQ ID NO: 30697 - protein, 691 aa, Arabidopsis thaliana
  peptide (1)..(691): Ceres Seq. ID no. 13488463
MMAGGNVRFLVLILAVAICGAASVFQPISDSHRSAALDVFVPVDGSYKSLEEAYEALKTLEILGIDKKSDLSSKTCENVVKVLQSSSSTLKDAFYALNVNGILKCKIGEAGPKDIVSQLQAGVKDAKLLLDFYYSVRGLVLAKEQFPGTHISLGDAEAIFRSIKSLSQSDGRWRYSSNNPESSTFAAGLAYETLAGVISLAPSEFDPSLIQSVKTGILKLSDSIQKYDDGTFYFDEKSVDASQGPISTTASVIRGLTSFAASESTGLNLPGDKIVGLAKFFLGVGIPGDAKDFFNQIDALACLEDNKFSVPLILSLPSTVISLTKKEPLKVKVSTVLGSKAPALSVKLTQALSSKSVDSSVINNQELKFDADSATYFLDSFPKNFDIGKYTFVFKIVLDESAHEKVYITEAQTKVPIAATGAISIENAEIAVLDSDIGSVESQKKLDLTKDGAVSLSANHLQKLRLSFQLTTPLGNAFKPHQAFFKLKHESQVEHIFLVKTSGKKSELVLDFLGLVEKLYYLSGKYEIQLTIGDASMENSLLSNIGHIELDLPERPEKATRPPLQSTEPYSRYGPKAEISHIFRIPEKLPAKQLSLVFLGVIVLPFIGFLIGLTRLGVNIKSFPSSTGSAISALLFHCGIGAVLLLYVLFWLKLDLFTTLKALSLLGVFLLFVGHRTLSQLASASNKLKSA

SEQ ID NO: 30698 - protein, 690 aa, Arabidopsis thaliana
  peptide (1)..(690): Ceres Seq. ID no. 13488464
MAGGNVRFLVLILAVAICGAASVFQPISDSHRSAALDVFVPVDGSYKSLEEAYEALKTLEILGIDKKSDLSSKTCENVVKVLQSSSSTLKDAFYALNVNGILKCKIGEAGPKDIVSQLQAGVKDAKLLLDFYYSVRGLVLAKEQFPGTHISLGDAEAIFRSIKSLSQSDGRWRYSSNNPESSTFAAGLAYETLAGVISLAPSEFDPSLIQSVKTGILKLSDSIQKYDDGTFYFDEKSVDASQGPISTTASVIRGLTSFAASESTGLNLPGDKIVGLAKFFLGVGIPGDAKDFFNQIDALACLEDNKFSVPLILSLPSTVISLTKKEPLKVKVSTVLGSKAPALSVKLTQALSSKSVDSSVINNQELKFDADSATYFLDSFPKNFDIGKYTFVFKIVLDESAHEKVYITEAQTKVPIAATGAISIENAEIAVLDSDIGSVESQKKLDLTKDGAVSLSANHLQKLRLSFQLTTPLGNAFKPHQAFFKLKHESQVEHIFLVKTSGKKSELVLDFLGLVEKLYYLSGKYEIQLTIGDASMENSLLSNIGHIELDLPERPEKATRPPLQSTEPYSRYGPKAEISHIFRIPEKLPAKQLSLVFLGVIVLPFIGFLIGLTRLGVNIKSFPSSTGSAISALLFHCGIGAVLLLYVLFWLKLDLFTTLKALSLLGVFLLFVGHRTLSQLASASNKLKSA

SEQ ID NO: 30699 - DNA, 1597 bp, Arabidopsis thaliana
  misc_feature (1)..(1597): Ceres Seq. ID no. 13491734
  misc_feature (1)..(1597): Ortholog of  Ceres SEQ ID NO 13663060 as cited in SEQ ID NO 60964
  misc_feature (1)..(1597): Ortholog of  Ceres SEQ ID NO 13655298 as cited in SEQ ID NO 68914
aagcaaagagagaggaaaaattagactttactcattgttcagtggttgagagagaaaagagtaaaaaagcacatggcctcattaccattggggcctcagcctcatgctcttgctccgccgctgcagcttcacgacggcgacgctttgaaacgccgtcctgaattggattctgataaggaaatgtctgcagctgttattgagggaaatgacgctgttactggtcatatcatttccactactataggaggcaaaaacggcgaaccaaagcagaccattagttacatggctgagcgggttgttggaacaggttcattcgggattgtttttcaggcgaaatgcttggaaactggagaatcagtagccattaaaaaggtcttgcaagatcgacgctataaaaaccgtgagttgcaactaatgcgaccaatggatcacccaaatgtcatctccttgaagcactgtttcttctctacaacgagtagagatgagctcttcctcaaccttgttatggagtatgtacctgagactttataccgggttttgaggcactatactagttctaatcagaggatgccaattttctatgtcaagctttacacatatcaaatctttagaggtttggcttacatccatactgttcccggtgtttgccacagagatgtgaaaccacaaaatctcttggttgatcccttgacccatcaggttaagctgtgtgattttggaagtgcaaaagtattggtcaaaggtgaaccaaacatatcatatatctgctcccgttattatcgtgctccagaactcatctttggcgccacagagtatacagcatccatagatatatggtctgctggttgtgtactggcagagcttcttcttggccagccgttatttccaggagaaaattcagttgatcagcttgtggagatcataaaggttcttggtactccaactcgtgaagaaattcgatgtatgaacccgaactacacagattttaggttcccacaaatcaaagctcacccttggcacaaggtttttcataaacggatgcctccagaagcaatagaccttgcatctcggcttcttcaatattcaccaagtctacgctgcactgcgctcgaagcatgtgctcatccgtttttcaatgaactccgagagccaaacgcccgtcttccaaatggtcgtccattaccgccattgttcaatttcaaacaagagttaggtggagcttcaatggagctaatcaacaggctaatacctgagcatgtgagacgacaaatgagcacaggattacaaaacagttaaaaactgtgcatgtctgaagagaaagaggagaaaagcaggtttactacttttatttgatagttgacaggttcaacagtatattaaccacgactattatcagcttctatacccgtagtaaagtcatattcagctttttgagaaatcagatgctgataattgcgtctattttttttttattccttagcctggagagtggagagagacactgttcctcgtgtatttttgtatatgtttttgtctgtaaaacaattctgacagatacgtagagacaaaagaaaaacgaggtgataatattaaaccg

SEQ ID NO: 30700 - protein, 407 aa, Arabidopsis thaliana
  peptide (1)..(407): Ceres Seq. ID no. 13491735
MASLPLGPQPHALAPPLQLHDGDALKRRPELDSDKEMSAAVIEGNDAVTGHIISTTIGGKNGEPKQTISYMAERVVGTGSFGIVFQAKCLETGESVAIKKVLQDRRYKNRELQLMRPMDHPNVISLKHCFFSTTSRDELFLNLVMEYVPETLYRVLRHYTSSNQRMPIFYVKLYTYQIFRGLAYIHTVPGVCHRDVKPQNLLVDPLTHQVKLCDFGSAKVLVKGEPNISYICSRYYRAPELIFGATEYTASIDIWSAGCVLAELLLGQPLFPGENSVDQLVEIIKVLGTPTREEIRCMNPNYTDFRFPQIKAHPWHKVFHKRMPPEAIDLASRLLQYSPSLRCTALEACAHPFFNELREPNARLPNGRPLPPLFNFKQELGGASMELINRLIPEHVRRQMSTGLQNS

SEQ ID NO: 30701 - protein, 371 aa, Arabidopsis thaliana
  peptide (1)..(371): Ceres Seq. ID no. 13491736
MSAAVIEGNDAVTGHIISTTIGGKNGEPKQTISYMAERVVGTGSFGIVFQAKCLETGESVAIKKVLQDRRYKNRELQLMRPMDHPNVISLKHCFFSTTSRDELFLNLVMEYVPETLYRVLRHYTSSNQRMPIFYVKLYTYQIFRGLAYIHTVPGVCHRDVKPQNLLVDPLTHQVKLCDFGSAKVLVKGEPNISYICSRYYRAPELIFGATEYTASIDIWSAGCVLAELLLGQPLFPGENSVDQLVEIIKVLGTPTREEIRCMNPNYTDFRFPQIKAHPWHKVFHKRMPPEAIDLASRLLQYSPSLRCTALEACAHPFFNELREPNARLPNGRPLPPLFNFKQELGGASMELINRLIPEHVRRQMSTGLQNS

SEQ ID NO: 30702 - protein, 337 aa, Arabidopsis thaliana
  peptide (1)..(337): Ceres Seq. ID no. 13491737
MAERVVGTGSFGIVFQAKCLETGESVAIKKVLQDRRYKNRELQLMRPMDHPNVISLKHCFFSTTSRDELFLNLVMEYVPETLYRVLRHYTSSNQRMPIFYVKLYTYQIFRGLAYIHTVPGVCHRDVKPQNLLVDPLTHQVKLCDFGSAKVLVKGEPNISYICSRYYRAPELIFGATEYTASIDIWSAGCVLAELLLGQPLFPGENSVDQLVEIIKVLGTPTREEIRCMNPNYTDFRFPQIKAHPWHKVFHKRMPPEAIDLASRLLQYSPSLRCTALEACAHPFFNELREPNARLPNGRPLPPLFNFKQELGGASMELINRLIPEHVRRQMSTGLQNS

SEQ ID NO: 30703 - DNA, 1878 bp, Arabidopsis thaliana
  misc_feature (1)..(1878): Ceres Seq. ID no. 12639121
  misc_feature (1)..(1878): Ortholog of  Ceres SEQ ID NO 13504578 as cited in SEQ ID NO 59850
actccaaaaaggaaaaaaaaaacaaaaaaaaacagcttctaaaaataaaaaataaaaaaaaatcccagccaccgtgggggtaattccgtaaatttgtaacagaaactccattcccgcggcgtatgcagagggcaatcccgtaaacttaacccatctccggtgatgaataagatccactccttcacatcggagtgattttccacggngtttctcttcttcttctcccctccaacaaaataaaataagatatgaaagcaaatcgcggcggcggagagcacggccaacacgaggctctaaagctttccagtttcttcttcatgccggagcggccacgtgattacctcgtgcttttcacacgtttctccgtcctcacgtgcctcatcgtctccgtatctcttgttctccgcgccacttttttatccccttccgctcgagactattccaccacctacggtctcaaattaaccgccgtacctcaaaaagccatagctctccctccgtccgcatccgtcggaccaaccaatatctcccatatcttcttctctatcgccggagcagctgagacatggatcgatcggagccagtacatctccttatggtggcgaaacacgacacgtggcttcgtctggctcgatgaaccggtgaaaatccctgaaaatcactccgatgtcagattctcgatcccgactcgagtttctgatccaggctggactcgattcaaattctccagctcaagagccgcggttcgaatcgctcgtataatctgggatagttatcggttaaatctaccaaatgtccggtggttcgtcatgggagatgacgataccgtcttcttcaccgagaatctcgtcaaggttctctcaaagtacgaccacgagcagatgtggtacatcggaggaaactcagagagcgtcgagcaagacgtgatgcacgcgtacgatatggcgtttggcggcggtggtttcgctctgagccgtccattagcggcgcgtttggccgccgcgatggatgattgtctccaacgttatttctatttttacggttctgatcagagaatcgcgtcttgcatcagcgagatcggcgttccgttcaccgaagaacgcggttttcatcagcttgacataagaggagatccatacgggtttctagcggcgcatccattggcaccgcttgtatcgttgcatcaccttgtttacttagacccaatgttccctaacaaaaacccgatcgagtcgttacagaccctaatgaaaccttataccttagacccgaatcgaatactccaacagattaattgtcatgatcgcaaacgtcaatggtctatatccatctcttggggatacaccattcagatatacacttacttcttgactgctacggagctgactacgccgttgcagaccttcaaaacttggcggtcttccagcgatggacctttcgtgtttaacactcggcccttgaaacctgacccctgtgagcgtccggtcacttatttcatggatggtgccgaggatgtacgggatagtgggacgaaaacttggtatagcataggggataagaactatggtcattgcggaaagattgagcatactcgattaactaaagtgaagaggatattggtgacttcaatgaagacggatcctgagtattggaacaaggcaccgaggagacagtgttgtgaggtgatggaaggaaaagtaggaaaaagaaaagagaaagaaatgttgttaaggattagaaaatgcagatctttggagaagatataaaaaaagcgttttaattagagagatttttgcacatacagatttagattcgatcattagttatttgtttctaaattcctcaattcctagtaccaagagaatgacgattttctct

SEQ ID NO: 30704 - protein, 505 aa, Arabidopsis thaliana
  peptide (1)..(505): Ceres Seq. ID no. 12639122
MKANRGGGEHGQHEALKLSSFFFMPERPRDYLVLFTRFSVLTCLIVSVSLVLRATFLSPSARDYSTTYGLKLTAVPQKAIALPPSASVGPTNISHIFFSIAGAAETWIDRSQYISLWWRNTTRGFVWLDEPVKIPENHSDVRFSIPTRVSDPGWTRFKFSSSRAAVRIARIIWDSYRLNLPNVRWFVMGDDDTVFFTENLVKVLSKYDHEQMWYIGGNSESVEQDVMHAYDMAFGGGGFALSRPLAARLAAAMDDCLQRYFYFYGSDQRIASCISEIGVPFTEERGFHQLDIRGDPYGFLAAHPLAPLVSLHHLVYLDPMFPNKNPIESLQTLMKPYTLDPNRILQQINCHDRKRQWSISISWGYTIQIYTYFLTATELTTPLQTFKTWRSSSDGPFVFNTRPLKPDPCERPVTYFMDGAEDVRDSGTKTWYSIGDKNYGHCGKIEHTRLTKVKRILVTSMKTDPEYWNKAPRRQCCEVMEGKVGKRKEKEMLLRIRKCRSLEKI

SEQ ID NO: 30705 - protein, 482 aa, Arabidopsis thaliana
  peptide (1)..(482): Ceres Seq. ID no. 12639123
MPERPRDYLVLFTRFSVLTCLIVSVSLVLRATFLSPSARDYSTTYGLKLTAVPQKAIALPPSASVGPTNISHIFFSIAGAAETWIDRSQYISLWWRNTTRGFVWLDEPVKIPENHSDVRFSIPTRVSDPGWTRFKFSSSRAAVRIARIIWDSYRLNLPNVRWFVMGDDDTVFFTENLVKVLSKYDHEQMWYIGGNSESVEQDVMHAYDMAFGGGGFALSRPLAARLAAAMDDCLQRYFYFYGSDQRIASCISEIGVPFTEERGFHQLDIRGDPYGFLAAHPLAPLVSLHHLVYLDPMFPNKNPIESLQTLMKPYTLDPNRILQQINCHDRKRQWSISISWGYTIQIYTYFLTATELTTPLQTFKTWRSSSDGPFVFNTRPLKPDPCERPVTYFMDGAEDVRDSGTKTWYSIGDKNYGHCGKIEHTRLTKVKRILVTSMKTDPEYWNKAPRRQCCEVMEGKVGKRKEKEMLLRIRKCRSLEKI

SEQ ID NO: 30706 - protein, 318 aa, Arabidopsis thaliana
  peptide (1)..(318): Ceres Seq. ID no. 12639124
MGDDDTVFFTENLVKVLSKYDHEQMWYIGGNSESVEQDVMHAYDMAFGGGGFALSRPLAARLAAAMDDCLQRYFYFYGSDQRIASCISEIGVPFTEERGFHQLDIRGDPYGFLAAHPLAPLVSLHHLVYLDPMFPNKNPIESLQTLMKPYTLDPNRILQQINCHDRKRQWSISISWGYTIQIYTYFLTATELTTPLQTFKTWRSSSDGPFVFNTRPLKPDPCERPVTYFMDGAEDVRDSGTKTWYSIGDKNYGHCGKIEHTRLTKVKRILVTSMKTDPEYWNKAPRRQCCEVMEGKVGKRKEKEMLLRIRKCRSLEKI

SEQ ID NO: 30707 - DNA, 1833 bp, Arabidopsis thaliana
  misc_feature (1)..(1833): Ceres Seq. ID no. 13509854
  misc_feature (1)..(1833): Ortholog of  Ceres SEQ ID NO 13663419 as cited in SEQ ID NO 66561
gtaaataaaacaaaatgcttttaggatactaaataagtaactttttaatatttttgatccacgatttgtttagtagacaaacaaggcaactatataagtaacatcatcgtttcttcaatcccataacccaaaaattctctcacagaaaaccaaaaaaaaaatggactccaaaacaacttttctcacatttctcctctgtattttcattttctctcatttttcaccctcaacttccaaatctctgacagaaaagcccttatctttctcaccgtcggcgagtttgccgactctcacggcggagagacttatcaaaggattcaatttgatgcctacacgcgacgtcaatgtcatcgatgaagaaggttctgaggctccgagactggtcgagagagcattcgatttgccggcggcggttgaccgtcgtggctccggtggttctccgtcggttcaagattttggtcaccatgctggttactacaaactccctaactcaaaagcagcaaggatgttctactttttcttcgagtcaaggacgaacaaagccgatccagtggtgatttggctaaccggtggaccaggttgcagtagtgaactggctctgttctacgagaacggaccgttcaccgtctctaacaactcatctctttcttggaacgaatttggttgggacaaggcatcaaatctaatctacgtggaccaaccggtaggaactggtttcagttacacatcggaccaaagcgatcttcgtcatgacgaggatggtgtcagtaatgacctttatgacttcttacaggcgtttttcaaagagcatccacaatttgtgaagaatgatttttacattaccggtgaatcctacgctggacattacattccggcattggcttcacgtgttcaccgtggaaacaagaacaaagaaggaactcacattaaccttaagggttttgcgatcggtaacggtttaaccaacccggagattcaatatggtgcgtatgcggattacgcgctagacatgaatttaatcacacagtctgatcatgataacctcaaccgttattacgcaacttgtcaacaatctatcaaagaatgcagcgcggatggtggtgaaggggatgcgtgtgcttcttcttacactgtctgcaacaacattttccaaaagataatggatattgctggaaacgtaaactattatgacgtgaggaaacaatgtgaaggaagcttatgctatgatttctcgaacatggagaatttcttgaaccagaaatcggtgcggaaggcattaggtgtgggagatatcgagtttgtgtcttgcagtacagcggtctacgaagcaatgcagatggactggatgcggaatcttgaggtcgggattccagctcttcttcaagatggaattaagctccttgtttatgccggagaatacgatctcatctgcaattggctcggaaactcaaagtgggttcacgaaatggaatggtcaggccagaaagagtttgtagcagcagcgacagttccattccacgtagacaacaaagaagcgggtttaatgaagaactacggttcactcactttcctaaaggtccatgatgctggacacatggttccgatggatcagccaaaggcagcattgcaaatgcttcagaactggatgcaaggaaagctcagtacacccactggtcggaccgctcatcagtaaatccaaattccgaaccggctgaattattatgtatttaggagatcaatattttacttttaagaaaagctaaataacatatacttgtgaattatttctatcaatacacaggaaacttcattgttaatttctaaccatcatat

SEQ ID NO: 30708 - protein, 510 aa, Arabidopsis thaliana
  peptide (1)..(510): Ceres Seq. ID no. 13509855
MDSKTTFLTFLLCIFIFSHFSPSTSKSLTEKPLSFSPSASLPTLTAERLIKGFNLMPTRDVNVIDEEGSEAPRLVERAFDLPAAVDRRGSGGSPSVQDFGHHAGYYKLPNSKAARMFYFFFESRTNKADPVVIWLTGGPGCSSELALFYENGPFTVSNNSSLSWNEFGWDKASNLIYVDQPVGTGFSYTSDQSDLRHDEDGVSNDLYDFLQAFFKEHPQFVKNDFYITGESYAGHYIPALASRVHRGNKNKEGTHINLKGFAIGNGLTNPEIQYGAYADYALDMNLITQSDHDNLNRYYATCQQSIKECSADGGEGDACASSYTVCNNIFQKIMDIAGNVNYYDVRKQCEGSLCYDFSNMENFLNQKSVRKALGVGDIEFVSCSTAVYEAMQMDWMRNLEVGIPALLQDGIKLLVYAGEYDLICNWLGNSKWVHEMEWSGQKEFVAAATVPFHVDNKEAGLMKNYGSLTFLKVHDAGHMVPMDQPKAALQMLQNWMQGKLSTPTGRTAHQ

SEQ ID NO: 30709 - protein, 455 aa, Arabidopsis thaliana
  peptide (1)..(455): Ceres Seq. ID no. 13509856
MPTRDVNVIDEEGSEAPRLVERAFDLPAAVDRRGSGGSPSVQDFGHHAGYYKLPNSKAARMFYFFFESRTNKADPVVIWLTGGPGCSSELALFYENGPFTVSNNSSLSWNEFGWDKASNLIYVDQPVGTGFSYTSDQSDLRHDEDGVSNDLYDFLQAFFKEHPQFVKNDFYITGESYAGHYIPALASRVHRGNKNKEGTHINLKGFAIGNGLTNPEIQYGAYADYALDMNLITQSDHDNLNRYYATCQQSIKECSADGGEGDACASSYTVCNNIFQKIMDIAGNVNYYDVRKQCEGSLCYDFSNMENFLNQKSVRKALGVGDIEFVSCSTAVYEAMQMDWMRNLEVGIPALLQDGIKLLVYAGEYDLICNWLGNSKWVHEMEWSGQKEFVAAATVPFHVDNKEAGLMKNYGSLTFLKVHDAGHMVPMDQPKAALQMLQNWMQGKLSTPTGRTAHQ

SEQ ID NO: 30710 - protein, 395 aa, Arabidopsis thaliana
  peptide (1)..(395): Ceres Seq. ID no. 13509857
MFYFFFESRTNKADPVVIWLTGGPGCSSELALFYENGPFTVSNNSSLSWNEFGWDKASNLIYVDQPVGTGFSYTSDQSDLRHDEDGVSNDLYDFLQAFFKEHPQFVKNDFYITGESYAGHYIPALASRVHRGNKNKEGTHINLKGFAIGNGLTNPEIQYGAYADYALDMNLITQSDHDNLNRYYATCQQSIKECSADGGEGDACASSYTVCNNIFQKIMDIAGNVNYYDVRKQCEGSLCYDFSNMENFLNQKSVRKALGVGDIEFVSCSTAVYEAMQMDWMRNLEVGIPALLQDGIKLLVYAGEYDLICNWLGNSKWVHEMEWSGQKEFVAAATVPFHVDNKEAGLMKNYGSLTFLKVHDAGHMVPMDQPKAALQMLQNWMQGKLSTPTGRTAHQ

SEQ ID NO: 30711 - DNA, 1221 bp, Arabidopsis thaliana
  misc_feature (1)..(1221): Ceres Seq. ID no. 13490421
  misc_feature (1)..(1221): Ortholog of  Ceres SEQ ID NO 13598427 as cited in SEQ ID NO 60899
gaaaaccagactaaagggcagaaacgtcatttgacaaaaagaaggatgattctctccttcctctttccccaatgcaaagaaaaagcattatagacttttcaagttttccgatataggcacgaaatcgctatttctctcttcgacgaagctttgataatttgatctcaatcgatcgattctattgagaatttgtgtacctgttttcttataaggttaactaaggattgtggaatcagaagtgttgtgtttttgtgatcggagattatggattggggaaacgtaacggttgatgatctcttcgatgctctccgagaagttgactggtcgtctccgccgcgtcctccgtctgagttcttctcaaggttcaccgttcctaaatctgtccctaaatgggatagtcgcctcaagtgcaatctctactactaccgaacaaactatttcatcatgatcgtcgttatacttggattgggagtccttacaaggcctttagcgatcttcgctgcgcttttgacagcattaagtttggcatttctaaatgacagctttgcaggttcttttagtgagaaggcgacacgaaccgtcagaagattctctccacagttagctgctaaaatgagacctcctttgacacctgtcactcgtgggcgtccatcatcaaagagagcaatccatgtatgtggtcaaccccgttgggtttttgtcttgacatgctcacttgtgagttttgctctttggtatatttcctctggtttgctcagagtctcggttgcgctactcattgcacatcttgcaacaattcttcatgcaagcttgagaacaccgaacttgaaggcacgttttaacacatttagggaggaattccgagcagtatggcgtaactacagcgagatttagagtaattctttggcagcttgtaccaccatgatcgtgttctgctgaggacataacgctgtaaagaccaaacttactgcctttctccaagataaacccggtttcgttaacactgtactatggatgttcaatctggatttgttgctcaatgactgggatcatctgttttttctttgatttgagatttgagctctgagctctttttgctagcaaaatcctctctttttttttttgctaaagacttgtaaagctagctttgttgttcttcgttctaacacaaaaccctttgtgtaaagtcctagaatcgtttaatagcttgcatttttttcc

SEQ ID NO: 30712 - protein, 209 aa, Arabidopsis thaliana
  peptide (1)..(209): Ceres Seq. ID no. 13490422
MDWGNVTVDDLFDALREVDWSSPPRPPSEFFSRFTVPKSVPKWDSRLKCNLYYYRTNYFIMIVVILGLGVLTRPLAIFAALLTALSLAFLNDSFAGSFSEKATRTVRRFSPQLAAKMRPPLTPVTRGRPSSKRAIHVCGQPRWVFVLTCSLVSFALWYISSGLLRVSVALLIAHLATILHASLRTPNLKARFNTFREEFRAVWRNYSEI

SEQ ID NO: 30713 - protein, 149 aa, Arabidopsis thaliana
  peptide (1)..(149): Ceres Seq. ID no. 13490423
MIVVILGLGVLTRPLAIFAALLTALSLAFLNDSFAGSFSEKATRTVRRFSPQLAAKMRPPLTPVTRGRPSSKRAIHVCGQPRWVFVLTCSLVSFALWYISSGLLRVSVALLIAHLATILHASLRTPNLKARFNTFREEFRAVWRNYSEI

SEQ ID NO: 30714 - DNA, 679 bp, Arabidopsis thaliana
  misc_feature (1)..(679): Ceres Seq. ID no. 12321380
  misc_feature (1)..(679): Ortholog of  Ceres SEQ ID NO 12557737 as cited in SEQ ID NO 81
aattttatgggccttcaaattcagccgatcagaccaataaaagcttaacggattagagttttttgctcttctcatgtaatcaaatccctgcagaaaaaacacaaaaatcataaaaccctagcaatggcgacccaaccggcgaaagagtctgttcaatgtttcggaaggaagaagacggcaacagcagtcacctactgcaaacggggctcgggcatgattaagctcaacggttcgccgatcgagctttatcagccagagatcctccgattcaagatcttcgagccagtccttctcctcgggaaacaccgtttcgccggagttgacatgaggatccgtgccacgggcggtggtaacacatctcgggtctacgcaatccgtcagagtatcgctaaggccctcgttgcttactaccagaagtacgttgatgaacagtcgaagaaggagatcaaggacatcttgatgaggtacgataggactcttcttgttgcggatccgagaaggtgcgagtcgaagaagtttggtggtcctggtgctcgtgctcgtttccagaagagttaccgttagattctggtttgattttttgtttctgtatcaacgttttgggattatgatgttgaaattgtgagactttggtttctcttttgcgttttattttcaatggttattggataatgtttct

SEQ ID NO: 30715 - protein, 146 aa, Arabidopsis thaliana
  peptide (1)..(146): Ceres Seq. ID no. 12321381
MATQPAKESVQCFGRKKTATAVTYCKRGSGMIKLNGSPIELYQPEILRFKIFEPVLLLGKHRFAGVDMRIRATGGGNTSRVYAIRQSIAKALVAYYQKYVDEQSKKEIKDILMRYDRTLLVADPRRCESKKFGGPGARARFQKSYR

SEQ ID NO: 30716 - protein, 116 aa, Arabidopsis thaliana
  peptide (1)..(116): Ceres Seq. ID no. 12321382
MIKLNGSPIELYQPEILRFKIFEPVLLLGKHRFAGVDMRIRATGGGNTSRVYAIRQSIAKALVAYYQKYVDEQSKKEIKDILMRYDRTLLVADPRRCESKKFGGPGARARFQKSYR

SEQ ID NO: 30717 - protein, 79 aa, Arabidopsis thaliana
  peptide (1)..(79): Ceres Seq. ID no. 12321383
MRIRATGGGNTSRVYAIRQSIAKALVAYYQKYVDEQSKKEIKDILMRYDRTLLVADPRRCESKKFGGPGARARFQKSYR

SEQ ID NO: 30718 - DNA, 738 bp, Arabidopsis thaliana
  misc_feature (1)..(738): Ceres Seq. ID no. 12326890
  misc_feature (1)..(738): Ortholog of  Ceres SEQ ID NO 15178860 as cited in SEQ ID NO 0
atcgaacaaatcagacaaaagcctcgcatctctctctcttgggatctgaatcttcaaattgaaaacaaaaagatcacaagagaaaaaaacaaaaaaaaatgcctcatggaactcttgaagttgttcttgtcagcgccaaaggtctcgaggacgcagattttctgaataacatggatccttatgtgcaactcacttgtcggactcaagatcagaagagcaacgttgcagaaggaatggggacaactccggaatggaatgagacatttatcttcactgtctctgaaggaactacagagttaaaagcgaaaatcttcgacaaagatgtcggtacagaggatgatgcggttggtgaagcaactattccgttggagccggttttcgtggaaggaagtattccaccaactgcatacaatgtggtgaaagatgaagagtacaaaggagagatttgggtggctctctccttcaagccctcggaaaaccgaagcaggggtatggacgaggagtcctatgggggctggaaaaactctgaagcatcatactaagagaagaaaccattgtgtgtcactgtttgatttgagtcttgggaacaaaatgttgagttttcatttgaaagcgtattttttgttcagattgtttttaatgatttcataaactcgtgagatttttgattcttcttttctagaacttgttttggtaatgtttctctgtggttgttttctgagttgggcgagaagaagt

SEQ ID NO: 30719 - protein, 147 aa, Arabidopsis thaliana
  peptide (1)..(147): Ceres Seq. ID no. 12326891
MPHGTLEVVLVSAKGLEDADFLNNMDPYVQLTCRTQDQKSNVAEGMGTTPEWNETFIFTVSEGTTELKAKIFDKDVGTEDDAVGEATIPLEPVFVEGSIPPTAYNVVKDEEYKGEIWVALSFKPSENRSRGMDEESYGGWKNSEASY

SEQ ID NO: 30720 - protein, 123 aa, Arabidopsis thaliana
  peptide (1)..(123): Ceres Seq. ID no. 12326892
MDPYVQLTCRTQDQKSNVAEGMGTTPEWNETFIFTVSEGTTELKAKIFDKDVGTEDDAVGEATIPLEPVFVEGSIPPTAYNVVKDEEYKGEIWVALSFKPSENRSRGMDEESYGGWKNSEASY

SEQ ID NO: 30721 - protein, 102 aa, Arabidopsis thaliana; identical to SEQ ID NO: 29920
  peptide (1)..(102): Ceres Seq. ID no. 12326893

SEQ ID NO: 30722 - DNA, 1680 bp, Arabidopsis thaliana
  misc_feature (1)..(1680): Ceres Seq. ID no. 12343531
  misc_feature (1)..(1680): Ortholog of  Ceres SEQ ID NO 13660872 as cited in SEQ ID NO 60830
  misc_feature (1)..(1680): Ortholog of  Ceres SEQ ID NO 12616221 as cited in SEQ ID NO 63291
atttttcactcctttcctttcccccacaaactaaacaaaaaaccattcacaaaaaaaatagagagaatcatctgagagagtagtagtgatgatatgatcgcttcttctcctacaatctcagaaacctccgatcacggttttatatatcttctacaacggatacaatggagagcaccgattcttccggtggtccaccaccgccacaacctaaccttcctccaggcttccggtttcaccctaccgacgaagagcttgttgttcactacctcaaacgcaaagcagcctctgctcctttacctgtcgccatcatcgccgaagtcgatctctataaatttgatccatgggaacttcccgctaaagcatcgtttggagaacaagaatggtacttctttagtccacgagatcggaagtatccaaacggagcaagaccaaacagagcggcgacttcaggttattggaaagcgaccggtacagataaaccggtacttgcttccgacggtaaccaaaaggtgggcgtgaagaaggcactagtcttctacagtggtaaaccaccaaaaggcgttaaaagtgattggatcatgcatgagtatcgtctcatcgaaaacaaaccaaacaatcgacctcctggctgtgatttcggcaacaaaaaaaactcactcagacttgatgattgggtgttatgtagaatctacaagaagaacaacgcaagtcgacatgttgataacgataaggatcatgatatgatcgattacattttcaggaagattcctccgtctttatcaatggcggctgcttctacaggacttcaccaacatcatcataatgtctcaagatcaatgaatttcttccctggcaaattctccggtggtggttacgggattttctctgacggtggtaacacgagtatatacgacggcggtggcatgatcaacaatattggtactgactcagtagatcacgacaataacgctgacgtcgttggtttaaatcatgcttcgtcgtcaggtcctatgatgatggcgaatttgaaacgaactctcccggtgccgtattggcctgtagcagatgaggagcaagatgcatctccgagcaaacggtttcacggtgtaggaggaggaggaggagattgttcgaacatgtcttcctccatgatggaagagactccaccattgatgcaacaacaaggtggtgtgttaggagatggattattcagaacgacatcgtaccaattacccggtttaaattggtactcttcttaatcaaatgtgtttcgccgccggtgtgaagaattttccggtgacagtgaagatttttttccgattggtggggtcatttgcatgcattatataatttgagatttgtgtatatgttttgggttaattaattggtcacaggggttagaggaagaagattatttagagagcggagaagaagtgaggcaacatatagaaaacataggtttaaaaaatattactgtttgttaagtttaatgattaaatgtataaatcttatacttagatgtttatatatagtttgtatagatgcatatagtttctctcaatgctattttgagattgtattttcttgtaaaggaaatgttttaaaaaaaaaaaaaaaaaaagttgtgtaactatgtatttttcttcacatatgttgaaaatcactgatgtttttggactc

SEQ ID NO: 30723 - protein, 364 aa, Arabidopsis thaliana
  peptide (1)..(364): Ceres Seq. ID no. 12343532
MESTDSSGGPPPPQPNLPPGFRFHPTDEELVVHYLKRKAASAPLPVAIIAEVDLYKFDPWELPAKASFGEQEWYFFSPRDRKYPNGARPNRAATSGYWKATGTDKPVLASDGNQKVGVKKALVFYSGKPPKGVKSDWIMHEYRLIENKPNNRPPGCDFGNKKNSLRLDDWVLCRIYKKNNASRHVDNDKDHDMIDYIFRKIPPSLSMAAASTGLHQHHHNVSRSMNFFPGKFSGGGYGIFSDGGNTSIYDGGGMINNIGTDSVDHDNNADVVGLNHASSSGPMMMANLKRTLPVPYWPVADEEQDASPSKRFHGVGGGGGDCSNMSSSMMEETPPLMQQQGGVLGDGLFRTTSYQLPGLNWYSS

SEQ ID NO: 30724 - protein, 226 aa, Arabidopsis thaliana
  peptide (1)..(226): Ceres Seq. ID no. 12343533
MHEYRLIENKPNNRPPGCDFGNKKNSLRLDDWVLCRIYKKNNASRHVDNDKDHDMIDYIFRKIPPSLSMAAASTGLHQHHHNVSRSMNFFPGKFSGGGYGIFSDGGNTSIYDGGGMINNIGTDSVDHDNNADVVGLNHASSSGPMMMANLKRTLPVPYWPVADEEQDASPSKRFHGVGGGGGDCSNMSSSMMEETPPLMQQQGGVLGDGLFRTTSYQLPGLNWYSS

SEQ ID NO: 30725 - DNA, 931 bp, Arabidopsis thaliana
  misc_feature (1)..(931): Ceres Seq. ID no. 13490184
  misc_feature (1)..(931): Ortholog of  Ceres SEQ ID NO 15174190 as cited in SEQ ID NO 64430
aaaatttctctgccggtgttgacttcaaactctctttgattagatcggcgccaacttctaaacgcaaatgggaatcacgagaaacttgatcctgggtttggcttgtttagcctttgtctccattgctaaagctctgcctcatgaaccagaacttggctcggctcgtgtcgtcttccagactagttatggagatatcgaatttgggttctatcccactgtggcacccaagacagtggatcacatcttcaagcttgttcgtttaggaggatacaacactaatcatttcttcagggttgataaaggttttgttgctcaagttgcggatgtggcgagtggacgatcagctccaatgaatgaggagcaaaggaaagaagctgagaagaaaattgtgggagagttcagtgatgttaagcatgtcagaggtactctttccatgggaagatatgacgatccaaacagtgcacaatcttcattttcgatgcttcttggcaatgctcctcatcttgatcgccagtatgctgtgtttggtaaagttactaaaggagatgaaacattgagtaagctagaagaagttcccactcgccgcgaggggatttttgttatgccgacggagcggatcacgattttgtcgacatactattacgacactaaaatggagagctgtgaagaagagagatctgtcctgaaaagaaggcttcaagcatcttttgtggaggtcgaaagacagagaatgaagtgcttcccgtgaatgaagttaacacataagaaactgttcaacaaaagccttaaaacgccagggaacacaaaggtaaatgtatgtctagtaaaaaaactcagaatgctagacagtttatgagtggtttatcagtgtgagagattgtagttaacagtgtaaacagtttgagacattgaatcatggattgtttccttc

SEQ ID NO: 30726 - protein, 226 aa, Arabidopsis thaliana
  peptide (1)..(226): Ceres Seq. ID no. 13490185
MGITRNLILGLACLAFVSIAKALPHEPELGSARVVFQTSYGDIEFGFYPTVAPKTVDHIFKLVRLGGYNTNHFFRVDKGFVAQVADVASGRSAPMNEEQRKEAEKKIVGEFSDVKHVRGTLSMGRYDDPNSAQSSFSMLLGNAPHLDRQYAVFGKVTKGDETLSKLEEVPTRREGIFVMPTERITILSTYYYDTKMESCEEERSVLKRRLQASFVEVERQRMKCFP

SEQ ID NO: 30727 - protein, 132 aa, Arabidopsis thaliana
  peptide (1)..(132): Ceres Seq. ID no. 13490186
MNEEQRKEAEKKIVGEFSDVKHVRGTLSMGRYDDPNSAQSSFSMLLGNAPHLDRQYAVFGKVTKGDETLSKLEEVPTRREGIFVMPTERITILSTYYYDTKMESCEEERSVLKRRLQASFVEVERQRMKCFP

SEQ ID NO: 30728 - DNA, 1235 bp, Arabidopsis thaliana; identical to SEQ ID NO: 22288
  misc_feature (1)..(1235): Ceres Seq. ID no. 12324896
  misc_feature (1)..(1235): Ortholog of  Ceres SEQ ID NO 12636774 as cited in SEQ ID NO 372
  misc_feature (1)..(1235): Ortholog of  Ceres SEQ ID NO 13582350 as cited in SEQ ID NO 56734
  misc_feature (1)..(1235): Ortholog of  Ceres SEQ ID NO 12476493 as cited in SEQ ID NO 58163
  misc_feature (1)..(1235): Ortholog of  Ceres SEQ ID NO 13597295 as cited in SEQ ID NO 63743
  misc_feature (1)..(1235): Ortholog of  Ceres SEQ ID NO 12617090 as cited in SEQ ID NO 64005
  misc_feature (1)..(1235): Ortholog of  Ceres SEQ ID NO 13597233 as cited in SEQ ID NO 64370

SEQ ID NO: 30729 - protein, 329 aa, Arabidopsis thaliana; identical to SEQ ID NO: 22289
  peptide (1)..(329): Ceres Seq. ID no. 12324897

SEQ ID NO: 30730 - protein, 325 aa, Arabidopsis thaliana; identical to SEQ ID NO: 22290
  peptide (1)..(325): Ceres Seq. ID no. 12324898

SEQ ID NO: 30731 - protein, 254 aa, Arabidopsis thaliana; identical to SEQ ID NO: 22291
  peptide (1)..(254): Ceres Seq. ID no. 12324899

SEQ ID NO: 30732 - DNA, 1389 bp, Arabidopsis thaliana; identical to SEQ ID NO: 22445
  misc_feature (1)..(1389): Ceres Seq. ID no. 12394789
  misc_feature (1)..(1389): Ortholog of  Ceres SEQ ID NO 13502952 as cited in SEQ ID NO 62271
  misc_feature (1)..(1389): Ortholog of  Ceres SEQ ID NO 13502973 as cited in SEQ ID NO 68052
  misc_feature (1)..(1389): Ortholog of  Ceres SEQ ID NO 13596000 as cited in SEQ ID NO 68188

SEQ ID NO: 30733 - protein, 387 aa, Arabidopsis thaliana; identical to SEQ ID NO: 22446
  peptide (1)..(387): Ceres Seq. ID no. 12394790

SEQ ID NO: 30734 - protein, 373 aa, Arabidopsis thaliana; identical to SEQ ID NO: 22447
  peptide (1)..(373): Ceres Seq. ID no. 12394791

SEQ ID NO: 30735 - protein, 214 aa, Arabidopsis thaliana; identical to SEQ ID NO: 22448
  peptide (1)..(214): Ceres Seq. ID no. 12394792

SEQ ID NO: 30736 - DNA, 722 bp, Arabidopsis thaliana
  misc_feature (1)..(722): Ceres Seq. ID no. 12332196
  misc_feature (1)..(722): Ortholog of  Ceres SEQ ID NO 12624105 as cited in SEQ ID NO 61361
  misc_feature (1)..(722): Ortholog of  Ceres SEQ ID NO 14309166 as cited in SEQ ID NO 0
aaaatgagtggataatacaaccactgaatctgttttgctttagttggaagcattaagagaacagccatggcttcttcttcaatctcattctcctgtgcaccttctttggccacctcactcttctccaccacttcttcttccccaaggctgctctcctctagatttctcggaacccgaaacttaaagcttcggatccgacctgccagactaggaccctccaatggttcaagaaccacttgctggttcaagttcggcaagaatggtgtcgatgctgaaaatgccggaatctatggcagccagtctcgagatgatttcgacagagacgacgtcgaacagtatttcaactacatgggtatgcttgcagtagaaggaacctattcaaagatggaagctcttcttaacctaaacattcacccagttgatatcttgttgatgttagccgctacagaaggtgacagacctaagatcgaggagcttctcaaagccggtgctgattattcggtcaaggacgctgatggaagaaccgctatcgacagagccaacagtgaagagatccgtgatttgatccttggctactcgactcaaaaggcttgactccgcttggttttaatacacaggaacaacacaagttatgttcttgagttttgaaatgtttgtgtttgctagaacaaactgtctttctgtgttccgcggatgagtagattataaaatccatcttctcc

SEQ ID NO: 30737 - protein, 175 aa, Arabidopsis thaliana
  peptide (1)..(175): Ceres Seq. ID no. 12332197
MASSSISFSCAPSLATSLFSTTSSSPRLLSSRFLGTRNLKLRIRPARLGPSNGSRTTCWFKFGKNGVDAENAGIYGSQSRDDFDRDDVEQYFNYMGMLAVEGTYSKMEALLNLNIHPVDILLMLAATEGDRPKIEELLKAGADYSVKDADGRTAIDRANSEEIRDLILGYSTQKA

SEQ ID NO: 30738 - DNA, 780 bp, Arabidopsis thaliana
  misc_feature (1)..(780): Ceres Seq. ID no. 12334285
  misc_feature (1)..(780): Ortholog of  Ceres SEQ ID NO 13598227 as cited in SEQ ID NO 61591
  misc_feature (1)..(780): Ortholog of  Ceres SEQ ID NO 12584790 as cited in SEQ ID NO 62648
  misc_feature (1)..(780): Ortholog of  Ceres SEQ ID NO 13545965 as cited in SEQ ID NO 67378
agatagagaaaggaaatcgaattaaaatcttcgtcagattcgagagacgacgacgacgaacttgttgttctcgattatcatcagcagctcccttcaaaaaccctaactctctgagctcgatcgacaagtgataatggccaacagtaatttgccgcgaagaatcatcaaggaaactcaacgtctgctcagtgaaccggctcccggtataagtgcctctccatctgaggataatatgcggtatttcaacgttatgattcttggtcctacacaatcaccttatgaaggaggagttttcaagttggagctctttttgcctgaagaataccctatggcagctcccaaggttaggtttctcacaaagatataccatcctaacattgacaagcttggaagaatctgtcttgatattctcaaggacaaatggagccctgcactacaaatacgaacagtgctcttaagtattcaagctcttctgagtgcaccaaacccagatgatccgctttctgagaacattgctaagcactggaagagtaatgaggcagaagctgtggatacagctaaggaatggacccgtctttatgcaagcggcgcatgataaattggagggtgaaaactgaaaagatctctttcatccaaataacattacatttgctgaaatctatctcaacatcaaagttataagaaagcttatattttgctggttatttccccccgccactgctctgtaatctctcttaatcacactgtatcattactcctaggatcaatactcgttcttat

SEQ ID NO: 30739 - protein, 153 aa, Arabidopsis thaliana
  peptide (1)..(153): Ceres Seq. ID no. 12334286
MANSNLPRRIIKETQRLLSEPAPGISASPSEDNMRYFNVMILGPTQSPYEGGVFKLELFLPEEYPMAAPKVRFLTKIYHPNIDKLGRICLDILKDKWSPALQIRTVLLSIQALLSAPNPDDPLSENIAKHWKSNEAEAVDTAKEWTRLYASGA

SEQ ID NO: 30740 - protein, 120 aa, Arabidopsis thaliana
  peptide (1)..(120): Ceres Seq. ID no. 12334287
MRYFNVMILGPTQSPYEGGVFKLELFLPEEYPMAAPKVRFLTKIYHPNIDKLGRICLDILKDKWSPALQIRTVLLSIQALLSAPNPDDPLSENIAKHWKSNEAEAVDTAKEWTRLYASGA

SEQ ID NO: 30741 - protein, 114 aa, Arabidopsis thaliana
  peptide (1)..(114): Ceres Seq. ID no. 12334288
MILGPTQSPYEGGVFKLELFLPEEYPMAAPKVRFLTKIYHPNIDKLGRICLDILKDKWSPALQIRTVLLSIQALLSAPNPDDPLSENIAKHWKSNEAEAVDTAKEWTRLYASGA

SEQ ID NO: 30742 - DNA, 1235 bp, Arabidopsis thaliana
  misc_feature (1)..(1235): Ceres Seq. ID no. 13490261
  misc_feature (1)..(1235): Ortholog of  Ceres SEQ ID NO 12615217 as cited in SEQ ID NO 62470
aaacagagcaagctttccttcttatcccgaacaattcggtctgcttcgtctccctccctttcaattttcgtagacgaaccaacgaaaggtcttttctagtctagtcacttcacttctacggctactgccatggcggcttctttctcttccactgctcccacgacaccggttcttcgattcagagccaactactccaagcctctcctctctctcccagattcgtgtttgaggataatctcttcggcgatatctccctctacacgcttaattgcgtgttcgttcaagacagacaagcttccgctcggtgccggcgtcaatctctccggtggccccgttgtcaagcgctctctacagaagagattggtgataaggtctgctactattgaagaaatagaagcagagaagtctgctattgagactgatgttaaatcaaagatggagaagactattgaaacgcttcggacgagtttcaactccataaggactgggagatccaatgcagcgatgcttgacaagattgaggtggaatactatggaagtccagtaagtttgaaaagcatagcccaaatcagtactccggatggaagttctcttttgctgcaaccatatgacaaatccagcttgaaggctatagagaaagccattgtgaattctgatcttggtgtgacccctaataacgatggagatgttattcgactgtccttgcctcccctcacatctgacagaagaaaggaactatcaaaggttgttgctaaacagtctgaagaagggaaggttgcactgaggaacattaggagagatgccttgaaatcttatgataaactcgagaaggagaagaagctgtcagaagacaacgtgaaggatttgtcaagtgatttgcagaaactaattgatgtatacatgaagaagatagaggagctctacaaacagaaagaaaaggaattgatgaaggtgtgaccataatggttgttaggggaggagacgtaattcaacaatctggtaaaatcccgcaatttccaatgccttcgtttcttttactatttgccctgatgtttccttggggtacaagcatgtcttttgggaattgagagcaactttgtttaaattttcggttgcaaaatttttagaagaagcctctgatattttgtttcttttattaaaggatccctctttgtacagcaaaactcttgttaattttggttcatcaccccaattatcaaatcttatttttggct

SEQ ID NO: 30743 - protein, 275 aa, Arabidopsis thaliana
  peptide (1)..(275): Ceres Seq. ID no. 13490262
MAASFSSTAPTTPVLRFRANYSKPLLSLPDSCLRIISSAISPSTRLIACSFKTDKLPLGAGVNLSGGPVVKRSLQKRLVIRSATIEEIEAEKSAIETDVKSKMEKTIETLRTSFNSIRTGRSNAAMLDKIEVEYYGSPVSLKSIAQISTPDGSSLLLQPYDKSSLKAIEKAIVNSDLGVTPNNDGDVIRLSLPPLTSDRRKELSKVVAKQSEEGKVALRNIRRDALKSYDKLEKEKKLSEDNVKDLSSDLQKLIDVYMKKIEELYKQKEKELMKV

SEQ ID NO: 30744 - protein, 173 aa, Arabidopsis thaliana
  peptide (1)..(173): Ceres Seq. ID no. 13490263
MEKTIETLRTSFNSIRTGRSNAAMLDKIEVEYYGSPVSLKSIAQISTPDGSSLLLQPYDKSSLKAIEKAIVNSDLGVTPNNDGDVIRLSLPPLTSDRRKELSKVVAKQSEEGKVALRNIRRDALKSYDKLEKEKKLSEDNVKDLSSDLQKLIDVYMKKIEELYKQKEKELMKV

SEQ ID NO: 30745 - protein, 150 aa, Arabidopsis thaliana
  peptide (1)..(150): Ceres Seq. ID no. 13490264
MLDKIEVEYYGSPVSLKSIAQISTPDGSSLLLQPYDKSSLKAIEKAIVNSDLGVTPNNDGDVIRLSLPPLTSDRRKELSKVVAKQSEEGKVALRNIRRDALKSYDKLEKEKKLSEDNVKDLSSDLQKLIDVYMKKIEELYKQKEKELMKV

SEQ ID NO: 30746 - DNA, 1298 bp, Arabidopsis thaliana
  misc_feature (1)..(1298): Ceres Seq. ID no. 12370642
  misc_feature (1)..(1298): Ortholog of  Ceres SEQ ID NO 13594298 as cited in SEQ ID NO 57803
  misc_feature (1)..(1298): Ortholog of  Ceres SEQ ID NO 13503476 as cited in SEQ ID NO 61978
  misc_feature (1)..(1298): Ortholog of  Ceres SEQ ID NO 12578438 as cited in SEQ ID NO 62201
  misc_feature (1)..(1298): Ortholog of  Ceres SEQ ID NO 12617675 as cited in SEQ ID NO 64656
ctctctctctctctctctctttcaatacagctccaaaactcgtcctcaagacgctatttatccatttaagtctcttctcttttcgtcctcataatactcttatacacagaaacgtttttcattcataacaaaaaatgggttttataactcgatttttagttttcatgtcactcttcaccagtttggtttctggatttgctctacaaaagcttcctcttatacagttcgacgaaggttacacacagctctttggtgaccagaatcttattgttcacagagatggaaaatctgtccggttaacgcttgatgaaagaaccggttctggatttgtctcaaatgatatttacttgcatggcttcttcagttcctctatcaaattgccagcagattactctgcaggagttgttatcgccttttatttatcaaatggggacttatatgagaagaatcatgacgagattgattttgagtttttggggaatattagaggcagagaatggaggattcagaccaatatatacggtaatggaagcacacacttgggcagagaagaaagatacaatctttggtttgatccaacagaggatttccatcaatacagtatcctttggtctctatctcacatcatattttatgtagacaatgttccgatcagagaagtcaaacgtacggcgtcgatgggcggtgacttcccggcgaagccaatgtctttatattcaaccatatgggatggttccaaatgggcgactgatggaggcaagtacggtgtaaattacaaatatgccccttacgtctctcaattcactgatctgatcctccacggctgcgccgttgaccccaccgagaagtttccgagctgcaaagatgaagcggttcagaatctccggctagcatcggagataacggagtctcagaggaacaagatggagattttccgacagaaacacatgacttattcgtattgttacgatcatatgaggtacaaggtggttttgtcggagtgtgttgtgaatccggctgaggctaagcgtctcagggtctatgatccggtcacgttcggtgggattcctcacggccaccgtcgtgggaagcatcggagcaggagccgattagctcgaactgagtcgatatgaatcggtgtatattgttcggctagagggcatttttggcattttctgtcttgtataggaatactatgaattatggactgaataatggaatgacaccgctatattttgatttcctccattttatgaacattatcgttttaacataataataaaatttcatttttctat

SEQ ID NO: 30747 - protein, 332 aa, Arabidopsis thaliana
  peptide (1)..(332): Ceres Seq. ID no. 12370643
MGFITRFLVFMSLFTSLVSGFALQKLPLIQFDEGYTQLFGDQNLIVHRDGKSVRLTLDERTGSGFVSNDIYLHGFFSSSIKLPADYSAGVVIAFYLSNGDLYEKNHDEIDFEFLGNIRGREWRIQTNIYGNGSTHLGREERYNLWFDPTEDFHQYSILWSLSHIIFYVDNVPIREVKRTASMGGDFPAKPMSLYSTIWDGSKWATDGGKYGVNYKYAPYVSQFTDLILHGCAVDPTEKFPSCKDEAVQNLRLASEITESQRNKMEIFRQKHMTYSYCYDHMRYKVVLSECVVNPAEAKRLRVYDPVTFGGIPHGHRRGKHRSRSRLARTESI

SEQ ID NO: 30748 - protein, 322 aa, Arabidopsis thaliana
  peptide (1)..(322): Ceres Seq. ID no. 12370644
MSLFTSLVSGFALQKLPLIQFDEGYTQLFGDQNLIVHRDGKSVRLTLDERTGSGFVSNDIYLHGFFSSSIKLPADYSAGVVIAFYLSNGDLYEKNHDEIDFEFLGNIRGREWRIQTNIYGNGSTHLGREERYNLWFDPTEDFHQYSILWSLSHIIFYVDNVPIREVKRTASMGGDFPAKPMSLYSTIWDGSKWATDGGKYGVNYKYAPYVSQFTDLILHGCAVDPTEKFPSCKDEAVQNLRLASEITESQRNKMEIFRQKHMTYSYCYDHMRYKVVLSECVVNPAEAKRLRVYDPVTFGGIPHGHRRGKHRSRSRLARTESI

SEQ ID NO: 30749 - DNA, 1290 bp, Arabidopsis thaliana
  misc_feature (1)..(1290): Ceres Seq. ID no. 13576771
  misc_feature (1)..(1290): Ortholog of  Ceres SEQ ID NO 13597533 as cited in SEQ ID NO 64942
aagcaaataattacgagattagcctcgcactgaacttcaattctctctttccttttttccgttcgatgagagcttaagctctgccgcgttttcgttctccgatctttttccatttttatcagtttcttctcttccaaattagggtttttcttttcagtctttgggaatgattttgatgcggtgaaaaagttttttttttttgagggggaaggatttctgggtttgctcttagggttttgtcttttcaatcgccggagcctgaaataatccggcagatatggcgtctgaattgccgatgagccctcatttggagcagattcacggagaaatccgtgaccatttccgagccctcgcgaatggcttccagaggttggataagatcaaggattctagtagacaaagcaagcaactcgaagaacttgctgagaagatgagagactgtaaaaggttggttaaggagtttgatcgtgaactcaaagatggggaagctcgaaattctcctcaagtaaataagcaattgaatgatgagaaacaatctatgattaaggaactcaactcttatgttgcactaagaaaaacgtacttgaatacactcggcaacaagaaagttgaactttttgatactggagctggagtcagcggtgaacccacagctgaagaaaacgtccaaatggcttcaacaatgtcaaaccaagagcttgtcgatgctggaatgaaaaggatggacgagactgaccaggctattgaacgttctaaacaggttgtgcatcagacactcgaagttggcactcaaactgcatctaacttaaagggacagacggatcaaatgggccgcgttgtaaacgacctagacacaattcagttctctcttaagaaagcttcgcagctggtgaaagagataggaagacaggtagctacagataaatgcataatggcgttcctgtttctgattgtctgtggtgttatagctataatcattgtgaagatcgtgaacccaaacaacaaagacatcagagacatccctggactagctcctccagcgcaatcgagaaagctcttgtacttcagagaatagccttttggcagggccgagagggaaggtttggtgcatattacacttgctgttgcgtgtgtgttcattctttcatgaaagagggcttgtttatgtcatttaaatttgagctttcattagagttttgtatcatatatcatcattctttaacttatgaccacatgttgtataattttataccaagttcaatatattttataagatccgttttattgtcc

SEQ ID NO: 30750 - protein, 265 aa, Arabidopsis thaliana
  peptide (1)..(265): Ceres Seq. ID no. 13576772
MASELPMSPHLEQIHGEIRDHFRALANGFQRLDKIKDSSRQSKQLEELAEKMRDCKRLVKEFDRELKDGEARNSPQVNKQLNDEKQSMIKELNSYVALRKTYLNTLGNKKVELFDTGAGVSGEPTAEENVQMASTMSNQELVDAGMKRMDETDQAIERSKQVVHQTLEVGTQTASNLKGQTDQMGRVVNDLDTIQFSLKKASQLVKEIGRQVATDKCIMAFLFLIVCGVIAIIIVKIVNPNNKDIRDIPGLAPPAQSRKLLYFRE

SEQ ID NO: 30751 - protein, 259 aa, Arabidopsis thaliana
  peptide (1)..(259): Ceres Seq. ID no. 13576773
MSPHLEQIHGEIRDHFRALANGFQRLDKIKDSSRQSKQLEELAEKMRDCKRLVKEFDRELKDGEARNSPQVNKQLNDEKQSMIKELNSYVALRKTYLNTLGNKKVELFDTGAGVSGEPTAEENVQMASTMSNQELVDAGMKRMDETDQAIERSKQVVHQTLEVGTQTASNLKGQTDQMGRVVNDLDTIQFSLKKASQLVKEIGRQVATDKCIMAFLFLIVCGVIAIIIVKIVNPNNKDIRDIPGLAPPAQSRKLLYFRE

SEQ ID NO: 30752 - protein, 214 aa, Arabidopsis thaliana
  peptide (1)..(214): Ceres Seq. ID no. 13576774
MRDCKRLVKEFDRELKDGEARNSPQVNKQLNDEKQSMIKELNSYVALRKTYLNTLGNKKVELFDTGAGVSGEPTAEENVQMASTMSNQELVDAGMKRMDETDQAIERSKQVVHQTLEVGTQTASNLKGQTDQMGRVVNDLDTIQFSLKKASQLVKEIGRQVATDKCIMAFLFLIVCGVIAIIIVKIVNPNNKDIRDIPGLAPPAQSRKLLYFRE

SEQ ID NO: 30753 - DNA, 1293 bp, Arabidopsis thaliana
  misc_feature (1)..(1293): Ceres Seq. ID no. 13489292
  misc_feature (1)..(1293): Ortholog of  Ceres SEQ ID NO 14311001 as cited in SEQ ID NO 53717
  misc_feature (1)..(1293): Ortholog of  Ceres SEQ ID NO 13595833 as cited in SEQ ID NO 59877
  misc_feature (1)..(1293): Ortholog of  Ceres SEQ ID NO 13654452 as cited in SEQ ID NO 65792
  misc_feature (1)..(1293): Ortholog of  Ceres SEQ ID NO 13573778 as cited in SEQ ID NO 0
tggtactttcacatttctctgtaataaactcggtaggtttgcgaaaacctcgccgccgggaaaaaaaaaaatcaatggaaggaggaggaagaggaccaaatcaaacgattctcagtgaaatagaacatatgcctgaagctccacgtcaacgtatctctcatcaccgtcgagctcgctctgaaaccttcttctccggcgaatcaatcgacgatctcctcttattcgatccttccgatatcgatttctcttctctagacttcctcaacgctccaccaccaccacaacaatcacaacaacaaccgcaagcttctcccatgtccgttgattcggaagaaacctcatcgaacggtgttgttcctcctaattctcttcctccaaaacccgaagctagattcggtcgccatgttcgtagcttctcggttgattccgatttcttcgatgatttgggtgttactgaggagaagtttatagctacaagttcaggagagaagaagaaagggaatcatcatcatagcaggagtaattctatggatggagagatgagttcggcgtcgtttaatatcgaatcgattttagcttctgtgagtggtaaagatagtgggaagaagaatatgggtatgggtggtgatagacttgctgagcttgctttgcttgatcctaaaagagctaaaaggattttagcgaatagacaatctgcggcgaggtcgaaagagaggaagattaggtatactggtgagttagagaggaaggttcagacacttcagaatgaagctactacattgtctgctcaagtcactatgttacagagaggaacatcagagctgaacactgaaaataaacacctcaaaatgcggcttcaagctttagagcaacaagctgaacttagggatgctttgaatgaagcgctgcgggatgaactgaaccgacttaaggtggtagctggagaaattcctcaggggaatggaaattcttacaaccgtgctcaattctcatctcagcaatcggcaatgaatcagtttgggaacaaaacgaaccaacagatgagtacaaacgggcagccatcgctcccaagctacatggatttcaccaagagaggctgagttcgtgtcacctatatatgtttgctgagttataaatacgttatattcatttcgggctgcaatatttgatgtatgtaaaaagtatgtatgtatccatgtataatggcttttgtgttgttagcgtctatgcagatatgttcatggcgacatcggtctatctttacaagtagtatccattgtaatatactacccc

SEQ ID NO: 30754 - protein, 365 aa, Arabidopsis thaliana
  peptide (1)..(365): Ceres Seq. ID no. 13489293
VLSHFSVINSVGLRKPRRREKKKSMEGGGRGPNQTILSEIEHMPEAPRQRISHHRRARSETFFSGESIDDLLLFDPSDIDFSSLDFLNAPPPPQQSQQQPQASPMSVDSEETSSNGVVPPNSLPPKPEARFGRHVRSFSVDSDFFDDLGVTEEKFIATSSGEKKKGNHHHSRSNSMDGEMSSASFNIESILASVSGKDSGKKNMGMGGDRLAELALLDPKRAKRILANRQSAARSKERKIRYTGELERKVQTLQNEATTLSAQVTMLQRGTSELNTENKHLKMRLQALEQQAELRDALNEALRDELNRLKVVAGEIPQGNGNSYNRAQFSSQQSAMNQFGNKTNQQMSTNGQPSLPSYMDFTKRG

SEQ ID NO: 30755 - protein, 341 aa, Arabidopsis thaliana
  peptide (1)..(341): Ceres Seq. ID no. 13489294
MEGGGRGPNQTILSEIEHMPEAPRQRISHHRRARSETFFSGESIDDLLLFDPSDIDFSSLDFLNAPPPPQQSQQQPQASPMSVDSEETSSNGVVPPNSLPPKPEARFGRHVRSFSVDSDFFDDLGVTEEKFIATSSGEKKKGNHHHSRSNSMDGEMSSASFNIESILASVSGKDSGKKNMGMGGDRLAELALLDPKRAKRILANRQSAARSKERKIRYTGELERKVQTLQNEATTLSAQVTMLQRGTSELNTENKHLKMRLQALEQQAELRDALNEALRDELNRLKVVAGEIPQGNGNSYNRAQFSSQQSAMNQFGNKTNQQMSTNGQPSLPSYMDFTKRG

SEQ ID NO: 30756 - protein, 323 aa, Arabidopsis thaliana
  peptide (1)..(323): Ceres Seq. ID no. 13489295
MPEAPRQRISHHRRARSETFFSGESIDDLLLFDPSDIDFSSLDFLNAPPPPQQSQQQPQASPMSVDSEETSSNGVVPPNSLPPKPEARFGRHVRSFSVDSDFFDDLGVTEEKFIATSSGEKKKGNHHHSRSNSMDGEMSSASFNIESILASVSGKDSGKKNMGMGGDRLAELALLDPKRAKRILANRQSAARSKERKIRYTGELERKVQTLQNEATTLSAQVTMLQRGTSELNTENKHLKMRLQALEQQAELRDALNEALRDELNRLKVVAGEIPQGNGNSYNRAQFSSQQSAMNQFGNKTNQQMSTNGQPSLPSYMDFTKRG

SEQ ID NO: 30757 - DNA, 1430 bp, Arabidopsis thaliana
  misc_feature (1)..(1430): Ceres Seq. ID no. 12422339
  misc_feature (1)..(1430): Ortholog of  Ceres SEQ ID NO 14302287 as cited in SEQ ID NO 68134
  misc_feature (1)..(1430): Ortholog of  Ceres SEQ ID NO 14309328 as cited in SEQ ID NO 0
aaagaaaccaaaagagtaaaacaaacacagagaagcttcttcttaaacgatgccgtactataccagagatgacaacgacgtcgacgatttcgatgagtttgatccaacgccgtacagtggtggttacgacatcacggtgatctacggccgtccgattccaccttccgatgagacttgttatcctctctcatctggtgtcgatgatgatttcgaatacgagagacctgaatttactcagatccatgagccttctgcttacggtgatgaagctcttaacacagagtacagtagctattctcgacccaagccacgacccgcatttcgacccgatcctggttatggatctgaatccggttatgggaggaaaccggaatctgagtacggatctggctatggtggacaaacggaggtggagtatggtcggagacctgagcagagttatggatctggttatggtggaaggacggagactgaatcggagtatggatctggtggtggtggaagaactgaggttgagtatggtaggagacctgaatcagggcttggatctggttatggtgggagatcggagtctgagtatgagcgtaagcctagctatggaaggtctgaggaacaagaagaaggttataggaagcctagctatggaagatctgaagaacaggaggaaggttacaggaagccaagttatggaagatctgaggagcaggaagaaggatatagaaagcctagctatggaagatctgaggaggaacaagaggaaggttataggaagcctagctatggaagatctgaggaacaagaggaaggaagttacaggaaacctagttatgggaggtctgatgatcaggtggagagttacattaagcctagctatggaagatctgaggaacaggaggagggaagttacaggaagcctagttatgggaggtctgaggaacaggaagaggggagttacaggaagcagcctagctatggccgtggcaatgacgatgatgatgatgagcagcgtaggaaccgttctggttctggtgatgatgaggaagggagctatggccgcaagaaatatggtggcaatgactctgatgaggatgaggagaagaagaagcaccgtcacaagcatcaccaccagaagcgtcgtgacgaagacgatgagtaaactaaaccctctctgtgctagagagtgtaatgagaatgtgtgtttgcttagcctcaaaaatctactaaataaagagctaagtcacatacctttctacataatatcttccgacgttggtgttgtgtttgtttgaatctctgtattattactacagagtcttcgtactggttcataataagacctttaagtggtattgggtcaccatgtaactgttgctactctgtttcgttttctatctatcgttttgtgttatgatttacttttctatccttat

SEQ ID NO: 30758 - protein, 373 aa, Arabidopsis thaliana
  peptide (1)..(373): Ceres Seq. ID no. 12422340
MRLVILSHLVSMMISNTRDLNLLRSMSLLLTVMKLLTQSTVAILDPSHDPHFDPILVMDLNPVMGGNRNLSTDLAMVDKRRWSMVGDLSRVMDLVMVEGRRLNRSMDLVVVEELRLSMVGDLNQGLDLVMVGDRSLSMSVSLAMEGLRNKKKVIGSLAMEDLKNRRKVTGSQVMEDLRSRKKDIESLAMEDLRRNKRKVIGSLAMEDLRNKRKEVTGNLVMGGLMIRWRVTLSLAMEDLRNRRREVTGSLVMGGLRNRKRGVTGSSLAMAVAMTMMMMSSVGTVLVLVMMRKGAMAARNMVAMTLMRMRRRRSTVTSITTRSVVTKTMSKLNPLCARECNENVCLLSLKNLLNKELSHIPFYIISSDVGVVFV

SEQ ID NO: 30759 - protein, 368 aa, Arabidopsis thaliana
  peptide (1)..(368): Ceres Seq. ID no. 12422341
MPYYTRDDNDVDDFDEFDPTPYSGGYDITVIYGRPIPPSDETCYPLSSGVDDDFEYERPEFTQIHEPSAYGDEALNTEYSSYSRPKPRPAFRPDPGYGSESGYGRKPESEYGSGYGGQTEVEYGRRPEQSYGSGYGGRTETESEYGSGGGGRTEVEYGRRPESGLGSGYGGRSESEYERKPSYGRSEEQEEGYRKPSYGRSEEQEEGYRKPSYGRSEEQEEGYRKPSYGRSEEEQEEGYRKPSYGRSEEQEEGSYRKPSYGRSDDQVESYIKPSYGRSEEQEEGSYRKPSYGRSEEQEEGSYRKQPSYGRGNDDDDDEQRRNRSGSGDDEEGSYGRKKYGGNDSDEDEEKKKHRHKHHHQKRRDEDDE

SEQ ID NO: 30760 - protein, 362 aa, Arabidopsis thaliana
  peptide (1)..(362): Ceres Seq. ID no. 12422342
MMISNTRDLNLLRSMSLLLTVMKLLTQSTVAILDPSHDPHFDPILVMDLNPVMGGNRNLSTDLAMVDKRRWSMVGDLSRVMDLVMVEGRRLNRSMDLVVVEELRLSMVGDLNQGLDLVMVGDRSLSMSVSLAMEGLRNKKKVIGSLAMEDLKNRRKVTGSQVMEDLRSRKKDIESLAMEDLRRNKRKVIGSLAMEDLRNKRKEVTGNLVMGGLMIRWRVTLSLAMEDLRNRRREVTGSLVMGGLRNRKRGVTGSSLAMAVAMTMMMMSSVGTVLVLVMMRKGAMAARNMVAMTLMRMRRRRSTVTSITTRSVVTKTMSKLNPLCARECNENVCLLSLKNLLNKELSHIPFYIISSDVGVVFV

SEQ ID NO: 30761 - DNA, 1280 bp, Arabidopsis thaliana
  misc_feature (1)..(1280): Ceres Seq. ID no. 12323503
  misc_feature (1)..(1280): Ortholog of  Ceres SEQ ID NO 14313097 as cited in SEQ ID NO 58902
agaaacaccaaaccttaaaaagagctctgctttgagatcttagccattaagttctcttgatgatgtctggttcaagattagtctctagactaataataatcttctcaataatctccacatctttcctcaccgttgaatcgattcgattactccccgattcgttcgaagatgcatcttcagatttcatggaagctccagcatatcaaaacggtcttgaatgctctgttttagccaaaaacagactcttgttagcttgtgatccatcagctgttcatatagctatgactctagatccagcttacttgcgtggcacggtatctgcagtacattccatcctcaaacacacttcttgccctgaaaacatcttcttccacttcattgcttcgggtacaagtcagggttcgctcgccaagaccctatcctctgtttttccttctttgagtttcaaagtctatacctttgatgaaactatagtaaagaatctaatctcttcatctataagacaagctcttgatagtcctttgaattacgcaagaagctacttatccgagatcctttctttgtgtgttagtcgagtgatatatctcgattcggatgtgattgtggtcaatgatattcagaaactatggaagatttctttatccgggtcaagaacaatcggtgcaccagagtattgccacgcaaatttcaccaaatacttcacagatagcttctggtccgatcgaaaactctcgagcgtcttcgattccaagactccttgttatttcaacacaggagtgatggttattgatttagagcggtggagagaaggagattacacgagaaagatcgaaaactggatgaagattcagaaagaagataagagaatctacgaattgggttctttaccaccgtttcttctagtgtttggtggtgatattgaagctattgatcatcaatggaaccaacacggtctcggtggagacaacattgtgagtagttgtagatctttgcatcctggtccggttagtttgatacattggagtggtaaagggaagccatgggttaggcttgatgatggtaagccttgtccaattgattatctttgggctccttatgatcttcacaagtcacagaggcagtatcttcaatacaatcaagagttagaaattctttgatttattcattttttggggttttggtatggtaaattttgtgaactcattacatggattctatgttttttgttattccttttttaatgtacatacaacataaatacatcgaggattttgttcaag

SEQ ID NO: 30762 - protein, 365 aa, Arabidopsis thaliana
  peptide (1)..(365): Ceres Seq. ID no. 12323504
MMSGSRLVSRLIIIFSIISTSFLTVESIRLLPDSFEDASSDFMEAPAYQNGLECSVLAKNRLLLACDPSAVHIAMTLDPAYLRGTVSAVHSILKHTSCPENIFFHFIASGTSQGSLAKTLSSVFPSLSFKVYTFDETIVKNLISSSIRQALDSPLNYARSYLSEILSLCVSRVIYLDSDVIVVNDIQKLWKISLSGSRTIGAPEYCHANFTKYFTDSFWSDRKLSSVFDSKTPCYFNTGVMVIDLERWREGDYTRKIENWMKIQKEDKRIYELGSLPPFLLVFGGDIEAIDHQWNQHGLGGDNIVSSCRSLHPGPVSLIHWSGKGKPWVRLDDGKPCPIDYLWAPYDLHKSQRQYLQYNQELEIL

SEQ ID NO: 30763 - protein, 364 aa, Arabidopsis thaliana
  peptide (1)..(364): Ceres Seq. ID no. 12323505
MSGSRLVSRLIIIFSIISTSFLTVESIRLLPDSFEDASSDFMEAPAYQNGLECSVLAKNRLLLACDPSAVHIAMTLDPAYLRGTVSAVHSILKHTSCPENIFFHFIASGTSQGSLAKTLSSVFPSLSFKVYTFDETIVKNLISSSIRQALDSPLNYARSYLSEILSLCVSRVIYLDSDVIVVNDIQKLWKISLSGSRTIGAPEYCHANFTKYFTDSFWSDRKLSSVFDSKTPCYFNTGVMVIDLERWREGDYTRKIENWMKIQKEDKRIYELGSLPPFLLVFGGDIEAIDHQWNQHGLGGDNIVSSCRSLHPGPVSLIHWSGKGKPWVRLDDGKPCPIDYLWAPYDLHKSQRQYLQYNQELEIL

SEQ ID NO: 30764 - protein, 323 aa, Arabidopsis thaliana
  peptide (1)..(323): Ceres Seq. ID no. 12323506
MEAPAYQNGLECSVLAKNRLLLACDPSAVHIAMTLDPAYLRGTVSAVHSILKHTSCPENIFFHFIASGTSQGSLAKTLSSVFPSLSFKVYTFDETIVKNLISSSIRQALDSPLNYARSYLSEILSLCVSRVIYLDSDVIVVNDIQKLWKISLSGSRTIGAPEYCHANFTKYFTDSFWSDRKLSSVFDSKTPCYFNTGVMVIDLERWREGDYTRKIENWMKIQKEDKRIYELGSLPPFLLVFGGDIEAIDHQWNQHGLGGDNIVSSCRSLHPGPVSLIHWSGKGKPWVRLDDGKPCPIDYLWAPYDLHKSQRQYLQYNQELEIL

SEQ ID NO: 30765 - DNA, 1608 bp, Arabidopsis thaliana
  misc_feature (1)..(1608): Ceres Seq. ID no. 12340059
  misc_feature (1)..(1608): Ortholog of  Ceres SEQ ID NO 14316049 as cited in SEQ ID NO 67036
  misc_feature (1)..(1608): Ortholog of  Ceres SEQ ID NO 14313252 as cited in SEQ ID NO 67134
ataagccaagcaaagggggttttagggtttttgaccgcgagccagatctctttctcttgtttctcccacttccgaatcaatggccttctcttctctcctcagatctgccgcctcctatacggttgccgctcctcgccctgactttttctcgtcgccggcgtctgatcattctaaggtgttgtcaagtcttggatttagtcgcaacctgaagccatcaagattttcttctgggatatcttcatctctacaaaatggcaatgcaagaagtgtgcaacccatcaaggccacggctacagaagtgccatctgcagttcgaaggtcaagtagcagtggaaagacaaaggttgggatcaacggttttggtcggattggaaggttggtcctccgcattgcaacatcaagggatgatattgaggttgtagcagtgaatgacccattcattgatgccaagtacatggcttacatgttgaagtatgattctactcatggaaatttcaagggaagcatcaatgtcattgatgattctactttggagatcaatgggaagaaggtcaatgttgtcagcaagagagatccatctgagatcccatgggctgatcttggagctgattatgttgttgagtcttccggtgtattcaccaccctgtcaaaggctgcatcccatttgaagggcggtgccaagaaagttataatttctgccccttctggctgacgcacctatgtttgttgttggagtaaacgagcacacataccaaccaaacatggatatagtctccaatgcaagttgtaccaccaattgtcttgcccctcttgccaaggtggtacatgaggaatttggtattcttgaaggcttgatgacaactgtccacgcaactacagctactcagaaaactgttgatgggccatcaatgaaggactggagaggaggtcggggcgctagtcaaaacatcattcctagctcaaccggcgccgcgaaggctgtaggtaaagttcttccagaactgaatgggaaacttacgggaatggccttccgtgtaccaacatcgaatgtttctgtggtggatttaacttgtcgacttgagaagggtgcctcttacgaagatgttaaggcagccattaagcatgcctcagaaggacctcttaaaggcattctcgggtacacagatgaagatgtcgtctccaatgatttcgtcggtgattcaaggtccagtatctttgacgccaatgctggtattggattgagcaagtcctttgtgaaacttgtctcttggtacgacaacgaatggggttacagcaaccgagttcttgaccttatagagcacatggctttggtagctgccagccactaaatacacacaccagttcttgcagaagcttgagtctttctgctttttgcgtaacctgctctacaaagccggtttggatttgttcggttcaattaggtgccactgtgctaggtgttttgaaatatttggcttgaatctcgagcctttactctatttttgttctgttccagtatcagcaaccatggaaactagatttggtccaaaagactgaaaaactgtgcgacttacatctatgaataaggggctaagctagttgtacttt

SEQ ID NO: 30766 - protein, 210 aa, Arabidopsis thaliana
  peptide (1)..(210): Ceres Seq. ID no. 12340060
MAFSSLLRSAASYTVAAPRPDFFSSPASDHSKVLSSLGFSRNLKPSRFSSGISSSLQNGNARSVQPIKATATEVPSAVRRSSSSGKTKVGINGFGRIGRLVLRIATSRDDIEVVAVNDPFIDAKYMAYMLKYDSTHGNFKGSINVIDDSTLEINGKKVNVVSKRDPSEIPWADLGADYVVESSGVFTTLSKAASHLKGGAKKVIISAPSG

SEQ ID NO: 30767 - protein, 209 aa, Arabidopsis thaliana
  peptide (1)..(209): Ceres Seq. ID no. 12340061
MFVVGVNEHTYQPNMDIVSNASCTTNCLAPLAKVVHEEFGILEGLMTTVHATTATQKTVDGPSMKDWRGGRGASQNIIPSSTGAAKAVGKVLPELNGKLTGMAFRVPTSNVSVVDLTCRLEKGASYEDVKAAIKHASEGPLKGILGYTDEDVVSNDFVGDSRSSIFDANAGIGLSKSFVKLVSWYDNEWGYSNRVLDLIEHMALVAASH

SEQ ID NO: 30768 - protein, 195 aa, Arabidopsis thaliana
  peptide (1)..(195): Ceres Seq. ID no. 12340062
MDIVSNASCTTNCLAPLAKVVHEEFGILEGLMTTVHATTATQKTVDGPSMKDWRGGRGASQNIIPSSTGAAKAVGKVLPELNGKLTGMAFRVPTSNVSVVDLTCRLEKGASYEDVKAAIKHASEGPLKGILGYTDEDVVSNDFVGDSRSSIFDANAGIGLSKSFVKLVSWYDNEWGYSNRVLDLIEHMALVAASH

SEQ ID NO: 30769 - DNA, 1437 bp, Arabidopsis thaliana
  misc_feature (1)..(1437): Ceres Seq. ID no. 12338079
  misc_feature (1)..(1437): Ortholog of  Ceres SEQ ID NO 13639243 as cited in SEQ ID NO 56820
  misc_feature (1)..(1437): Ortholog of  Ceres SEQ ID NO 13496409 as cited in SEQ ID NO 65697
actgccgcatcttttcttagggttcttgtttcgctatctcttaaacacaaacagctctgtccgaataatctctcttcaagtacctctttttcctgattctgtatatcgccatgaattactgatttccctctctataaacccatcaaagtaaaccaatttctcctgtcacttgtacctaactcgatcttaccagactggtgatggcgtctttgaaccctttcgatcttctaggagatgatgctgaggatccaagccagctcgctgtggctttgtctcagaaagtcgagaaagctgctgctgctgttcagcctcctaaggccgctaagttcccaaccaagccggctcctccttctcaagcagtgagggagtcgaggaatgctcctcaaggaggtcgtggtgggactggtggacgtggtggattttcccgtggcaggggtaatggtggatacaaccgggacaacaggaacaatgatgctcctggaaatgagaatggattttctggaggatacaggagaccttctgaagatgctgatggagcaagccgtggtgggtctgttggtggataccgtgttggcggtggtcttgaaggacctcgccgtggtggagttgccaacggggaatctggtgatgttgaacgcccaccgaggaattatgaccgccatagcaggacaggtcatggtactggcatgaaacgtaatggtggaggtcgtggaaactggggcactactgaagatgatatccctccaacgtctgaggaacctaccacagaggttgagaagagccctgttgctgagaagcaaggaggtgaggatgaaacccctgaagcaaagaaagaactcactgcggaagagaaagcacagaaagaagctgaagaagctgaagccagggagatgactctagaagagtatgagaaaattctggaggagaagaagaaggctctgcaagccacaaaggttgaggaaaggaaagttgacaccaaagtgtttgagtccatgcaacagctctctaacaagaagaacaccgatgaagaaatcttcatcaagctgggatctgacaaggaaaaacgcaaagatgctactgagaaggccaaaaagtcgttgagcattaatgagttcttgaagccggctgatggaaagaggtacaacgggagaggtggaggctcccgcggaagaggaggtcgcggtggtcgtggtgaaggaggaaaccaaaggtatgcaaaagaagctgcagctccggcgattggagacacagctcagttcccttcgttgggctagtaaagacccctggtccttcagcctcgctatctctgtctttcgtttctctttggttgaattttgttagttttataattttttgttacactttctgaaggtcttttctgcgaaactattacgttttttaagttatgaaaaaaattattaagatatttttctctcc

SEQ ID NO: 30770 - protein, 357 aa, Arabidopsis thaliana
  peptide (1)..(357): Ceres Seq. ID no. 12338080
MASLNPFDLLGDDAEDPSQLAVALSQKVEKAAAAVQPPKAAKFPTKPAPPSQAVRESRNAPQGGRGGTGGRGGFSRGRGNGGYNRDNRNNDAPGNENGFSGGYRRPSEDADGASRGGSVGGYRVGGGLEGPRRGGVANGESGDVERPPRNYDRHSRTGHGTGMKRNGGGRGNWGTTEDDIPPTSEEPTTEVEKSPVAEKQGGEDETPEAKKELTAEEKAQKEAEEAEAREMTLEEYEKILEEKKKALQATKVEERKVDTKVFESMQQLSNKKNTDEEIFIKLGSDKEKRKDATEKAKKSLSINEFLKPADGKRYNGRGGGSRGRGGRGGRGEGGNQRYAKEAAAPAIGDTAQFPSLG

SEQ ID NO: 30771 - protein, 195 aa, Arabidopsis thaliana; identical to SEQ ID NO: 24160
  peptide (1)..(195): Ceres Seq. ID no. 12338081

SEQ ID NO: 30772 - DNA, 1191 bp, Arabidopsis thaliana
  misc_feature (1)..(1191): Ceres Seq. ID no. 13497360
  misc_feature (1)..(1191): Ortholog of  Ceres SEQ ID NO 13600141 as cited in SEQ ID NO 0
tgatagaacaatcaacaattacacttattttgctatcgtttgagcatctcaaaaatttctccggggagatttgtttgtatatatactcttccacaaagaagatgctcaaggtccctgaacaccaagttgctggtcacattgctagtgatgggaagctcggtccactcgtagatgaccaaggccggttcttcaagccacttcagggagattctcgtggcgaacacgaggctaagttctatgagtctttcacatcgaacatgaaggttccagatcacatccatagatacttcccggtgtatcacggcactcagctagttgaagcatctgatggatctggcaagcttcctcatcttgttcttgatgatgttgtttcagggtacgcaaacccgtcggtaatggatgttaagattggatctaggacatggtacccggatgtatcagaagaatacttcaagaaatgtattaagaaagatagacagaccaccacggtttcgttggggttcagggtttcaggttttaagatttttgatcaccaagaatcaagtttttggagagctgagaagaagcttgttcttgggtataatgcagatggtgctagattggctctgaggaagtttgtgtcatcgaactctcccgctgactctaacttgacaccaaactgtgcttttgcatcagaggtttatggcggttgtaacgggatcttagcgcagttgttggagcttaaagattggttcgaaacccaaacgctttaccatttcaattcctgctcgattctgatgatttacgagaatgaatcaatcttgatgcaaggaggagatgatgcaccggcaccacgggcacaagtgaagctggtggatttcgcgcatgttcttgatggaaacggtgtcatcgaccataatttcttgggtggactctgctctttcataaagttcatcaaagatattcttcagagcgttgaaaagcacgatgaaaccgatacttccctacttgagaacgggcgctagagaaacgtcgttcttcccggctccatttcaaataatctccaagtttttcctttcttggactagttgggttttggacatgaacgtttgtccctttcaattgtataatttcgttaactaaaccattgtactttctcattagagaaatatatcgagagtttcatgaaagtaagctaaggcagttaagctt

SEQ ID NO: 30773 - protein, 333 aa, Arabidopsis thaliana
  peptide (1)..(333): Ceres Seq. ID no. 13497361
IEQSTITLILLSFEHLKNFSGEICLYIYSSTKKMLKVPEHQVAGHIASDGKLGPLVDDQGRFFKPLQGDSRGEHEAKFYESFTSNMKVPDHIHRYFPVYHGTQLVEASDGSGKLPHLVLDDVVSGYANPSVMDVKIGSRTWYPDVSEEYFKKCIKKDRQTTTVSLGFRVSGFKIFDHQESSFWRAEKKLVLGYNADGARLALRKFVSSNSPADSNLTPNCAFASEVYGGCNGILAQLLELKDWFETQTLYHFNSCSILMIYENESILMQGGDDAPAPRAQVKLVDFAHVLDGNGVIDHNFLGGLCSFIKFIKDILQSVEKHDETDTSLLENGR

SEQ ID NO: 30774 - protein, 300 aa, Arabidopsis thaliana
  peptide (1)..(300): Ceres Seq. ID no. 13497362
MLKVPEHQVAGHIASDGKLGPLVDDQGRFFKPLQGDSRGEHEAKFYESFTSNMKVPDHIHRYFPVYHGTQLVEASDGSGKLPHLVLDDVVSGYANPSVMDVKIGSRTWYPDVSEEYFKKCIKKDRQTTTVSLGFRVSGFKIFDHQESSFWRAEKKLVLGYNADGARLALRKFVSSNSPADSNLTPNCAFASEVYGGCNGILAQLLELKDWFETQTLYHFNSCSILMIYENESILMQGGDDAPAPRAQVKLVDFAHVLDGNGVIDHNFLGGLCSFIKFIKDILQSVEKHDETDTSLLENGR

SEQ ID NO: 30775 - protein, 248 aa, Arabidopsis thaliana
  peptide (1)..(248): Ceres Seq. ID no. 13497363
MKVPDHIHRYFPVYHGTQLVEASDGSGKLPHLVLDDVVSGYANPSVMDVKIGSRTWYPDVSEEYFKKCIKKDRQTTTVSLGFRVSGFKIFDHQESSFWRAEKKLVLGYNADGARLALRKFVSSNSPADSNLTPNCAFASEVYGGCNGILAQLLELKDWFETQTLYHFNSCSILMIYENESILMQGGDDAPAPRAQVKLVDFAHVLDGNGVIDHNFLGGLCSFIKFIKDILQSVEKHDETDTSLLENGR

SEQ ID NO: 30776 - DNA, 1536 bp, Arabidopsis thaliana
  misc_feature (1)..(1536): Ceres Seq. ID no. 12335031
  misc_feature (1)..(1536): Ortholog of  Ceres SEQ ID NO 15172495 as cited in SEQ ID NO 60316
gtggtaaattagtcagatttcgatttggaaccctaaaaaaattcaaaagacgatcctcttctcgaagaaactcgattcttgtggattcgatttcattaaggaattttgaattgttgcctgtgatgggtggtttggctatggaggaaatgcctttatcggtgctattcgagcaagctaggaaaattcatcttgctgcttcagagtctggtgttgatcaggatgttgtgaagaaaggatgtgagatgtttcagaagtgcgaagatatgatcgggaagctggcgctgttttcgtctaacgagactaaagaagatattagcaccaacaatctcaaatatcttttggtgccttattatcttgcggagttgacagagaaaatcatacaggaggaccggattcagattgtcaaagcctcgtatgctaagttgaaggagttcttttcgttctgtgaggcaatggagcttgttccggatgaggagttggaggcttcttcacgaggaggttctggtgcacctgctgatcgaagggctctcaagatagctcggttcaaacgtcaaaaggctgcagaggcaaagcttcttgaaattaaagagaggaaggagcgacgtggacgttccactaaagcatcagctttgtcgactccggttgaatctggagaagatgatattccagatgatgacagcgaagaagagagagaggcctggctctcctcaattaacttggctatttgtaaggctattgatctgttggaaatgctaaagagagaagaggaaatgctctctgcaataaaggaaagacagttgaaggatggagagggtggattttctcgggatgctcttgatgatcgtacaaagaaagctgaaacctggcacagagacgctgctgcaaggatacagtactctaaaccggcacaaccaatcacttgtgccacatttgcacaagatgtgttagaaggaagagcttcggtatcacaaggtcacgaacacaagaaccaacctcttatattcggtccagcaagcatcgtgggtggaccgctctctaccgagagagaaagaatgatagctcaggtcttccaaccaagtcacaggatgccaacaatgtgcatagaggatgctgggttaacagagatgaacataatgaatgattggcaagagcagacgaaaaaagccattgaagaagcaaccacctcatggtacaatgataaacctctaagaagaaaagaagaagacgaggaagatgatgatgaagacgaagaagctgtgatgaaagctagagctttcgatgattggaaggatgataatcctcgcggtgcaggtaacaagaaactcacaccttgtggctgagactagagaccgagacacacattatttaacactttctccctctcttttgtttcttatttccaaaacctcttcgttcacttattataatgtctgtaatgtaatcatctttctactcttaagccttagacttacagattttggattcacggattcactttcattttcgttgggaatattatttttaaatacgccgact

SEQ ID NO: 30777 - protein, 445 aa, Arabidopsis thaliana
  peptide (1)..(445): Ceres Seq. ID no. 12335032
GKLVRFRFGTLKKFKRRSSSRRNSILVDSISLRNFELLPVMGGLAMEEMPLSVLFEQARKIHLAASESGVDQDVVKKGCEMFQKCEDMIGKLALFSSNETKEDISTNNLKYLLVPYYLAELTEKIIQEDRIQIVKASYAKLKEFFSFCEAMELVPDEELEASSRGGSGAPADRRALKIARFKRQKAAEAKLLEIKERKERRGRSTKASALSTPVESGEDDIPDDDSEEEREAWLSSINLAICKAIDLLEMLKREEEMLSAIKERQLKDGEGGFSRDALDDRTKKAETWHRDAAARIQYSKPAQPITCATFAQDVLEGRASVSQGHEHKNQPLIFGPASIVGGPLSTERERMIAQVFQPSHRMPTMCIEDAGLTEMNIMNDWQEQTKKAIEEATTSWYNDKPLRRKEEDEEDDDEDEEAVMKARAFDDWKDDNPRGAGNKKLTPCG

SEQ ID NO: 30778 - protein, 405 aa, Arabidopsis thaliana
  peptide (1)..(405): Ceres Seq. ID no. 12335033
MGGLAMEEMPLSVLFEQARKIHLAASESGVDQDVVKKGCEMFQKCEDMIGKLALFSSNETKEDISTNNLKYLLVPYYLAELTEKIIQEDRIQIVKASYAKLKEFFSFCEAMELVPDEELEASSRGGSGAPADRRALKIARFKRQKAAEAKLLEIKERKERRGRSTKASALSTPVESGEDDIPDDDSEEEREAWLSSINLAICKAIDLLEMLKREEEMLSAIKERQLKDGEGGFSRDALDDRTKKAETWHRDAAARIQYSKPAQPITCATFAQDVLEGRASVSQGHEHKNQPLIFGPASIVGGPLSTERERMIAQVFQPSHRMPTMCIEDAGLTEMNIMNDWQEQTKKAIEEATTSWYNDKPLRRKEEDEEDDDEDEEAVMKARAFDDWKDDNPRGAGNKKLTPCG

SEQ ID NO: 30779 - protein, 400 aa, Arabidopsis thaliana
  peptide (1)..(400): Ceres Seq. ID no. 12335034
MEEMPLSVLFEQARKIHLAASESGVDQDVVKKGCEMFQKCEDMIGKLALFSSNETKEDISTNNLKYLLVPYYLAELTEKIIQEDRIQIVKASYAKLKEFFSFCEAMELVPDEELEASSRGGSGAPADRRALKIARFKRQKAAEAKLLEIKERKERRGRSTKASALSTPVESGEDDIPDDDSEEEREAWLSSINLAICKAIDLLEMLKREEEMLSAIKERQLKDGEGGFSRDALDDRTKKAETWHRDAAARIQYSKPAQPITCATFAQDVLEGRASVSQGHEHKNQPLIFGPASIVGGPLSTERERMIAQVFQPSHRMPTMCIEDAGLTEMNIMNDWQEQTKKAIEEATTSWYNDKPLRRKEEDEEDDDEDEEAVMKARAFDDWKDDNPRGAGNKKLTPCG

SEQ ID NO: 30780 - DNA, 1169 bp, Arabidopsis thaliana
  misc_feature (1)..(1169): Ceres Seq. ID no. 13486807
  misc_feature (1)..(1169): Ortholog of  Ceres SEQ ID NO 13599496 as cited in SEQ ID NO 0
tcgtttgtgtttttgattggcggagaattggtgatagataagcttcttcttccctcttctcaacttggtggatctgtcatcgatggcctctttgatgctcaacggggccattaccttccccaaaggtttaggttcccctggttccaatttgcatgccagatcgattcctcggccgaccttactctcagttacccgaacctccacacctagactctcggtggctactagatgcagcagcagcagcgtgtcgtcttcccggccatcggcgcaacctaggttcattcagcacaagaaggaggcttactggttctacaggttcttatccatcgtatacgaccatgtcatcaatcctgggcattggaccgaggatatgagagacgacgctcttgagccagcggatctcagccatccggacatgcgagtggtcgatgtcggcggcggaactggtttcactactctgggcatagtcaagacagtgaaggccaagaatgtgaccattctggaccagtcgccacatcagctggccaaagcaaagcaaaaggagccgttgaaagaatgcaagatcgtcgagggagatgctgaggatcttccttttccaaccgattatgctgacagatacgtttctgctggaagcattgagtactggccggacccgcagaggggaataagggaagcgtacagggttctcaagatcggtggcaaagcgtgtctcatcggccctgtctacccaaccttctggctctctcgcttcttttctgatgtctggatgctcttccccaaggaggaagaatacattgagtggttcaagaatgccggtttcaaggacgttcagctcaagaggattggccccaagtggtaccgtggtgttcgcaggcacggccttatcatgggatattctgtcactggtgttaaacctgcctccggtgactctcctctccagcttggtccaaaggaagaggacgtagagaagcctgtcaacaaccccttctccttcttgggacgcttcctcctgggaactctagcagctgcctggtttgtgttaatccctatctacatgtggatcaaggatcagatcgttcccaaagaccaacccatctgatccttctcttctaggacatgatcattgtatcattgtaaacccctcttgtggtaaagaaagattcgagtcc

SEQ ID NO: 30781 - protein, 338 aa, Arabidopsis thaliana
  peptide (1)..(338): Ceres Seq. ID no. 13486808
MASLMLNGAITFPKGLGSPGSNLHARSIPRPTLLSVTRTSTPRLSVATRCSSSSVSSSRPSAQPRFIQHKKEAYWFYRFLSIVYDHVINPGHWTEDMRDDALEPADLSHPDMRVVDVGGGTGFTTLGIVKTVKAKNVTILDQSPHQLAKAKQKEPLKECKIVEGDAEDLPFPTDYADRYVSAGSIEYWPDPQRGIREAYRVLKIGGKACLIGPVYPTFWLSRFFSDVWMLFPKEEEYIEWFKNAGFKDVQLKRIGPKWYRGVRRHGLIMGYSVTGVKPASGDSPLQLGPKEEDVEKPVNNPFSFLGRFLLGTLAAAWFVLIPIYMWIKDQIVPKDQPI

SEQ ID NO: 30782 - protein, 334 aa, Arabidopsis thaliana
  peptide (1)..(334): Ceres Seq. ID no. 13486809
MLNGAITFPKGLGSPGSNLHARSIPRPTLLSVTRTSTPRLSVATRCSSSSVSSSRPSAQPRFIQHKKEAYWFYRFLSIVYDHVINPGHWTEDMRDDALEPADLSHPDMRVVDVGGGTGFTTLGIVKTVKAKNVTILDQSPHQLAKAKQKEPLKECKIVEGDAEDLPFPTDYADRYVSAGSIEYWPDPQRGIREAYRVLKIGGKACLIGPVYPTFWLSRFFSDVWMLFPKEEEYIEWFKNAGFKDVQLKRIGPKWYRGVRRHGLIMGYSVTGVKPASGDSPLQLGPKEEDVEKPVNNPFSFLGRFLLGTLAAAWFVLIPIYMWIKDQIVPKDQPI

SEQ ID NO: 30783 - protein, 242 aa, Arabidopsis thaliana
  peptide (1)..(242): Ceres Seq. ID no. 13486810
MRDDALEPADLSHPDMRVVDVGGGTGFTTLGIVKTVKAKNVTILDQSPHQLAKAKQKEPLKECKIVEGDAEDLPFPTDYADRYVSAGSIEYWPDPQRGIREAYRVLKIGGKACLIGPVYPTFWLSRFFSDVWMLFPKEEEYIEWFKNAGFKDVQLKRIGPKWYRGVRRHGLIMGYSVTGVKPASGDSPLQLGPKEEDVEKPVNNPFSFLGRFLLGTLAAAWFVLIPIYMWIKDQIVPKDQPI

SEQ ID NO: 30784 - DNA, 1466 bp, Arabidopsis thaliana
  misc_feature (1)..(1466): Ceres Seq. ID no. 13486703
  misc_feature (1)..(1466): Ortholog of  Ceres SEQ ID NO 14304838 as cited in SEQ ID NO 59750
aagatttttaagaatgttgtagtagcttcgcgaataatctcaggtcttctataaaaccaaactagcgattagtcgactcttcctctttattattacaaagacgaaaaggcttcgagttttgtaatttcttcttctgttacaagttcttttcactgtgaaagtaattcttcaatggcgaaagacggacctaattgggatggtttgcttaagtggagtctctctcacgccgacggtactcgacccactcgccagttgagtgaggaggatcgaaaatggtttatggaggctatgcaatcgcagactgtagatgtagtcaaacgcatgaaggagattacactagttatgcaaacacctgaacaagttttggtggaacatggagtaacacctgaagatatccaagatttgctggatgagctgcaagagcacgttgaatcgatcgatatggctaacgatcttcattcaattggaggcttggttcctcttcttagtttccttaaaaactctcatgctaatattcgggcaaaagctgcggatgtagttagcacaatagttcagaacaatcctagaagtcaggaacttgttatggaaaccaatgctctggagtcattgctctcgaatttcacttcagacactgatattcacgctcgaacccaggctcttggcgcaatatcatctttgattcgccataacaaaccaggagtaacggctttcaagcttgccaatggttatgctggcctaagagacgccttggcatctgatagtgtgagatttcaaaggaaagccttaaacttgttgcaatatctactgcaagaggatgattcagaccgcagtattgccactggacttggattcccccgagtgatgatgcatcttgcctctagtgacgatgctgagatcagagaagccgctcttcgtggattacttgagctttcaagagagaaaaacgatggaagtagcagcatagataaaagcgatgagaaactgaggcagctactagaagaacggatcaaaggaatcaccttgatgtcacaagaggatcttgaaacggttaaagaagagagacagctcgtggatttactgtggagcatttgctacaatgaaccttcttctctgagagaaaaaggacttgtcgttcttcccggtgaagacgcattgcctcctgatgtcgctagcaagctctttgagcctcctcttagagcttctgcagcaaaccgtaatgctactgagaagaaagatgaacctatgaaactacttggaccatagacgagaaatcaaagctaaaactttttattacttttccttgttttttatgttttgtaacttttcaaattgtcagaaaagtttcatagatatatgtattatgtcaatgatcaagggctatgttatgttaatttttgttttcatcattcgagatctttagtcttgttattgttgagattaagaatattcagcttcaatgcttttcc

SEQ ID NO: 30785 - protein, 363 aa, Arabidopsis thaliana
  peptide (1)..(363): Ceres Seq. ID no. 13486704
MAKDGPNWDGLLKWSLSHADGTRPTRQLSEEDRKWFMEAMQSQTVDVVKRMKEITLVMQTPEQVLVEHGVTPEDIQDLLDELQEHVESIDMANDLHSIGGLVPLLSFLKNSHANIRAKAADVVSTIVQNNPRSQELVMETNALESLLSNFTSDTDIHARTQALGAISSLIRHNKPGVTAFKLANGYAGLRDALASDSVRFQRKALNLLQYLLQEDDSDRSIATGLGFPRVMMHLASSDDAEIREAALRGLLELSREKNDGSSSIDKSDEKLRQLLEERIKGITLMSQEDLETVKEERQLVDLLWSICYNEPSSLREKGLVVLPGEDALPPDVASKLFEPPLRASAANRNATEKKDEPMKLLGP

SEQ ID NO: 30786 - protein, 327 aa, Arabidopsis thaliana
  peptide (1)..(327): Ceres Seq. ID no. 13486705
MEAMQSQTVDVVKRMKEITLVMQTPEQVLVEHGVTPEDIQDLLDELQEHVESIDMANDLHSIGGLVPLLSFLKNSHANIRAKAADVVSTIVQNNPRSQELVMETNALESLLSNFTSDTDIHARTQALGAISSLIRHNKPGVTAFKLANGYAGLRDALASDSVRFQRKALNLLQYLLQEDDSDRSIATGLGFPRVMMHLASSDDAEIREAALRGLLELSREKNDGSSSIDKSDEKLRQLLEERIKGITLMSQEDLETVKEERQLVDLLWSICYNEPSSLREKGLVVLPGEDALPPDVASKLFEPPLRASAANRNATEKKDEPMKLLGP

SEQ ID NO: 30787 - protein, 324 aa, Arabidopsis thaliana
  peptide (1)..(324): Ceres Seq. ID no. 13486706
MQSQTVDVVKRMKEITLVMQTPEQVLVEHGVTPEDIQDLLDELQEHVESIDMANDLHSIGGLVPLLSFLKNSHANIRAKAADVVSTIVQNNPRSQELVMETNALESLLSNFTSDTDIHARTQALGAISSLIRHNKPGVTAFKLANGYAGLRDALASDSVRFQRKALNLLQYLLQEDDSDRSIATGLGFPRVMMHLASSDDAEIREAALRGLLELSREKNDGSSSIDKSDEKLRQLLEERIKGITLMSQEDLETVKEERQLVDLLWSICYNEPSSLREKGLVVLPGEDALPPDVASKLFEPPLRASAANRNATEKKDEPMKLLGP

SEQ ID NO: 30788 - DNA, 1148 bp, Arabidopsis thaliana
  misc_feature (1)..(1148): Ceres Seq. ID no. 13491548
  misc_feature (1)..(1148): Ortholog of  Ceres SEQ ID NO 14311671 as cited in SEQ ID NO 51251
  misc_feature (1)..(1148): Ortholog of  Ceres SEQ ID NO 14304791 as cited in SEQ ID NO 53562
  misc_feature (1)..(1148): Ortholog of  Ceres SEQ ID NO 14307355 as cited in SEQ ID NO 54610
  misc_feature (1)..(1148): Ortholog of  Ceres SEQ ID NO 13594298 as cited in SEQ ID NO 57803
  misc_feature (1)..(1148): Ortholog of  Ceres SEQ ID NO 13503476 as cited in SEQ ID NO 61978
  misc_feature (1)..(1148): Ortholog of  Ceres SEQ ID NO 12578438 as cited in SEQ ID NO 62201
  misc_feature (1)..(1148): Ortholog of  Ceres SEQ ID NO 12617675 as cited in SEQ ID NO 64656
aaaaatctctcccccttcttctctcttcctcacattcctcaccaaaccctctccaaaacacacccacacgtacgcacacacacaaagacaatgtctcctttcaaaatattcttcttcacgactcttctcgtggcggcgttttcagtgtcggctgctgatttcaacactgacgtcaacgtagcttggggaaatggccgtgggaagatactcaacaacggccagcttcttactctctccttagacaaatcctctggttccggttttcaatccaaaacagagtatttgtttggaaagattgatatgcagattaagcttgttcctggtaactctgcaggaacagtcacaactttttacctaaaatccgaaggatccacttgggatgagattgattttgagttcttgggtaatatgagtggagatccttatactttacacactaatgtttacactcaaggtaaaggtgacaaagagcaacaattccatctctggttcgacccaaccgccaatttccacacttactcaatcctctggaaccctcaaagaatcatattgaccgtcgatgacacacccattagagagtttaaaaactatgagtctctcggtgtcttgtttccaaagaacaagccgatgaggatgtacgcgagtttatggaacgcagacgattgggcaacaagaggcggtcttgttaaaactgattggtctaaagctccattcatggcttcttacagaaacattaagattgactcgaaaccaaactccaattggtacactcaagaaatggattcaacaagccaagctagactcaaatgggttcagaagaattacatgatctacaattattgtactgaccataggaggtttccacagggagctcctaaggaatgcacaacaagctcatagaatctcaaattatattctatttatttatctacacttcctctctttcttttatgtgaaaattgtgaatgctctgtttctagcttgtctattatgtccgagaatttctttttctgtttttgattcttttcgttgtatatctttgtccaataaaggaaatgatgtgtctttactcttatagatatgtataaaaagatgtccctgttttatttgttaaaaaaaattgtttatgataatgatagttctttctc

SEQ ID NO: 30789 - protein, 299 aa, Arabidopsis thaliana
  peptide (1)..(299): Ceres Seq. ID no. 13491549
KNLSPFFSLPHIPHQTLSKTHPHVRTHTKTMSPFKIFFFTTLLVAAFSVSAADFNTDVNVAWGNGRGKILNNGQLLTLSLDKSSGSGFQSKTEYLFGKIDMQIKLVPGNSAGTVTTFYLKSEGSTWDEIDFEFLGNMSGDPYTLHTNVYTQGKGDKEQQFHLWFDPTANFHTYSILWNPQRIILTVDDTPIREFKNYESLGVLFPKNKPMRMYASLWNADDWATRGGLVKTDWSKAPFMASYRNIKIDSKPNSNWYTQEMDSTSQARLKWVQKNYMIYNYCTDHRRFPQGAPKECTTSS

SEQ ID NO: 30790 - protein, 269 aa, Arabidopsis thaliana; identical to SEQ ID NO: 21034
  peptide (1)..(269): Ceres Seq. ID no. 13491550

SEQ ID NO: 30791 - protein, 199 aa, Arabidopsis thaliana; identical to SEQ ID NO: 21035
  peptide (1)..(199): Ceres Seq. ID no. 13491551

SEQ ID NO: 30792 - DNA, 1458 bp, Arabidopsis thaliana
  misc_feature (1)..(1458): Ceres Seq. ID no. 13487675
  misc_feature (1)..(1458): Ortholog of  Ceres SEQ ID NO 15168545 as cited in SEQ ID NO 57829
  misc_feature (1)..(1458): Ortholog of  Ceres SEQ ID NO 15168468 as cited in SEQ ID NO 58115
  misc_feature (1)..(1458): Ortholog of  Ceres SEQ ID NO 13596440 as cited in SEQ ID NO 68769
ttctatcaaaccgtcaagttgggaaacaaaacaaaactcgcaagtttaacaacgcgtcttctacctcctcctcatcggactatttatctatagtcttcgttagatcaattcctctgttttactcctaagtttcgagatccacatttctctttaacctcatctcatctcttagtcgagatcttcactttctgatgacaatagggtcgtttttctcttctctcttattctggcgcaattctcaggaccaggaggcgcagagagggaggatgcaggagatagatcttagtgttcacactataaagtcccatggaggaagagtcgcttctaaacacaagcacgattggatcatactcgtcatcttgattgccatcgagataggcttgaacctcatctctcctttctaccgctacgtgggaaaagacatgatgactgacctcaagtaccctttcaaggacaacaccgtacctatctggtctgtccctgtgtacgctgtgcttcttcccatcatagtgttcgtctgcttctacctgaagaggacatgtgtgtacgatctgcaccacagcatcctcgggctgctcttcgccgtcttgataactggtgtcatcactgactccatcaaggtagccaccggacgccctcgtcctaacttctactggcgctgcttccccgacggcaaagagctgtatgatgcgttgggaggtgtggtatgccacggcaaggcagctgaggtcaaggaaggccacaagagcttcccgagcggacacacttcctggtcctttgcggggcttacattcctttccctttacctctctggcaaaatcaaggccttcaacaatgaaggacatgtggcgaaactctgcctcgtgatcttccctctgcttgccgcttgtcttgtggggatatctcgtgtggatgactactggcaccactggcaagatgtcttcgcaggagctctcattggcacccttgtagccgccttctgctaccgtcagttctaccccaacccttaccacgaagaaggatggggtccctacgcctatttcaaggcagctcaagaacgaggagtccctgtgacctcctcccaaaacggagatgccttgagggctatgtctctgcagatggattcaacatctctcgaaaacatggaatctggcacttccaccgctcccagatgatcctcctctcttattatttgattcattatttggtttttcattttgatttggccgtcgtcgtgagattgtgaatggtgtagctacatactgtatgtgtattcaaaactctacttgtaccattacatttttgtaaatccactcttcatgaaattgacgtttttctggtgtccgagaggcttgggtcgctcgaataatctcgtccaatagactaatacggctctagtgaacacggtatttacatgtttgtgatctaaactgaaatcagttatttcttaattcgtag

SEQ ID NO: 30793 - protein, 327 aa, Arabidopsis thaliana
  peptide (1)..(327): Ceres Seq. ID no. 13487676
MTIGSFFSSLLFWRNSQDQEAQRGRMQEIDLSVHTIKSHGGRVASKHKHDWIILVILIAIEIGLNLISPFYRYVGKDMMTDLKYPFKDNTVPIWSVPVYAVLLPIIVFVCFYLKRTCVYDLHHSILGLLFAVLITGVITDSIKVATGRPRPNFYWRCFPDGKELYDALGGVVCHGKAAEVKEGHKSFPSGHTSWSFAGLTFLSLYLSGKIKAFNNEGHVAKLCLVIFPLLAACLVGISRVDDYWHHWQDVFAGALIGTLVAAFCYRQFYPNPYHEEGWGPYAYFKAAQERGVPVTSSQNGDALRAMSLQMDSTSLENMESGTSTAPR

SEQ ID NO: 30794 - protein, 302 aa, Arabidopsis thaliana
  peptide (1)..(302): Ceres Seq. ID no. 13487677
MQEIDLSVHTIKSHGGRVASKHKHDWIILVILIAIEIGLNLISPFYRYVGKDMMTDLKYPFKDNTVPIWSVPVYAVLLPIIVFVCFYLKRTCVYDLHHSILGLLFAVLITGVITDSIKVATGRPRPNFYWRCFPDGKELYDALGGVVCHGKAAEVKEGHKSFPSGHTSWSFAGLTFLSLYLSGKIKAFNNEGHVAKLCLVIFPLLAACLVGISRVDDYWHHWQDVFAGALIGTLVAAFCYRQFYPNPYHEEGWGPYAYFKAAQERGVPVTSSQNGDALRAMSLQMDSTSLENMESGTSTAPR

SEQ ID NO: 30795 - protein, 250 aa, Arabidopsis thaliana
  peptide (1)..(250): Ceres Seq. ID no. 13487678
MMTDLKYPFKDNTVPIWSVPVYAVLLPIIVFVCFYLKRTCVYDLHHSILGLLFAVLITGVITDSIKVATGRPRPNFYWRCFPDGKELYDALGGVVCHGKAAEVKEGHKSFPSGHTSWSFAGLTFLSLYLSGKIKAFNNEGHVAKLCLVIFPLLAACLVGISRVDDYWHHWQDVFAGALIGTLVAAFCYRQFYPNPYHEEGWGPYAYFKAAQERGVPVTSSQNGDALRAMSLQMDSTSLENMESGTSTAPR

SEQ ID NO: 30796 - DNA, 2496 bp, Arabidopsis thaliana
  misc_feature (1)..(2496): Ceres Seq. ID no. 12561218
  misc_feature (1)..(2496): Ortholog of  Ceres SEQ ID NO 15178931 as cited in SEQ ID NO 1125
  misc_feature (1)..(2496): Ortholog of  Ceres SEQ ID NO 13596648 as cited in SEQ ID NO 63080
  misc_feature (1)..(2496): Ortholog of  Ceres SEQ ID NO 13584744 as cited in SEQ ID NO 69137
  misc_feature (1)..(2496): Ortholog of  Ceres SEQ ID NO 15179672 as cited in SEQ ID NO 0
aataattaaaattcgtcttccttccttgctctcggcgataacttggtttctctcctctctctcatctctctttgtttcgacccttttttagtatatttccaggaaatatcttcttcctcctttcgttttctctatctcagttttctctcttctcagcattaagtagtcaacggtcagcgatctcggcgttccttctaatcggaaaagtctagcttcagtttcttttttttttgcttttttggtttccgcgattaatcgatttgggtattttgattttctcttcaaattaagtcaacgggtggatacgcgttgagagggcttttctcgtattctgcttctaatttcatcatcttggtattaccttgtgtgggtggtagcttaatcgaaggattcgagatcccttttatcaggggttttaacaatgatggattttctctgatgagggatagttctagggtttgtttttaatctcttgaggataaaatggaacgaagattaatgatcccttgcttcttttggttgattctcgttttggatttggttctcagagtctcgggcaacgccgaaggtgatgctctaagtgcactgaaaaacagtttagccgaccctaataaggtgcttcaaagttgggatgctactcttgttactccatgtacatggtttcatgttacttgcaatagcgacaatagtgttacacgtgttgaccttgggaatgcaaatctatctggacagctcgtaatgcaacttggtcagcttccaaacttgcagtacttggagctttatagcaataacattactgggacaatcccagaacagcttggaaatctgacggaattggtgagcttggatctttacttgaacaatttaagcgggcctattccatcaactctcggccgacttaagaaactccgtttcttgcgtcttaataacaatagcttatctggagaaattccaaggtctttgactgctgtcctgacgctacaagttctggatctctcaaacaatcctctcaccggagatattcctgttaatggttccttttcacttttcactccaatcagttttgccaacaccaagttgactccccttcctgcatctccaccgcctcctatctctcctacaccgccatcacctgcagggagtaatagaattactggagcgattgcgggaggagttgctgcaggtgctgcacttctatttgctgttccggccattgcactagcttggtggcgaaggaaaaagccgcaggaccacttctttgatgtaccagctgaagaggacccagaagttcatttaggacaactgaagaggttttcattgcgtgaactacaagttgcttcggataattttagcaacaagaacatattgggtagaggtggttttggtaaagtttataaaggacggttagctgatggtactttagtggccgttaaaaggctaaaagaggagcgcacccaaggtggcgaactgcagttccagacagaggttgagatgattagtatggcggttcacagaaacttgcttcggcttcgtggattttgcatgactccaaccgaaagattgcttgtttatccctacatggctaatggaagtgttgcctcctgtttaagagaacgtcccgagtcccagccaccacttgattggccaaagagacagcgtattgcgttgggatctgcaagagggcttgcgtatttacatgatcattgcgacccaaagattattcatcgagatgtgaaagctgcaaatattttgttggatgaagagtttgaagccgtggttggggattttggacttgcaaaactcatggactacaaagacacacatgtgacaaccgcagtgcgtgggacaattggtcatatagcccctgagtacctttccactggaaaatcatcagagaaaaccgatgtctttgggtatggagtcatgcttcttgagcttatcactggacaaagggcttttgatcttgctcgcctcgcgaatgatgatgatgtcatgttactagactgggtgaaagggttgttaaaagagaagaaattggaagcactagtagatgttgatcttcagggtaattacaaagacgaagaagtggagcagctaatccaagtggctttactctgcactcagagttcaccaatggaaagacccaaaatgtctgaagttgtaagaatgcttgaaggagatggtttagctgagagatgggaagagtggcaaaaggaggaaatgttcagacaagatttcaactacccaacccaccatccagccgtgtctggctggatcattggcgattccacttcccagatcgaaaacgaatacccctcgggtccaagataagattcgaaacacgaatgttttttctgtattttgtttttctctgtatttattgagggttttagcttctgctgctccatattattggttcttaagtgaatacatgaggatcagattgggtttgtaagtgttatatgatgaaaaaggatttgaatgttgttgaaagct

SEQ ID NO: 30797 - protein, 615 aa, Arabidopsis thaliana
  peptide (1)..(615): Ceres Seq. ID no. 12561219
MERRLMIPCFFWLILVLDLVLRVSGNAEGDALSALKNSLADPNKVLQSWDATLVTPCTWFHVTCNSDNSVTRVDLGNANLSGQLVMQLGQLPNLQYLELYSNNITGTIPEQLGNLTELVSLDLYLNNLSGPIPSTLGRLKKLRFLRLNNNSLSGEIPRSLTAVLTLQVLDLSNNPLTGDIPVNGSFSLFTPISFANTKLTPLPASPPPPISPTPPSPAGSNRITGAIAGGVAAGAALLFAVPAIALAWWRRKKPQDHFFDVPAEEDPEVHLGQLKRFSLRELQVASDNFSNKNILGRGGFGKVYKGRLADGTLVAVKRLKEERTQGGELQFQTEVEMISMAVHRNLLRLRGFCMTPTERLLVYPYMANGSVASCLRERPESQPPLDWPKRQRIALGSARGLAYLHDHCDPKIIHRDVKAANILLDEEFEAVVGDFGLAKLMDYKDTHVTTAVRGTIGHIAPEYLSTGKSSEKTDVFGYGVMLLELITGQRAFDLARLANDDDVMLLDWVKGLLKEKKLEALVDVDLQGNYKDEEVEQLIQVALLCTQSSPMERPKMSEVVRMLEGDGLAERWEEWQKEEMFRQDFNYPTHHPAVSGWIIGDSTSQIENEYPSGPR

SEQ ID NO: 30798 - protein, 610 aa, Arabidopsis thaliana
  peptide (1)..(610): Ceres Seq. ID no. 12561220
MIPCFFWLILVLDLVLRVSGNAEGDALSALKNSLADPNKVLQSWDATLVTPCTWFHVTCNSDNSVTRVDLGNANLSGQLVMQLGQLPNLQYLELYSNNITGTIPEQLGNLTELVSLDLYLNNLSGPIPSTLGRLKKLRFLRLNNNSLSGEIPRSLTAVLTLQVLDLSNNPLTGDIPVNGSFSLFTPISFANTKLTPLPASPPPPISPTPPSPAGSNRITGAIAGGVAAGAALLFAVPAIALAWWRRKKPQDHFFDVPAEEDPEVHLGQLKRFSLRELQVASDNFSNKNILGRGGFGKVYKGRLADGTLVAVKRLKEERTQGGELQFQTEVEMISMAVHRNLLRLRGFCMTPTERLLVYPYMANGSVASCLRERPESQPPLDWPKRQRIALGSARGLAYLHDHCDPKIIHRDVKAANILLDEEFEAVVGDFGLAKLMDYKDTHVTTAVRGTIGHIAPEYLSTGKSSEKTDVFGYGVMLLELITGQRAFDLARLANDDDVMLLDWVKGLLKEKKLEALVDVDLQGNYKDEEVEQLIQVALLCTQSSPMERPKMSEVVRMLEGDGLAERWEEWQKEEMFRQDFNYPTHHPAVSGWIIGDSTSQIENEYPSGPR

SEQ ID NO: 30799 - protein, 530 aa, Arabidopsis thaliana
  peptide (1)..(530): Ceres Seq. ID no. 12561221
MQLGQLPNLQYLELYSNNITGTIPEQLGNLTELVSLDLYLNNLSGPIPSTLGRLKKLRFLRLNNNSLSGEIPRSLTAVLTLQVLDLSNNPLTGDIPVNGSFSLFTPISFANTKLTPLPASPPPPISPTPPSPAGSNRITGAIAGGVAAGAALLFAVPAIALAWWRRKKPQDHFFDVPAEEDPEVHLGQLKRFSLRELQVASDNFSNKNILGRGGFGKVYKGRLADGTLVAVKRLKEERTQGGELQFQTEVEMISMAVHRNLLRLRGFCMTPTERLLVYPYMANGSVASCLRERPESQPPLDWPKRQRIALGSARGLAYLHDHCDPKIIHRDVKAANILLDEEFEAVVGDFGLAKLMDYKDTHVTTAVRGTIGHIAPEYLSTGKSSEKTDVFGYGVMLLELITGQRAFDLARLANDDDVMLLDWVKGLLKEKKLEALVDVDLQGNYKDEEVEQLIQVALLCTQSSPMERPKMSEVVRMLEGDGLAERWEEWQKEEMFRQDFNYPTHHPAVSGWIIGDSTSQIENEYPSGPR

SEQ ID NO: 30800 - DNA, 606 bp, Arabidopsis thaliana
  misc_feature (1)..(606): Ceres Seq. ID no. 12333083
  misc_feature (1)..(606): Ortholog of  Ceres SEQ ID NO 12556948 as cited in SEQ ID NO 54
catttctgcttcttcttctgctaagagacagagaaatagagagagatcgcgtcggcacaatctgcaatttccaacatcgacatgtttaactctacagcattggtgattttcgccattcttttcctctcaatctccgccgatgcgttcccgattccgtctcccaacggagagatcgacgcaatgttgatccgaaacagtatcatcggagaagatgaagatctaatgccaactgagatcagtcggagagtactgatggcgcagaaacggtacatcggctacgaaacgctaaggagagacatggttccttgtcagaaaccaggagcttcttactacgattgtcgctctggacaagctaattattacagcagaggctgcgacaccattacaagatgcgctagagacacaaacgacatcaacacatgaaggtaagatccaagaaattgccaaaattggaagctttttggccgaggcaagtaaattatatgattaagcttttgcattgctgttgttatatatgtgtttttgacataagaattgttataatatatgtaactctgccactagttggttatcaatgttcaattattgagatctataaattatatt

SEQ ID NO: 30801 - protein, 113 aa, Arabidopsis thaliana
  peptide (1)..(113): Ceres Seq. ID no. 12333084
MFNSTALVIFAILFLSISADAFPIPSPNGEIDAMLIRNSIIGEDEDLMPTEISRRVLMAQKRYIGYETLRRDMVPCQKPGASYYDCRSGQANYYSRGCDTITRCARDTNDINT

SEQ ID NO: 30802 - protein, 80 aa, Arabidopsis thaliana
  peptide (1)..(80): Ceres Seq. ID no. 12333085
MLIRNSIIGEDEDLMPTEISRRVLMAQKRYIGYETLRRDMVPCQKPGASYYDCRSGQANYYSRGCDTITRCARDTNDINT

SEQ ID NO: 30803 - protein, 66 aa, Arabidopsis thaliana
  peptide (1)..(66): Ceres Seq. ID no. 12333086
MPTEISRRVLMAQKRYIGYETLRRDMVPCQKPGASYYDCRSGQANYYSRGCDTITRCARDTNDINT

SEQ ID NO: 30804 - DNA, 703 bp, Arabidopsis thaliana
  misc_feature (1)..(703): Ceres Seq. ID no. 13489872
  misc_feature (1)..(703): Ortholog of  Ceres SEQ ID NO 13600689 as cited in SEQ ID NO 0
  misc_feature (1)..(703): Ortholog of  Ceres SEQ ID NO 15178120 as cited in SEQ ID NO 0
aagtttgatcgaaagtttcagacttcaataagttttcagtttcgtgcatagattaggaatctcgaaaccctaattctgttttctacacgaaacccatcaaaatcgaattttgatcgtttctaatttctgccatttgattctcttcatcagtcacatttaggggaaacgagaagccctaatctttgattctttaatcgccatggctaatagctctttcaagttggaacacccactagagaggagacaaattgaatcttctcgcatcagggagaagtatccagacagaattccagtgatcgtagagagagctgaaagaagtgatgttcccaatatcgacaagaagaagtaccttgttccagctgatctaactgttgggcaatttgtgtatgttgtccgtaaaagaatcaagctgagtgccgaaaaggctatcttcgtctttgtgaagaacacattgcctccaactgctgcaatgatgtctgcaatctatgatgagaacaaagacgaagatgggtttctctacatgacttacagtggagagaacacctttggtttggtttaaatgtgtgccttccaatgcttttgtgctgatgtgtatattatatgctcttttataacactatgaatatgcaaaagttatatgtactactattaatgtaaatgttgctttgaatttaagttgttagtttgggttttacttttggac

SEQ ID NO: 30805 - protein, 119 aa, Arabidopsis thaliana
  peptide (1)..(119): Ceres Seq. ID no. 13489873
MANSSFKLEHPLERRQIESSRIREKYPDRIPVIVERAERSDVPNIDKKKYLVPADLTVGQFVYVVRKRIKLSAEKAIFVFVKNTLPPTAAMMSAIYDENKDEDGFLYMTYSGENTFGLV

SEQ ID NO: 30806 - DNA, 705 bp, Arabidopsis thaliana
  misc_feature (1)..(705): Ceres Seq. ID no. 12332216
  misc_feature (1)..(705): Ortholog of  Ceres SEQ ID NO 15176693 as cited in SEQ ID NO 1078
  misc_feature (1)..(705): Ortholog of  Ceres SEQ ID NO 12615074 as cited in SEQ ID NO 62676
  misc_feature (1)..(705): Ortholog of  Ceres SEQ ID NO 13598819 as cited in SEQ ID NO 0
  misc_feature (1)..(705): Ortholog of  Ceres SEQ ID NO 13600371 as cited in SEQ ID NO 0
aaaggttgtccaagtctacaaaccaaaagcacgctacagaagaagaggaagaagaaagatgtcgtggcaatcatacgtcgatgaccatctcatgtgcgaggtcgaaggcaaccacctcacacacgccgccatcttcggccaagacggcagtgtctgggctcagagctcagctttccctcagttgaagcctgcagagatagcaggaatcaacaaagactttgaagaagccggacatcttgccccaaccgggctattccttggcggtgagaagtacatggttgtccaaggtgaggctggagccgtcatccgagggaaaaagggacctggtggagtcactatcaagaagactactcaagctctagtctttggtatctatgatgaaccgatgaccggagggcaatgcaacttggtcgtggagaggctcggcgattaccttatcgagtctggtctctaagttcactcaaagtgcttcaaacaaatttcatttttcgggttctttcttcactagagaagcacccttctgccatgtattgtgatttgattgttgttgtgcatcaaacaaagttattatactcttaaaaagaacaaagaaacaatcatatttgttatggttttgatcctctcctatgatggctcttatgtttttctcttgtactgtatttcgtaatgtataattacgctttggaataaaaatttgagtttgtg

SEQ ID NO: 30807 - protein, 150 aa, Arabidopsis thaliana
  peptide (1)..(150): Ceres Seq. ID no. 12332217
KVVQVYKPKARYRRRGRRKMSWQSYVDDHLMCEVEGNHLTHAAIFGQDGSVWAQSSAFPQLKPAEIAGINKDFEEAGHLAPTGLFLGGEKYMVVQGEAGAVIRGKKGPGGVTIKKTTQALVFGIYDEPMTGGQCNLVVERLGDYLIESGL

SEQ ID NO: 30808 - protein, 131 aa, Arabidopsis thaliana
  peptide (1)..(131): Ceres Seq. ID no. 12332218
MSWQSYVDDHLMCEVEGNHLTHAAIFGQDGSVWAQSSAFPQLKPAEIAGINKDFEEAGHLAPTGLFLGGEKYMVVQGEAGAVIRGKKGPGGVTIKKTTQALVFGIYDEPMTGGQCNLVVERLGDYLIESGL

SEQ ID NO: 30809 - protein, 120 aa, Arabidopsis thaliana
  peptide (1)..(120): Ceres Seq. ID no. 12332219
MCEVEGNHLTHAAIFGQDGSVWAQSSAFPQLKPAEIAGINKDFEEAGHLAPTGLFLGGEKYMVVQGEAGAVIRGKKGPGGVTIKKTTQALVFGIYDEPMTGGQCNLVVERLGDYLIESGL

SEQ ID NO: 30810 - DNA, 1020 bp, Arabidopsis thaliana
  misc_feature (1)..(1020): Ceres Seq. ID no. 12489584
  misc_feature (1)..(1020): Ortholog of  Ceres SEQ ID NO 14304689 as cited in SEQ ID NO 53265
  misc_feature (1)..(1020): Ortholog of  Ceres SEQ ID NO 14307820 as cited in SEQ ID NO 53938
  misc_feature (1)..(1020): Ortholog of  Ceres SEQ ID NO 15177137 as cited in SEQ ID NO 55030
  misc_feature (1)..(1020): Ortholog of  Ceres SEQ ID NO 14302407 as cited in SEQ ID NO 66891
  misc_feature (1)..(1020): Ortholog of  Ceres SEQ ID NO 13599557 as cited in SEQ ID NO 0
acccactagaaccgttgtaacctacgacccataataatgtaccatctccttatcattatcactacactctccttctcttcaattaacataaccttcgccgtcgatgaagctttcccttcaattcccactaccttcagcgtcgcaacgaaacaacactacgacgtaaaaccaatccaccatgaagtttatgacggagaaaggaagatatacgacatcagccaccagtacacgccggagttgccggtttgggagtcttcagaaggactagggaactttcttagacttgccgtgagtatgaagaatggatccgatgctaatatctcgaagatggaactatctgttcactctggaactcatgttgatgcaccaggccatttccatgaccattattatgagtctggttttgatactgattcacttgatcttcaaatccttaatggtcctgctttattggttgatgttccaagagataagaacatttcagctgaggttatgaaatcactacatattccaagagggatccgtcgtgttctctttaaaacattgaacactgataggaggcttatgtttaagaaagaatttgattcaagctttgtcgggtttatggtcgatggggcgaaatggttggttgaaaatacagacatcaaacttgttgggcttgattatctttcatttgctgcttatgatgaagcacctgcgacgcataggtttatacttgaacgacgggatataatccctgtcgaagcgctgaagctggatgacgtggaggtaggaatgtacacgcttcattgcttaccgttaagattggttggagcggaaggagcaccaacgagatgcattctcatcaagtgattcagttcatctttttctatctaagttgtatatgaattactgataataaacaataggctttttggcttcttgcttccaagatctcataaccatatcgaagatgttaacatatgggatgattttgttgtaaaagaagcgtctaatcttattatataaagtatggttttc

SEQ ID NO: 30811 - protein, 271 aa, Arabidopsis thaliana
  peptide (1)..(271): Ceres Seq. ID no. 12489585
MYHLLIIITTLSFSSINITFAVDEAFPSIPTTFSVATKQHYDVKPIHHEVYDGERKIYDISHQYTPELPVWESSEGLGNFLRLAVSMKNGSDANISKMELSVHSGTHVDAPGHFHDHYYESGFDTDSLDLQILNGPALLVDVPRDKNISAEVMKSLHIPRGIRRVLFKTLNTDRRLMFKKEFDSSFVGFMVDGAKWLVENTDIKLVGLDYLSFAAYDEAPATHRFILERRDIIPVEALKLDDVEVGMYTLHCLPLRLVGAEGAPTRCILIK

SEQ ID NO: 30812 - protein, 185 aa, Arabidopsis thaliana
  peptide (1)..(185): Ceres Seq. ID no. 12489586
MKNGSDANISKMELSVHSGTHVDAPGHFHDHYYESGFDTDSLDLQILNGPALLVDVPRDKNISAEVMKSLHIPRGIRRVLFKTLNTDRRLMFKKEFDSSFVGFMVDGAKWLVENTDIKLVGLDYLSFAAYDEAPATHRFILERRDIIPVEALKLDDVEVGMYTLHCLPLRLVGAEGAPTRCILIK

SEQ ID NO: 30813 - protein, 174 aa, Arabidopsis thaliana
  peptide (1)..(174): Ceres Seq. ID no. 12489587
MELSVHSGTHVDAPGHFHDHYYESGFDTDSLDLQILNGPALLVDVPRDKNISAEVMKSLHIPRGIRRVLFKTLNTDRRLMFKKEFDSSFVGFMVDGAKWLVENTDIKLVGLDYLSFAAYDEAPATHRFILERRDIIPVEALKLDDVEVGMYTLHCLPLRLVGAEGAPTRCILIK

SEQ ID NO: 30814 - DNA, 1081 bp, Arabidopsis thaliana
  misc_feature (1)..(1081): Ceres Seq. ID no. 13489874
  misc_feature (1)..(1081): Ortholog of  Ceres SEQ ID NO 13596163 as cited in SEQ ID NO 60864
  misc_feature (1)..(1081): Ortholog of  Ceres SEQ ID NO 15226347 as cited in SEQ ID NO 61639
aaaacgcaccgctttgtttgattgttcctccttgtccccgaccagagaaatacaaaggaagaagaagaagagttgtttgattatctttaagcaaagaggaaactgttttgcttctagatccgatccaatccaatcaaacaaaggatccgattgatcagaaaaaatccaccaaatttctcaagatcgaaacatataattgaagatgagcgacgtatttgaagggtacgagcgtcaatactgcgagctctcaaccaatctctctagaaaatgtcactctgcatcggttctctccaacggagaggagaagaaggggaagattgctcagatcaagtctggaatagacgaagctgatgtcttgatccggaaaatggatcttgaggcaagaagtttgcagccgagtgctaaagctgtgtgtctttctaaactaagagagtataaatctgatctgaaccaattgaagaaggaattcaaacgagtctcttccgcagatgctaagccgtcttcccgtgaagagttgatggaatccggaatggcggatctgcatgcagtatctgctgatcaaagaggaagattggcaatgtccgtggagaggcttgaccaatcaagtgacagaatcagggagagtagaagactaatgctggagacagaagaggttggcatctcaattgtccaagatttgagtcagcaacgccaaaccctccttcatgcgcacaacaagcttcatggtgtggatgacgccattgacaagagcaagaaggtgttgacggctatgtcaaggagaatgactaggaacaaatggatcattacatcggtaatcgtggctctcgttctcgccatcatcttgatcatctcatacaagctttctcattaatatactcaaaaaacattattcatcgtgattgtgtatatatatatgatggttgattttctctgtaatggcccaagtggttacttgtatttttaagtacgatgtttgtattgaagtggcaacacttttaacattcataaggtttcccaagtcttttcttttttgtctttttttccaaaaaagtggtactattttatataaagcagatgtttc

SEQ ID NO: 30815 - protein, 222 aa, Arabidopsis thaliana
  peptide (1)..(222): Ceres Seq. ID no. 13489875
MSDVFEGYERQYCELSTNLSRKCHSASVLSNGEEKKGKIAQIKSGIDEADVLIRKMDLEARSLQPSAKAVCLSKLREYKSDLNQLKKEFKRVSSADAKPSSREELMESGMADLHAVSADQRGRLAMSVERLDQSSDRIRESRRLMLETEEVGISIVQDLSQQRQTLLHAHNKLHGVDDAIDKSKKVLTAMSRRMTRNKWIITSVIVALVLAIILIISYKLSH

SEQ ID NO: 30816 - protein, 167 aa, Arabidopsis thaliana
  peptide (1)..(167): Ceres Seq. ID no. 13489876
MDLEARSLQPSAKAVCLSKLREYKSDLNQLKKEFKRVSSADAKPSSREELMESGMADLHAVSADQRGRLAMSVERLDQSSDRIRESRRLMLETEEVGISIVQDLSQQRQTLLHAHNKLHGVDDAIDKSKKVLTAMSRRMTRNKWIITSVIVALVLAIILIISYKLSH

SEQ ID NO: 30817 - protein, 117 aa, Arabidopsis thaliana
  peptide (1)..(117): Ceres Seq. ID no. 13489877
MESGMADLHAVSADQRGRLAMSVERLDQSSDRIRESRRLMLETEEVGISIVQDLSQQRQTLLHAHNKLHGVDDAIDKSKKVLTAMSRRMTRNKWIITSVIVALVLAIILIISYKLSH

SEQ ID NO: 30818 - DNA, 782 bp, Arabidopsis thaliana
  misc_feature (1)..(782): Ceres Seq. ID no. 12323507
  misc_feature (1)..(782): Ortholog of  Ceres SEQ ID NO 12627215 as cited in SEQ ID NO 60976
  misc_feature (1)..(782): Ortholog of  Ceres SEQ ID NO 13654980 as cited in SEQ ID NO 63094
  misc_feature (1)..(782): Ortholog of  Ceres SEQ ID NO 15174852 as cited in SEQ ID NO 67166
  misc_feature (1)..(782): Ortholog of  Ceres SEQ ID NO 12589584 as cited in SEQ ID NO 0
  misc_feature (1)..(782): Ortholog of  Ceres SEQ ID NO 12635657 as cited in SEQ ID NO 0
  misc_feature (1)..(782): Ortholog of  Ceres SEQ ID NO 12635879 as cited in SEQ ID NO 0
  misc_feature (1)..(782): Ortholog of  Ceres SEQ ID NO 13599649 as cited in SEQ ID NO 0
  misc_feature (1)..(782): Ortholog of  Ceres SEQ ID NO 14309404 as cited in SEQ ID NO 0
actactctgttttcacttttcgatttgagaaaaaaaaaaacgatcacgaagatggcgaaagcaagctttattctactcggaactctcttcctcttcggagccatagcttcaattcaggcaaaagaagatctcaaggaggttactcacaaggtttacttcgatgtagagatcgacggcaaatccgctggtcgcgttgttataggactatttggcaaggcagttcctaaaactgcagaaaacttcagagctttgtgcacaggggagaaaggtgtagggaagagtgggaaacctctacactacaagggaagcaagttccatcgaatcattcccagctttatgatccagggaggtgacttcacgcatgggaacggtatgggtggagaatcaatctatggtcagaagtttgctgatgagaacttcaagctgaagcacactggaccaggtgtactttcaatggcgaactcgggagaagacacaaatggttcgcagttttttatcacaacggtgacaacaagctggttagatggaaggcatgtggtgtttgggaaagtggtgcaaggaatggatgtagtttataagattgaagctgagggcaaacaaagcggaactcctaagagcaaagtcgtaattgcagacagtggagaacttcctctctaagaatagcattttaaagttactcttacgagttagttgtaatctaaacacgtcccaaatgctacaagaacagaatggtgtcactggactctgaaatttcgttttcttgcgtaacagacttttccatg

SEQ ID NO: 30819 - protein, 218 aa, Arabidopsis thaliana
  peptide (1)..(218): Ceres Seq. ID no. 12323508
TTLFSLFDLRKKKTITKMAKASFILLGTLFLFGAIASIQAKEDLKEVTHKVYFDVEIDGKSAGRVVIGLFGKAVPKTAENFRALCTGEKGVGKSGKPLHYKGSKFHRIIPSFMIQGGDFTHGNGMGGESIYGQKFADENFKLKHTGPGVLSMANSGEDTNGSQFFITTVTTSWLDGRHVVFGKVVQGMDVVYKIEAEGKQSGTPKSKVVIADSGELPL

SEQ ID NO: 30820 - protein, 201 aa, Arabidopsis thaliana
  peptide (1)..(201): Ceres Seq. ID no. 12323509
MAKASFILLGTLFLFGAIASIQAKEDLKEVTHKVYFDVEIDGKSAGRVVIGLFGKAVPKTAENFRALCTGEKGVGKSGKPLHYKGSKFHRIIPSFMIQGGDFTHGNGMGGESIYGQKFADENFKLKHTGPGVLSMANSGEDTNGSQFFITTVTTSWLDGRHVVFGKVVQGMDVVYKIEAEGKQSGTPKSKVVIADSGELPL

SEQ ID NO: 30821 - DNA, 954 bp, Arabidopsis thaliana
  misc_feature (1)..(954): Ceres Seq. ID no. 12357683
  misc_feature (1)..(954): Ortholog of  Ceres SEQ ID NO 15170792 as cited in SEQ ID NO 52707
acattacgaaaagtactagtttattggtgttattcatcgctgctcaaggtggcaaaccaaggagaacaagaagagtccagggccaatgagcctgagggtatcaaatcagtgattgatgacatctacaattttgaagacgaccctgtggttgatagattcaatagatttggaacggagatgtctgccatggtctcggccttgacacaggtggtttctgctcgctctcagactgaagctgaaggtgctcactcttcttcctcctcggctggacataagagagaatggcttggaatcgattctgttcctattccctcatcatttgctcgtgtagactcttcacataatccgatcgaagaatccataagaaaggcatttccagaggaagcaagggagaaaaaaaggaggtacagaggagtaaggcagagaccatggggcaaatgggcagctgagatacgtgatccacatagagccgctagggtttggctcgggacgtttgatacagcggaggccgcggctagagcctacgacgaggctgcactccggttccgtggaaataaagcaaagctaaatttcccagaggatgtaaggattcttcctcctccccctcctcttcttcgttcaccagctgacacggtggcgaataaagcagaagaggatctgataaattattggagttatacaaagttgttgcaaagttcaggccaacggtcatttctcgagcgaggacaagaagagagtaataacatatttgaacattcaccaatggaacaacctctgcctccttcaagttctggtccaagttcctctaattttcctgcaccttctctacctaatacatagtttcacttttattaaagctctacaaatacaattaaatacatagctaaatgaaaatgattttcttgtctgtataccttcttaagtgctaaacaatatattgtactctttgtttcc

SEQ ID NO: 30822 - protein, 279 aa, Arabidopsis thaliana
  peptide (1)..(279): Ceres Seq. ID no. 12357684
TLRKVLVYWCYSSLLKVANQGEQEESRANEPEGIKSVIDDIYNFEDDPVVDRFNRFGTEMSAMVSALTQVVSARSQTEAEGAHSSSSSAGHKREWLGIDSVPIPSSFARVDSSHNPIEESIRKAFPEEAREKKRRYRGVRQRPWGKWAAEIRDPHRAARVWLGTFDTAEAAARAYDEAALRFRGNKAKLNFPEDVRILPPPPPLLRSPADTVANKAEEDLINYWSYTKLLQSSGQRSFLERGQEESNNIFEHSPMEQPLPPSSSGPSSSNFPAPSLPNT

SEQ ID NO: 30823 - protein, 220 aa, Arabidopsis thaliana
  peptide (1)..(220): Ceres Seq. ID no. 12357685
MSAMVSALTQVVSARSQTEAEGAHSSSSSAGHKREWLGIDSVPIPSSFARVDSSHNPIEESIRKAFPEEAREKKRRYRGVRQRPWGKWAAEIRDPHRAARVWLGTFDTAEAAARAYDEAALRFRGNKAKLNFPEDVRILPPPPPLLRSPADTVANKAEEDLINYWSYTKLLQSSGQRSFLERGQEESNNIFEHSPMEQPLPPSSSGPSSSNFPAPSLPNT

SEQ ID NO: 30824 - protein, 217 aa, Arabidopsis thaliana
  peptide (1)..(217): Ceres Seq. ID no. 12357686
MVSALTQVVSARSQTEAEGAHSSSSSAGHKREWLGIDSVPIPSSFARVDSSHNPIEESIRKAFPEEAREKKRRYRGVRQRPWGKWAAEIRDPHRAARVWLGTFDTAEAAARAYDEAALRFRGNKAKLNFPEDVRILPPPPPLLRSPADTVANKAEEDLINYWSYTKLLQSSGQRSFLERGQEESNNIFEHSPMEQPLPPSSSGPSSSNFPAPSLPNT

SEQ ID NO: 30825 - DNA, 1157 bp, Arabidopsis thaliana
  misc_feature (1)..(1157): Ceres Seq. ID no. 12423136
  misc_feature (1)..(1157): Ortholog of  Ceres SEQ ID NO 13656155 as cited in SEQ ID NO 64609
cgagatatatcgactccgcgaccctccactactctgctgatctacacacacacacacaaacacaatcgccggcaacaatggcgaagctcacacttctcttcttcctttcctttctcatcttctcctcatccatcgctttccaatcagacgagctcctcgttgacgacgacgaatttggtctagaaggagcaaagccccgctgccaccgatcttcacacatcttcttcttcttcgccacagcagcagcaacagactccaactattcggagaagatactcagatcctaccgatttggattcaaaagtccaatttactctcgaacatgccttcggtgactctgatttctcccccgccggtactttctccgctcgtctcaaaacctggagtcatggcggaaagacattaacgaagctgcgattctctagaaatgatttttctgctgaagagaaagatgcattcaagaatctgctgaaaggagatggcttttatcggattcggcttccatctaatgtggttagtccaccagggagagagtttgtgattgcatcagtgagagctagatgtctaccacgggatggcttggatgagcatttcattatacacatggaaggtgctaacatcttggcagttagttatggttctcctggggcgtgtcaatatcctcgacaattgaaacttccagcaaaatggtcgtttaactctcacacaattctgaaaagcagtgagcaggcgccaagaactccaatattcactgaggagattctaggcagtgagaatgtagagggagaagttgaaccaccaccagagagatcattttgggcgaaatattggatgtatttgataccgctgggactcgtagtgatgaatgccgtgacacaagcatcaaacatggctgaagaacctgcgggtggacaggcaggaggtgcacaagtgcaaccagctgccaggagaagatgattccacttttacttctcccaaagcaatgaaagctgcagctggttagagatgatgattcaacagatcttcatgtaaaccatcttgccatcatttggttttatgtaacctttaattttaatcctcgatcggtgtgttttagtactcaccaatcgggaaatcaaaaatcttgtcttcatgacatatcaagaacaaagacattt

SEQ ID NO: 30826 - protein, 117 aa, Arabidopsis thaliana
  peptide (1)..(117): Ceres Seq. ID no. 12423137
MEGANILAVSYGSPGACQYPRQLKLPAKWSFNSHTILKSSEQAPRTPIFTEEILGSENVEGEVEPPPERSFWAKYWMYLIPLGLVVMNAVTQASNMAEEPAGGQAGGAQVQPAARRR

SEQ ID NO: 30827 - protein, 110 aa, Arabidopsis thaliana
  peptide (1)..(110): Ceres Seq. ID no. 12423138
RYIDSATLHYSADLHTHTQTQSPATMAKLTLLFFLSFLIFSSSIAFQSDELLVDDDEFGLEGAKPRCHRSSHIFFFFATAAATDSNYSEKILRSYRFGFKSPIYSRTCLR

SEQ ID NO: 30828 - protein, 85 aa, Arabidopsis thaliana
  peptide (1)..(85): Ceres Seq. ID no. 12423139
MAKLTLLFFLSFLIFSSSIAFQSDELLVDDDEFGLEGAKPRCHRSSHIFFFFATAAATDSNYSEKILRSYRFGFKSPIYSRTCLR

SEQ ID NO: 30829 - DNA, 636 bp, Arabidopsis thaliana
  misc_feature (1)..(636): Ceres Seq. ID no. 12325146
  misc_feature (1)..(636): Ortholog of  Ceres SEQ ID NO 14301855 as cited in SEQ ID NO 61528
agagagatagagagagagataatgggcaaagaaaaagacaaaaacagaggagcttctccttcatcttacggcacgtttcaaggtgtccctacttatcctccaccgtcctatcctcatcctccgtcgcatcatccagtcatcggaattcctcagccgtctccacctcccggatcacctcatcacgacatttccgttcatcaatacattcaagaacatcaaaccgttgctggttaccctgtttctcaaggaagacctgcaagacaaaaccgtcttccttgttgtggtcttggcctcggttggttcttgttcatcattggtttcctccttggtgcaattccatggtatgtaggcgtattcattctagtatgtgctaggatcgatccacgagagaaaccaggatacgtagcttgtaccattgcagctgttgttgctacaattaccatagtttttggtgtcatgggaggaagaggagtttggtcgtgaagtgtgcaaataaatacattgttcatcaagtatcttgaacttgtataggagaaacctttttggtgtttttaatggggatgatttaagtgtgggagtgcttgttgatttaagtgtgcaaataaatacattcttcatcaagtatcttgagctagt

SEQ ID NO: 30830 - protein, 160 aa, Arabidopsis thaliana
  peptide (1)..(160): Ceres Seq. ID no. 12325147
REIEREIMGKEKDKNRGASPSSYGTFQGVPTYPPPSYPHPPSHHPVIGIPQPSPPPGSPHHDISVHQYIQEHQTVAGYPVSQGRPARQNRLPCCGLGLGWFLFIIGFLLGAIPWYVGVFILVCARIDPREKPGYVACTIAAVVATITIVFGVMGGRGVWS

SEQ ID NO: 30831 - protein, 153 aa, Arabidopsis thaliana
  peptide (1)..(153): Ceres Seq. ID no. 12325148
MGKEKDKNRGASPSSYGTFQGVPTYPPPSYPHPPSHHPVIGIPQPSPPPGSPHHDISVHQYIQEHQTVAGYPVSQGRPARQNRLPCCGLGLGWFLFIIGFLLGAIPWYVGVFILVCARIDPREKPGYVACTIAAVVATITIVFGVMGGRGVWS

SEQ ID NO: 30832 - protein, 123 aa, Arabidopsis thaliana
  peptide (1)..(123): Ceres Seq. ID no. 12325149
RDRERDNGQRKRQKQRSFSFILRHVSRCPYLSSTVLSSSSVASSSHRNSSAVSTSRITSSRHFRSSIHSRTSNRCWLPCFSRKTCKTKPSSLLWSWPRLVLVHHWFPPWCNSMVCRRIHSSMC

SEQ ID NO: 30833 - DNA, 818 bp, Arabidopsis thaliana
  misc_feature (1)..(818): Ceres Seq. ID no. 12466495
  misc_feature (1)..(818): Ortholog of  Ceres SEQ ID NO 13599568 as cited in SEQ ID NO 509
  misc_feature (1)..(818): Ortholog of  Ceres SEQ ID NO 13638595 as cited in SEQ ID NO 52050
  misc_feature (1)..(818): Ortholog of  Ceres SEQ ID NO 13594748 as cited in SEQ ID NO 52114
  misc_feature (1)..(818): Ortholog of  Ceres SEQ ID NO 12623490 as cited in SEQ ID NO 61136
  misc_feature (1)..(818): Ortholog of  Ceres SEQ ID NO 12583993 as cited in SEQ ID NO 68098
acatggacctcaagtaaaatggaagcaaacactttgtttcttctaaaagctctttgtcttctttgttttaatgtatgcttcacattagcttccgaccctgatcccatccaagacttctgcataccaaaacctgtgacatctccttaccatgaccatcacttctccaccaatctcccttgcaaaaactcctccgaagtaaccaccgaagattttgtcttttccggtctaaaaactgccggaaacttcacggagacggggttcgccaccgtcccagtaggcccagaaaacttccccggccttaatacattaggcatctcgtttgtccgggctgatctcaaacccggatccattaacccaccacattaccatccgcgggcgacggaagtagcccacttggttaaaggacgggtttactctggttttgtggactcgaacaataaggtttacgctaaagtgatggaagaaggagaaatgatggtttacccaaaagggcttgtacattttcagatgaacgtcggagatgttacggccacgattgtcggcggacttaatagccaaaaccctggtattcagaagataccgtccgtggtttttgggtcagggatcaatgaggagttgcttatgaaagcttttgggttgagtcttaagcagattggtacgttgaagaaaagatttgatcctgtcatgtctaatgaacattgatgttttctcttaaagtcttatcgagattattacatcgaagttatcttttatgtgatggtagttcttgatcataatgttatttatatattttgacccaaacaatggtcatctttagc

SEQ ID NO: 30834 - protein, 233 aa, Arabidopsis thaliana
  peptide (1)..(233): Ceres Seq. ID no. 12466496
TWTSSKMEANTLFLLKALCLLCFNVCFTLASDPDPIQDFCIPKPVTSPYHDHHFSTNLPCKNSSEVTTEDFVFSGLKTAGNFTETGFATVPVGPENFPGLNTLGISFVRADLKPGSINPPHYHPRATEVAHLVKGRVYSGFVDSNNKVYAKVMEEGEMMVYPKGLVHFQMNVGDVTATIVGGLNSQNPGIQKIPSVVFGSGINEELLMKAFGLSLKQIGTLKKRFDPVMSNEH

SEQ ID NO: 30835 - protein, 227 aa, Arabidopsis thaliana
  peptide (1)..(227): Ceres Seq. ID no. 12466497
MEANTLFLLKALCLLCFNVCFTLASDPDPIQDFCIPKPVTSPYHDHHFSTNLPCKNSSEVTTEDFVFSGLKTAGNFTETGFATVPVGPENFPGLNTLGISFVRADLKPGSINPPHYHPRATEVAHLVKGRVYSGFVDSNNKVYAKVMEEGEMMVYPKGLVHFQMNVGDVTATIVGGLNSQNPGIQKIPSVVFGSGINEELLMKAFGLSLKQIGTLKKRFDPVMSNEH

SEQ ID NO: 30836 - DNA, 1041 bp, Arabidopsis thaliana
  misc_feature (1)..(1041): Ceres Seq. ID no. 13490044
  misc_feature (1)..(1041): Ortholog of  Ceres SEQ ID NO 15175425 as cited in SEQ ID NO 0
ctattttataaaattttagtaaaaagaagaaaaaaaaggaagaagaagaccaagaaattgaggtgcatgtgaggatgagtagtaaaaattaggaagactctagtctgggagagactttcagcagctatttctttgtcttctttctctttaaagaacctcactctctctctctttagtcaaaaatccccaattcgtgaacaaattagggtttttgaagtttgaagaaggagagaaagatgagtgcttcaaggtttatcaagtgtgtcactgtcggcgacggtgctgttggaaagacttgtcttctcatctcctacactagcaacactttccccacggattatgtgccaactgtgttcgataatttcagtgccaatgtgattgttgatggcaacactatcaacttgggattgtgggatactgcagggcaagaggactacaatagactaagacctttgagctatcgcggtgcagatgtcttcttacttgcattctcacttgtcagcaaagctagctatgaaaatgtttctaaaaagtgggttcctgaactgagacattatgctcctggtgttcccatcatcctcgttggaacaaagcttgatcttcgagatgataagcaattctttgccgagcaccctggtgctgtgcctatctctaccgctcagggtgaagaactaaagaagctgattggggcgcctgcttatatcgaatgcagtgcaaaaactcaacagaatgtgaaagcagtgtttgatgcggctatcaaggtcgttctccagccaccaaaaaacaagaagaagaagaagagaaaatctcagaaaggttgttctatactctgattcaacaagaagaaaggaatcaacaggagaattagagctataagtatttgttttctcctttttcataacttgtttacccaaggaatcaaaaatctgttgtttgtagtctgaaaatgacaaaagttgaagaactagtaacaagtatttgtattcttgtttgcattttgatctgtaaatataccacgaatccttgatttctctgtttcct

SEQ ID NO: 30837 - protein, 198 aa, Arabidopsis thaliana
  peptide (1)..(198): Ceres Seq. ID no. 13490045
MSASRFIKCVTVGDGAVGKTCLLISYTSNTFPTDYVPTVFDNFSANVIVDGNTINLGLWDTAGQEDYNRLRPLSYRGADVFLLAFSLVSKASYENVSKKWVPELRHYAPGVPIILVGTKLDLRDDKQFFAEHPGAVPISTAQGEELKKLIGAPAYIECSAKTQQNVKAVFDAAIKVVLQPPKNKKKKKRKSQKGCSIL

SEQ ID NO: 30838 - DNA, 784 bp, Arabidopsis thaliana
  misc_feature (1)..(784): Ceres Seq. ID no. 12332255
  misc_feature (1)..(784): Ortholog of  Ceres SEQ ID NO 15168553 as cited in SEQ ID NO 57750
aaatcaaacataacaaaaaccaacaaaacaaactcaaaaggattcttcttcaaacacaacatcttcaagaaaacatgaaaatggaaatgggtttagtgttccttacagtttttatggctgtgatgtcttctacaatggtctctgctcagtcaagctgcacaaacgcgttgattagcatgtcgccgtgtctcaactacataactggaaactctacctctcctaatcagcaatgctgtaatcagttgagtagagtagtccagtcttctcctgactgtttgtgtcaagtccttaacggtggaggctctcagcttgggatcaatgttaaccaaacacaagctcttggtctgcctagggcttgtaatgttcagactcctcctgtcagtcgctgtaataccggtggtggtggtggtggttctacttctgactctcctgcagaatcaccaaactcttcaggaccaggtaatggatcgaaaaccgtaccagtaggagaaggagacggacccccatcgtctgatggaagctctatcaagttctcatttcctcttattgccttcttctccgcggtttcctacatggcaatcttctgagttactattttcccatacgcttttgtgccactcagattgcattctttatttgtccctatttattcacatttcgttgtgattttgtgtgatgtattttatgctctgtaaatccctactctccgggtgatattgctttgttgtaccaacggagagcattttggatctctttaccttttataataaacattactttcccg

SEQ ID NO: 30839 - protein, 194 aa, Arabidopsis thaliana
  peptide (1)..(194): Ceres Seq. ID no. 12332256
IKHNKNQQNKLKRILLQTQHLQENMKMEMGLVFLTVFMAVMSSTMVSAQSSCTNALISMSPCLNYITGNSTSPNQQCCNQLSRVVQSSPDCLCQVLNGGGSQLGINVNQTQALGLPRACNVQTPPVSRCNTGGGGGGSTSDSPAESPNSSGPGNGSKTVPVGEGDGPPSSDGSSIKFSFPLIAFFSAVSYMAIF

SEQ ID NO: 30840 - protein, 170 aa, Arabidopsis thaliana
  peptide (1)..(170): Ceres Seq. ID no. 12332257
MKMEMGLVFLTVFMAVMSSTMVSAQSSCTNALISMSPCLNYITGNSTSPNQQCCNQLSRVVQSSPDCLCQVLNGGGSQLGINVNQTQALGLPRACNVQTPPVSRCNTGGGGGGSTSDSPAESPNSSGPGNGSKTVPVGEGDGPPSSDGSSIKFSFPLIAFFSAVSYMAIF

SEQ ID NO: 30841 - protein, 168 aa, Arabidopsis thaliana
  peptide (1)..(168): Ceres Seq. ID no. 12332258
MEMGLVFLTVFMAVMSSTMVSAQSSCTNALISMSPCLNYITGNSTSPNQQCCNQLSRVVQSSPDCLCQVLNGGGSQLGINVNQTQALGLPRACNVQTPPVSRCNTGGGGGGSTSDSPAESPNSSGPGNGSKTVPVGEGDGPPSSDGSSIKFSFPLIAFFSAVSYMAIF

SEQ ID NO: 30842 - DNA, 965 bp, Arabidopsis thaliana
  misc_feature (1)..(965): Ceres Seq. ID no. 13491928
  misc_feature (1)..(965): Ortholog of  Ceres SEQ ID NO 13597338 as cited in SEQ ID NO 64272
cgttacgttttaggcgtttaacacaattattattttctaaaacgagagccgtttaacgagaaagagaaatttctaactccagagagcgaagaacacaatcccagagtagcagaatctgatccatcccacctttttcaattctcaggcaaagtgtttgatctcatattcggataagtcaaacttgaaaaaatggaagggactgtgttcacgccttgtttggaaggaatgaagcatgtcaaatctgatcaaggcgagatgcttactaagccatttttagagctttgcaagaccatcttgcctgttatagataaatttggagctgctatgactctcgtgaaatctgacattggtggcaacataacgaggttggagaagaactacttatctgatcccgacaagttcaagtacttgtacacctttgttcaagtcgaaattgagtctaagatagcaaaaggatcgtctagctgtacaaacggtcttctctggttaaccagagcaatggatttcttagtggagctgttccgaaacttggtagcacatcaagactggtcaatgccacaagcttgtgctgactcataccaaaaaacactcaagaaatggcacggatggctcgccagctctaccttctctatggctttaaagctagctccggacaggaagaagttcatggatgtcatatctggttctggtaacatccaagccgacatggaaaggttttgtgctgagtttggtccgtttcttcatgataatcataagtttctggctagcgtcggtatggatgacatgaaagcttcttaagtcatcatatgattatcgccggtatcaaatcttctttgccggaatctttgtctgttttaacttttctccttccaattatagaacctccaaaaagaaacagaataatgtgttggtttctatctgaatgttcactttatattacaagttataacatacgaatcaatctt

SEQ ID NO: 30843 - protein, 202 aa, Arabidopsis thaliana; identical to SEQ ID NO: 24242
  peptide (1)..(202): Ceres Seq. ID no. 13491929

SEQ ID NO: 30844 - protein, 190 aa, Arabidopsis thaliana; identical to SEQ ID NO: 24243
  peptide (1)..(190): Ceres Seq. ID no. 13491930

SEQ ID NO: 30845 - protein, 180 aa, Arabidopsis thaliana; identical to SEQ ID NO: 24244
  peptide (1)..(180): Ceres Seq. ID no. 13491931

SEQ ID NO: 30846 - DNA, 673 bp, Arabidopsis thaliana
  misc_feature (1)..(673): Ceres Seq. ID no. 12322661
  misc_feature (1)..(673): Ortholog of  Ceres SEQ ID NO 14307370 as cited in SEQ ID NO 54127
  misc_feature (1)..(673): Ortholog of  Ceres SEQ ID NO 13596338 as cited in SEQ ID NO 68005
aaaaaatttactcggattttaaagcagattccttcgatctaaagaaagagagaaaatggagaatatgttaggtcttctaagacttcatgtgattagaggtgttaatcttgccatcagagattctcaaagcagtgatccttatgtcattgtcctatgggaaaacagaagctacgaacccgtgtgatgaaaaagaatttgaatccagaatggaacgaagacttgacactttctgttactgatccaactcttcctgtcaagatcatggtgtacgatagggacaggttctcaagagatgataagatgggagatgcgatttttcacattgatccgttccttgaagccatcagaatccaaaaccaactaggaggactacctgaggggactgtaataatgaagatacaggcaagcagacaaaactgcttgtcagaagagagcaagattgtatggcacaaaggaaagattgtccagaacatgttccttaagcttcagaatgttgaacgaggggagatagagctgcagcttgagtggatcgatgtctccggcgccttgactgatgatgcggaggatgttgctttctagatcgactctatactacaagaaattcctgtgatgatacggcgaaaacaataacacaaactgatgtagtgatttactcaattaataatcttaatgc

SEQ ID NO: 30847 - protein, 141 aa, Arabidopsis thaliana
  peptide (1)..(141): Ceres Seq. ID no. 12322662
MGKQKLRTRVMKKNLNPEWNEDLTLSVTDPTLPVKIMVYDRDRFSRDDKMGDAIFHIDPFLEAIRIQNQLGGLPEGTVIMKIQASRQNCLSEESKIVWHKGKIVQNMFLKLQNVERGEIELQLEWIDVSGALTDDAEDVAF

SEQ ID NO: 30848 - protein, 131 aa, Arabidopsis thaliana
  peptide (1)..(131): Ceres Seq. ID no. 12322663
MKKNLNPEWNEDLTLSVTDPTLPVKIMVYDRDRFSRDDKMGDAIFHIDPFLEAIRIQNQLGGLPEGTVIMKIQASRQNCLSEESKIVWHKGKIVQNMFLKLQNVERGEIELQLEWIDVSGALTDDAEDVAF

SEQ ID NO: 30849 - protein, 105 aa, Arabidopsis thaliana
  peptide (1)..(105): Ceres Seq. ID no. 12322664
MVYDRDRFSRDDKMGDAIFHIDPFLEAIRIQNQLGGLPEGTVIMKIQASRQNCLSEESKIVWHKGKIVQNMFLKLQNVERGEIELQLEWIDVSGALTDDAEDVAF

SEQ ID NO: 30850 - DNA, 1333 bp, Arabidopsis thaliana
  misc_feature (1)..(1333): Ceres Seq. ID no. 13504694
  misc_feature (1)..(1333): Ortholog of  Ceres SEQ ID NO 13596474 as cited in SEQ ID NO 62169
  misc_feature (1)..(1333): Ortholog of  Ceres SEQ ID NO 13598714 as cited in SEQ ID NO 62656
  misc_feature (1)..(1333): Ortholog of  Ceres SEQ ID NO 13597519 as cited in SEQ ID NO 64759
  misc_feature (1)..(1333): Ortholog of  Ceres SEQ ID NO 13597870 as cited in SEQ ID NO 64982
  misc_feature (1)..(1333): Ortholog of  Ceres SEQ ID NO 13587054 as cited in SEQ ID NO 0
acactatcaatctacgatcatatatctttcatttcatcatcatggaccacaaaatgtcaatgtatttgtttgtgtcttacctagcaatctttactcttttcttcaaaggctttgtctcctcgtttccttcgggatataacaatggttacaacaatggtcacggacatggactaactagcaatctcaactatcgattctatgaccggtcttgtccgcgtcttcaaacgattgttaagtccggagtttggagagcttttaaagatgattctcgaatcgctgcatctcttcttcgactccatttccacgattgttttgtcaatggatgtgatggatctatacttctgaacgattcagaggatttcaaaggagagaagaacgctcagccaaaccgaaactcagtccgtggattcgaagtcattgaagacattaaatctgatatcgaaagttcttgtcccttaacagtttcatgcgctgacatagttgctctcgcggctagagaagctgtcgtcctcactggaggaccgttttggcccgtgcctttgggacgaagggactcattaacggcgagtgagcaagcggcgaatacaaatctgccatctccgtttgaggcgttggagaatataacagccaagttcgtgacccttggactcgacctcaaggacgttgttgtcctctcaggagcacatactataggatttgctcaatgtttcgtgatcaagcatagactcttcaacttcaagggctcaggccagcctgacccaaacctagccgcttcctcagcacttctctctaagctaaaggacacgtgtcctaacgtggactcctcagactctaagctcgctgctcttgacgcagctagctcagtcaagtttgacaatgcttactacgtgaacttaatgaacaacataggactgttggattctgatcaaaccctaatgacagatcctacggctgccgccttggtgaagtcgtacagcgagaatccgtacttgttctcgagggatttcgcagtttcaatggttaaaatggggaatatcggagttatgaccggaagtgatggagtaattcgaggaaaatgtggatttccaggttaagttatatatagactcttcacaaaatccaaatcagtctattatatatctagagctaatctagctttaatgaggaatcaaataaaccaaagtctatgaataaaatatgttttatatatatggtgtaaaagcgtccttatgtatcaatatatatatatatggatcccataaacaaaaatacttggacttgtatgtgtgttacgtttgtgtgtaatggaaaatgtatttgtctttgtattttt

SEQ ID NO: 30851 - protein, 363 aa, Arabidopsis thaliana
  peptide (1)..(363): Ceres Seq. ID no. 13504695
TINLRSYIFHFIIMDHKMSMYLFVSYLAIFTLFFKGFVSSFPSGYNNGYNNGHGHGLTSNLNYRFYDRSCPRLQTIVKSGVWRAFKDDSRIAASLLRLHFHDCFVNGCDGSILLNDSEDFKGEKNAQPNRNSVRGFEVIEDIKSDIESSCPLTVSCADIVALAAREAVVLTGGPFWPVPLGRRDSLTASEQAANTNLPSPFEALENITAKFVTLGLDLKDVVVLSGAHTIGFAQCFVIKHRLFNFKGSGQPDPNLAASSALLSKLKDTCPNVDSSDSKLAALDAASSVKFDNAYYVNLMNNIGLLDSDQTLMTDPTAAALVKSYSENPYLFSRDFAVSMVKMGNIGVMTGSDGVIRGKCGFPG

SEQ ID NO: 30852 - protein, 350 aa, Arabidopsis thaliana
  peptide (1)..(350): Ceres Seq. ID no. 13504696
MDHKMSMYLFVSYLAIFTLFFKGFVSSFPSGYNNGYNNGHGHGLTSNLNYRFYDRSCPRLQTIVKSGVWRAFKDDSRIAASLLRLHFHDCFVNGCDGSILLNDSEDFKGEKNAQPNRNSVRGFEVIEDIKSDIESSCPLTVSCADIVALAAREAVVLTGGPFWPVPLGRRDSLTASEQAANTNLPSPFEALENITAKFVTLGLDLKDVVVLSGAHTIGFAQCFVIKHRLFNFKGSGQPDPNLAASSALLSKLKDTCPNVDSSDSKLAALDAASSVKFDNAYYVNLMNNIGLLDSDQTLMTDPTAAALVKSYSENPYLFSRDFAVSMVKMGNIGVMTGSDGVIRGKCGFPG

SEQ ID NO: 30853 - protein, 346 aa, Arabidopsis thaliana
  peptide (1)..(346): Ceres Seq. ID no. 13504697
MSMYLFVSYLAIFTLFFKGFVSSFPSGYNNGYNNGHGHGLTSNLNYRFYDRSCPRLQTIVKSGVWRAFKDDSRIAASLLRLHFHDCFVNGCDGSILLNDSEDFKGEKNAQPNRNSVRGFEVIEDIKSDIESSCPLTVSCADIVALAAREAVVLTGGPFWPVPLGRRDSLTASEQAANTNLPSPFEALENITAKFVTLGLDLKDVVVLSGAHTIGFAQCFVIKHRLFNFKGSGQPDPNLAASSALLSKLKDTCPNVDSSDSKLAALDAASSVKFDNAYYVNLMNNIGLLDSDQTLMTDPTAAALVKSYSENPYLFSRDFAVSMVKMGNIGVMTGSDGVIRGKCGFPG

SEQ ID NO: 30854 - DNA, 2484 bp, Arabidopsis thaliana
  misc_feature (1)..(2484): Ceres Seq. ID no. 12327297
  misc_feature (1)..(2484): Ortholog of  Ceres SEQ ID NO 14313151 as cited in SEQ ID NO 54664
gtctgattcttcaataagctcacggatttctcctcaaaatcctaatccaatcatttctccaattctccaaggagtttggtaatacacaaataacatggaagacgttagaagaagaaacagaggacatcctctgctcagatccaagaagagaggagaaggctacaaccatggcttctcaccgtctcagattcaatctcttgccgtcatctgtcaaactttcctccctccggagaccacgtcggaacagcaagctgttaattccttccacgtagcctcctctactcaaccaccattcactgatgaggtggcggagatgatagtgaaaaacggacgatcagaagcagtcaaagttttgagaatcatattgatgattttgtcattcagatttggaactttgttgctttgtgggtctctctgtcttgataagagttggccttttgttcttaaattctctcaacttccattggataaaagagaagcgatcttgagaaattggtctagacaaagtggattccttcttccatttcgtatcactttcttccttgcaaaattctacaccctcttctacttcttctcccagacggatgagaatctgaagaatcctgcactggaagctatagggtattgcatcgatgggacagagagaagtagcaacaagaagagtgaagcagatgagaagcgacgacctctagagaaagggatcattgaaactatgcatgagagtgacgtaaccatcacacaatctctaactgaaaaaggtgttcatgttgctagagacgatggtgacaatgtgtacaggatcagatgcgatgcggttgttgtaggctcaggaagtggaggaggtgttgcagctgcaaacctagctaaagctggattgaaagtcttggttctagagaaaggaaactactttacagctcatgactattcgggtctagaagttccgtctatgctcgagttatacgaaaaaggcggccttttgactacggttgatgggaaatttatgctcttggctggttcagctgttggaggaggtacagctgttaattggtctgcatctataaggacaccggatcatgttttgcaggaatggtctgaagggagtaagatcaagttttttggtagccaagaatatcagtctgcaatggatgaagttacgataaggattggtgtcacggaaagatgtgtcaaacacgggtttcagaatcaggttctgcggaaagggtgcgagagactcggtttgcaggtagaatcagttccaaggaactcaccagaggatcattactgtggcttgtgcgggtatggatgtagagcaggagccaagaacgggacagatcaaacctggttggttgatgctgtagagaatggtgcagtgatcctgacagggatcaaagctgagagatttgtattagtagacaacactagtagtagcaatgagagaaagaaacgatgtgtgggagtgtttgctagctctgttggaggaaagattgggaagaagtttattatcgaagctcgagtaacggtttcatccgctggatcgctgttaacaccgcctctgatgctttcgagtgggctaaagaacccgaacattggaaggaacttaaagctgcacccggttctgatgacatggggatacttcccggagaaagattctgagttctccgggaaaatgtatgagggagggatcatcacgtccgtccatcatatgaatgatactgaatctggatgcaaagcaatactggagaatccactgataggaccagcttcttacgcagggttgagcccgtgggtttcaggaccagaccttaaagagaggatgattaagtacggaagaacagctcatctttttgctctggttcgggacttagggtcaggtgaggttatgatggaaaacgaagttacatacaggacaaccaagaaagatagagagaatctgagggcaggtcttagacaagctttgcgggtttcggttgcagctggtgcagttgaagtcggaacatataggagtgatggacagaagatgaagtgtgaggcaattactaaagaagccatggaagagtttctagacgaagttgatgctgttggtggggttggcacaaaaggagagtattggacgacgtacttctcggctcaccagatgggtagttgtaggatgggagtcaccgcggaggaaggtgcgttggatgagaatggtgagagctgggaagcagaggggttgtttgtttgtgatggaagtatattgccatcagctgttggggttaacccaatgatcaccattcagtctactgcttactgcatctcctcaaagatagttgactcgctgcaaaacaaaacaaaagtatagagaagtaaaaaaagaaagaactgaaaccatcccattagtattcatatcgaataaatatgtttttccttgcaagacaaattttgtttaagaatcatggaataacttatcttgacgacaacaaagatgtaaacaaatgatatatc

SEQ ID NO: 30855 - protein, 748 aa, Arabidopsis thaliana
  peptide (1)..(748): Ceres Seq. ID no. 12327298
MEDVRRRNRGHPLLRSKKRGEGYNHGFSPSQIQSLAVICQTFLPPETTSEQQAVNSFHVASSTQPPFTDEVAEMIVKNGRSEAVKVLRIILMILSFRFGTLLLCGSLCLDKSWPFVLKFSQLPLDKREAILRNWSRQSGFLLPFRITFFLAKFYTLFYFFSQTDENLKNPALEAIGYCIDGTERSSNKKSEADEKRRPLEKGIIETMHESDVTITQSLTEKGVHVARDDGDNVYRIRCDAVVVGSGSGGGVAAANLAKAGLKVLVLEKGNYFTAHDYSGLEVPSMLELYEKGGLLTTVDGKFMLLAGSAVGGGTAVNWSASIRTPDHVLQEWSEGSKIKFFGSQEYQSAMDEVTIRIGVTERCVKHGFQNQVLRKGCERLGLQVESVPRNSPEDHYCGLCGYGCRAGAKNGTDQTWLVDAVENGAVILTGIKAERFVLVDNTSSSNERKKRCVGVFASSVGGKIGKKFIIEARVTVSSAGSLLTPPLMLSSGLKNPNIGRNLKLHPVLMTWGYFPEKDSEFSGKMYEGGIITSVHHMNDTESGCKAILENPLIGPASYAGLSPWVSGPDLKERMIKYGRTAHLFALVRDLGSGEVMMENEVTYRTTKKDRENLRAGLRQALRVSVAAGAVEVGTYRSDGQKMKCEAITKEAMEEFLDEVDAVGGVGTKGEYWTTYFSAHQMGSCRMGVTAEEGALDENGESWEAEGLFVCDGSILPSAVGVNPMITIQSTAYCISSKIVDSLQNKTKV

SEQ ID NO: 30856 - protein, 675 aa, Arabidopsis thaliana
  peptide (1)..(675): Ceres Seq. ID no. 12327299
MIVKNGRSEAVKVLRIILMILSFRFGTLLLCGSLCLDKSWPFVLKFSQLPLDKREAILRNWSRQSGFLLPFRITFFLAKFYTLFYFFSQTDENLKNPALEAIGYCIDGTERSSNKKSEADEKRRPLEKGIIETMHESDVTITQSLTEKGVHVARDDGDNVYRIRCDAVVVGSGSGGGVAAANLAKAGLKVLVLEKGNYFTAHDYSGLEVPSMLELYEKGGLLTTVDGKFMLLAGSAVGGGTAVNWSASIRTPDHVLQEWSEGSKIKFFGSQEYQSAMDEVTIRIGVTERCVKHGFQNQVLRKGCERLGLQVESVPRNSPEDHYCGLCGYGCRAGAKNGTDQTWLVDAVENGAVILTGIKAERFVLVDNTSSSNERKKRCVGVFASSVGGKIGKKFIIEARVTVSSAGSLLTPPLMLSSGLKNPNIGRNLKLHPVLMTWGYFPEKDSEFSGKMYEGGIITSVHHMNDTESGCKAILENPLIGPASYAGLSPWVSGPDLKERMIKYGRTAHLFALVRDLGSGEVMMENEVTYRTTKKDRENLRAGLRQALRVSVAAGAVEVGTYRSDGQKMKCEAITKEAMEEFLDEVDAVGGVGTKGEYWTTYFSAHQMGSCRMGVTAEEGALDENGESWEAEGLFVCDGSILPSAVGVNPMITIQSTAYCISSKIVDSLQNKTKV

SEQ ID NO: 30857 - protein, 657 aa, Arabidopsis thaliana
  peptide (1)..(657): Ceres Seq. ID no. 12327300
MILSFRFGTLLLCGSLCLDKSWPFVLKFSQLPLDKREAILRNWSRQSGFLLPFRITFFLAKFYTLFYFFSQTDENLKNPALEAIGYCIDGTERSSNKKSEADEKRRPLEKGIIETMHESDVTITQSLTEKGVHVARDDGDNVYRIRCDAVVVGSGSGGGVAAANLAKAGLKVLVLEKGNYFTAHDYSGLEVPSMLELYEKGGLLTTVDGKFMLLAGSAVGGGTAVNWSASIRTPDHVLQEWSEGSKIKFFGSQEYQSAMDEVTIRIGVTERCVKHGFQNQVLRKGCERLGLQVESVPRNSPEDHYCGLCGYGCRAGAKNGTDQTWLVDAVENGAVILTGIKAERFVLVDNTSSSNERKKRCVGVFASSVGGKIGKKFIIEARVTVSSAGSLLTPPLMLSSGLKNPNIGRNLKLHPVLMTWGYFPEKDSEFSGKMYEGGIITSVHHMNDTESGCKAILENPLIGPASYAGLSPWVSGPDLKERMIKYGRTAHLFALVRDLGSGEVMMENEVTYRTTKKDRENLRAGLRQALRVSVAAGAVEVGTYRSDGQKMKCEAITKEAMEEFLDEVDAVGGVGTKGEYWTTYFSAHQMGSCRMGVTAEEGALDENGESWEAEGLFVCDGSILPSAVGVNPMITIQSTAYCISSKIVDSLQNKTKV

SEQ ID NO: 30858 - DNA, 841 bp, Arabidopsis thaliana
  misc_feature (1)..(841): Ceres Seq. ID no. 13591613
  misc_feature (1)..(841): Ortholog of  Ceres SEQ ID NO 14305994 as cited in SEQ ID NO 52280
  misc_feature (1)..(841): Ortholog of  Ceres SEQ ID NO 14306255 as cited in SEQ ID NO 56917
cgtagacttatctctatataccccctttaatttgtttgctcttagcctttactttatagttttatatcatatcaatcgacatggcgaatgtggatcgtgatcggcgtgtgcatgtagaccgtactgacaaacgtgttcatcagccaaactacgaagatgatgtcggttttggtggctatggcggttatggtgctggttctgattataagagtcgcggcccctccactaaccaaatcttggcacttatagcaggagttcccattggtggcacactgctaaccctagctggactcactctagccggttcggtgatcggcttgctagtctccatacccctcttcctcctcttcagtccggtgatagtcccggcggctctcactattgggcttgctgtgacgggaatcttggcttctggtttgtttgggttgacgggtctgagctcggtctcgtgggtcctcaactacctccgtgggacgagtgatacagtgccagagcaattggactacgctaaacggcgtatggctgatgcggtaggctatgctggtatgaagggaaaagagatgggtcagtatgtgcaagataaggctcatgaggctcgtgagactgagttcatgactgagacccatgagccgggtaaggccaggagaggctcataagctaatataaattgcgggagtcagttggaaacgcgataaatgtagttttacttttatgtcccagtttctttcctcttttaagaatatctttgtctatatatgtgttcgttcgttttgtcttgtccaaataaaaatccttgttagtgaaataagaaatgaaataaatatgttttcttttttgagat

SEQ ID NO: 30859 - protein, 191 aa, Arabidopsis thaliana
  peptide (1)..(191): Ceres Seq. ID no. 13591614
MANVDRDRRVHVDRTDKRVHQPNYEDDVGFGGYGGYGAGSDYKSRGPSTNQILALIAGVPIGGTLLTLAGLTLAGSVIGLLVSIPLFLLFSPVIVPAALTIGLAVTGILASGLFGLTGLSSVSWVLNYLRGTSDTVPEQLDYAKRRMADAVGYAGMKGKEMGQYVQDKAHEARETEFMTETHEPGKARRGS

SEQ ID NO: 30860 - DNA, 665 bp, Arabidopsis thaliana
  misc_feature (1)..(665): Ceres Seq. ID no. 12323110
  misc_feature (1)..(665): Ortholog of  Ceres SEQ ID NO 15174142 as cited in SEQ ID NO 64367
agtctagagccgcgcaagaagacgattctctctcttgagttgaagaaatgaagcacaacaatgttatccccaatggtcacttcaaaaagcactggcagaattatgtcaagacatggttcaaccagcctgccaggaaaaccagaagaagaattgcgaggcaaaagaaggctgtgaagatcttccctcgtccaacttctggacctctccgccctgttgtgcatggtcagactcttaagtacaacatgaaggtcagaaccggtaaaggattcactcttgaagagctcaaggctggtgactctacaccagaagagttggctaatgctacccaagttcaaggagactacttgcctattgtacgtgagaagcctaccatggaactcgtcaagctgacttcagaaatgaagtctttcaaggcttttgacaagatacgccttgagcgcactaacaagaggcatgccggagctagagccaagagagccgcagaggctgagaaagaagagaagaagtgaggtcgttcttcttaggtagaagaaacttttatcttatcaacttttggaactgaattttgtgtatcagactgtcttttctttcatcagtttttatccttaaatctttgattttgctgctaccttgcttctcttgatttatggaaaagaccgtatctc

SEQ ID NO: 30861 - protein, 153 aa, Arabidopsis thaliana
  peptide (1)..(153): Ceres Seq. ID no. 12323111
MKHNNVIPNGHFKKHWQNYVKTWFNQPARKTRRRIARQKKAVKIFPRPTSGPLRPVVHGQTLKYNMKVRTGKGFTLEELKAGDSTPEELANATQVQGDYLPIVREKPTMELVKLTSEMKSFKAFDKIRLERTNKRHAGARAKRAAEAEKEEKK

SEQ ID NO: 30862 - protein, 88 aa, Arabidopsis thaliana
  peptide (1)..(88): Ceres Seq. ID no. 12323112
MKVRTGKGFTLEELKAGDSTPEELANATQVQGDYLPIVREKPTMELVKLTSEMKSFKAFDKIRLERTNKRHAGARAKRAAEAEKEEKK

SEQ ID NO: 30863 - DNA, 1593 bp, Arabidopsis thaliana
  misc_feature (1)..(1593): Ceres Seq. ID no. 12322908
  misc_feature (1)..(1593): Ortholog of  Ceres SEQ ID NO 14312176 as cited in SEQ ID NO 59203
gattgactaaaagtcattaaattacaaatctaaagttaaaagtgtttcgtctgaaatttcttgttagctccaaaagaggaaaacgaatccaagaaggagaaaaagtctcattcctcaagctccgcatcattcctccttcatggggtctctgcatcttacaatttagcactctcatattattattccttaaaccccttgttttgattttgtttccagatttaaagaaaccctaagacctcttcgaaatctccccagaaacacttatttcatttcttccttggccttgactacgcgtctttccttttactccggaaggaagatccagaaaggttttctttcgatcgttgcttttgactatgcatagatctggtacaacaatggcgtggaacgtattcaagttctgtactgccttacgaggtcttggatcgatcatgatccttttggttcttggtgttgtcggtgttacttattacgctgtcgttttgactaattatggtcctgcactctctcaaggtggccttgattctcttgctgctctcactatcttaatcctcttccatttcctcctggcaatgcttttgtggagctatttctcagtggtttttactgatcctggtgttgtgcctcctaattggagaccatctactgatgaagaaagaggtgaatctgatccgttaaatagtttggactttgttggtttacaatccgattcttcttcttcaaacccaagagttcggttttgtcggaagtgcaatcaactaaaaccttctcgttgtcatcattgttctgtttgtggtcggtgtgtgttgaagatggatcaccattgtgtttgggttgttaactgtgtaggagcactgaactataagtattttcttcttttcttgttctacacatttttagagacgacccttgtgactttggttcttatgccgcacttcattgcattctttagtgatgaagaaatacctggaaccccaggcactcttgctactacttttcttgcatttgttttgaacttggcatttgcgttgagcgtgatgggtttcttaattatgcatatttccttggtagctggcaataccacaactatagaggcatatgagaagaaaaccactacaaaatggcggtatgacctcggtaaaaagaaaaactttgaacaggtatttggaatggataagagatactggttaatcccaggatacacagaagaagatctaaggcgaatgccggagctgcagggacttgaatacccttcgaaacccgactttgattcccagtgatgctcaagaagactttgatcatcatcatcatcccatgtaaaacagcaatacgtagaaaaacagagcaagtggcatgtcaaggagaaatctactaacatgaagatggatgcttcactttaggcagtgtagatgtcttcccatggaaggctaagtcatcatcaaatttgtgggttttgaaaagaggatgattacaatttagctttgttggccacatatatgttcatcatcttcaatagttcatatatagatatgatcttattataaatgtagaacacacatgatttaccctaaatcctcttgactcttttgtttc

SEQ ID NO: 30864 - protein, 307 aa, Arabidopsis thaliana
  peptide (1)..(307): Ceres Seq. ID no. 12322909
MHRSGTTMAWNVFKFCTALRGLGSIMILLVLGVVGVTYYAVVLTNYGPALSQGGLDSLAALTILILFHFLLAMLLWSYFSVVFTDPGVVPPNWRPSTDEERGESDPLNSLDFVGLQSDSSSSNPRVRFCRKCNQLKPSRCHHCSVCGRCVLKMDHHCVWVVNCVGALNYKYFLLFLFYTFLETTLVTLVLMPHFIAFFSDEEIPGTPGTLATTFLAFVLNLAFALSVMGFLIMHISLVAGNTTTIEAYEKKTTTKWRYDLGKKKNFEQVFGMDKRYWLIPGYTEEDLRRMPELQGLEYPSKPDFDSQ

SEQ ID NO: 30865 - protein, 300 aa, Arabidopsis thaliana
  peptide (1)..(300): Ceres Seq. ID no. 12322910
MAWNVFKFCTALRGLGSIMILLVLGVVGVTYYAVVLTNYGPALSQGGLDSLAALTILILFHFLLAMLLWSYFSVVFTDPGVVPPNWRPSTDEERGESDPLNSLDFVGLQSDSSSSNPRVRFCRKCNQLKPSRCHHCSVCGRCVLKMDHHCVWVVNCVGALNYKYFLLFLFYTFLETTLVTLVLMPHFIAFFSDEEIPGTPGTLATTFLAFVLNLAFALSVMGFLIMHISLVAGNTTTIEAYEKKTTTKWRYDLGKKKNFEQVFGMDKRYWLIPGYTEEDLRRMPELQGLEYPSKPDFDSQ

SEQ ID NO: 30866 - protein, 282 aa, Arabidopsis thaliana
  peptide (1)..(282): Ceres Seq. ID no. 12322911
MILLVLGVVGVTYYAVVLTNYGPALSQGGLDSLAALTILILFHFLLAMLLWSYFSVVFTDPGVVPPNWRPSTDEERGESDPLNSLDFVGLQSDSSSSNPRVRFCRKCNQLKPSRCHHCSVCGRCVLKMDHHCVWVVNCVGALNYKYFLLFLFYTFLETTLVTLVLMPHFIAFFSDEEIPGTPGTLATTFLAFVLNLAFALSVMGFLIMHISLVAGNTTTIEAYEKKTTTKWRYDLGKKKNFEQVFGMDKRYWLIPGYTEEDLRRMPELQGLEYPSKPDFDSQ

SEQ ID NO: 30867 - DNA, 838 bp, Arabidopsis thaliana
  misc_feature (1)..(838): Ceres Seq. ID no. 12335427
  misc_feature (1)..(838): Ortholog of  Ceres SEQ ID NO 15168314 as cited in SEQ ID NO 60142
aactactctctctctctctctttcttctgccatcgccaaaaacttgtcttttgcttcttatttgctctgatcttttgattcaacggctcccggagacgacggaagcaatgcagttcttcggtggatctgagattagtccgtcgccgccagttccgacggcgagtggaaacaacgcgcacatgatgtacgttttcaatcgtaacggtgtatgtcttctctacaaagaatggaatcggcctcttcatacacttaatcctcagcaagatcacaagctcatgtttggtcttctcttctctctcaaatctctcaccgctaagatggatccagtcaatgcggataaaggaaatcttggggttccacagttgccaggacaaggttgctctttccatagtttccgtacgaatacttacaagctaagtttcatggagactccctctggtattaagattatcttagtaactcatccaaagaccggagatttacgcgaatccttgaagtacatctacagtttatacgttgaatatgtcgtaaaaaatcctatatacagcccaggatctccaatcaagtcggagttgttcaacactgcacttgaccagtacgtaaggagcatctcttagtgtgtgcattacagatttgtccattggaacttctctccttcaacagaactatcgtctgaacaatctctgaaaagaagagagaattgtagtagagagatttatcttgagttcgactgttttctctgcaaatctatgtttcgtttaccctttttattaactccactgtattggcttgctatcaatgatgttcatggtttactcaaatattgaaatgcgacatg

SEQ ID NO: 30868 - protein, 204 aa, Arabidopsis thaliana
  peptide (1)..(204): Ceres Seq. ID no. 12335428
LLSLSLFLLPSPKTCLLLLICSDLLIQRLPETTEAMQFFGGSEISPSPPVPTASGNNAHMMYVFNRNGVCLLYKEWNRPLHTLNPQQDHKLMFGLLFSLKSLTAKMDPVNADKGNLGVPQLPGQGCSFHSFRTNTYKLSFMETPSGIKIILVTHPKTGDLRESLKYIYSLYVEYVVKNPIYSPGSPIKSELFNTALDQYVRSIS

SEQ ID NO: 30869 - protein, 169 aa, Arabidopsis thaliana; identical to SEQ ID NO: 24678
  peptide (1)..(169): Ceres Seq. ID no. 12335429

SEQ ID NO: 30870 - protein, 145 aa, Arabidopsis thaliana; identical to SEQ ID NO: 24679
  peptide (1)..(145): Ceres Seq. ID no. 12335430

SEQ ID NO: 30871 - DNA, 776 bp, Arabidopsis thaliana
  misc_feature (1)..(776): Ceres Seq. ID no. 12332230
  misc_feature (1)..(776): Ortholog of  Ceres SEQ ID NO 15173516 as cited in SEQ ID NO 61801
atacgattgccataatttcatccatacttatccggtttataacaccgataatccgatttggtcaaaatccggcggagaaaaaccctaaaaatggagaaagagacgaaggagaagatcgagaaaactgtgatagagatactcagtgaatcggatatgaaagagataacagagttcaaggttcgtaaactcgcttcggagaaactcgcaatcgatctctcggagaaatctcacaaagcatttgtacgaagcgtcgtggagaaattcctcgacgaagagagagcgagagaatatgaaaactcacaagtgaataaggaagaagaagatggagataaggattgtggtaaaggaaacaaagagtttgatgatgacggcgatcttatcatttgcaggttatcggataagagaagagtgacgattcaggaatttaaagggaagagtttggtttctatcagagagtattacaagaaagatggcaaagaacttcctacttctaaaggaataagcttaacagatgaacaatggtcaaccttcaagaaaaacatgccagccatcgaaaatgctgtcaagaaaatggaatcgcgtgtctgaatgaagaacatgtgatactttatctctaaacatgtgtaagtgtcttcttaagtagttagttgttcgaatgttcaggtctctcatgtaactgtcttttttattttcttctctcgaattggtcgttatgtgtctcgtactgagttgtatccatttcgctttaaccgattccaaaaactctggaccaaagt

SEQ ID NO: 30872 - protein, 165 aa, Arabidopsis thaliana
  peptide (1)..(165): Ceres Seq. ID no. 12332231
MEKETKEKIEKTVIEILSESDMKEITEFKVRKLASEKLAIDLSEKSHKAFVRSVVEKFLDEERAREYENSQVNKEEEDGDKDCGKGNKEFDDDGDLIICRLSDKRRVTIQEFKGKSLVSIREYYKKDGKELPTSKGISLTDEQWSTFKKNMPAIENAVKKMESRV

SEQ ID NO: 30873 - protein, 144 aa, Arabidopsis thaliana
  peptide (1)..(144): Ceres Seq. ID no. 12332232
MKEITEFKVRKLASEKLAIDLSEKSHKAFVRSVVEKFLDEERAREYENSQVNKEEEDGDKDCGKGNKEFDDDGDLIICRLSDKRRVTIQEFKGKSLVSIREYYKKDGKELPTSKGISLTDEQWSTFKKNMPAIENAVKKMESRV

SEQ ID NO: 30874 - DNA, 834 bp, Arabidopsis thaliana
  misc_feature (1)..(834): Ceres Seq. ID no. 13489264
  misc_feature (1)..(834): Ortholog of  Ceres SEQ ID NO 13660598 as cited in SEQ ID NO 67591
gctctttatctctctctccaactttacctttaacaaaaaaaaaatggcaagcgcgaatccagaaaccgccaaacccacgcctgcaacggtggacatggctaatccagaggagcttaagaaagttttcgaccagtttgactccaacggcgacggcaagatctcagtcctcgaactcggcggtgtgtttaaggctatggggacttcctacacagagacggaactcaaccgcgtgctcgaagaagtcgatacagatcgcgacggttacatcaacctcgacgaattctcaactctctgtcgctcgtcttcctccgccgcagagatccgtgacgctttcgatctctacgatcaggacaaaaacggactgatctccgcctctgagcttcaccaggtgcttaaccgtctcgggatgtcttgctctgttgaagactgtactcgtatgatcggacctgtggatgctgacggcgatgggaatgttaatttcgaagagtttcagaagatgatgacgtcgtcttctctcctcaacagcaatggatccgccgctcctccttcgacctagggagttttccagatttcagatctggatttcgggaataagaataactatggaaattaggtactcttttcttcttaaatgtgatcaatcatcatcagtctaacttcaatcggatctcttttcattcatacatggttgagatttagatctgaatatggatatatatcgtttgctctccttgttcaaaacaaatttggtttctaatttcttattctgcattctcgagttatgtatcagtttcgaactatatttgcatagaaacaaaaaccagattctctgcc

SEQ ID NO: 30875 - protein, 184 aa, Arabidopsis thaliana
  peptide (1)..(184): Ceres Seq. ID no. 13489265
LFISLSNFTFNKKKMASANPETAKPTPATVDMANPEELKKVFDQFDSNGDGKISVLELGGVFKAMGTSYTETELNRVLEEVDTDRDGYINLDEFSTLCRSSSSAAEIRDAFDLYDQDKNGLISASELHQVLNRLGMSCSVEDCTRMIGPVDADGDGNVNFEEFQKMMTSSSLLNSNGSAAPPST

SEQ ID NO: 30876 - protein, 170 aa, Arabidopsis thaliana
  peptide (1)..(170): Ceres Seq. ID no. 13489266
MASANPETAKPTPATVDMANPEELKKVFDQFDSNGDGKISVLELGGVFKAMGTSYTETELNRVLEEVDTDRDGYINLDEFSTLCRSSSSAAEIRDAFDLYDQDKNGLISASELHQVLNRLGMSCSVEDCTRMIGPVDADGDGNVNFEEFQKMMTSSSLLNSNGSAAPPST

SEQ ID NO: 30877 - protein, 153 aa, Arabidopsis thaliana
  peptide (1)..(153): Ceres Seq. ID no. 13489267
MANPEELKKVFDQFDSNGDGKISVLELGGVFKAMGTSYTETELNRVLEEVDTDRDGYINLDEFSTLCRSSSSAAEIRDAFDLYDQDKNGLISASELHQVLNRLGMSCSVEDCTRMIGPVDADGDGNVNFEEFQKMMTSSSLLNSNGSAAPPST

SEQ ID NO: 30878 - DNA, 806 bp, Arabidopsis thaliana
  misc_feature (1)..(806): Ceres Seq. ID no. 12332172
  misc_feature (1)..(806): Ortholog of  Ceres SEQ ID NO 14303374 as cited in SEQ ID NO 54088
  misc_feature (1)..(806): Ortholog of  Ceres SEQ ID NO 13639250 as cited in SEQ ID NO 56555
  misc_feature (1)..(806): Ortholog of  Ceres SEQ ID NO 15177034 as cited in SEQ ID NO 60024
  misc_feature (1)..(806): Ortholog of  Ceres SEQ ID NO 13598257 as cited in SEQ ID NO 63008
  misc_feature (1)..(806): Ortholog of  Ceres SEQ ID NO 13597309 as cited in SEQ ID NO 63851
  misc_feature (1)..(806): Ortholog of  Ceres SEQ ID NO 12599167 as cited in SEQ ID NO 64443
cacacatacatcttctccatccattacacaacgaagcatagtggcaaacccgtaaatacataataccaatgacgaccaaagattgcggaaaccacggcggcggcggaggaggaggaaccgccagtcgaatctgcggagtaatcatcggcttcatcatcatcgtcttgataacaatattcctcgtttggataatcctccaaccgacaaaaccaagattcatcctccaagacgccaccgtctacgcctttaatctctcgcagcctaacctcctcacctcaaactttcagatcacgatcgcttcacgtaaccgaaactcaagaatcggaatctactacgaccgtcttcacgtctacgctacttaccggaaccaacaaatcactctacgtacagcaattcctccgacgtaccaaggccataaagaagacaacgtttggtctcctttcgtttatggaaactccgtccctatcgctcctttcaacgccgtggctctcggcgacgagcagaatcgtgggtttgtcacgttgattatacgcgccgatggacgcgtgaggtggaaggtcgggactcttattacagggaagtatcatctccatgttcgttgtcaggcgttcataaatctggctgataaagccgccggagttcatgtcggcgaaaacgccgtcaagtacatgttgatcaataagtgcagtgtcaatgtttagtaggtaaaatgacacaactttgacgccgtcaatgtttgcattcttcttcttttcatttttcttctacttggataatgtttttgcttcaatatcgtttaatttgtc

SEQ ID NO: 30879 - protein, 210 aa, Arabidopsis thaliana
  peptide (1)..(210): Ceres Seq. ID no. 12332173
MTTKDCGNHGGGGGGGTASRICGVIIGFIIIVLITIFLVWIILQPTKPRFILQDATVYAFNLSQPNLLTSNFQITIASRNRNSRIGIYYDRLHVYATYRNQQITLRTAIPPTYQGHKEDNVWSPFVYGNSVPIAPFNAVALGDEQNRGFVTLIIRADGRVRWKVGTLITGKYHLHVRCQAFINLADKAAGVHVGENAVKYMLINKCSVNV

SEQ ID NO: 30880 - DNA, 1407 bp, Arabidopsis thaliana
  misc_feature (1)..(1407): Ceres Seq. ID no. 13486967
  misc_feature (1)..(1407): Ortholog of  Ceres SEQ ID NO 13598282 as cited in SEQ ID NO 68138
tgaaatgaacaaatatatcaaataataatagtgtaattaagtcggaggaaaacaacaagaacccagaaagaggaacgaagaaactaattcaaaggatcaagttcaccgcttcattttagtcattaaacaaagatggtgatgggaggagaagcatccatggaactggaccagtgttttcagaagatgaagatggaaggaatctcgatcaaagagtggaaagatatccctgtggagcttctgatgaggatcctttcccttgttgatgatcgtaatgtcattgttgcttctggtgtttgcactggctggagagatgctatctcttttggcctcactcgtctccgtctatcttggtgcaacaacaacatgaacagcttggttctttctcttgttcccaagtttgtaaagctgcagactttaaatctaaggcaggacaaaccgcaactagaggacaatgcagtggaggccatagcaaatcactgccatgagttacaagaacttgatctcagcaaaagcttgaaaattacagaccgttcactttatgcacttgctcatggttgcccagacctcacaaaactcaaccttagtggctgcacttcattcagcgacactgctattgcgtatttgaccagattctgcagaaagcttaaagttttgaatctttgcggatgtgtcaaagctgtaactgacaatgccttggaggctattgggaataactgcaatcagatgcagtcactaaacttgggatggtgtgagaatatcagtgatgatggggtaatgagtttagcttatggctgtccagatctcaggacccttgacctctgcggctgtgttcttattacagatgagagtgtggtagctctagcagactggtgtgtccacttgaggtcactggggctatactattgcagaaacataacagacagagcaatgtactcgctagctcaaagcggggtaaagaacaaaccgggatcgtggaaatcggttaagaaaggtaaatacgatgaagaaggactgagaagtctcaacattagccaatgcactgcccttacaccttcagcggttcaagctgtttgcgattcatttcccgcacttcacacatgctcaggaaggcattcgcttgtcatgagcggctgtctgaacttaacaactgtgcactgtgcttgtatccttcaggctcatcgtgcacacaatgcggttcctcatcctgctcattaagacagaggaatagttatgttgtatatataaacatcatgttgatggagattagtattataaacgaagtagcttttttaaggtttatgtgaaaccttagaagcttttgagttgttctttctttgtcttgaaagatcttttgtatattttggtgctatgttcataacttctttagtaagacctctcgttgttacc

SEQ ID NO: 30881 - protein, 360 aa, Arabidopsis thaliana
  peptide (1)..(360): Ceres Seq. ID no. 13486968
MVMGGEASMELDQCFQKMKMEGISIKEWKDIPVELLMRILSLVDDRNVIVASGVCTGWRDAISFGLTRLRLSWCNNNMNSLVLSLVPKFVKLQTLNLRQDKPQLEDNAVEAIANHCHELQELDLSKSLKITDRSLYALAHGCPDLTKLNLSGCTSFSDTAIAYLTRFCRKLKVLNLCGCVKAVTDNALEAIGNNCNQMQSLNLGWCENISDDGVMSLAYGCPDLRTLDLCGCVLITDESVVALADWCVHLRSLGLYYCRNITDRAMYSLAQSGVKNKPGSWKSVKKGKYDEEGLRSLNISQCTALTPSAVQAVCDSFPALHTCSGRHSLVMSGCLNLTTVHCACILQAHRAHNAVPHPAH

SEQ ID NO: 30882 - protein, 358 aa, Arabidopsis thaliana
  peptide (1)..(358): Ceres Seq. ID no. 13486969
MGGEASMELDQCFQKMKMEGISIKEWKDIPVELLMRILSLVDDRNVIVASGVCTGWRDAISFGLTRLRLSWCNNNMNSLVLSLVPKFVKLQTLNLRQDKPQLEDNAVEAIANHCHELQELDLSKSLKITDRSLYALAHGCPDLTKLNLSGCTSFSDTAIAYLTRFCRKLKVLNLCGCVKAVTDNALEAIGNNCNQMQSLNLGWCENISDDGVMSLAYGCPDLRTLDLCGCVLITDESVVALADWCVHLRSLGLYYCRNITDRAMYSLAQSGVKNKPGSWKSVKKGKYDEEGLRSLNISQCTALTPSAVQAVCDSFPALHTCSGRHSLVMSGCLNLTTVHCACILQAHRAHNAVPHPAH

SEQ ID NO: 30883 - protein, 352 aa, Arabidopsis thaliana
  peptide (1)..(352): Ceres Seq. ID no. 13486970
MELDQCFQKMKMEGISIKEWKDIPVELLMRILSLVDDRNVIVASGVCTGWRDAISFGLTRLRLSWCNNNMNSLVLSLVPKFVKLQTLNLRQDKPQLEDNAVEAIANHCHELQELDLSKSLKITDRSLYALAHGCPDLTKLNLSGCTSFSDTAIAYLTRFCRKLKVLNLCGCVKAVTDNALEAIGNNCNQMQSLNLGWCENISDDGVMSLAYGCPDLRTLDLCGCVLITDESVVALADWCVHLRSLGLYYCRNITDRAMYSLAQSGVKNKPGSWKSVKKGKYDEEGLRSLNISQCTALTPSAVQAVCDSFPALHTCSGRHSLVMSGCLNLTTVHCACILQAHRAHNAVPHPAH

SEQ ID NO: 30884 - DNA, 694 bp, Arabidopsis thaliana
  misc_feature (1)..(694): Ceres Seq. ID no. 12422743
  misc_feature (1)..(694): Ortholog of  Ceres SEQ ID NO 15175146 as cited in SEQ ID NO 0
ataaatggcgcatttaattagaacccccaaaatctcttcacaactgtaaaaccccaatcacctctttacatgtgacttccttattactctcttcttcttattttcctcctcttcttcttcgctctagtttcccccaacaatcgccatggcagcttcgtctctcaatctcctcctcattctctctcttctcactttcatttctctccagagatctgaatctctttccgataatccatctctcactcttctacccgacggattcgactggccgatctctcactccgatgaattcgatatcatcgacggtgaagaaagcttcgaagttacggaggaagacgacggcgtaacagatcgacggtcattgtactggcggaggacgaagtattacatatcgtacggtgcattgtcggcgaatagagtgccatgtcctcccagatctggaagatcgtactacactcataactgcttcagagctagaggtcccgttcatccgtatagccgaggctgctcgtcgatcactcgatgccggagatagatgaagaaagcttaaaactccatgggcattttcgtaattttgccaaccatggtttattattatgatgtttgtatttgtaatgttcgatgtttgtttgtaaaccgtgattagttacgttcgttaaacggtaaacccggtgattataatttcgagttctgc

SEQ ID NO: 30885 - protein, 129 aa, Arabidopsis thaliana
  peptide (1)..(129): Ceres Seq. ID no. 12422744
MAASSLNLLLILSLLTFISLQRSESLSDNPSLTLLPDGFDWPISHSDEFDIIDGEESFEVTEEDDGVTDRRSLYWRRTKYYISYGALSANRVPCPPRSGRSYYTHNCFRARGPVHPYSRGCSSITRCRR

SEQ ID NO: 30886 - DNA, 1200 bp, Arabidopsis thaliana
  misc_feature (1)..(1200): Ceres Seq. ID no. 12371656
  misc_feature (1)..(1200): Ortholog of  Ceres SEQ ID NO 14303600 as cited in SEQ ID NO 64632
  misc_feature (1)..(1200): Ortholog of  Ceres SEQ ID NO 14302776 as cited in SEQ ID NO 66919
gtctcctctccaccaagtgaatctctttctctctctctttttctccgcggaaggaatctcttcttctggttgcgtttgagtccgtacgaaaacaaaagaaaagagagagatggcggaagagaagaaagctccaatcagtgtctggactaccgtgaagcccttcgtcaatggcggtgcctctggtatgctcgctacttgcgttatccagccgatcgacatgattaaggtgaggattcaacttggtcagggatctgcagccagtataaccaccaacatgcttaagaatgagggcgttggtgccttctacaagggattatctgctgggttgctgaggcaagcaacttacacgacagcccgtcttggatcattcaagttgctgactgcaaaggcaattgagtctaatgatggaaagcctctaccgctgtatcagaaggcactatgtggtctgacagctggtgctattggtgcttgcgtcggtagtccagccgatctagcacttatcagaatgcaggccgataatactttgccgctagctcagcgcaggaattataccaatgctttccatgcgcttacccgtattagcgctgatgagggagttttagcactttggaaagggtgtgggcccactgtggtcagagctatggctttgaacatgggaatgcttgcatcttatgatcaaagtgctgaatacatgagagataatcttggtttcggggagatgtctacggtcgtaggagcaagtgctgtttctgggttctgcgctgcggcttgcagtctgccatttgactttgtcaaaactcagattcagaaaatgcaaccggatgctcaaggaaagtatccatacacaggttcgctcgattgtgcgatgaaaaccttaaaagaaggaggacctctgaaattttactcgggtttcccagtttactgtgtcaggattgcccctcacgtcatgatgacatggatcttcctaaaccagattacgaaatttcaaaagaagattggtatgtgaggaacaaatacagcagcaaaaaaataagatgagaagaacgaaaacacaattggaattgtgttcatttgctttttaatcatatacataacctgccttaaaagcatattattgtagctgtttgaactttaattttttgtttcggtcggtgattggtccggtgaattttaaattttcttctttggtggaagtttaag

SEQ ID NO: 30887 - protein, 298 aa, Arabidopsis thaliana
  peptide (1)..(298): Ceres Seq. ID no. 12371657
MAEEKKAPISVWTTVKPFVNGGASGMLATCVIQPIDMIKVRIQLGQGSAASITTNMLKNEGVGAFYKGLSAGLLRQATYTTARLGSFKLLTAKAIESNDGKPLPLYQKALCGLTAGAIGACVGSPADLALIRMQADNTLPLAQRRNYTNAFHALTRISADEGVLALWKGCGPTVVRAMALNMGMLASYDQSAEYMRDNLGFGEMSTVVGASAVSGFCAAACSLPFDFVKTQIQKMQPDAQGKYPYTGSLDCAMKTLKEGGPLKFYSGFPVYCVRIAPHVMMTWIFLNQITKFQKKIGM

SEQ ID NO: 30888 - protein, 273 aa, Arabidopsis thaliana
  peptide (1)..(273): Ceres Seq. ID no. 12371658
MLATCVIQPIDMIKVRIQLGQGSAASITTNMLKNEGVGAFYKGLSAGLLRQATYTTARLGSFKLLTAKAIESNDGKPLPLYQKALCGLTAGAIGACVGSPADLALIRMQADNTLPLAQRRNYTNAFHALTRISADEGVLALWKGCGPTVVRAMALNMGMLASYDQSAEYMRDNLGFGEMSTVVGASAVSGFCAAACSLPFDFVKTQIQKMQPDAQGKYPYTGSLDCAMKTLKEGGPLKFYSGFPVYCVRIAPHVMMTWIFLNQITKFQKKIGM

SEQ ID NO: 30889 - protein, 262 aa, Arabidopsis thaliana
  peptide (1)..(262): Ceres Seq. ID no. 12371659
MIKVRIQLGQGSAASITTNMLKNEGVGAFYKGLSAGLLRQATYTTARLGSFKLLTAKAIESNDGKPLPLYQKALCGLTAGAIGACVGSPADLALIRMQADNTLPLAQRRNYTNAFHALTRISADEGVLALWKGCGPTVVRAMALNMGMLASYDQSAEYMRDNLGFGEMSTVVGASAVSGFCAAACSLPFDFVKTQIQKMQPDAQGKYPYTGSLDCAMKTLKEGGPLKFYSGFPVYCVRIAPHVMMTWIFLNQITKFQKKIGM

SEQ ID NO: 30890 - DNA, 1501 bp, Arabidopsis thaliana
  misc_feature (1)..(1501): Ceres Seq. ID no. 12321354
  misc_feature (1)..(1501): Ortholog of  Ceres SEQ ID NO 14314792 as cited in SEQ ID NO 56837
accgctcttcttctatcgatctctgatctcctcttctctctgtcttctgagttctgtctacgcttcgtcgccgatcccggccagactccgtcttaccggcacaaaccctagattcccggaggacgaaattcgttttttcgccggaactaaattaaggagatttgagaggctatgggtacaacaacgacaacaagcgctgtgtatatccatgttatcgaggatgtcgtcaacaaagttcgtgaggagttcattaacaacggaggtcctggcgagagtgttctcagcgagcttcaaggaatttgggagacgaagatgatgcaagccggagtcttgaatggaccaatagagaggtcatcggctcagaagccaacacctggtggtccactgactcatgatttgaatgttccttatgaaggtacagaggagtacgagactcccactgctgaaatgctcttccctcctacaccattgcagactccccttccaacgccgcttcccggtactgctgataactcatccatgtataacatccctaccggctcaagtgattatcccactcctggaactgagaatggagtcaacattgatgttaaagcaagacctagtccttatatgccaccgccttctccgtggactaatcctagacttgatgtcaatgttgcttatgtggatggccgtgatgagcctgagagaggaaactctaatcagcagtttacgcaggatttatttgtgccatcttctgggaaacgaaaacgtgatgattcatctgcacactatcaaaatggtggatctatacctcaacaagatggtgcaagcgatgctatccctgaggcaaactttgaatgtgctgcactccgtataacctatgttggcgatagaaagatcccacgagatttgattggctcatcatcgaagattccccaagttgatgggccaatgcctgacccgtatgatgaaatgttgtccacacccaatatatacagttatcaaggacccaatgaagagtttaatgaggccagaactcctgctccaaacgaaatccaaacgagcactcctgttgctgtaccaaacgatatcattgaagatgatgaagagctgttgaacgaagatgatgatgatgacgagttggacgacctagaaagtggcgaggatatgaacacacaacacctggttttagctcaatttgacaaggtgacgcgcacaaagagcaggtggaagtgcagtctgaaagacgggatcatgcatataaacgataaggacattctcttcaacaaagcaacaggcgagttcgacttctgatcttgacactagtaatgcttctaggaaagtcagagtccttcaaatgtcggatgtctttctttgtaccttatgatttagaccgacctccgagtgagagacatgattatttatgggaatatgtactctggttggcttgttgtacaaaaagaacagatttttccggccgaagaaggcttatcaactttgacttgtttcatgagtt

SEQ ID NO: 30891 - protein, 375 aa, Arabidopsis thaliana
  peptide (1)..(375): Ceres Seq. ID no. 12321355
MGTTTTTSAVYIHVIEDVVNKVREEFINNGGPGESVLSELQGIWETKMMQAGVLNGPIERSSAQKPTPGGPLTHDLNVPYEGTEEYETPTAEMLFPPTPLQTPLPTPLPGTADNSSMYNIPTGSSDYPTPGTENGVNIDVKARPSPYMPPPSPWTNPRLDVNVAYVDGRDEPERGNSNQQFTQDLFVPSSGKRKRDDSSAHYQNGGSIPQQDGASDAIPEANFECAALRITYVGDRKIPRDLIGSSSKIPQVDGPMPDPYDEMLSTPNIYSYQGPNEEFNEARTPAPNEIQTSTPVAVPNDIIEDDEELLNEDDDDDELDDLESGEDMNTQHLVLAQFDKVTRTKSRWKCSLKDGIMHINDKDILFNKATGEFDF

SEQ ID NO: 30892 - protein, 328 aa, Arabidopsis thaliana
  peptide (1)..(328): Ceres Seq. ID no. 12321356
MMQAGVLNGPIERSSAQKPTPGGPLTHDLNVPYEGTEEYETPTAEMLFPPTPLQTPLPTPLPGTADNSSMYNIPTGSSDYPTPGTENGVNIDVKARPSPYMPPPSPWTNPRLDVNVAYVDGRDEPERGNSNQQFTQDLFVPSSGKRKRDDSSAHYQNGGSIPQQDGASDAIPEANFECAALRITYVGDRKIPRDLIGSSSKIPQVDGPMPDPYDEMLSTPNIYSYQGPNEEFNEARTPAPNEIQTSTPVAVPNDIIEDDEELLNEDDDDDELDDLESGEDMNTQHLVLAQFDKVTRTKSRWKCSLKDGIMHINDKDILFNKATGEFDF

SEQ ID NO: 30893 - protein, 327 aa, Arabidopsis thaliana
  peptide (1)..(327): Ceres Seq. ID no. 12321357
MQAGVLNGPIERSSAQKPTPGGPLTHDLNVPYEGTEEYETPTAEMLFPPTPLQTPLPTPLPGTADNSSMYNIPTGSSDYPTPGTENGVNIDVKARPSPYMPPPSPWTNPRLDVNVAYVDGRDEPERGNSNQQFTQDLFVPSSGKRKRDDSSAHYQNGGSIPQQDGASDAIPEANFECAALRITYVGDRKIPRDLIGSSSKIPQVDGPMPDPYDEMLSTPNIYSYQGPNEEFNEARTPAPNEIQTSTPVAVPNDIIEDDEELLNEDDDDDELDDLESGEDMNTQHLVLAQFDKVTRTKSRWKCSLKDGIMHINDKDILFNKATGEFDF

SEQ ID NO: 30894 - DNA, 540 bp, Arabidopsis thaliana; identical to SEQ ID NO: 26058
  misc_feature (1)..(540): Ceres Seq. ID no. 12599931
  misc_feature (1)..(540): Ortholog of  Ceres SEQ ID NO 12608605 as cited in SEQ ID NO 58240

SEQ ID NO: 30895 - protein, 93 aa, Arabidopsis thaliana; identical to SEQ ID NO: 26059
  peptide (1)..(93): Ceres Seq. ID no. 12599932

SEQ ID NO: 30896 - DNA, 844 bp, Arabidopsis thaliana
  misc_feature (1)..(844): Ceres Seq. ID no. 12337495
  misc_feature (1)..(844): Ortholog of  Ceres SEQ ID NO 13594613 as cited in SEQ ID NO 52127
acggcggtggagaaaaaacaaaagagagcgagacaaagagagactacaatggctgttccaagaggaggaaatggtttgaatgaagaagaagatgttgacggagaaaacgctatctttgaggaaaacggtgttgactacgacaccgattccgagcttccctctcacctccgtgacttggccgccgctgctcaggccggagatgtcgccgccttgcgcaccgccatcgacaatttgaatgggagagtcgatgagccactcgaggataatgactcggcacttcacttggcatgtctatatggtcacctaccttgtgttcagctgctcttagaaagaggagctgatatggaagtgaaagatgaagacgaagcaattcctctacatgatgcttgtgctggaggatacttggaaatagtacagcttctttttagccgagctagtagtcctgaatgtgtgaagagaatgattgaaacagcagatatagaaggtgatactcctctgcatcacgcagcaagaggtgaacatgttgacgtggttaggtttttgctgggttccggggcttcaccaacgacacaaaactcctatgggaagacaccaggtgaattagctgatttaaacactgatgctaagaggatactcgaagaagcgataaacaactcaatgatctcctagtgatgctgcaaatctgcagagttcattggccagttttggcgactcagtgaagtagtagcaaaatgttaactttttcttaatcctgttttttggtggtttcatatacaaaaggtttcaaattttgatacctatggaattaagaacttccgtgtcggttttaatcatgaaattatta

SEQ ID NO: 30897 - protein, 222 aa, Arabidopsis thaliana
  peptide (1)..(222): Ceres Seq. ID no. 12337496
TAVEKKQKRARQRETTMAVPRGGNGLNEEEDVDGENAIFEENGVDYDTDSELPSHLRDLAAAAQAGDVAALRTAIDNLNGRVDEPLEDNDSALHLACLYGHLPCVQLLLERGADMEVKDEDEAIPLHDACAGGYLEIVQLLFSRASSPECVKRMIETADIEGDTPLHHAARGEHVDVVRFLLGSGASPTTQNSYGKTPGELADLNTDAKRILEEAINNSMIS

SEQ ID NO: 30898 - protein, 206 aa, Arabidopsis thaliana
  peptide (1)..(206): Ceres Seq. ID no. 12337497
MAVPRGGNGLNEEEDVDGENAIFEENGVDYDTDSELPSHLRDLAAAAQAGDVAALRTAIDNLNGRVDEPLEDNDSALHLACLYGHLPCVQLLLERGADMEVKDEDEAIPLHDACAGGYLEIVQLLFSRASSPECVKRMIETADIEGDTPLHHAARGEHVDVVRFLLGSGASPTTQNSYGKTPGELADLNTDAKRILEEAINNSMIS

SEQ ID NO: 30899 - DNA, 869 bp, Arabidopsis thaliana
  misc_feature (1)..(869): Ceres Seq. ID no. 12332915
  misc_feature (1)..(869): Ortholog of  Ceres SEQ ID NO 12609656 as cited in SEQ ID NO 51891
  misc_feature (1)..(869): Ortholog of  Ceres SEQ ID NO 13664337 as cited in SEQ ID NO 61267
  misc_feature (1)..(869): Ortholog of  Ceres SEQ ID NO 15224278 as cited in SEQ ID NO 63590
  misc_feature (1)..(869): Ortholog of  Ceres SEQ ID NO 12635152 as cited in SEQ ID NO 0
accattattacaaaaagtctacgacggcaaaacgaaaatccacaggcggagaaatcaaaaaaccaaaaatccaatctttggattcttacttctacgatttgtgtgtttcctcaaacccaaatgtctcgtctcccgattttaatcgcttcgtgtctcttcctctcttcactcaccgccgccgtcgtcaccgccgccgaatccgatactccgacggcttattcactcctccaaagctacaacttccccgtcggaatccttccaaaaggagtcgtagcttatgatttagacacaacaacaggcaaattccatgcgtatttcaacgattcatgtagcttcaatcttgttggttcttaccaattgaattacaaatcaacaatcagtggttacatctccgagaacaagctcaagaaattgactggtgttaaagtcaaagttttgttcttgtggcttaacatcgtcgaggttattagaaacggtgacgagatggagttttccgttgggatcacatcggcgaatttcgcgatccaagagtttttggaatcgcctcagtgtggttgtggctttgagtgcaaggattcgaaattggacatgattgagagaatcccttttctttcttcgtcttgaaattgaaaaaggtacaatctttttttgtaatttgtccccaaaaaatcttacctttcgaaaagatcgcatcttttatgtattgtccaataatatgagcgtagtgtctggaatttgtaattgtttactttagttctatttattggattcaagttctgtaatggtgaaaagaaaagatactgaagggagatgtgaacattgtgaagtgaacatttgtaatcttagattgaatgttttcatttttgttc

SEQ ID NO: 30900 - protein, 207 aa, Arabidopsis thaliana
  peptide (1)..(207): Ceres Seq. ID no. 12332916
TIITKSLRRQNENPQAEKSKNQKSNLWILTSTICVFPQTQMSRLPILIASCLFLSSLTAAVVTAAESDTPTAYSLLQSYNFPVGILPKGVVAYDLDTTTGKFHAYFNDSCSFNLVGSYQLNYKSTISGYISENKLKKLTGVKVKVLFLWLNIVEVIRNGDEMEFSVGITSANFAIQEFLESPQCGCGFECKDSKLDMIERIPFLSSS

SEQ ID NO: 30901 - protein, 167 aa, Arabidopsis thaliana
  peptide (1)..(167): Ceres Seq. ID no. 12332917
MSRLPILIASCLFLSSLTAAVVTAAESDTPTAYSLLQSYNFPVGILPKGVVAYDLDTTTGKFHAYFNDSCSFNLVGSYQLNYKSTISGYISENKLKKLTGVKVKVLFLWLNIVEVIRNGDEMEFSVGITSANFAIQEFLESPQCGCGFECKDSKLDMIERIPFLSSS

SEQ ID NO: 30902 - DNA, 856 bp, Arabidopsis thaliana
  misc_feature (1)..(856): Ceres Seq. ID no. 12421566
  misc_feature (1)..(856): Ortholog of  Ceres SEQ ID NO 13580026 as cited in SEQ ID NO 62641
catttctcattaccaaaatcagcggagcaaaagttacttccgaaaccctaaaaaaaacacgatgatgctcaagcaagctgcgaagaaggccctagggcttacgtcacgtcaatcaacaccgtggtctgttggtatcctccgaacctaccatgagaacgtcatcgaccactacgataatccccgcaacgttgggtctttcgataagaatgatcccaacgttggtacgggactcgtaggagctcccgcttgtggtgatgtgatgaagcttcaaatcaaggtcgatgagaagactggtcaaatcgttgatgctcgctttaagacttttggttgtggttcagccatcgcttcttcatctgttgccactgaatgggtgaaaggcaaagctatggaggatgttctgaccatcaaaaacaccgaaatcgcaaagcatctttctctcccaccagtcaagctccactgcagtatgttggcggaggacgctatcaaggcagctgtgaaagactacaaggagaagcgtgtgaagacaaatggtgctgcagcagcaggagaaaccacacaggcttgattccttttactagtgtgtataccataatgtgtatatgatggtgaaaacaggggagaagtagaagaggatgatacatacaacctatggtatgttgtaatgttcaagacttaaggagtattttagaataaactctgttcacagaaacgtgtaagaatgattttgcttcggccctgtagtttttgctgttttatgcaccgatgtgatgtaatgttttctctcttctttgggaggtttataaattacaactttgacagacaaattttcaattttcaattttgacattataatttt

SEQ ID NO: 30903 - protein, 187 aa, Arabidopsis thaliana
  peptide (1)..(187): Ceres Seq. ID no. 12421567
ISHYQNQRSKSYFRNPKKNTMMLKQAAKKALGLTSRQSTPWSVGILRTYHENVIDHYDNPRNVGSFDKNDPNVGTGLVGAPACGDVMKLQIKVDEKTGQIVDARFKTFGCGSAIASSSVATEWVKGKAMEDVLTIKNTEIAKHLSLPPVKLHCSMLAEDAIKAAVKDYKEKRVKTNGAAAAGETTQA

SEQ ID NO: 30904 - protein, 167 aa, Arabidopsis thaliana
  peptide (1)..(167): Ceres Seq. ID no. 12421568
MMLKQAAKKALGLTSRQSTPWSVGILRTYHENVIDHYDNPRNVGSFDKNDPNVGTGLVGAPACGDVMKLQIKVDEKTGQIVDARFKTFGCGSAIASSSVATEWVKGKAMEDVLTIKNTEIAKHLSLPPVKLHCSMLAEDAIKAAVKDYKEKRVKTNGAAAAGETTQA

SEQ ID NO: 30905 - protein, 166 aa, Arabidopsis thaliana
  peptide (1)..(166): Ceres Seq. ID no. 12421569
MLKQAAKKALGLTSRQSTPWSVGILRTYHENVIDHYDNPRNVGSFDKNDPNVGTGLVGAPACGDVMKLQIKVDEKTGQIVDARFKTFGCGSAIASSSVATEWVKGKAMEDVLTIKNTEIAKHLSLPPVKLHCSMLAEDAIKAAVKDYKEKRVKTNGAAAAGETTQA

SEQ ID NO: 30906 - DNA, 1210 bp, Arabidopsis thaliana
  misc_feature (1)..(1210): Ceres Seq. ID no. 12482053
  misc_feature (1)..(1210): Ortholog of  Ceres SEQ ID NO 12636774 as cited in SEQ ID NO 372
  misc_feature (1)..(1210): Ortholog of  Ceres SEQ ID NO 12562215 as cited in SEQ ID NO 20489
  misc_feature (1)..(1210): Ortholog of  Ceres SEQ ID NO 13595548 as cited in SEQ ID NO 51024
  misc_feature (1)..(1210): Ortholog of  Ceres SEQ ID NO 13582350 as cited in SEQ ID NO 56734
  misc_feature (1)..(1210): Ortholog of  Ceres SEQ ID NO 12476493 as cited in SEQ ID NO 58163
  misc_feature (1)..(1210): Ortholog of  Ceres SEQ ID NO 13597295 as cited in SEQ ID NO 63743
  misc_feature (1)..(1210): Ortholog of  Ceres SEQ ID NO 12617090 as cited in SEQ ID NO 64005
  misc_feature (1)..(1210): Ortholog of  Ceres SEQ ID NO 13597439 as cited in SEQ ID NO 64081
  misc_feature (1)..(1210): Ortholog of  Ceres SEQ ID NO 13599438 as cited in SEQ ID NO 0
  misc_feature (1)..(1210): Ortholog of  Ceres SEQ ID NO 13623850 as cited in SEQ ID NO 0
gtgagaaaaagtaaataaaaaagagatggttttgatcaaagagagagagatggagattccagttattgattttgcagagttggatggagagaagagaagcaagaccatgtcacttcttgatcatgcatgtgataagtggggattcttcatggttgataatcatggaattgataaagagttgatggagaaagtgaagaagatgattaactctcactatgaggagcatttgaaagagaagttttaccagtcagagatggtcaaggctttgagtgaaggcaaaacctcagatgcagattgggaaagcagtttcttcatctcacataaaccaacttcaaatatctgtcagatcccaaacatttcagaggaactcagcaagacgatggatgaatatgtttgtcaactgcacaagtttgcagagagactctccaagctcatgtgtgagaatcttggtcttgatcaggaagacataatgaatgccttttctggtccaaaaggtccagcttttggaacaaaagtggctaaatacccagaatgcccacgtcctgagcttatgagagggctgagagaacatacggatgctgggggaatcatattactcctgcaggatgatcaagtgcctggtcttgagttctttaaagatgggaagtgggttcctataccgccatccaagaacaataccatttttgtcaataccggtgatcaactagagatactgagtaatgggaggtacaagagtgttgttcaccgtgtaatgacagtgaagcatggaagtagactgtcgattgctacgttttacaatccggctggtgatgccataatatctccagctccaaagctcttgtatccaagtggctaccgttttcaagactacctaaagctttattcaactaccaagtttggagacaaaggccccagacttgagaccatgaagaaaatgggaaatgcggattcagcctaggatgcatctggaatttgacgcttctgtactcacatcataaaaactttgtcttcttcttgtgtttccttataatttaaataaccagccatgtcagaatcttgctgattcagctatactacttcactcttctttcttcacttccacttgaaaagttccaaagccaaactgaagcagtctcatcaagctctgtgtcgaacttgagattagacaaagagcttgtaatctaagctctaagattgacagtcaatttca

SEQ ID NO: 30907 - protein, 310 aa, Arabidopsis thaliana
  peptide (1)..(310): Ceres Seq. ID no. 12482054
MVLIKEREMEIPVIDFAELDGEKRSKTMSLLDHACDKWGFFMVDNHGIDKELMEKVKKMINSHYEEHLKEKFYQSEMVKALSEGKTSDADWESSFFISHKPTSNICQIPNISEELSKTMDEYVCQLHKFAERLSKLMCENLGLDQEDIMNAFSGPKGPAFGTKVAKYPECPRPELMRGLREHTDAGGIILLLQDDQVPGLEFFKDGKWVPIPPSKNNTIFVNTGDQLEILSNGRYKSVVHRVMTVKHGSRLSIATFYNPAGDAIISPAPKLLYPSGYRFQDYLKLYSTTKFGDKGPRLETMKKMGNADSA

SEQ ID NO: 30908 - protein, 302 aa, Arabidopsis thaliana
  peptide (1)..(302): Ceres Seq. ID no. 12482055
MEIPVIDFAELDGEKRSKTMSLLDHACDKWGFFMVDNHGIDKELMEKVKKMINSHYEEHLKEKFYQSEMVKALSEGKTSDADWESSFFISHKPTSNICQIPNISEELSKTMDEYVCQLHKFAERLSKLMCENLGLDQEDIMNAFSGPKGPAFGTKVAKYPECPRPELMRGLREHTDAGGIILLLQDDQVPGLEFFKDGKWVPIPPSKNNTIFVNTGDQLEILSNGRYKSVVHRVMTVKHGSRLSIATFYNPAGDAIISPAPKLLYPSGYRFQDYLKLYSTTKFGDKGPRLETMKKMGNADSA

SEQ ID NO: 30909 - protein, 283 aa, Arabidopsis thaliana
  peptide (1)..(283): Ceres Seq. ID no. 12482056
MSLLDHACDKWGFFMVDNHGIDKELMEKVKKMINSHYEEHLKEKFYQSEMVKALSEGKTSDADWESSFFISHKPTSNICQIPNISEELSKTMDEYVCQLHKFAERLSKLMCENLGLDQEDIMNAFSGPKGPAFGTKVAKYPECPRPELMRGLREHTDAGGIILLLQDDQVPGLEFFKDGKWVPIPPSKNNTIFVNTGDQLEILSNGRYKSVVHRVMTVKHGSRLSIATFYNPAGDAIISPAPKLLYPSGYRFQDYLKLYSTTKFGDKGPRLETMKKMGNADSA

SEQ ID NO: 30910 - DNA, 1333 bp, Arabidopsis thaliana
  misc_feature (1)..(1333): Ceres Seq. ID no. 12370509
  misc_feature (1)..(1333): Ortholog of  Ceres SEQ ID NO 13597638 as cited in SEQ ID NO 65448
  misc_feature (1)..(1333): Ortholog of  Ceres SEQ ID NO 14302772 as cited in SEQ ID NO 69055
aacaacgtcacctaaatctctctcacccaatttgtgtttcttctttctgctaaaaggttataatttttgtttcttggtttggtgagaatcttcaagaaactgaaacaaagaaaatggattctagttgcatagacgagataagttcctccacttcagaatctttctccgccaccaccgccaagaagctctctcctcctcccgcggcggcgttacgcctctaccggatgggaagcggcgggagcagcgtcgtgttggatcccgagaacggcctagagacggagtcacgaaagctaccatcttcaaaatacaaaggtgttgttcctcagcctaacggaagatggggagctcagatctacgagaagcaccaacgagtatggctcgggactttcaacgagcaagaagaagctgctcgttcctacgacatcgcagcttgtagattccgtggccgcgacgccgtcgtcaacttcaagaacgttctggaagacggcgatttagcttttcttgaagctcactcaaaggccgagatcgtcgacatgttgagaaaacacacttacgccgacgagcttgaacagaacaataaacggcagttgtttctctccgtcgacgctaacggaaaacgtaacggatcgagtactactcaaaacgacaaagttttaaagacgcgtgaagttcttttcgagaaggctgttacacctagcgacgttgggaagctaaaccgtctcgtgatacctaaacaacacgccgagaaacactttccgttaccgtcaccgtcaccggcagtgactaaaggagttttgatcaacttcgaagacgttaacggtaaagtgtggaggttccgttactcatactggaacagtagtcaaagttacgtgttgaccaagggatggagtcgattcgtcaaggagaagaatcttcgagccggtgatgttgttactttcgagagatcgaccggactagagcggcagttatatattgattggaaagttcggtctggtccgagagaaaacccggttcaggtggtggttcggcttttcggagttgatatctttaatgtgaccaccgtgaagccaaacgacgtcgtggccgtttgcggtggaaagagatctcgagatgttgatgatatgtttgcgttacggtgttccaagaagcaggcgataatcaatgctttgtgacatatttccttttccgattttatgctttcgttttttaatttttttttttgtcaagttgtgtaggttgtgattcatgctaggttgtatttaggaaaagagataagaccaaaaaataaattggaacaatggttttgtggaaaagtggtaaatagacctacctc

SEQ ID NO: 30911 - protein, 352 aa, Arabidopsis thaliana
  peptide (1)..(352): Ceres Seq. ID no. 12370510
MDSSCIDEISSSTSESFSATTAKKLSPPPAAALRLYRMGSGGSSVVLDPENGLETESRKLPSSKYKGVVPQPNGRWGAQIYEKHQRVWLGTFNEQEEAARSYDIAACRFRGRDAVVNFKNVLEDGDLAFLEAHSKAEIVDMLRKHTYADELEQNNKRQLFLSVDANGKRNGSSTTQNDKVLKTREVLFEKAVTPSDVGKLNRLVIPKQHAEKHFPLPSPSPAVTKGVLINFEDVNGKVWRFRYSYWNSSQSYVLTKGWSRFVKEKNLRAGDVVTFERSTGLERQLYIDWKVRSGPRENPVQVVVRLFGVDIFNVTTVKPNDVVAVCGGKRSRDVDDMFALRCSKKQAIINAL

SEQ ID NO: 30912 - protein, 315 aa, Arabidopsis thaliana
  peptide (1)..(315): Ceres Seq. ID no. 12370511
MGSGGSSVVLDPENGLETESRKLPSSKYKGVVPQPNGRWGAQIYEKHQRVWLGTFNEQEEAARSYDIAACRFRGRDAVVNFKNVLEDGDLAFLEAHSKAEIVDMLRKHTYADELEQNNKRQLFLSVDANGKRNGSSTTQNDKVLKTREVLFEKAVTPSDVGKLNRLVIPKQHAEKHFPLPSPSPAVTKGVLINFEDVNGKVWRFRYSYWNSSQSYVLTKGWSRFVKEKNLRAGDVVTFERSTGLERQLYIDWKVRSGPRENPVQVVVRLFGVDIFNVTTVKPNDVVAVCGGKRSRDVDDMFALRCSKKQAIINAL

SEQ ID NO: 30913 - protein, 212 aa, Arabidopsis thaliana
  peptide (1)..(212): Ceres Seq. ID no. 12370512
MLRKHTYADELEQNNKRQLFLSVDANGKRNGSSTTQNDKVLKTREVLFEKAVTPSDVGKLNRLVIPKQHAEKHFPLPSPSPAVTKGVLINFEDVNGKVWRFRYSYWNSSQSYVLTKGWSRFVKEKNLRAGDVVTFERSTGLERQLYIDWKVRSGPRENPVQVVVRLFGVDIFNVTTVKPNDVVAVCGGKRSRDVDDMFALRCSKKQAIINAL

SEQ ID NO: 30914 - DNA, 1903 bp, Arabidopsis thaliana
  misc_feature (1)..(1903): Ceres Seq. ID no. 12384905
  misc_feature (1)..(1903): Ortholog of  Ceres SEQ ID NO 15174547 as cited in SEQ ID NO 59586
  misc_feature (1)..(1903): Ortholog of  Ceres SEQ ID NO 15169470 as cited in SEQ ID NO 66036
acatcaaaaccgcctccatttctcattctctctctctctaaaaaaccaaatccagagtcagagaaaatctgtgatggctctttccaacgcctcctctctctccaccagatctatctacggcggtgatctttctcaccgtccaagcaaccgtcaatcatccttcacatttcatcccgccgtcaacaccaagcctaaatccgttaacctcgtcacggctgtacacgcggctgagccagctagaaacgctgtttcagtcaaagaatccgttgcgtcttcttcgtctggtgcattgaaatggactccagagagctggaaactgaagaaggctctgcaacttcctgattatcctaacgccaatgagcttgagtctgtgcttaaaacgatagaggcttttcctccgattgtgttcgccggagaagctaggaatcttgaagagagattggctgatgctgctgttggtaaagcttttcttctccaaggaggtgattgtgctgagagtttcaaggagttcaatgctactaatatcagagacaccttcagggttctgcttcagatgagtattgttcttacattcggtggccaggttccggtcattaaggttgggaggatggctggtcaatttgcaaagcctagatctgatgcatttgaggagaaggatggagtgaaattaccaagctacaagggagataacatcaatggtgatacttttgatgagaaatccaggattcctgatcctaataggatgattcgagcttacactcaatctgcagctactttgaatcttcttagagcctttgccactggaggttacgctgctattcaaagagttactcaatggaaccttgattttgttgaacaaagtgagcaagctgacaggtaccaggaattagctaatagggttgatgaggccttggggttcatgtctgcatgtggacttggcacggatcatccacttatgactacaactgatttctacacatcccatgagtgtttgcttctgccttatgaacagtcccttacaaggttggattcaacttctggtctctactatgattgttctgcacacatggtctggtgcggagagcgtaccagacaattggatggcgctcatgtcgagtttctcagggggattgctaatcctctgggcattaaggtgagcaacaaaatggatccctttgagctggttaagctagtagaaatcctgaatcctaataacaagcctggaagaatcactgtaattgtgagaatgggtgccgagaacatgagagttaagcttccccacctgatcagagcagtccgcagatcaggccagattgtgacatgggtctgcgatccaatgcatggaaacaccatcaaagcaccttgcggtcttaaaacacgtgcctttgactcaatactggctgaagtccgagcattccttgatgtgcacgagcaagaaggaagccacgcgggcggtatccatctcgagatgacaggtcagaacgtgacagaatgcattggagggtcccgcactgtgacctacgatgacctcagttctcgctaccacacacactgtgacccaaggctgaacgcgtcacagtctcttgaacttgccttcattgttgcagaacggctcaggaagagaagaacgggtagccagcgtgtgtcttgagtccggttcttcccttttatacactttttgattccaaacaaatcttttctctttgtcctgtgactgtgagttggtgtctttatgacctaagttaaaagccccaaaagcctctctaggaggagtaaacctgtttctgctgtggacagaccatgtcatgtcattgttctttatgttaactttaatgtcaaaccgtgtcacttacactagtgtatatttatttttacgtatctacacaaacatgaaacttgttct

SEQ ID NO: 30915 - protein, 549 aa, Arabidopsis thaliana
  peptide (1)..(549): Ceres Seq. ID no. 12384906
HQNRLHFSFSLSLKNQIQSQRKSVMALSNASSLSTRSIYGGDLSHRPSNRQSSFTFHPAVNTKPKSVNLVTAVHAAEPARNAVSVKESVASSSSGALKWTPESWKLKKALQLPDYPNANELESVLKTIEAFPPIVFAGEARNLEERLADAAVGKAFLLQGGDCAESFKEFNATNIRDTFRVLLQMSIVLTFGGQVPVIKVGRMAGQFAKPRSDAFEEKDGVKLPSYKGDNINGDTFDEKSRIPDPNRMIRAYTQSAATLNLLRAFATGGYAAIQRVTQWNLDFVEQSEQADRYQELANRVDEALGFMSACGLGTDHPLMTTTDFYTSHECLLLPYEQSLTRLDSTSGLYYDCSAHMVWCGERTRQLDGAHVEFLRGIANPLGIKVSNKMDPFELVKLVEILNPNNKPGRITVIVRMGAENMRVKLPHLIRAVRRSGQIVTWVCDPMHGNTIKAPCGLKTRAFDSILAEVRAFLDVHEQEGSHAGGIHLEMTGQNVTECIGGSRTVTYDDLSSRYHTHCDPRLNASQSLELAFIVAERLRKRRTGSQRVS

SEQ ID NO: 30916 - protein, 525 aa, Arabidopsis thaliana
  peptide (1)..(525): Ceres Seq. ID no. 12384907
MALSNASSLSTRSIYGGDLSHRPSNRQSSFTFHPAVNTKPKSVNLVTAVHAAEPARNAVSVKESVASSSSGALKWTPESWKLKKALQLPDYPNANELESVLKTIEAFPPIVFAGEARNLEERLADAAVGKAFLLQGGDCAESFKEFNATNIRDTFRVLLQMSIVLTFGGQVPVIKVGRMAGQFAKPRSDAFEEKDGVKLPSYKGDNINGDTFDEKSRIPDPNRMIRAYTQSAATLNLLRAFATGGYAAIQRVTQWNLDFVEQSEQADRYQELANRVDEALGFMSACGLGTDHPLMTTTDFYTSHECLLLPYEQSLTRLDSTSGLYYDCSAHMVWCGERTRQLDGAHVEFLRGIANPLGIKVSNKMDPFELVKLVEILNPNNKPGRITVIVRMGAENMRVKLPHLIRAVRRSGQIVTWVCDPMHGNTIKAPCGLKTRAFDSILAEVRAFLDVHEQEGSHAGGIHLEMTGQNVTECIGGSRTVTYDDLSSRYHTHCDPRLNASQSLELAFIVAERLRKRRTGSQRVS

SEQ ID NO: 30917 - protein, 365 aa, Arabidopsis thaliana
  peptide (1)..(365): Ceres Seq. ID no. 12384908
MSIVLTFGGQVPVIKVGRMAGQFAKPRSDAFEEKDGVKLPSYKGDNINGDTFDEKSRIPDPNRMIRAYTQSAATLNLLRAFATGGYAAIQRVTQWNLDFVEQSEQADRYQELANRVDEALGFMSACGLGTDHPLMTTTDFYTSHECLLLPYEQSLTRLDSTSGLYYDCSAHMVWCGERTRQLDGAHVEFLRGIANPLGIKVSNKMDPFELVKLVEILNPNNKPGRITVIVRMGAENMRVKLPHLIRAVRRSGQIVTWVCDPMHGNTIKAPCGLKTRAFDSILAEVRAFLDVHEQEGSHAGGIHLEMTGQNVTECIGGSRTVTYDDLSSRYHTHCDPRLNASQSLELAFIVAERLRKRRTGSQRVS

SEQ ID NO: 30918 - DNA, 1132 bp, Arabidopsis thaliana
  misc_feature (1)..(1132): Ceres Seq. ID no. 12326010
  misc_feature (1)..(1132): Ortholog of  Ceres SEQ ID NO 13639033 as cited in SEQ ID NO 55960
aacaagatacaatgagaatgttagttcttcgcactcccaccggacctgtctccgccgtcagattcatcaccaaatccaaaccttctcctttctcttctcccgattcatggctcctccctgcaccaaacactcaccggagtcgtccccgcgtcgtcctcgctctctctaaccccgacggaagcgtcaactcaaaaccctcaacctcagcttctcaaatcccttcttcaggagatgaaacagttttcgtgggtcaagataatgttcctctcgagggcgtgattcaattcgataaaccgtcatctacttcatcttctaacattaccaaatggggtcgtgtggctttacttgcgggtggtgatgttttagctctgcttatcttctctgccattgggagatttagccatggtttccctgttttttctcttgatactctccacacagctgaccctttcattgcgggatggtttctgagtgcttatttcttggggggttatgcggaggaaggacgaggaatgaagggaaagtctaaagctgtggttgcagctgcgaaatcttggattgtcggaactccgcttggaattatcattaggtcagcttcatcaggtcacattccggcatatagctttgtgttggtgacaatgggaagtactgctgttttacttataggatggagagcattgttattcagtgtgcttcctacagagtccaagaagaaagatgatacgtatcggaagggtagtgcattcgagctatttgagttgcttacttcattgataagacgatggtgaaggagcatccatgaatattcggtcggttggaggttgagatttaagtatgcacaacaaaaatgtaaatgtactttgtcacaagtcacaaccgctaacagatcatataaatatgtgtgttgagaagttccaggaccaagtgtaatatcgatatagttgcagtggccagtggaggaggaaagcaatgatgagagatgatttgtctcaagtcaaacaataaacagaggaagtaaactccagtactcttttttgggtggtttttctccattgacagtagaatcaaagattttcagtatatatccaattaacagagaaatgaaatgaaaacaaaaatatcattacagtgg

SEQ ID NO: 30919 - protein, 261 aa, Arabidopsis thaliana
  peptide (1)..(261): Ceres Seq. ID no. 12326011
QDTMRMLVLRTPTGPVSAVRFITKSKPSPFSSPDSWLLPAPNTHRSRPRVVLALSNPDGSVNSKPSTSASQIPSSGDETVFVGQDNVPLEGVIQFDKPSSTSSSNITKWGRVALLAGGDVLALLIFSAIGRFSHGFPVFSLDTLHTADPFIAGWFLSAYFLGGYAEEGRGMKGKSKAVVAAAKSWIVGTPLGIIIRSASSGHIPAYSFVLVTMGSTAVLLIGWRALLFSVLPTESKKKDDTYRKGSAFELFELLTSLIRRW

SEQ ID NO: 30920 - protein, 258 aa, Arabidopsis thaliana
  peptide (1)..(258): Ceres Seq. ID no. 12326012
MRMLVLRTPTGPVSAVRFITKSKPSPFSSPDSWLLPAPNTHRSRPRVVLALSNPDGSVNSKPSTSASQIPSSGDETVFVGQDNVPLEGVIQFDKPSSTSSSNITKWGRVALLAGGDVLALLIFSAIGRFSHGFPVFSLDTLHTADPFIAGWFLSAYFLGGYAEEGRGMKGKSKAVVAAAKSWIVGTPLGIIIRSASSGHIPAYSFVLVTMGSTAVLLIGWRALLFSVLPTESKKKDDTYRKGSAFELFELLTSLIRRW

SEQ ID NO: 30921 - protein, 256 aa, Arabidopsis thaliana
  peptide (1)..(256): Ceres Seq. ID no. 12326013
MLVLRTPTGPVSAVRFITKSKPSPFSSPDSWLLPAPNTHRSRPRVVLALSNPDGSVNSKPSTSASQIPSSGDETVFVGQDNVPLEGVIQFDKPSSTSSSNITKWGRVALLAGGDVLALLIFSAIGRFSHGFPVFSLDTLHTADPFIAGWFLSAYFLGGYAEEGRGMKGKSKAVVAAAKSWIVGTPLGIIIRSASSGHIPAYSFVLVTMGSTAVLLIGWRALLFSVLPTESKKKDDTYRKGSAFELFELLTSLIRRW

SEQ ID NO: 30922 - DNA, 1337 bp, Arabidopsis thaliana
  misc_feature (1)..(1337): Ceres Seq. ID no. 12321402
  misc_feature (1)..(1337): Ortholog of  Ceres SEQ ID NO 14310483 as cited in SEQ ID NO 58376
  misc_feature (1)..(1337): Ortholog of  Ceres SEQ ID NO 13654451 as cited in SEQ ID NO 67881
agttcaaacaattcttcgtcctattaaatacaaaaaataaaaatccttaaaaatatatccttatcttcaaccaagaatgggagaggtccaagaaggtcccaaagttgaacaagagaagaagccggctgccaccgtagtcccagttgagactactgacggcaagccaaagagcggcggaggagattccgcggcagcagcagcaccaccggtcgccgcggttgtctctgcctttgtttacaaagtggatatgcactgtgaaggctgcgctaagaagataaagcgaatggttaagcactttgatggagtgaaagatgtgacggcggatactggtggaaataagcttttggtggtcggaaagattgatccagtgaaactccaggagaagttggaggagaaaaccaagagaaaggtggttctcgcgaatccaccgccaaaggtagagggacctgttgctgccgccgttggagagaagaaagccgatggtggagataaggaggcggctcctcctgctcctgctccggcgactccaaaagagagcgtggtgcctttaaagatcagactacattgcgaaggatgtattcagaaaatcaagaaaataatattgaaaatcaaaggagtcgaaacagtggctattgacggagctaaagacgtggtgacggttaaaggaacgatagacgttaaagaacttgtgcctctactcactaagaagctcaaaagaaccgtcgagcctcttgttcccgccaaaaaagatgacggagccgccgagataagaagaacggaacgtgccgctcctgacgcaaagaaagaggctccgtccgccggagttaacgaagcaaagaaggaaggaagtgacggtggagagaagaaaaaagaggttggagacggcggagagaagaagaaagaaggtggtgacggcggagagaaaaagaaagaagccggagacggaggagagaagaagaaagatggcggaggtgtgccggccccggtggcgatggtgaataagatggattattatgggtactcagcttatccaacggctcctatgcattggcaagaaggacacgtgtacggtcagagttattcgatgacaggtcagaattatccagtgggaggtcagagttatccaggttcaggatacaactacgcaagtgagagttacgtgccgtacgcgcagccaaacgtgaacgctcctggaatgttcagcgacgagaatcccaatggttgctctgttatgtaataatgcgttaactgtaaatataagaaactataaggttaaaacataattgtgggaacacaaaacttatgttaaaattttgaaagtctactttgagtcagcg

SEQ ID NO: 30923 - protein, 386 aa, Arabidopsis thaliana
  peptide (1)..(386): Ceres Seq. ID no. 12321403
MGEVQEGPKVEQEKKPAATVVPVETTDGKPKSGGGDSAAAAAPPVAAVVSAFVYKVDMHCEGCAKKIKRMVKHFDGVKDVTADTGGNKLLVVGKIDPVKLQEKLEEKTKRKVVLANPPPKVEGPVAAAVGEKKADGGDKEAAPPAPAPATPKESVVPLKIRLHCEGCIQKIKKIILKIKGVETVAIDGAKDVVTVKGTIDVKELVPLLTKKLKRTVEPLVPAKKDDGAAEIRRTERAAPDAKKEAPSAGVNEAKKEGSDGGEKKKEVGDGGEKKKEGGDGGEKKKEAGDGGEKKKDGGGVPAPVAMVNKMDYYGYSAYPTAPMHWQEGHVYGQSYSMTGQNYPVGGQSYPGSGYNYASESYVPYAQPNVNAPGMFSDENPNGCSVM

SEQ ID NO: 30924 - protein, 329 aa, Arabidopsis thaliana
  peptide (1)..(329): Ceres Seq. ID no. 12321404
MHCEGCAKKIKRMVKHFDGVKDVTADTGGNKLLVVGKIDPVKLQEKLEEKTKRKVVLANPPPKVEGPVAAAVGEKKADGGDKEAAPPAPAPATPKESVVPLKIRLHCEGCIQKIKKIILKIKGVETVAIDGAKDVVTVKGTIDVKELVPLLTKKLKRTVEPLVPAKKDDGAAEIRRTERAAPDAKKEAPSAGVNEAKKEGSDGGEKKKEVGDGGEKKKEGGDGGEKKKEAGDGGEKKKDGGGVPAPVAMVNKMDYYGYSAYPTAPMHWQEGHVYGQSYSMTGQNYPVGGQSYPGSGYNYASESYVPYAQPNVNAPGMFSDENPNGCSVM

SEQ ID NO: 30925 - protein, 317 aa, Arabidopsis thaliana
  peptide (1)..(317): Ceres Seq. ID no. 12321405
MVKHFDGVKDVTADTGGNKLLVVGKIDPVKLQEKLEEKTKRKVVLANPPPKVEGPVAAAVGEKKADGGDKEAAPPAPAPATPKESVVPLKIRLHCEGCIQKIKKIILKIKGVETVAIDGAKDVVTVKGTIDVKELVPLLTKKLKRTVEPLVPAKKDDGAAEIRRTERAAPDAKKEAPSAGVNEAKKEGSDGGEKKKEVGDGGEKKKEGGDGGEKKKEAGDGGEKKKDGGGVPAPVAMVNKMDYYGYSAYPTAPMHWQEGHVYGQSYSMTGQNYPVGGQSYPGSGYNYASESYVPYAQPNVNAPGMFSDENPNGCSVM

SEQ ID NO: 30926 - DNA, 1373 bp, Arabidopsis thaliana
  misc_feature (1)..(1373): Ceres Seq. ID no. 12372173
  misc_feature (1)..(1373): Ortholog of  Ceres SEQ ID NO 14313471 as cited in SEQ ID NO 64513
  misc_feature (1)..(1373): Ortholog of  Ceres SEQ ID NO 13591377 as cited in SEQ ID NO 66534
cttctctatcaacactttctttcatctctcgccggaaaaacccataaccacaacaatggccaccgaaacccaaatccgaatcggagtaatgggttgcgccgatatcgctcgaaaagtctctcgagcaatccacctcgctcccaacgccacaatctccggcgtagcaagccggtctttagaaaaagccaaagcctttgccaccgccaataactacccagaatcaaccaaaatccacggctcttacgaatctcttctcgaagatccagagatcgatgcgctctatgttcctctccccactagtctccacgttgagtgggctattaaagcagctgagaaagggaaacatatccttttggagaagcctgttgctatgaacgtaactgagtttgataagattgttgatgcttgtgaagctaatggtgttcagattatggatggtactatgtgggttcataatcctagaactgctttgcttaaagagtttctttctgattctgaacgttttggtcagcttaaaactgtacagagttgtttctcatttgctggagatgaagattttcttaaaaacgatatccgtgtgaaacctggtcttgacgggcttggtgcgctaggagatgcggggtggtacgcgatcagagcaactcttttagctaataactttgagcttccgaaaactgtgactgctttccccggtgctgtgttgaatgaagcaggagtgatactttcctgtggagcatctttgagttgggaagatggacgaactgcaactatatattgttcattcttggctaacttaacaatggagataactgccattggaacgaaaggcacactccgtgtacacgacttcattatcccgtataaggagactgaggcgtcgtttaccacgagcactaaagcttggttcaatgaccttgtgactgcgtgggttagtcccccgagtgagcatacggttaagacagagcttccacaagaggcatgtatggtgagagagtttgctcgattggttggagaaatcaagaacaatggtgcaaagcctgatgggtactggcctagtattagccgaaagacgcagctagtggttgatgctgttaaagagtctgttgataaaaactatcaacagattagtctctctggtcgttgaaggaaaggactcagactataaatgttgtcgtgtgttctctcctctctcgctctctatgttcaaacttcgatcaaccgtttaagtgtttgttaccacttaccaatatgttctgtcttctgctgtgtccgcctgtatgtatgttaattgttttagactccaattactagccttcaattactaagtaagtcaatactaaaagttacagtttataaaaatcgtatgttttggt

SEQ ID NO: 30927 - protein, 380 aa, Arabidopsis thaliana
  peptide (1)..(380): Ceres Seq. ID no. 12372174
FSINTFFHLSPEKPITTTMATETQIRIGVMGCADIARKVSRAIHLAPNATISGVASRSLEKAKAFATANNYPESTKIHGSYESLLEDPEIDALYVPLPTSLHVEWAIKAAEKGKHILLEKPVAMNVTEFDKIVDACEANGVQIMDGTMWVHNPRTALLKEFLSDSERFGQLKTVQSCFSFAGDEDFLKNDIRVKPGLDGLGALGDAGWYAIRATLLANNFELPKTVTAFPGAVLNEAGVILSCGASLSWEDGRTATIYCSFLANLTMEITAIGTKGTLRVHDFIIPYKETEASFTTSTKAWFNDLVTAWVSPPSEHTVKTELPQEACMVREFARLVGEIKNNGAKPDGYWPSISRKTQLVVDAVKESVDKNYQQISLSGR

SEQ ID NO: 30928 - protein, 362 aa, Arabidopsis thaliana
  peptide (1)..(362): Ceres Seq. ID no. 12372175
MATETQIRIGVMGCADIARKVSRAIHLAPNATISGVASRSLEKAKAFATANNYPESTKIHGSYESLLEDPEIDALYVPLPTSLHVEWAIKAAEKGKHILLEKPVAMNVTEFDKIVDACEANGVQIMDGTMWVHNPRTALLKEFLSDSERFGQLKTVQSCFSFAGDEDFLKNDIRVKPGLDGLGALGDAGWYAIRATLLANNFELPKTVTAFPGAVLNEAGVILSCGASLSWEDGRTATIYCSFLANLTMEITAIGTKGTLRVHDFIIPYKETEASFTTSTKAWFNDLVTAWVSPPSEHTVKTELPQEACMVREFARLVGEIKNNGAKPDGYWPSISRKTQLVVDAVKESVDKNYQQISLSGR

SEQ ID NO: 30929 - protein, 351 aa, Arabidopsis thaliana
  peptide (1)..(351): Ceres Seq. ID no. 12372176
MGCADIARKVSRAIHLAPNATISGVASRSLEKAKAFATANNYPESTKIHGSYESLLEDPEIDALYVPLPTSLHVEWAIKAAEKGKHILLEKPVAMNVTEFDKIVDACEANGVQIMDGTMWVHNPRTALLKEFLSDSERFGQLKTVQSCFSFAGDEDFLKNDIRVKPGLDGLGALGDAGWYAIRATLLANNFELPKTVTAFPGAVLNEAGVILSCGASLSWEDGRTATIYCSFLANLTMEITAIGTKGTLRVHDFIIPYKETEASFTTSTKAWFNDLVTAWVSPPSEHTVKTELPQEACMVREFARLVGEIKNNGAKPDGYWPSISRKTQLVVDAVKESVDKNYQQISLSGR

SEQ ID NO: 30930 - DNA, 1571 bp, Arabidopsis thaliana
  misc_feature (1)..(1571): Ceres Seq. ID no. 13486971
  misc_feature (1)..(1571): Ortholog of  Ceres SEQ ID NO 15179007 as cited in SEQ ID NO 1038
  misc_feature (1)..(1571): Ortholog of  Ceres SEQ ID NO 15226449 as cited in SEQ ID NO 58879
  misc_feature (1)..(1571): Ortholog of  Ceres SEQ ID NO 13597146 as cited in SEQ ID NO 63311
attttgtcttaacgactctttattgtcccgacacacgaaaatggcgtctcttagccaaatcaccctgccacgcgcgccgtcgtcggagattggcctcttacgccgtcgattggagcggccgatcatcagaacccggatcggattcaacggccggattgcgagcgtattgactaacgcaggggaccaagcggtgtcggtaaaagcgagtgtgagccagaaggtgattgaagaggaagccaaagttattgtgggtacctacgcgcgagctccagtggttctctcgagtgggaaaggttgtaaattgttcgaccctgaaggaaaagagtatctggattgtgcatctggaatcgctgtgaatgctcttggtcatggagatcctgattggcttcgagctgtcactgagcaagctggtgttcttgcccatgtcagcaatgtttattacacgatccctcagatagagctcgcaaaacgcttggtggcgagttcttttgcagaccgtgtattcttttgtaactcgggaacggaagccaatgaagcagccattaagttttcaagaaaattccagagattcacccatccagaagacaaagaagtcgcgacaggtttcatcgcctttacaaacagcttccatggaagaaccttaggagctcttgccttgacaagcaaagaacaatacagaactcctttcgaacccatcatgcctggtgtaaccttcttagaatatggtaacattcaagcagccacagaccttatccgctcaggtaaaatagctgcagtttttgtggaaccaattcaaggagaaggcgggatttactctgctacaaaagagtttctgcaatctctgcgctctgcttgtgatgccgctggatctcttctcgtcttcgatgaggttcaatgtggtttgggtcgaacgggtctcatgtgggcttatgaagccttcggtgtgactcctgacataatgacggttgcaaagcctttagctggtggtttacctattggagcggtgctggtgactgaaaaggttgcagagaccataaactacggagatcatggaagtacatttgcaggcagccctcttgtgtgcagtgcagccattgcagttatggataaagtatcgaaaccctctttcttgtccagtgtctcaaataaaggtcgatactttagagacctgttggtgaaaaaacttggaggaaactcgcacgtgaaggaagtgagaggcgaagggcttatcataggagtggagctcgatgtgccggcaagctcactggttgatgcttgccgagattcgggtcttctgatcttgacagcggggaaaggaaatgtcgtcaggattgttcctccgttggttatatcagaggaggaaatcgaacgtgcggttgagatcatgtctcaaaatttgactgcgcttgattgaagttcttggaagagaaatgatgtggtgttgaagaagagctaatgttttatattcgatcttgtcttaaattagcctcaagtgtaccggtaaagatgctctgcacaattgaaaagaaataaaatttgacacaaaacttgatgaactaattgttcaatct

SEQ ID NO: 30931 - protein, 470 aa, Arabidopsis thaliana
  peptide (1)..(470): Ceres Seq. ID no. 13486972
FCLNDSLLSRHTKMASLSQITLPRAPSSEIGLLRRRLERPIIRTRIGFNGRIASVLTNAGDQAVSVKASVSQKVIEEEAKVIVGTYARAPVVLSSGKGCKLFDPEGKEYLDCASGIAVNALGHGDPDWLRAVTEQAGVLAHVSNVYYTIPQIELAKRLVASSFADRVFFCNSGTEANEAAIKFSRKFQRFTHPEDKEVATGFIAFTNSFHGRTLGALALTSKEQYRTPFEPIMPGVTFLEYGNIQAATDLIRSGKIAAVFVEPIQGEGGIYSATKEFLQSLRSACDAAGSLLVFDEVQCGLGRTGLMWAYEAFGVTPDIMTVAKPLAGGLPIGAVLVTEKVAETINYGDHGSTFAGSPLVCSAAIAVMDKVSKPSFLSSVSNKGRYFRDLLVKKLGGNSHVKEVRGEGLIIGVELDVPASSLVDACRDSGLLILTAGKGNVVRIVPPLVISEEEIERAVEIMSQNLTALD

SEQ ID NO: 30932 - protein, 457 aa, Arabidopsis thaliana
  peptide (1)..(457): Ceres Seq. ID no. 13486973
MASLSQITLPRAPSSEIGLLRRRLERPIIRTRIGFNGRIASVLTNAGDQAVSVKASVSQKVIEEEAKVIVGTYARAPVVLSSGKGCKLFDPEGKEYLDCASGIAVNALGHGDPDWLRAVTEQAGVLAHVSNVYYTIPQIELAKRLVASSFADRVFFCNSGTEANEAAIKFSRKFQRFTHPEDKEVATGFIAFTNSFHGRTLGALALTSKEQYRTPFEPIMPGVTFLEYGNIQAATDLIRSGKIAAVFVEPIQGEGGIYSATKEFLQSLRSACDAAGSLLVFDEVQCGLGRTGLMWAYEAFGVTPDIMTVAKPLAGGLPIGAVLVTEKVAETINYGDHGSTFAGSPLVCSAAIAVMDKVSKPSFLSSVSNKGRYFRDLLVKKLGGNSHVKEVRGEGLIIGVELDVPASSLVDACRDSGLLILTAGKGNVVRIVPPLVISEEEIERAVEIMSQNLTALD

SEQ ID NO: 30933 - protein, 238 aa, Arabidopsis thaliana
  peptide (1)..(238): Ceres Seq. ID no. 13486974
MPGVTFLEYGNIQAATDLIRSGKIAAVFVEPIQGEGGIYSATKEFLQSLRSACDAAGSLLVFDEVQCGLGRTGLMWAYEAFGVTPDIMTVAKPLAGGLPIGAVLVTEKVAETINYGDHGSTFAGSPLVCSAAIAVMDKVSKPSFLSSVSNKGRYFRDLLVKKLGGNSHVKEVRGEGLIIGVELDVPASSLVDACRDSGLLILTAGKGNVVRIVPPLVISEEEIERAVEIMSQNLTALD

SEQ ID NO: 30934 - DNA, 1180 bp, Arabidopsis thaliana
  misc_feature (1)..(1180): Ceres Seq. ID no. 13504734
  misc_feature (1)..(1180): Ortholog of  Ceres SEQ ID NO 15180043 as cited in SEQ ID NO 0
tgacgtcaaactctctctatacacagagttaaattgagtttgtgtctcgtaacttatcctgtgagcgaaaatggtgaaagcaactaaggcagagaagaagatcgcctacgataccaagctatgtcagcttatcgatgagtacacccagatcttggtcgttgcggccgataacgtcggatcaactcagcttcagaacatcagaaagggtcttcgtggagactccgtcgtgcttatggggaagaacactatgatgaagcgttccgttaggattcactctgagaacaccggaaacactgcaatcctgaatctgcttcctctccttcagggaaacgttggtttgatctttaccaaaggtgacctcaaggaagtgagcgaggaggttgctaagtacaaggttggtgcccctgctcgtgtgggtttggtggctccaattgatgtggttgtccaacctggcaacactggtctcgacccatcccaaacatctttcttccaggtgcttaacatcccaaccaagattaacaagggtaccgtcgaaatcatcaccccagttgagcttatcaagcaaggtgacaaggtcgggtcttctgaggctgcgcttctagccaagcttggcatcaggccgttctcatatggtcttgttgtccagtctgtctatgacaatggctcagtcttcagcccagaggttcttgatcttactgaagaccaacttgtggagaagtttgcttctggtatctccatggtcacttccttggctcttgctgtgtcgtaccctacccttgctgctgcaccgcatatgttcatcaatgcgtacaagaatgccttggctattgctgttgccactgagtacaccttccctcaagcagagaaggtcaaggaatacttgaaggatccaagcaagtttgctgttgcttcagtagctgcggtgtctgctgatgcaggtggtggtgccccagctgctgctaaggtagaggagaaggaagagtccgacgaagaagactatggaggtgatttcggtttgttcgatgaagagtagattttgtcggttaagatcttacctttttgtcgtggattataagtgttgctttgtttttagtatgttggacctcaattttcttggttttagccaatccagttttatgttactactgtcttttattttttggaaagatttcgttttcct

SEQ ID NO: 30935 - protein, 320 aa, Arabidopsis thaliana
  peptide (1)..(320): Ceres Seq. ID no. 13504735
MVKATKAEKKIAYDTKLCQLIDEYTQILVVAADNVGSTQLQNIRKGLRGDSVVLMGKNTMMKRSVRIHSENTGNTAILNLLPLLQGNVGLIFTKGDLKEVSEEVAKYKVGAPARVGLVAPIDVVVQPGNTGLDPSQTSFFQVLNIPTKINKGTVEIITPVELIKQGDKVGSSEAALLAKLGIRPFSYGLVVQSVYDNGSVFSPEVLDLTEDQLVEKFASGISMVTSLALAVSYPTLAAAPHMFINAYKNALAIAVATEYTFPQAEKVKEYLKDPSKFAVASVAAVSADAGGGAPAAAKVEEKEESDEEDYGGDFGLFDEE

SEQ ID NO: 30936 - protein, 266 aa, Arabidopsis thaliana; identical to SEQ ID NO: 26377
  peptide (1)..(266): Ceres Seq. ID no. 13504736

SEQ ID NO: 30937 - protein, 261 aa, Arabidopsis thaliana; identical to SEQ ID NO: 26378
  peptide (1)..(261): Ceres Seq. ID no. 13504737

SEQ ID NO: 30938 - DNA, 1016 bp, Arabidopsis thaliana
  misc_feature (1)..(1016): Ceres Seq. ID no. 13489860
  misc_feature (1)..(1016): Ortholog of  Ceres SEQ ID NO 12557432 as cited in SEQ ID NO 92
  misc_feature (1)..(1016): Ortholog of  Ceres SEQ ID NO 15224319 as cited in SEQ ID NO 66044
  misc_feature (1)..(1016): Ortholog of  Ceres SEQ ID NO 13598045 as cited in SEQ ID NO 66822
agagctcataaattttgtggagagcaaagttctcagcaaaatcaaagaagaaccgaacgagagagagaaacgaattcttctcaggtgttaaagaatgtctcggagatatgatagccgtaccacaatcttctcgccagaaggtcgtctttaccaggtagagtatgctatggaggccattggaaacgccggttctgcgattggaatcttatccaaagacggtgttgtgttgatcggtgagaagaaagtcacctcaaagcttcttcaaacctcaacctctgctgagaaaatgtacaagattgatgaccatgttgcctgtgctgttgctggtataatgtctgatgctaacatacttatcaacacggctcgagttcaagctcaacgttacaccttcatgtaccaagagcccatgccggttgagcagctggttcaatctctttgtgacacaaaacaaggatacacacagtttggtggtcttcgcccgtttggtgtctcctttctctttgcaggatgggacaagcaccatggtttccagctttatatgagtgacccgagtgggaactatggtggttggaaagctgcagctgttggagcaaacaatcaggcggctcagtctatcctgaaacaagactacaaggacgatgcaaccagggaagaagcagtcgagcttgccttgaaggttctgaccaagacaatggacagcactagcttaacatctgagaagctagagcttgctgaagtgtatctgactccatccaagactgttaagtaccatgttcactcacctgagtcgctcaccaaactgttggtcaagcacggtgtgactcaacccgctgctgaaacatcttaagcccaaaagtatctctagtcttattcgcctggtacggtgtctccgctttatgtttgtagttctctgttttacagctttccttttggtttgaactttgaagttacctttggcgatgaaactagatttgacaatgttatgaatttatcttcaatgcatcatctttttactt

SEQ ID NO: 30939 - protein, 250 aa, Arabidopsis thaliana
  peptide (1)..(250): Ceres Seq. ID no. 13489861
MSRRYDSRTTIFSPEGRLYQVEYAMEAIGNAGSAIGILSKDGVVLIGEKKVTSKLLQTSTSAEKMYKIDDHVACAVAGIMSDANILINTARVQAQRYTFMYQEPMPVEQLVQSLCDTKQGYTQFGGLRPFGVSFLFAGWDKHHGFQLYMSDPSGNYGGWKAAAVGANNQAAQSILKQDYKDDATREEAVELALKVLTKTMDSTSLTSEKLELAEVYLTPSKTVKYHVHSPESLTKLLVKHGVTQPAAETS

SEQ ID NO: 30940 - protein, 226 aa, Arabidopsis thaliana
  peptide (1)..(226): Ceres Seq. ID no. 13489862
MEAIGNAGSAIGILSKDGVVLIGEKKVTSKLLQTSTSAEKMYKIDDHVACAVAGIMSDANILINTARVQAQRYTFMYQEPMPVEQLVQSLCDTKQGYTQFGGLRPFGVSFLFAGWDKHHGFQLYMSDPSGNYGGWKAAAVGANNQAAQSILKQDYKDDATREEAVELALKVLTKTMDSTSLTSEKLELAEVYLTPSKTVKYHVHSPESLTKLLVKHGVTQPAAETS

SEQ ID NO: 30941 - protein, 186 aa, Arabidopsis thaliana
  peptide (1)..(186): Ceres Seq. ID no. 13489863
MYKIDDHVACAVAGIMSDANILINTARVQAQRYTFMYQEPMPVEQLVQSLCDTKQGYTQFGGLRPFGVSFLFAGWDKHHGFQLYMSDPSGNYGGWKAAAVGANNQAAQSILKQDYKDDATREEAVELALKVLTKTMDSTSLTSEKLELAEVYLTPSKTVKYHVHSPESLTKLLVKHGVTQPAAETS

SEQ ID NO: 30942 - DNA, 3198 bp, Arabidopsis thaliana
  misc_feature (1)..(3198): Ceres Seq. ID no. 13579859
  misc_feature (1)..(3198): Ortholog of  Ceres SEQ ID NO 14304202 as cited in SEQ ID NO 56346
  misc_feature (1)..(3198): Ortholog of  Ceres SEQ ID NO 14304159 as cited in SEQ ID NO 56494
  misc_feature (1)..(3198): Ortholog of  Ceres SEQ ID NO 14314198 as cited in SEQ ID NO 57472
  misc_feature (1)..(3198): Ortholog of  Ceres SEQ ID NO 12623915 as cited in SEQ ID NO 61013
  misc_feature (1)..(3198): Ortholog of  Ceres SEQ ID NO 14302314 as cited in SEQ ID NO 62543
  misc_feature (1)..(3198): Ortholog of  Ceres SEQ ID NO 13598391 as cited in SEQ ID NO 62769
acaatcctcataatcactttcgaaattacatttacgctttcttgcaatcaaattttccgatcttaagttcagaagacgatgtcagaggtggaaatagagaacgctgctacgatcgaaggaaacaccgctgcggatgcgccggtgacggatgcggccgttgagaagaagcctgcagcgaaaggacgaaagacgaagaatgttaaggaagtgaaggagaagaagactgttgctgccgctccgaagaagagaactgtttcatctcatcctacttacgaagagatgattaaggatgcgattgttacgttgaaagagagaactggatctagccaatacgcgattcagaagttcatcgaggagaagcgtaaggagcttcctccaacattcagaaagctgttgcttctcaatctgaagagactcgttgcttctgggaagcttgtgaaggtcaaagcctcgtttaaactcccatcggcgtcggctaaagcatcatcccctaaggcggcagcggagaaatctgctcctgcgaagaagaaaccggcgactgtggcggttaccaaggcgaagagaaaggtcgctgcggcttccaaggctaagaaaacaatcgccgttaaacctaagactgctgctgctaagaaagtgaccgcgaaggctaaggctaagcccgttcctcgtgccactgctgctgcaactaagaggaaagctgttgatgcgaagcccaaggctaaggctagaccagccaaggcagccaaaacggccaaggttacatctccggctaagaaagctgttgctgccacgaagaaagttgctacggtggccacaaagaagaagactccggttaagaaggttgtgaagccaaagacggttaagtctccagcaaagagggcttcttctagggttaagaagtgaagttagggtttgtaggtagaagaatggttaacgatagtttagacttgtataattcaatcatctttatgcgactttgtttgcttttcttctttcagtgttcttgttattcacagttcctttggactacccaaaaaaaaaaaaaaaactatccagggttggatccaaccctggatagtttttttttttttttttttttttttttttaaaaagaaacttttttttttttttaccacatgattcaaaataaatttacacaattcttacatgtactttataataaattttttacaacataacctttatataaagggaacaaaccccagtttaccgtttaccaaaaatcaagtagaatccattcccatcatcaaccaaaaggccttatcagctttagatctatttcatttccatcttatgcttttctctctattgattacagaaaagcataaacaaccatagtcttgtcttcttcatctgatcattagttgtcgtgcctttacatttcagcgaatctgatggtattgtgtaatgcctcgttttggtggtagctttctcaagatgaagaggaccagagaggagggtaatatctctaccaacaggtaatatatgaagttaaggatggggtgatctaacacatcaaggtttgccccctcatcgaaagcagcaaagcacatcatgatacatctgatgaggaaacacgtaaagcatatggttgtcacgtaaccaacctcttgcagctttttgcgccgccctttagattctactggaaaccgttgcaacattaggaaaagccttccaccataaagtaaaaatccaagggcagcgaacaatgaaacacctgcaaagaacatcttagataggattaccataactcgaacaggcttccaccacaaaaccaaccatagagcaatctgaactacatatacaactgcattaattgtgaagaagcttggcctgagtccatcagtcgatactgcacgcgcctgataataaatttcagcccagaaaagaaccagaagagcataggtggtgaagaaagcaagacttggaatatcaagcaagatatgttgcagaatctctggttgcataaactgaacatttcgcctgaagacaaacaccacagcacgaactccattaacaacgaaattgagaaagtgaaagaccttttgcgtcgtccaaccatattcaggaactctcaattgtattctcacaagttgaatcacagcaacgagggaaacgattccgtagagaacagcgagaacatggaagatacgatcctgccaaatcggagattcgtttacgtctgaccaccaattcgaagcttctttgagattcaacatctccaccgccgacgaagacgacgacgacatcatctccgacgcaaatttcgtaacctcgacgccgccgattctcatctacacgagtcagattccttctcgattcagattttgaatatacataatgagaactctctggatttgaatcacctctttttatttctttctttttttgttattttccccacggttctcgagaaccgattcatctttccagctttcttcactttttcctttatataaagttagaaaaacaaaaaaaaacaaaatagttagaaaaaatctgagagaaacagaagaaacataaaaaaaatgaggccattgagcattaaaccaacatcgttagatgtagctagacatgccacatcagtagaatcatttgggaatcaccgaccgccgatatcgccgtggcactcaccggtgccgtacctattcggtggtcttgcggcgatgttaggcctcatagccttcgctttacttatcctagcctgctcttactggcgcttgtcaacctccggtgatgactccggcgaaagagtcgacgaggaaaaagagagtcggtctggagtgaaggcggctagcgcggcgtgcgaggagaaggttcttgtcataatggccggagatgacttgccgaggtttctggccacgccggcggcgaacaaatgcatgtgcggtcacgagggtagaatggtaattttcaaggaggatggtattggtgctggagaggagaaaatgggagacagagagaaagccaaagaaaatgaagaaacaacgagtcagtgagcttttttgttttcttttcttctctcagtcttgtctttttttttttgttggggaattttccttcgtgttttcacgggaaatgtaaaatttactgagagaaaattttgggttatgattaatgaatgtttgcttgtaatttcctatccccaatggtggaaaactcgtttttagtttttgt

SEQ ID NO: 30943 - protein, 274 aa, Arabidopsis thaliana
  peptide (1)..(274): Ceres Seq. ID no. 13579860
MSEVEIENAATIEGNTAADAPVTDAAVEKKPAAKGRKTKNVKEVKEKKTVAAAPKKRTVSSHPTYEEMIKDAIVTLKERTGSSQYAIQKFIEEKRKELPPTFRKLLLLNLKRLVASGKLVKVKASFKLPSASAKASSPKAAAEKSAPAKKKPATVAVTKAKRKVAAASKAKKTIAVKPKTAAAKKVTAKAKAKPVPRATAAATKRKAVDAKPKAKARPAKAAKTAKVTSPAKKAVAATKKVATVATKKKTPVKKVVKPKTVKSPAKRASSRVKK

SEQ ID NO: 30944 - protein, 207 aa, Arabidopsis thaliana
  peptide (1)..(207): Ceres Seq. ID no. 13579861
MIKDAIVTLKERTGSSQYAIQKFIEEKRKELPPTFRKLLLLNLKRLVASGKLVKVKASFKLPSASAKASSPKAAAEKSAPAKKKPATVAVTKAKRKVAAASKAKKTIAVKPKTAAAKKVTAKAKAKPVPRATAAATKRKAVDAKPKAKARPAKAAKTAKVTSPAKKAVAATKKVATVATKKKTPVKKVVKPKTVKSPAKRASSRVKK

SEQ ID NO: 30945 - protein, 156 aa, Arabidopsis thaliana
  peptide (1)..(156): Ceres Seq. ID no. 13579862
MRPLSIKPTSLDVARHATSVESFGNHRPPISPWHSPVPYLFGGLAAMLGLIAFALLILACSYWRLSTSGDDSGERVDEEKESRSGVKAASAACEEKVLVIMAGDDLPRFLATPAANKCMCGHEGRMVIFKEDGIGAGEEKMGDREKAKENEETTSQ

SEQ ID NO: 30946 - DNA, 641 bp, Arabidopsis thaliana
  misc_feature (1)..(641): Ceres Seq. ID no. 12420660
  misc_feature (1)..(641): Ortholog of  Ceres SEQ ID NO 12422485 as cited in SEQ ID NO 20557
atttccgtcggactcagtggagaagaagaagaagatccaaatcgatccgttgaaaaggaatttcgaatttgctgtgcgatgtcgagtgcggtggacgctacgggaaacccgatccctacttcggcggttttaacggcgtcagcgaagcatataggtatgaggtgtatgccggagaatgttgcgttcctcaaatgcaagaagaattatccaaacccagagaagtgtctcgacaaaggtcgtgacgtcactcgctgcgtgcttggcttgctgaaggatcttcaccagaagtgccaaaaggagatggatgattatgttgggtgtatgtattactacacaaacgagtttgatctgtgtaggaaagagcaagaagccttcgagaaagtgtgtcccttgaaatgagaatcacaagttcttgtcatgttttgatttgtatctcataataaagcaaaatgttcatttttgaatgagctttactctctccatctcttgtttgttgtcatcccatttatttcctctcagatgctttcgtagtgagttccaaagacaactaaatgactcagttttattgttcgatggttcactaatcagcacagaatggaacaattgtttttatctgcttatattctaccatacttgacagt

SEQ ID NO: 30947 - protein, 132 aa, Arabidopsis thaliana
  peptide (1)..(132): Ceres Seq. ID no. 12420661
ISVGLSGEEEEDPNRSVEKEFRICCAMSSAVDATGNPIPTSAVLTASAKHIGMRCMPENVAFLKCKKNYPNPEKCLDKGRDVTRCVLGLLKDLHQKCQKEMDDYVGCMYYYTNEFDLCRKEQEAFEKVCPLK

SEQ ID NO: 30948 - protein, 106 aa, Arabidopsis thaliana
  peptide (1)..(106): Ceres Seq. ID no. 12420662
MSSAVDATGNPIPTSAVLTASAKHIGMRCMPENVAFLKCKKNYPNPEKCLDKGRDVTRCVLGLLKDLHQKCQKEMDDYVGCMYYYTNEFDLCRKEQEAFEKVCPLK

SEQ ID NO: 30949 - protein, 80 aa, Arabidopsis thaliana
  peptide (1)..(80): Ceres Seq. ID no. 12420663
MRCMPENVAFLKCKKNYPNPEKCLDKGRDVTRCVLGLLKDLHQKCQKEMDDYVGCMYYYTNEFDLCRKEQEAFEKVCPLK

SEQ ID NO: 30950 - DNA, 908 bp, Arabidopsis thaliana
  misc_feature (1)..(908): Ceres Seq. ID no. 12396500
  misc_feature (1)..(908): Ortholog of  Ceres SEQ ID NO 12616162 as cited in SEQ ID NO 63260
aatcagaaaaaggagagaaagaaaagaagaagcaaaacagagagaaaatggcaggattgtttgataaacaagccgatctataccttgacgccagacctaattacccctctgagtggttctcgaagctcgctgatctcaccgatcaccacggtttagcctgggatgctgccaccggaaatggccaagcagctctcgccgttgcagagcattacgagagtgtcgtagcaacggacgtgagtgaatcgcagctgaagctagcaacgccacatccgaaaatcaattatcgccttacgccgacgtcaatgaccgacgacgagctagtggaattaatcggaggagaaaactcagtagatctaatcacggtcgcccaaggcgtacactggttcgatctccctaggttctactcagtggccacacgactcctccgtaaaccaggcggaatcatcgctgtctggggatacaacgacgtcatagtgagtccagagttcgacgccgtccagtatcggctccacgccacaacgctgccgttttggaagtatccgtacattcagcacatcttcgattcgtacgaagcattgccgtttcctttcgaaaatgttgggatgggatcagaaggggagccattaaagctggagatgcctaaaacgacgtcgtttgaagggatcataaggatgtttaaatcatggtcggctatcgtcacggcgagagagaaaggcgtcgagttgttaccggagagtttggtgagagagcttgaaaccgcttggggaggttctgatctggttcgttccgtcgtttacaaagcttttatgattgcaggaaaagttagagtttgatatcaccaaaccatgattgattgttgttctcatttgagtttatttataaaaattggttatattgcaaaaattccc

SEQ ID NO: 30951 - protein, 276 aa, Arabidopsis thaliana
  peptide (1)..(276): Ceres Seq. ID no. 12396501
SEKGEKEKKKQNREKMAGLFDKQADLYLDARPNYPSEWFSKLADLTDHHGLAWDAATGNGQAALAVAEHYESVVATDVSESQLKLATPHPKINYRLTPTSMTDDELVELIGGENSVDLITVAQGVHWFDLPRFYSVATRLLRKPGGIIAVWGYNDVIVSPEFDAVQYRLHATTLPFWKYPYIQHIFDSYEALPFPFENVGMGSEGEPLKLEMPKTTSFEGIIRMFKSWSAIVTAREKGVELLPESLVRELETAWGGSDLVRSVVYKAFMIAGKVRV

SEQ ID NO: 30952 - protein, 261 aa, Arabidopsis thaliana
  peptide (1)..(261): Ceres Seq. ID no. 12396502
MAGLFDKQADLYLDARPNYPSEWFSKLADLTDHHGLAWDAATGNGQAALAVAEHYESVVATDVSESQLKLATPHPKINYRLTPTSMTDDELVELIGGENSVDLITVAQGVHWFDLPRFYSVATRLLRKPGGIIAVWGYNDVIVSPEFDAVQYRLHATTLPFWKYPYIQHIFDSYEALPFPFENVGMGSEGEPLKLEMPKTTSFEGIIRMFKSWSAIVTAREKGVELLPESLVRELETAWGGSDLVRSVVYKAFMIAGKVRV

SEQ ID NO: 30953 - protein, 176 aa, Arabidopsis thaliana
  peptide (1)..(176): Ceres Seq. ID no. 12396503
MTDDELVELIGGENSVDLITVAQGVHWFDLPRFYSVATRLLRKPGGIIAVWGYNDVIVSPEFDAVQYRLHATTLPFWKYPYIQHIFDSYEALPFPFENVGMGSEGEPLKLEMPKTTSFEGIIRMFKSWSAIVTAREKGVELLPESLVRELETAWGGSDLVRSVVYKAFMIAGKVRV

SEQ ID NO: 30954 - DNA, 1300 bp, Arabidopsis thaliana
  misc_feature (1)..(1300): Ceres Seq. ID no. 12326352
  misc_feature (1)..(1300): Ortholog of  Ceres SEQ ID NO 14308787 as cited in SEQ ID NO 55614
  misc_feature (1)..(1300): Ortholog of  Ceres SEQ ID NO 13656547 as cited in SEQ ID NO 65935
agacccaagatttgagtcttcaacaaacagatacaaatgggaagcatcgatgccgcagtgttgggttcagagaagaaatcaaacccgggaaaagccacaattcttgctctgggaaaagcctttcctcaccagctagtaatgcaagagtacttagtcgatggctacttcaaaaccaccaagtgtgatgaccctgaactcaaacagaaacttactcgtctctgcaagacaacaacggtgaagacaaggtatgttgtgatgtcagaggagattctcaagaagtacccagaacttgccattgaaggaggatccacagtgacgcagcgtctagacatctgcaacgatgcagtgaccgagatggcagtagaagcctccagagcctgcatcaagaactggggacgttctatttccgacataactcacgttgtctatgtctcctcaagcgaagctcgtcttcctggtggggacttgtacctggccaaggggcttggactcagtcctgacacacaccgtgttctgctctactttgttggctgttctggtggcgttgcaggtctccgtgtagccaaagacatcgccgagaataatccgggcagtagagttttgcttgccacgtctgagacaaccatcattgggttcaagcccccaagtgtggatagaccgtatgatcttgttggggtcgcgttgtttggtgatggagccggagctatgatcattggatccgatccagacccgatctgcgagaagcctctctttgagcttcatactgcaatacagaactttttacctgaaacagagaagacgataagatggaaggctaacanaacaagggataaacttcaagctatcgagagagcttccacagataatagaagacaatgtggagaatttctgcaagaagctaataggaaaagcgggactggctcataagaactataaccagatgttctgggcggttcatccaggtggaccagccatcttgaaccggattgaaaagcggcttaacctgtcgcctgagaagctgagtccaagcagaagagctctcatggactatggcaatgcgagcagcaattcaattgtttatgtgctggagtatatgttggaggagagcaagaaagtgaggaacatgaatgaagaagaaaacgagtggggtctgattcttgcttttggacctggtgttacatttgaaggcattatcgctcgaaaccttgatgtctgaacaataagtttttaccttgcagatcgagaaagaaccccttatgctttaataaagacatgaagctaaacatacgaaatatttttt

SEQ ID NO: 30955 - protein, 296 aa, Arabidopsis thaliana
  peptide (1)..(296): Ceres Seq. ID no. 12326353
  misc_feature (262)..(262): Xaa is any aa, unknown or other
MGSIDAAVLGSEKKSNPGKATILALGKAFPHQLVMQEYLVDGYFKTTKCDDPELKQKLTRLCKTTTVKTRYVVMSEEILKKYPELAIEGGSTVTQRLDICNDAVTEMAVEASRACIKNWGRSISDITHVVYVSSSEARLPGGDLYLAKGLGLSPDTHRVLLYFVGCSGGVAGLRVAKDIAENNPGSRVLLATSETTIIGFKPPSVDRPYDLVGVALFGDGAGAMIIGSDPDPICEKPLFELHTAIQNFLPETEKTIRWKANXTRDKLQAIERASTDNRRQCGEFLQEANRKSGTGS

SEQ ID NO: 30956 - protein, 262 aa, Arabidopsis thaliana
  peptide (1)..(262): Ceres Seq. ID no. 12326354
  misc_feature (228)..(228): Xaa is any aa, unknown or other
MQEYLVDGYFKTTKCDDPELKQKLTRLCKTTTVKTRYVVMSEEILKKYPELAIEGGSTVTQRLDICNDAVTEMAVEASRACIKNWGRSISDITHVVYVSSSEARLPGGDLYLAKGLGLSPDTHRVLLYFVGCSGGVAGLRVAKDIAENNPGSRVLLATSETTIIGFKPPSVDRPYDLVGVALFGDGAGAMIIGSDPDPICEKPLFELHTAIQNFLPETEKTIRWKANXTRDKLQAIERASTDNRRQCGEFLQEANRKSGTGS

SEQ ID NO: 30957 - protein, 223 aa, Arabidopsis thaliana
  peptide (1)..(223): Ceres Seq. ID no. 12326355
  misc_feature (189)..(189): Xaa is any aa, unknown or other
MSEEILKKYPELAIEGGSTVTQRLDICNDAVTEMAVEASRACIKNWGRSISDITHVVYVSSSEARLPGGDLYLAKGLGLSPDTHRVLLYFVGCSGGVAGLRVAKDIAENNPGSRVLLATSETTIIGFKPPSVDRPYDLVGVALFGDGAGAMIIGSDPDPICEKPLFELHTAIQNFLPETEKTIRWKANXTRDKLQAIERASTDNRRQCGEFLQEANRKSGTGS

SEQ ID NO: 30958 - DNA, 1512 bp, Arabidopsis thaliana
  misc_feature (1)..(1512): Ceres Seq. ID no. 13591994
  misc_feature (1)..(1512): Ortholog of  Ceres SEQ ID NO 13654285 as cited in SEQ ID NO 68661
gagatttatatagagagaaaaaaactatggctcacataaagatctaacagagacagtagtatagtcccacttccccaccaccaaagcttcgatcatcatcatcatcatcatcatggatccggatccggatcataaccatcgacccaacttccctctccagcttcttgattcttctacctcctcctcttccacttccttagccatcatctctactacttccgaacctaactccgaacctaagaagcctcctcctaaacgaacctctactaaagaccgacacaccaaagtcgaaggccgaggccgtcggatccgtatgcctgccatgtgtgctgcacgtgtctttcagctcacacgtgagcttggtcacaaatccgacggtgaaactattgagtggctactccaacaagcagaaccagcggttatagccgctacagggactggaaccattccggctaacttcacttctttaaacatctcacttcgtagctcaagatcttctctctctgctgctcatcttcgtacaactcctagtagctattactttcattcaccacatcagtccatgactcatcatcttcaacatcagcatcaggttcgtcccaagaacgagtcacattcttcgtcttcttcttcttcacagcttttagatcacaaccaaatgggtaactatctagtacaatcaactgctggatctttacctacgagtcagagtcctgcaacggcaccgttttggagtagtggtgacaacacacagaatctttgggcttttaatattaatcctcatcattccggtgttgtcgccggagatgtttacaaccccaacagtggtggtagtggcggcggtagtggagttcatttgatgaattttgcagctcctattgctttgttttctggacagcctttggcttctggttatggaggaggaggaggtggcggtggagaacatagccattatggagttttagcggcgttgaatgctgcttaccgaccggtggcggagacggggaaccataacaacaaccagcaaaaccgtgacggagatcatcatcacaaccatcaagaagatggaagcaccagtcatcattcctaggcaaacatacacaaacaaatatattctgtgagatttatttttctttttttgtcctttcgtttgtttgtttgttcttaacaagcgtgttttttttgcattgcttctttttcatatatttttatttatttctaaattctaatattctacggatttcatcttgtttatttttctgattaatgtattgagtaagtaattaagaacctgataatcgatatgttttagtttgtggtttttgcatgcaaggctttggttttattattctagagatttttgcttgaagtagttgtcttgtgaaatgttttcctcattactattgagtgtgagagttttctaatacttgattagggtttttgaacaatttttatatatgtatattaattcagtacggattatcaataaattatttcgcatgccaaattatt

SEQ ID NO: 30959 - protein, 325 aa, Arabidopsis thaliana
  peptide (1)..(325): Ceres Seq. ID no. 13591995
MDPDPDHNHRPNFPLQLLDSSTSSSSTSLAIISTTSEPNSEPKKPPPKRTSTKDRHTKVEGRGRRIRMPAMCAARVFQLTRELGHKSDGETIEWLLQQAEPAVIAATGTGTIPANFTSLNISLRSSRSSLSAAHLRTTPSSYYFHSPHQSMTHHLQHQHQVRPKNESHSSSSSSSQLLDHNQMGNYLVQSTAGSLPTSQSPATAPFWSSGDNTQNLWAFNINPHHSGVVAGDVYNPNSGGSGGGSGVHLMNFAAPIALFSGQPLASGYGGGGGGGGEHSHYGVLAALNAAYRPVAETGNHNNNQQNRDGDHHHNHQEDGSTSHHS

SEQ ID NO: 30960 - protein, 258 aa, Arabidopsis thaliana
  peptide (1)..(258): Ceres Seq. ID no. 13591996
MPAMCAARVFQLTRELGHKSDGETIEWLLQQAEPAVIAATGTGTIPANFTSLNISLRSSRSSLSAAHLRTTPSSYYFHSPHQSMTHHLQHQHQVRPKNESHSSSSSSSQLLDHNQMGNYLVQSTAGSLPTSQSPATAPFWSSGDNTQNLWAFNINPHHSGVVAGDVYNPNSGGSGGGSGVHLMNFAAPIALFSGQPLASGYGGGGGGGGEHSHYGVLAALNAAYRPVAETGNHNNNQQNRDGDHHHNHQEDGSTSHHS

SEQ ID NO: 30961 - protein, 255 aa, Arabidopsis thaliana
  peptide (1)..(255): Ceres Seq. ID no. 13591997
MCAARVFQLTRELGHKSDGETIEWLLQQAEPAVIAATGTGTIPANFTSLNISLRSSRSSLSAAHLRTTPSSYYFHSPHQSMTHHLQHQHQVRPKNESHSSSSSSSQLLDHNQMGNYLVQSTAGSLPTSQSPATAPFWSSGDNTQNLWAFNINPHHSGVVAGDVYNPNSGGSGGGSGVHLMNFAAPIALFSGQPLASGYGGGGGGGGEHSHYGVLAALNAAYRPVAETGNHNNNQQNRDGDHHHNHQEDGSTSHHS

SEQ ID NO: 30962 - DNA, 1232 bp, Arabidopsis thaliana
  misc_feature (1)..(1232): Ceres Seq. ID no. 12324969
  misc_feature (1)..(1232): Ortholog of  Ceres SEQ ID NO 15177091 as cited in SEQ ID NO 52140
  misc_feature (1)..(1232): Ortholog of  Ceres SEQ ID NO 15172539 as cited in SEQ ID NO 57333
  misc_feature (1)..(1232): Ortholog of  Ceres SEQ ID NO 14315951 as cited in SEQ ID NO 57634
  misc_feature (1)..(1232): Ortholog of  Ceres SEQ ID NO 13597324 as cited in SEQ ID NO 64842
  misc_feature (1)..(1232): Ortholog of  Ceres SEQ ID NO 13658672 as cited in SEQ ID NO 66627
cccttattaacctatatcgttcgccaacttcgaaaccctaaattcccaaattgcggaggctgagagatctcaaatcgacgaccaacaggaagaatgagcagtcgttcgagtagaaccgtgtacgtcggaaaccttcctggcgatatccgtgagagagaggtcgaagatttgttcagtaagtatggacctgttgttcaaattgatttgaaggttcctccaaggcctcctggttatgcattcgttgagtttgatgatgctcgggatgctgaagatgctattcatggtcgtgatggctatgactttgatgggcatcgtttgagggtggaattggcgcatggtgggaggcgttcatcagatgatactcggggtagtttcaatggtggtggccgtggtggtggtcgcggccgtggtgatggtggtagtcgtgggccatctaggagatcagagtttcgtgttctagtcacaggcttgccttcatctgcttcttggcaagatctcaaggatcacatgcgtaaaggaggcgatgtctgtttctcgcaagtgtaccgtgatgctagagggacaactggagttgttgattacacctgctatgaggacatgaagtatgcgctgaaaaagctcgacgacacagagtttcgaaatgcgttttcgaatggatatgtccgggttagagaatatgattcaaggaaggattctaggagtcctagccggggaagatcctattctaagagccgcagccgcagccgtggacgaagcgtgagccgaagcaggagcagaagcaggagcaggagcagaagtcccaaggcaaagtcttcacgtaggtcccctgcaaaatctacatcaagatctcctggcccccgctcgaagtcaaggtcaccgtctccaagaagatcgcgttcaagatcaagatctcctctaccttctgttcagaaggaaggaagcaagagccctagcaagccaagtccagccaagagtcctatccacactaggagtccatcgaggtaaaatgggagatatccaggtgaaaagagaagagagaagcatcttcttgctactcaaaacaaattctactttcttgaagtggattatatctgaacgcttattgactgtagaagatgcgacaagtttgatttgcactatcattttgtaatattcttgccattcttcgtcttctggatccctttacttttgagaatgatgtttttttttgaagatatcgtttcttttccctc

SEQ ID NO: 30963 - protein, 303 aa, Arabidopsis thaliana
  peptide (1)..(303): Ceres Seq. ID no. 12324970
MSSRSSRTVYVGNLPGDIREREVEDLFSKYGPVVQIDLKVPPRPPGYAFVEFDDARDAEDAIHGRDGYDFDGHRLRVELAHGGRRSSDDTRGSFNGGGRGGGRGRGDGGSRGPSRRSEFRVLVTGLPSSASWQDLKDHMRKGGDVCFSQVYRDARGTTGVVDYTCYEDMKYALKKLDDTEFRNAFSNGYVRVREYDSRKDSRSPSRGRSYSKSRSRSRGRSVSRSRSRSRSRSRSPKAKSSRRSPAKSTSRSPGPRSKSRSPSPRRSRSRSRSPLPSVQKEGSKSPSKPSPAKSPIHTRSPSR

SEQ ID NO: 30964 - protein, 165 aa, Arabidopsis thaliana; identical to SEQ ID NO: 29319
  peptide (1)..(165): Ceres Seq. ID no. 12324971

SEQ ID NO: 30965 - DNA, 977 bp, Arabidopsis thaliana
  misc_feature (1)..(977): Ceres Seq. ID no. 12322916
  misc_feature (1)..(977): Ortholog of  Ceres SEQ ID NO 15174082 as cited in SEQ ID NO 61896
  misc_feature (1)..(977): Ortholog of  Ceres SEQ ID NO 13655598 as cited in SEQ ID NO 64077
  misc_feature (1)..(977): Ortholog of  Ceres SEQ ID NO 15179351 as cited in SEQ ID NO 0
  misc_feature (1)..(977): Ortholog of  Ceres SEQ ID NO 15180408 as cited in SEQ ID NO 0
atcatcttcttcactaaacaaaaaaaaacccttcaaaacatttccttattctttcttcttcatctacaacaatggctggagttgcctttggttcctttgatgattcattcagcttggcttctctaagagcttacctcgctgagttcatctccactttactctttgttttcgctggtgttggctctgccattgcctacgcaaagctgacgtcggacgctgctcttgatacaccgggactagtggccatcgcggtttgtcatggttttgctctcttcgtggccgttgcaatcggagccaacatctccggtggccatgtgaacccagccgtcacttttggtcttgctgtcggtggtcaaatcacagtcatcaccggagttttctactggatcgctcagcttctcggctccaccgccgcttgtttcctccttaaatacgtcaccggtggattggcggttccaacccacagcgttgcggctggactaggatcgatagaaggagtagtgatggagatcatcatcaccttcgctttggtctacactgtctacgccaccgccgctgatcccaagaagggttctctcggaaccatcgctcctctcgccattggtcttatcgttggtgccaacatcctcgccgccggtccattctccggtggatccatgaacccagcacgttcctttggaccagctgttgctgccggagacttctctggtcactgggtctactgggttggaccactcatcggtggtggacttgccggacttatctacggaaatgtcttcatgggttcttccgaacatgttcctcttgcttctgctgatttctaaggaaacaagtgatgattcttgattcatgtttctgtgtttggttactttgcctcgatctttcttgttttgtttggagtttggtccggtttcgttgtaatttttatccaatttgtatgaatattatttaatggatggctgttttggttataaatt

SEQ ID NO: 30966 - protein, 250 aa, Arabidopsis thaliana
  peptide (1)..(250): Ceres Seq. ID no. 12322917
MAGVAFGSFDDSFSLASLRAYLAEFISTLLFVFAGVGSAIAYAKLTSDAALDTPGLVAIAVCHGFALFVAVAIGANISGGHVNPAVTFGLAVGGQITVITGVFYWIAQLLGSTAACFLLKYVTGGLAVPTHSVAAGLGSIEGVVMEIIITFALVYTVYATAADPKKGSLGTIAPLAIGLIVGANILAAGPFSGGSMNPARSFGPAVAAGDFSGHWVYWVGPLIGGGLAGLIYGNVFMGSSEHVPLASADF

SEQ ID NO: 30967 - DNA, 1310 bp, Arabidopsis thaliana
  misc_feature (1)..(1310): Ceres Seq. ID no. 12697154
  misc_feature (1)..(1310): Ortholog of  Ceres SEQ ID NO 15171289 as cited in SEQ ID NO 51570
aaccaaaaagcttttcttcccaacacacacaaaaaaaaaaactgtaacgaccaaaaaaaaagaggacgcgttagaagaaaaaaaaagaacaatccgataaaaagatccggcgatgtcaaacccgacccgtaagaatatggagaggattaaaggtccatggagtccagaagaagatgatctgttgcagaggcttgttcagaaacatggtccgaggaactggtctttgattagcaaatcaatccctggacgttccggcaaatcttgtcgtctccggtggtgtaaccagctatctccggaggtagagcaccgtgctttttcgcaggaagaagacgagacgattattcgagctcacgctcggtttggtaacaagtgggctacgatctctcgtcttctcaatggacgaaccgataacgctatcaagaatcattggaactcgacgctgaagcgaaaatgcagcgtcgaagggcaaagttgtgattttggtggtaatggagggtatgatggtaatttaggagaagagcaaccgttgaaacgtacggcgagtggtggtggtggtgtctcgactggcttgtatatgagtcccggaagtccatcgggatctgacgtcagcgagcaatctagtggtggtgcacacgtgtttaaaccaacggttagatctgaggttacagcgtcatcgtctggtgaagatcctccaacttatcttagtttgtctcttccttggactgacgagacggttcgagtcaacgagccggttcaacttaaccagaatacggttatggacggtggttatacggcggagctgtttccggttagaaaggaagagcaagtggaagtagaagaagaagaagcgaaggggatatctggtggattcggtggtgagttcatgacggtggttcaggagatgataaggacggaggtgaggagttacatggcggatttacagcgaggaaacgtcggtggtagtagttctggcggcggaggtggcggttcgtgtatgccacaaagtgtaaacagccgtcgtgttgggtttagagagtttatagtgaaccaaatcggaattgggaagatggagtagagtgataagaacaagttttccctctgtttctcgggaaaataaaagtttcaggcttttcatgtatagagccagtagtagagacgacgaaaggaggaagcgaaatcaaaaaatgttttgttatcatcatcatatgatcttctttcgtgattcaattaaaagcaaagcaagatcatttattaacaatttacacaaacttgaagaagaaaagtcaaaaacacttctcaaacttttattc

SEQ ID NO: 30968 - protein, 320 aa, Arabidopsis thaliana; identical to SEQ ID NO: 24922
  peptide (1)..(320): Ceres Seq. ID no. 12697155

SEQ ID NO: 30969 - protein, 312 aa, Arabidopsis thaliana; identical to SEQ ID NO: 24923
  peptide (1)..(312): Ceres Seq. ID no. 12697156

SEQ ID NO: 30970 - protein, 166 aa, Arabidopsis thaliana; identical to SEQ ID NO: 24924
  peptide (1)..(166): Ceres Seq. ID no. 12697157

SEQ ID NO: 30971 - DNA, 1117 bp, Arabidopsis thaliana
  misc_feature (1)..(1117): Ceres Seq. ID no. 12321756
  misc_feature (1)..(1117): Ortholog of  Ceres SEQ ID NO 14306439 as cited in SEQ ID NO 53628
  misc_feature (1)..(1117): Ortholog of  Ceres SEQ ID NO 12611235 as cited in SEQ ID NO 56101
  misc_feature (1)..(1117): Ortholog of  Ceres SEQ ID NO 15226202 as cited in SEQ ID NO 65001
  misc_feature (1)..(1117): Ortholog of  Ceres SEQ ID NO 15177896 as cited in SEQ ID NO 0
agctctgtctaatctctctcgatcgacgactgctctctctctgaaccggagacggtgtcacgggacgaatctaatcgccgggaaaccgtttttttttttctctcggaaaatcgatttgaatctccggcgatctgatcgggatgagtaacatcgatctgattgggatgagtaaccgcgatctgatcgggatgagtaacagcgagcttctcaccgtcgagcctctcgatcttcaattcccttttgaattgaagaagcagatctcttgctctctctatttgacgaacaagaccgacaataatgttgcctttaaggttaagacgacgaatccgaaaaagtattgtgttaggcctaatactggagttgttctcccgaggtctacttgcgaagttcttgtgaccatgcaagctcaaaaggaagctccttccgatatgcagtgcaaggacaagtttctgcttcaaggtgtgatagctagtcctggtgtcacagccaaggaagttactcctgagatgtttagcaaagaggctggacatcgagttgaggaaactaaactgagagttacttatgttgctccaccacgaccaccatcaccggttcacgaaggatctgaagagggttcttcacccagggcttctgtctcagataatggacatggttctgaattttcgtttgagagatttatcgtggacaacaaggctggacatcaagaaaacacatctgaggcgagggcactcattaccaagctaaccgaagaaaaacagtctgccattcaactgaacaacagacttcaaagagaactggatcagttaaggcgtgaaagcaaaaagagccaaagtggtggtatcccattcatgtacgttcttttggtcggactcatcggtctaattttgggatacattatgaagaggacataaaccacccaccttgaaattaatccctcacccgccacgaaggaaaaaaaaaagacttttaactcttttcagtcggacatttttttctcttctgtatttgtcaatttcgccttaaaaaggtgtcttagaagatttgtgtttcgtaactcagtttgctatgtttttttcaacttttgtaatccaaatgactttgcgttggttctttctcc

SEQ ID NO: 30972 - protein, 256 aa, Arabidopsis thaliana
  peptide (1)..(256): Ceres Seq. ID no. 12321757
MSNIDLIGMSNRDLIGMSNSELLTVEPLDLQFPFELKKQISCSLYLTNKTDNNVAFKVKTTNPKKYCVRPNTGVVLPRSTCEVLVTMQAQKEAPSDMQCKDKFLLQGVIASPGVTAKEVTPEMFSKEAGHRVEETKLRVTYVAPPRPPSPVHEGSEEGSSPRASVSDNGHGSEFSFERFIVDNKAGHQENTSEARALITKLTEEKQSAIQLNNRLQRELDQLRRESKKSQSGGIPFMYVLLVGLIGLILGYIMKRT

SEQ ID NO: 30973 - protein, 248 aa, Arabidopsis thaliana
  peptide (1)..(248): Ceres Seq. ID no. 12321758
MSNRDLIGMSNSELLTVEPLDLQFPFELKKQISCSLYLTNKTDNNVAFKVKTTNPKKYCVRPNTGVVLPRSTCEVLVTMQAQKEAPSDMQCKDKFLLQGVIASPGVTAKEVTPEMFSKEAGHRVEETKLRVTYVAPPRPPSPVHEGSEEGSSPRASVSDNGHGSEFSFERFIVDNKAGHQENTSEARALITKLTEEKQSAIQLNNRLQRELDQLRRESKKSQSGGIPFMYVLLVGLIGLILGYIMKRT

SEQ ID NO: 30974 - protein, 240 aa, Arabidopsis thaliana
  peptide (1)..(240): Ceres Seq. ID no. 12321759
MSNSELLTVEPLDLQFPFELKKQISCSLYLTNKTDNNVAFKVKTTNPKKYCVRPNTGVVLPRSTCEVLVTMQAQKEAPSDMQCKDKFLLQGVIASPGVTAKEVTPEMFSKEAGHRVEETKLRVTYVAPPRPPSPVHEGSEEGSSPRASVSDNGHGSEFSFERFIVDNKAGHQENTSEARALITKLTEEKQSAIQLNNRLQRELDQLRRESKKSQSGGIPFMYVLLVGLIGLILGYIMKRT

SEQ ID NO: 30975 - DNA, 1433 bp, Arabidopsis thaliana
  misc_feature (1)..(1433): Ceres Seq. ID no. 12324574
  misc_feature (1)..(1433): Ortholog of  Ceres SEQ ID NO 13597805 as cited in SEQ ID NO 64186
aaattcaaaaaaaatcttagatcaggtggaatctaccagagagcacgcgattctagatcgaatcaccggtgagtgacgccggagtttttatccccgcggcgaagagagtaaaccatttcttcttcccgatgtatcagtgaagttaagtagtcgagagaggggataatgatggaagtggaaggatcaatgaatcgtgctcctgatcaatcatccttcttacgatcaagacgatccaaagctctgtatcagtttaagcagcagaaactcccagcttgtaagccagtgttaacaccaatatcggttataacagtgtttatgttaatgggttttgttttcattcccattggtctcattactcttcgtgcttctcgtgatgctattgaaattatagatcggtatgatgttgagtgcattcctgaagaatatagaaccaacaaactgttgtatataactgattcatccatcccaaagaattgtacccgctacttgaaggtacaaaagtatatgaaagctcccatttttatctactaccagcttgataactactatcaaaaccatcgccggtatgtaaagagtagaagtgatcagcaactattacatggactggagtatagccacacaagttcttgtgaaccagaggagtcatctaatggtctcccaattgttccttgtgggttaatcgcttggagtatgttcaatgatacatttacgttttctcgtgaaagaacaaaactgaatgtgagccggaataacattgcgtggaagagtgaccgcgagcacaagtttggaaagaatgtgtatcctatcaatttccagaacggaactttgattggtggagcaaagttggatccaaaacttccactaagtgaccaagaggactttatagtgtggatgcgagcagctgctttgctaagcttccggaaattatatggaagaatcgaagaggacttggaaccaggaaaagttgttgaagtaaatttgatgaacaattacaacacttatagctttagtgggcagaagaagcttattctctccacatcaaattggttaggaggaagaaatgatttgcctgggcatcacctatcttgtcgttggttcctcttccgtagtcatatccatcatcttcatgttgctccatttgaaaaatccaaggccttacggcgacaattcttggaacaagaaaagcctttcaagttgagaagctgttacattctttctctaacatattcatattccaggttcatatatattcctacatattcaagagccatactttgtctatatatatatgatcatctaggtttaaggagtatataacgtatgtatgagcctatagttctagaaaactgaaggttcctctgttttctttacgatccttgtgtgttcggattgcgggttctaaagattcaacaaaaagataattgtttgacccc

SEQ ID NO: 30976 - protein, 383 aa, Arabidopsis thaliana
  peptide (1)..(383): Ceres Seq. ID no. 12324575
MMEVEGSMNRAPDQSSFLRSRRSKALYQFKQQKLPACKPVLTPISVITVFMLMGFVFIPIGLITLRASRDAIEIIDRYDVECIPEEYRTNKLLYITDSSIPKNCTRYLKVQKYMKAPIFIYYQLDNYYQNHRRYVKSRSDQQLLHGLEYSHTSSCEPEESSNGLPIVPCGLIAWSMFNDTFTFSRERTKLNVSRNNIAWKSDREHKFGKNVYPINFQNGTLIGGAKLDPKLPLSDQEDFIVWMRAAALLSFRKLYGRIEEDLEPGKVVEVNLMNNYNTYSFSGQKKLILSTSNWLGGRNDLPGHHLSCRWFLFRSHIHHLHVAPFEKSKALRRQFLEQEKPFKLRSCYILSLTYSYSRFIYIPTYSRAILCLYIYDHLGLRSI

SEQ ID NO: 30977 - protein, 382 aa, Arabidopsis thaliana
  peptide (1)..(382): Ceres Seq. ID no. 12324576
MEVEGSMNRAPDQSSFLRSRRSKALYQFKQQKLPACKPVLTPISVITVFMLMGFVFIPIGLITLRASRDAIEIIDRYDVECIPEEYRTNKLLYITDSSIPKNCTRYLKVQKYMKAPIFIYYQLDNYYQNHRRYVKSRSDQQLLHGLEYSHTSSCEPEESSNGLPIVPCGLIAWSMFNDTFTFSRERTKLNVSRNNIAWKSDREHKFGKNVYPINFQNGTLIGGAKLDPKLPLSDQEDFIVWMRAAALLSFRKLYGRIEEDLEPGKVVEVNLMNNYNTYSFSGQKKLILSTSNWLGGRNDLPGHHLSCRWFLFRSHIHHLHVAPFEKSKALRRQFLEQEKPFKLRSCYILSLTYSYSRFIYIPTYSRAILCLYIYDHLGLRSI

SEQ ID NO: 30978 - protein, 376 aa, Arabidopsis thaliana
  peptide (1)..(376): Ceres Seq. ID no. 12324577
MNRAPDQSSFLRSRRSKALYQFKQQKLPACKPVLTPISVITVFMLMGFVFIPIGLITLRASRDAIEIIDRYDVECIPEEYRTNKLLYITDSSIPKNCTRYLKVQKYMKAPIFIYYQLDNYYQNHRRYVKSRSDQQLLHGLEYSHTSSCEPEESSNGLPIVPCGLIAWSMFNDTFTFSRERTKLNVSRNNIAWKSDREHKFGKNVYPINFQNGTLIGGAKLDPKLPLSDQEDFIVWMRAAALLSFRKLYGRIEEDLEPGKVVEVNLMNNYNTYSFSGQKKLILSTSNWLGGRNDLPGHHLSCRWFLFRSHIHHLHVAPFEKSKALRRQFLEQEKPFKLRSCYILSLTYSYSRFIYIPTYSRAILCLYIYDHLGLRSI

SEQ ID NO: 30979 - DNA, 822 bp, Arabidopsis thaliana
  misc_feature (1)..(822): Ceres Seq. ID no. 12321976
  misc_feature (1)..(822): Ortholog of  Ceres SEQ ID NO 13639278 as cited in SEQ ID NO 59801
  misc_feature (1)..(822): Ortholog of  Ceres SEQ ID NO 12598299 as cited in SEQ ID NO 68409
aactttgtcccaaaaatttattatagagcgaaccaatcaaacactagttcaatgtctctttcgttgatttctggttcgattcatatctgcgctgagcttcgtctccgtcaatctccgtcgtgtttaacaatctcttcttcgcggccaaaatttctctcttcccgtagtaagcagttctctctcgaccattttcctcagatctcacgtccgatcaaagtcatcgcgagaagcgccatggagacgacggcggagacaattaccggcggtgttcccaacaacacgatgaagttattgttcgttgagatgggtgtcggttacgatcagcacgggcaagatgtgacatctgcggcgatgaaggcttgtaagaatgcaatttcttcgaattcgattcctgcttttaggaggggttcgattcctggagtttcatttggagaaatgaagttgcagattaagcttggagtgcctcattctcttcaccagcagctggatttggacaaggttaagtctatcttcccatatgggaagattgtgaatgtagaggtggtggatggaggactgatttgctcaagcggtgttctagtcgaagaaatgggtgatacaaatgaagattgctacatagtgaatgtcgcagtctatgtcggttactagtctatcgttcttgtatggtcgactcgacgccgggtttaacaatgtcaccctcgtcgatagaagagaaaaacaaaaacaaatgcagtcacttttagttgtatattttgatttcagaaccattttggtttgtaggcgtgcagcgtttggtgcggtctagaaataatcacgtttgcc

SEQ ID NO: 30980 - protein, 215 aa, Arabidopsis thaliana
  peptide (1)..(215): Ceres Seq. ID no. 12321977
NFVPKIYYRANQSNTSSMSLSLISGSIHICAELRLRQSPSCLTISSSRPKFLSSRSKQFSLDHFPQISRPIKVIARSAMETTAETITGGVPNNTMKLLFVEMGVGYDQHGQDVTSAAMKACKNAISSNSIPAFRRGSIPGVSFGEMKLQIKLGVPHSLHQQLDLDKVKSIFPYGKIVNVEVVDGGLICSSGVLVEEMGDTNEDCYIVNVAVYVGY

SEQ ID NO: 30981 - protein, 198 aa, Arabidopsis thaliana
  peptide (1)..(198): Ceres Seq. ID no. 12321978
MSLSLISGSIHICAELRLRQSPSCLTISSSRPKFLSSRSKQFSLDHFPQISRPIKVIARSAMETTAETITGGVPNNTMKLLFVEMGVGYDQHGQDVTSAAMKACKNAISSNSIPAFRRGSIPGVSFGEMKLQIKLGVPHSLHQQLDLDKVKSIFPYGKIVNVEVVDGGLICSSGVLVEEMGDTNEDCYIVNVAVYVGY

SEQ ID NO: 30982 - protein, 137 aa, Arabidopsis thaliana
  peptide (1)..(137): Ceres Seq. ID no. 12321979
METTAETITGGVPNNTMKLLFVEMGVGYDQHGQDVTSAAMKACKNAISSNSIPAFRRGSIPGVSFGEMKLQIKLGVPHSLHQQLDLDKVKSIFPYGKIVNVEVVDGGLICSSGVLVEEMGDTNEDCYIVNVAVYVGY

SEQ ID NO: 30983 - DNA, 1168 bp, Arabidopsis thaliana
  misc_feature (1)..(1168): Ceres Seq. ID no. 12324578
  misc_feature (1)..(1168): Ortholog of  Ceres SEQ ID NO 13594435 as cited in SEQ ID NO 57977
atcaaaaaatctctatccatccacaacaacaacaaaaactcaagaacaatatctccacttgatcactaccacattgtccaatcactctacaaagcctgtacgtacacaacaacattaccatggtgaaacaagaacgcaagatccaaaccagcagcacaaaaaaggaaatgcctttgtcatcatcaccatcttcttcttcttcttcttcatcttcttcctcgtcttcgtcttcgtgtaagaacaagaacaagaagagtaagattaagaagtacaaaggagtgaggatgagaagttggggatcatgggtctctgagattagggcaccaaatcaaaagacaaggatttggttaggttcttactcaacagctgaagcagctgctagagcttacgatgttgcactcttatgtctcaaaggccctcaagccaatctcaacttccctacttcttcttcttctcatcatcttcttgataatctcttagatgaaaatacccttttgtcccccaaatccatccaaagagtagctgctcaagctgccaactcatttaaccattttgcccctacttcatcagccgtctcgtcaccgtccgatcatgatcatcaccatgatgatgggatgcaatctttgatgggatcttttgtggacaatcatgtgtctttgatggattcaacatcttcatggtatgatgatcataatgggatgttcttgtttgataatggagctccattcaattactctcctcaactaaactcgacgacgatgctcgatgaatacttctacgaagatgctgacattccgctttggagtttcaattaatccgacggtccataatacatactttaattagttttctaaatcattttttaaattcttttttatatatgtaacatatatttaccctcgtcgtaattattcatttccaagttgtttgttgcttggagagaattgacgacggatacgattatataatataattgtaagtttttatatgtagcaaactcggtacaattcggatttaatagggatctaggaagttcacatgaacaagcgactcttttttttgtcacttctttgactttttcatgtgaggtttcttttcatcaattttttttaacaatgtgtgaaaatatttctgtattgtaatgatatatttcgcacaatagttttgc

SEQ ID NO: 30984 - protein, 231 aa, Arabidopsis thaliana
  peptide (1)..(231): Ceres Seq. ID no. 12324579
MVKQERKIQTSSTKKEMPLSSSPSSSSSSSSSSSSSSSCKNKNKKSKIKKYKGVRMRSWGSWVSEIRAPNQKTRIWLGSYSTAEAAARAYDVALLCLKGPQANLNFPTSSSSHHLLDNLLDENTLLSPKSIQRVAAQAANSFNHFAPTSSAVSSPSDHDHHHDDGMQSLMGSFVDNHVSLMDSTSSWYDDHNGMFLFDNGAPFNYSPQLNSTTMLDEYFYEDADIPLWSFN

SEQ ID NO: 30985 - protein, 215 aa, Arabidopsis thaliana
  peptide (1)..(215): Ceres Seq. ID no. 12324580
MPLSSSPSSSSSSSSSSSSSSSCKNKNKKSKIKKYKGVRMRSWGSWVSEIRAPNQKTRIWLGSYSTAEAAARAYDVALLCLKGPQANLNFPTSSSSHHLLDNLLDENTLLSPKSIQRVAAQAANSFNHFAPTSSAVSSPSDHDHHHDDGMQSLMGSFVDNHVSLMDSTSSWYDDHNGMFLFDNGAPFNYSPQLNSTTMLDEYFYEDADIPLWSFN

SEQ ID NO: 30986 - protein, 176 aa, Arabidopsis thaliana
  peptide (1)..(176): Ceres Seq. ID no. 12324581
MRSWGSWVSEIRAPNQKTRIWLGSYSTAEAAARAYDVALLCLKGPQANLNFPTSSSSHHLLDNLLDENTLLSPKSIQRVAAQAANSFNHFAPTSSAVSSPSDHDHHHDDGMQSLMGSFVDNHVSLMDSTSSWYDDHNGMFLFDNGAPFNYSPQLNSTTMLDEYFYEDADIPLWSFN

SEQ ID NO: 30987 - DNA, 941 bp, Arabidopsis thaliana
  misc_feature (1)..(941): Ceres Seq. ID no. 12340295
  misc_feature (1)..(941): Ortholog of  Ceres SEQ ID NO 12610385 as cited in SEQ ID NO 55938
gacaaaccaaaaaaaaagcctaaaaagccgaccttttttctttctttctctcctctacctctcagcttctgctggatctctccagcagacacgatcttgttcggagagattcgtaggggaccgatctatcaaggcttcaagggcaaacagaaatggaccacgacaagacaggatgccaaagcccacctgaaggtcccaagctatgtactaacaactgcggtttctttgaagcgctgccacaatgaacatgtgttctaagtgtcacaaggatatgttgttccaacagtagcagggcgctaagtttgcatctgcagtgtctggaacatcgtcatccagcaacatcataaaggaaacctttaccgctgcgttggtcgatattgaaaccaaatccgttgagccgatgactgtttctgtacagccatcctctgtccaagtcgttgcagaggtagtagcaccagaagaagctgcgaaaccaaagggaccaagccgatgtactacttgcaataagcgggttggcctgactggattcaaatgtcgctgtgggagcctcttctgcggaaaacacaccgctatgcagacatacatgactgctccttcaattaccatgctgctgcgcaagaggcgatagctaaggcaaacccggttgtgaaagcagagaagcttgacaaaatctgaaaatctaagtaaacttctctggtttcatcaggtggcctggtttttccttctcctgtctgtgtctggttcaagtattctcatgttaaaaaggttttatataaggtcgaatgaaagcgtgcttgatctttagcgtcttccatctctctgcaatatttgtggtgtggaactttctattatctgtgtttgcaagcagagaaacgtgctcttaaaaaaaatgctttgtgtgtttatctttctactatttttgagcactgtgttattgtttc

SEQ ID NO: 30988 - protein, 85 aa, Arabidopsis thaliana
  peptide (1)..(85): Ceres Seq. ID no. 12340296
DKPKKKPKKPTFFLSFSPLPLSFCWISPADTILFGEIRRGPIYQGFKGKQKWTTTRQDAKAHLKVPSYVLTTAVSLKRCHNEHVF

SEQ ID NO: 30989 - protein, 75 aa, Arabidopsis thaliana
  peptide (1)..(75): Ceres Seq. ID no. 12340297
MTVSVQPSSVQVVAEVVAPEEAAKPKGPSRCTTCNKRVGLTGFKCRCGSLFCGKHTAMQTYMTAPSITMLLRKRR

SEQ ID NO: 30990 - protein, 62 aa, Arabidopsis thaliana
  peptide (1)..(62): Ceres Seq. ID no. 12340298
TNQKKSLKSRPFFFLSLLYLSASAGSLQQTRSCSERFVGDRSIKASRANRNGPRQDRMPKPT

SEQ ID NO: 30991 - DNA, 1219 bp, Arabidopsis thaliana
  misc_feature (1)..(1219): Ceres Seq. ID no. 12481880
  misc_feature (1)..(1219): Ortholog of  Ceres SEQ ID NO 14306066 as cited in SEQ ID NO 57378
gtagtaattaccccgtttaacccgcgttaattacgcttgtgtccctacgcgcgtctcaaagatctctctcttctctggagaaaaaataaaacaaaagaacagcgttcgccgagagatatacatactcggatcagtcgtcaaaagctttggaatttgatacttttgatttttcgagaatcttgaaaatcagtcatgggttctggaaaagagcgtgacactttcgtctacctcgctaagctctctgagcaagctgagcgttatgaagaaatggtggaatcaatgaaaagtgttgcgaaattgaatgttgatctgacggtggaagagaggaacttactctctgtgggttacaagaacgtgattggttcaaggagagcttcgtggaggatcttctcgtcgattgaacaaaaggaagcagtgaaagggaatgatgttaatgtaaagaggatcaaagagtatatggagaaggttgagttagagctttctaacatatgcattgatattatgtctgtcttagatgagcatctcattccttcggcttccgagggtgaatctactgtcttcttcaacaagatgaaaggtgactattaccgctatcttgctgagttcaaatcagggaacgagaggaaagaggctgctgatcagtctttgaaagcctatgagattgctactactgctgctgaggctaagctccctccaacacaccctatcagattgggtttggctttgaatttctctgtcttctactacgagatcatgaacgcacctgaaagggcatgtcaccttgctaagcaggcgttcgatgaagctatctcagagcttgacactctgaacgaggaatcctacaaagatagcaccttaataatgcaactccttagggacaatctgaccttgtggacttctgacatctcagaagaaggaggagacgatgctcataagacgaatggttctgccaaacctggtgctggtggagacgatgcagagtgatatgatatgtgtgcacctggacaatatgtttcaagaactgaatgtgcggtgaataatagtgaaaagtagagtttctctgttccctatatcatgattgtctatgttacttgtactctggtttagccctaaatgtctctctggtttgaatgtattgcatgcctgtctcaggacactcttatttgtaattcactactgtcgtcttactatctatccttatggatccaatcttgaaact

SEQ ID NO: 30992 - protein, 263 aa, Arabidopsis thaliana
  peptide (1)..(263): Ceres Seq. ID no. 12481881
MGSGKERDTFVYLAKLSEQAERYEEMVESMKSVAKLNVDLTVEERNLLSVGYKNVIGSRRASWRIFSSIEQKEAVKGNDVNVKRIKEYMEKVELELSNICIDIMSVLDEHLIPSASEGESTVFFNKMKGDYYRYLAEFKSGNERKEAADQSLKAYEIATTAAEAKLPPTHPIRLGLALNFSVFYYEIMNAPERACHLAKQAFDEAISELDTLNEESYKDSTLIMQLLRDNLTLWTSDISEEGGDDAHKTNGSAKPGAGGDDAE

SEQ ID NO: 30993 - protein, 238 aa, Arabidopsis thaliana
  peptide (1)..(238): Ceres Seq. ID no. 12481882
MVESMKSVAKLNVDLTVEERNLLSVGYKNVIGSRRASWRIFSSIEQKEAVKGNDVNVKRIKEYMEKVELELSNICIDIMSVLDEHLIPSASEGESTVFFNKMKGDYYRYLAEFKSGNERKEAADQSLKAYEIATTAAEAKLPPTHPIRLGLALNFSVFYYEIMNAPERACHLAKQAFDEAISELDTLNEESYKDSTLIMQLLRDNLTLWTSDISEEGGDDAHKTNGSAKPGAGGDDAE

SEQ ID NO: 30994 - protein, 234 aa, Arabidopsis thaliana
  peptide (1)..(234): Ceres Seq. ID no. 12481883
MKSVAKLNVDLTVEERNLLSVGYKNVIGSRRASWRIFSSIEQKEAVKGNDVNVKRIKEYMEKVELELSNICIDIMSVLDEHLIPSASEGESTVFFNKMKGDYYRYLAEFKSGNERKEAADQSLKAYEIATTAAEAKLPPTHPIRLGLALNFSVFYYEIMNAPERACHLAKQAFDEAISELDTLNEESYKDSTLIMQLLRDNLTLWTSDISEEGGDDAHKTNGSAKPGAGGDDAE

SEQ ID NO: 30995 - DNA, 905 bp, Arabidopsis thaliana
  misc_feature (1)..(905): Ceres Seq. ID no. 13490791
  misc_feature (1)..(905): Ortholog of  Ceres SEQ ID NO 14306110 as cited in SEQ ID NO 1363
gttatataatgacaccataaccatttcttctcttcacaatctttacaagaatatctctcttctacagtaaacaaaaaatggcaatgaatggtttgtccaagatggctgtagccgccgcaactgctcttctcctagttctgaccattgtcccgggcgcagtagctgtgacttacactattgaatggaccactggtgtggactactcaggttgggctaccggaaagactttcagggttggtgacattctagagttcaagtatggttcttcccacacggtggatgtggttgacaaagccggatatgatggctgcgacgcctcctcctcgactgagaaccattccgatggagacaccaaaatcgatcttaagactgtaggaataaactatttcatctgttctacacctggtcactgcagaaccaatggcggcatgaagctagccgttaatgtcgtagccggttctgccggacctccggccactcccacgccaccttcttcaactccgggaactcctaccacaccggaatcacctccgtctggcggatcacccacacccaccacacccacacctggtgcaggttcaacttctcctcctcctccaccaaaggcaagtggtgcgtctaagggagtgatgagttacgttttggtgggagtctcgatggttttgggttatggtttgtggatgtaattggtttagagagccagggtggagtcagtgcttttgcctttttaaattattttggtttttggttgtaagagaatttgggtttgtgtgccacgtcagaagctcttcattattcgtaggatttttattatctcggcatttgattatcgttatcatcatcatcatcacattcacttattctcttgttgtaataaattatactattaattttcattttcgtcc

SEQ ID NO: 30996 - protein, 202 aa, Arabidopsis thaliana
  peptide (1)..(202): Ceres Seq. ID no. 13490792
MAMNGLSKMAVAAATALLLVLTIVPGAVAVTYTIEWTTGVDYSGWATGKTFRVGDILEFKYGSSHTVDVVDKAGYDGCDASSSTENHSDGDTKIDLKTVGINYFICSTPGHCRTNGGMKLAVNVVAGSAGPPATPTPPSSTPGTPTTPESPPSGGSPTPTTPTPGAGSTSPPPPPKASGASKGVMSYVLVGVSMVLGYGLWM

SEQ ID NO: 30997 - protein, 200 aa, Arabidopsis thaliana
  peptide (1)..(200): Ceres Seq. ID no. 13490793
MNGLSKMAVAAATALLLVLTIVPGAVAVTYTIEWTTGVDYSGWATGKTFRVGDILEFKYGSSHTVDVVDKAGYDGCDASSSTENHSDGDTKIDLKTVGINYFICSTPGHCRTNGGMKLAVNVVAGSAGPPATPTPPSSTPGTPTTPESPPSGGSPTPTTPTPGAGSTSPPPPPKASGASKGVMSYVLVGVSMVLGYGLWM

SEQ ID NO: 30998 - protein, 194 aa, Arabidopsis thaliana
  peptide (1)..(194): Ceres Seq. ID no. 13490794
MAVAAATALLLVLTIVPGAVAVTYTIEWTTGVDYSGWATGKTFRVGDILEFKYGSSHTVDVVDKAGYDGCDASSSTENHSDGDTKIDLKTVGINYFICSTPGHCRTNGGMKLAVNVVAGSAGPPATPTPPSSTPGTPTTPESPPSGGSPTPTTPTPGAGSTSPPPPPKASGASKGVMSYVLVGVSMVLGYGLWM

SEQ ID NO: 30999 - DNA, 1904 bp, Arabidopsis thaliana
  misc_feature (1)..(1904): Ceres Seq. ID no. 12338555
  misc_feature (1)..(1904): Ortholog of  Ceres SEQ ID NO 15170655 as cited in SEQ ID NO 67069
ttttacgaatccacatattcctggatcaacgggaacccttcgtttctttcccacccgcgtgttatcccgtttctcaaatttctcatctttccgggaaaattcactttttttttttcctgggaagattcgttgtgttgtgaattttagtgggcaccttcaaattttcgattttttttttattttccttgtctcttacctgatttggtgatttattattacatcaaccactcgattcgttagatttccggatttgaaaaagagtcaccaacttgtacggattctcgttttggggatcgagtattgctgatttgtgattttgttgtttttgggtactttccctttgtggattcggatctggttggtggctttgtcaaatgggcgcattagatgagggatgtttgaatctggagctcgacattggaatgaaaaatggctgcattgagcttgctttcgagcaccaacctgagactttagcaatccaagacgctgtcaaacttctcttgcaaggtcttcatgaagatgtcaatcgggaaggcatcaaaaagactcctttccgtgtcgccaaggcccttcgtgaagggaccagaggttataagcaaaaggtgaaggactatgtacagagtgctctgtttccagaagcagggttggatgaaggagttgggcaagcaggaggagtcggaggacttgttgttgtcagagacctcgatcattactcttactgtgaatcttgcttgcttccttttcatgtcaagtgtcacataggttatgtcccatcgggccagagagtgttaggactgagcaagttctctagagtcactgatgttttcgccaagcggctccaagaccctcagcgtttggctgatgatatttgttcagctctccaacattgggtcaaaccagctggagtcgctgttgttcttgaatgctctcacattcacttccccagtttggacttggactctctgaacttgtctagccaccgtggatttgtgaagctactggtttcctcggggtcaggagttttcgaggatgaaagctcgaatctttggggtgaatttcagagtttcttgatgttcaaaggtgtaaaaacgcaagctttgtgcagaaatggcagctctgtgaaagagtggtgcccaagcgttaaaagctcgtctaaattatcacctgaagttgacccggaaatggtttctgctgttgtttccatcctgaaatcactgggagaagatccgttgaggaaagaactcattgctacaccaactcgattcctcaaatggatgttgaacttccaaagaaccaacctcgaaatgaagctaaacagctttaaccctgccaaagtcaatggcgaggtcaaagagaaaaggctgcactgtgagctgaacatgcccttctggtcaatgtgtgaacatcatttgcttcctttctatggagttgttcatattggctacttttgtgctgaaggatccaaccccaaccctgttggaagttcactcatgaaagcgattgtacacttttatgggttcaagcttcaagtgcaagagaggatgactcgacagatcgctgaaacgctatcgcctcttgttggcggggatgtgattgttgtggcggaagctgggcatacttgtatgatctctagaggaattgagaagtttggaagcagcaccgcgacaatcgcagttttgggtcggttttcgagtgacaattccgcaagagcgatgtttctagacaagatccatacaactaatgccttgaagacagagtcaagctctccattttgagatggtttcatgtctgtttgttgtcttttttttatgcttctgcttgtcttctcttttttttgttatatgataaatacttcggaagttgctaaacttcggaagcaaaccaatgatttcttggttttgatt

SEQ ID NO: 31000 - protein, 466 aa, Arabidopsis thaliana
  peptide (1)..(466): Ceres Seq. ID no. 12338557
MGALDEGCLNLELDIGMKNGCIELAFEHQPETLAIQDAVKLLLQGLHEDVNREGIKKTPFRVAKALREGTRGYKQKVKDYVQSALFPEAGLDEGVGQAGGVGGLVVVRDLDHYSYCESCLLPFHVKCHIGYVPSGQRVLGLSKFSRVTDVFAKRLQDPQRLADDICSALQHWVKPAGVAVVLECSHIHFPSLDLDSLNLSSHRGFVKLLVSSGSGVFEDESSNLWGEFQSFLMFKGVKTQALCRNGSSVKEWCPSVKSSSKLSPEVDPEMVSAVVSILKSLGEDPLRKELIATPTRFLKWMLNFQRTNLEMKLNSFNPAKVNGEVKEKRLHCELNMPFWSMCEHHLLPFYGVVHIGYFCAEGSNPNPVGSSLMKAIVHFYGFKLQVQERMTRQIAETLSPLVGGDVIVVAEAGHTCMISRGIEKFGSSTATIAVLGRFSSDNSARAMFLDKIHTTNALKTESSSPF

SEQ ID NO: 31001 - protein, 450 aa, Arabidopsis thaliana
  peptide (1)..(450): Ceres Seq. ID no. 12338558
MKNGCIELAFEHQPETLAIQDAVKLLLQGLHEDVNREGIKKTPFRVAKALREGTRGYKQKVKDYVQSALFPEAGLDEGVGQAGGVGGLVVVRDLDHYSYCESCLLPFHVKCHIGYVPSGQRVLGLSKFSRVTDVFAKRLQDPQRLADDICSALQHWVKPAGVAVVLECSHIHFPSLDLDSLNLSSHRGFVKLLVSSGSGVFEDESSNLWGEFQSFLMFKGVKTQALCRNGSSVKEWCPSVKSSSKLSPEVDPEMVSAVVSILKSLGEDPLRKELIATPTRFLKWMLNFQRTNLEMKLNSFNPAKVNGEVKEKRLHCELNMPFWSMCEHHLLPFYGVVHIGYFCAEGSNPNPVGSSLMKAIVHFYGFKLQVQERMTRQIAETLSPLVGGDVIVVAEAGHTCMISRGIEKFGSSTATIAVLGRFSSDNSARAMFLDKIHTTNALKTESSSPF

SEQ ID NO: 31002 - protein, 234 aa, Arabidopsis thaliana
  peptide (1)..(234): Ceres Seq. ID no. 12338559
MFKGVKTQALCRNGSSVKEWCPSVKSSSKLSPEVDPEMVSAVVSILKSLGEDPLRKELIATPTRFLKWMLNFQRTNLEMKLNSFNPAKVNGEVKEKRLHCELNMPFWSMCEHHLLPFYGVVHIGYFCAEGSNPNPVGSSLMKAIVHFYGFKLQVQERMTRQIAETLSPLVGGDVIVVAEAGHTCMISRGIEKFGSSTATIAVLGRFSSDNSARAMFLDKIHTTNALKTESSSPF

SEQ ID NO: 31003 - DNA, 1698 bp, Arabidopsis thaliana
  misc_feature (1)..(1698): Ceres Seq. ID no. 12396660
  misc_feature (1)..(1698): Ortholog of  Ceres SEQ ID NO 14304276 as cited in SEQ ID NO 53407
aagctaagctctagaaacaccgcctttaacgtctcgctgcaccatttttcatcgttgatcagtcgtcgatcctcttgagtgatttgattttagactttctagttatcaaactcgaaagatggattctgtccttgtagtgggcattgcatcggttattctcggtgcgttgatcgctgtactcttcttcggtagctacttccggaagcggacatcggaggtgcaatccatggccaaagcggagcctcaggatccgatccggaatccaaagtcgaatcatcctgctccgaagaagaatcatcccaaatctcaagcgtccgataagaatcagaacaaacggcatcatcctttagatttaaacacgttgaaaggccacggtgatgctgttactggactctgtttctcgtccgatggaaagagcttggccacagcttgcgctgatggagtaatcagggtgttcaagctagatgatgcatcaagcaaaagcttcaaatttttaaggataaatcttcctgctggaggacatccaaccgccgtggcatttgctgacgatgcctcatctattgttgtggcttgtcatcatatgtctggttcatctttgtacatgtacggtgaagataagcaaaaggatcagcaagggaagcttcctcttcctagtatcaaatgggaccaccatcatattcatgagaagagatcagtgcttaccatctctggagctactgcaacttacggtactgctgatggaagtgttgtcattgcctcttgttctgaagggactgatatcgtcctttggcatgggaaaactgggaggaatttgggacatgttgatacaaaccagttgaagaaccacatggcagctgtatcaccaaatggacgttttttggcagctgcagcatttactgcagatgtgaaagtgtgggaaattgtgtatcagaaagatggttctgtgaaagaggtttcaagagttatgcaacttaaaggccacaagagtgcagtgacttggttatgcttttctccaaactcagagcaaatcatcaccgcttcaaaagatggttcaataagagtctggaacatcaatgtccgttatcatcttgatgaggatccaaagactttgaaggtgttcccgattccactttgcgactcaggaggcaatccgttgcactatgatcgtctcagcttatgcccagagggaaagatattggcagcaagccatggttccacattgcagtggttatgtgctgaaactggaaatgtcttggacacagctgagaaagcccacgaaggggatatcacatgcatatcttgggcacccaaggctattacagttggggaaagacatgccatggttttggggacatcaggcgatgacaagaaagtgaagctgtgggaagctccaaagtcgcaatctttgtaggctctcgcatacacgtagtcccttgatgacatgaggcgtatttaaacggtacaacttgcgaggaaaaaaactctaataggttttgtttcgagtcccaagttgggatcaaatgaagggtggtttaaagtccttcttgttaccaagtgtcttttaacttctgaagttttgaattttgctcataggactagtacaacactcacagtcttctatgttttccaaattaaggaaatttaaaaagcacacaacaacactaagaaatatgaatcgattaaaattattatacgcag

SEQ ID NO: 31004 - protein, 430 aa, Arabidopsis thaliana
  peptide (1)..(430): Ceres Seq. ID no. 12396661
MDSVLVVGIASVILGALIAVLFFGSYFRKRTSEVQSMAKAEPQDPIRNPKSNHPAPKKNHPKSQASDKNQNKRHHPLDLNTLKGHGDAVTGLCFSSDGKSLATACADGVIRVFKLDDASSKSFKFLRINLPAGGHPTAVAFADDASSIVVACHHMSGSSLYMYGEDKQKDQQGKLPLPSIKWDHHHIHEKRSVLTISGATATYGTADGSVVIASCSEGTDIVLWHGKTGRNLGHVDTNQLKNHMAAVSPNGRFLAAAAFTADVKVWEIVYQKDGSVKEVSRVMQLKGHKSAVTWLCFSPNSEQIITASKDGSIRVWNINVRYHLDEDPKTLKVFPIPLCDSGGNPLHYDRLSLCPEGKILAASHGSTLQWLCAETGNVLDTAEKAHEGDITCISWAPKAITVGERHAMVLGTSGDDKKVKLWEAPKSQSL

SEQ ID NO: 31005 - protein, 394 aa, Arabidopsis thaliana
  peptide (1)..(394): Ceres Seq. ID no. 12396662
MAKAEPQDPIRNPKSNHPAPKKNHPKSQASDKNQNKRHHPLDLNTLKGHGDAVTGLCFSSDGKSLATACADGVIRVFKLDDASSKSFKFLRINLPAGGHPTAVAFADDASSIVVACHHMSGSSLYMYGEDKQKDQQGKLPLPSIKWDHHHIHEKRSVLTISGATATYGTADGSVVIASCSEGTDIVLWHGKTGRNLGHVDTNQLKNHMAAVSPNGRFLAAAAFTADVKVWEIVYQKDGSVKEVSRVMQLKGHKSAVTWLCFSPNSEQIITASKDGSIRVWNINVRYHLDEDPKTLKVFPIPLCDSGGNPLHYDRLSLCPEGKILAASHGSTLQWLCAETGNVLDTAEKAHEGDITCISWAPKAITVGERHAMVLGTSGDDKKVKLWEAPKSQSL

SEQ ID NO: 31006 - protein, 276 aa, Arabidopsis thaliana
  peptide (1)..(276): Ceres Seq. ID no. 12396663
MSGSSLYMYGEDKQKDQQGKLPLPSIKWDHHHIHEKRSVLTISGATATYGTADGSVVIASCSEGTDIVLWHGKTGRNLGHVDTNQLKNHMAAVSPNGRFLAAAAFTADVKVWEIVYQKDGSVKEVSRVMQLKGHKSAVTWLCFSPNSEQIITASKDGSIRVWNINVRYHLDEDPKTLKVFPIPLCDSGGNPLHYDRLSLCPEGKILAASHGSTLQWLCAETGNVLDTAEKAHEGDITCISWAPKAITVGERHAMVLGTSGDDKKVKLWEAPKSQSL

SEQ ID NO: 31007 - DNA, 991 bp, Arabidopsis thaliana
  misc_feature (1)..(991): Ceres Seq. ID no. 13645938
  misc_feature (1)..(991): Ortholog of  Ceres SEQ ID NO 13656286 as cited in SEQ ID NO 69168
  misc_feature (1)..(991): Ortholog of  Ceres SEQ ID NO 15174351 as cited in SEQ ID NO 0
acacaaaacctggtgttttttctctcgtcgtcgtttggtcgtgtcctaagacaagaaccggcgaacgaagaacaaactttttgaatctaacatccgaaagaaagagagaaaatgtcgtttacaggaacattggataaatgcaaggcctgtgacaaaaccgtgtacgtgatggatttgttaacattagagggtaatacttatcacaaatcatgtttcagatgcacccattgcaaaggcactctcgtgataagcaattactcatcaatggatggagttctttactgtaagccacacttcgaacagcttttcaaagaatctggcaattacagcaagaattttcaggcaggaaagaccgagaagcccaatgatcatctgactcgaactccaagcaagttatcatcattcttcagtggaacacaagacaaatgtgcgacttgtaagaagacggtttacccacttgagaaagtaacaatggaaggagaaagttaccacaagacttgcttcaggtgcacacacagtggttgtcctttgactcactcttcttacgcttctcttaatggcgtcctctactgtaaagtccacttcaatcagctctttctcgagaaaggcagttacaatcacgtccatcaagccgctgctaaccaccgtcgatccgcctcttctggtggcgcttctcctccttctgatgatcacaaacctgacgacaccgcctcaattcccgaagcaaaagaagatgacgctgcccctgaagctgcaggagaagaggagcctgagccggtcgttgagtcttgaaaatgtcgtggaggaatgatcttatcagttctcaagtttgaagtttttatatgcgtttctgtttaatgaatatataaatacaaattgttgttgtttcttcttgtaaattcttgtaaagttttaaagctctttttggagagaatctgttgtaaacaaaatctttaacatccaattttttttgaagaggatatttttaacc

SEQ ID NO: 31008 - protein, 226 aa, Arabidopsis thaliana
  peptide (1)..(226): Ceres Seq. ID no. 13645939
MSFTGTLDKCKACDKTVYVMDLLTLEGNTYHKSCFRCTHCKGTLVISNYSSMDGVLYCKPHFEQLFKESGNYSKNFQAGKTEKPNDHLTRTPSKLSSFFSGTQDKCATCKKTVYPLEKVTMEGESYHKTCFRCTHSGCPLTHSSYASLNGVLYCKVHFNQLFLEKGSYNHVHQAAANHRRSASSGGASPPSDDHKPDDTASIPEAKEDDAAPEAAGEEEPEPVVES

SEQ ID NO: 31009 - protein, 207 aa, Arabidopsis thaliana
  peptide (1)..(207): Ceres Seq. ID no. 13645940
MDLLTLEGNTYHKSCFRCTHCKGTLVISNYSSMDGVLYCKPHFEQLFKESGNYSKNFQAGKTEKPNDHLTRTPSKLSSFFSGTQDKCATCKKTVYPLEKVTMEGESYHKTCFRCTHSGCPLTHSSYASLNGVLYCKVHFNQLFLEKGSYNHVHQAAANHRRSASSGGASPPSDDHKPDDTASIPEAKEDDAAPEAAGEEEPEPVVES

SEQ ID NO: 31010 - protein, 175 aa, Arabidopsis thaliana
  peptide (1)..(175): Ceres Seq. ID no. 13645941
MDGVLYCKPHFEQLFKESGNYSKNFQAGKTEKPNDHLTRTPSKLSSFFSGTQDKCATCKKTVYPLEKVTMEGESYHKTCFRCTHSGCPLTHSSYASLNGVLYCKVHFNQLFLEKGSYNHVHQAAANHRRSASSGGASPPSDDHKPDDTASIPEAKEDDAAPEAAGEEEPEPVVES

SEQ ID NO: 31011 - DNA, 1266 bp, Arabidopsis thaliana
  misc_feature (1)..(1266): Ceres Seq. ID no. 13497673
  misc_feature (1)..(1266): Ortholog of  Ceres SEQ ID NO 15178797 as cited in SEQ ID NO 1152
  misc_feature (1)..(1266): Ortholog of  Ceres SEQ ID NO 15175688 as cited in SEQ ID NO 60465
  misc_feature (1)..(1266): Ortholog of  Ceres SEQ ID NO 13495628 as cited in SEQ ID NO 60727
ctgtgaataaatttatgtgtgaaaaaaaattgtacgttggaatagtgaaaaccctaactgacaaaatcagtaacattacacaagctgtgttccattaaagtctgtgtttatatacaaagaacttgctcattcctcaaagcatccacacataatcacgatgaagctctttgttcatctctctatcttcttctccatcctcttcatcactctcccatcttcttacagctgcaccgaaaatgacaagaatgccctccttcaaatcaagaaagcacttggcaatcctccccttctatcctcctggaacccccgaaccgactgttgtaccggctggaccggcgtcgaatgcactaaccgtcgcgttaccggtctcagcgttacctccggcgaagtctccggtcagatctcgtaccagatcggcgacctcgttgacctccgtacactagatttcagctacctgccacacctcaccggaaacatcccacgcaccatcaccaaactcaagaacctcaacactctctacttgaagcacactagtctctccggtccgattcctgattacatcagcgagctcaagagcctcacgttcttggacctttcttttaaccaatttaccggtccaattcccggttcgctatctcagatgccgaagcttgaagccattcaaatcaacgataataagctaaccggttctataccaaactctttcggttcttttgttggcaacgtccctaatctctacttgtctaacaataagctgtcaggaaaaataccggaatcgttgtctaaatacgacttcaacgcagtggatttgtcgggaaatggtttcgaaggagatgcctttatgttcttcggacggaacaaaacaacagtacgagtggatttgtcgagaaacatgtttaatttcgatctcgtcaaggttaagttcgctagaagcatagtttcgttggatctgagccagaaccatatctacgggaagataccaccagcactgactaaactacacctcgagcatttcaacgtgagcgacaaccatctctgcggaaaaatcccaagtggcggtctacttcagacctttgaaccatctgccttcgctcacaacatctgtctttgtggaactccccttaaggcttgttaatttggtttaatcttggcggaagaataaaaataatgttgaatatgttatgatgatgtgttcattatcaccgccaaaccaagtttattgtttctttgttatgaatttaatttaatggcaagaattggttacgt

SEQ ID NO: 31012 - protein, 325 aa, Arabidopsis thaliana
  peptide (1)..(325): Ceres Seq. ID no. 13497674
MKLFVHLSIFFSILFITLPSSYSCTENDKNALLQIKKALGNPPLLSSWNPRTDCCTGWTGVECTNRRVTGLSVTSGEVSGQISYQIGDLVDLRTLDFSYLPHLTGNIPRTITKLKNLNTLYLKHTSLSGPIPDYISELKSLTFLDLSFNQFTGPIPGSLSQMPKLEAIQINDNKLTGSIPNSFGSFVGNVPNLYLSNNKLSGKIPESLSKYDFNAVDLSGNGFEGDAFMFFGRNKTTVRVDLSRNMFNFDLVKVKFARSIVSLDLSQNHIYGKIPPALTKLHLEHFNVSDNHLCGKIPSGGLLQTFEPSAFAHNICLCGTPLKAC

SEQ ID NO: 31013 - protein, 164 aa, Arabidopsis thaliana
  peptide (1)..(164): Ceres Seq. ID no. 13497675
MPKLEAIQINDNKLTGSIPNSFGSFVGNVPNLYLSNNKLSGKIPESLSKYDFNAVDLSGNGFEGDAFMFFGRNKTTVRVDLSRNMFNFDLVKVKFARSIVSLDLSQNHIYGKIPPALTKLHLEHFNVSDNHLCGKIPSGGLLQTFEPSAFAHNICLCGTPLKAC

SEQ ID NO: 31014 - DNA, 1336 bp, Arabidopsis thaliana
  misc_feature (1)..(1336): Ceres Seq. ID no. 12322726
  misc_feature (1)..(1336): Ortholog of  Ceres SEQ ID NO 14308417 as cited in SEQ ID NO 55357
aaaaacttagaaagcagagaagagttaaagtgttagagagagagagagacagagatcggagatgtgtagcaacaaagcaagtccggtcgtcggagaagaaaaacagagtacgagatcatcgaagaggatcaagaagagaaaaaacagagaagctaccaccaccatggaggataagtcttcttccaatcttgacgcgtctcgtaagatcagaacaaaaacgaaaaaacccaaatttctcagtctcaagctcgagctcaacacttctcacgagatcaacgagaatcccagaagcaagaagagcaagaagaagaacaacaacaaaaaacagagcaagaagaaagaaccggatacgacgccgtttaaggagaagaagagagcagagactactactacactggggggaggagagaaagaagaagagcaatacgacaccgttgcagcttacctcttcaattccgccaccgacagtacaatttcttcgatccacgatctcctcccttcctccgcggccaccgatgtagattgcggcggagaaaggaataatctttctccgtatgatcgtcaagaccacggatcgtcgtcgtcttcccttctaaggacggcgatgaggaaaggagcgagcgaggaggaggagacgacggaggagcggtgggtgagttattcagaggttgtggaggaagtgatgagtcggagcgggactccacgttgttgcggcggaggcgatggaaacgatggccggccttcgttggctctgaagcttgattatgagcagatcatggaggcttggtcggataaaggtacgctttatgtcgacggagaaccgccgcagacagtgccggacttgcatgcttccgctgatgggtttaatgacggcggagaggcggggaatttatgggcagtgccggagatggaaacgacggagaggttatggagagggcatagagaagccagcttgctccggtataaagagaaacggcaaaaccgtcttttctctaagcggattcgatatcaagttcgtaaactcaatgccgagaaacgtcctcgtgttaaaggccggtttgtaaaaagagaggattcataaaccacctaagtgacggatgtttagtatttcatgatattgctattttgtgacttgttgagaagttaaggctcaaccggagtataccgagaactgaagatgatattggtctgtataggggtcttgaccagctcggttatgcaaaagtttcggttttgtttggccgcctagctttggttctcttattagaaaagtcaactaatttgtaccaaatcatctgaacaataatgataataaaaatgagaagttaatgggtgc

SEQ ID NO: 31015 - protein, 339 aa, Arabidopsis thaliana
  peptide (1)..(339): Ceres Seq. ID no. 12322727
MCSNKASPVVGEEKQSTRSSKRIKKRKNREATTTMEDKSSSNLDASRKIRTKTKKPKFLSLKLELNTSHEINENPRSKKSKKKNNNKKQSKKKEPDTTPFKEKKRAETTTTLGGGEKEEEQYDTVAAYLFNSATDSTISSIHDLLPSSAATDVDCGGERNNLSPYDRQDHGSSSSSLLRTAMRKGASEEEETTEERWVSYSEVVEEVMSRSGTPRCCGGGDGNDGRPSLALKLDYEQIMEAWSDKGTLYVDGEPPQTVPDLHASADGFNDGGEAGNLWAVPEMETTERLWRGHREASLLRYKEKRQNRLFSKRIRYQVRKLNAEKRPRVKGRFVKREDS

SEQ ID NO: 31016 - protein, 305 aa, Arabidopsis thaliana
  peptide (1)..(305): Ceres Seq. ID no. 12322728
MEDKSSSNLDASRKIRTKTKKPKFLSLKLELNTSHEINENPRSKKSKKKNNNKKQSKKKEPDTTPFKEKKRAETTTTLGGGEKEEEQYDTVAAYLFNSATDSTISSIHDLLPSSAATDVDCGGERNNLSPYDRQDHGSSSSSLLRTAMRKGASEEEETTEERWVSYSEVVEEVMSRSGTPRCCGGGDGNDGRPSLALKLDYEQIMEAWSDKGTLYVDGEPPQTVPDLHASADGFNDGGEAGNLWAVPEMETTERLWRGHREASLLRYKEKRQNRLFSKRIRYQVRKLNAEKRPRVKGRFVKREDS

SEQ ID NO: 31017 - protein, 172 aa, Arabidopsis thaliana
  peptide (1)..(172): Ceres Seq. ID no. 12322729
KLRKQRRVKVLERERDRDRRCVATKQVRSSEKKNRVRDHRRGSRREKTEKLPPPWRISLLPILTRLVRSEQKRKNPNFSVSSSSSTLLTRSTRIPEARRARRRTTTKNRARRKNRIRRRLRRRREQRLLLHWGEERKKKSNTTPLQLTSSIPPPTVQFLRSTISSLPPRPPM

SEQ ID NO: 31018 - DNA, 789 bp, Arabidopsis thaliana
  misc_feature (1)..(789): Ceres Seq. ID no. 12397073
  misc_feature (1)..(789): Ortholog of  Ceres SEQ ID NO 12588828 as cited in SEQ ID NO 1280
acacaatcaaccactttccttttttcattcgtctcaatttctctcatgacgagtagtagtggaagcctcaaactagagatccacactgatgacaagacgccgggaaagtggagcgtaccgctcggcgatgatgttttccgaagttcttgagcgggggaggaggctcggagaaggctgtgttcggtgaggggtctctttttagcccgtttttgttcgggaagtactttgatccgtcagacgcctttccgttgtgggaatttgaagctgaggttttgctggcgagccttaggagcttaggacagtgtagagtcgattggtctcagacggatcaagcttatgtccttaaatccgatatccccgtggtggggaaaaataacgtgcaggtgtacgtggacattaacggaagagtgatggagattagtggccaatggaacagcaacaagaaagcggcgaccaacagtgactggagaagcggccggtggtgggaacatggctatgtccgccgtctcgagctccctagcgatgccgacgccaaatactctgaagctttcctctctaacaacgacgattactctttcttagagatccgaatccctaagataaattctaagaacaagttttaatctgatcatgtcgccttgacgagttttaactttagattcttttcgtaattttgttttctttagttaactattattatagatatgaaattctgtggtagagacacaatggatgaatgatatgttatatatacatactataaaatatatcaaatataacatatcgatt

SEQ ID NO: 31019 - protein, 70 aa, Arabidopsis thaliana
  peptide (1)..(70): Ceres Seq. ID no. 12397074
MEISGQWNSNKKAATNSDWRSGRWWEHGYVRRLELPSDADAKYSEAFLSNNDDYSFLEIRIPKINSKNKF

SEQ ID NO: 31020 - protein, 49 aa, Arabidopsis thaliana
  peptide (1)..(49): Ceres Seq. ID no. 12397075
TQSTTFLFSFVSISLMTSSSGSLKLEIHTDDKTPGKWSVPLGDDVFRSS

SEQ ID NO: 31021 - DNA, 670 bp, Arabidopsis thaliana
  misc_feature (1)..(670): Ceres Seq. ID no. 12601447
  misc_feature (1)..(670): Ortholog of  Ceres SEQ ID NO 15178884 as cited in SEQ ID NO 0
aaatatcactaacccaaaaacaaaacaaaaaatgggtttcattggtaagagtgtattagtgagtctcgtagcactttggtgcttcacttcctctgtcttcactgaagaagtgaaccataagactcaaaccccttctctagctcctgctcctgctccttaccaccacggccaccaccacccacaccctcctcatcaccaccaccctcaccctcaccctcacccccacccaccggccaaatctcctgttaaacccccggttaaggcaccagtgtctccaccagccaaacctccggttaagcccccggtttacccacccaccaaagccccggtgaaacccccatctaaacccccggtcaagccacctgtttccccaccagccaaacctccggttaagccaccagtttaccctccaaccaaagctccagttaagcccccaactaaacccccagtcaagccaccagtttaccctccaaccaaagccccggttaagcccccaactaaacccccggtcaagccaccagtttccccaccagccaaacctccagttaagcccccggtttaccctcctaccaaagctccggttaagcctccggtttctcctccgacgaagccacctgttacaccgccggtttacccgcctaagttcaaccgtagtctagtcgccgttcgg

SEQ ID NO: 31022 - protein, 223 aa, Arabidopsis thaliana
  peptide (1)..(223): Ceres Seq. ID no. 12601448
NITNPKTKQKMGFIGKSVLVSLVALWCFTSSVFTEEVNHKTQTPSLAPAPAPYHHGHHHPHPPHHHHPHPHPHPHPPAKSPVKPPVKAPVSPPAKPPVKPPVYPPTKAPVKPPSKPPVKPPVSPPAKPPVKPPVYPPTKAPVKPPTKPPVKPPVYPPTKAPVKPPTKPPVKPPVSPPAKPPVKPPVYPPTKAPVKPPVSPPTKPPVTPPVYPPKFNRSLVAVR

SEQ ID NO: 31023 - protein, 213 aa, Arabidopsis thaliana
  peptide (1)..(213): Ceres Seq. ID no. 12601449
MGFIGKSVLVSLVALWCFTSSVFTEEVNHKTQTPSLAPAPAPYHHGHHHPHPPHHHHPHPHPHPHPPAKSPVKPPVKAPVSPPAKPPVKPPVYPPTKAPVKPPSKPPVKPPVSPPAKPPVKPPVYPPTKAPVKPPTKPPVKPPVYPPTKAPVKPPTKPPVKPPVSPPAKPPVKPPVYPPTKAPVKPPVSPPTKPPVTPPVYPPKFNRSLVAVR

SEQ ID NO: 31024 - DNA, 2380 bp, Arabidopsis thaliana
  misc_feature (1)..(2380): Ceres Seq. ID no. 12330997
  misc_feature (1)..(2380): Ortholog of  Ceres SEQ ID NO 13654989 as cited in SEQ ID NO 63117
  misc_feature (1)..(2380): Ortholog of  Ceres SEQ ID NO 13584744 as cited in SEQ ID NO 69137
ctcgaggtcttagggttttagctgttgacttgtcgcagcttcactggagaattgaatgaattttcttatggtttcaggaaggtgatgaatgttgagatcgatttgatttcaatcaacgttcaatgaagattgtgatgatttctcataagatggatttgattttggttttcataatcgtaatcggaggatctattttccgacgagtttctgctaatttcaccgaaccttgtaacggaagatgcggtggattgactctgccttatcctttcgggttttcaaacggttgttcgatccgattcgattgctctgcggcggagaaaccgatgatcggagacttttccgttcaaaacgtgacggaaaacagtatatttgtcggtctctctcacaattgtactcggaagattgaagatatgaatccgcttttcggcgagaatttcgcaccgacgtcggagaacagtttcttgatggagaattgcaaccgtaccaccgatggatgttcgatcaaacagaagtttttggagaatgtgctgaaacttaaaagttgtgatgctactggaaacataagttgtttttctttagatagtaattcgagttcgaagaactcagctaagtttttcagtatgaagacattaaggaacagctcgtgtagtttgttgttctcgtcgatagctttcgagtctgtaggtgtcaatgcgggtatagcgttagagtttgagagagttcggttaggttggtggcttaagggaggttgccagagcggaacttgcgcggctaacaccgattgtacagacgttgaaactcctcatggatatgcaggacaccggtgctcatgtcttgacggtttccacggtgacggatacaccaacccttgccagagagcactaccggagtgccgtggttccaagctcgtgtggagacattgtagatctaatcttattactattgtaggaggaactgttggtggagcgtttttactagctggcttggctcttttgttcttttgtaagcgggtctactcctttgagaagtcatttaagcgcaaagcgtcttttgtctgaagctgcagggaactcgagtgtcgcctttttcccttacaaggaaatcgagaaagcgacagatggtttctctgaaaagcagaagctaggaataggtgcatatggtacggtctatagaggaaagctccaaaatgatgaatgggttgctatcaaaagactcagacatagagattcagaaagtcttgaccaagtcatgaatgagatcaagcttctttcctctgtgagtcacccgaatcttgtccgtctcttagggtgttgtatagaacaaggcgatccagttcttgtttatgagtacatgccgaatggaactctatcagaacatctacaaagagatagagggagtggccttccatggaccttgcgtctcactgttgctactcaaacagctaaagcaatcgcgtatctccactcttcaatgaacccgccaatctatcaccgtgacatcaaatctaccaatatccttcttgattatgatttcaactccaaagttgcggatttcgggctctctagactgggaatgacggaatcttcccacatatcaacggctcctcaagggactcctggttatcttgacccgcagtaccatcaatgctttcatctttctgataagagcgacgtctacagctttggagtcgtccttgccgagattataacgggattgaaagtcgttgatttcacacgtccccataccgaaatcaacttagcagctcttgctgttgacaaaatcgggtcaggttgtatcgatgagataatagacccgattcttgacttggatctcgacgcatggactctctcatccatacacaccgtggctgagcttgcatttcgatgcttagccttccacagtgacatgagaccgacaatgaccgaagtagcggacgagcttgaacagataagactcagtggttggattccaagcatgagcttggattcaccagccggttctctccgttcatctgatcgaggaagcgaaagatcagttaaacaatcatcaataggaagcagaagagtcgttatccctcagaaacaacctgattgcctcgcatccgtcgaagagattagcgatagctcacccatctcagttcaagatccttggttaagtgcacaaagctcaccgtctacaaatacattgctcggtaacattccaagatgatagtatgatctcaaaacacgattaccactttcttgtttatataagtccctcttttgtgtagctttcacaatcattcagtgtttataatgctaagtagagagattaacaatggtgaaaacaggtttatacatgagttataatgtaaacgatcttgaaacaagatctttcaatc

SEQ ID NO: 31025 - protein, 319 aa, Arabidopsis thaliana
  peptide (1)..(319): Ceres Seq. ID no. 12330998
MNEIKLLSSVSHPNLVRLLGCCIEQGDPVLVYEYMPNGTLSEHLQRDRGSGLPWTLRLTVATQTAKAIAYLHSSMNPPIYHRDIKSTNILLDYDFNSKVADFGLSRLGMTESSHISTAPQGTPGYLDPQYHQCFHLSDKSDVYSFGVVLAEIITGLKVVDFTRPHTEINLAALAVDKIGSGCIDEIIDPILDLDLDAWTLSSIHTVAELAFRCLAFHSDMRPTMTEVADELEQIRLSGWIPSMSLDSPAGSLRSSDRGSERSVKQSSIGSRRVVIPQKQPDCLASVEEISDSSPISVQDPWLSAQSSPSTNTLLGNIPR

SEQ ID NO: 31026 - protein, 311 aa, Arabidopsis thaliana
  peptide (1)..(311): Ceres Seq. ID no. 12330999
MKIVMISHKMDLILVFIIVIGGSIFRRVSANFTEPCNGRCGGLTLPYPFGFSNGCSIRFDCSAAEKPMIGDFSVQNVTENSIFVGLSHNCTRKIEDMNPLFGENFAPTSENSFLMENCNRTTDGCSIKQKFLENVLKLKSCDATGNISCFSLDSNSSSKNSAKFFSMKTLRNSSCSLLFSSIAFESVGVNAGIALEFERVRLGWWLKGGCQSGTCAANTDCTDVETPHGYAGHRCSCLDGFHGDGYTNPCQRALPECRGSKLVWRHCRSNLITIVGGTVGGAFLLAGLALLFFCKRVYSFEKSFKRKASFV

SEQ ID NO: 31027 - protein, 307 aa, Arabidopsis thaliana
  peptide (1)..(307): Ceres Seq. ID no. 12331000
MISHKMDLILVFIIVIGGSIFRRVSANFTEPCNGRCGGLTLPYPFGFSNGCSIRFDCSAAEKPMIGDFSVQNVTENSIFVGLSHNCTRKIEDMNPLFGENFAPTSENSFLMENCNRTTDGCSIKQKFLENVLKLKSCDATGNISCFSLDSNSSSKNSAKFFSMKTLRNSSCSLLFSSIAFESVGVNAGIALEFERVRLGWWLKGGCQSGTCAANTDCTDVETPHGYAGHRCSCLDGFHGDGYTNPCQRALPECRGSKLVWRHCRSNLITIVGGTVGGAFLLAGLALLFFCKRVYSFEKSFKRKASFV

SEQ ID NO: 31028 - DNA, 977 bp, Arabidopsis thaliana
  misc_feature (1)..(977): Ceres Seq. ID no. 12322651
  misc_feature (1)..(977): Ortholog of  Ceres SEQ ID NO 14312228 as cited in SEQ ID NO 59237
aaaccaaataatctctcgtttctaaacaaactagtggtgagtgaatcttctctggtgagtaatggaagtgagtatgtctttgaatgcgttaactcggcttcctctgaagaacacaggaagattcgaagaggttggtttagcgagacactctctgtttagctcaagaacggcatgccgagagacggcggtacagcagcggcggatggtttttgtggtggaggctaagggaaagaaaggtatggcggcgcgtcagtatcaacgtacacctcctcctatgcctaagattgaagacgatggaaacccaagattcgttatcttcattcgtatggccaatgtgtatctttggtatcctctgagtataatagctggtggtactactgctaagatcatggttgctgcaaaagataacctcttggggaagtatatctacaaagacaccattgcaagaaacattgccgctgttatttacagagatgagaaagagattcaaaagacagcaattaagcagcatcgtgtcttgcgtacagccaccgagtttcgatatggctacaaacttgtagaaaacggaaacatgagagctgcacttagtacttcagatgttattgagctcccaacccaggaccagcttaaaacagtgttcgacaaagttaaagactactttggggatgcaaaagagtcattcggaaagctatcatcgctgaacccggggagtgacgaaaaaactgaagaaacctcggatgagaaagccaaggcctgaggctgaacaattgacacttggttggttgattttgatgtctcaaccgtctcggtatgggctgcagaggtcactggatatgacgagactaccgctattttgtgcacattttctctatacatctctcacagaaacagcttctgttaaatctcttgtaacatataacttattgtgtattgtagatttgttgaaagaaagagccattggttacaacttgcaattg

SEQ ID NO: 31029 - protein, 231 aa, Arabidopsis thaliana
  peptide (1)..(231): Ceres Seq. ID no. 12322652
MEVSMSLNALTRLPLKNTGRFEEVGLARHSLFSSRTACRETAVQQRRMVFVVEAKGKKGMAARQYQRTPPPMPKIEDDGNPRFVIFIRMANVYLWYPLSIIAGGTTAKIMVAAKDNLLGKYIYKDTIARNIAAVIYRDEKEIQKTAIKQHRVLRTATEFRYGYKLVENGNMRAALSTSDVIELPTQDQLKTVFDKVKDYFGDAKESFGKLSSLNPGSDEKTEETSDEKAKA

SEQ ID NO: 31030 - protein, 227 aa, Arabidopsis thaliana
  peptide (1)..(227): Ceres Seq. ID no. 12322653
MSLNALTRLPLKNTGRFEEVGLARHSLFSSRTACRETAVQQRRMVFVVEAKGKKGMAARQYQRTPPPMPKIEDDGNPRFVIFIRMANVYLWYPLSIIAGGTTAKIMVAAKDNLLGKYIYKDTIARNIAAVIYRDEKEIQKTAIKQHRVLRTATEFRYGYKLVENGNMRAALSTSDVIELPTQDQLKTVFDKVKDYFGDAKESFGKLSSLNPGSDEKTEETSDEKAKA

SEQ ID NO: 31031 - protein, 184 aa, Arabidopsis thaliana
  peptide (1)..(184): Ceres Seq. ID no. 12322654
MVFVVEAKGKKGMAARQYQRTPPPMPKIEDDGNPRFVIFIRMANVYLWYPLSIIAGGTTAKIMVAAKDNLLGKYIYKDTIARNIAAVIYRDEKEIQKTAIKQHRVLRTATEFRYGYKLVENGNMRAALSTSDVIELPTQDQLKTVFDKVKDYFGDAKESFGKLSSLNPGSDEKTEETSDEKAKA

SEQ ID NO: 31032 - DNA, 621 bp, Arabidopsis thaliana
  misc_feature (1)..(621): Ceres Seq. ID no. 12559532
  misc_feature (1)..(621): Ortholog of  Ceres SEQ ID NO 15169443 as cited in SEQ ID NO 58785
accctaagcgtatataaatcatatagttttcattttttcgtacttcttctccatcgccgtctaaaaaccctaatctcactccgcctcctgcgagatccatcaacacttccgcaaaaatgaaggttgttgctgcgtttttgcttgccgtcttgagcgggaaagcttccccaaccactggcgatatcaaggatattcttggatcagttggtgctgagacagaggattctcagattgagcttttgttgaaggaagtgaaagggaaagacttggctgagctaattgctgctggaagggagaagttagcttcagtaccatcaggaggtggtggtggtgttgcggttgcttctgctacatctggaggtggaggaggtggtggtgctcctgctgctgagtccaagaaagaagagaagaaagaagagaaagaagaatccgatgatgacatgggtttcagtttgttcgagtaatgcggtatacttggcatttggttttgctgtaccctttcgaaatctttatgtcgttgtttagtttgttgtattcgactatcttcttagactttgctgaaattctcaagagatttttttactcaaacatcagtccacttgtgattggcatttatatttc

SEQ ID NO: 31033 - protein, 115 aa, Arabidopsis thaliana
  peptide (1)..(115): Ceres Seq. ID no. 12559533
MKVVAAFLLAVLSGKASPTTGDIKDILGSVGAETEDSQIELLLKEVKGKDLAELIAAGREKLASVPSGGGGGVAVASATSGGGGGGGAPAAESKKEEKKEEKEESDDDMGFSLFE

SEQ ID NO: 31034 - DNA, 1051 bp, Arabidopsis thaliana
  misc_feature (1)..(1051): Ceres Seq. ID no. 12579915
  misc_feature (1)..(1051): Ortholog of  Ceres SEQ ID NO 13656147 as cited in SEQ ID NO 64422
  misc_feature (1)..(1051): Ortholog of  Ceres SEQ ID NO 13596496 as cited in SEQ ID NO 68639
acatcctaatcgaaaatctcaaaaccctagaaaaaatggcaggaacctgagttgtggcggtgtacggcgaaggagccatgacggagacgaaacagaaatctcccttctccgtgaaagttggtctcgctcagatgcttcgtggcggtgtaatcatggatgtcgtcaacgcagagcaagctcgaatcgctgaagaagctggcgcatgcgccgtgatggctcttgaacgtgttcccgccgatattcgagctcaaggcggtgttgctcgaatgagcgatccagagatgatcaaagaaatcaaaaacgccgtgacgattccggtgatggcgaaagctagaattggtcatttcgttgaagcagatcctggaagcaatcggagttgattacgtcgacgagagtgaagttctcactctcgccgacgaagataatcacatcaacaaacataatttcaaaatcccttttgtttgtggatgtaggaatctcggtgaagctttaaggcggatccgtgaaggagccgccatgataagaaccaaaggtgaggctggaactggtaacgttgttgaagccgttaggcacgtgaggagtgtgaacggagctattcggttacttagaagcatggacgatgacgaggttttcacttacgcgaaaaagatcgctgcgccgtatgatttggttgtgcagactaaggagcttgggaggttaccggtggttcagttcgctgctggaggagtggcgacgccggcggatgcggcgttgatgatgcagttgggatgtgatggagtgtttgttgggtcgggtgttttcaagagtggagatccggtgaagagggctaaggctattgttcaggcggttacgaattatagagacgcggcggtgttggcggaggtgagctgtggtttaggtgaagccatggttggtcttaatttggatgataaggttgagaggttcgctagtcgttctgagtaaccaatcaaatttcagatgtttttatccataacgtttgtcactttaatatgtatccacaaaccaatattctcgatttattcaagatttt

SEQ ID NO: 31035 - protein, 148 aa, Arabidopsis thaliana
  peptide (1)..(148): Ceres Seq. ID no. 12579916
MIRTKGEAGTGNVVEAVRHVRSVNGAIRLLRSMDDDEVFTYAKKIAAPYDLVVQTKELGRLPVVQFAAGGVATPADAALMMQLGCDGVFVGSGVFKSGDPVKRAKAIVQAVTNYRDAAVLAEVSCGLGEAMVGLNLDDKVERFASRSE

SEQ ID NO: 31036 - protein, 116 aa, Arabidopsis thaliana
  peptide (1)..(116): Ceres Seq. ID no. 12579917
MDDDEVFTYAKKIAAPYDLVVQTKELGRLPVVQFAAGGVATPADAALMMQLGCDGVFVGSGVFKSGDPVKRAKAIVQAVTNYRDAAVLAEVSCGLGEAMVGLNLDDKVERFASRSE

SEQ ID NO: 31037 - protein, 100 aa, Arabidopsis thaliana
  peptide (1)..(100): Ceres Seq. ID no. 12579918
MTETKQKSPFSVKVGLAQMLRGGVIMDVVNAEQARIAEEAGACAVMALERVPADIRAQGGVARMSDPEMIKEIKNAVTIPVMAKARIGHFVEADPGSNRS

SEQ ID NO: 31038 - DNA, 752 bp, Arabidopsis thaliana
  misc_feature (1)..(752): Ceres Seq. ID no. 13487050
  misc_feature (1)..(752): Ortholog of  Ceres SEQ ID NO 12609890 as cited in SEQ ID NO 51792
  misc_feature (1)..(752): Ortholog of  Ceres SEQ ID NO 12597253 as cited in SEQ ID NO 62959
  misc_feature (1)..(752): Ortholog of  Ceres SEQ ID NO 15173341 as cited in SEQ ID NO 63800
  misc_feature (1)..(752): Ortholog of  Ceres SEQ ID NO 12635416 as cited in SEQ ID NO 0
  misc_feature (1)..(752): Ortholog of  Ceres SEQ ID NO 12635564 as cited in SEQ ID NO 0
  misc_feature (1)..(752): Ortholog of  Ceres SEQ ID NO 12636917 as cited in SEQ ID NO 0
  misc_feature (1)..(752): Ortholog of  Ceres SEQ ID NO 14309430 as cited in SEQ ID NO 0
aaaaatcacaaatcttcaacttccgatactttcaatctctctaaactctcaatttcagtaatcgataaccgtagcaatggaatccaccggaaaagtgaagaaagctttcggaggaagaaaaccacctggtgccccaaaaaccaaatcggtttcgaaatcgatgaaagccggtcttcaattcccagtgggaagaatcactcgtttcctgaagaaaggacgatacgctcagagacttggtggtggtgctccggtttacatggccgccgttcttgaatacctcgccgcagaagttctggagcttgctggtaacgctgcgagagataacaagaaatcaaggataattccgaggcatcttcttctcgcgataaggaacgatgaagaattggggaaacttctgagtggtgtcacaatcgctcacggtggtgttttgcctaacatcaactctgttctattgcctaagaagtctgccactaaaccagctgaagaaaaggctaccaaatcaccagtcaagtctccaaagaaagcttaatctgctagagttttcgttgctagtttgtgtttgagctctggtgaatgtagaaatttgaagcttttggatcttagtttctatgtatttggtgatttagaatgttgttcaaaatccttttcctaatcataagaatttatgatctatctattatacgcttcgtctaatcttttggtccactcgtcgtaatgtcattagtgaatatttaataaacaactttgtcatc

SEQ ID NO: 31039 - protein, 150 aa, Arabidopsis thaliana
  peptide (1)..(150): Ceres Seq. ID no. 13487051
MESTGKVKKAFGGRKPPGAPKTKSVSKSMKAGLQFPVGRITRFLKKGRYAQRLGGGAPVYMAAVLEYLAAEVLELAGNAARDNKKSRIIPRHLLLAIRNDEELGKLLSGVTIAHGGVLPNINSVLLPKKSATKPAEEKATKSPVKSPKKA

SEQ ID NO: 31040 - protein, 122 aa, Arabidopsis thaliana
  peptide (1)..(122): Ceres Seq. ID no. 13487052
MKAGLQFPVGRITRFLKKGRYAQRLGGGAPVYMAAVLEYLAAEVLELAGNAARDNKKSRIIPRHLLLAIRNDEELGKLLSGVTIAHGGVLPNINSVLLPKKSATKPAEEKATKSPVKSPKKA

SEQ ID NO: 31041 - protein, 90 aa, Arabidopsis thaliana
  peptide (1)..(90): Ceres Seq. ID no. 13487053
MAAVLEYLAAEVLELAGNAARDNKKSRIIPRHLLLAIRNDEELGKLLSGVTIAHGGVLPNINSVLLPKKSATKPAEEKATKSPVKSPKKA

SEQ ID NO: 31042 - DNA, 1517 bp, Arabidopsis thaliana
  misc_feature (1)..(1517): Ceres Seq. ID no. 12322684
  misc_feature (1)..(1517): Ortholog of  Ceres SEQ ID NO 12609146 as cited in SEQ ID NO 52118
  misc_feature (1)..(1517): Ortholog of  Ceres SEQ ID NO 13638136 as cited in SEQ ID NO 58644
  misc_feature (1)..(1517): Ortholog of  Ceres SEQ ID NO 15225826 as cited in SEQ ID NO 64774
  misc_feature (1)..(1517): Ortholog of  Ceres SEQ ID NO 13599119 as cited in SEQ ID NO 0
aattttcgttgaacacaagtgacgaatttgagagagaaaaaaaaagaaaatcagagataaagaatttgagtttcttggaattaaaggatcgattttgttgaagtgaaattgaaattgattgtgaaagagaaagagactgatggtagcagaagcagaggttgtgtttcaacagagtttaccggcggttctggagattgagttgtttgacggagtttcctccgccgttaaatctcccgtttcttctccgaaattgggttttactcagtcaacggcgtcggtttccggaagtttaacgacttctcctgtggctgatatctttccagagggtgattgcgatcctagtgtcttggattatattccgaccatccggtctggaagctttgctgatattgggccaaagagaaacatggaagatgaacacattcgcatagacgatttatcttctcaagttggttccctttttgagttgccgaagcctagtgctttctatgcggtttttgacgggcatggaggaccagaagcagcagcatacgtacgggaaaatgccattaggtttttctttgaagatgagcagtttccacagacatcggaagtgagtagtgtttatgtggaagaagttgagacttcattgagaaatgcgtttcttcaagctgatctagctttggcagaggattgcagtatcagcgattcttgtggtaccaccgctctgactgctcttatttgtggaagactcttaatggttgcaaatgccggagactgcagagcggttctatgcaggaaaggcagagcgatagacatgtctgaagaccataaaccgattaatctacttgagagaagaagagtggaggaatccggcggtttcatcactaatgacggttacctaaatgaagtcctagctgtaacccgagctctgggcgactgggatttaaaactgccacacggctctcaatctccactgatctcggaaccagaaatcaagcagataactctaactgaagacgatgagtttcttgtgattgggtgcgatgggatttgggatgtcttgacgagccaagaagcggttagcattgttaggcgtggcttaaaccggcacaacgatccaacaagatgtgcgcgagagctagtgatggaggctctggggcggaactcatttgataatttaactgcggtggtggtatgtttcatgacaatggacagaggggacaagccggtggtgccattggagaagagaaggtgttttagtctttcgcctgaagctttctgtagcttgaggaatctgttggatggctgaaactagtgtgttttctggtgaaaaccgatgattatataattgatgatgacgaataatctctcccacggctgcttttgtatttagagattttacgcagctgagagaactcttttgagatatacttgtgtattaagtgtgtttgttgtgtgcacagtatgcgattacagttttgtgtacatacatactgttagttgtctatgaataacgaaaaagaaaagattaagtg

SEQ ID NO: 31043 - protein, 383 aa, Arabidopsis thaliana
  peptide (1)..(383): Ceres Seq. ID no. 12322685
MVAEAEVVFQQSLPAVLEIELFDGVSSAVKSPVSSPKLGFTQSTASVSGSLTTSPVADIFPEGDCDPSVLDYIPTIRSGSFADIGPKRNMEDEHIRIDDLSSQVGSLFELPKPSAFYAVFDGHGGPEAAAYVRENAIRFFFEDEQFPQTSEVSSVYVEEVETSLRNAFLQADLALAEDCSISDSCGTTALTALICGRLLMVANAGDCRAVLCRKGRAIDMSEDHKPINLLERRRVEESGGFITNDGYLNEVLAVTRALGDWDLKLPHGSQSPLISEPEIKQITLTEDDEFLVIGCDGIWDVLTSQEAVSIVRRGLNRHNDPTRCARELVMEALGRNSFDNLTAVVVCFMTMDRGDKPVVPLEKRRCFSLSPEAFCSLRNLLDG

SEQ ID NO: 31044 - protein, 294 aa, Arabidopsis thaliana
  peptide (1)..(294): Ceres Seq. ID no. 12322686
MEDEHIRIDDLSSQVGSLFELPKPSAFYAVFDGHGGPEAAAYVRENAIRFFFEDEQFPQTSEVSSVYVEEVETSLRNAFLQADLALAEDCSISDSCGTTALTALICGRLLMVANAGDCRAVLCRKGRAIDMSEDHKPINLLERRRVEESGGFITNDGYLNEVLAVTRALGDWDLKLPHGSQSPLISEPEIKQITLTEDDEFLVIGCDGIWDVLTSQEAVSIVRRGLNRHNDPTRCARELVMEALGRNSFDNLTAVVVCFMTMDRGDKPVVPLEKRRCFSLSPEAFCSLRNLLDG

SEQ ID NO: 31045 - DNA, 860 bp, Arabidopsis thaliana
  misc_feature (1)..(860): Ceres Seq. ID no. 13591956
  misc_feature (1)..(860): Ortholog of  Ceres SEQ ID NO 13638595 as cited in SEQ ID NO 52050
  misc_feature (1)..(860): Ortholog of  Ceres SEQ ID NO 14301870 as cited in SEQ ID NO 61501
  misc_feature (1)..(860): Ortholog of  Ceres SEQ ID NO 12583993 as cited in SEQ ID NO 68098
aagagtagggaaaaagaaaagaaaagtagagtactatcttcctcttaaaccaaccattcaaaatgttgcgtactatcttcctcttatctcttctctttgctctatccaatgcctctgttcaagatttctgtgtcgcaaacctgaaacgcgctgaaacccctgcgggttacccttgcattcgtcccattcatgtcaaagctacagactttgtcttctctggcttaggcactcctggaaacactacaaacatcatcaacgccgctgtcacacccgctttcgcagctcagttcccgggtctgaacggtctaggcctctctacagctagacttgacttagctcctaaaggtgtgatcccaatgcacactcaccctggtgcctctgaggttctctttgtccttactggctccattaccgctgggtttgtctcctcggcaaacgctgtctacgtgcagacactcaaaccaggacaggtcatggttttcccacagggcttgcttcatttccagatcaacgcgggaaaatcctctgcttcagccgttgtcactttcaacagcgctaatccgggtctgcagattctcgacttcgcactctttgctaacagtcttcccactgaactcgtcgtgggtactactttccttgacgccactacagtcaagaagctaaagggtgttcttggaggaactggctaaaaaaagacttaggactactccttgactaaaacaccaaaacctgtttcttcatctttttttctctttaattgattcttgtcttctctgttttgtgtgccttgtaattcttcaaaacctgtcaaaattgttacattgtatgtgagttttttcaattaagatcctgagttggtc

SEQ ID NO: 31046 - protein, 208 aa, Arabidopsis thaliana; identical to SEQ ID NO: 23207
  peptide (1)..(208): Ceres Seq. ID no. 13591957

SEQ ID NO: 31047 - protein, 110 aa, Arabidopsis thaliana
  peptide (1)..(110): Ceres Seq. ID no. 13591958
MHTHPGASEVLFVLTGSITAGFVSSANAVYVQTLKPGQVMVFPQGLLHFQINAGKSSASAVVTFNSANPGLQILDFALFANSLPTELVVGTTFLDATTVKKLKGVLGGTG

SEQ ID NO: 31048 - DNA, 1720 bp, Arabidopsis thaliana
  misc_feature (1)..(1720): Ceres Seq. ID no. 12579466
  misc_feature (1)..(1720): Ortholog of  Ceres SEQ ID NO 15226473 as cited in SEQ ID NO 50919
  misc_feature (1)..(1720): Ortholog of  Ceres SEQ ID NO 13639704 as cited in SEQ ID NO 51325
  misc_feature (1)..(1720): Ortholog of  Ceres SEQ ID NO 13661747 as cited in SEQ ID NO 60578
  misc_feature (1)..(1720): Ortholog of  Ceres SEQ ID NO 13661672 as cited in SEQ ID NO 61462
  misc_feature (1)..(1720): Ortholog of  Ceres SEQ ID NO 13599646 as cited in SEQ ID NO 0
ttatcctctctctctcgtcttcttcgtctgctcttcttttttatctctcgaaattcctctctctttctctctgcatcaaaacagcaactttacttctgcgtttttgtttatctctctgtattatccgattaatttaaaggagttctttgaaggcagctgcttctatgccatattgccgagaaaatgggcgagtctaaggggtgcgggaatgttggacgaatgatttcgaagaactcctataacttaatcacacacaagagagaagagagaaagagagaaagagagacagagataatggcgtacagtgcgtgtttcctacaccagagcgcattggcttcatcagccgcacgatcatcatcttcctcctcatcccagcgtcacgtgtcgctctccaaacctgttcagatcatctgtaaagctcaacagtctcatgaagacgataactccgccgtctcccgccgtcttgctctcactctcctcgtcggcgccgctgctgttggttccaaagtatctcctgctgatgccgcctacggtgaagctgcaaacgtgtttgggaagccaaagacgaacacagacttcttgccatacaatggagatgggttcaaagtgcaggttccagcaaaatggaacccaagcaaagagattgagtatccaggacaagtccttaggttcgaagacaacttcgatgctactagcaatctcaatgtcatggtcactcctaccgacaagaagtccatcactgattacggttctcccgaagagttcctctctcaggttaattacctcctagggaaacaagcttacttcggtgagactgcctctgagggaggctttgacaacaatgcagtggcaacagcaaacattctggagtcatcatctcaggaagttggtgggaaaccctactattacttgtctgtgttgacaagaacggctgatggagacgaaggtgggaagcatcagctgatcacagcaaccgtgaatggagggaagctttacatctgcaaagcacaagctggagacaagaggtggttcaagggagccaggagtatgtcttctctcaaatcagctcttccctccaccgcatcactccgattaccttcctcgtcttctcgccgtccggttactcttcgtctcccaatctcttctccttcactcccatctttctccggtctctctccggtcaatcctctcctctcaatcggacttccagattggcaaagctttgagaaaggattcaaaattgttgacggtggtggtcgtatctacgcgatgagacacggacgacgtgttccgaagctgaacagaccaccggaccagcgcaaagctcttctgcgaggactcacgactcagcttcttaagcatgggagaatcaagacgactcgagctagagctagtgcgatgaggaagttcgttgacaagatgattacattggctaaagacggttcgttgcacaagcgaagacaagccttgggatatatctacgagaaacagattgttcacgctctgtttgctgaggttcctgatagatacggtgagagaaacggtggatacacgaggatcatcagaactcttccaaggagaggtgataatgctccaatggcttacattgagcttgtctaaggtcaatatctcttttattttgctcaattgtttcacttttgctctgtaatattgaaaaacagttgttgatgcagatatgagatcattttgttttgtgagc

SEQ ID NO: 31049 - protein, 478 aa, Arabidopsis thaliana
  peptide (1)..(478): Ceres Seq. ID no. 12579467
MGESKGCGNVGRMISKNSYNLITHKREERKRERETEIMAYSACFLHQSALASSAARSSSSSSSQRHVSLSKPVQIICKAQQSHEDDNSAVSRRLALTLLVGAAAVGSKVSPADAAYGEAANVFGKPKTNTDFLPYNGDGFKVQVPAKWNPSKEIEYPGQVLRFEDNFDATSNLNVMVTPTDKKSITDYGSPEEFLSQVNYLLGKQAYFGETASEGGFDNNAVATANILESSSQEVGGKPYYYLSVLTRTADGDEGGKHQLITATVNGGKLYICKAQAGDKRWFKGARSMSSLKSALPSTASLRLPSSSSRRPVTLRLPISSPSLPSFSGLSPVNPLLSIGLPDWQSFEKGFKIVDGGGRIYAMRHGRRVPKLNRPPDQRKALLRGLTTQLLKHGRIKTTRARASAMRKFVDKMITLAKDGSLHKRRQALGYIYEKQIVHALFAEVPDRYGERNGGYTRIIRTLPRRGDNAPMAYIELV

SEQ ID NO: 31050 - protein, 466 aa, Arabidopsis thaliana
  peptide (1)..(466): Ceres Seq. ID no. 12579468
MISKNSYNLITHKREERKRERETEIMAYSACFLHQSALASSAARSSSSSSSQRHVSLSKPVQIICKAQQSHEDDNSAVSRRLALTLLVGAAAVGSKVSPADAAYGEAANVFGKPKTNTDFLPYNGDGFKVQVPAKWNPSKEIEYPGQVLRFEDNFDATSNLNVMVTPTDKKSITDYGSPEEFLSQVNYLLGKQAYFGETASEGGFDNNAVATANILESSSQEVGGKPYYYLSVLTRTADGDEGGKHQLITATVNGGKLYICKAQAGDKRWFKGARSMSSLKSALPSTASLRLPSSSSRRPVTLRLPISSPSLPSFSGLSPVNPLLSIGLPDWQSFEKGFKIVDGGGRIYAMRHGRRVPKLNRPPDQRKALLRGLTTQLLKHGRIKTTRARASAMRKFVDKMITLAKDGSLHKRRQALGYIYEKQIVHALFAEVPDRYGERNGGYTRIIRTLPRRGDNAPMAYIELV

SEQ ID NO: 31051 - protein, 441 aa, Arabidopsis thaliana
  peptide (1)..(441): Ceres Seq. ID no. 12579469
MAYSACFLHQSALASSAARSSSSSSSQRHVSLSKPVQIICKAQQSHEDDNSAVSRRLALTLLVGAAAVGSKVSPADAAYGEAANVFGKPKTNTDFLPYNGDGFKVQVPAKWNPSKEIEYPGQVLRFEDNFDATSNLNVMVTPTDKKSITDYGSPEEFLSQVNYLLGKQAYFGETASEGGFDNNAVATANILESSSQEVGGKPYYYLSVLTRTADGDEGGKHQLITATVNGGKLYICKAQAGDKRWFKGARSMSSLKSALPSTASLRLPSSSSRRPVTLRLPISSPSLPSFSGLSPVNPLLSIGLPDWQSFEKGFKIVDGGGRIYAMRHGRRVPKLNRPPDQRKALLRGLTTQLLKHGRIKTTRARASAMRKFVDKMITLAKDGSLHKRRQALGYIYEKQIVHALFAEVPDRYGERNGGYTRIIRTLPRRGDNAPMAYIELV

SEQ ID NO: 31052 - DNA, 689 bp, Arabidopsis thaliana
  misc_feature (1)..(689): Ceres Seq. ID no. 12322670
  misc_feature (1)..(689): Ortholog of  Ceres SEQ ID NO 12609863 as cited in SEQ ID NO 52056
  misc_feature (1)..(689): Ortholog of  Ceres SEQ ID NO 13661859 as cited in SEQ ID NO 61611
atttctatttcacatctgagagcttttttcgtttcttgtgagatcatctaaaaaatggcttcgactgtttcgctttctttactcagcggcggcagtggagctcttcaggcgcgttgcgcaagaaccgcgcatgttagcccacgagcggcgcattctaacaaacccgcgctttcttcgttctcgctgaccggcgcctctcgcaggaatctgttattttcgttgacggcagcgacggtagtgacgggacttcagcctgcatcaatggcggagaatattccgttatttggtataagaaagaaactgaagaaagcagaagaagaagcggtggagatcgtgaaagaaggctttgagacggcggagaaaggcgttgatgcggcggagaaaggattagaagcggcggagagaggtgtagagacggcagagaaggaaatcgtgacggcggttagctttaatggattgacacaagctggagccgtcgtggcggctgagttcgtcggagttcttgtcgctacgtcagtagtgaatgggattttaggaccagaagcccagaaatcttaggaataacctaatgctatatgtacttttgtgttggagttaaaaaaatatttgtctaaatttttgctgttaattatgttttgtaatatcataaaccatacccagagatgaagaagatcagaattatgtggtct

SEQ ID NO: 31053 - protein, 167 aa, Arabidopsis thaliana
  peptide (1)..(167): Ceres Seq. ID no. 12322671
MASTVSLSLLSGGSGALQARCARTAHVSPRAAHSNKPALSSFSLTGASRRNLLFSLTAATVVTGLQPASMAENIPLFGIRKKLKKAEEEAVEIVKEGFETAEKGVDAAEKGLEAAERGVETAEKEIVTAVSFNGLTQAGAVVAAEFVGVLVATSVVNGILGPEAQKS

SEQ ID NO: 31054 - protein, 98 aa, Arabidopsis thaliana
  peptide (1)..(98): Ceres Seq. ID no. 12322672
MAENIPLFGIRKKLKKAEEEAVEIVKEGFETAEKGVDAAEKGLEAAERGVETAEKEIVTAVSFNGLTQAGAVVAAEFVGVLVATSVVNGILGPEAQKS

SEQ ID NO: 31055 - DNA, 701 bp, Arabidopsis thaliana
  misc_feature (1)..(701): Ceres Seq. ID no. 13592829
  misc_feature (1)..(701): Ortholog of  Ceres SEQ ID NO 13661797 as cited in SEQ ID NO 61647
attgaagaaaaagctttgacaaaaccagggaaagagacagagagagataatggcggctaaactaatctgttcgtctttaacagtgcattcaatggcaaataagaagccatcaccttctgctgcaacaagaacaataacctcaaagaagagcacagcgactccacaggtgaaactgctgacaagagtcgagcagctcaagcttctgaccaaagccgagaaagcaggacttttgtctttagcagagaaatcaggtttctctctatcgaccatcgagcgtcttggattgctgaccaaagcagaggagttcggcgttttgtctgccgccacaaacccggaaacgcctggaacgttattcactttgagcctcggtttactccttcttggaccggtttttgcatatgtggttcctgaagattacacttgggaagtagtgattcaggttcttgtggctctactctctgttcttggtggctctgctgcttttgctgcttctggttttgtctccaatttgcagaaatctgattagcccgatcgttttttttttgtatcaaatatatttacccggtgtagcaagagacttttctgcatttaagatgaaaactttataatgtatttgatctacattgtatcaaccagtcattttcactattttctatctatgtaaatggtttcatatacagaatccaagagaaacgttttgc

SEQ ID NO: 31056 - protein, 158 aa, Arabidopsis thaliana
  peptide (1)..(158): Ceres Seq. ID no. 15221171
MAAKLICSSLTVHSMANKKPSPSAATRTITSKKSTATPQVKLLTRVEQLKLLTKAEKAGLLSLAEKSGFSLSTIERLGLLTKAEEFGVLSAATNPETPGTLFTLSLGLLLLGPVFAYVVPEDYTWEVVIQVLVALLSVLGGSAAFAASGFVSNLQKSD

SEQ ID NO: 31057 - protein, 144 aa, Arabidopsis thaliana
  peptide (1)..(144): Ceres Seq. ID no. 15221172
MANKKPSPSAATRTITSKKSTATPQVKLLTRVEQLKLLTKAEKAGLLSLAEKSGFSLSTIERLGLLTKAEEFGVLSAATNPETPGTLFTLSLGLLLLGPVFAYVVPEDYTWEVVIQVLVALLSVLGGSAAFAASGFVSNLQKSD

SEQ ID NO: 31058 - DNA, 960 bp, Arabidopsis thaliana
  misc_feature (1)..(960): Ceres Seq. ID no. 12339034
  misc_feature (1)..(960): Ortholog of  Ceres SEQ ID NO 13647648 as cited in SEQ ID NO 20346
  misc_feature (1)..(960): Ortholog of  Ceres SEQ ID NO 15179852 as cited in SEQ ID NO 66623
ctaccaatttcaagatctggtcgtcgctcacaggagaaacgtaatggaaaacaaagagaccaagcaagaaccagcagcagcagctgagcaaaagaccgttccgttgatcgaagatgagatcgagaggagcaaagtcgggatcatgagagctctctgcgaccgacaagatcctgaaactaaggaggtggatgatctgatgataaggaggtttctgagagcgcgtgacctggacattgaaaaggcttcaacgatgtttctaaattacctgacttggaagagaagcatgctcccaaaggggcacataccagaagcagagattgcaaatgatctatcgcataacaagatgtgtatgcaaggtcatgacaagatgggtcgacctatcgctgttgccattgggaacagacataacccttccaaaggcaaccctgacgagttcaagcgttttgttgtctacacgctcgagaagatttgtgctagaatgccgagaggtcaagagaaattcgtagcaattggagatctgcaaggctggggatattctaattgtgacatccgtggctaccttgctgctctttccactttgcaggattgttacccagagagattagggaaactctatatagttcatgccccctacattttcatgaccgcatggaaggtcatttatccttttatcgacgccaacaccaagaaaaagattgttttcgtggagaacaagaaactcactccaacgctgcttgaagacatagacgaaagccaacttcccgacatctacggaggcaaattgccacttgttcctattcaggagacctgattataggtcttactacggcccacctctatttccaaattattacttactagtattattttttatttgaataaaatgaaaaacatattgagtgtcgccaaatgccaacaattatatatttactgtcaaagaagctaaaagatataatattg

SEQ ID NO: 31059 - protein, 269 aa, Arabidopsis thaliana
  peptide (1)..(269): Ceres Seq. ID no. 12339035
YQFQDLVVAHRRNVMENKETKQEPAAAAEQKTVPLIEDEIERSKVGIMRALCDRQDPETKEVDDLMIRRFLRARDLDIEKASTMFLNYLTWKRSMLPKGHIPEAEIANDLSHNKMCMQGHDKMGRPIAVAIGNRHNPSKGNPDEFKRFVVYTLEKICARMPRGQEKFVAIGDLQGWGYSNCDIRGYLAALSTLQDCYPERLGKLYIVHAPYIFMTAWKVIYPFIDANTKKKIVFVENKKLTPTLLEDIDESQLPDIYGGKLPLVPIQET

SEQ ID NO: 31060 - protein, 255 aa, Arabidopsis thaliana
  peptide (1)..(255): Ceres Seq. ID no. 12339037
MENKETKQEPAAAAEQKTVPLIEDEIERSKVGIMRALCDRQDPETKEVDDLMIRRFLRARDLDIEKASTMFLNYLTWKRSMLPKGHIPEAEIANDLSHNKMCMQGHDKMGRPIAVAIGNRHNPSKGNPDEFKRFVVYTLEKICARMPRGQEKFVAIGDLQGWGYSNCDIRGYLAALSTLQDCYPERLGKLYIVHAPYIFMTAWKVIYPFIDANTKKKIVFVENKKLTPTLLEDIDESQLPDIYGGKLPLVPIQET

SEQ ID NO: 31061 - protein, 222 aa, Arabidopsis thaliana
  peptide (1)..(222): Ceres Seq. ID no. 12339038
MRALCDRQDPETKEVDDLMIRRFLRARDLDIEKASTMFLNYLTWKRSMLPKGHIPEAEIANDLSHNKMCMQGHDKMGRPIAVAIGNRHNPSKGNPDEFKRFVVYTLEKICARMPRGQEKFVAIGDLQGWGYSNCDIRGYLAALSTLQDCYPERLGKLYIVHAPYIFMTAWKVIYPFIDANTKKKIVFVENKKLTPTLLEDIDESQLPDIYGGKLPLVPIQET

SEQ ID NO: 31062 - DNA, 800 bp, Arabidopsis thaliana
  misc_feature (1)..(800): Ceres Seq. ID no. 12321377
  misc_feature (1)..(800): Ortholog of  Ceres SEQ ID NO 13598422 as cited in SEQ ID NO 68856
gatagaaccaaaaaaaaaacacctccgatctcggcgagagaaagagaaacgatctgtgagagagaatggatcagatcttgaacaaggtaggctcgtactggttaggtaagaaggcgaacaagcagctcgattccgtcggtgacgatatcaactctctgtcttcgagcatcgaaggaggaacaaaatggttggtgaacaaaatcaaaggaaaaatgcagaagccattgcccgagttattaaaggagtttggtttgcctgtggggatctttccacgtgatgcaaccaactacgagttcaatgaacagacgaggaagttaactgtctttattccatcaatctgcgaagttggttacaaagatacatcagtcttgagattcaccactacagttaccggatttctcgagaagggaaagctagctgatgttgaagggatgaagacaaaagtaatgatatgggttaaagtcacaagtatttctgcagattcttcaaaggtacatttcacagcagggatgaagaaaagcagaagccgagatgcttatgaggttttaagagatggcgttgagattgataaattctagctctgttttgctggtaattctcaattcttttatcatctttctccaatctctatctttaaagtttcaagtttcttaaaaaaatggtttttgtatatgctgattttcaattatgttgaagttcatgaatttgataaactgaagaatatggttactcagtacaccaaacaatgttcttatgtcttttggtattacttactgagtcactgtttaagcatatgaccg

SEQ ID NO: 31063 - protein, 170 aa, Arabidopsis thaliana
  peptide (1)..(170): Ceres Seq. ID no. 12321378
MDQILNKVGSYWLGKKANKQLDSVGDDINSLSSSIEGGTKWLVNKIKGKMQKPLPELLKEFGLPVGIFPRDATNYEFNEQTRKLTVFIPSICEVGYKDTSVLRFTTTVTGFLEKGKLADVEGMKTKVMIWVKVTSISADSSKVHFTAGMKKSRSRDAYEVLRDGVEIDKF

SEQ ID NO: 31064 - protein, 121 aa, Arabidopsis thaliana
  peptide (1)..(121): Ceres Seq. ID no. 12321379
MQKPLPELLKEFGLPVGIFPRDATNYEFNEQTRKLTVFIPSICEVGYKDTSVLRFTTTVTGFLEKGKLADVEGMKTKVMIWVKVTSISADSSKVHFTAGMKKSRSRDAYEVLRDGVEIDKF

SEQ ID NO: 31065 - DNA, 999 bp, Arabidopsis thaliana
  misc_feature (1)..(999): Ceres Seq. ID no. 12321788
  misc_feature (1)..(999): Ortholog of  Ceres SEQ ID NO 14305591 as cited in SEQ ID NO 0
gaagtctttctctctcgatcaagccaagtaaaaaaaaaatcctaatctttgcgtcaccgttcgtgtttcctcttctctctagggttctccttcaacagttttccagtaaacatgagtcgtcatcctgaagtgaagtgggctgagactaccgagaagattttcctcactgtagtattagctgatactaaggataccaaggttaacctagacccagaaggagtctttgatttctctgcgaaagttggtccagaaaaccacgtttatgagctcaaactggaacttgccgataaagtcaatgttgaggaaagcaaaatcaacattggagagagaagcatattctgcataattgagaaagcagagccggaaaggtggaataagctactccgtgtgaagaagcccccacactatgtcaaggttgattgggacaagtgggttgatgaggacgatgaaggcagtgctggtgccgcagatatggatatggcaggaatggaaggaatgggaggaatgggaggcatgggccggcatgggaggaatgggtggaatgggtggaatgggtggaatgggaggaatggaaggaatggatttctcgaaattaatgggtggaatgggtggaatgggcggactcgaagggctcggtggaatgggaggcatgggtggaatgggaggcatgggtggaatgggagacatgggtggtatgggaggcatggaagagtttgaagacagtgatgatgaacaagagacagcaaaatcaggagacaagaaggatgatgccgttaaggaggaaggtcttgcgacagagaaggcaccagcggcagaagaaacaacatctgttaaggaagacaagtgaagactctgttctagagatgatgaaaaaccatatggtattattagcttttcaggtttatgaaaccctctgaattacttcctcttttatatgaatgttgttggtactctgttttctttctatggatttgatcttggtttaagtttcttctaccc

SEQ ID NO: 31066 - protein, 201 aa, Arabidopsis thaliana
  peptide (1)..(201): Ceres Seq. ID no. 12321789
MSRHPEVKWAETTEKIFLTVVLADTKDTKVNLDPEGVFDFSAKVGPENHVYELKLELADKVNVEESKINIGERSIFCIIEKAEPERWNKLLRVKKPPHYVKVDWDKWVDEDDEGSAGAADMDMAGMEGMGGMGGMGRHGRNGWNGWNGWNGRNGRNGFLEINGWNGWNGRTRRARWNGRHGWNGRHGWNGRHGWYGRHGRV

SEQ ID NO: 31067 - protein, 146 aa, Arabidopsis thaliana
  peptide (1)..(146): Ceres Seq. ID no. 12321790
MSRLIGTSGLMRTMKAVLVPQIWIWQEWKEWEEWEAWAGMGGMGGMGGMGGMGGMEGMDFSKLMGGMGGMGGLEGLGGMGGMGGMGGMGGMGDMGGMGGMEEFEDSDDEQETAKSGDKKDDAVKEEGLATEKAPAAEETTSVKEDK

SEQ ID NO: 31068 - protein, 136 aa, Arabidopsis thaliana
  peptide (1)..(136): Ceres Seq. ID no. 12321791
MRTMKAVLVPQIWIWQEWKEWEEWEAWAGMGGMGGMGGMGGMGGMEGMDFSKLMGGMGGMGGLEGLGGMGGMGGMGGMGGMGDMGGMGGMEEFEDSDDEQETAKSGDKKDDAVKEEGLATEKAPAAEETTSVKEDK

SEQ ID NO: 31069 - DNA, 736 bp, Arabidopsis thaliana
  misc_feature (1)..(736): Ceres Seq. ID no. 13650656
  misc_feature (1)..(736): Ortholog of  Ceres SEQ ID NO 13581866 as cited in SEQ ID NO 52179
  misc_feature (1)..(736): Ortholog of  Ceres SEQ ID NO 14315451 as cited in SEQ ID NO 59289
aaattacctagaacatcctaatcgaaaaaagtgttagcttttgatctttcttatattcttctctgaaatagtaacacactgtgaagagtttttcctacatctgaattttgtctgatccagctgagaacaggaaaaagaagaaaatggcgtttgtgacaactgcggaagtttgtgacgcgaatcaagagctgattcggagtggtcagctacgagctttgcaacccattttccagatttatggccgtcgacaaatattctcaggaccagttgtcactgtcaaagtttttgaagacaatggcttaatccgtcaattcatcgaggagaaaggaaacggtagagttcttgtggtggatggtggagggagtcaacgatgtgcaatactcggaggtaaccccgttgttcaagctcagaacaacggatgggcaggaatcgttgtgaacggatgcatcagagacgtcgatgagatcaacggttgtgatatcggagtgagagctttggcctctcatccgataaaagcgagtaagaaaggacttggagaacaacgagttccggtaaatatcgcagggactcggatttgtgatggtgaatggctttatgcagatactgatgggattcttgtctcccaaattgagttatccgtttaataaaaaaggctttgatcagttaccaaaaaaaaaaacagaacgtggtttgtgttcatcttcttgttacttaagagattgttgaattataatgc

SEQ ID NO: 31070 - protein, 166 aa, Arabidopsis thaliana; identical to SEQ ID NO: 29350
  peptide (1)..(166): Ceres Seq. ID no. 13650657

SEQ ID NO: 31071 - DNA, 750 bp, Arabidopsis thaliana
  misc_feature (1)..(750): Ceres Seq. ID no. 13500273
  misc_feature (1)..(750): Ortholog of  Ceres SEQ ID NO 14309169 as cited in SEQ ID NO 0
accctaacaccctactaacacctccctctttcaatctccgatcaaatacaaacgcatacttccaatttcgccggcgaagatgcagcagaggaagccgacggcgggtagacccagtggtaccgatggatccgatttctcataccgcatggtcgttgactctcgttacacgaaggtcactaaagaaaaagctcgtctccgtcctttgatctttgttcaggctgcgatttatgtaatcggattatcgtgtgcgtttctaacaacaactaaaaaggatgagaagaacacccttgctattgcagctgctgttgctggcttagtgtgttcattgataggagaattaggttgcagacgtagcagagtaaaccttttgaggctctacacggctgcatcaaccattgttatggttctttctgtgttttgtgctgttaggagcagattaaccatggaggaacgcaatagctctggaacaaccgcgaagcttgagctcgcaggtttcatttgtgctcaattaggagcggtggtgcagatattagcgatcatcgttacagggtcccttgtcaataatatgtctccacctacgaaagcagcatagaggaacataaaatttgggcactgtcgtgtgtgcttctcttaaatgaagaacttaggaatttgtaatttttgaaccatttttgttctctccaccaagtgattagtgttatacaacgttgtttacttcagctttttaatcagtcattcaaacacattaag

SEQ ID NO: 31072 - protein, 170 aa, Arabidopsis thaliana
  peptide (1)..(170): Ceres Seq. ID no. 13500274
MQQRKPTAGRPSGTDGSDFSYRMVVDSRYTKVTKEKARLRPLIFVQAAIYVIGLSCAFLTTTKKDEKNTLAIAAAVAGLVCSLIGELGCRRSRVNLLRLYTAASTIVMVLSVFCAVRSRLTMEERNSSGTTAKLELAGFICAQLGAVVQILAIIVTGSLVNNMSPPTKAA

SEQ ID NO: 31073 - protein, 148 aa, Arabidopsis thaliana
  peptide (1)..(148): Ceres Seq. ID no. 13500275
MVVDSRYTKVTKEKARLRPLIFVQAAIYVIGLSCAFLTTTKKDEKNTLAIAAAVAGLVCSLIGELGCRRSRVNLLRLYTAASTIVMVLSVFCAVRSRLTMEERNSSGTTAKLELAGFICAQLGAVVQILAIIVTGSLVNNMSPPTKAA

SEQ ID NO: 31074 - DNA, 1112 bp, Arabidopsis thaliana
  misc_feature (1)..(1112): Ceres Seq. ID no. 12396985
  misc_feature (1)..(1112): Ortholog of  Ceres SEQ ID NO 15179996 as cited in SEQ ID NO 0
attttaaaacatctatccacattaaatcattcactgatctctaaccaatcccacacacactaccacaaacaatggccaccgtcgctaacttcttagccaaaccaatctccaccgtagtcccacggccatcctccgccgttgcttcgacctcctccttcgtattctttaaccataaaactaatcctctgttccggaggaaaaacctcccgaaaagattattctccgccgtgaaaataaaggctggagcggcgtctccgggaaaggtgggtacaccaccggcgaatgacgagaaggtacaaaagattcacagcggagaggaattcgacgaggcgttgaaaaatgcgaagagcagacttgtggttgcagagtttgctacgagtaagagtgatcagagtaataagatatatccgtttatggtggaactgagcaggacctgtaacgacgtcgttttcttgctcgtcatgggtgatgaatctgacaagaccagagaactctgtcggagagagaagattgagaaagttcctcactttagcttttataagagcatggagaaaatacacgaggaagaaggtattgaaccggaccagttaatgggagacgttctatactacggagacaaccactctacggtggtgcagctgcacggccgacctgacgtggaaaagctgatcgacgagaatcgcactggaggcaagctgatcgtgcttgacgttggtctaaaacattgtggtccttgcgttaaagtgtatccgaccgtgctgaaactgtcccggtcaatgtccgagacagtcgtattcgctagaatgaacggtgacgagaacgatagttgtatggagtttctcaaggacatgaatgttatcgaagttccaactttcttgttcattagagacggcgagattcgtggccgttatgttggttccggtaaaggagaactcattggagagattcttcggtactcaggcgttcgtgtcacttattaatttgtatcaaaactttaattttattacatctcacttcaaaaaagaatgagtttttggtctttgtctgtaccatccgaaaccggttgatatgaaagaaaaaaaactcaaaatagtgtgattcttgattatttg

SEQ ID NO: 31075 - protein, 302 aa, Arabidopsis thaliana
  peptide (1)..(302): Ceres Seq. ID no. 12396986
MATVANFLAKPISTVVPRPSSAVASTSSFVFFNHKTNPLFRRKNLPKRLFSAVKIKAGAASPGKVGTPPANDEKVQKIHSGEEFDEALKNAKSRLVVAEFATSKSDQSNKIYPFMVELSRTCNDVVFLLVMGDESDKTRELCRREKIEKVPHFSFYKSMEKIHEEEGIEPDQLMGDVLYYGDNHSTVVQLHGRPDVEKLIDENRTGGKLIVLDVGLKHCGPCVKVYPTVLKLSRSMSETVVFARMNGDENDSCMEFLKDMNVIEVPTFLFIRDGEIRGRYVGSGKGELIGEILRYSGVRVTY

SEQ ID NO: 31076 - protein, 188 aa, Arabidopsis thaliana
  peptide (1)..(188): Ceres Seq. ID no. 12396987
MVELSRTCNDVVFLLVMGDESDKTRELCRREKIEKVPHFSFYKSMEKIHEEEGIEPDQLMGDVLYYGDNHSTVVQLHGRPDVEKLIDENRTGGKLIVLDVGLKHCGPCVKVYPTVLKLSRSMSETVVFARMNGDENDSCMEFLKDMNVIEVPTFLFIRDGEIRGRYVGSGKGELIGEILRYSGVRVTY

SEQ ID NO: 31077 - protein, 172 aa, Arabidopsis thaliana
  peptide (1)..(172): Ceres Seq. ID no. 12396988
MGDESDKTRELCRREKIEKVPHFSFYKSMEKIHEEEGIEPDQLMGDVLYYGDNHSTVVQLHGRPDVEKLIDENRTGGKLIVLDVGLKHCGPCVKVYPTVLKLSRSMSETVVFARMNGDENDSCMEFLKDMNVIEVPTFLFIRDGEIRGRYVGSGKGELIGEILRYSGVRVTY

SEQ ID NO: 31078 - DNA, 1838 bp, Arabidopsis thaliana
  misc_feature (1)..(1838): Ceres Seq. ID no. 12322952
  misc_feature (1)..(1838): Ortholog of  Ceres SEQ ID NO 15173355 as cited in SEQ ID NO 61844
accagctctactcattgattttacacactcaccagcacctctatttctttctcactctccaagtctcctctgtgaaagctgaaagctcatcttcttccacgtgatttgtcttcccgatcaccaaacctttccggtaattactctcccttgcgttcgacgccatcttccttggagttctcttcaatcaaccggtaaatcttccactgattttgaagaagattcttccatgttcgatctggttcgtctccagagatcgagagttgaattgcctcgaaacagctctagtttcaccagagacgcgcgaacgatagaaataaagagactcgaagctgcgtgtaccggagacgaatggcgggaaaattgacttgagcgcgattttctgtgtggatccaaaatgaagaagaaggtgtctcagcagaagttactgtacagatggaagaggaaggtatacgccacgttgatgttcgctttctgctttgggactttcgtatttatacaagctcgtttcgcatctatacaagctcgtttcaatcgaatctctgcgtctctcgattcgcttaaaaagcctcgtctagatcagagaccacagattgccttcctcttcattgcccggaatcgactccctctcgagtttgtctgggatgctttctttaagggtgaggatggaaagttctcaatatatgttcattctagacctggatttgttctcaacgaggctacaacgcgatccaagtactttttggatcggcgacttaatgacagtatacaggtagattggggtgaatcaaccatgattgaagcagaacgtgtattgcttagacatgcacttagagattcatttaatcaccgctttgtttttctttctgatagctgcatacctctgtacagtttcagctacacgtataactacatcatgtcaacaccaactagtttcgttgatagctttgcagatacaaaagatagccgttataatcctagaatgaatcccattattcctgttcgtaactggagaaaaggatcacagtgggtcgttctgaatagaaaacacgcagaaattgtggtgaatgatacctctgtctttcctatgtttcagcagcattgcaggagaaaatcacttccagagttttggcgagatcgtcctgtaccagctgaaggttggaaggaacacaactgtatacctgatgagcactatgttcagacattgctatctcaaaagggtgtagatagcgaactcacacgaagatcactgacacactcagcttgggacctttcatcctcgaaaagtaatgaacgtcgtggatggcatcctatgacttacaagttttctgatgctactcctgatcttatacagtccattaagggaatcgacaatatcaactacgagactgaataccggcgagaatggtgtagcagtaaagggaaaccatcaccgtgcttcctcttcgccaggaagttcactcgtcccgccgctctccgcctactccgtgaaactatcttgttagagggcaaagagcatgacaataagtagatccttcaccatttaaagcatatattacacataggtacgtaagataaccaagagttactatgtttgtacaattgtactactgtgatttcatctgtaatacttacgatgacgaatttacatagaaacttacaccatttggtaaatgagtaaaagccagccttgataaaagatggacggtagagaaagagctcagcaggggtgacctgagaacacatgaaaacgagagctgtaacaatgacgtagcgtcattacagccgttgattactcgtgtgttctcatatcaaccctgtcgagatccactaccttcatg

SEQ ID NO: 31079 - protein, 377 aa, Arabidopsis thaliana
  peptide (1)..(377): Ceres Seq. ID no. 12322953
MKKKVSQQKLLYRWKRKVYATLMFAFCFGTFVFIQARFASIQARFNRISASLDSLKKPRLDQRPQIAFLFIARNRLPLEFVWDAFFKGEDGKFSIYVHSRPGFVLNEATTRSKYFLDRRLNDSIQVDWGESTMIEAERVLLRHALRDSFNHRFVFLSDSCIPLYSFSYTYNYIMSTPTSFVDSFADTKDSRYNPRMNPIIPVRNWRKGSQWVVLNRKHAEIVVNDTSVFPMFQQHCRRKSLPEFWRDRPVPAEGWKEHNCIPDEHYVQTLLSQKGVDSELTRRSLTHSAWDLSSSKSNERRGWHPMTYKFSDATPDLIQSIKGIDNINYETEYRREWCSSKGKPSPCFLFARKFTRPAALRLLRETILLEGKEHDNK

SEQ ID NO: 31080 - protein, 355 aa, Arabidopsis thaliana
  peptide (1)..(355): Ceres Seq. ID no. 12322954
MFAFCFGTFVFIQARFASIQARFNRISASLDSLKKPRLDQRPQIAFLFIARNRLPLEFVWDAFFKGEDGKFSIYVHSRPGFVLNEATTRSKYFLDRRLNDSIQVDWGESTMIEAERVLLRHALRDSFNHRFVFLSDSCIPLYSFSYTYNYIMSTPTSFVDSFADTKDSRYNPRMNPIIPVRNWRKGSQWVVLNRKHAEIVVNDTSVFPMFQQHCRRKSLPEFWRDRPVPAEGWKEHNCIPDEHYVQTLLSQKGVDSELTRRSLTHSAWDLSSSKSNERRGWHPMTYKFSDATPDLIQSIKGIDNINYETEYRREWCSSKGKPSPCFLFARKFTRPAALRLLRETILLEGKEHDNK

SEQ ID NO: 31081 - protein, 245 aa, Arabidopsis thaliana
  peptide (1)..(245): Ceres Seq. ID no. 12322955
MIEAERVLLRHALRDSFNHRFVFLSDSCIPLYSFSYTYNYIMSTPTSFVDSFADTKDSRYNPRMNPIIPVRNWRKGSQWVVLNRKHAEIVVNDTSVFPMFQQHCRRKSLPEFWRDRPVPAEGWKEHNCIPDEHYVQTLLSQKGVDSELTRRSLTHSAWDLSSSKSNERRGWHPMTYKFSDATPDLIQSIKGIDNINYETEYRREWCSSKGKPSPCFLFARKFTRPAALRLLRETILLEGKEHDNK

SEQ ID NO: 31082 - DNA, 699 bp, Arabidopsis thaliana
  misc_feature (1)..(699): Ceres Seq. ID no. 12322132
  misc_feature (1)..(699): Ortholog of  Ceres SEQ ID NO 13594979 as cited in SEQ ID NO 56172
aaaacaacacggttacgcaaactctctctgagaaaatccccaaatctcatgaaattagggtttcaatcattctttgaacgcaaaattagaaacctcctctccatccgccacgaatctctagggttcttctgaaggattagatttctgggttttagaaatctgtctctcgtcatcaacaattcacgtgatgccgtcgttaacactgagcattcgtttccttttcttagttctctgcttgatcggtttacaagctgcggatgatttcccagataaatcccgcggtgacgtatgccctcgggttaaggatcggggtggatgcacaatcaactgtttccgggcggatccggtttgtggaaccgatggagtcacgtactggtgcggttgtcccgacgcagcttgccatggcgctcgcgtagtcaaaaaaggagcttgtgacacaggtaatgcaggaagtgcttctgttcctggacaagctttgttattgattcatattgtttggctcttcttgctcggactctctcttctcgttggtggtttctgatctctagagagttagtggtggaattagacaaggaattagatagatcacacgtcctgagtttgttgtatgtgtatagttgagtattgttttgctttgtgtgctatatatatgtaatagattctgttgcagttcattctaataatgaagatttgatcggg

SEQ ID NO: 31083 - protein, 117 aa, Arabidopsis thaliana
  peptide (1)..(117): Ceres Seq. ID no. 12322133
MPSLTLSIRFLFLVLCLIGLQAADDFPDKSRGDVCPRVKDRGGCTINCFRADPVCGTDGVTYWCGCPDAACHGARVVKKGACDTGNAGSASVPGQALLLIHIVWLFLLGLSLLVGGF

SEQ ID NO: 31084 - DNA, 687 bp, Arabidopsis thaliana
  misc_feature (1)..(687): Ceres Seq. ID no. 13499600
  misc_feature (1)..(687): Ortholog of  Ceres SEQ ID NO 13598157 as cited in SEQ ID NO 61570
accaatctcaaagcaaattaaatacactactacttcttgagcttttaaactacacaaacaaatggctccaagaaccccccttgcactcttcgtttctctcaacctcctcttcttcacttacacctctgcaaccacagggacttgtcctaaaaattccatagagatcggtacttgtgtcactgtgctcaatctagtggacctaacattgggaaacccacctgtaaagccatgttgctcgctcatccaaggcttggctgaccttgaggctgcggcctgcctctgcactgcgctcaaagctagcattcttggaattgtcaatattaaccttcctatcaatctcagcgtactcctcaatgtttgtagtaggaatgctccaaagagtttccagtgcgcgtaagttgaatacctatgacatacctatgaaacaaacgaatcataccgatgcttgaacatgttttcttacctacttgttgttgttctaagatgtttgttttttctttctttcttggattgttaataatgaacgtacgacgttctgatgcaaaataatggaaaatggggttgtgtgtacaatcgacaagtttgtatatactcctttactttgttgttcctttgttttgttgttcctcttctttgtaactgtgtatttcaaatttgcttaataaaaatataaattgatgttgtagt

SEQ ID NO: 31085 - protein, 111 aa, Arabidopsis thaliana
  peptide (1)..(111): Ceres Seq. ID no. 13499601
MAPRTPLALFVSLNLLFFTYTSATTGTCPKNSIEIGTCVTVLNLVDLTLGNPPVKPCCSLIQGLADLEAAACLCTALKASILGIVNINLPINLSVLLNVCSRNAPKSFQCA

SEQ ID NO: 31086 - DNA, 1390 bp, Arabidopsis thaliana
  misc_feature (1)..(1390): Ceres Seq. ID no. 12489610
  misc_feature (1)..(1390): Ortholog of  Ceres SEQ ID NO 15176596 as cited in SEQ ID NO 55168
  misc_feature (1)..(1390): Ortholog of  Ceres SEQ ID NO 14301576 as cited in SEQ ID NO 62362
acgagatactctcttcttaaaacctcatccacccaaacacaaatgtcttgtaatccttctcttatctttctccttgtgattcctttttatattcctctgatattttctctcagtttgatctcatttgctctgcaatggcgactaccatgaatgctgctgtttctctcacatcttcaaactcttcttcttttcccgctacaagttgtgccattgctcctgaaaggatcaggtttactaagggtgctttttactacaaaagcaacaatgtagtgacaggtaaaagagtgttttccataaaagcacaaatcacaacagaaacagatactcctactcctgcaaagaaagtagagaaagtgtcaaagaagaacgaggaaggtgtgattgttaacaggtacagaccaaaagagccttacactggaaaatgccttctcaacaccaaaatcacagctgatgatgctcctggagagacctggcacatggttttcagccatcaaggagaaatcccgtacagagaaggacaatctgttggtgtgattgcagatggaattgacaagaatggaaagcctcacaaggtcagactttactccattgcaagcagcgctcttggagatctcggcaattctgaaaccgtttctttgtgtgttaaaagacttgtttatactaatgaccaaggagagactgttaaaggagtttgctcaaatttcttgtgtgatttggcacccggaagtgatgttaagctgactggtcctgtaggcaaagaaatgcttatgccaaaggatccaaacgccaccgttattatgcttgccacagggacaggaattgctcctttcaggtctttcttatggaagatgttctttgagaaacatgatgactacaagttcaatggcttagcttggttgttcttgggtgtaccaaccactagctctttgctctaccaagaggagtttgataagatgaaagcaaaggcccccgagaacttcagggtggattacgcgataagcagagaacaagcgaacgataaaggagagaaaatgtatatccagactcggatggcgcaatacgcagctgagttatgggagttgttgaagaaagacaacacttttgtttacatgtgtggactcaagggaatggagaaaggaattgatgacattatggtctcattggctgcaaatgacggtattgactggtttgattacaagaagcagttgaagaaggcagagcaatggaacgttgaagtctactgatcaaaaagcctttgacatttctgtagcaaagtatagctgaacaaaactgtaattttcgcttctgaatttctgtattttgaagataagttttttagatatgttatactaaaaaaagagttctttaatcattatcatttacttcttcc

SEQ ID NO: 31087 - protein, 369 aa, Arabidopsis thaliana
  peptide (1)..(369): Ceres Seq. ID no. 12489611
MATTMNAAVSLTSSNSSSFPATSCAIAPERIRFTKGAFYYKSNNVVTGKRVFSIKAQITTETDTPTPAKKVEKVSKKNEEGVIVNRYRPKEPYTGKCLLNTKITADDAPGETWHMVFSHQGEIPYREGQSVGVIADGIDKNGKPHKVRLYSIASSALGDLGNSETVSLCVKRLVYTNDQGETVKGVCSNFLCDLAPGSDVKLTGPVGKEMLMPKDPNATVIMLATGTGIAPFRSFLWKMFFEKHDDYKFNGLAWLFLGVPTTSSLLYQEEFDKMKAKAPENFRVDYAISREQANDKGEKMYIQTRMAQYAAELWELLKKDNTFVYMCGLKGMEKGIDDIMVSLAANDGIDWFDYKKQLKKAEQWNVEVY

SEQ ID NO: 31088 - protein, 365 aa, Arabidopsis thaliana
  peptide (1)..(365): Ceres Seq. ID no. 12489612
MNAAVSLTSSNSSSFPATSCAIAPERIRFTKGAFYYKSNNVVTGKRVFSIKAQITTETDTPTPAKKVEKVSKKNEEGVIVNRYRPKEPYTGKCLLNTKITADDAPGETWHMVFSHQGEIPYREGQSVGVIADGIDKNGKPHKVRLYSIASSALGDLGNSETVSLCVKRLVYTNDQGETVKGVCSNFLCDLAPGSDVKLTGPVGKEMLMPKDPNATVIMLATGTGIAPFRSFLWKMFFEKHDDYKFNGLAWLFLGVPTTSSLLYQEEFDKMKAKAPENFRVDYAISREQANDKGEKMYIQTRMAQYAAELWELLKKDNTFVYMCGLKGMEKGIDDIMVSLAANDGIDWFDYKKQLKKAEQWNVEVY

SEQ ID NO: 31089 - protein, 255 aa, Arabidopsis thaliana
  peptide (1)..(255): Ceres Seq. ID no. 12489613
MVFSHQGEIPYREGQSVGVIADGIDKNGKPHKVRLYSIASSALGDLGNSETVSLCVKRLVYTNDQGETVKGVCSNFLCDLAPGSDVKLTGPVGKEMLMPKDPNATVIMLATGTGIAPFRSFLWKMFFEKHDDYKFNGLAWLFLGVPTTSSLLYQEEFDKMKAKAPENFRVDYAISREQANDKGEKMYIQTRMAQYAAELWELLKKDNTFVYMCGLKGMEKGIDDIMVSLAANDGIDWFDYKKQLKKAEQWNVEVY

SEQ ID NO: 31090 - DNA, 1195 bp, Arabidopsis thaliana
  misc_feature (1)..(1195): Ceres Seq. ID no. 12333949
  misc_feature (1)..(1195): Ortholog of  Ceres SEQ ID NO 15227260 as cited in SEQ ID NO 69285
gcggagaagtactctctggagccgccacgtctcagtgatccgactacgacacctttcttcactcttcttcttgcgtcttctctgctctcgtggtctctctgttatttaattttaatcgattgagatcgcttttagctctcgtctttgaattttacgggcagaaaatgggtgaagaagctcgagcgttagatatggaggagatcagtgacaacacgacgagacgaaacgatgtcgttcatgacttgatggttgatttatacccgcttagcagctactacttcggttcaaaagaagctcttcgcgtcaaggacgagattatctctgatcgagtcatcagattgaaatccaattatgctgctcatggattgagaacttgcgttgaagctgttcttctggttgagttgttcaagcatcctcatgttttgcttcttcaatatagaaactccattttcaagcttcctggtggtcgtttgagacctggagaatcagatattgaaggtctaaaacggaaactagcatcaaagctatcggttaacgaaaatgtgggtgtttcgggttatgaggtaggagaatgtattgggatgtggtggagacccaactttgagacattgatgtatcctttcttgccacctaatattaaacacccaaaggaatgcacaaagctttttcttgtgagattaccggtacatcaacagtttgttgtgcctaagaacttcaaactcctcgctgttccattgtgtcaactccatgaaaatgaaaagacttatgggccgatcatgtcgcaaattcctaagcttctttcgaaattctccttcaacatgatggagatatgaacgaacctcatgatcattgcctctagtagctcttgccccccgcaatttgtgataggattatgtttggggaaatcgtttgtggagcctctctgagtctgtgactatataatgtatatagggcttataatatatagacaatgttgaagaatagcatgttcttgttggttatagagactagacatgaagtatactgatagatagattaatcaattcgaaacaatttttctttgtgtgataatttcgatgtgtaattgaatgtatacatgagtaaaacaaatataggggtgtatgcttatttgtatattccttgttgaagaaaaccttgttatcttcaaacatgaaaccgagaaacataagtaaag

SEQ ID NO: 31091 - protein, 222 aa, Arabidopsis thaliana
  peptide (1)..(222): Ceres Seq. ID no. 12333950
MGEEARALDMEEISDNTTRRNDVVHDLMVDLYPLSSYYFGSKEALRVKDEIISDRVIRLKSNYAAHGLRTCVEAVLLVELFKHPHVLLLQYRNSIFKLPGGRLRPGESDIEGLKRKLASKLSVNENVGVSGYEVGECIGMWWRPNFETLMYPFLPPNIKHPKECTKLFLVRLPVHQQFVVPKNFKLLAVPLCQLHENEKTYGPIMSQIPKLLSKFSFNMMEI

SEQ ID NO: 31092 - protein, 213 aa, Arabidopsis thaliana
  peptide (1)..(213): Ceres Seq. ID no. 12333951
MEEISDNTTRRNDVVHDLMVDLYPLSSYYFGSKEALRVKDEIISDRVIRLKSNYAAHGLRTCVEAVLLVELFKHPHVLLLQYRNSIFKLPGGRLRPGESDIEGLKRKLASKLSVNENVGVSGYEVGECIGMWWRPNFETLMYPFLPPNIKHPKECTKLFLVRLPVHQQFVVPKNFKLLAVPLCQLHENEKTYGPIMSQIPKLLSKFSFNMMEI

SEQ ID NO: 31093 - protein, 195 aa, Arabidopsis thaliana
  peptide (1)..(195): Ceres Seq. ID no. 12333952
MVDLYPLSSYYFGSKEALRVKDEIISDRVIRLKSNYAAHGLRTCVEAVLLVELFKHPHVLLLQYRNSIFKLPGGRLRPGESDIEGLKRKLASKLSVNENVGVSGYEVGECIGMWWRPNFETLMYPFLPPNIKHPKECTKLFLVRLPVHQQFVVPKNFKLLAVPLCQLHENEKTYGPIMSQIPKLLSKFSFNMMEI

SEQ ID NO: 31094 - DNA, 761 bp, Arabidopsis thaliana
  misc_feature (1)..(761): Ceres Seq. ID no. 12397086
  misc_feature (1)..(761): Ortholog of  Ceres SEQ ID NO 13596727 as cited in SEQ ID NO 63000
aaagaagaaaaacccttgctactgcttttcatttctgacctaaaagctcagctccgatttgaaaatggggagtagattgggaggacgagtggttcatttcgcgaatcttccgattaagcttctgatgcctgcgaagctgaccaacattcacgaattcgcgttgaaaacgattccttccgcgtccaagatcgagatcaagcgagtcctggagtcgctctacggattcgatgtggagaaggtgaatactttaaacatggatgggaagaagaagaagcgtggtggtttgttgatagcgaaagctgattacaagaaggcttacgtcacgctacgtagtccattgtcgatttctagggatttgtttccggtgaagtatatcgaggaagataggaagagtaaagtgaaaggatctagctttgttgaggaagaagatgataagaagagtcattggcttgatcgtaaggagaagagggagattggtggttatggtaaaggtaaaggtcgtcgaggtggtgaaagggctaactctccgacgagaggtggtgctgcggcggcggggacggccaagtttccatggagcaacatgagatttgttggtaagtagggtttatgagcagattatgatctggggtttgtgtttctttagctatcggattattgattttgttgtttctattacttgaggtttgtgtattgagaatctgaatcattgaagctctcagtgtttctgagatttggctaataaatctgaatcaagatgttgc

SEQ ID NO: 31095 - protein, 178 aa, Arabidopsis thaliana
  peptide (1)..(178): Ceres Seq. ID no. 12397087
MGSRLGGRVVHFANLPIKLLMPAKLTNIHEFALKTIPSASKIEIKRVLESLYGFDVEKVNTLNMDGKKKKRGGLLIAKADYKKAYVTLRSPLSISRDLFPVKYIEEDRKSKVKGSSFVEEEDDKKSHWLDRKEKREIGGYGKGKGRRGGERANSPTRGGAAAAGTAKFPWSNMRFVGK

SEQ ID NO: 31096 - protein, 158 aa, Arabidopsis thaliana
  peptide (1)..(158): Ceres Seq. ID no. 12397088
MPAKLTNIHEFALKTIPSASKIEIKRVLESLYGFDVEKVNTLNMDGKKKKRGGLLIAKADYKKAYVTLRSPLSISRDLFPVKYIEEDRKSKVKGSSFVEEEDDKKSHWLDRKEKREIGGYGKGKGRRGGERANSPTRGGAAAAGTAKFPWSNMRFVGK

SEQ ID NO: 31097 - protein, 115 aa, Arabidopsis thaliana
  peptide (1)..(115): Ceres Seq. ID no. 12397089
MDGKKKKRGGLLIAKADYKKAYVTLRSPLSISRDLFPVKYIEEDRKSKVKGSSFVEEEDDKKSHWLDRKEKREIGGYGKGKGRRGGERANSPTRGGAAAAGTAKFPWSNMRFVGK

SEQ ID NO: 31098 - DNA, 1684 bp, Arabidopsis thaliana
  misc_feature (1)..(1684): Ceres Seq. ID no. 13497681
  misc_feature (1)..(1684): Ortholog of  Ceres SEQ ID NO 13597334 as cited in SEQ ID NO 64244
  misc_feature (1)..(1684): Ortholog of  Ceres SEQ ID NO 14303165 as cited in SEQ ID NO 65181
  misc_feature (1)..(1684): Ortholog of  Ceres SEQ ID NO 15224550 as cited in SEQ ID NO 0
atttatgaggggtgagttgattcattaattcttggatctttgggtgtctaggtttacttagagaagtgacttgtgtctttaatgggtttgttgaaagatgtgtcagtgacatgaagaagacgaacaacaacaataagcttgcaataaatgttttgccttcatcttcatcacacatcaacaccacacaaaaagtgtttttcatactcttcagaaaagtcaataccgtgaaaaagaggagactcctgactcctcagtcattgcaatgtcttcttcttcttcttgcttgttcttcactttcattctcttactcagtctcttctcctcctatgcttctccatcgaattcgacatccgaaactgtgcctctccggcctcaaagagagattcagaagatgaaactcatcagaaaacaactccaaaagattaataaaccagccatcaagaccattcatagctcagatggagatacgatagattgtgttccatctcatcaccagcctgcttttgatcatcctttgttacagggacaacgaccaatggatccaccggagatgcctatagggtatagccaagaaaatgaatcccacgaaaatttccagctttggagtttatacggtgagtcttgcccggaaggtacgattccgatcagaagaacaacggagcaagacatgttaagagcaaattctgtccgtagatttggtcggaaaatcaggcgcgtgagaagggattcgagcagtaatggccacgagcatgcggttggatacgtatcgggaagtcaatactacggagcaaaagcaagtataaacgtgtggacgccacgtgtcataagccaatacgagtttagtctatctcagatttggatcatcgccggttctttcgccggcgatcttaataccatcgaagctggttggcagattagcccggagctatacggagacactaacccaagattcttcacctattggacgtcggatgcttaccaagcaacaggatgctataacctactatgttctggttttgttcaaacaaacaatcgaatcgcaattggagcggcgatttcgcccgtttcgtcgtataaaggtggacaattcgatataagcttattgatatggaaggacccaaagcatggacattggtggctccaattcgggtcgggtacactagtcggatattggcccgtatctctgttcacacacctgagggagcatggaaacatggtccagtttggtggcgagatcgtgaacacacgacctggtggttcacatacttcgactcaaatgggcagtggccattttgccggtgaaggttttggaaaagcgtcttactttaggaatcttcaaatggtagattgggacaatactcttattccgatatctaatcttaaagttcttgcagatcatcctaattgttatgatataagaggaggggtaaaccgtgtttggggtaactttttttattacggaggaccgggtaaaaactcgaaatgtccatagagaaaaaaaagaagtggatagtgttgttttgagcttaagtaaatgagattttttgggatttagagctcaggacaatgatgaaagatccatagtttttttttttgtttgtaagaaaagaaatgtatcgattgattgatatgttatcaaatgtgtaaatgtagaatatggtgttaagtggaagtaggcgtttat

SEQ ID NO: 31099 - protein, 409 aa, Arabidopsis thaliana
  peptide (1)..(409): Ceres Seq. ID no. 13497682
MSSSSSCLFFTFILLLSLFSSYASPSNSTSETVPLRPQREIQKMKLIRKQLQKINKPAIKTIHSSDGDTIDCVPSHHQPAFDHPLLQGQRPMDPPEMPIGYSQENESHENFQLWSLYGESCPEGTIPIRRTTEQDMLRANSVRRFGRKIRRVRRDSSSNGHEHAVGYVSGSQYYGAKASINVWTPRVISQYEFSLSQIWIIAGSFAGDLNTIEAGWQISPELYGDTNPRFFTYWTSDAYQATGCYNLLCSGFVQTNNRIAIGAAISPVSSYKGGQFDISLLIWKDPKHGHWWLQFGSGTLVGYWPVSLFTHLREHGNMVQFGGEIVNTRPGGSHTSTQMGSGHFAGEGFGKASYFRNLQMVDWDNTLIPISNLKVLADHPNCYDIRGGVNRVWGNFFYYGGPGKNSKCP

SEQ ID NO: 31100 - protein, 366 aa, Arabidopsis thaliana
  peptide (1)..(366): Ceres Seq. ID no. 13497683
MKLIRKQLQKINKPAIKTIHSSDGDTIDCVPSHHQPAFDHPLLQGQRPMDPPEMPIGYSQENESHENFQLWSLYGESCPEGTIPIRRTTEQDMLRANSVRRFGRKIRRVRRDSSSNGHEHAVGYVSGSQYYGAKASINVWTPRVISQYEFSLSQIWIIAGSFAGDLNTIEAGWQISPELYGDTNPRFFTYWTSDAYQATGCYNLLCSGFVQTNNRIAIGAAISPVSSYKGGQFDISLLIWKDPKHGHWWLQFGSGTLVGYWPVSLFTHLREHGNMVQFGGEIVNTRPGGSHTSTQMGSGHFAGEGFGKASYFRNLQMVDWDNTLIPISNLKVLADHPNCYDIRGGVNRVWGNFFYYGGPGKNSKCP

SEQ ID NO: 31101 - protein, 318 aa, Arabidopsis thaliana
  peptide (1)..(318): Ceres Seq. ID no. 13497684
MDPPEMPIGYSQENESHENFQLWSLYGESCPEGTIPIRRTTEQDMLRANSVRRFGRKIRRVRRDSSSNGHEHAVGYVSGSQYYGAKASINVWTPRVISQYEFSLSQIWIIAGSFAGDLNTIEAGWQISPELYGDTNPRFFTYWTSDAYQATGCYNLLCSGFVQTNNRIAIGAAISPVSSYKGGQFDISLLIWKDPKHGHWWLQFGSGTLVGYWPVSLFTHLREHGNMVQFGGEIVNTRPGGSHTSTQMGSGHFAGEGFGKASYFRNLQMVDWDNTLIPISNLKVLADHPNCYDIRGGVNRVWGNFFYYGGPGKNSKCP

SEQ ID NO: 31102 - DNA, 1241 bp, Arabidopsis thaliana
  misc_feature (1)..(1241): Ceres Seq. ID no. 12321288
  misc_feature (1)..(1241): Ortholog of  Ceres SEQ ID NO 15177091 as cited in SEQ ID NO 52140
  misc_feature (1)..(1241): Ortholog of  Ceres SEQ ID NO 15172539 as cited in SEQ ID NO 57333
  misc_feature (1)..(1241): Ortholog of  Ceres SEQ ID NO 14315951 as cited in SEQ ID NO 57634
  misc_feature (1)..(1241): Ortholog of  Ceres SEQ ID NO 13597324 as cited in SEQ ID NO 64842
  misc_feature (1)..(1241): Ortholog of  Ceres SEQ ID NO 13658672 as cited in SEQ ID NO 66627
agaaaccctagtttgaattttcacggccgacctctctctctcatctactaagctctcctccgagtattgttggcttcagaccaaatcttctccggcgctgtagcgtttcccccgtttcccctttttaacctttgcaaacaatgagtgggcgattttctcggtcaatctatgttggtaacttgcccggtgacattagggaacatgagattgaagatatcttttacaagtatggccgcattgtcgatattgaattgaaggttccacctcggcctccatgttattgctttgttgagtttgagcattctcgggatgctgaagatgccatcaagggccgtgatggctataatttggatggctgtcgcttgagggttgagcttgcacatggtggtcgaggacagtcttcaagtgatcgtcgtggtggctacggtggtggtggcagcggctatggtggtggaggtggtggtggtggatcagctcggtttggcgtctcacgacactctgaattccgagttattgtacgtgggctcccatcatctgcttcatggcaagatttgaaggatcatatgcggaaagctggtgatgtgtgctttgctgaggtgactcgagacagtgatggaacttatggtgttgtcgactacaccaattatgatgacatgaagtatgcaataaggaaacttgatgacacagagttcagaaacccctgggctagaggttttatccgggttaagaaatatgaaagctcccgatcaagaagcagaagcccaagcagaagcagaagtcgaagtcgtagccgaggccgtggtcgcagccatagccgcagtcgcagccttagcaggagcaagagcccaaggaaggatctgagtaaatcaccaaggcgatccctttccagatcgatttcaaaatctagatcgccatcgcccgacaagaagaagagtccccccagggcaatgtcgagatcaaagtccaggtccaggtccagatcgaggtctccgtccaaatctcctcccaaggttcgcgaaggcagtgtgtgattttgttaggcggtgaaaatggccaaaagaaagagtgcgaaaattctcaagtcaagatccactctctgtgtgtgtttttttgctgttttcggataattgacattttctgctgttctctgcttctttactcacaaatgatcatctttatactattatgacctgttatgttatggatgtttccgtgaccatcacaatacctctgagttttgc

SEQ ID NO: 31103 - protein, 296 aa, Arabidopsis thaliana
  peptide (1)..(296): Ceres Seq. ID no. 12321289
MSGRFSRSIYVGNLPGDIREHEIEDIFYKYGRIVDIELKVPPRPPCYCFVEFEHSRDAEDAIKGRDGYNLDGCRLRVELAHGGRGQSSSDRRGGYGGGGSGYGGGGGGGGSARFGVSRHSEFRVIVRGLPSSASWQDLKDHMRKAGDVCFAEVTRDSDGTYGVVDYTNYDDMKYAIRKLDDTEFRNPWARGFIRVKKYESSRSRSRSPSRSRSRSRSRGRGRSHSRSRSLSRSKSPRKDLSKSPRRSLSRSISKSRSPSPDKKKSPPRAMSRSKSRSRSRSRSPSKSPPKVREGSV

SEQ ID NO: 31104 - protein, 155 aa, Arabidopsis thaliana
  peptide (1)..(155): Ceres Seq. ID no. 12321290
MRKAGDVCFAEVTRDSDGTYGVVDYTNYDDMKYAIRKLDDTEFRNPWARGFIRVKKYESSRSRSRSPSRSRSRSRSRGRGRSHSRSRSLSRSKSPRKDLSKSPRRSLSRSISKSRSPSPDKKKSPPRAMSRSKSRSRSRSRSPSKSPPKVREGSV

SEQ ID NO: 31105 - DNA, 2221 bp, Arabidopsis thaliana
  misc_feature (1)..(2221): Ceres Seq. ID no. 13645720
  misc_feature (1)..(2221): Ortholog of  Ceres SEQ ID NO 13657677 as cited in SEQ ID NO 66119
gtttagggtttggttgaattttacagagcttccggatcagagagcttgagaagaaatcaaatcgagaaaatgaggatatcgtttgcgattgcatcaactgcgaagagatttgttcatcggagtcttgtggtgagaggtaatgctgcaactgtttctccctctttttcctttttctggagacgagctttctctggtaagactagttatgattacagagagaaactgagtagaaatgggctgagtgaattaaagttagatgacgctgttgctctgttcggtgaaatggtcaagtctcgtcccttcccttccatcattgagttcagcaaactgttgagtgcaattgctaagatgaacaagttcgatgttgtcatctctctcggcgagcagatgcaaaacttgggaattcctcataatcactatacttacagtattttgattaactgtttttgtcgacgctctcaactccctcttgctttagctgttcttggcaagatgatgaaacttggctatgagcccaatattgtcacgctttcttcgctgctcaatgggtattgccacagtaagaggatatccgaggctgtagctttggttgatcagatgttcgtaacggggtatcaacccaataccgtcacatttaacactctaatccatggactttttcttcacaacaaagcttcagaagcaatggctttaattgatcgaatggttgcaaaaggttgtcaaccagatctggttacttatggagtggtagtaaatggattatgtaagagaggtgatactgatttggcttttaatctgctcaacaagatggaacaagggaaattagaacctggtgttttgatctacaacacaatcattgatggtctttgcaaatacaaacatatggatgatgcgctcaacctatttaaagaaatggaaacaaaaggcattagaccaaatgttgttacctacagctccctcataagttgcctttgtaattacggaagatggagtgatgcctctcgcctccttagtgatatgattgagaggaaaatcaaccctgatgtattcactttcagcgcattgatcgatgcgtttgtgaaggagggcaagcttgtagaggctgagaaattgtacgacgagatggtcaaaaggtccatagatcctagtattgtcacatacagttcattgatcaacgggttttgtatgcacgatcgtctagacgaggccaagcagatgtttgagttcatggttagcaagcattgttttccagatgtagtgacttataatacgcttataaagggattttgcaagtataaaagggtagaagagggtatggaagtcttccgtgagatgtctcaaagaggattggttggcaacactgtcacttacaacattcttatccaagggttatttcaagctggagattgtgatatggctcaagaaatattcaaagagatggtatctgatggcgtgcctcccaatattatgacatacaacactttgttagatggactttgtaaaaatgggaagctagagaaagcaatggttgtattcgagtatctgcaaaggagtaaaatggaacctactatttacacatataatattatgattgaagggatgtgcaaggcagggaaggtggaagatgggtgggatctattttgtaatctcagccttaaaggagtgaagccggatgttgtagcgtacaatacaatgatatcaggattttgtaggaaaggttcaaaggaggaagcagatgccttatttaaagaaatgaaagaagatgggactcttccaaacagcggttgctataatacgctgattagggcacgccttagagatggtgacagagaagcatcagctgaactcatcaaagaaatgaggagttgcgggtttgctggagatgcttcaaccattggcttggtcactaatatgttacatgatgggagattggacaaaagcttcctcgatatgctttcttaaaacagtttcatcatccttgagtcgagagaatagtcgagcaaaccatatccccttgaaagcagcatctgcgaggctgcaaacaagggttgataaggagcactcttcaagcagatttcagatttcgacttgagatttttcgggctcgagggtgactttgcttttgtttctccccttccttctttttcacaaagctcaatgatttttttttggtgattgtcttgtgaactgctaagctttttaactcatattgagtcatggc

SEQ ID NO: 31106 - protein, 630 aa, Arabidopsis thaliana
  peptide (1)..(630): Ceres Seq. ID no. 13645721
MRISFAIASTAKRFVHRSLVVRGNAATVSPSFSFFWRRAFSGKTSYDYREKLSRNGLSELKLDDAVALFGEMVKSRPFPSIIEFSKLLSAIAKMNKFDVVISLGEQMQNLGIPHNHYTYSILINCFCRRSQLPLALAVLGKMMKLGYEPNIVTLSSLLNGYCHSKRISEAVALVDQMFVTGYQPNTVTFNTLIHGLFLHNKASEAMALIDRMVAKGCQPDLVTYGVVVNGLCKRGDTDLAFNLLNKMEQGKLEPGVLIYNTIIDGLCKYKHMDDALNLFKEMETKGIRPNVVTYSSLISCLCNYGRWSDASRLLSDMIERKINPDVFTFSALIDAFVKEGKLVEAEKLYDEMVKRSIDPSIVTYSSLINGFCMHDRLDEAKQMFEFMVSKHCFPDVVTYNTLIKGFCKYKRVEEGMEVFREMSQRGLVGNTVTYNILIQGLFQAGDCDMAQEIFKEMVSDGVPPNIMTYNTLLDGLCKNGKLEKAMVVFEYLQRSKMEPTIYTYNIMIEGMCKAGKVEDGWDLFCNLSLKGVKPDVVAYNTMISGFCRKGSKEEADALFKEMKEDGTLPNSGCYNTLIRARLRDGDREASAELIKEMRSCGFAGDASTIGLVTNMLHDGRLDKSFLDMLS

SEQ ID NO: 31107 - protein, 559 aa, Arabidopsis thaliana
  peptide (1)..(559): Ceres Seq. ID no. 13645722
MVKSRPFPSIIEFSKLLSAIAKMNKFDVVISLGEQMQNLGIPHNHYTYSILINCFCRRSQLPLALAVLGKMMKLGYEPNIVTLSSLLNGYCHSKRISEAVALVDQMFVTGYQPNTVTFNTLIHGLFLHNKASEAMALIDRMVAKGCQPDLVTYGVVVNGLCKRGDTDLAFNLLNKMEQGKLEPGVLIYNTIIDGLCKYKHMDDALNLFKEMETKGIRPNVVTYSSLISCLCNYGRWSDASRLLSDMIERKINPDVFTFSALIDAFVKEGKLVEAEKLYDEMVKRSIDPSIVTYSSLINGFCMHDRLDEAKQMFEFMVSKHCFPDVVTYNTLIKGFCKYKRVEEGMEVFREMSQRGLVGNTVTYNILIQGLFQAGDCDMAQEIFKEMVSDGVPPNIMTYNTLLDGLCKNGKLEKAMVVFEYLQRSKMEPTIYTYNIMIEGMCKAGKVEDGWDLFCNLSLKGVKPDVVAYNTMISGFCRKGSKEEADALFKEMKEDGTLPNSGCYNTLIRARLRDGDREASAELIKEMRSCGFAGDASTIGLVTNMLHDGRLDKSFLDMLS

SEQ ID NO: 31108 - protein, 537 aa, Arabidopsis thaliana
  peptide (1)..(537): Ceres Seq. ID no. 13645723
MNKFDVVISLGEQMQNLGIPHNHYTYSILINCFCRRSQLPLALAVLGKMMKLGYEPNIVTLSSLLNGYCHSKRISEAVALVDQMFVTGYQPNTVTFNTLIHGLFLHNKASEAMALIDRMVAKGCQPDLVTYGVVVNGLCKRGDTDLAFNLLNKMEQGKLEPGVLIYNTIIDGLCKYKHMDDALNLFKEMETKGIRPNVVTYSSLISCLCNYGRWSDASRLLSDMIERKINPDVFTFSALIDAFVKEGKLVEAEKLYDEMVKRSIDPSIVTYSSLINGFCMHDRLDEAKQMFEFMVSKHCFPDVVTYNTLIKGFCKYKRVEEGMEVFREMSQRGLVGNTVTYNILIQGLFQAGDCDMAQEIFKEMVSDGVPPNIMTYNTLLDGLCKNGKLEKAMVVFEYLQRSKMEPTIYTYNIMIEGMCKAGKVEDGWDLFCNLSLKGVKPDVVAYNTMISGFCRKGSKEEADALFKEMKEDGTLPNSGCYNTLIRARLRDGDREASAELIKEMRSCGFAGDASTIGLVTNMLHDGRLDKSFLDMLS

SEQ ID NO: 31109 - DNA, 1043 bp, Arabidopsis thaliana
  misc_feature (1)..(1043): Ceres Seq. ID no. 12327203
  misc_feature (1)..(1043): Ortholog of  Ceres SEQ ID NO 13594080 as cited in SEQ ID NO 55001
  misc_feature (1)..(1043): Ortholog of  Ceres SEQ ID NO 13587495 as cited in SEQ ID NO 0
cactgatatctgtgatatctctttgtcccccatctattaatctcctcctccgcatcgccgccgtgcacttccccacctcttccggcggatatgatgagcattgtatcaagtcatcatcactgtcaacaatctgttatacacgaacgtagcggtataggaacaatatctaaggtttcttgttcgagatattgcggtccgtgtttctctggacgactggctttctctcatagcctctgcttgaagactacttatgggaaaactgataggagaaagttttcaagaatttgcagtattgtggatgatgaggggaatctagataattcggatgacgaggaaaaggaatcactcgatgataaaactaaaaggcaagcgaatgatatgaatcgggctaatcttgaaagaatggttgggtcagatgattctgcatttaacggcttagatcttgcaaccctcatcagacagaagtatggaaaatcttatgatgttcaactcatcaagaaggagttcatggggaagaatcttcttgcaatgaatgtcatgtggaagtacagagaacagaggtcttttcctctaaccgaagaagaatatatacttagacttgacgatgtagccaacatgttgaaatgctggggagcagtctcacatatccgtagcagcctagcaaagtcgaaggagcgacctcggatagggaaggctgtcagcattttcatagacatggattcgacagggggaagagcaaatgaatggatttacaagtaaaaatcgaccggtttgcagctgctaaaccaagaaatcaaaaggttttgtctctacgtttatcgtcatcaattcattttgaaggctcttcagtgatggttgcctgcagaaaccgaggtttttgctatatttgatgtccaaatcaggtagtatatatgtacatgtgtgtattaagtagacacaaatctttacttgaactctctgtgtaaaatatctccatgtgttgaaattcaatcatctttgtgaatcttcctctctttgtgatctgtaaaagtattagttttggc

SEQ ID NO: 31110 - protein, 222 aa, Arabidopsis thaliana
  peptide (1)..(222): Ceres Seq. ID no. 12327204
MMSIVSSHHHCQQSVIHERSGIGTISKVSCSRYCGPCFSGRLAFSHSLCLKTTYGKTDRRKFSRICSIVDDEGNLDNSDDEEKESLDDKTKRQANDMNRANLERMVGSDDSAFNGLDLATLIRQKYGKSYDVQLIKKEFMGKNLLAMNVMWKYREQRSFPLTEEEYILRLDDVANMLKCWGAVSHIRSSLAKSKERPRIGKAVSIFIDMDSTGGRANEWIYK

SEQ ID NO: 31111 - protein, 221 aa, Arabidopsis thaliana
  peptide (1)..(221): Ceres Seq. ID no. 12327205
MSIVSSHHHCQQSVIHERSGIGTISKVSCSRYCGPCFSGRLAFSHSLCLKTTYGKTDRRKFSRICSIVDDEGNLDNSDDEEKESLDDKTKRQANDMNRANLERMVGSDDSAFNGLDLATLIRQKYGKSYDVQLIKKEFMGKNLLAMNVMWKYREQRSFPLTEEEYILRLDDVANMLKCWGAVSHIRSSLAKSKERPRIGKAVSIFIDMDSTGGRANEWIYK

SEQ ID NO: 31112 - protein, 126 aa, Arabidopsis thaliana
  peptide (1)..(126): Ceres Seq. ID no. 12327206
MNRANLERMVGSDDSAFNGLDLATLIRQKYGKSYDVQLIKKEFMGKNLLAMNVMWKYREQRSFPLTEEEYILRLDDVANMLKCWGAVSHIRSSLAKSKERPRIGKAVSIFIDMDSTGGRANEWIYK

SEQ ID NO: 31113 - DNA, 1228 bp, Arabidopsis thaliana; identical to SEQ ID NO: 27523
  misc_feature (1)..(1228): Ceres Seq. ID no. 12421727
  misc_feature (1)..(1228): Ortholog of  Ceres SEQ ID NO 12474685 as cited in SEQ ID NO 88
  misc_feature (1)..(1228): Ortholog of  Ceres SEQ ID NO 13638574 as cited in SEQ ID NO 51223
  misc_feature (1)..(1228): Ortholog of  Ceres SEQ ID NO 14311531 as cited in SEQ ID NO 51466
  misc_feature (1)..(1228): Ortholog of  Ceres SEQ ID NO 15170465 as cited in SEQ ID NO 52798
  misc_feature (1)..(1228): Ortholog of  Ceres SEQ ID NO 15177112 as cited in SEQ ID NO 55956
  misc_feature (1)..(1228): Ortholog of  Ceres SEQ ID NO 12610790 as cited in SEQ ID NO 56123
  misc_feature (1)..(1228): Ortholog of  Ceres SEQ ID NO 14315399 as cited in SEQ ID NO 57112
  misc_feature (1)..(1228): Ortholog of  Ceres SEQ ID NO 13655636 as cited in SEQ ID NO 63519
  misc_feature (1)..(1228): Ortholog of  Ceres SEQ ID NO 13655896 as cited in SEQ ID NO 64970

SEQ ID NO: 31114 - protein, 311 aa, Arabidopsis thaliana; identical to SEQ ID NO: 27524
  peptide (1)..(311): Ceres Seq. ID no. 12421728

SEQ ID NO: 31115 - protein, 286 aa, Arabidopsis thaliana; identical to SEQ ID NO: 27525
  peptide (1)..(286): Ceres Seq. ID no. 12421729

SEQ ID NO: 31116 - protein, 191 aa, Arabidopsis thaliana; identical to SEQ ID NO: 27526
  peptide (1)..(191): Ceres Seq. ID no. 12421730

SEQ ID NO: 31117 - DNA, 1342 bp, Arabidopsis thaliana; identical to SEQ ID NO: 27527
  misc_feature (1)..(1342): Ceres Seq. ID no. 13489686
  misc_feature (1)..(1342): Ortholog of  Ceres SEQ ID NO 15178317 as cited in SEQ ID NO 52489
  misc_feature (1)..(1342): Ortholog of  Ceres SEQ ID NO 14314415 as cited in SEQ ID NO 57442

SEQ ID NO: 31118 - protein, 270 aa, Arabidopsis thaliana; identical to SEQ ID NO: 27528
  peptide (1)..(270): Ceres Seq. ID no. 13489687

SEQ ID NO: 31119 - protein, 259 aa, Arabidopsis thaliana; identical to SEQ ID NO: 27529
  peptide (1)..(259): Ceres Seq. ID no. 13489688

SEQ ID NO: 31120 - protein, 147 aa, Arabidopsis thaliana; identical to SEQ ID NO: 27530
  peptide (1)..(147): Ceres Seq. ID no. 13489689

SEQ ID NO: 31121 - DNA, 1646 bp, Arabidopsis thaliana; identical to SEQ ID NO: 27531
  misc_feature (1)..(1646): Ceres Seq. ID no. 13488223
  misc_feature (1)..(1646): Ortholog of  Ceres SEQ ID NO 15174599 as cited in SEQ ID NO 53646
  misc_feature (1)..(1646): Ortholog of  Ceres SEQ ID NO 15174646 as cited in SEQ ID NO 54499

SEQ ID NO: 31122 - protein, 493 aa, Arabidopsis thaliana; identical to SEQ ID NO: 27532
  peptide (1)..(493): Ceres Seq. ID no. 13488224

SEQ ID NO: 31123 - protein, 489 aa, Arabidopsis thaliana; identical to SEQ ID NO: 27533
  peptide (1)..(489): Ceres Seq. ID no. 13488225

SEQ ID NO: 31124 - protein, 380 aa, Arabidopsis thaliana; identical to SEQ ID NO: 27534
  peptide (1)..(380): Ceres Seq. ID no. 13488226

SEQ ID NO: 31125 - DNA, 1263 bp, Arabidopsis thaliana; identical to SEQ ID NO: 27535
  misc_feature (1)..(1263): Ceres Seq. ID no. 13491651
  misc_feature (1)..(1263): Ortholog of  Ceres SEQ ID NO 15176333 as cited in SEQ ID NO 52787
  misc_feature (1)..(1263): Ortholog of  Ceres SEQ ID NO 15170403 as cited in SEQ ID NO 53457
  misc_feature (1)..(1263): Ortholog of  Ceres SEQ ID NO 14303479 as cited in SEQ ID NO 54254
  misc_feature (1)..(1263): Ortholog of  Ceres SEQ ID NO 14312047 as cited in SEQ ID NO 55656
  misc_feature (1)..(1263): Ortholog of  Ceres SEQ ID NO 13660872 as cited in SEQ ID NO 60830
  misc_feature (1)..(1263): Ortholog of  Ceres SEQ ID NO 12616221 as cited in SEQ ID NO 63291
  misc_feature (1)..(1263): Ortholog of  Ceres SEQ ID NO 14302355 as cited in SEQ ID NO 65830

SEQ ID NO: 31126 - protein, 312 aa, Arabidopsis thaliana; identical to SEQ ID NO: 27536
  peptide (1)..(312): Ceres Seq. ID no. 13491652

SEQ ID NO: 31127 - protein, 269 aa, Arabidopsis thaliana; identical to SEQ ID NO: 27537
  peptide (1)..(269): Ceres Seq. ID no. 13491653

SEQ ID NO: 31128 - protein, 215 aa, Arabidopsis thaliana; identical to SEQ ID NO: 27538
  peptide (1)..(215): Ceres Seq. ID no. 13491654

SEQ ID NO: 31129 - DNA, 1379 bp, Arabidopsis thaliana; identical to SEQ ID NO: 27539
  misc_feature (1)..(1379): Ceres Seq. ID no. 13489931
  misc_feature (1)..(1379): Ortholog of  Ceres SEQ ID NO 13598488 as cited in SEQ ID NO 63862
  misc_feature (1)..(1379): Ortholog of  Ceres SEQ ID NO 13659640 as cited in SEQ ID NO 67101

SEQ ID NO: 31130 - protein, 355 aa, Arabidopsis thaliana; identical to SEQ ID NO: 27540
  peptide (1)..(355): Ceres Seq. ID no. 13489932

SEQ ID NO: 31131 - protein, 216 aa, Arabidopsis thaliana; identical to SEQ ID NO: 27541
  peptide (1)..(216): Ceres Seq. ID no. 13489933

SEQ ID NO: 31132 - protein, 188 aa, Arabidopsis thaliana; identical to SEQ ID NO: 27542
  peptide (1)..(188): Ceres Seq. ID no. 13489934

SEQ ID NO: 31133 - DNA, 1145 bp, Arabidopsis thaliana; identical to SEQ ID NO: 27543
  misc_feature (1)..(1145): Ceres Seq. ID no. 12340318
  misc_feature (1)..(1145): Ortholog of  Ceres SEQ ID NO 12598859 as cited in SEQ ID NO 62872
  misc_feature (1)..(1145): Ortholog of  Ceres SEQ ID NO 12617350 as cited in SEQ ID NO 63777
  misc_feature (1)..(1145): Ortholog of  Ceres SEQ ID NO 13598749 as cited in SEQ ID NO 64341
  misc_feature (1)..(1145): Ortholog of  Ceres SEQ ID NO 15176153 as cited in SEQ ID NO 0
  misc_feature (1)..(1145): Ortholog of  Ceres SEQ ID NO 15179157 as cited in SEQ ID NO 0

SEQ ID NO: 31134 - protein, 314 aa, Arabidopsis thaliana; identical to SEQ ID NO: 27544
  peptide (1)..(314): Ceres Seq. ID no. 12340319

SEQ ID NO: 31135 - DNA, 1353 bp, Arabidopsis thaliana; identical to SEQ ID NO: 27545
  misc_feature (1)..(1353): Ceres Seq. ID no. 13622031
  misc_feature (1)..(1353): Ortholog of  Ceres SEQ ID NO 13596338 as cited in SEQ ID NO 68005

SEQ ID NO: 31136 - protein, 337 aa, Arabidopsis thaliana; identical to SEQ ID NO: 27546
  peptide (1)..(337): Ceres Seq. ID no. 13622032

SEQ ID NO: 31137 - protein, 255 aa, Arabidopsis thaliana; identical to SEQ ID NO: 27547
  peptide (1)..(255): Ceres Seq. ID no. 13622033

SEQ ID NO: 31138 - protein, 221 aa, Arabidopsis thaliana; identical to SEQ ID NO: 27548
  peptide (1)..(221): Ceres Seq. ID no. 13622034

SEQ ID NO: 31139 - DNA, 1573 bp, Arabidopsis thaliana; identical to SEQ ID NO: 27549
  misc_feature (1)..(1573): Ceres Seq. ID no. 13489743
  misc_feature (1)..(1573): Ortholog of  Ceres SEQ ID NO 15172426 as cited in SEQ ID NO 59156

SEQ ID NO: 31140 - protein, 358 aa, Arabidopsis thaliana; identical to SEQ ID NO: 27550
  peptide (1)..(358): Ceres Seq. ID no. 13489744

SEQ ID NO: 31141 - protein, 310 aa, Arabidopsis thaliana; identical to SEQ ID NO: 27551
  peptide (1)..(310): Ceres Seq. ID no. 13489745

SEQ ID NO: 31142 - protein, 277 aa, Arabidopsis thaliana; identical to SEQ ID NO: 27552
  peptide (1)..(277): Ceres Seq. ID no. 13489746

SEQ ID NO: 31143 - DNA, 1347 bp, Arabidopsis thaliana; identical to SEQ ID NO: 27553
  misc_feature (1)..(1347): Ceres Seq. ID no. 12357669
  misc_feature (1)..(1347): Ortholog of  Ceres SEQ ID NO 12364737 as cited in SEQ ID NO 51089
  misc_feature (1)..(1347): Ortholog of  Ceres SEQ ID NO 14311515 as cited in SEQ ID NO 51680
  misc_feature (1)..(1347): Ortholog of  Ceres SEQ ID NO 14306553 as cited in SEQ ID NO 53121
  misc_feature (1)..(1347): Ortholog of  Ceres SEQ ID NO 14315035 as cited in SEQ ID NO 56880
  misc_feature (1)..(1347): Ortholog of  Ceres SEQ ID NO 13594276 as cited in SEQ ID NO 57728
  misc_feature (1)..(1347): Ortholog of  Ceres SEQ ID NO 13594147 as cited in SEQ ID NO 58975
  misc_feature (1)..(1347): Ortholog of  Ceres SEQ ID NO 13655302 as cited in SEQ ID NO 63307
  misc_feature (1)..(1347): Ortholog of  Ceres SEQ ID NO 13597380 as cited in SEQ ID NO 64054
  misc_feature (1)..(1347): Ortholog of  Ceres SEQ ID NO 12625474 as cited in SEQ ID NO 64169
  misc_feature (1)..(1347): Ortholog of  Ceres SEQ ID NO 13597502 as cited in SEQ ID NO 64681

SEQ ID NO: 31144 - protein, 364 aa, Arabidopsis thaliana; identical to SEQ ID NO: 27554
  peptide (1)..(364): Ceres Seq. ID no. 12357670

SEQ ID NO: 31145 - protein, 199 aa, Arabidopsis thaliana; identical to SEQ ID NO: 27555
  peptide (1)..(199): Ceres Seq. ID no. 12357671

SEQ ID NO: 31146 - protein, 188 aa, Arabidopsis thaliana; identical to SEQ ID NO: 27556
  peptide (1)..(188): Ceres Seq. ID no. 12357672

SEQ ID NO: 31147 - DNA, 1208 bp, Arabidopsis thaliana; identical to SEQ ID NO: 27557
  misc_feature (1)..(1208): Ceres Seq. ID no. 12348436
  misc_feature (1)..(1208): Ortholog of  Ceres SEQ ID NO 13659643 as cited in SEQ ID NO 67106

SEQ ID NO: 31148 - protein, 172 aa, Arabidopsis thaliana; identical to SEQ ID NO: 27558
  peptide (1)..(172): Ceres Seq. ID no. 12348437

SEQ ID NO: 31149 - protein, 162 aa, Arabidopsis thaliana; identical to SEQ ID NO: 27559
  peptide (1)..(162): Ceres Seq. ID no. 12348438

SEQ ID NO: 31150 - protein, 144 aa, Arabidopsis thaliana; identical to SEQ ID NO: 27560
  peptide (1)..(144): Ceres Seq. ID no. 12348439

SEQ ID NO: 31151 - DNA, 1518 bp, Arabidopsis thaliana; identical to SEQ ID NO: 27561
  misc_feature (1)..(1518): Ceres Seq. ID no. 12466440
  misc_feature (1)..(1518): Ortholog of  Ceres SEQ ID NO 15179609 as cited in SEQ ID NO 0

SEQ ID NO: 31152 - protein, 373 aa, Arabidopsis thaliana; identical to SEQ ID NO: 27562
  peptide (1)..(373): Ceres Seq. ID no. 12466441

SEQ ID NO: 31153 - protein, 365 aa, Arabidopsis thaliana; identical to SEQ ID NO: 27563
  peptide (1)..(365): Ceres Seq. ID no. 12466442

SEQ ID NO: 31154 - protein, 301 aa, Arabidopsis thaliana; identical to SEQ ID NO: 27564
  peptide (1)..(301): Ceres Seq. ID no. 12466443

SEQ ID NO: 31155 - DNA, 1234 bp, Arabidopsis thaliana; identical to SEQ ID NO: 27565
  misc_feature (1)..(1234): Ceres Seq. ID no. 12581463
  misc_feature (1)..(1234): Ortholog of  Ceres SEQ ID NO 13593831 as cited in SEQ ID NO 53828

SEQ ID NO: 31156 - protein, 286 aa, Arabidopsis thaliana; identical to SEQ ID NO: 27566
  peptide (1)..(286): Ceres Seq. ID no. 12581464

SEQ ID NO: 31157 - protein, 214 aa, Arabidopsis thaliana; identical to SEQ ID NO: 27567
  peptide (1)..(214): Ceres Seq. ID no. 12581465

SEQ ID NO: 31158 - protein, 206 aa, Arabidopsis thaliana; identical to SEQ ID NO: 27568
  peptide (1)..(206): Ceres Seq. ID no. 12581466

SEQ ID NO: 31159 - DNA, 1061 bp, Arabidopsis thaliana; identical to SEQ ID NO: 27569
  misc_feature (1)..(1061): Ceres Seq. ID no. 13489980
  misc_feature (1)..(1061): Ortholog of  Ceres SEQ ID NO 14305022 as cited in SEQ ID NO 53586
  misc_feature (1)..(1061): Ortholog of  Ceres SEQ ID NO 12506279 as cited in SEQ ID NO 55440
  misc_feature (1)..(1061): Ortholog of  Ceres SEQ ID NO 13654847 as cited in SEQ ID NO 62459
  misc_feature (1)..(1061): Ortholog of  Ceres SEQ ID NO 15174357 as cited in SEQ ID NO 0

SEQ ID NO: 31160 - protein, 252 aa, Arabidopsis thaliana; identical to SEQ ID NO: 27570
  peptide (1)..(252): Ceres Seq. ID no. 13489981

SEQ ID NO: 31161 - DNA, 1952 bp, Arabidopsis thaliana; identical to SEQ ID NO: 27571
  misc_feature (1)..(1952): Ceres Seq. ID no. 12370661
  misc_feature (1)..(1952): Ortholog of  Ceres SEQ ID NO 13594037 as cited in SEQ ID NO 55666
  misc_feature (1)..(1952): Ortholog of  Ceres SEQ ID NO 13657707 as cited in SEQ ID NO 66407

SEQ ID NO: 31162 - protein, 571 aa, Arabidopsis thaliana; identical to SEQ ID NO: 27572
  peptide (1)..(571): Ceres Seq. ID no. 12370662

SEQ ID NO: 31163 - protein, 547 aa, Arabidopsis thaliana; identical to SEQ ID NO: 27573
  peptide (1)..(547): Ceres Seq. ID no. 12370663

SEQ ID NO: 31164 - protein, 499 aa, Arabidopsis thaliana; identical to SEQ ID NO: 27574
  peptide (1)..(499): Ceres Seq. ID no. 12370664

SEQ ID NO: 31165 - DNA, 1420 bp, Arabidopsis thaliana; identical to SEQ ID NO: 27575
  misc_feature (1)..(1420): Ceres Seq. ID no. 12331583
  misc_feature (1)..(1420): Ortholog of  Ceres SEQ ID NO 13596433 as cited in SEQ ID NO 68721
  misc_feature (1)..(1420): Ortholog of  Ceres SEQ ID NO 13599169 as cited in SEQ ID NO 0

SEQ ID NO: 31166 - protein, 342 aa, Arabidopsis thaliana; identical to SEQ ID NO: 27576
  peptide (1)..(342): Ceres Seq. ID no. 12331584

SEQ ID NO: 31167 - protein, 313 aa, Arabidopsis thaliana; identical to SEQ ID NO: 27577
  peptide (1)..(313): Ceres Seq. ID no. 12331585

SEQ ID NO: 31168 - protein, 293 aa, Arabidopsis thaliana; identical to SEQ ID NO: 27578
  peptide (1)..(293): Ceres Seq. ID no. 12331586

SEQ ID NO: 31169 - DNA, 1089 bp, Arabidopsis thaliana; identical to SEQ ID NO: 27579
  misc_feature (1)..(1089): Ceres Seq. ID no. 13488415
  misc_feature (1)..(1089): Ortholog of  Ceres SEQ ID NO 15173851 as cited in SEQ ID NO 57413

SEQ ID NO: 31170 - protein, 250 aa, Arabidopsis thaliana; identical to SEQ ID NO: 27580
  peptide (1)..(250): Ceres Seq. ID no. 13488416

SEQ ID NO: 31171 - protein, 134 aa, Arabidopsis thaliana; identical to SEQ ID NO: 27581
  peptide (1)..(134): Ceres Seq. ID no. 13488417

SEQ ID NO: 31172 - DNA, 825 bp, Arabidopsis thaliana; identical to SEQ ID NO: 27582
  misc_feature (1)..(825): Ceres Seq. ID no. 12384990
  misc_feature (1)..(825): Ortholog of  Ceres SEQ ID NO 14306062 as cited in SEQ ID NO 57524

SEQ ID NO: 31173 - protein, 180 aa, Arabidopsis thaliana; identical to SEQ ID NO: 27583
  peptide (1)..(180): Ceres Seq. ID no. 12384991

SEQ ID NO: 31174 - protein, 159 aa, Arabidopsis thaliana; identical to SEQ ID NO: 27584
  peptide (1)..(159): Ceres Seq. ID no. 12384992

SEQ ID NO: 31175 - protein, 155 aa, Arabidopsis thaliana; identical to SEQ ID NO: 27585
  peptide (1)..(155): Ceres Seq. ID no. 12384993

SEQ ID NO: 31176 - DNA, 1145 bp, Arabidopsis thaliana; identical to SEQ ID NO: 27586
  misc_feature (1)..(1145): Ceres Seq. ID no. 12394991
  misc_feature (1)..(1145): Ortholog of  Ceres SEQ ID NO 14315662 as cited in SEQ ID NO 53109
  misc_feature (1)..(1145): Ortholog of  Ceres SEQ ID NO 12620168 as cited in SEQ ID NO 66161

SEQ ID NO: 31177 - protein, 211 aa, Arabidopsis thaliana; identical to SEQ ID NO: 27587
  peptide (1)..(211): Ceres Seq. ID no. 12394992

SEQ ID NO: 31178 - protein, 124 aa, Arabidopsis thaliana; identical to SEQ ID NO: 27588
  peptide (1)..(124): Ceres Seq. ID no. 12394993

SEQ ID NO: 31179 - DNA, 1518 bp, Arabidopsis thaliana; identical to SEQ ID NO: 27589
  misc_feature (1)..(1518): Ceres Seq. ID no. 12333361
  misc_feature (1)..(1518): Ortholog of  Ceres SEQ ID NO 15177368 as cited in SEQ ID NO 57336

SEQ ID NO: 31180 - protein, 380 aa, Arabidopsis thaliana; identical to SEQ ID NO: 27590
  peptide (1)..(380): Ceres Seq. ID no. 12333362

SEQ ID NO: 31181 - protein, 318 aa, Arabidopsis thaliana; identical to SEQ ID NO: 27591
  peptide (1)..(318): Ceres Seq. ID no. 12333363

SEQ ID NO: 31182 - DNA, 1506 bp, Arabidopsis thaliana; identical to SEQ ID NO: 27592
  misc_feature (1)..(1506): Ceres Seq. ID no. 12331587
  misc_feature (1)..(1506): Ortholog of  Ceres SEQ ID NO 13655434 as cited in SEQ ID NO 64337

SEQ ID NO: 31183 - protein, 448 aa, Arabidopsis thaliana; identical to SEQ ID NO: 27593
  peptide (1)..(448): Ceres Seq. ID no. 12331588

SEQ ID NO: 31184 - protein, 399 aa, Arabidopsis thaliana; identical to SEQ ID NO: 27594
  peptide (1)..(399): Ceres Seq. ID no. 12331589

SEQ ID NO: 31185 - protein, 330 aa, Arabidopsis thaliana; identical to SEQ ID NO: 27595
  peptide (1)..(330): Ceres Seq. ID no. 12331590

SEQ ID NO: 31186 - DNA, 1179 bp, Arabidopsis thaliana; identical to SEQ ID NO: 27596
  misc_feature (1)..(1179): Ceres Seq. ID no. 12394969
  misc_feature (1)..(1179): Ortholog of  Ceres SEQ ID NO 13596474 as cited in SEQ ID NO 62169
  misc_feature (1)..(1179): Ortholog of  Ceres SEQ ID NO 13598714 as cited in SEQ ID NO 62656
  misc_feature (1)..(1179): Ortholog of  Ceres SEQ ID NO 13596969 as cited in SEQ ID NO 63375
  misc_feature (1)..(1179): Ortholog of  Ceres SEQ ID NO 13597519 as cited in SEQ ID NO 64759
  misc_feature (1)..(1179): Ortholog of  Ceres SEQ ID NO 15170183 as cited in SEQ ID NO 65667
  misc_feature (1)..(1179): Ortholog of  Ceres SEQ ID NO 13596362 as cited in SEQ ID NO 67877
  misc_feature (1)..(1179): Ortholog of  Ceres SEQ ID NO 13587054 as cited in SEQ ID NO 0

SEQ ID NO: 31187 - protein, 362 aa, Arabidopsis thaliana; identical to SEQ ID NO: 27597
  peptide (1)..(362): Ceres Seq. ID no. 12394970

SEQ ID NO: 31188 - protein, 348 aa, Arabidopsis thaliana; identical to SEQ ID NO: 27598
  peptide (1)..(348): Ceres Seq. ID no. 12394971

SEQ ID NO: 31189 - protein, 339 aa, Arabidopsis thaliana; identical to SEQ ID NO: 27599
  peptide (1)..(339): Ceres Seq. ID no. 12394972

SEQ ID NO: 31190 - DNA, 1167 bp, Arabidopsis thaliana; identical to SEQ ID NO: 27600
  misc_feature (1)..(1167): Ceres Seq. ID no. 12327065
  misc_feature (1)..(1167): Ortholog of  Ceres SEQ ID NO 15170881 as cited in SEQ ID NO 54654

SEQ ID NO: 31191 - protein, 313 aa, Arabidopsis thaliana; identical to SEQ ID NO: 27601
  peptide (1)..(313): Ceres Seq. ID no. 12327066

SEQ ID NO: 31192 - protein, 197 aa, Arabidopsis thaliana; identical to SEQ ID NO: 27602
  peptide (1)..(197): Ceres Seq. ID no. 12327067

SEQ ID NO: 31193 - DNA, 1584 bp, Arabidopsis thaliana; identical to SEQ ID NO: 27603
  misc_feature (1)..(1584): Ceres Seq. ID no. 12704699
  misc_feature (1)..(1584): Ortholog of  Ceres SEQ ID NO 15171430 as cited in SEQ ID NO 51500
  misc_feature (1)..(1584): Ortholog of  Ceres SEQ ID NO 15172476 as cited in SEQ ID NO 54945
  misc_feature (1)..(1584): Ortholog of  Ceres SEQ ID NO 15176106 as cited in SEQ ID NO 60324
  misc_feature (1)..(1584): Ortholog of  Ceres SEQ ID NO 13654989 as cited in SEQ ID NO 63117
  misc_feature (1)..(1584): Ortholog of  Ceres SEQ ID NO 13584744 as cited in SEQ ID NO 69137

SEQ ID NO: 31194 - protein, 415 aa, Arabidopsis thaliana; identical to SEQ ID NO: 27604
  peptide (1)..(415): Ceres Seq. ID no. 12704700

SEQ ID NO: 31195 - protein, 392 aa, Arabidopsis thaliana; identical to SEQ ID NO: 27605
  peptide (1)..(392): Ceres Seq. ID no. 12704701

SEQ ID NO: 31196 - protein, 258 aa, Arabidopsis thaliana; identical to SEQ ID NO: 27606
  peptide (1)..(258): Ceres Seq. ID no. 12704702

SEQ ID NO: 31197 - DNA, 1205 bp, Arabidopsis thaliana; identical to SEQ ID NO: 27607
  misc_feature (1)..(1205): Ceres Seq. ID no. 12332476
  misc_feature (1)..(1205): Ortholog of  Ceres SEQ ID NO 14311596 as cited in SEQ ID NO 51728
  misc_feature (1)..(1205): Ortholog of  Ceres SEQ ID NO 15177031 as cited in SEQ ID NO 60171
  misc_feature (1)..(1205): Ortholog of  Ceres SEQ ID NO 12617197 as cited in SEQ ID NO 63406
  misc_feature (1)..(1205): Ortholog of  Ceres SEQ ID NO 13597804 as cited in SEQ ID NO 64182
  misc_feature (1)..(1205): Ortholog of  Ceres SEQ ID NO 15179788 as cited in SEQ ID NO 64818
  misc_feature (1)..(1205): Ortholog of  Ceres SEQ ID NO 14302768 as cited in SEQ ID NO 64889
  misc_feature (1)..(1205): Ortholog of  Ceres SEQ ID NO 13598565 as cited in SEQ ID NO 65250
  misc_feature (1)..(1205): Ortholog of  Ceres SEQ ID NO 13598597 as cited in SEQ ID NO 65496
  misc_feature (1)..(1205): Ortholog of  Ceres SEQ ID NO 13596284 as cited in SEQ ID NO 68273
  misc_feature (1)..(1205): Ortholog of  Ceres SEQ ID NO 15178902 as cited in SEQ ID NO 0

SEQ ID NO: 31198 - protein, 326 aa, Arabidopsis thaliana; identical to SEQ ID NO: 27608
  peptide (1)..(326): Ceres Seq. ID no. 12332477

SEQ ID NO: 31199 - protein, 196 aa, Arabidopsis thaliana; identical to SEQ ID NO: 27609
  peptide (1)..(196): Ceres Seq. ID no. 12332478

SEQ ID NO: 31200 - protein, 164 aa, Arabidopsis thaliana; identical to SEQ ID NO: 27610
  peptide (1)..(164): Ceres Seq. ID no. 12332479

SEQ ID NO: 31201 - DNA, 1391 bp, Arabidopsis thaliana; identical to SEQ ID NO: 27611
  misc_feature (1)..(1391): Ceres Seq. ID no. 12335464
  misc_feature (1)..(1391): Ortholog of  Ceres SEQ ID NO 15171355 as cited in SEQ ID NO 51485

SEQ ID NO: 31202 - protein, 316 aa, Arabidopsis thaliana; identical to SEQ ID NO: 27612
  peptide (1)..(316): Ceres Seq. ID no. 12335465

SEQ ID NO: 31203 - protein, 242 aa, Arabidopsis thaliana; identical to SEQ ID NO: 27613
  peptide (1)..(242): Ceres Seq. ID no. 12335466

SEQ ID NO: 31204 - DNA, 1310 bp, Arabidopsis thaliana; identical to SEQ ID NO: 27614
  misc_feature (1)..(1310): Ceres Seq. ID no. 12335884
  misc_feature (1)..(1310): Ortholog of  Ceres SEQ ID NO 14302021 as cited in SEQ ID NO 68979
  misc_feature (1)..(1310): Ortholog of  Ceres SEQ ID NO 14309296 as cited in SEQ ID NO 0

SEQ ID NO: 31205 - protein, 310 aa, Arabidopsis thaliana; identical to SEQ ID NO: 27615
  peptide (1)..(310): Ceres Seq. ID no. 12335885

SEQ ID NO: 31206 - protein, 176 aa, Arabidopsis thaliana; identical to SEQ ID NO: 27616
  peptide (1)..(176): Ceres Seq. ID no. 12335886

SEQ ID NO: 31207 - DNA, 1070 bp, Arabidopsis thaliana; identical to SEQ ID NO: 27617
  misc_feature (1)..(1070): Ceres Seq. ID no. 4905418
  misc_feature (1)..(1070): Ortholog of  Ceres SEQ ID NO 13599448 as cited in SEQ ID NO 521
  misc_feature (1)..(1070): Ortholog of  Ceres SEQ ID NO 14311918 as cited in SEQ ID NO 51684
  misc_feature (1)..(1070): Ortholog of  Ceres SEQ ID NO 13596408 as cited in SEQ ID NO 62028

SEQ ID NO: 31208 - protein, 215 aa, Arabidopsis thaliana; identical to SEQ ID NO: 27618
  peptide (1)..(215): Ceres Seq. ID no. 4905419

SEQ ID NO: 31209 - protein, 175 aa, Arabidopsis thaliana; identical to SEQ ID NO: 27619
  peptide (1)..(175): Ceres Seq. ID no. 4905420

SEQ ID NO: 31210 - DNA, 1167 bp, Arabidopsis thaliana; identical to SEQ ID NO: 27620
  misc_feature (1)..(1167): Ceres Seq. ID no. 13497461
  misc_feature (1)..(1167): Ortholog of  Ceres SEQ ID NO 14302761 as cited in SEQ ID NO 65542

SEQ ID NO: 31211 - protein, 288 aa, Arabidopsis thaliana; identical to SEQ ID NO: 27621
  peptide (1)..(288): Ceres Seq. ID no. 13497462

SEQ ID NO: 31212 - DNA, 1588 bp, Arabidopsis thaliana; identical to SEQ ID NO: 27622
  misc_feature (1)..(1588): Ceres Seq. ID no. 12335467
  misc_feature (1)..(1588): Ortholog of  Ceres SEQ ID NO 14314536 as cited in SEQ ID NO 52436

SEQ ID NO: 31213 - protein, 426 aa, Arabidopsis thaliana; identical to SEQ ID NO: 27623
  peptide (1)..(426): Ceres Seq. ID no. 12335468

SEQ ID NO: 31214 - protein, 424 aa, Arabidopsis thaliana; identical to SEQ ID NO: 27624
  peptide (1)..(424): Ceres Seq. ID no. 12335469

SEQ ID NO: 31215 - protein, 315 aa, Arabidopsis thaliana; identical to SEQ ID NO: 27625
  peptide (1)..(315): Ceres Seq. ID no. 12335470

SEQ ID NO: 31216 - DNA, 1086 bp, Arabidopsis thaliana; identical to SEQ ID NO: 27626
  misc_feature (1)..(1086): Ceres Seq. ID no. 12335862
  misc_feature (1)..(1086): Ortholog of  Ceres SEQ ID NO 13582073 as cited in SEQ ID NO 56218

SEQ ID NO: 31217 - protein, 188 aa, Arabidopsis thaliana; identical to SEQ ID NO: 27627
  peptide (1)..(188): Ceres Seq. ID no. 12335863

SEQ ID NO: 31218 - DNA, 1579 bp, Arabidopsis thaliana; identical to SEQ ID NO: 27628
  misc_feature (1)..(1579): Ceres Seq. ID no. 12335129
  misc_feature (1)..(1579): Ortholog of  Ceres SEQ ID NO 13597574 as cited in SEQ ID NO 64677
  misc_feature (1)..(1579): Ortholog of  Ceres SEQ ID NO 13597843 as cited in SEQ ID NO 64850
  misc_feature (1)..(1579): Ortholog of  Ceres SEQ ID NO 13597678 as cited in SEQ ID NO 65375
  misc_feature (1)..(1579): Ortholog of  Ceres SEQ ID NO 13596180 as cited in SEQ ID NO 67941
  misc_feature (1)..(1579): Ortholog of  Ceres SEQ ID NO 13591190 as cited in SEQ ID NO 68044
  misc_feature (1)..(1579): Ortholog of  Ceres SEQ ID NO 13595961 as cited in SEQ ID NO 68223

SEQ ID NO: 31219 - protein, 486 aa, Arabidopsis thaliana; identical to SEQ ID NO: 27629
  peptide (1)..(486): Ceres Seq. ID no. 12335130

SEQ ID NO: 31220 - protein, 480 aa, Arabidopsis thaliana; identical to SEQ ID NO: 27630
  peptide (1)..(480): Ceres Seq. ID no. 12335131

SEQ ID NO: 31221 - protein, 445 aa, Arabidopsis thaliana; identical to SEQ ID NO: 27631
  peptide (1)..(445): Ceres Seq. ID no. 12335132

SEQ ID NO: 31222 - DNA, 1310 bp, Arabidopsis thaliana; identical to SEQ ID NO: 27632
  misc_feature (1)..(1310): Ceres Seq. ID no. 12332629
  misc_feature (1)..(1310): Ortholog of  Ceres SEQ ID NO 13638292 as cited in SEQ ID NO 57738

SEQ ID NO: 31223 - protein, 350 aa, Arabidopsis thaliana; identical to SEQ ID NO: 27633
  peptide (1)..(350): Ceres Seq. ID no. 12332630

SEQ ID NO: 31224 - protein, 278 aa, Arabidopsis thaliana; identical to SEQ ID NO: 27634
  peptide (1)..(278): Ceres Seq. ID no. 12332631

SEQ ID NO: 31225 - protein, 241 aa, Arabidopsis thaliana; identical to SEQ ID NO: 27635
  peptide (1)..(241): Ceres Seq. ID no. 12332632

SEQ ID NO: 31226 - DNA, 1210 bp, Arabidopsis thaliana; identical to SEQ ID NO: 27636
  misc_feature (1)..(1210): Ceres Seq. ID no. 12482774
  misc_feature (1)..(1210): Ortholog of  Ceres SEQ ID NO 12619999 as cited in SEQ ID NO 66123
  misc_feature (1)..(1210): Ortholog of  Ceres SEQ ID NO 13656436 as cited in SEQ ID NO 69154

SEQ ID NO: 31227 - protein, 221 aa, Arabidopsis thaliana; identical to SEQ ID NO: 27637
  peptide (1)..(221): Ceres Seq. ID no. 12482775

SEQ ID NO: 31228 - protein, 166 aa, Arabidopsis thaliana; identical to SEQ ID NO: 27638
  peptide (1)..(166): Ceres Seq. ID no. 12482776

SEQ ID NO: 31229 - DNA, 1264 bp, Arabidopsis thaliana; identical to SEQ ID NO: 27639
  misc_feature (1)..(1264): Ceres Seq. ID no. 13487494
  misc_feature (1)..(1264): Ortholog of  Ceres SEQ ID NO 15178228 as cited in SEQ ID NO 58330
  misc_feature (1)..(1264): Ortholog of  Ceres SEQ ID NO 13596635 as cited in SEQ ID NO 62488

SEQ ID NO: 31230 - protein, 342 aa, Arabidopsis thaliana; identical to SEQ ID NO: 27640
  peptide (1)..(342): Ceres Seq. ID no. 13487495

SEQ ID NO: 31231 - protein, 336 aa, Arabidopsis thaliana; identical to SEQ ID NO: 27641
  peptide (1)..(336): Ceres Seq. ID no. 13487496

SEQ ID NO: 31232 - protein, 319 aa, Arabidopsis thaliana; identical to SEQ ID NO: 27642
  peptide (1)..(319): Ceres Seq. ID no. 13487497

SEQ ID NO: 31233 - DNA, 926 bp, Arabidopsis thaliana; identical to SEQ ID NO: 27643
  misc_feature (1)..(926): Ceres Seq. ID no. 12338033
  misc_feature (1)..(926): Ortholog of  Ceres SEQ ID NO 14311392 as cited in SEQ ID NO 58307
  misc_feature (1)..(926): Ortholog of  Ceres SEQ ID NO 13599348 as cited in SEQ ID NO 0

SEQ ID NO: 31234 - protein, 132 aa, Arabidopsis thaliana; identical to SEQ ID NO: 27644
  peptide (1)..(132): Ceres Seq. ID no. 12338034

SEQ ID NO: 31235 - protein, 110 aa, Arabidopsis thaliana; identical to SEQ ID NO: 27645
  peptide (1)..(110): Ceres Seq. ID no. 12338035

SEQ ID NO: 31236 - protein, 109 aa, Arabidopsis thaliana; identical to SEQ ID NO: 27646
  peptide (1)..(109): Ceres Seq. ID no. 12338036

SEQ ID NO: 31237 - DNA, 1318 bp, Arabidopsis thaliana; identical to SEQ ID NO: 27647
  misc_feature (1)..(1318): Ceres Seq. ID no. 13490280
  misc_feature (1)..(1318): Ortholog of  Ceres SEQ ID NO 13658911 as cited in SEQ ID NO 66294
  misc_feature (1)..(1318): Ortholog of  Ceres SEQ ID NO 13660693 as cited in SEQ ID NO 67411

SEQ ID NO: 31238 - protein, 384 aa, Arabidopsis thaliana; identical to SEQ ID NO: 27648
  peptide (1)..(384): Ceres Seq. ID no. 13490281

SEQ ID NO: 31239 - protein, 383 aa, Arabidopsis thaliana; identical to SEQ ID NO: 27649
  peptide (1)..(383): Ceres Seq. ID no. 13490282

SEQ ID NO: 31240 - protein, 352 aa, Arabidopsis thaliana; identical to SEQ ID NO: 27650
  peptide (1)..(352): Ceres Seq. ID no. 13490283

SEQ ID NO: 31241 - DNA, 835 bp, Arabidopsis thaliana; identical to SEQ ID NO: 27651
  misc_feature (1)..(835): Ceres Seq. ID no. 12421619
  misc_feature (1)..(835): Ortholog of  Ceres SEQ ID NO 12578315 as cited in SEQ ID NO 62451
  misc_feature (1)..(835): Ortholog of  Ceres SEQ ID NO 13584577 as cited in SEQ ID NO 65298

SEQ ID NO: 31242 - protein, 181 aa, Arabidopsis thaliana; identical to SEQ ID NO: 27652
  peptide (1)..(181): Ceres Seq. ID no. 12421620

SEQ ID NO: 31243 - protein, 176 aa, Arabidopsis thaliana; identical to SEQ ID NO: 27653
  peptide (1)..(176): Ceres Seq. ID no. 12421621

SEQ ID NO: 31244 - protein, 138 aa, Arabidopsis thaliana; identical to SEQ ID NO: 27654
  peptide (1)..(138): Ceres Seq. ID no. 12421622

SEQ ID NO: 31245 - DNA, 1510 bp, Arabidopsis thaliana; identical to SEQ ID NO: 27655
  misc_feature (1)..(1510): Ceres Seq. ID no. 12370594
  misc_feature (1)..(1510): Ortholog of  Ceres SEQ ID NO 13581327 as cited in SEQ ID NO 51165
  misc_feature (1)..(1510): Ortholog of  Ceres SEQ ID NO 12610002 as cited in SEQ ID NO 55823
  misc_feature (1)..(1510): Ortholog of  Ceres SEQ ID NO 14308310 as cited in SEQ ID NO 58573
  misc_feature (1)..(1510): Ortholog of  Ceres SEQ ID NO 14308795 as cited in SEQ ID NO 59140
  misc_feature (1)..(1510): Ortholog of  Ceres SEQ ID NO 14313354 as cited in SEQ ID NO 61520
  misc_feature (1)..(1510): Ortholog of  Ceres SEQ ID NO 13596744 as cited in SEQ ID NO 62765

SEQ ID NO: 31246 - protein, 349 aa, Arabidopsis thaliana; identical to SEQ ID NO: 27656
  peptide (1)..(349): Ceres Seq. ID no. 12370595

SEQ ID NO: 31247 - protein, 263 aa, Arabidopsis thaliana; identical to SEQ ID NO: 27657
  peptide (1)..(263): Ceres Seq. ID no. 12370596

SEQ ID NO: 31248 - protein, 204 aa, Arabidopsis thaliana; identical to SEQ ID NO: 27658
  peptide (1)..(204): Ceres Seq. ID no. 12370597

SEQ ID NO: 31249 - DNA, 1219 bp, Arabidopsis thaliana; identical to SEQ ID NO: 27659
  misc_feature (1)..(1219): Ceres Seq. ID no. 12562073
  misc_feature (1)..(1219): Ortholog of  Ceres SEQ ID NO 13656155 as cited in SEQ ID NO 64609

SEQ ID NO: 31250 - protein, 330 aa, Arabidopsis thaliana; identical to SEQ ID NO: 27660
  peptide (1)..(330): Ceres Seq. ID no. 12562074

SEQ ID NO: 31251 - protein, 292 aa, Arabidopsis thaliana; identical to SEQ ID NO: 27661
  peptide (1)..(292): Ceres Seq. ID no. 12562075

SEQ ID NO: 31252 - DNA, 1302 bp, Arabidopsis thaliana; identical to SEQ ID NO: 27662
  misc_feature (1)..(1302): Ceres Seq. ID no. 12333724
  misc_feature (1)..(1302): Ortholog of  Ceres SEQ ID NO 15170595 as cited in SEQ ID NO 57510
  misc_feature (1)..(1302): Ortholog of  Ceres SEQ ID NO 13655218 as cited in SEQ ID NO 68872

SEQ ID NO: 31253 - protein, 326 aa, Arabidopsis thaliana; identical to SEQ ID NO: 27663
  peptide (1)..(326): Ceres Seq. ID no. 12333725

SEQ ID NO: 31254 - protein, 267 aa, Arabidopsis thaliana; identical to SEQ ID NO: 27664
  peptide (1)..(267): Ceres Seq. ID no. 12333726

SEQ ID NO: 31255 - DNA, 827 bp, Arabidopsis thaliana; identical to SEQ ID NO: 27665
  misc_feature (1)..(827): Ceres Seq. ID no. 12370590
  misc_feature (1)..(827): Ortholog of  Ceres SEQ ID NO 13657610 as cited in SEQ ID NO 66165
  misc_feature (1)..(827): Ortholog of  Ceres SEQ ID NO 13598312 as cited in SEQ ID NO 68448
  misc_feature (1)..(827): Ortholog of  Ceres SEQ ID NO 13596100 as cited in SEQ ID NO 68573

SEQ ID NO: 31256 - protein, 225 aa, Arabidopsis thaliana; identical to SEQ ID NO: 27666
  peptide (1)..(225): Ceres Seq. ID no. 12370591

SEQ ID NO: 31257 - protein, 160 aa, Arabidopsis thaliana; identical to SEQ ID NO: 27667
  peptide (1)..(160): Ceres Seq. ID no. 12370592

SEQ ID NO: 31258 - protein, 131 aa, Arabidopsis thaliana; identical to SEQ ID NO: 27668
  peptide (1)..(131): Ceres Seq. ID no. 12370593

SEQ ID NO: 31259 - DNA, 1117 bp, Arabidopsis thaliana; identical to SEQ ID NO: 27669
  misc_feature (1)..(1117): Ceres Seq. ID no. 12357628
  misc_feature (1)..(1117): Ortholog of  Ceres SEQ ID NO 12608889 as cited in SEQ ID NO 50891

SEQ ID NO: 31260 - protein, 260 aa, Arabidopsis thaliana; identical to SEQ ID NO: 27670
  peptide (1)..(260): Ceres Seq. ID no. 12357629

SEQ ID NO: 31261 - protein, 182 aa, Arabidopsis thaliana; identical to SEQ ID NO: 27671
  peptide (1)..(182): Ceres Seq. ID no. 12357630

SEQ ID NO: 31262 - protein, 142 aa, Arabidopsis thaliana; identical to SEQ ID NO: 27672
  peptide (1)..(142): Ceres Seq. ID no. 12357631

SEQ ID NO: 31263 - DNA, 1272 bp, Arabidopsis thaliana; identical to SEQ ID NO: 27673
  misc_feature (1)..(1272): Ceres Seq. ID no. 12324965
  misc_feature (1)..(1272): Ortholog of  Ceres SEQ ID NO 13597416 as cited in SEQ ID NO 60674

SEQ ID NO: 31264 - protein, 270 aa, Arabidopsis thaliana; identical to SEQ ID NO: 27674
  peptide (1)..(270): Ceres Seq. ID no. 12324966

SEQ ID NO: 31265 - protein, 236 aa, Arabidopsis thaliana; identical to SEQ ID NO: 27675
  peptide (1)..(236): Ceres Seq. ID no. 12324967

SEQ ID NO: 31266 - protein, 166 aa, Arabidopsis thaliana; identical to SEQ ID NO: 27676
  peptide (1)..(166): Ceres Seq. ID no. 12324968

SEQ ID NO: 31267 - DNA, 742 bp, Arabidopsis thaliana; identical to SEQ ID NO: 27677
  misc_feature (1)..(742): Ceres Seq. ID no. 13621920
  misc_feature (1)..(742): Ortholog of  Ceres SEQ ID NO 15174297 as cited in SEQ ID NO 0

SEQ ID NO: 31268 - protein, 149 aa, Arabidopsis thaliana; identical to SEQ ID NO: 27678
  peptide (1)..(149): Ceres Seq. ID no. 13621921

SEQ ID NO: 31269 - protein, 113 aa, Arabidopsis thaliana; identical to SEQ ID NO: 27679
  peptide (1)..(113): Ceres Seq. ID no. 13621922

SEQ ID NO: 31270 - protein, 98 aa, Arabidopsis thaliana; identical to SEQ ID NO: 27680
  peptide (1)..(98): Ceres Seq. ID no. 13621923

SEQ ID NO: 31271 - DNA, 514 bp, Arabidopsis thaliana; identical to SEQ ID NO: 27681
  misc_feature (1)..(514): Ceres Seq. ID no. 12335955
  misc_feature (1)..(514): Ortholog of  Ceres SEQ ID NO 12476115 as cited in SEQ ID NO 107

SEQ ID NO: 31272 - protein, 77 aa, Arabidopsis thaliana; identical to SEQ ID NO: 27682
  peptide (1)..(77): Ceres Seq. ID no. 12335956

SEQ ID NO: 31273 - protein, 73 aa, Arabidopsis thaliana; identical to SEQ ID NO: 27683
  peptide (1)..(73): Ceres Seq. ID no. 12335957

SEQ ID NO: 31274 - protein, 64 aa, Arabidopsis thaliana; identical to SEQ ID NO: 27684
  peptide (1)..(64): Ceres Seq. ID no. 12335958

SEQ ID NO: 31275 - protein, 55 aa, Arabidopsis thaliana; identical to SEQ ID NO: 27685
  peptide (1)..(55): Ceres Seq. ID no. 12335959

SEQ ID NO: 31276 - DNA, 795 bp, Arabidopsis thaliana; identical to SEQ ID NO: 27686
  misc_feature (1)..(795): Ceres Seq. ID no. 12321153
  misc_feature (1)..(795): Ortholog of  Ceres SEQ ID NO 14309614 as cited in SEQ ID NO 52633
  misc_feature (1)..(795): Ortholog of  Ceres SEQ ID NO 15172691 as cited in SEQ ID NO 56148
  misc_feature (1)..(795): Ortholog of  Ceres SEQ ID NO 15174297 as cited in SEQ ID NO 0

SEQ ID NO: 31277 - protein, 182 aa, Arabidopsis thaliana; identical to SEQ ID NO: 27687
  peptide (1)..(182): Ceres Seq. ID no. 12321154

SEQ ID NO: 31278 - protein, 149 aa, Arabidopsis thaliana; identical to SEQ ID NO: 27688
  peptide (1)..(149): Ceres Seq. ID no. 12321155

SEQ ID NO: 31279 - protein, 113 aa, Arabidopsis thaliana; identical to SEQ ID NO: 27689
  peptide (1)..(113): Ceres Seq. ID no. 12321156

SEQ ID NO: 31280 - DNA, 1298 bp, Arabidopsis thaliana; identical to SEQ ID NO: 27690
  misc_feature (1)..(1298): Ceres Seq. ID no. 12600704
  misc_feature (1)..(1298): Ortholog of  Ceres SEQ ID NO 12613953 as cited in SEQ ID NO 68388

SEQ ID NO: 31281 - protein, 327 aa, Arabidopsis thaliana; identical to SEQ ID NO: 27691
  peptide (1)..(327): Ceres Seq. ID no. 12600705

SEQ ID NO: 31282 - protein, 317 aa, Arabidopsis thaliana; identical to SEQ ID NO: 27692
  peptide (1)..(317): Ceres Seq. ID no. 12600706

SEQ ID NO: 31283 - protein, 311 aa, Arabidopsis thaliana; identical to SEQ ID NO: 27693
  peptide (1)..(311): Ceres Seq. ID no. 12600707

SEQ ID NO: 31284 - DNA, 982 bp, Arabidopsis thaliana; identical to SEQ ID NO: 27694
  misc_feature (1)..(982): Ceres Seq. ID no. 12738229
  misc_feature (1)..(982): Ortholog of  Ceres SEQ ID NO 13598488 as cited in SEQ ID NO 63862
  misc_feature (1)..(982): Ortholog of  Ceres SEQ ID NO 13659640 as cited in SEQ ID NO 67101

SEQ ID NO: 31285 - protein, 326 aa, Arabidopsis thaliana; identical to SEQ ID NO: 27695
  peptide (1)..(326): Ceres Seq. ID no. 12738230

SEQ ID NO: 31286 - protein, 314 aa, Arabidopsis thaliana; identical to SEQ ID NO: 27696
  peptide (1)..(314): Ceres Seq. ID no. 12738231

SEQ ID NO: 31287 - protein, 267 aa, Arabidopsis thaliana; identical to SEQ ID NO: 27697
  peptide (1)..(267): Ceres Seq. ID no. 12738232

SEQ ID NO: 31288 - DNA, 2020 bp, Arabidopsis thaliana; identical to SEQ ID NO: 27698
  misc_feature (1)..(2020): Ceres Seq. ID no. 12370951
  misc_feature (1)..(2020): Ortholog of  Ceres SEQ ID NO 15175681 as cited in SEQ ID NO 55458
  misc_feature (1)..(2020): Ortholog of  Ceres SEQ ID NO 15180188 as cited in SEQ ID NO 0

SEQ ID NO: 31289 - protein, 509 aa, Arabidopsis thaliana; identical to SEQ ID NO: 27699
  peptide (1)..(509): Ceres Seq. ID no. 12370952

SEQ ID NO: 31290 - protein, 482 aa, Arabidopsis thaliana; identical to SEQ ID NO: 27700
  peptide (1)..(482): Ceres Seq. ID no. 12370953

SEQ ID NO: 31291 - protein, 457 aa, Arabidopsis thaliana; identical to SEQ ID NO: 27701
  peptide (1)..(457): Ceres Seq. ID no. 12370954

SEQ ID NO: 31292 - DNA, 1033 bp, Arabidopsis thaliana; identical to SEQ ID NO: 27702
  misc_feature (1)..(1033): Ceres Seq. ID no. 12340116
  misc_feature (1)..(1033): Ortholog of  Ceres SEQ ID NO 15168549 as cited in SEQ ID NO 56976

SEQ ID NO: 31293 - protein, 280 aa, Arabidopsis thaliana; identical to SEQ ID NO: 24848
  peptide (1)..(280): Ceres Seq. ID no. 12340117

SEQ ID NO: 31294 - protein, 253 aa, Arabidopsis thaliana; identical to SEQ ID NO: 24849
  peptide (1)..(253): Ceres Seq. ID no. 12340118

SEQ ID NO: 31295 - protein, 198 aa, Arabidopsis thaliana; identical to SEQ ID NO: 24850
  peptide (1)..(198): Ceres Seq. ID no. 12340119

SEQ ID NO: 31296 - DNA, 1789 bp, Arabidopsis thaliana; identical to SEQ ID NO: 27706
  misc_feature (1)..(1789): Ceres Seq. ID no. 13592258
  misc_feature (1)..(1789): Ortholog of  Ceres SEQ ID NO 13664178 as cited in SEQ ID NO 61247
  misc_feature (1)..(1789): Ortholog of  Ceres SEQ ID NO 15179290 as cited in SEQ ID NO 0

SEQ ID NO: 31297 - protein, 474 aa, Arabidopsis thaliana; identical to SEQ ID NO: 27707
  peptide (1)..(474): Ceres Seq. ID no. 13592259

SEQ ID NO: 31298 - protein, 384 aa, Arabidopsis thaliana; identical to SEQ ID NO: 27708
  peptide (1)..(384): Ceres Seq. ID no. 13592260

SEQ ID NO: 31299 - protein, 375 aa, Arabidopsis thaliana; identical to SEQ ID NO: 27709
  peptide (1)..(375): Ceres Seq. ID no. 13592261

SEQ ID NO: 31300 - DNA, 1591 bp, Arabidopsis thaliana; identical to SEQ ID NO: 27710
  misc_feature (1)..(1591): Ceres Seq. ID no. 12339561
  misc_feature (1)..(1591): Ortholog of  Ceres SEQ ID NO 13596816 as cited in SEQ ID NO 62287

SEQ ID NO: 31301 - protein, 460 aa, Arabidopsis thaliana; identical to SEQ ID NO: 27711
  peptide (1)..(460): Ceres Seq. ID no. 12339562

SEQ ID NO: 31302 - protein, 435 aa, Arabidopsis thaliana; identical to SEQ ID NO: 27712
  peptide (1)..(435): Ceres Seq. ID no. 12339564

SEQ ID NO: 31303 - protein, 325 aa, Arabidopsis thaliana; identical to SEQ ID NO: 27713
  peptide (1)..(325): Ceres Seq. ID no. 12339566

SEQ ID NO: 31304 - DNA, 1073 bp, Arabidopsis thaliana; identical to SEQ ID NO: 27714
  misc_feature (1)..(1073): Ceres Seq. ID no. 13499467
  misc_feature (1)..(1073): Ortholog of  Ceres SEQ ID NO 15176807 as cited in SEQ ID NO 0

SEQ ID NO: 31305 - protein, 243 aa, Arabidopsis thaliana; identical to SEQ ID NO: 27715
  peptide (1)..(243): Ceres Seq. ID no. 13499468

SEQ ID NO: 31306 - DNA, 1102 bp, Arabidopsis thaliana; identical to SEQ ID NO: 27716
  misc_feature (1)..(1102): Ceres Seq. ID no. 13621924
  misc_feature (1)..(1102): Ortholog of  Ceres SEQ ID NO 12582036 as cited in SEQ ID NO 50981
  misc_feature (1)..(1102): Ortholog of  Ceres SEQ ID NO 15173523 as cited in SEQ ID NO 61797

SEQ ID NO: 31307 - protein, 255 aa, Arabidopsis thaliana; identical to SEQ ID NO: 27717
  peptide (1)..(255): Ceres Seq. ID no. 13621925

SEQ ID NO: 31308 - protein, 246 aa, Arabidopsis thaliana; identical to SEQ ID NO: 27718
  peptide (1)..(246): Ceres Seq. ID no. 13621926

SEQ ID NO: 31309 - protein, 233 aa, Arabidopsis thaliana; identical to SEQ ID NO: 27719
  peptide (1)..(233): Ceres Seq. ID no. 13621927

SEQ ID NO: 31310 - DNA, 764 bp, Arabidopsis thaliana; identical to SEQ ID NO: 27720
  misc_feature (1)..(764): Ceres Seq. ID no. 12481981
  misc_feature (1)..(764): Ortholog of  Ceres SEQ ID NO 14309599 as cited in SEQ ID NO 52625
  misc_feature (1)..(764): Ortholog of  Ceres SEQ ID NO 13661426 as cited in SEQ ID NO 61254

SEQ ID NO: 31311 - protein, 200 aa, Arabidopsis thaliana; identical to SEQ ID NO: 27721
  peptide (1)..(200): Ceres Seq. ID no. 12481982

SEQ ID NO: 31312 - protein, 190 aa, Arabidopsis thaliana; identical to SEQ ID NO: 27722
  peptide (1)..(190): Ceres Seq. ID no. 12481983

SEQ ID NO: 31313 - DNA, 680 bp, Arabidopsis thaliana; identical to SEQ ID NO: 27723
  misc_feature (1)..(680): Ceres Seq. ID no. 12338681
  misc_feature (1)..(680): Ortholog of  Ceres SEQ ID NO 13594809 as cited in SEQ ID NO 51847
  misc_feature (1)..(680): Ortholog of  Ceres SEQ ID NO 15226273 as cited in SEQ ID NO 64934
  misc_feature (1)..(680): Ortholog of  Ceres SEQ ID NO 12617639 as cited in SEQ ID NO 65219
  misc_feature (1)..(680): Ortholog of  Ceres SEQ ID NO 15173998 as cited in SEQ ID NO 0
  misc_feature (1)..(680): Ortholog of  Ceres SEQ ID NO 15178333 as cited in SEQ ID NO 0

SEQ ID NO: 31314 - protein, 173 aa, Arabidopsis thaliana; identical to SEQ ID NO: 27724
  peptide (1)..(173): Ceres Seq. ID no. 12338682

SEQ ID NO: 31315 - protein, 150 aa, Arabidopsis thaliana; identical to SEQ ID NO: 27725
  peptide (1)..(150): Ceres Seq. ID no. 12338683

SEQ ID NO: 31316 - protein, 125 aa, Arabidopsis thaliana; identical to SEQ ID NO: 27726
  peptide (1)..(125): Ceres Seq. ID no. 12338685

SEQ ID NO: 31317 - DNA, 1219 bp, Arabidopsis thaliana; identical to SEQ ID NO: 27727
  misc_feature (1)..(1219): Ceres Seq. ID no. 13487573
  misc_feature (1)..(1219): Ortholog of  Ceres SEQ ID NO 15227026 as cited in SEQ ID NO 52193
  misc_feature (1)..(1219): Ortholog of  Ceres SEQ ID NO 15177903 as cited in SEQ ID NO 54993
  misc_feature (1)..(1219): Ortholog of  Ceres SEQ ID NO 13595454 as cited in SEQ ID NO 56502

SEQ ID NO: 31318 - protein, 316 aa, Arabidopsis thaliana; identical to SEQ ID NO: 27728
  peptide (1)..(316): Ceres Seq. ID no. 13487574

SEQ ID NO: 31319 - protein, 285 aa, Arabidopsis thaliana; identical to SEQ ID NO: 27729
  peptide (1)..(285): Ceres Seq. ID no. 13487575

SEQ ID NO: 31320 - protein, 284 aa, Arabidopsis thaliana; identical to SEQ ID NO: 27730
  peptide (1)..(284): Ceres Seq. ID no. 13487576

SEQ ID NO: 31321 - DNA, 930 bp, Arabidopsis thaliana; identical to SEQ ID NO: 27731
  misc_feature (1)..(930): Ceres Seq. ID no. 13493755
  misc_feature (1)..(930): Ortholog of  Ceres SEQ ID NO 14309527 as cited in SEQ ID NO 52599
  misc_feature (1)..(930): Ortholog of  Ceres SEQ ID NO 13589024 as cited in SEQ ID NO 68078

SEQ ID NO: 31322 - protein, 229 aa, Arabidopsis thaliana; identical to SEQ ID NO: 27732
  peptide (1)..(229): Ceres Seq. ID no. 13493756

SEQ ID NO: 31323 - protein, 200 aa, Arabidopsis thaliana; identical to SEQ ID NO: 27733
  peptide (1)..(200): Ceres Seq. ID no. 13493757

SEQ ID NO: 31324 - protein, 164 aa, Arabidopsis thaliana; identical to SEQ ID NO: 27734
  peptide (1)..(164): Ceres Seq. ID no. 13493758

SEQ ID NO: 31325 - DNA, 825 bp, Arabidopsis thaliana; identical to SEQ ID NO: 27735
  misc_feature (1)..(825): Ceres Seq. ID no. 13489945
  misc_feature (1)..(825): Ortholog of  Ceres SEQ ID NO 12608429 as cited in SEQ ID NO 60231

SEQ ID NO: 31326 - protein, 125 aa, Arabidopsis thaliana; identical to SEQ ID NO: 27736
  peptide (1)..(125): Ceres Seq. ID no. 13489946

SEQ ID NO: 31327 - protein, 77 aa, Arabidopsis thaliana; identical to SEQ ID NO: 27737
  peptide (1)..(77): Ceres Seq. ID no. 13489947

SEQ ID NO: 31328 - DNA, 1104 bp, Arabidopsis thaliana; identical to SEQ ID NO: 27738
  misc_feature (1)..(1104): Ceres Seq. ID no. 12331667
  misc_feature (1)..(1104): Ortholog of  Ceres SEQ ID NO 15172430 as cited in SEQ ID NO 59207

SEQ ID NO: 31329 - protein, 152 aa, Arabidopsis thaliana; identical to SEQ ID NO: 27739
  peptide (1)..(152): Ceres Seq. ID no. 12331668

SEQ ID NO: 31330 - protein, 120 aa, Arabidopsis thaliana; identical to SEQ ID NO: 27740
  peptide (1)..(120): Ceres Seq. ID no. 12331669

SEQ ID NO: 31331 - protein, 76 aa, Arabidopsis thaliana; identical to SEQ ID NO: 27741
  peptide (1)..(76): Ceres Seq. ID no. 12331670

SEQ ID NO: 31332 - DNA, 680 bp, Arabidopsis thaliana; identical to SEQ ID NO: 27742
  misc_feature (1)..(680): Ceres Seq. ID no. 12331621
  misc_feature (1)..(680): Ortholog of  Ceres SEQ ID NO 13504026 as cited in SEQ ID NO 58279
  misc_feature (1)..(680): Ortholog of  Ceres SEQ ID NO 15226827 as cited in SEQ ID NO 69141

SEQ ID NO: 31333 - protein, 122 aa, Arabidopsis thaliana; identical to SEQ ID NO: 27743
  peptide (1)..(122): Ceres Seq. ID no. 12331622

SEQ ID NO: 31334 - DNA, 1090 bp, Arabidopsis thaliana; identical to SEQ ID NO: 27744
  misc_feature (1)..(1090): Ceres Seq. ID no. 13489767
  misc_feature (1)..(1090): Ortholog of  Ceres SEQ ID NO 12558659 as cited in SEQ ID NO 20727
  misc_feature (1)..(1090): Ortholog of  Ceres SEQ ID NO 13656436 as cited in SEQ ID NO 69154

SEQ ID NO: 31335 - protein, 214 aa, Arabidopsis thaliana; identical to SEQ ID NO: 27745
  peptide (1)..(214): Ceres Seq. ID no. 13489768

SEQ ID NO: 31336 - DNA, 842 bp, Arabidopsis thaliana; identical to SEQ ID NO: 27746
  misc_feature (1)..(842): Ceres Seq. ID no. 12738275
  misc_feature (1)..(842): Ortholog of  Ceres SEQ ID NO 13599602 as cited in SEQ ID NO 0

SEQ ID NO: 31337 - protein, 235 aa, Arabidopsis thaliana; identical to SEQ ID NO: 27747
  peptide (1)..(235): Ceres Seq. ID no. 12738276

SEQ ID NO: 31338 - protein, 187 aa, Arabidopsis thaliana; identical to SEQ ID NO: 27748
  peptide (1)..(187): Ceres Seq. ID no. 12738277

SEQ ID NO: 31339 - protein, 153 aa, Arabidopsis thaliana; identical to SEQ ID NO: 27749
  peptide (1)..(153): Ceres Seq. ID no. 12738278

SEQ ID NO: 31340 - DNA, 1392 bp, Arabidopsis thaliana; identical to SEQ ID NO: 27750
  misc_feature (1)..(1392): Ceres Seq. ID no. 13492415
  misc_feature (1)..(1392): Ortholog of  Ceres SEQ ID NO 13638746 as cited in SEQ ID NO 59296
  misc_feature (1)..(1392): Ortholog of  Ceres SEQ ID NO 14314050 as cited in SEQ ID NO 59952
  misc_feature (1)..(1392): Ortholog of  Ceres SEQ ID NO 13596474 as cited in SEQ ID NO 62169
  misc_feature (1)..(1392): Ortholog of  Ceres SEQ ID NO 13598714 as cited in SEQ ID NO 62656
  misc_feature (1)..(1392): Ortholog of  Ceres SEQ ID NO 13596969 as cited in SEQ ID NO 63375
  misc_feature (1)..(1392): Ortholog of  Ceres SEQ ID NO 15225685 as cited in SEQ ID NO 63616
  misc_feature (1)..(1392): Ortholog of  Ceres SEQ ID NO 13597519 as cited in SEQ ID NO 64759
  misc_feature (1)..(1392): Ortholog of  Ceres SEQ ID NO 13587054 as cited in SEQ ID NO 0

SEQ ID NO: 31341 - protein, 358 aa, Arabidopsis thaliana; identical to SEQ ID NO: 27751
  peptide (1)..(358): Ceres Seq. ID no. 13492416

SEQ ID NO: 31342 - DNA, 1547 bp, Arabidopsis thaliana; identical to SEQ ID NO: 27752
  misc_feature (1)..(1547): Ceres Seq. ID no. 12327682
  misc_feature (1)..(1547): Ortholog of  Ceres SEQ ID NO 14303313 as cited in SEQ ID NO 64389

SEQ ID NO: 31343 - protein, 354 aa, Arabidopsis thaliana; identical to SEQ ID NO: 27753
  peptide (1)..(354): Ceres Seq. ID no. 12327683

SEQ ID NO: 31344 - protein, 198 aa, Arabidopsis thaliana; identical to SEQ ID NO: 27754
  peptide (1)..(198): Ceres Seq. ID no. 12327684

SEQ ID NO: 31345 - protein, 183 aa, Arabidopsis thaliana; identical to SEQ ID NO: 27755
  peptide (1)..(183): Ceres Seq. ID no. 12327685

SEQ ID NO: 31346 - DNA, 1519 bp, Arabidopsis thaliana; identical to SEQ ID NO: 27756
  misc_feature (1)..(1519): Ceres Seq. ID no. 12558479
  misc_feature (1)..(1519): Ortholog of  Ceres SEQ ID NO 15176709 as cited in SEQ ID NO 1148
  misc_feature (1)..(1519): Ortholog of  Ceres SEQ ID NO 13658922 as cited in SEQ ID NO 66316

SEQ ID NO: 31347 - protein, 381 aa, Arabidopsis thaliana; identical to SEQ ID NO: 27757
  peptide (1)..(381): Ceres Seq. ID no. 12558480

SEQ ID NO: 31348 - protein, 363 aa, Arabidopsis thaliana; identical to SEQ ID NO: 27758
  peptide (1)..(363): Ceres Seq. ID no. 12558481

SEQ ID NO: 31349 - protein, 346 aa, Arabidopsis thaliana; identical to SEQ ID NO: 27759
  peptide (1)..(346): Ceres Seq. ID no. 12558482

SEQ ID NO: 31350 - DNA, 1314 bp, Arabidopsis thaliana; identical to SEQ ID NO: 27760
  misc_feature (1)..(1314): Ceres Seq. ID no. 12371735
  misc_feature (1)..(1314): Ortholog of  Ceres SEQ ID NO 13655992 as cited in SEQ ID NO 65504
  misc_feature (1)..(1314): Ortholog of  Ceres SEQ ID NO 13587581 as cited in SEQ ID NO 0

SEQ ID NO: 31351 - protein, 346 aa, Arabidopsis thaliana; identical to SEQ ID NO: 27761
  peptide (1)..(346): Ceres Seq. ID no. 12371736

SEQ ID NO: 31352 - protein, 304 aa, Arabidopsis thaliana; identical to SEQ ID NO: 27762
  peptide (1)..(304): Ceres Seq. ID no. 12371737

SEQ ID NO: 31353 - protein, 300 aa, Arabidopsis thaliana; identical to SEQ ID NO: 27763
  peptide (1)..(300): Ceres Seq. ID no. 12371738

SEQ ID NO: 31354 - DNA, 1014 bp, Arabidopsis thaliana; identical to SEQ ID NO: 27764
  misc_feature (1)..(1014): Ceres Seq. ID no. 13489272
  misc_feature (1)..(1014): Ortholog of  Ceres SEQ ID NO 12608127 as cited in SEQ ID NO 57579
  misc_feature (1)..(1014): Ortholog of  Ceres SEQ ID NO 12634558 as cited in SEQ ID NO 0
  misc_feature (1)..(1014): Ortholog of  Ceres SEQ ID NO 15180294 as cited in SEQ ID NO 0

SEQ ID NO: 31355 - protein, 255 aa, Arabidopsis thaliana; identical to SEQ ID NO: 27765
  peptide (1)..(255): Ceres Seq. ID no. 13489273

SEQ ID NO: 31356 - DNA, 1610 bp, Arabidopsis thaliana; identical to SEQ ID NO: 27766
  misc_feature (1)..(1610): Ceres Seq. ID no. 12325174
  misc_feature (1)..(1610): Ortholog of  Ceres SEQ ID NO 14315919 as cited in SEQ ID NO 60074

SEQ ID NO: 31357 - protein, 414 aa, Arabidopsis thaliana; identical to SEQ ID NO: 27767
  peptide (1)..(414): Ceres Seq. ID no. 12325175

SEQ ID NO: 31358 - protein, 284 aa, Arabidopsis thaliana; identical to SEQ ID NO: 27768
  peptide (1)..(284): Ceres Seq. ID no. 12325176

SEQ ID NO: 31359 - protein, 256 aa, Arabidopsis thaliana; identical to SEQ ID NO: 27769
  peptide (1)..(256): Ceres Seq. ID no. 12325177

SEQ ID NO: 31360 - DNA, 1098 bp, Arabidopsis thaliana; identical to SEQ ID NO: 27770
  misc_feature (1)..(1098): Ceres Seq. ID no. 12331633
  misc_feature (1)..(1098): Ortholog of  Ceres SEQ ID NO 13594193 as cited in SEQ ID NO 58558

SEQ ID NO: 31361 - protein, 305 aa, Arabidopsis thaliana; identical to SEQ ID NO: 27771
  peptide (1)..(305): Ceres Seq. ID no. 12331634

SEQ ID NO: 31362 - protein, 182 aa, Arabidopsis thaliana; identical to SEQ ID NO: 27772
  peptide (1)..(182): Ceres Seq. ID no. 12331635

SEQ ID NO: 31363 - DNA, 2351 bp, Arabidopsis thaliana; identical to SEQ ID NO: 27773
  misc_feature (1)..(2351): Ceres Seq. ID no. 13491443
  misc_feature (1)..(2351): Ortholog of  Ceres SEQ ID NO 13656177 as cited in SEQ ID NO 64997

SEQ ID NO: 31364 - protein, 671 aa, Arabidopsis thaliana; identical to SEQ ID NO: 27774
  peptide (1)..(671): Ceres Seq. ID no. 13491444

SEQ ID NO: 31365 - protein, 667 aa, Arabidopsis thaliana; identical to SEQ ID NO: 27775
  peptide (1)..(667): Ceres Seq. ID no. 13491445

SEQ ID NO: 31366 - protein, 657 aa, Arabidopsis thaliana; identical to SEQ ID NO: 27776
  peptide (1)..(657): Ceres Seq. ID no. 13491446

SEQ ID NO: 31367 - DNA, 705 bp, Arabidopsis thaliana; identical to SEQ ID NO: 27777
  misc_feature (1)..(705): Ceres Seq. ID no. 12580042
  misc_feature (1)..(705): Ortholog of  Ceres SEQ ID NO 15176321 as cited in SEQ ID NO 52814
  misc_feature (1)..(705): Ortholog of  Ceres SEQ ID NO 12563124 as cited in SEQ ID NO 57104
  misc_feature (1)..(705): Ortholog of  Ceres SEQ ID NO 13598373 as cited in SEQ ID NO 62185
  misc_feature (1)..(705): Ortholog of  Ceres SEQ ID NO 12584664 as cited in SEQ ID NO 62232
  misc_feature (1)..(705): Ortholog of  Ceres SEQ ID NO 15226273 as cited in SEQ ID NO 64934
  misc_feature (1)..(705): Ortholog of  Ceres SEQ ID NO 12617639 as cited in SEQ ID NO 65219

SEQ ID NO: 31368 - protein, 175 aa, Arabidopsis thaliana; identical to SEQ ID NO: 27778
  peptide (1)..(175): Ceres Seq. ID no. 12580043

SEQ ID NO: 31369 - protein, 114 aa, Arabidopsis thaliana; identical to SEQ ID NO: 27779
  peptide (1)..(114): Ceres Seq. ID no. 12580044

SEQ ID NO: 31370 - protein, 107 aa, Arabidopsis thaliana; identical to SEQ ID NO: 27780
  peptide (1)..(107): Ceres Seq. ID no. 12580045

SEQ ID NO: 31371 - DNA, 1374 bp, Arabidopsis thaliana; identical to SEQ ID NO: 27781
  misc_feature (1)..(1374): Ceres Seq. ID no. 12348627
  misc_feature (1)..(1374): Ortholog of  Ceres SEQ ID NO 14302008 as cited in SEQ ID NO 56021

SEQ ID NO: 31372 - protein, 318 aa, Arabidopsis thaliana; identical to SEQ ID NO: 27782
  peptide (1)..(318): Ceres Seq. ID no. 12348628

SEQ ID NO: 31373 - protein, 210 aa, Arabidopsis thaliana; identical to SEQ ID NO: 27783
  peptide (1)..(210): Ceres Seq. ID no. 12348629

SEQ ID NO: 31374 - protein, 179 aa, Arabidopsis thaliana; identical to SEQ ID NO: 27784
  peptide (1)..(179): Ceres Seq. ID no. 12348630

SEQ ID NO: 31375 - DNA, 1264 bp, Arabidopsis thaliana; identical to SEQ ID NO: 27785
  misc_feature (1)..(1264): Ceres Seq. ID no. 12330000
  misc_feature (1)..(1264): Ortholog of  Ceres SEQ ID NO 12616332 as cited in SEQ ID NO 63449
  misc_feature (1)..(1264): Ortholog of  Ceres SEQ ID NO 13597498 as cited in SEQ ID NO 64648

SEQ ID NO: 31376 - protein, 345 aa, Arabidopsis thaliana; identical to SEQ ID NO: 27786
  peptide (1)..(345): Ceres Seq. ID no. 12330001

SEQ ID NO: 31377 - protein, 259 aa, Arabidopsis thaliana; identical to SEQ ID NO: 27787
  peptide (1)..(259): Ceres Seq. ID no. 12330002

SEQ ID NO: 31378 - protein, 236 aa, Arabidopsis thaliana; identical to SEQ ID NO: 27788
  peptide (1)..(236): Ceres Seq. ID no. 12330003

SEQ ID NO: 31379 - DNA, 958 bp, Arabidopsis thaliana; identical to SEQ ID NO: 27789
  misc_feature (1)..(958): Ceres Seq. ID no. 12738824
  misc_feature (1)..(958): Ortholog of  Ceres SEQ ID NO 14314174 as cited in SEQ ID NO 54350
  misc_feature (1)..(958): Ortholog of  Ceres SEQ ID NO 15224566 as cited in SEQ ID NO 55626
  misc_feature (1)..(958): Ortholog of  Ceres SEQ ID NO 13502979 as cited in SEQ ID NO 69150

SEQ ID NO: 31380 - protein, 133 aa, Arabidopsis thaliana; identical to SEQ ID NO: 27790
  peptide (1)..(133): Ceres Seq. ID no. 12738825

SEQ ID NO: 31381 - protein, 131 aa, Arabidopsis thaliana; identical to SEQ ID NO: 27791
  peptide (1)..(131): Ceres Seq. ID no. 12738826

SEQ ID NO: 31382 - protein, 110 aa, Arabidopsis thaliana; identical to SEQ ID NO: 27792
  peptide (1)..(110): Ceres Seq. ID no. 12738827

SEQ ID NO: 31383 - DNA, 797 bp, Arabidopsis thaliana; identical to SEQ ID NO: 27793
  misc_feature (1)..(797): Ceres Seq. ID no. 12331684
  misc_feature (1)..(797): Ortholog of  Ceres SEQ ID NO 12613614 as cited in SEQ ID NO 68243
  misc_feature (1)..(797): Ortholog of  Ceres SEQ ID NO 12556636 as cited in SEQ ID NO 0
  misc_feature (1)..(797): Ortholog of  Ceres SEQ ID NO 13600066 as cited in SEQ ID NO 0
  misc_feature (1)..(797): Ortholog of  Ceres SEQ ID NO 15179946 as cited in SEQ ID NO 0

SEQ ID NO: 31384 - protein, 171 aa, Arabidopsis thaliana; identical to SEQ ID NO: 27794
  peptide (1)..(171): Ceres Seq. ID no. 12331685

SEQ ID NO: 31385 - protein, 139 aa, Arabidopsis thaliana; identical to SEQ ID NO: 27795
  peptide (1)..(139): Ceres Seq. ID no. 12331686

SEQ ID NO: 31386 - protein, 103 aa, Arabidopsis thaliana; identical to SEQ ID NO: 27796
  peptide (1)..(103): Ceres Seq. ID no. 12331687

SEQ ID NO: 31387 - DNA, 1169 bp, Arabidopsis thaliana; identical to SEQ ID NO: 27797
  misc_feature (1)..(1169): Ceres Seq. ID no. 12579866
  misc_feature (1)..(1169): Ortholog of  Ceres SEQ ID NO 14311044 as cited in SEQ ID NO 53643

SEQ ID NO: 31388 - protein, 298 aa, Arabidopsis thaliana; identical to SEQ ID NO: 27798
  peptide (1)..(298): Ceres Seq. ID no. 12579867

SEQ ID NO: 31389 - protein, 286 aa, Arabidopsis thaliana; identical to SEQ ID NO: 23094
  peptide (1)..(286): Ceres Seq. ID no. 12579868

SEQ ID NO: 31390 - protein, 151 aa, Arabidopsis thaliana; identical to SEQ ID NO: 23095
  peptide (1)..(151): Ceres Seq. ID no. 12579869

SEQ ID NO: 31391 - DNA, 802 bp, Arabidopsis thaliana; identical to SEQ ID NO: 27801
  misc_feature (1)..(802): Ceres Seq. ID no. 12675009
  misc_feature (1)..(802): Ortholog of  Ceres SEQ ID NO 12610341 as cited in SEQ ID NO 56073

SEQ ID NO: 31392 - protein, 140 aa, Arabidopsis thaliana; identical to SEQ ID NO: 27802
  peptide (1)..(140): Ceres Seq. ID no. 12675010

SEQ ID NO: 31393 - protein, 127 aa, Arabidopsis thaliana; identical to SEQ ID NO: 27803
  peptide (1)..(127): Ceres Seq. ID no. 12675011

SEQ ID NO: 31394 - protein, 97 aa, Arabidopsis thaliana; identical to SEQ ID NO: 27804
  peptide (1)..(97): Ceres Seq. ID no. 12675012

SEQ ID NO: 31395 - DNA, 1514 bp, Arabidopsis thaliana; identical to SEQ ID NO: 27805
  misc_feature (1)..(1514): Ceres Seq. ID no. 12580052
  misc_feature (1)..(1514): Ortholog of  Ceres SEQ ID NO 13597559 as cited in SEQ ID NO 65274

SEQ ID NO: 31396 - protein, 340 aa, Arabidopsis thaliana; identical to SEQ ID NO: 27806
  peptide (1)..(340): Ceres Seq. ID no. 12580053

SEQ ID NO: 31397 - protein, 321 aa, Arabidopsis thaliana; identical to SEQ ID NO: 27807
  peptide (1)..(321): Ceres Seq. ID no. 12580054

SEQ ID NO: 31398 - protein, 319 aa, Arabidopsis thaliana; identical to SEQ ID NO: 27808
  peptide (1)..(319): Ceres Seq. ID no. 12580055

SEQ ID NO: 31399 - DNA, 1159 bp, Arabidopsis thaliana; identical to SEQ ID NO: 27809
  misc_feature (1)..(1159): Ceres Seq. ID no. 13490301
  misc_feature (1)..(1159): Ortholog of  Ceres SEQ ID NO 13594671 as cited in SEQ ID NO 51800
  misc_feature (1)..(1159): Ortholog of  Ceres SEQ ID NO 12784099 as cited in SEQ ID NO 66784

SEQ ID NO: 31400 - protein, 303 aa, Arabidopsis thaliana; identical to SEQ ID NO: 27810
  peptide (1)..(303): Ceres Seq. ID no. 13490302

SEQ ID NO: 31401 - protein, 279 aa, Arabidopsis thaliana; identical to SEQ ID NO: 27811
  peptide (1)..(279): Ceres Seq. ID no. 13490303

SEQ ID NO: 31402 - protein, 261 aa, Arabidopsis thaliana; identical to SEQ ID NO: 27812
  peptide (1)..(261): Ceres Seq. ID no. 13490304

SEQ ID NO: 31403 - DNA, 604 bp, Arabidopsis thaliana; identical to SEQ ID NO: 27813
  misc_feature (1)..(604): Ceres Seq. ID no. 12395010
  misc_feature (1)..(604): Ortholog of  Ceres SEQ ID NO 12329459 as cited in SEQ ID NO 20533

SEQ ID NO: 31404 - protein, 52 aa, Arabidopsis thaliana; identical to SEQ ID NO: 27814
  peptide (1)..(52): Ceres Seq. ID no. 12395011

SEQ ID NO: 31405 - protein, 49 aa, Arabidopsis thaliana; identical to SEQ ID NO: 27815
  peptide (1)..(49): Ceres Seq. ID no. 12395012

SEQ ID NO: 31406 - DNA, 1204 bp, Arabidopsis thaliana; identical to SEQ ID NO: 27816
  misc_feature (1)..(1204): Ceres Seq. ID no. 12384946
  misc_feature (1)..(1204): Ortholog of  Ceres SEQ ID NO 15177091 as cited in SEQ ID NO 52140
  misc_feature (1)..(1204): Ortholog of  Ceres SEQ ID NO 13597324 as cited in SEQ ID NO 64842
  misc_feature (1)..(1204): Ortholog of  Ceres SEQ ID NO 13658672 as cited in SEQ ID NO 66627

SEQ ID NO: 31407 - protein, 268 aa, Arabidopsis thaliana; identical to SEQ ID NO: 27817
  peptide (1)..(268): Ceres Seq. ID no. 12384947

SEQ ID NO: 31408 - protein, 140 aa, Arabidopsis thaliana; identical to SEQ ID NO: 27818
  peptide (1)..(140): Ceres Seq. ID no. 12384948

SEQ ID NO: 31409 - DNA, 1164 bp, Arabidopsis thaliana; identical to SEQ ID NO: 27819
  misc_feature (1)..(1164): Ceres Seq. ID no. 12421667
  misc_feature (1)..(1164): Ortholog of  Ceres SEQ ID NO 13595668 as cited in SEQ ID NO 56792

SEQ ID NO: 31410 - protein, 139 aa, Arabidopsis thaliana; identical to SEQ ID NO: 27820
  peptide (1)..(139): Ceres Seq. ID no. 12421668

SEQ ID NO: 31411 - protein, 136 aa, Arabidopsis thaliana; identical to SEQ ID NO: 27821
  peptide (1)..(136): Ceres Seq. ID no. 12421669

SEQ ID NO: 31412 - protein, 131 aa, Arabidopsis thaliana; identical to SEQ ID NO: 27822
  peptide (1)..(131): Ceres Seq. ID no. 12421670

SEQ ID NO: 31413 - DNA, 1598 bp, Arabidopsis thaliana; identical to SEQ ID NO: 27823
  misc_feature (1)..(1598): Ceres Seq. ID no. 12738448
  misc_feature (1)..(1598): Ortholog of  Ceres SEQ ID NO 15177320 as cited in SEQ ID NO 52645
  misc_feature (1)..(1598): Ortholog of  Ceres SEQ ID NO 15171359 as cited in SEQ ID NO 57279
  misc_feature (1)..(1598): Ortholog of  Ceres SEQ ID NO 14313840 as cited in SEQ ID NO 59568
  misc_feature (1)..(1598): Ortholog of  Ceres SEQ ID NO 13662245 as cited in SEQ ID NO 62708
  misc_feature (1)..(1598): Ortholog of  Ceres SEQ ID NO 14314084 as cited in SEQ ID NO 63256
  misc_feature (1)..(1598): Ortholog of  Ceres SEQ ID NO 15169466 as cited in SEQ ID NO 66135
  misc_feature (1)..(1598): Ortholog of  Ceres SEQ ID NO 14303091 as cited in SEQ ID NO 66369

SEQ ID NO: 31414 - protein, 496 aa, Arabidopsis thaliana; identical to SEQ ID NO: 27824
  peptide (1)..(496): Ceres Seq. ID no. 12738449

SEQ ID NO: 31415 - protein, 485 aa, Arabidopsis thaliana; identical to SEQ ID NO: 27825
  peptide (1)..(485): Ceres Seq. ID no. 12738450

SEQ ID NO: 31416 - protein, 329 aa, Arabidopsis thaliana; identical to SEQ ID NO: 27826
  peptide (1)..(329): Ceres Seq. ID no. 12738451

SEQ ID NO: 31417 - DNA, 1496 bp, Arabidopsis thaliana; identical to SEQ ID NO: 27827
  misc_feature (1)..(1496): Ceres Seq. ID no. 12421656
  misc_feature (1)..(1496): Ortholog of  Ceres SEQ ID NO 14308061 as cited in SEQ ID NO 55155
  misc_feature (1)..(1496): Ortholog of  Ceres SEQ ID NO 13654238 as cited in SEQ ID NO 67874

SEQ ID NO: 31418 - protein, 343 aa, Arabidopsis thaliana; identical to SEQ ID NO: 27828
  peptide (1)..(343): Ceres Seq. ID no. 12421657

SEQ ID NO: 31419 - protein, 300 aa, Arabidopsis thaliana; identical to SEQ ID NO: 27829
  peptide (1)..(300): Ceres Seq. ID no. 12421658

SEQ ID NO: 31420 - protein, 290 aa, Arabidopsis thaliana; identical to SEQ ID NO: 27830
  peptide (1)..(290): Ceres Seq. ID no. 12421659

SEQ ID NO: 31421 - DNA, 1367 bp, Arabidopsis thaliana; identical to SEQ ID NO: 27831
  misc_feature (1)..(1367): Ceres Seq. ID no. 12333764
  misc_feature (1)..(1367): Ortholog of  Ceres SEQ ID NO 14306667 as cited in SEQ ID NO 52925
  misc_feature (1)..(1367): Ortholog of  Ceres SEQ ID NO 15177522 as cited in SEQ ID NO 0

SEQ ID NO: 31422 - protein, 401 aa, Arabidopsis thaliana; identical to SEQ ID NO: 27832
  peptide (1)..(401): Ceres Seq. ID no. 12333765

SEQ ID NO: 31423 - protein, 283 aa, Arabidopsis thaliana; identical to SEQ ID NO: 27833
  peptide (1)..(283): Ceres Seq. ID no. 12333766

SEQ ID NO: 31424 - protein, 266 aa, Arabidopsis thaliana; identical to SEQ ID NO: 27834
  peptide (1)..(266): Ceres Seq. ID no. 12333767

SEQ ID NO: 31425 - DNA, 1148 bp, Arabidopsis thaliana; identical to SEQ ID NO: 27835
  misc_feature (1)..(1148): Ceres Seq. ID no. 13497523
  misc_feature (1)..(1148): Ortholog of  Ceres SEQ ID NO 14316532 as cited in SEQ ID NO 57093
  misc_feature (1)..(1148): Ortholog of  Ceres SEQ ID NO 14301482 as cited in SEQ ID NO 63355

SEQ ID NO: 31426 - protein, 333 aa, Arabidopsis thaliana; identical to SEQ ID NO: 27836
  peptide (1)..(333): Ceres Seq. ID no. 13497524

SEQ ID NO: 31427 - protein, 310 aa, Arabidopsis thaliana; identical to SEQ ID NO: 27837
  peptide (1)..(310): Ceres Seq. ID no. 13497525

SEQ ID NO: 31428 - protein, 229 aa, Arabidopsis thaliana; identical to SEQ ID NO: 27838
  peptide (1)..(229): Ceres Seq. ID no. 13497526

SEQ ID NO: 31429 - DNA, 1266 bp, Arabidopsis thaliana; identical to SEQ ID NO: 27839
  misc_feature (1)..(1266): Ceres Seq. ID no. 12327432
  misc_feature (1)..(1266): Ortholog of  Ceres SEQ ID NO 15170595 as cited in SEQ ID NO 57510
  misc_feature (1)..(1266): Ortholog of  Ceres SEQ ID NO 13655218 as cited in SEQ ID NO 68872

SEQ ID NO: 31430 - protein, 364 aa, Arabidopsis thaliana; identical to SEQ ID NO: 27840
  peptide (1)..(364): Ceres Seq. ID no. 12327433

SEQ ID NO: 31431 - protein, 333 aa, Arabidopsis thaliana; identical to SEQ ID NO: 27841
  peptide (1)..(333): Ceres Seq. ID no. 12327434

SEQ ID NO: 31432 - protein, 325 aa, Arabidopsis thaliana; identical to SEQ ID NO: 27842
  peptide (1)..(325): Ceres Seq. ID no. 12327435

SEQ ID NO: 31433 - DNA, 771 bp, Arabidopsis thaliana; identical to SEQ ID NO: 27843
  misc_feature (1)..(771): Ceres Seq. ID no. 12333364
  misc_feature (1)..(771): Ortholog of  Ceres SEQ ID NO 15225940 as cited in SEQ ID NO 205

SEQ ID NO: 31434 - protein, 220 aa, Arabidopsis thaliana; identical to SEQ ID NO: 27844
  peptide (1)..(220): Ceres Seq. ID no. 12333365

SEQ ID NO: 31435 - DNA, 698 bp, Arabidopsis thaliana; identical to SEQ ID NO: 27845
  misc_feature (1)..(698): Ceres Seq. ID no. 12340193
  misc_feature (1)..(698): Ortholog of  Ceres SEQ ID NO 13596816 as cited in SEQ ID NO 62287

SEQ ID NO: 31436 - protein, 189 aa, Arabidopsis thaliana; identical to SEQ ID NO: 27846
  peptide (1)..(189): Ceres Seq. ID no. 12340194

SEQ ID NO: 31437 - DNA, 707 bp, Arabidopsis thaliana; identical to SEQ ID NO: 27847
  misc_feature (1)..(707): Ceres Seq. ID no. 12370068
  misc_feature (1)..(707): Ortholog of  Ceres SEQ ID NO 13657008 as cited in SEQ ID NO 69164

SEQ ID NO: 31438 - protein, 183 aa, Arabidopsis thaliana; identical to SEQ ID NO: 27848
  peptide (1)..(183): Ceres Seq. ID no. 12370069

SEQ ID NO: 31439 - protein, 162 aa, Arabidopsis thaliana; identical to SEQ ID NO: 27849
  peptide (1)..(162): Ceres Seq. ID no. 12370070

SEQ ID NO: 31440 - protein, 141 aa, Arabidopsis thaliana; identical to SEQ ID NO: 27850
  peptide (1)..(141): Ceres Seq. ID no. 12370071

SEQ ID NO: 31441 - DNA, 763 bp, Arabidopsis thaliana; identical to SEQ ID NO: 27851
  misc_feature (1)..(763): Ceres Seq. ID no. 13491922
  misc_feature (1)..(763): Ortholog of  Ceres SEQ ID NO 13595021 as cited in SEQ ID NO 55815

SEQ ID NO: 31442 - protein, 208 aa, Arabidopsis thaliana; identical to SEQ ID NO: 27852
  peptide (1)..(208): Ceres Seq. ID no. 13491923

SEQ ID NO: 31443 - DNA, 1267 bp, Arabidopsis thaliana; identical to SEQ ID NO: 27853
  misc_feature (1)..(1267): Ceres Seq. ID no. 12338433
  misc_feature (1)..(1267): Ortholog of  Ceres SEQ ID NO 13594308 as cited in SEQ ID NO 57706

SEQ ID NO: 31444 - protein, 379 aa, Arabidopsis thaliana; identical to SEQ ID NO: 26380
  peptide (1)..(379): Ceres Seq. ID no. 12338434

SEQ ID NO: 31445 - protein, 362 aa, Arabidopsis thaliana; identical to SEQ ID NO: 26381
  peptide (1)..(362): Ceres Seq. ID no. 12338436

SEQ ID NO: 31446 - protein, 309 aa, Arabidopsis thaliana; identical to SEQ ID NO: 26382
  peptide (1)..(309): Ceres Seq. ID no. 12338437

SEQ ID NO: 31447 - DNA, 1400 bp, Arabidopsis thaliana; identical to SEQ ID NO: 27857
  misc_feature (1)..(1400): Ceres Seq. ID no. 12335141
  misc_feature (1)..(1400): Ortholog of  Ceres SEQ ID NO 13655375 as cited in SEQ ID NO 63347
  misc_feature (1)..(1400): Ortholog of  Ceres SEQ ID NO 12626166 as cited in SEQ ID NO 64505
  misc_feature (1)..(1400): Ortholog of  Ceres SEQ ID NO 13654415 as cited in SEQ ID NO 68820

SEQ ID NO: 31448 - protein, 335 aa, Arabidopsis thaliana; identical to SEQ ID NO: 27858
  peptide (1)..(335): Ceres Seq. ID no. 12335142

SEQ ID NO: 31449 - protein, 317 aa, Arabidopsis thaliana; identical to SEQ ID NO: 27859
  peptide (1)..(317): Ceres Seq. ID no. 12335143

SEQ ID NO: 31450 - protein, 300 aa, Arabidopsis thaliana; identical to SEQ ID NO: 27860
  peptide (1)..(300): Ceres Seq. ID no. 12335144

SEQ ID NO: 31451 - DNA, 1681 bp, Arabidopsis thaliana; identical to SEQ ID NO: 27861
  misc_feature (1)..(1681): Ceres Seq. ID no. 12332449
  misc_feature (1)..(1681): Ortholog of  Ceres SEQ ID NO 15177320 as cited in SEQ ID NO 52645
  misc_feature (1)..(1681): Ortholog of  Ceres SEQ ID NO 15171359 as cited in SEQ ID NO 57279
  misc_feature (1)..(1681): Ortholog of  Ceres SEQ ID NO 14313840 as cited in SEQ ID NO 59568
  misc_feature (1)..(1681): Ortholog of  Ceres SEQ ID NO 15169466 as cited in SEQ ID NO 66135
  misc_feature (1)..(1681): Ortholog of  Ceres SEQ ID NO 14303091 as cited in SEQ ID NO 66369

SEQ ID NO: 31452 - protein, 484 aa, Arabidopsis thaliana; identical to SEQ ID NO: 27862
  peptide (1)..(484): Ceres Seq. ID no. 12332450

SEQ ID NO: 31453 - protein, 415 aa, Arabidopsis thaliana; identical to SEQ ID NO: 27863
  peptide (1)..(415): Ceres Seq. ID no. 12332451

SEQ ID NO: 31454 - protein, 398 aa, Arabidopsis thaliana; identical to SEQ ID NO: 27864
  peptide (1)..(398): Ceres Seq. ID no. 12332452

SEQ ID NO: 31455 - DNA, 1451 bp, Arabidopsis thaliana; identical to SEQ ID NO: 27865
  misc_feature (1)..(1451): Ceres Seq. ID no. 12333516
  misc_feature (1)..(1451): Ortholog of  Ceres SEQ ID NO 13532807 as cited in SEQ ID NO 53012
  misc_feature (1)..(1451): Ortholog of  Ceres SEQ ID NO 13663060 as cited in SEQ ID NO 60964
  misc_feature (1)..(1451): Ortholog of  Ceres SEQ ID NO 13656849 as cited in SEQ ID NO 65764
  misc_feature (1)..(1451): Ortholog of  Ceres SEQ ID NO 13500573 as cited in SEQ ID NO 67431
  misc_feature (1)..(1451): Ortholog of  Ceres SEQ ID NO 13656501 as cited in SEQ ID NO 69206

SEQ ID NO: 31456 - protein, 376 aa, Arabidopsis thaliana; identical to SEQ ID NO: 27866
  peptide (1)..(376): Ceres Seq. ID no. 12333517

SEQ ID NO: 31457 - protein, 280 aa, Arabidopsis thaliana; identical to SEQ ID NO: 27867
  peptide (1)..(280): Ceres Seq. ID no. 12333518

SEQ ID NO: 31458 - protein, 250 aa, Arabidopsis thaliana; identical to SEQ ID NO: 27868
  peptide (1)..(250): Ceres Seq. ID no. 12333519

SEQ ID NO: 31459 - DNA, 1119 bp, Arabidopsis thaliana; identical to SEQ ID NO: 27869
  misc_feature (1)..(1119): Ceres Seq. ID no. 12678920
  misc_feature (1)..(1119): Ortholog of  Ceres SEQ ID NO 12474685 as cited in SEQ ID NO 88
  misc_feature (1)..(1119): Ortholog of  Ceres SEQ ID NO 13638574 as cited in SEQ ID NO 51223
  misc_feature (1)..(1119): Ortholog of  Ceres SEQ ID NO 14311531 as cited in SEQ ID NO 51466
  misc_feature (1)..(1119): Ortholog of  Ceres SEQ ID NO 15170465 as cited in SEQ ID NO 52798
  misc_feature (1)..(1119): Ortholog of  Ceres SEQ ID NO 15177112 as cited in SEQ ID NO 55956
  misc_feature (1)..(1119): Ortholog of  Ceres SEQ ID NO 12610790 as cited in SEQ ID NO 56123
  misc_feature (1)..(1119): Ortholog of  Ceres SEQ ID NO 13655636 as cited in SEQ ID NO 63519
  misc_feature (1)..(1119): Ortholog of  Ceres SEQ ID NO 13655896 as cited in SEQ ID NO 64970

SEQ ID NO: 31460 - protein, 311 aa, Arabidopsis thaliana; identical to SEQ ID NO: 27524
  peptide (1)..(311): Ceres Seq. ID no. 12678921

SEQ ID NO: 31461 - protein, 286 aa, Arabidopsis thaliana; identical to SEQ ID NO: 27525
  peptide (1)..(286): Ceres Seq. ID no. 12678922

SEQ ID NO: 31462 - protein, 191 aa, Arabidopsis thaliana; identical to SEQ ID NO: 27526
  peptide (1)..(191): Ceres Seq. ID no. 12678923

SEQ ID NO: 31463 - DNA, 918 bp, Arabidopsis thaliana; identical to SEQ ID NO: 27873
  misc_feature (1)..(918): Ceres Seq. ID no. 13653925
  misc_feature (1)..(918): Ortholog of  Ceres SEQ ID NO 13591776 as cited in SEQ ID NO 20695
  misc_feature (1)..(918): Ortholog of  Ceres SEQ ID NO 13595072 as cited in SEQ ID NO 55971

SEQ ID NO: 31464 - protein, 112 aa, Arabidopsis thaliana; identical to SEQ ID NO: 27874
  peptide (1)..(112): Ceres Seq. ID no. 13653926

SEQ ID NO: 31465 - protein, 96 aa, Arabidopsis thaliana; identical to SEQ ID NO: 27875
  peptide (1)..(96): Ceres Seq. ID no. 13653927

SEQ ID NO: 31466 - protein, 95 aa, Arabidopsis thaliana; identical to SEQ ID NO: 27876
  peptide (1)..(95): Ceres Seq. ID no. 13653928

SEQ ID NO: 31467 - DNA, 887 bp, Arabidopsis thaliana; identical to SEQ ID NO: 27877
  misc_feature (1)..(887): Ceres Seq. ID no. 12421446
  misc_feature (1)..(887): Ortholog of  Ceres SEQ ID NO 13637842 as cited in SEQ ID NO 54650
  misc_feature (1)..(887): Ortholog of  Ceres SEQ ID NO 12608127 as cited in SEQ ID NO 57579
  misc_feature (1)..(887): Ortholog of  Ceres SEQ ID NO 12634558 as cited in SEQ ID NO 0
  misc_feature (1)..(887): Ortholog of  Ceres SEQ ID NO 15180294 as cited in SEQ ID NO 0

SEQ ID NO: 31468 - protein, 255 aa, Arabidopsis thaliana; identical to SEQ ID NO: 27765
  peptide (1)..(255): Ceres Seq. ID no. 12421447

SEQ ID NO: 31469 - DNA, 791 bp, Arabidopsis thaliana; identical to SEQ ID NO: 27879
  misc_feature (1)..(791): Ceres Seq. ID no. 13490901
  misc_feature (1)..(791): Ortholog of  Ceres SEQ ID NO 14315067 as cited in SEQ ID NO 57249
  misc_feature (1)..(791): Ortholog of  Ceres SEQ ID NO 15173278 as cited in SEQ ID NO 58144

SEQ ID NO: 31470 - protein, 169 aa, Arabidopsis thaliana; identical to SEQ ID NO: 27880
  peptide (1)..(169): Ceres Seq. ID no. 13490902

SEQ ID NO: 31471 - DNA, 1109 bp, Arabidopsis thaliana; identical to SEQ ID NO: 27881
  misc_feature (1)..(1109): Ceres Seq. ID no. 12422858
  misc_feature (1)..(1109): Ortholog of  Ceres SEQ ID NO 13594298 as cited in SEQ ID NO 57803
  misc_feature (1)..(1109): Ortholog of  Ceres SEQ ID NO 13503476 as cited in SEQ ID NO 61978
  misc_feature (1)..(1109): Ortholog of  Ceres SEQ ID NO 12578438 as cited in SEQ ID NO 62201
  misc_feature (1)..(1109): Ortholog of  Ceres SEQ ID NO 12617675 as cited in SEQ ID NO 64656

SEQ ID NO: 31472 - protein, 305 aa, Arabidopsis thaliana; identical to SEQ ID NO: 27882
  peptide (1)..(305): Ceres Seq. ID no. 12422859

SEQ ID NO: 31473 - protein, 292 aa, Arabidopsis thaliana; identical to SEQ ID NO: 27883
  peptide (1)..(292): Ceres Seq. ID no. 12422860

SEQ ID NO: 31474 - protein, 285 aa, Arabidopsis thaliana; identical to SEQ ID NO: 27884
  peptide (1)..(285): Ceres Seq. ID no. 12422861

SEQ ID NO: 31475 - DNA, 673 bp, Arabidopsis thaliana; identical to SEQ ID NO: 27885
  misc_feature (1)..(673): Ceres Seq. ID no. 12331700
  misc_feature (1)..(673): Ortholog of  Ceres SEQ ID NO 13595067 as cited in SEQ ID NO 55857
  misc_feature (1)..(673): Ortholog of  Ceres SEQ ID NO 12635516 as cited in SEQ ID NO 0
  misc_feature (1)..(673): Ortholog of  Ceres SEQ ID NO 15179376 as cited in SEQ ID NO 0

SEQ ID NO: 31476 - protein, 159 aa, Arabidopsis thaliana; identical to SEQ ID NO: 27886
  peptide (1)..(159): Ceres Seq. ID no. 12331701

SEQ ID NO: 31477 - protein, 149 aa, Arabidopsis thaliana; identical to SEQ ID NO: 27887
  peptide (1)..(149): Ceres Seq. ID no. 12331702

SEQ ID NO: 31478 - DNA, 847 bp, Arabidopsis thaliana; identical to SEQ ID NO: 27888
  misc_feature (1)..(847): Ceres Seq. ID no. 12331364
  misc_feature (1)..(847): Ortholog of  Ceres SEQ ID NO 14316118 as cited in SEQ ID NO 52391
  misc_feature (1)..(847): Ortholog of  Ceres SEQ ID NO 14316060 as cited in SEQ ID NO 52465
  misc_feature (1)..(847): Ortholog of  Ceres SEQ ID NO 13664032 as cited in SEQ ID NO 67527

SEQ ID NO: 31479 - protein, 141 aa, Arabidopsis thaliana; identical to SEQ ID NO: 27889
  peptide (1)..(141): Ceres Seq. ID no. 12331365

SEQ ID NO: 31480 - protein, 107 aa, Arabidopsis thaliana; identical to SEQ ID NO: 27890
  peptide (1)..(107): Ceres Seq. ID no. 12331366

SEQ ID NO: 31481 - DNA, 1149 bp, Arabidopsis thaliana; identical to SEQ ID NO: 27891
  misc_feature (1)..(1149): Ceres Seq. ID no. 13487530
  misc_feature (1)..(1149): Ortholog of  Ceres SEQ ID NO 13594298 as cited in SEQ ID NO 57803
  misc_feature (1)..(1149): Ortholog of  Ceres SEQ ID NO 13503476 as cited in SEQ ID NO 61978
  misc_feature (1)..(1149): Ortholog of  Ceres SEQ ID NO 12578438 as cited in SEQ ID NO 62201
  misc_feature (1)..(1149): Ortholog of  Ceres SEQ ID NO 12617675 as cited in SEQ ID NO 64656

SEQ ID NO: 31482 - protein, 307 aa, Arabidopsis thaliana; identical to SEQ ID NO: 27892
  peptide (1)..(307): Ceres Seq. ID no. 13487531

SEQ ID NO: 31483 - protein, 299 aa, Arabidopsis thaliana; identical to SEQ ID NO: 27893
  peptide (1)..(299): Ceres Seq. ID no. 13487532

SEQ ID NO: 31484 - protein, 242 aa, Arabidopsis thaliana; identical to SEQ ID NO: 27894
  peptide (1)..(242): Ceres Seq. ID no. 13487533

SEQ ID NO: 31485 - DNA, 2320 bp, Arabidopsis thaliana; identical to SEQ ID NO: 27895
  misc_feature (1)..(2320): Ceres Seq. ID no. 13509885
  misc_feature (1)..(2320): Ortholog of  Ceres SEQ ID NO 15226533 as cited in SEQ ID NO 59723

SEQ ID NO: 31486 - protein, 298 aa, Arabidopsis thaliana; identical to SEQ ID NO: 27896
  peptide (1)..(298): Ceres Seq. ID no. 13509886

SEQ ID NO: 31487 - protein, 195 aa, Arabidopsis thaliana; identical to SEQ ID NO: 27897
  peptide (1)..(195): Ceres Seq. ID no. 13509887

SEQ ID NO: 31488 - protein, 190 aa, Arabidopsis thaliana; identical to SEQ ID NO: 27898
  peptide (1)..(190): Ceres Seq. ID no. 13509888

SEQ ID NO: 31489 - DNA, 1178 bp, Arabidopsis thaliana; identical to SEQ ID NO: 27899
  misc_feature (1)..(1178): Ceres Seq. ID no. 13490414
  misc_feature (1)..(1178): Ortholog of  Ceres SEQ ID NO 14314468 as cited in SEQ ID NO 52388
  misc_feature (1)..(1178): Ortholog of  Ceres SEQ ID NO 14307446 as cited in SEQ ID NO 59409

SEQ ID NO: 31490 - protein, 351 aa, Arabidopsis thaliana; identical to SEQ ID NO: 27900
  peptide (1)..(351): Ceres Seq. ID no. 13490415

SEQ ID NO: 31491 - protein, 341 aa, Arabidopsis thaliana; identical to SEQ ID NO: 27901
  peptide (1)..(341): Ceres Seq. ID no. 13490416

SEQ ID NO: 31492 - DNA, 1343 bp, Arabidopsis thaliana; identical to SEQ ID NO: 27902
  misc_feature (1)..(1343): Ceres Seq. ID no. 13487498
  misc_feature (1)..(1343): Ortholog of  Ceres SEQ ID NO 13654155 as cited in SEQ ID NO 68352

SEQ ID NO: 31493 - protein, 280 aa, Arabidopsis thaliana; identical to SEQ ID NO: 27903
  peptide (1)..(280): Ceres Seq. ID no. 13487499

SEQ ID NO: 31494 - protein, 256 aa, Arabidopsis thaliana; identical to SEQ ID NO: 27904
  peptide (1)..(256): Ceres Seq. ID no. 13487500

SEQ ID NO: 31495 - protein, 217 aa, Arabidopsis thaliana; identical to SEQ ID NO: 27905
  peptide (1)..(217): Ceres Seq. ID no. 13487501

SEQ ID NO: 31496 - DNA, 1672 bp, Arabidopsis thaliana; identical to SEQ ID NO: 27906
  misc_feature (1)..(1672): Ceres Seq. ID no. 12395760
  misc_feature (1)..(1672): Ortholog of  Ceres SEQ ID NO 14311183 as cited in SEQ ID NO 58495
  misc_feature (1)..(1672): Ortholog of  Ceres SEQ ID NO 13502874 as cited in SEQ ID NO 66298
  misc_feature (1)..(1672): Ortholog of  Ceres SEQ ID NO 12614124 as cited in SEQ ID NO 68392

SEQ ID NO: 31497 - protein, 530 aa, Arabidopsis thaliana; identical to SEQ ID NO: 27907
  peptide (1)..(530): Ceres Seq. ID no. 12395761

SEQ ID NO: 31498 - protein, 512 aa, Arabidopsis thaliana; identical to SEQ ID NO: 27908
  peptide (1)..(512): Ceres Seq. ID no. 12395762

SEQ ID NO: 31499 - protein, 430 aa, Arabidopsis thaliana; identical to SEQ ID NO: 27909
  peptide (1)..(430): Ceres Seq. ID no. 12395763

SEQ ID NO: 31500 - DNA, 1324 bp, Arabidopsis thaliana; identical to SEQ ID NO: 27910
  misc_feature (1)..(1324): Ceres Seq. ID no. 12422635
  misc_feature (1)..(1324): Ortholog of  Ceres SEQ ID NO 13596585 as cited in SEQ ID NO 62424
  misc_feature (1)..(1324): Ortholog of  Ceres SEQ ID NO 15225240 as cited in SEQ ID NO 66495

SEQ ID NO: 31501 - protein, 232 aa, Arabidopsis thaliana; identical to SEQ ID NO: 27911
  peptide (1)..(232): Ceres Seq. ID no. 12422636

SEQ ID NO: 31502 - protein, 147 aa, Arabidopsis thaliana; identical to SEQ ID NO: 27912
  peptide (1)..(147): Ceres Seq. ID no. 12422637

SEQ ID NO: 31503 - protein, 143 aa, Arabidopsis thaliana; identical to SEQ ID NO: 27913
  peptide (1)..(143): Ceres Seq. ID no. 12422638

SEQ ID NO: 31504 - DNA, 429 bp, Arabidopsis thaliana; identical to SEQ ID NO: 27914
  misc_feature (1)..(429): Ceres Seq. ID no. 12334228
  misc_feature (1)..(429): Ortholog of  Ceres SEQ ID NO 13593557 as cited in SEQ ID NO 175

SEQ ID NO: 31505 - protein, 91 aa, Arabidopsis thaliana; identical to SEQ ID NO: 27915
  peptide (1)..(91): Ceres Seq. ID no. 12334229

SEQ ID NO: 31506 - protein, 84 aa, Arabidopsis thaliana; identical to SEQ ID NO: 27916
  peptide (1)..(84): Ceres Seq. ID no. 12334230

SEQ ID NO: 31507 - protein, 81 aa, Arabidopsis thaliana; identical to SEQ ID NO: 27917
  peptide (1)..(81): Ceres Seq. ID no. 12334231

SEQ ID NO: 31508 - DNA, 1403 bp, Arabidopsis thaliana; identical to SEQ ID NO: 27918
  misc_feature (1)..(1403): Ceres Seq. ID no. 12335483
  misc_feature (1)..(1403): Ortholog of  Ceres SEQ ID NO 14309287 as cited in SEQ ID NO 0

SEQ ID NO: 31509 - protein, 419 aa, Arabidopsis thaliana; identical to SEQ ID NO: 27919
  peptide (1)..(419): Ceres Seq. ID no. 12335484

SEQ ID NO: 31510 - protein, 342 aa, Arabidopsis thaliana; identical to SEQ ID NO: 27920
  peptide (1)..(342): Ceres Seq. ID no. 12335485

SEQ ID NO: 31511 - protein, 321 aa, Arabidopsis thaliana; identical to SEQ ID NO: 27921
  peptide (1)..(321): Ceres Seq. ID no. 12335486

SEQ ID NO: 31512 - DNA, 1757 bp, Arabidopsis thaliana; identical to SEQ ID NO: 27922
  misc_feature (1)..(1757): Ceres Seq. ID no. 12327245
  misc_feature (1)..(1757): Ortholog of  Ceres SEQ ID NO 13599900 as cited in SEQ ID NO 531
  misc_feature (1)..(1757): Ortholog of  Ceres SEQ ID NO 13659971 as cited in SEQ ID NO 67565
  misc_feature (1)..(1757): Ortholog of  Ceres SEQ ID NO 13500385 as cited in SEQ ID NO 67583

SEQ ID NO: 31513 - protein, 491 aa, Arabidopsis thaliana; identical to SEQ ID NO: 27923
  peptide (1)..(491): Ceres Seq. ID no. 12327246

SEQ ID NO: 31514 - protein, 488 aa, Arabidopsis thaliana; identical to SEQ ID NO: 27924
  peptide (1)..(488): Ceres Seq. ID no. 12327247

SEQ ID NO: 31515 - protein, 417 aa, Arabidopsis thaliana; identical to SEQ ID NO: 27925
  peptide (1)..(417): Ceres Seq. ID no. 12327248

SEQ ID NO: 31516 - DNA, 1495 bp, Arabidopsis thaliana; identical to SEQ ID NO: 27926
  misc_feature (1)..(1495): Ceres Seq. ID no. 12335145
  misc_feature (1)..(1495): Ortholog of  Ceres SEQ ID NO 15171669 as cited in SEQ ID NO 51370

SEQ ID NO: 31517 - protein, 224 aa, Arabidopsis thaliana; identical to SEQ ID NO: 27927
  peptide (1)..(224): Ceres Seq. ID no. 12335146

SEQ ID NO: 31518 - protein, 210 aa, Arabidopsis thaliana; identical to SEQ ID NO: 27928
  peptide (1)..(210): Ceres Seq. ID no. 12335147

SEQ ID NO: 31519 - protein, 206 aa, Arabidopsis thaliana; identical to SEQ ID NO: 27929
  peptide (1)..(206): Ceres Seq. ID no. 12335148

SEQ ID NO: 31520 - DNA, 1150 bp, Arabidopsis thaliana; identical to SEQ ID NO: 27930
  misc_feature (1)..(1150): Ceres Seq. ID no. 13491427
  misc_feature (1)..(1150): Ortholog of  Ceres SEQ ID NO 14312711 as cited in SEQ ID NO 1401
  misc_feature (1)..(1150): Ortholog of  Ceres SEQ ID NO 13586635 as cited in SEQ ID NO 14217
  misc_feature (1)..(1150): Ortholog of  Ceres SEQ ID NO 12616285 as cited in SEQ ID NO 63483

SEQ ID NO: 31521 - protein, 234 aa, Arabidopsis thaliana; identical to SEQ ID NO: 27931
  peptide (1)..(234): Ceres Seq. ID no. 13491428

SEQ ID NO: 31522 - protein, 227 aa, Arabidopsis thaliana; identical to SEQ ID NO: 27932
  peptide (1)..(227): Ceres Seq. ID no. 13491429

SEQ ID NO: 31523 - protein, 219 aa, Arabidopsis thaliana; identical to SEQ ID NO: 27933
  peptide (1)..(219): Ceres Seq. ID no. 13491430

SEQ ID NO: 31524 - DNA, 1266 bp, Arabidopsis thaliana; identical to SEQ ID NO: 27934
  misc_feature (1)..(1266): Ceres Seq. ID no. 13490700
  misc_feature (1)..(1266): Ortholog of  Ceres SEQ ID NO 15171275 as cited in SEQ ID NO 51428

SEQ ID NO: 31525 - protein, 362 aa, Arabidopsis thaliana; identical to SEQ ID NO: 27935
  peptide (1)..(362): Ceres Seq. ID no. 13490701

SEQ ID NO: 31526 - protein, 344 aa, Arabidopsis thaliana; identical to SEQ ID NO: 27936
  peptide (1)..(344): Ceres Seq. ID no. 13490702

SEQ ID NO: 31527 - protein, 243 aa, Arabidopsis thaliana; identical to SEQ ID NO: 27937
  peptide (1)..(243): Ceres Seq. ID no. 13490703

SEQ ID NO: 31528 - DNA, 1803 bp, Arabidopsis thaliana; identical to SEQ ID NO: 27938
  misc_feature (1)..(1803): Ceres Seq. ID no. 12335487
  misc_feature (1)..(1803): Ortholog of  Ceres SEQ ID NO 15177258 as cited in SEQ ID NO 51386

SEQ ID NO: 31529 - protein, 539 aa, Arabidopsis thaliana; identical to SEQ ID NO: 27939
  peptide (1)..(539): Ceres Seq. ID no. 12335488

SEQ ID NO: 31530 - protein, 512 aa, Arabidopsis thaliana; identical to SEQ ID NO: 24986
  peptide (1)..(512): Ceres Seq. ID no. 12335489

SEQ ID NO: 31531 - protein, 507 aa, Arabidopsis thaliana; identical to SEQ ID NO: 24987
  peptide (1)..(507): Ceres Seq. ID no. 12335490

SEQ ID NO: 31532 - DNA, 1323 bp, Arabidopsis thaliana; identical to SEQ ID NO: 27942
  misc_feature (1)..(1323): Ceres Seq. ID no. 12335491
  misc_feature (1)..(1323): Ortholog of  Ceres SEQ ID NO 13596891 as cited in SEQ ID NO 62868
  misc_feature (1)..(1323): Ortholog of  Ceres SEQ ID NO 12617235 as cited in SEQ ID NO 63990
  misc_feature (1)..(1323): Ortholog of  Ceres SEQ ID NO 13655371 as cited in SEQ ID NO 68945

SEQ ID NO: 31533 - protein, 346 aa, Arabidopsis thaliana; identical to SEQ ID NO: 27943
  peptide (1)..(346): Ceres Seq. ID no. 12335492

SEQ ID NO: 31534 - protein, 307 aa, Arabidopsis thaliana; identical to SEQ ID NO: 27944
  peptide (1)..(307): Ceres Seq. ID no. 12335493

SEQ ID NO: 31535 - protein, 292 aa, Arabidopsis thaliana; identical to SEQ ID NO: 27945
  peptide (1)..(292): Ceres Seq. ID no. 12335494

SEQ ID NO: 31536 - DNA, 1342 bp, Arabidopsis thaliana; identical to SEQ ID NO: 27946
  misc_feature (1)..(1342): Ceres Seq. ID no. 12562020
  misc_feature (1)..(1342): Ortholog of  Ceres SEQ ID NO 15176911 as cited in SEQ ID NO 54868
  misc_feature (1)..(1342): Ortholog of  Ceres SEQ ID NO 13596433 as cited in SEQ ID NO 68721
  misc_feature (1)..(1342): Ortholog of  Ceres SEQ ID NO 13599169 as cited in SEQ ID NO 0

SEQ ID NO: 31537 - protein, 357 aa, Arabidopsis thaliana; identical to SEQ ID NO: 27947
  peptide (1)..(357): Ceres Seq. ID no. 12562021

SEQ ID NO: 31538 - protein, 342 aa, Arabidopsis thaliana; identical to SEQ ID NO: 27948
  peptide (1)..(342): Ceres Seq. ID no. 12562022

SEQ ID NO: 31539 - protein, 313 aa, Arabidopsis thaliana; identical to SEQ ID NO: 27949
  peptide (1)..(313): Ceres Seq. ID no. 12562023

SEQ ID NO: 31540 - DNA, 1148 bp, Arabidopsis thaliana; identical to SEQ ID NO: 27950
  misc_feature (1)..(1148): Ceres Seq. ID no. 12334358
  misc_feature (1)..(1148): Ortholog of  Ceres SEQ ID NO 14312166 as cited in SEQ ID NO 59253

SEQ ID NO: 31541 - protein, 307 aa, Arabidopsis thaliana; identical to SEQ ID NO: 27951
  peptide (1)..(307): Ceres Seq. ID no. 12334359

SEQ ID NO: 31542 - protein, 297 aa, Arabidopsis thaliana; identical to SEQ ID NO: 27952
  peptide (1)..(297): Ceres Seq. ID no. 12334360

SEQ ID NO: 31543 - protein, 236 aa, Arabidopsis thaliana; identical to SEQ ID NO: 27953
  peptide (1)..(236): Ceres Seq. ID no. 12334361

SEQ ID NO: 31544 - DNA, 1458 bp, Arabidopsis thaliana; identical to SEQ ID NO: 27954
  misc_feature (1)..(1458): Ceres Seq. ID no. 12325068
  misc_feature (1)..(1458): Ortholog of  Ceres SEQ ID NO 15177221 as cited in SEQ ID NO 53046
  misc_feature (1)..(1458): Ortholog of  Ceres SEQ ID NO 14315134 as cited in SEQ ID NO 59476
  misc_feature (1)..(1458): Ortholog of  Ceres SEQ ID NO 12616332 as cited in SEQ ID NO 63449
  misc_feature (1)..(1458): Ortholog of  Ceres SEQ ID NO 13597498 as cited in SEQ ID NO 64648
  misc_feature (1)..(1458): Ortholog of  Ceres SEQ ID NO 14308053 as cited in SEQ ID NO 67790

SEQ ID NO: 31545 - protein, 393 aa, Arabidopsis thaliana; identical to SEQ ID NO: 27955
  peptide (1)..(393): Ceres Seq. ID no. 12325069

SEQ ID NO: 31546 - protein, 384 aa, Arabidopsis thaliana; identical to SEQ ID NO: 27956
  peptide (1)..(384): Ceres Seq. ID no. 12325070

SEQ ID NO: 31547 - protein, 282 aa, Arabidopsis thaliana; identical to SEQ ID NO: 27957
  peptide (1)..(282): Ceres Seq. ID no. 12325071

SEQ ID NO: 31548 - DNA, 1306 bp, Arabidopsis thaliana; identical to SEQ ID NO: 27958
  misc_feature (1)..(1306): Ceres Seq. ID no. 12421637
  misc_feature (1)..(1306): Ortholog of  Ceres SEQ ID NO 14304871 as cited in SEQ ID NO 54194
  misc_feature (1)..(1306): Ortholog of  Ceres SEQ ID NO 13597751 as cited in SEQ ID NO 60721

SEQ ID NO: 31549 - protein, 350 aa, Arabidopsis thaliana; identical to SEQ ID NO: 27959
  peptide (1)..(350): Ceres Seq. ID no. 12421638

SEQ ID NO: 31550 - protein, 323 aa, Arabidopsis thaliana; identical to SEQ ID NO: 27960
  peptide (1)..(323): Ceres Seq. ID no. 12421639

SEQ ID NO: 31551 - protein, 296 aa, Arabidopsis thaliana; identical to SEQ ID NO: 27961
  peptide (1)..(296): Ceres Seq. ID no. 12421640

SEQ ID NO: 31552 - DNA, 1935 bp, Arabidopsis thaliana; identical to SEQ ID NO: 27962
  misc_feature (1)..(1935): Ceres Seq. ID no. 12371338
  misc_feature (1)..(1935): Ortholog of  Ceres SEQ ID NO 14310841 as cited in SEQ ID NO 53666
  misc_feature (1)..(1935): Ortholog of  Ceres SEQ ID NO 15178736 as cited in SEQ ID NO 56439
  misc_feature (1)..(1935): Ortholog of  Ceres SEQ ID NO 14308493 as cited in SEQ ID NO 60320

SEQ ID NO: 31553 - protein, 536 aa, Arabidopsis thaliana; identical to SEQ ID NO: 27963
  peptide (1)..(536): Ceres Seq. ID no. 12371339

SEQ ID NO: 31554 - protein, 529 aa, Arabidopsis thaliana; identical to SEQ ID NO: 27964
  peptide (1)..(529): Ceres Seq. ID no. 12371340

SEQ ID NO: 31555 - protein, 484 aa, Arabidopsis thaliana; identical to SEQ ID NO: 27965
  peptide (1)..(484): Ceres Seq. ID no. 12371341

SEQ ID NO: 31556 - DNA, 1032 bp, Arabidopsis thaliana; identical to SEQ ID NO: 27966
  misc_feature (1)..(1032): Ceres Seq. ID no. 12332963
  misc_feature (1)..(1032): Ortholog of  Ceres SEQ ID NO 14308278 as cited in SEQ ID NO 55403
  misc_feature (1)..(1032): Ortholog of  Ceres SEQ ID NO 12618176 as cited in SEQ ID NO 64489
  misc_feature (1)..(1032): Ortholog of  Ceres SEQ ID NO 15179231 as cited in SEQ ID NO 0

SEQ ID NO: 31557 - protein, 281 aa, Arabidopsis thaliana; identical to SEQ ID NO: 27967
  peptide (1)..(281): Ceres Seq. ID no. 12332964

SEQ ID NO: 31558 - protein, 259 aa, Arabidopsis thaliana; identical to SEQ ID NO: 27968
  peptide (1)..(259): Ceres Seq. ID no. 12332965

SEQ ID NO: 31559 - protein, 202 aa, Arabidopsis thaliana; identical to SEQ ID NO: 27969
  peptide (1)..(202): Ceres Seq. ID no. 12332966

SEQ ID NO: 31560 - DNA, 998 bp, Arabidopsis thaliana; identical to SEQ ID NO: 27970
  misc_feature (1)..(998): Ceres Seq. ID no. 12325548
  misc_feature (1)..(998): Ortholog of  Ceres SEQ ID NO 15172948 as cited in SEQ ID NO 51777
  misc_feature (1)..(998): Ortholog of  Ceres SEQ ID NO 12784416 as cited in SEQ ID NO 61324

SEQ ID NO: 31561 - protein, 218 aa, Arabidopsis thaliana; identical to SEQ ID NO: 27971
  peptide (1)..(218): Ceres Seq. ID no. 12325549

SEQ ID NO: 31562 - protein, 111 aa, Arabidopsis thaliana; identical to SEQ ID NO: 27972
  peptide (1)..(111): Ceres Seq. ID no. 12325550

SEQ ID NO: 31563 - DNA, 908 bp, Arabidopsis thaliana; identical to SEQ ID NO: 27973
  misc_feature (1)..(908): Ceres Seq. ID no. 12394059
  misc_feature (1)..(908): Ortholog of  Ceres SEQ ID NO 12610239 as cited in SEQ ID NO 56199
  misc_feature (1)..(908): Ortholog of  Ceres SEQ ID NO 12782126 as cited in SEQ ID NO 60168

SEQ ID NO: 31564 - protein, 191 aa, Arabidopsis thaliana; identical to SEQ ID NO: 27974
  peptide (1)..(191): Ceres Seq. ID no. 12394060

SEQ ID NO: 31565 - protein, 188 aa, Arabidopsis thaliana; identical to SEQ ID NO: 27975
  peptide (1)..(188): Ceres Seq. ID no. 12394061

SEQ ID NO: 31566 - DNA, 853 bp, Arabidopsis thaliana; identical to SEQ ID NO: 27976
  misc_feature (1)..(853): Ceres Seq. ID no. 12421660
  misc_feature (1)..(853): Ortholog of  Ceres SEQ ID NO 14312262 as cited in SEQ ID NO 57108

SEQ ID NO: 31567 - protein, 207 aa, Arabidopsis thaliana; identical to SEQ ID NO: 27977
  peptide (1)..(207): Ceres Seq. ID no. 12421661

SEQ ID NO: 31568 - protein, 197 aa, Arabidopsis thaliana; identical to SEQ ID NO: 27978
  peptide (1)..(197): Ceres Seq. ID no. 12421662

SEQ ID NO: 31569 - DNA, 692 bp, Arabidopsis thaliana; identical to SEQ ID NO: 27979
  misc_feature (1)..(692): Ceres Seq. ID no. 12340023
  misc_feature (1)..(692): Ortholog of  Ceres SEQ ID NO 12635272 as cited in SEQ ID NO 495
  misc_feature (1)..(692): Ortholog of  Ceres SEQ ID NO 13594789 as cited in SEQ ID NO 52172
  misc_feature (1)..(692): Ortholog of  Ceres SEQ ID NO 14306131 as cited in SEQ ID NO 52246
  misc_feature (1)..(692): Ortholog of  Ceres SEQ ID NO 14309585 as cited in SEQ ID NO 52660
  misc_feature (1)..(692): Ortholog of  Ceres SEQ ID NO 14305267 as cited in SEQ ID NO 0

SEQ ID NO: 31570 - protein, 158 aa, Arabidopsis thaliana; identical to SEQ ID NO: 27980
  peptide (1)..(158): Ceres Seq. ID no. 12340024

SEQ ID NO: 31571 - DNA, 837 bp, Arabidopsis thaliana; identical to SEQ ID NO: 27981
  misc_feature (1)..(837): Ceres Seq. ID no. 12423298
  misc_feature (1)..(837): Ortholog of  Ceres SEQ ID NO 13580026 as cited in SEQ ID NO 62641

SEQ ID NO: 31572 - protein, 183 aa, Arabidopsis thaliana; identical to SEQ ID NO: 27982
  peptide (1)..(183): Ceres Seq. ID no. 12423299

SEQ ID NO: 31573 - protein, 167 aa, Arabidopsis thaliana; identical to SEQ ID NO: 27983
  peptide (1)..(167): Ceres Seq. ID no. 12423300

SEQ ID NO: 31574 - protein, 166 aa, Arabidopsis thaliana; identical to SEQ ID NO: 27984
  peptide (1)..(166): Ceres Seq. ID no. 12423301

SEQ ID NO: 31575 - DNA, 911 bp, Arabidopsis thaliana; identical to SEQ ID NO: 27985
  misc_feature (1)..(911): Ceres Seq. ID no. 13486631
  misc_feature (1)..(911): Ortholog of  Ceres SEQ ID NO 14303374 as cited in SEQ ID NO 54088
  misc_feature (1)..(911): Ortholog of  Ceres SEQ ID NO 13639250 as cited in SEQ ID NO 56555
  misc_feature (1)..(911): Ortholog of  Ceres SEQ ID NO 15177034 as cited in SEQ ID NO 60024
  misc_feature (1)..(911): Ortholog of  Ceres SEQ ID NO 13598257 as cited in SEQ ID NO 63008
  misc_feature (1)..(911): Ortholog of  Ceres SEQ ID NO 13597309 as cited in SEQ ID NO 63851
  misc_feature (1)..(911): Ortholog of  Ceres SEQ ID NO 12599167 as cited in SEQ ID NO 64443

SEQ ID NO: 31576 - protein, 209 aa, Arabidopsis thaliana; identical to SEQ ID NO: 27986
  peptide (1)..(209): Ceres Seq. ID no. 13486632

SEQ ID NO: 31577 - DNA, 1368 bp, Arabidopsis thaliana; identical to SEQ ID NO: 27987
  misc_feature (1)..(1368): Ceres Seq. ID no. 12423294
  misc_feature (1)..(1368): Ortholog of  Ceres SEQ ID NO 13597205 as cited in SEQ ID NO 63422
  misc_feature (1)..(1368): Ortholog of  Ceres SEQ ID NO 14302511 as cited in SEQ ID NO 67604
  misc_feature (1)..(1368): Ortholog of  Ceres SEQ ID NO 15226642 as cited in SEQ ID NO 0

SEQ ID NO: 31578 - protein, 313 aa, Arabidopsis thaliana; identical to SEQ ID NO: 27988
  peptide (1)..(313): Ceres Seq. ID no. 12423295

SEQ ID NO: 31579 - protein, 186 aa, Arabidopsis thaliana; identical to SEQ ID NO: 27989
  peptide (1)..(186): Ceres Seq. ID no. 12423296

SEQ ID NO: 31580 - protein, 157 aa, Arabidopsis thaliana; identical to SEQ ID NO: 27990
  peptide (1)..(157): Ceres Seq. ID no. 12423297

SEQ ID NO: 31581 - DNA, 919 bp, Arabidopsis thaliana; identical to SEQ ID NO: 27991
  misc_feature (1)..(919): Ceres Seq. ID no. 13488627
  misc_feature (1)..(919): Ortholog of  Ceres SEQ ID NO 13587227 as cited in SEQ ID NO 513
  misc_feature (1)..(919): Ortholog of  Ceres SEQ ID NO 13594494 as cited in SEQ ID NO 51293
  misc_feature (1)..(919): Ortholog of  Ceres SEQ ID NO 13595538 as cited in SEQ ID NO 59858
  misc_feature (1)..(919): Ortholog of  Ceres SEQ ID NO 12598249 as cited in SEQ ID NO 61073
  misc_feature (1)..(919): Ortholog of  Ceres SEQ ID NO 13582815 as cited in SEQ ID NO 68106

SEQ ID NO: 31582 - protein, 179 aa, Arabidopsis thaliana; identical to SEQ ID NO: 27992
  peptide (1)..(179): Ceres Seq. ID no. 13488628

SEQ ID NO: 31583 - DNA, 1792 bp, Arabidopsis thaliana; identical to SEQ ID NO: 22471
  misc_feature (1)..(1792): Ceres Seq. ID no. 13490532
  misc_feature (1)..(1792): Ortholog of  Ceres SEQ ID NO 13600220 as cited in SEQ ID NO 0

SEQ ID NO: 31584 - protein, 524 aa, Arabidopsis thaliana; identical to SEQ ID NO: 22472
  peptide (1)..(524): Ceres Seq. ID no. 13490533

SEQ ID NO: 31585 - protein, 423 aa, Arabidopsis thaliana; identical to SEQ ID NO: 22473
  peptide (1)..(423): Ceres Seq. ID no. 13490534

SEQ ID NO: 31586 - protein, 413 aa, Arabidopsis thaliana; identical to SEQ ID NO: 22474
  peptide (1)..(413): Ceres Seq. ID no. 13490535

SEQ ID NO: 31587 - DNA, 970 bp, Arabidopsis thaliana; identical to SEQ ID NO: 27997
  misc_feature (1)..(970): Ceres Seq. ID no. 13504892
  misc_feature (1)..(970): Ortholog of  Ceres SEQ ID NO 12557432 as cited in SEQ ID NO 92

SEQ ID NO: 31588 - protein, 237 aa, Arabidopsis thaliana; identical to SEQ ID NO: 27998
  peptide (1)..(237): Ceres Seq. ID no. 13504893

SEQ ID NO: 31589 - protein, 170 aa, Arabidopsis thaliana; identical to SEQ ID NO: 27999
  peptide (1)..(170): Ceres Seq. ID no. 13504894

SEQ ID NO: 31590 - protein, 160 aa, Arabidopsis thaliana; identical to SEQ ID NO: 28000
  peptide (1)..(160): Ceres Seq. ID no. 13504895

SEQ ID NO: 31591 - DNA, 1153 bp, Arabidopsis thaliana; identical to SEQ ID NO: 28001
  misc_feature (1)..(1153): Ceres Seq. ID no. 12334239
  misc_feature (1)..(1153): Ortholog of  Ceres SEQ ID NO 13656436 as cited in SEQ ID NO 69154

SEQ ID NO: 31592 - protein, 129 aa, Arabidopsis thaliana; identical to SEQ ID NO: 28002
  peptide (1)..(129): Ceres Seq. ID no. 12334240

SEQ ID NO: 31593 - protein, 121 aa, Arabidopsis thaliana; identical to SEQ ID NO: 28003
  peptide (1)..(121): Ceres Seq. ID no. 12334241

SEQ ID NO: 31594 - protein, 120 aa, Arabidopsis thaliana; identical to SEQ ID NO: 28004
  peptide (1)..(120): Ceres Seq. ID no. 12334242

SEQ ID NO: 31595 - DNA, 1203 bp, Arabidopsis thaliana; identical to SEQ ID NO: 28005
  misc_feature (1)..(1203): Ceres Seq. ID no. 12371326
  misc_feature (1)..(1203): Ortholog of  Ceres SEQ ID NO 12609041 as cited in SEQ ID NO 51310
  misc_feature (1)..(1203): Ortholog of  Ceres SEQ ID NO 13594966 as cited in SEQ ID NO 56152
  misc_feature (1)..(1203): Ortholog of  Ceres SEQ ID NO 12582457 as cited in SEQ ID NO 57530
  misc_feature (1)..(1203): Ortholog of  Ceres SEQ ID NO 13655804 as cited in SEQ ID NO 64881

SEQ ID NO: 31596 - protein, 182 aa, Arabidopsis thaliana; identical to SEQ ID NO: 28006
  peptide (1)..(182): Ceres Seq. ID no. 12371327

SEQ ID NO: 31597 - protein, 177 aa, Arabidopsis thaliana; identical to SEQ ID NO: 28007
  peptide (1)..(177): Ceres Seq. ID no. 12371328

SEQ ID NO: 31598 - protein, 122 aa, Arabidopsis thaliana; identical to SEQ ID NO: 28008
  peptide (1)..(122): Ceres Seq. ID no. 12371329

SEQ ID NO: 31599 - DNA, 1271 bp, Arabidopsis thaliana; identical to SEQ ID NO: 28009
  misc_feature (1)..(1271): Ceres Seq. ID no. 13490305
  misc_feature (1)..(1271): Ortholog of  Ceres SEQ ID NO 15224973 as cited in SEQ ID NO 58138

SEQ ID NO: 31600 - protein, 334 aa, Arabidopsis thaliana; identical to SEQ ID NO: 28010
  peptide (1)..(334): Ceres Seq. ID no. 13490306

SEQ ID NO: 31601 - protein, 312 aa, Arabidopsis thaliana; identical to SEQ ID NO: 28011
  peptide (1)..(312): Ceres Seq. ID no. 13490307

SEQ ID NO: 31602 - protein, 245 aa, Arabidopsis thaliana; identical to SEQ ID NO: 28012
  peptide (1)..(245): Ceres Seq. ID no. 13490308

SEQ ID NO: 31603 - DNA, 1479 bp, Arabidopsis thaliana; identical to SEQ ID NO: 28013
  misc_feature (1)..(1479): Ceres Seq. ID no. 13499756
  misc_feature (1)..(1479): Ortholog of  Ceres SEQ ID NO 13599520 as cited in SEQ ID NO 633
  misc_feature (1)..(1479): Ortholog of  Ceres SEQ ID NO 13595142 as cited in SEQ ID NO 56671
  misc_feature (1)..(1479): Ortholog of  Ceres SEQ ID NO 15168569 as cited in SEQ ID NO 58123
  misc_feature (1)..(1479): Ortholog of  Ceres SEQ ID NO 15226382 as cited in SEQ ID NO 63295
  misc_feature (1)..(1479): Ortholog of  Ceres SEQ ID NO 13598460 as cited in SEQ ID NO 63382
  misc_feature (1)..(1479): Ortholog of  Ceres SEQ ID NO 13597403 as cited in SEQ ID NO 64085

SEQ ID NO: 31604 - protein, 408 aa, Arabidopsis thaliana; identical to SEQ ID NO: 28014
  peptide (1)..(408): Ceres Seq. ID no. 13499757

SEQ ID NO: 31605 - protein, 369 aa, Arabidopsis thaliana; identical to SEQ ID NO: 28015
  peptide (1)..(369): Ceres Seq. ID no. 13499758

SEQ ID NO: 31606 - protein, 311 aa, Arabidopsis thaliana; identical to SEQ ID NO: 28016
  peptide (1)..(311): Ceres Seq. ID no. 13499759

SEQ ID NO: 31607 - DNA, 1174 bp, Arabidopsis thaliana; identical to SEQ ID NO: 28017
  misc_feature (1)..(1174): Ceres Seq. ID no. 13500049
  misc_feature (1)..(1174): Ortholog of  Ceres SEQ ID NO 15178809 as cited in SEQ ID NO 401
  misc_feature (1)..(1174): Ortholog of  Ceres SEQ ID NO 15177055 as cited in SEQ ID NO 57450
  misc_feature (1)..(1174): Ortholog of  Ceres SEQ ID NO 12615854 as cited in SEQ ID NO 62880

SEQ ID NO: 31608 - protein, 279 aa, Arabidopsis thaliana; identical to SEQ ID NO: 28018
  peptide (1)..(279): Ceres Seq. ID no. 13500050

SEQ ID NO: 31609 - DNA, 914 bp, Arabidopsis thaliana; identical to SEQ ID NO: 28019
  misc_feature (1)..(914): Ceres Seq. ID no. 12393250
  misc_feature (1)..(914): Ortholog of  Ceres SEQ ID NO 12467471 as cited in SEQ ID NO 55509
  misc_feature (1)..(914): Ortholog of  Ceres SEQ ID NO 13598557 as cited in SEQ ID NO 65168

SEQ ID NO: 31610 - protein, 164 aa, Arabidopsis thaliana; identical to SEQ ID NO: 28020
  peptide (1)..(164): Ceres Seq. ID no. 12393251

SEQ ID NO: 31611 - protein, 116 aa, Arabidopsis thaliana; identical to SEQ ID NO: 28021
  peptide (1)..(116): Ceres Seq. ID no. 12393252

SEQ ID NO: 31612 - DNA, 662 bp, Arabidopsis thaliana; identical to SEQ ID NO: 28022
  misc_feature (1)..(662): Ceres Seq. ID no. 12333587
  misc_feature (1)..(662): Ortholog of  Ceres SEQ ID NO 15180055 as cited in SEQ ID NO 1186

SEQ ID NO: 31613 - protein, 144 aa, Arabidopsis thaliana; identical to SEQ ID NO: 28023
  peptide (1)..(144): Ceres Seq. ID no. 12333588

SEQ ID NO: 31614 - protein, 112 aa, Arabidopsis thaliana; identical to SEQ ID NO: 28024
  peptide (1)..(112): Ceres Seq. ID no. 12333589

SEQ ID NO: 31615 - protein, 80 aa, Arabidopsis thaliana; identical to SEQ ID NO: 28025
  peptide (1)..(80): Ceres Seq. ID no. 12333590

SEQ ID NO: 31616 - DNA, 1153 bp, Arabidopsis thaliana; identical to SEQ ID NO: 28026
  misc_feature (1)..(1153): Ceres Seq. ID no. 12324234
  misc_feature (1)..(1153): Ortholog of  Ceres SEQ ID NO 14302396 as cited in SEQ ID NO 66907
  misc_feature (1)..(1153): Ortholog of  Ceres SEQ ID NO 13496281 as cited in SEQ ID NO 69175

SEQ ID NO: 31617 - protein, 228 aa, Arabidopsis thaliana; identical to SEQ ID NO: 28027
  peptide (1)..(228): Ceres Seq. ID no. 12324235

SEQ ID NO: 31618 - protein, 198 aa, Arabidopsis thaliana; identical to SEQ ID NO: 28028
  peptide (1)..(198): Ceres Seq. ID no. 12324236

SEQ ID NO: 31619 - DNA, 819 bp, Arabidopsis thaliana; identical to SEQ ID NO: 28029
  misc_feature (1)..(819): Ceres Seq. ID no. 13621966
  misc_feature (1)..(819): Ortholog of  Ceres SEQ ID NO 15173567 as cited in SEQ ID NO 57612
  misc_feature (1)..(819): Ortholog of  Ceres SEQ ID NO 12611396 as cited in SEQ ID NO 59809
  misc_feature (1)..(819): Ortholog of  Ceres SEQ ID NO 15178140 as cited in SEQ ID NO 0

SEQ ID NO: 31620 - protein, 168 aa, Arabidopsis thaliana; identical to SEQ ID NO: 28030
  peptide (1)..(168): Ceres Seq. ID no. 13621967

SEQ ID NO: 31621 - DNA, 1087 bp, Arabidopsis thaliana; identical to SEQ ID NO: 28031
  misc_feature (1)..(1087): Ceres Seq. ID no. 13497134
  misc_feature (1)..(1087): Ortholog of  Ceres SEQ ID NO 13595414 as cited in SEQ ID NO 56539

SEQ ID NO: 31622 - protein, 317 aa, Arabidopsis thaliana; identical to SEQ ID NO: 28032
  peptide (1)..(317): Ceres Seq. ID no. 13497135

SEQ ID NO: 31623 - protein, 290 aa, Arabidopsis thaliana; identical to SEQ ID NO: 28033
  peptide (1)..(290): Ceres Seq. ID no. 13497136

SEQ ID NO: 31624 - protein, 239 aa, Arabidopsis thaliana; identical to SEQ ID NO: 28034
  peptide (1)..(239): Ceres Seq. ID no. 13497137

SEQ ID NO: 31625 - DNA, 1117 bp, Arabidopsis thaliana; identical to SEQ ID NO: 28035
  misc_feature (1)..(1117): Ceres Seq. ID no. 12371743
  misc_feature (1)..(1117): Ortholog of  Ceres SEQ ID NO 14313413 as cited in SEQ ID NO 58766
  misc_feature (1)..(1117): Ortholog of  Ceres SEQ ID NO 15171109 as cited in SEQ ID NO 59576

SEQ ID NO: 31626 - protein, 186 aa, Arabidopsis thaliana; identical to SEQ ID NO: 28036
  peptide (1)..(186): Ceres Seq. ID no. 12371744

SEQ ID NO: 31627 - DNA, 1202 bp, Arabidopsis thaliana; identical to SEQ ID NO: 28037
  misc_feature (1)..(1202): Ceres Seq. ID no. 13504859
  misc_feature (1)..(1202): Ortholog of  Ceres SEQ ID NO 12583421 as cited in SEQ ID NO 56410
  misc_feature (1)..(1202): Ortholog of  Ceres SEQ ID NO 15169300 as cited in SEQ ID NO 59572
  misc_feature (1)..(1202): Ortholog of  Ceres SEQ ID NO 15176407 as cited in SEQ ID NO 59620
  misc_feature (1)..(1202): Ortholog of  Ceres SEQ ID NO 13596876 as cited in SEQ ID NO 62696
  misc_feature (1)..(1202): Ortholog of  Ceres SEQ ID NO 13655442 as cited in SEQ ID NO 64359

SEQ ID NO: 31628 - protein, 323 aa, Arabidopsis thaliana; identical to SEQ ID NO: 28038
  peptide (1)..(323): Ceres Seq. ID no. 13504860

SEQ ID NO: 31629 - protein, 316 aa, Arabidopsis thaliana; identical to SEQ ID NO: 28039
  peptide (1)..(316): Ceres Seq. ID no. 13504861

SEQ ID NO: 31630 - protein, 275 aa, Arabidopsis thaliana; identical to SEQ ID NO: 28040
  peptide (1)..(275): Ceres Seq. ID no. 13504862

SEQ ID NO: 31631 - DNA, 1684 bp, Arabidopsis thaliana; identical to SEQ ID NO: 27249
  misc_feature (1)..(1684): Ceres Seq. ID no. 12739003
  misc_feature (1)..(1684): Ortholog of  Ceres SEQ ID NO 13597407 as cited in SEQ ID NO 64106

SEQ ID NO: 31632 - protein, 332 aa, Arabidopsis thaliana; identical to SEQ ID NO: 27250
  peptide (1)..(332): Ceres Seq. ID no. 12739004

SEQ ID NO: 31633 - protein, 212 aa, Arabidopsis thaliana; identical to SEQ ID NO: 27251
  peptide (1)..(212): Ceres Seq. ID no. 12739005

SEQ ID NO: 31634 - protein, 193 aa, Arabidopsis thaliana; identical to SEQ ID NO: 27252
  peptide (1)..(193): Ceres Seq. ID no. 12739006

SEQ ID NO: 31635 - DNA, 1307 bp, Arabidopsis thaliana; identical to SEQ ID NO: 28045
  misc_feature (1)..(1307): Ceres Seq. ID no. 13493913
  misc_feature (1)..(1307): Ortholog of  Ceres SEQ ID NO 13582619 as cited in SEQ ID NO 56520
  misc_feature (1)..(1307): Ortholog of  Ceres SEQ ID NO 14314632 as cited in SEQ ID NO 59923
  misc_feature (1)..(1307): Ortholog of  Ceres SEQ ID NO 13660872 as cited in SEQ ID NO 60830
  misc_feature (1)..(1307): Ortholog of  Ceres SEQ ID NO 12616221 as cited in SEQ ID NO 63291

SEQ ID NO: 31636 - protein, 318 aa, Arabidopsis thaliana; identical to SEQ ID NO: 28046
  peptide (1)..(318): Ceres Seq. ID no. 13493914

SEQ ID NO: 31637 - protein, 196 aa, Arabidopsis thaliana; identical to SEQ ID NO: 28047
  peptide (1)..(196): Ceres Seq. ID no. 13493915

SEQ ID NO: 31638 - protein, 175 aa, Arabidopsis thaliana; identical to SEQ ID NO: 28048
  peptide (1)..(175): Ceres Seq. ID no. 13493916

SEQ ID NO: 31639 - DNA, 1023 bp, Arabidopsis thaliana; identical to SEQ ID NO: 28049
  misc_feature (1)..(1023): Ceres Seq. ID no. 12334086
  misc_feature (1)..(1023): Ortholog of  Ceres SEQ ID NO 13597272 as cited in SEQ ID NO 63951

SEQ ID NO: 31640 - protein, 289 aa, Arabidopsis thaliana; identical to SEQ ID NO: 28050
  peptide (1)..(289): Ceres Seq. ID no. 12334087

SEQ ID NO: 31641 - protein, 249 aa, Arabidopsis thaliana; identical to SEQ ID NO: 28051
  peptide (1)..(249): Ceres Seq. ID no. 12334088

SEQ ID NO: 31642 - protein, 202 aa, Arabidopsis thaliana; identical to SEQ ID NO: 28052
  peptide (1)..(202): Ceres Seq. ID no. 12334089

SEQ ID NO: 31643 - DNA, 817 bp, Arabidopsis thaliana; identical to SEQ ID NO: 28053
  misc_feature (1)..(817): Ceres Seq. ID no. 12331774
  misc_feature (1)..(817): Ortholog of  Ceres SEQ ID NO 14309515 as cited in SEQ ID NO 52717

SEQ ID NO: 31644 - protein, 209 aa, Arabidopsis thaliana; identical to SEQ ID NO: 28054
  peptide (1)..(209): Ceres Seq. ID no. 12331775

SEQ ID NO: 31645 - protein, 206 aa, Arabidopsis thaliana; identical to SEQ ID NO: 28055
  peptide (1)..(206): Ceres Seq. ID no. 12331776

SEQ ID NO: 31646 - DNA, 719 bp, Arabidopsis thaliana; identical to SEQ ID NO: 28056
  misc_feature (1)..(719): Ceres Seq. ID no. 13489970
  misc_feature (1)..(719): Ortholog of  Ceres SEQ ID NO 12634455 as cited in SEQ ID NO 0

SEQ ID NO: 31647 - protein, 188 aa, Arabidopsis thaliana; identical to SEQ ID NO: 28057
  peptide (1)..(188): Ceres Seq. ID no. 13489971

SEQ ID NO: 31648 - protein, 155 aa, Arabidopsis thaliana; identical to SEQ ID NO: 28058
  peptide (1)..(155): Ceres Seq. ID no. 13489972

SEQ ID NO: 31649 - protein, 134 aa, Arabidopsis thaliana; identical to SEQ ID NO: 28059
  peptide (1)..(134): Ceres Seq. ID no. 13489973

SEQ ID NO: 31650 - DNA, 665 bp, Arabidopsis thaliana; identical to SEQ ID NO: 28060
  misc_feature (1)..(665): Ceres Seq. ID no. 12420732
  misc_feature (1)..(665): Ortholog of  Ceres SEQ ID NO 15179206 as cited in SEQ ID NO 0

SEQ ID NO: 31651 - protein, 162 aa, Arabidopsis thaliana; identical to SEQ ID NO: 28061
  peptide (1)..(162): Ceres Seq. ID no. 12420733

SEQ ID NO: 31652 - DNA, 743 bp, Arabidopsis thaliana; identical to SEQ ID NO: 28062
  misc_feature (1)..(743): Ceres Seq. ID no. 12384626
  misc_feature (1)..(743): Ortholog of  Ceres SEQ ID NO 14304183 as cited in SEQ ID NO 53725
  misc_feature (1)..(743): Ortholog of  Ceres SEQ ID NO 14305778 as cited in SEQ ID NO 57220
  misc_feature (1)..(743): Ortholog of  Ceres SEQ ID NO 14309452 as cited in SEQ ID NO 0

SEQ ID NO: 31653 - protein, 183 aa, Arabidopsis thaliana; identical to SEQ ID NO: 28063
  peptide (1)..(183): Ceres Seq. ID no. 12384627

SEQ ID NO: 31654 - protein, 162 aa, Arabidopsis thaliana; identical to SEQ ID NO: 26463
  peptide (1)..(162): Ceres Seq. ID no. 12384628

SEQ ID NO: 31655 - protein, 153 aa, Arabidopsis thaliana; identical to SEQ ID NO: 26464
  peptide (1)..(153): Ceres Seq. ID no. 12384629

SEQ ID NO: 31656 - DNA, 1362 bp, Arabidopsis thaliana; identical to SEQ ID NO: 28066
  misc_feature (1)..(1362): Ceres Seq. ID no. 13618728
  misc_feature (1)..(1362): Ortholog of  Ceres SEQ ID NO 14301572 as cited in SEQ ID NO 66173

SEQ ID NO: 31657 - protein, 362 aa, Arabidopsis thaliana; identical to SEQ ID NO: 28067
  peptide (1)..(362): Ceres Seq. ID no. 13618729

SEQ ID NO: 31658 - protein, 333 aa, Arabidopsis thaliana; identical to SEQ ID NO: 28068
  peptide (1)..(333): Ceres Seq. ID no. 13618730

SEQ ID NO: 31659 - protein, 277 aa, Arabidopsis thaliana; identical to SEQ ID NO: 28069
  peptide (1)..(277): Ceres Seq. ID no. 13618731

SEQ ID NO: 31660 - DNA, 839 bp, Arabidopsis thaliana; identical to SEQ ID NO: 28070
  misc_feature (1)..(839): Ceres Seq. ID no. 12738877
  misc_feature (1)..(839): Ortholog of  Ceres SEQ ID NO 13504237 as cited in SEQ ID NO 100
  misc_feature (1)..(839): Ortholog of  Ceres SEQ ID NO 15176643 as cited in SEQ ID NO 57825
  misc_feature (1)..(839): Ortholog of  Ceres SEQ ID NO 12598265 as cited in SEQ ID NO 65873
  misc_feature (1)..(839): Ortholog of  Ceres SEQ ID NO 15180736 as cited in SEQ ID NO 0

SEQ ID NO: 31661 - protein, 240 aa, Arabidopsis thaliana; identical to SEQ ID NO: 28071
  peptide (1)..(240): Ceres Seq. ID no. 12738878

SEQ ID NO: 31662 - protein, 207 aa, Arabidopsis thaliana; identical to SEQ ID NO: 28072
  peptide (1)..(207): Ceres Seq. ID no. 12738879

SEQ ID NO: 31663 - protein, 128 aa, Arabidopsis thaliana; identical to SEQ ID NO: 28073
  peptide (1)..(128): Ceres Seq. ID no. 12738880

SEQ ID NO: 31664 - DNA, 750 bp, Arabidopsis thaliana; identical to SEQ ID NO: 28074
  misc_feature (1)..(750): Ceres Seq. ID no. 13580820
  misc_feature (1)..(750): Ortholog of  Ceres SEQ ID NO 15174406 as cited in SEQ ID NO 0

SEQ ID NO: 31665 - protein, 118 aa, Arabidopsis thaliana; identical to SEQ ID NO: 28075
  peptide (1)..(118): Ceres Seq. ID no. 13580821

SEQ ID NO: 31666 - protein, 104 aa, Arabidopsis thaliana; identical to SEQ ID NO: 28076
  peptide (1)..(104): Ceres Seq. ID no. 13580822

SEQ ID NO: 31667 - protein, 98 aa, Arabidopsis thaliana; identical to SEQ ID NO: 28077
  peptide (1)..(98): Ceres Seq. ID no. 13580823

SEQ ID NO: 31668 - DNA, 1482 bp, Arabidopsis thaliana; identical to SEQ ID NO: 28078
  misc_feature (1)..(1482): Ceres Seq. ID no. 12324908
  misc_feature (1)..(1482): Ortholog of  Ceres SEQ ID NO 13655660 as cited in SEQ ID NO 63727

SEQ ID NO: 31669 - protein, 418 aa, Arabidopsis thaliana; identical to SEQ ID NO: 28079
  peptide (1)..(418): Ceres Seq. ID no. 12324909

SEQ ID NO: 31670 - protein, 386 aa, Arabidopsis thaliana; identical to SEQ ID NO: 28080
  peptide (1)..(386): Ceres Seq. ID no. 12324910

SEQ ID NO: 31671 - protein, 349 aa, Arabidopsis thaliana; identical to SEQ ID NO: 28081
  peptide (1)..(349): Ceres Seq. ID no. 12324911

SEQ ID NO: 31672 - DNA, 700 bp, Arabidopsis thaliana; identical to SEQ ID NO: 28082
  misc_feature (1)..(700): Ceres Seq. ID no. 12423258
  misc_feature (1)..(700): Ortholog of  Ceres SEQ ID NO 13582538 as cited in SEQ ID NO 57724

SEQ ID NO: 31673 - protein, 129 aa, Arabidopsis thaliana; identical to SEQ ID NO: 28083
  peptide (1)..(129): Ceres Seq. ID no. 12423259

SEQ ID NO: 31674 - DNA, 1277 bp, Arabidopsis thaliana; identical to SEQ ID NO: 28084
  misc_feature (1)..(1277): Ceres Seq. ID no. 12324789
  misc_feature (1)..(1277): Ortholog of  Ceres SEQ ID NO 14315189 as cited in SEQ ID NO 57702

SEQ ID NO: 31675 - protein, 356 aa, Arabidopsis thaliana; identical to SEQ ID NO: 28085
  peptide (1)..(356): Ceres Seq. ID no. 12324790

SEQ ID NO: 31676 - protein, 321 aa, Arabidopsis thaliana; identical to SEQ ID NO: 28086
  peptide (1)..(321): Ceres Seq. ID no. 12324791

SEQ ID NO: 31677 - protein, 258 aa, Arabidopsis thaliana; identical to SEQ ID NO: 28087
  peptide (1)..(258): Ceres Seq. ID no. 12324792

SEQ ID NO: 31678 - DNA, 1067 bp, Arabidopsis thaliana; identical to SEQ ID NO: 28088
  misc_feature (1)..(1067): Ceres Seq. ID no. 13646184
  misc_feature (1)..(1067): Ortholog of  Ceres SEQ ID NO 14316095 as cited in SEQ ID NO 52477

SEQ ID NO: 31679 - protein, 337 aa, Arabidopsis thaliana; identical to SEQ ID NO: 28089
  peptide (1)..(337): Ceres Seq. ID no. 13646185

SEQ ID NO: 31680 - protein, 212 aa, Arabidopsis thaliana; identical to SEQ ID NO: 28090
  peptide (1)..(212): Ceres Seq. ID no. 13646186

SEQ ID NO: 31681 - protein, 168 aa, Arabidopsis thaliana; identical to SEQ ID NO: 28091
  peptide (1)..(168): Ceres Seq. ID no. 13646187

SEQ ID NO: 31682 - DNA, 796 bp, Arabidopsis thaliana; identical to SEQ ID NO: 28092
  misc_feature (1)..(796): Ceres Seq. ID no. 13499570
  misc_feature (1)..(796): Ortholog of  Ceres SEQ ID NO 14307484 as cited in SEQ ID NO 59427

SEQ ID NO: 31683 - protein, 204 aa, Arabidopsis thaliana; identical to SEQ ID NO: 28093
  peptide (1)..(204): Ceres Seq. ID no. 13499571

SEQ ID NO: 31684 - protein, 188 aa, Arabidopsis thaliana; identical to SEQ ID NO: 28094
  peptide (1)..(188): Ceres Seq. ID no. 13499572

SEQ ID NO: 31685 - protein, 147 aa, Arabidopsis thaliana; identical to SEQ ID NO: 28095
  peptide (1)..(147): Ceres Seq. ID no. 13499573

SEQ ID NO: 31686 - DNA, 970 bp, Arabidopsis thaliana; identical to SEQ ID NO: 28096
  misc_feature (1)..(970): Ceres Seq. ID no. 12654004
  misc_feature (1)..(970): Ortholog of  Ceres SEQ ID NO 14308640 as cited in SEQ ID NO 60489
  misc_feature (1)..(970): Ortholog of  Ceres SEQ ID NO 12619999 as cited in SEQ ID NO 66123
  misc_feature (1)..(970): Ortholog of  Ceres SEQ ID NO 13656436 as cited in SEQ ID NO 69154

SEQ ID NO: 31687 - protein, 224 aa, Arabidopsis thaliana; identical to SEQ ID NO: 28097
  peptide (1)..(224): Ceres Seq. ID no. 12654005

SEQ ID NO: 31688 - protein, 181 aa, Arabidopsis thaliana; identical to SEQ ID NO: 28098
  peptide (1)..(181): Ceres Seq. ID no. 12654006

SEQ ID NO: 31689 - protein, 131 aa, Arabidopsis thaliana; identical to SEQ ID NO: 28099
  peptide (1)..(131): Ceres Seq. ID no. 12654007

SEQ ID NO: 31690 - DNA, 1521 bp, Arabidopsis thaliana; identical to SEQ ID NO: 22510
  misc_feature (1)..(1521): Ceres Seq. ID no. 12394809
  misc_feature (1)..(1521): Ortholog of  Ceres SEQ ID NO 14310864 as cited in SEQ ID NO 53602
  misc_feature (1)..(1521): Ortholog of  Ceres SEQ ID NO 12597180 as cited in SEQ ID NO 59415

SEQ ID NO: 31691 - protein, 392 aa, Arabidopsis thaliana; identical to SEQ ID NO: 22511
  peptide (1)..(392): Ceres Seq. ID no. 12394810

SEQ ID NO: 31692 - protein, 378 aa, Arabidopsis thaliana; identical to SEQ ID NO: 22512
  peptide (1)..(378): Ceres Seq. ID no. 12394811

SEQ ID NO: 31693 - protein, 205 aa, Arabidopsis thaliana; identical to SEQ ID NO: 22513
  peptide (1)..(205): Ceres Seq. ID no. 12394812

SEQ ID NO: 31694 - DNA, 1002 bp, Arabidopsis thaliana; identical to SEQ ID NO: 28104
  misc_feature (1)..(1002): Ceres Seq. ID no. 13622101
  misc_feature (1)..(1002): Ortholog of  Ceres SEQ ID NO 12557432 as cited in SEQ ID NO 92
  misc_feature (1)..(1002): Ortholog of  Ceres SEQ ID NO 14315553 as cited in SEQ ID NO 60445
  misc_feature (1)..(1002): Ortholog of  Ceres SEQ ID NO 15224319 as cited in SEQ ID NO 66044
  misc_feature (1)..(1002): Ortholog of  Ceres SEQ ID NO 13598045 as cited in SEQ ID NO 66822

SEQ ID NO: 31695 - protein, 235 aa, Arabidopsis thaliana; identical to SEQ ID NO: 28105
  peptide (1)..(235): Ceres Seq. ID no. 13622102

SEQ ID NO: 31696 - protein, 157 aa, Arabidopsis thaliana; identical to SEQ ID NO: 28106
  peptide (1)..(157): Ceres Seq. ID no. 13622103

SEQ ID NO: 31697 - protein, 118 aa, Arabidopsis thaliana; identical to SEQ ID NO: 28107
  peptide (1)..(118): Ceres Seq. ID no. 13622104

SEQ ID NO: 31698 - DNA, 1326 bp, Arabidopsis thaliana; identical to SEQ ID NO: 28108
  misc_feature (1)..(1326): Ceres Seq. ID no. 13501426
  misc_feature (1)..(1326): Ortholog of  Ceres SEQ ID NO 13657014 as cited in SEQ ID NO 65644
  misc_feature (1)..(1326): Ortholog of  Ceres SEQ ID NO 15176878 as cited in SEQ ID NO 0

SEQ ID NO: 31699 - protein, 334 aa, Arabidopsis thaliana; identical to SEQ ID NO: 28109
  peptide (1)..(334): Ceres Seq. ID no. 13501427

SEQ ID NO: 31700 - protein, 315 aa, Arabidopsis thaliana; identical to SEQ ID NO: 28110
  peptide (1)..(315): Ceres Seq. ID no. 13501428

SEQ ID NO: 31701 - protein, 243 aa, Arabidopsis thaliana; identical to SEQ ID NO: 28111
  peptide (1)..(243): Ceres Seq. ID no. 13501429

SEQ ID NO: 31702 - DNA, 1160 bp, Arabidopsis thaliana; identical to SEQ ID NO: 28112
  misc_feature (1)..(1160): Ceres Seq. ID no. 12333821
  misc_feature (1)..(1160): Ortholog of  Ceres SEQ ID NO 12614972 as cited in SEQ ID NO 61986
  misc_feature (1)..(1160): Ortholog of  Ceres SEQ ID NO 12625706 as cited in SEQ ID NO 64144
  misc_feature (1)..(1160): Ortholog of  Ceres SEQ ID NO 13584933 as cited in SEQ ID NO 65009
  misc_feature (1)..(1160): Ortholog of  Ceres SEQ ID NO 12634984 as cited in SEQ ID NO 0
  misc_feature (1)..(1160): Ortholog of  Ceres SEQ ID NO 13599377 as cited in SEQ ID NO 0

SEQ ID NO: 31703 - protein, 216 aa, Arabidopsis thaliana; identical to SEQ ID NO: 28113
  peptide (1)..(216): Ceres Seq. ID no. 12333822

SEQ ID NO: 31704 - protein, 150 aa, Arabidopsis thaliana; identical to SEQ ID NO: 28114
  peptide (1)..(150): Ceres Seq. ID no. 12333823

SEQ ID NO: 31705 - DNA, 951 bp, Arabidopsis thaliana; identical to SEQ ID NO: 28115
  misc_feature (1)..(951): Ceres Seq. ID no. 12333817
  misc_feature (1)..(951): Ortholog of  Ceres SEQ ID NO 15173035 as cited in SEQ ID NO 56029
  misc_feature (1)..(951): Ortholog of  Ceres SEQ ID NO 12608745 as cited in SEQ ID NO 58289

SEQ ID NO: 31706 - protein, 265 aa, Arabidopsis thaliana; identical to SEQ ID NO: 28116
  peptide (1)..(265): Ceres Seq. ID no. 12333818

SEQ ID NO: 31707 - protein, 217 aa, Arabidopsis thaliana; identical to SEQ ID NO: 28117
  peptide (1)..(217): Ceres Seq. ID no. 12333819

SEQ ID NO: 31708 - protein, 168 aa, Arabidopsis thaliana; identical to SEQ ID NO: 28118
  peptide (1)..(168): Ceres Seq. ID no. 12333820

SEQ ID NO: 31709 - DNA, 1058 bp, Arabidopsis thaliana; identical to SEQ ID NO: 28119
  misc_feature (1)..(1058): Ceres Seq. ID no. 12327410
  misc_feature (1)..(1058): Ortholog of  Ceres SEQ ID NO 14304689 as cited in SEQ ID NO 53265
  misc_feature (1)..(1058): Ortholog of  Ceres SEQ ID NO 14307820 as cited in SEQ ID NO 53938
  misc_feature (1)..(1058): Ortholog of  Ceres SEQ ID NO 15177137 as cited in SEQ ID NO 55030
  misc_feature (1)..(1058): Ortholog of  Ceres SEQ ID NO 14302407 as cited in SEQ ID NO 66891
  misc_feature (1)..(1058): Ortholog of  Ceres SEQ ID NO 13599557 as cited in SEQ ID NO 0

SEQ ID NO: 31710 - protein, 255 aa, Arabidopsis thaliana; identical to SEQ ID NO: 28120
  peptide (1)..(255): Ceres Seq. ID no. 12327411

SEQ ID NO: 31711 - protein, 185 aa, Arabidopsis thaliana; identical to SEQ ID NO: 28121
  peptide (1)..(185): Ceres Seq. ID no. 12327412

SEQ ID NO: 31712 - protein, 174 aa, Arabidopsis thaliana; identical to SEQ ID NO: 28122
  peptide (1)..(174): Ceres Seq. ID no. 12327413

SEQ ID NO: 31713 - DNA, 731 bp, Arabidopsis thaliana; identical to SEQ ID NO: 28123
  misc_feature (1)..(731): Ceres Seq. ID no. 12343557
  misc_feature (1)..(731): Ortholog of  Ceres SEQ ID NO 14314198 as cited in SEQ ID NO 57472
  misc_feature (1)..(731): Ortholog of  Ceres SEQ ID NO 15174264 as cited in SEQ ID NO 61877

SEQ ID NO: 31714 - protein, 148 aa, Arabidopsis thaliana; identical to SEQ ID NO: 28124
  peptide (1)..(148): Ceres Seq. ID no. 12343558

SEQ ID NO: 31715 - protein, 91 aa, Arabidopsis thaliana; identical to SEQ ID NO: 28125
  peptide (1)..(91): Ceres Seq. ID no. 12343559

SEQ ID NO: 31716 - DNA, 750 bp, Arabidopsis thaliana; identical to SEQ ID NO: 28126
  misc_feature (1)..(750): Ceres Seq. ID no. 12339757
  misc_feature (1)..(750): Ortholog of  Ceres SEQ ID NO 15170698 as cited in SEQ ID NO 58326
  misc_feature (1)..(750): Ortholog of  Ceres SEQ ID NO 14302279 as cited in SEQ ID NO 68864

SEQ ID NO: 31717 - protein, 163 aa, Arabidopsis thaliana; identical to SEQ ID NO: 28127
  peptide (1)..(163): Ceres Seq. ID no. 12339758

SEQ ID NO: 31718 - protein, 90 aa, Arabidopsis thaliana; identical to SEQ ID NO: 28128
  peptide (1)..(90): Ceres Seq. ID no. 12339759

SEQ ID NO: 31719 - DNA, 1024 bp, Arabidopsis thaliana; identical to SEQ ID NO: 28129
  misc_feature (1)..(1024): Ceres Seq. ID no. 13495970
  misc_feature (1)..(1024): Ortholog of  Ceres SEQ ID NO 15176514 as cited in SEQ ID NO 1114
  misc_feature (1)..(1024): Ortholog of  Ceres SEQ ID NO 15173688 as cited in SEQ ID NO 61918
  misc_feature (1)..(1024): Ortholog of  Ceres SEQ ID NO 13662513 as cited in SEQ ID NO 63303
  misc_feature (1)..(1024): Ortholog of  Ceres SEQ ID NO 12616929 as cited in SEQ ID NO 63962
  misc_feature (1)..(1024): Ortholog of  Ceres SEQ ID NO 15225803 as cited in SEQ ID NO 67623
  misc_feature (1)..(1024): Ortholog of  Ceres SEQ ID NO 15174088 as cited in SEQ ID NO 0

SEQ ID NO: 31720 - protein, 234 aa, Arabidopsis thaliana; identical to SEQ ID NO: 28130
  peptide (1)..(234): Ceres Seq. ID no. 13495971

SEQ ID NO: 31721 - protein, 219 aa, Arabidopsis thaliana; identical to SEQ ID NO: 28131
  peptide (1)..(219): Ceres Seq. ID no. 13495972

SEQ ID NO: 31722 - protein, 198 aa, Arabidopsis thaliana; identical to SEQ ID NO: 28132
  peptide (1)..(198): Ceres Seq. ID no. 13495973

SEQ ID NO: 31723 - DNA, 656 bp, Arabidopsis thaliana; identical to SEQ ID NO: 28133
  misc_feature (1)..(656): Ceres Seq. ID no. 13486772
  misc_feature (1)..(656): Ortholog of  Ceres SEQ ID NO 13596185 as cited in SEQ ID NO 67997

SEQ ID NO: 31724 - protein, 184 aa, Arabidopsis thaliana; identical to SEQ ID NO: 28134
  peptide (1)..(184): Ceres Seq. ID no. 13486773

SEQ ID NO: 31725 - protein, 167 aa, Arabidopsis thaliana; identical to SEQ ID NO: 28135
  peptide (1)..(167): Ceres Seq. ID no. 13486774

SEQ ID NO: 31726 - DNA, 795 bp, Arabidopsis thaliana; identical to SEQ ID NO: 28136
  misc_feature (1)..(795): Ceres Seq. ID no. 13486637
  misc_feature (1)..(795): Ortholog of  Ceres SEQ ID NO 13598160 as cited in SEQ ID NO 61317
  misc_feature (1)..(795): Ortholog of  Ceres SEQ ID NO 12614253 as cited in SEQ ID NO 68518

SEQ ID NO: 31727 - protein, 229 aa, Arabidopsis thaliana; identical to SEQ ID NO: 28137
  peptide (1)..(229): Ceres Seq. ID no. 13486638

SEQ ID NO: 31728 - protein, 222 aa, Arabidopsis thaliana; identical to SEQ ID NO: 28138
  peptide (1)..(222): Ceres Seq. ID no. 13486639

SEQ ID NO: 31729 - protein, 185 aa, Arabidopsis thaliana; identical to SEQ ID NO: 28139
  peptide (1)..(185): Ceres Seq. ID no. 13486640

SEQ ID NO: 31730 - DNA, 900 bp, Arabidopsis thaliana; identical to SEQ ID NO: 28140
  misc_feature (1)..(900): Ceres Seq. ID no. 12325562
  misc_feature (1)..(900): Ortholog of  Ceres SEQ ID NO 14306264 as cited in SEQ ID NO 1386
  misc_feature (1)..(900): Ortholog of  Ceres SEQ ID NO 15179159 as cited in SEQ ID NO 0

SEQ ID NO: 31731 - protein, 257 aa, Arabidopsis thaliana; identical to SEQ ID NO: 28141
  peptide (1)..(257): Ceres Seq. ID no. 12325563

SEQ ID NO: 31732 - protein, 247 aa, Arabidopsis thaliana; identical to SEQ ID NO: 28142
  peptide (1)..(247): Ceres Seq. ID no. 12325564

SEQ ID NO: 31733 - protein, 226 aa, Arabidopsis thaliana; identical to SEQ ID NO: 28143
  peptide (1)..(226): Ceres Seq. ID no. 12325565

SEQ ID NO: 31734 - DNA, 1145 bp, Arabidopsis thaliana; identical to SEQ ID NO: 28144
  misc_feature (1)..(1145): Ceres Seq. ID no. 12340183
  misc_feature (1)..(1145): Ortholog of  Ceres SEQ ID NO 13596944 as cited in SEQ ID NO 68910

SEQ ID NO: 31735 - protein, 347 aa, Arabidopsis thaliana; identical to SEQ ID NO: 28145
  peptide (1)..(347): Ceres Seq. ID no. 12340184

SEQ ID NO: 31736 - protein, 339 aa, Arabidopsis thaliana; identical to SEQ ID NO: 28146
  peptide (1)..(339): Ceres Seq. ID no. 12340185

SEQ ID NO: 31737 - protein, 336 aa, Arabidopsis thaliana; identical to SEQ ID NO: 28147
  peptide (1)..(336): Ceres Seq. ID no. 12340186

SEQ ID NO: 31738 - DNA, 837 bp, Arabidopsis thaliana; identical to SEQ ID NO: 28148
  misc_feature (1)..(837): Ceres Seq. ID no. 13490911
  misc_feature (1)..(837): Ortholog of  Ceres SEQ ID NO 15178836 as cited in SEQ ID NO 1142

SEQ ID NO: 31739 - protein, 220 aa, Arabidopsis thaliana; identical to SEQ ID NO: 28149
  peptide (1)..(220): Ceres Seq. ID no. 13490912

SEQ ID NO: 31740 - DNA, 793 bp, Arabidopsis thaliana; identical to SEQ ID NO: 28150
  misc_feature (1)..(793): Ceres Seq. ID no. 12423232
  misc_feature (1)..(793): Ortholog of  Ceres SEQ ID NO 13591265 as cited in SEQ ID NO 61046
  misc_feature (1)..(793): Ortholog of  Ceres SEQ ID NO 15224932 as cited in SEQ ID NO 62225

SEQ ID NO: 31741 - protein, 222 aa, Arabidopsis thaliana; identical to SEQ ID NO: 28151
  peptide (1)..(222): Ceres Seq. ID no. 12423233

SEQ ID NO: 31742 - protein, 212 aa, Arabidopsis thaliana; identical to SEQ ID NO: 28152
  peptide (1)..(212): Ceres Seq. ID no. 12423234

SEQ ID NO: 31743 - DNA, 1879 bp, Arabidopsis thaliana; identical to SEQ ID NO: 28153
  misc_feature (1)..(1879): Ceres Seq. ID no. 13487772
  misc_feature (1)..(1879): Ortholog of  Ceres SEQ ID NO 14314404 as cited in SEQ ID NO 57421
  misc_feature (1)..(1879): Ortholog of  Ceres SEQ ID NO 13493536 as cited in SEQ ID NO 58515
  misc_feature (1)..(1879): Ortholog of  Ceres SEQ ID NO 12618461 as cited in SEQ ID NO 64349

SEQ ID NO: 31744 - protein, 561 aa, Arabidopsis thaliana; identical to SEQ ID NO: 28154
  peptide (1)..(561): Ceres Seq. ID no. 13487773

SEQ ID NO: 31745 - protein, 532 aa, Arabidopsis thaliana; identical to SEQ ID NO: 28155
  peptide (1)..(532): Ceres Seq. ID no. 13487774

SEQ ID NO: 31746 - protein, 394 aa, Arabidopsis thaliana; identical to SEQ ID NO: 28156
  peptide (1)..(394): Ceres Seq. ID no. 13487775

SEQ ID NO: 31747 - DNA, 912 bp, Arabidopsis thaliana; identical to SEQ ID NO: 28157
  misc_feature (1)..(912): Ceres Seq. ID no. 12340195
  misc_feature (1)..(912): Ortholog of  Ceres SEQ ID NO 15176771 as cited in SEQ ID NO 55128

SEQ ID NO: 31748 - protein, 231 aa, Arabidopsis thaliana; identical to SEQ ID NO: 28158
  peptide (1)..(231): Ceres Seq. ID no. 12340196

SEQ ID NO: 31749 - protein, 171 aa, Arabidopsis thaliana; identical to SEQ ID NO: 28159
  peptide (1)..(171): Ceres Seq. ID no. 12340197

SEQ ID NO: 31750 - protein, 136 aa, Arabidopsis thaliana; identical to SEQ ID NO: 28160
  peptide (1)..(136): Ceres Seq. ID no. 12340198

SEQ ID NO: 31751 - DNA, 828 bp, Arabidopsis thaliana; identical to SEQ ID NO: 28161
  misc_feature (1)..(828): Ceres Seq. ID no. 12340170
  misc_feature (1)..(828): Ortholog of  Ceres SEQ ID NO 13599287 as cited in SEQ ID NO 338
  misc_feature (1)..(828): Ortholog of  Ceres SEQ ID NO 15172934 as cited in SEQ ID NO 51783
  misc_feature (1)..(828): Ortholog of  Ceres SEQ ID NO 14314817 as cited in SEQ ID NO 52571
  misc_feature (1)..(828): Ortholog of  Ceres SEQ ID NO 15174056 as cited in SEQ ID NO 0

SEQ ID NO: 31752 - protein, 214 aa, Arabidopsis thaliana; identical to SEQ ID NO: 28162
  peptide (1)..(214): Ceres Seq. ID no. 12340171

SEQ ID NO: 31753 - protein, 169 aa, Arabidopsis thaliana; identical to SEQ ID NO: 28163
  peptide (1)..(169): Ceres Seq. ID no. 12340172

SEQ ID NO: 31754 - DNA, 1206 bp, Arabidopsis thaliana; identical to SEQ ID NO: 28164
  misc_feature (1)..(1206): Ceres Seq. ID no. 12377569
  misc_feature (1)..(1206): Ortholog of  Ceres SEQ ID NO 14311683 as cited in SEQ ID NO 51263
  misc_feature (1)..(1206): Ortholog of  Ceres SEQ ID NO 15177862 as cited in SEQ ID NO 56033
  misc_feature (1)..(1206): Ortholog of  Ceres SEQ ID NO 13661430 as cited in SEQ ID NO 61258
  misc_feature (1)..(1206): Ortholog of  Ceres SEQ ID NO 13590940 as cited in SEQ ID NO 68653
  misc_feature (1)..(1206): Ortholog of  Ceres SEQ ID NO 14301982 as cited in SEQ ID NO 0
  misc_feature (1)..(1206): Ortholog of  Ceres SEQ ID NO 15179001 as cited in SEQ ID NO 0
  misc_feature (1)..(1206): Ortholog of  Ceres SEQ ID NO 15180040 as cited in SEQ ID NO 0

SEQ ID NO: 31755 - protein, 309 aa, Arabidopsis thaliana; identical to SEQ ID NO: 28165
  peptide (1)..(309): Ceres Seq. ID no. 12377570

SEQ ID NO: 31756 - protein, 289 aa, Arabidopsis thaliana; identical to SEQ ID NO: 28166
  peptide (1)..(289): Ceres Seq. ID no. 12377571

SEQ ID NO: 31757 - protein, 171 aa, Arabidopsis thaliana; identical to SEQ ID NO: 28167
  peptide (1)..(171): Ceres Seq. ID no. 12377572

SEQ ID NO: 31758 - DNA, 1037 bp, Arabidopsis thaliana; identical to SEQ ID NO: 28168
  misc_feature (1)..(1037): Ceres Seq. ID no. 12396853
  misc_feature (1)..(1037): Ortholog of  Ceres SEQ ID NO 13594298 as cited in SEQ ID NO 57803
  misc_feature (1)..(1037): Ortholog of  Ceres SEQ ID NO 13503476 as cited in SEQ ID NO 61978
  misc_feature (1)..(1037): Ortholog of  Ceres SEQ ID NO 12578438 as cited in SEQ ID NO 62201

SEQ ID NO: 31759 - protein, 277 aa, Arabidopsis thaliana; identical to SEQ ID NO: 28169
  peptide (1)..(277): Ceres Seq. ID no. 12396854

SEQ ID NO: 31760 - protein, 267 aa, Arabidopsis thaliana; identical to SEQ ID NO: 28170
  peptide (1)..(267): Ceres Seq. ID no. 12396855

SEQ ID NO: 31761 - protein, 265 aa, Arabidopsis thaliana; identical to SEQ ID NO: 28171
  peptide (1)..(265): Ceres Seq. ID no. 12396856

SEQ ID NO: 31762 - DNA, 1297 bp, Arabidopsis thaliana; identical to SEQ ID NO: 28172
  misc_feature (1)..(1297): Ceres Seq. ID no. 12422819
  misc_feature (1)..(1297): Ortholog of  Ceres SEQ ID NO 13656147 as cited in SEQ ID NO 64422
  misc_feature (1)..(1297): Ortholog of  Ceres SEQ ID NO 13596496 as cited in SEQ ID NO 68639

SEQ ID NO: 31763 - protein, 309 aa, Arabidopsis thaliana; identical to SEQ ID NO: 28173
  peptide (1)..(309): Ceres Seq. ID no. 12422820

SEQ ID NO: 31764 - protein, 278 aa, Arabidopsis thaliana; identical to SEQ ID NO: 28174
  peptide (1)..(278): Ceres Seq. ID no. 12422821

SEQ ID NO: 31765 - protein, 271 aa, Arabidopsis thaliana; identical to SEQ ID NO: 28175
  peptide (1)..(271): Ceres Seq. ID no. 12422822

SEQ ID NO: 31766 - DNA, 2308 bp, Arabidopsis thaliana; identical to SEQ ID NO: 28176
  misc_feature (1)..(2308): Ceres Seq. ID no. 12325938
  misc_feature (1)..(2308): Ortholog of  Ceres SEQ ID NO 14310784 as cited in SEQ ID NO 58503

SEQ ID NO: 31767 - protein, 682 aa, Arabidopsis thaliana; identical to SEQ ID NO: 28177
  peptide (1)..(682): Ceres Seq. ID no. 12325939

SEQ ID NO: 31768 - protein, 577 aa, Arabidopsis thaliana; identical to SEQ ID NO: 28178
  peptide (1)..(577): Ceres Seq. ID no. 12325940

SEQ ID NO: 31769 - protein, 527 aa, Arabidopsis thaliana; identical to SEQ ID NO: 28179
  peptide (1)..(527): Ceres Seq. ID no. 12325941

SEQ ID NO: 31770 - DNA, 1210 bp, Arabidopsis thaliana; identical to SEQ ID NO: 28180
  misc_feature (1)..(1210): Ceres Seq. ID no. 12482200
  misc_feature (1)..(1210): Ortholog of  Ceres SEQ ID NO 14309755 as cited in SEQ ID NO 20741
  misc_feature (1)..(1210): Ortholog of  Ceres SEQ ID NO 13594727 as cited in SEQ ID NO 52169
  misc_feature (1)..(1210): Ortholog of  Ceres SEQ ID NO 13596474 as cited in SEQ ID NO 62169
  misc_feature (1)..(1210): Ortholog of  Ceres SEQ ID NO 13598714 as cited in SEQ ID NO 62656
  misc_feature (1)..(1210): Ortholog of  Ceres SEQ ID NO 13596969 as cited in SEQ ID NO 63375
  misc_feature (1)..(1210): Ortholog of  Ceres SEQ ID NO 13597519 as cited in SEQ ID NO 64759
  misc_feature (1)..(1210): Ortholog of  Ceres SEQ ID NO 13587054 as cited in SEQ ID NO 0

SEQ ID NO: 31771 - protein, 346 aa, Arabidopsis thaliana; identical to SEQ ID NO: 28181
  peptide (1)..(346): Ceres Seq. ID no. 12482201

SEQ ID NO: 31772 - protein, 242 aa, Arabidopsis thaliana; identical to SEQ ID NO: 28182
  peptide (1)..(242): Ceres Seq. ID no. 12482202

SEQ ID NO: 31773 - protein, 194 aa, Arabidopsis thaliana; identical to SEQ ID NO: 28183
  peptide (1)..(194): Ceres Seq. ID no. 12482203

SEQ ID NO: 31774 - DNA, 2332 bp, Arabidopsis thaliana; identical to SEQ ID NO: 28184
  misc_feature (1)..(2332): Ceres Seq. ID no. 12372009
  misc_feature (1)..(2332): Ortholog of  Ceres SEQ ID NO 13656177 as cited in SEQ ID NO 64997

SEQ ID NO: 31775 - protein, 671 aa, Arabidopsis thaliana; identical to SEQ ID NO: 27774
  peptide (1)..(671): Ceres Seq. ID no. 12372010

SEQ ID NO: 31776 - protein, 667 aa, Arabidopsis thaliana; identical to SEQ ID NO: 27775
  peptide (1)..(667): Ceres Seq. ID no. 12372011

SEQ ID NO: 31777 - protein, 657 aa, Arabidopsis thaliana; identical to SEQ ID NO: 27776
  peptide (1)..(657): Ceres Seq. ID no. 12372012

SEQ ID NO: 31778 - DNA, 1591 bp, Arabidopsis thaliana; identical to SEQ ID NO: 28188
  misc_feature (1)..(1591): Ceres Seq. ID no. 12324793
  misc_feature (1)..(1591): Ortholog of  Ceres SEQ ID NO 15177903 as cited in SEQ ID NO 54993
  misc_feature (1)..(1591): Ortholog of  Ceres SEQ ID NO 15177994 as cited in SEQ ID NO 55641
  misc_feature (1)..(1591): Ortholog of  Ceres SEQ ID NO 13595454 as cited in SEQ ID NO 56502
  misc_feature (1)..(1591): Ortholog of  Ceres SEQ ID NO 13589016 as cited in SEQ ID NO 68472

SEQ ID NO: 31779 - protein, 152 aa, Arabidopsis thaliana; identical to SEQ ID NO: 28189
  peptide (1)..(152): Ceres Seq. ID no. 12324794

SEQ ID NO: 31780 - protein, 122 aa, Arabidopsis thaliana; identical to SEQ ID NO: 28190
  peptide (1)..(122): Ceres Seq. ID no. 12324795

SEQ ID NO: 31781 - protein, 79 aa, Arabidopsis thaliana; identical to SEQ ID NO: 28191
  peptide (1)..(79): Ceres Seq. ID no. 12324796

SEQ ID NO: 31782 - DNA, 1108 bp, Arabidopsis thaliana; identical to SEQ ID NO: 28192
  misc_feature (1)..(1108): Ceres Seq. ID no. 13486907
  misc_feature (1)..(1108): Ortholog of  Ceres SEQ ID NO 15170617 as cited in SEQ ID NO 52614

SEQ ID NO: 31783 - protein, 260 aa, Arabidopsis thaliana; identical to SEQ ID NO: 28193
  peptide (1)..(260): Ceres Seq. ID no. 13486908

SEQ ID NO: 31784 - DNA, 1873 bp, Arabidopsis thaliana; identical to SEQ ID NO: 28194
  misc_feature (1)..(1873): Ceres Seq. ID no. 12680413
  misc_feature (1)..(1873): Ortholog of  Ceres SEQ ID NO 13599324 as cited in SEQ ID NO 0

SEQ ID NO: 31785 - protein, 522 aa, Arabidopsis thaliana; identical to SEQ ID NO: 28195
  peptide (1)..(522): Ceres Seq. ID no. 12680414

SEQ ID NO: 31786 - protein, 506 aa, Arabidopsis thaliana; identical to SEQ ID NO: 28196
  peptide (1)..(506): Ceres Seq. ID no. 12680415

SEQ ID NO: 31787 - protein, 298 aa, Arabidopsis thaliana; identical to SEQ ID NO: 28197
  peptide (1)..(298): Ceres Seq. ID no. 12680416

SEQ ID NO: 31788 - DNA, 1114 bp, Arabidopsis thaliana; identical to SEQ ID NO: 28198
  misc_feature (1)..(1114): Ceres Seq. ID no. 12324072
  misc_feature (1)..(1114): Ortholog of  Ceres SEQ ID NO 13594794 as cited in SEQ ID NO 51761

SEQ ID NO: 31789 - protein, 245 aa, Arabidopsis thaliana; identical to SEQ ID NO: 28199
  peptide (1)..(245): Ceres Seq. ID no. 12324073

SEQ ID NO: 31790 - protein, 208 aa, Arabidopsis thaliana; identical to SEQ ID NO: 28200
  peptide (1)..(208): Ceres Seq. ID no. 12324074

SEQ ID NO: 31791 - protein, 180 aa, Arabidopsis thaliana; identical to SEQ ID NO: 28201
  peptide (1)..(180): Ceres Seq. ID no. 12324075

SEQ ID NO: 31792 - DNA, 1641 bp, Arabidopsis thaliana; identical to SEQ ID NO: 28202
  misc_feature (1)..(1641): Ceres Seq. ID no. 13490319
  misc_feature (1)..(1641): Ortholog of  Ceres SEQ ID NO 13596816 as cited in SEQ ID NO 62287

SEQ ID NO: 31793 - protein, 449 aa, Arabidopsis thaliana; identical to SEQ ID NO: 28203
  peptide (1)..(449): Ceres Seq. ID no. 13490320

SEQ ID NO: 31794 - protein, 320 aa, Arabidopsis thaliana; identical to SEQ ID NO: 28204
  peptide (1)..(320): Ceres Seq. ID no. 13490321

SEQ ID NO: 31795 - protein, 312 aa, Arabidopsis thaliana; identical to SEQ ID NO: 28205
  peptide (1)..(312): Ceres Seq. ID no. 13490322

SEQ ID NO: 31796 - DNA, 1786 bp, Arabidopsis thaliana; identical to SEQ ID NO: 28206
  misc_feature (1)..(1786): Ceres Seq. ID no. 13487784
  misc_feature (1)..(1786): Ortholog of  Ceres SEQ ID NO 13594536 as cited in SEQ ID NO 51382

SEQ ID NO: 31797 - protein, 462 aa, Arabidopsis thaliana; identical to SEQ ID NO: 28207
  peptide (1)..(462): Ceres Seq. ID no. 15220490

SEQ ID NO: 31798 - protein, 461 aa, Arabidopsis thaliana; identical to SEQ ID NO: 28208
  peptide (1)..(461): Ceres Seq. ID no. 15220491

SEQ ID NO: 31799 - protein, 362 aa, Arabidopsis thaliana; identical to SEQ ID NO: 28209
  peptide (1)..(362): Ceres Seq. ID no. 15220492

SEQ ID NO: 31800 - DNA, 1470 bp, Arabidopsis thaliana; identical to SEQ ID NO: 28210
  misc_feature (1)..(1470): Ceres Seq. ID no. 12326409
  misc_feature (1)..(1470): Ortholog of  Ceres SEQ ID NO 13662245 as cited in SEQ ID NO 62708

SEQ ID NO: 31801 - protein, 425 aa, Arabidopsis thaliana; identical to SEQ ID NO: 28211
  peptide (1)..(425): Ceres Seq. ID no. 12326410

SEQ ID NO: 31802 - protein, 325 aa, Arabidopsis thaliana; identical to SEQ ID NO: 28212
  peptide (1)..(325): Ceres Seq. ID no. 12326411

SEQ ID NO: 31803 - protein, 262 aa, Arabidopsis thaliana; identical to SEQ ID NO: 28213
  peptide (1)..(262): Ceres Seq. ID no. 12326412

SEQ ID NO: 31804 - DNA, 1358 bp, Arabidopsis thaliana; identical to SEQ ID NO: 28214
  misc_feature (1)..(1358): Ceres Seq. ID no. 12482532
  misc_feature (1)..(1358): Ortholog of  Ceres SEQ ID NO 14308598 as cited in SEQ ID NO 60416
  misc_feature (1)..(1358): Ortholog of  Ceres SEQ ID NO 13502952 as cited in SEQ ID NO 62271
  misc_feature (1)..(1358): Ortholog of  Ceres SEQ ID NO 13502973 as cited in SEQ ID NO 68052
  misc_feature (1)..(1358): Ortholog of  Ceres SEQ ID NO 13596000 as cited in SEQ ID NO 68188

SEQ ID NO: 31805 - protein, 358 aa, Arabidopsis thaliana; identical to SEQ ID NO: 21554
  peptide (1)..(358): Ceres Seq. ID no. 12482533

SEQ ID NO: 31806 - protein, 325 aa, Arabidopsis thaliana; identical to SEQ ID NO: 21555
  peptide (1)..(325): Ceres Seq. ID no. 12482534

SEQ ID NO: 31807 - protein, 283 aa, Arabidopsis thaliana; identical to SEQ ID NO: 21556
  peptide (1)..(283): Ceres Seq. ID no. 12482535

SEQ ID NO: 31808 - DNA, 1371 bp, Arabidopsis thaliana; identical to SEQ ID NO: 28218
  misc_feature (1)..(1371): Ceres Seq. ID no. 12333807
  misc_feature (1)..(1371): Ortholog of  Ceres SEQ ID NO 14314869 as cited in SEQ ID NO 58320

SEQ ID NO: 31809 - protein, 326 aa, Arabidopsis thaliana; identical to SEQ ID NO: 28219
  peptide (1)..(326): Ceres Seq. ID no. 12333808

SEQ ID NO: 31810 - DNA, 498 bp, Arabidopsis thaliana; identical to SEQ ID NO: 28220
  misc_feature (1)..(498): Ceres Seq. ID no. 12333353
  misc_feature (1)..(498): Ortholog of  Ceres SEQ ID NO 13586586 as cited in SEQ ID NO 0

SEQ ID NO: 31811 - protein, 93 aa, Arabidopsis thaliana; identical to SEQ ID NO: 28221
  peptide (1)..(93): Ceres Seq. ID no. 12333354

SEQ ID NO: 31812 - protein, 89 aa, Arabidopsis thaliana; identical to SEQ ID NO: 28222
  peptide (1)..(89): Ceres Seq. ID no. 12333355

SEQ ID NO: 31813 - protein, 88 aa, Arabidopsis thaliana; identical to SEQ ID NO: 28223
  peptide (1)..(88): Ceres Seq. ID no. 12333356

SEQ ID NO: 31814 - DNA, 636 bp, Arabidopsis thaliana; identical to SEQ ID NO: 28224
  misc_feature (1)..(636): Ceres Seq. ID no. 12560114
  misc_feature (1)..(636): Ortholog of  Ceres SEQ ID NO 15172660 as cited in SEQ ID NO 68708

SEQ ID NO: 31815 - protein, 163 aa, Arabidopsis thaliana; identical to SEQ ID NO: 28225
  peptide (1)..(163): Ceres Seq. ID no. 12560115

SEQ ID NO: 31816 - protein, 143 aa, Arabidopsis thaliana [sequence omitted]

SEQ ID NO: 31817 - DNA, 874 bp, Arabidopsis thaliana; identical to SEQ ID NO: 28227
  misc_feature (1)..(874): Ceres Seq. ID no. 12329801
  misc_feature (1)..(874): Ortholog of  Ceres SEQ ID NO 13598028 as cited in SEQ ID NO 66219

SEQ ID NO: 31818 - protein, 222 aa, Arabidopsis thaliana; identical to SEQ ID NO: 28228
  peptide (1)..(222): Ceres Seq. ID no. 12329802

SEQ ID NO: 31819 - protein, 183 aa, Arabidopsis thaliana; identical to SEQ ID NO: 28229
  peptide (1)..(183): Ceres Seq. ID no. 12329803

SEQ ID NO: 31820 - DNA, 935 bp, Arabidopsis thaliana; identical to SEQ ID NO: 28230
  misc_feature (1)..(935): Ceres Seq. ID no. 13489309
  misc_feature (1)..(935): Ortholog of  Ceres SEQ ID NO 12781196 as cited in SEQ ID NO 61049

SEQ ID NO: 31821 - protein, 181 aa, Arabidopsis thaliana; identical to SEQ ID NO: 28231
  peptide (1)..(181): Ceres Seq. ID no. 13489310

SEQ ID NO: 31822 - protein, 173 aa, Arabidopsis thaliana; identical to SEQ ID NO: 28232
  peptide (1)..(173): Ceres Seq. ID no. 13489311

SEQ ID NO: 31823 - protein, 140 aa, Arabidopsis thaliana; identical to SEQ ID NO: 28233
  peptide (1)..(140): Ceres Seq. ID no. 13489312

SEQ ID NO: 31824 - DNA, 593 bp, Arabidopsis thaliana; identical to SEQ ID NO: 28234
  misc_feature (1)..(593): Ceres Seq. ID no. 12337607
  misc_feature (1)..(593): Ortholog of  Ceres SEQ ID NO 15173990 as cited in SEQ ID NO 1070
  misc_feature (1)..(593): Ortholog of  Ceres SEQ ID NO 13594900 as cited in SEQ ID NO 52042

SEQ ID NO: 31825 - protein, 129 aa, Arabidopsis thaliana; identical to SEQ ID NO: 28235
  peptide (1)..(129): Ceres Seq. ID no. 12337608

SEQ ID NO: 31826 - protein, 119 aa, Arabidopsis thaliana; identical to SEQ ID NO: 28236
  peptide (1)..(119): Ceres Seq. ID no. 12337609

SEQ ID NO: 31827 - DNA, 943 bp, Arabidopsis thaliana; identical to SEQ ID NO: 28237
  misc_feature (1)..(943): Ceres Seq. ID no. 13489778
  misc_feature (1)..(943): Ortholog of  Ceres SEQ ID NO 15178201 as cited in SEQ ID NO 54736
  misc_feature (1)..(943): Ortholog of  Ceres SEQ ID NO 12616903 as cited in SEQ ID NO 63917

SEQ ID NO: 31828 - protein, 230 aa, Arabidopsis thaliana; identical to SEQ ID NO: 28238
  peptide (1)..(230): Ceres Seq. ID no. 13489779

SEQ ID NO: 31829 - protein, 227 aa, Arabidopsis thaliana; identical to SEQ ID NO: 28239
  peptide (1)..(227): Ceres Seq. ID no. 13489780

SEQ ID NO: 31830 - protein, 189 aa, Arabidopsis thaliana; identical to SEQ ID NO: 28240
  peptide (1)..(189): Ceres Seq. ID no. 13489781

SEQ ID NO: 31831 - DNA, 563 bp, Arabidopsis thaliana; identical to SEQ ID NO: 21572
  misc_feature (1)..(563): Ceres Seq. ID no. 12333265
  misc_feature (1)..(563): Ortholog of  Ceres SEQ ID NO 14309553 as cited in SEQ ID NO 52735
  misc_feature (1)..(563): Ortholog of  Ceres SEQ ID NO 15172828 as cited in SEQ ID NO 60174
  misc_feature (1)..(563): Ortholog of  Ceres SEQ ID NO 12483999 as cited in SEQ ID NO 0

SEQ ID NO: 31832 - protein, 114 aa, Arabidopsis thaliana; identical to SEQ ID NO: 21573
  peptide (1)..(114): Ceres Seq. ID no. 12333266

SEQ ID NO: 31833 - DNA, 759 bp, Arabidopsis thaliana; identical to SEQ ID NO: 28243
  misc_feature (1)..(759): Ceres Seq. ID no. 12331788
  misc_feature (1)..(759): Ortholog of  Ceres SEQ ID NO 12624284 as cited in SEQ ID NO 61595
  misc_feature (1)..(759): Ortholog of  Ceres SEQ ID NO 15225557 as cited in SEQ ID NO 0

SEQ ID NO: 31834 - protein, 198 aa, Arabidopsis thaliana; identical to SEQ ID NO: 28244
  peptide (1)..(198): Ceres Seq. ID no. 12331789

SEQ ID NO: 31835 - protein, 176 aa, Arabidopsis thaliana; identical to SEQ ID NO: 28245
  peptide (1)..(176): Ceres Seq. ID no. 12331790

SEQ ID NO: 31836 - protein, 158 aa, Arabidopsis thaliana; identical to SEQ ID NO: 28246
  peptide (1)..(158): Ceres Seq. ID no. 12331791

SEQ ID NO: 31837 - DNA, 476 bp, Arabidopsis thaliana; identical to SEQ ID NO: 28247
  misc_feature (1)..(476): Ceres Seq. ID no. 12393749
  misc_feature (1)..(476): Ortholog of  Ceres SEQ ID NO 15227226 as cited in SEQ ID NO 54691
  misc_feature (1)..(476): Ortholog of  Ceres SEQ ID NO 14303169 as cited in SEQ ID NO 65741

SEQ ID NO: 31838 - protein, 78 aa, Arabidopsis thaliana; identical to SEQ ID NO: 28248
  peptide (1)..(78): Ceres Seq. ID no. 12393750

SEQ ID NO: 31839 - protein, 77 aa, Arabidopsis thaliana; identical to SEQ ID NO: 28249
  peptide (1)..(77): Ceres Seq. ID no. 12393751

SEQ ID NO: 31840 - protein, 68 aa, Arabidopsis thaliana; identical to SEQ ID NO: 28250
  peptide (1)..(68): Ceres Seq. ID no. 12393752

SEQ ID NO: 31841 - DNA, 898 bp, Arabidopsis thaliana; identical to SEQ ID NO: 28251
  misc_feature (1)..(898): Ceres Seq. ID no. 12338786
  misc_feature (1)..(898): Ortholog of  Ceres SEQ ID NO 12614809 as cited in SEQ ID NO 68808
  misc_feature (1)..(898): Ortholog of  Ceres SEQ ID NO 12634366 as cited in SEQ ID NO 0
  misc_feature (1)..(898): Ortholog of  Ceres SEQ ID NO 14309113 as cited in SEQ ID NO 0

SEQ ID NO: 31842 - protein, 192 aa, Arabidopsis thaliana; identical to SEQ ID NO: 28252
  peptide (1)..(192): Ceres Seq. ID no. 12338787

SEQ ID NO: 31843 - DNA, 710 bp, Arabidopsis thaliana; identical to SEQ ID NO: 28253
  misc_feature (1)..(710): Ceres Seq. ID no. 12439581
  misc_feature (1)..(710): Ortholog of  Ceres SEQ ID NO 13495070 as cited in SEQ ID NO 53216
  misc_feature (1)..(710): Ortholog of  Ceres SEQ ID NO 13661333 as cited in SEQ ID NO 61620
  misc_feature (1)..(710): Ortholog of  Ceres SEQ ID NO 13596812 as cited in SEQ ID NO 62283
  misc_feature (1)..(710): Ortholog of  Ceres SEQ ID NO 13623021 as cited in SEQ ID NO 0
  misc_feature (1)..(710): Ortholog of  Ceres SEQ ID NO 14309080 as cited in SEQ ID NO 0

SEQ ID NO: 31844 - protein, 150 aa, Arabidopsis thaliana; identical to SEQ ID NO: 28254
  peptide (1)..(150): Ceres Seq. ID no. 12439582

SEQ ID NO: 31845 - protein, 132 aa, Arabidopsis thaliana; identical to SEQ ID NO: 26127
  peptide (1)..(132): Ceres Seq. ID no. 12439583

SEQ ID NO: 31846 - DNA, 938 bp, Arabidopsis thaliana; identical to SEQ ID NO: 28256
  misc_feature (1)..(938): Ceres Seq. ID no. 13490234
  misc_feature (1)..(938): Ortholog of  Ceres SEQ ID NO 15176828 as cited in SEQ ID NO 0

SEQ ID NO: 31847 - protein, 165 aa, Arabidopsis thaliana; identical to SEQ ID NO: 28257
  peptide (1)..(165): Ceres Seq. ID no. 13490235

SEQ ID NO: 31848 - protein, 146 aa, Arabidopsis thaliana; identical to SEQ ID NO: 28258
  peptide (1)..(146): Ceres Seq. ID no. 13490236

SEQ ID NO: 31849 - protein, 103 aa, Arabidopsis thaliana; identical to SEQ ID NO: 28259
  peptide (1)..(103): Ceres Seq. ID no. 13490237

SEQ ID NO: 31850 - DNA, 1741 bp, Arabidopsis thaliana; identical to SEQ ID NO: 22872
  misc_feature (1)..(1741): Ceres Seq. ID no. 12377573
  misc_feature (1)..(1741): Ortholog of  Ceres SEQ ID NO 14315422 as cited in SEQ ID NO 59255

SEQ ID NO: 31851 - protein, 470 aa, Arabidopsis thaliana; identical to SEQ ID NO: 22873
  peptide (1)..(470): Ceres Seq. ID no. 12377574

SEQ ID NO: 31852 - protein, 447 aa, Arabidopsis thaliana; identical to SEQ ID NO: 22874
  peptide (1)..(447): Ceres Seq. ID no. 12377575

SEQ ID NO: 31853 - DNA, 932 bp, Arabidopsis thaliana; identical to SEQ ID NO: 28263
  misc_feature (1)..(932): Ceres Seq. ID no. 12332733
  misc_feature (1)..(932): Ortholog of  Ceres SEQ ID NO 15226473 as cited in SEQ ID NO 50919
  misc_feature (1)..(932): Ortholog of  Ceres SEQ ID NO 13639704 as cited in SEQ ID NO 51325
  misc_feature (1)..(932): Ortholog of  Ceres SEQ ID NO 13661747 as cited in SEQ ID NO 60578
  misc_feature (1)..(932): Ortholog of  Ceres SEQ ID NO 13661672 as cited in SEQ ID NO 61462
  misc_feature (1)..(932): Ortholog of  Ceres SEQ ID NO 13599646 as cited in SEQ ID NO 0

SEQ ID NO: 31854 - protein, 279 aa, Arabidopsis thaliana; identical to SEQ ID NO: 28264
  peptide (1)..(279): Ceres Seq. ID no. 12332734

SEQ ID NO: 31855 - protein, 263 aa, Arabidopsis thaliana; identical to SEQ ID NO: 28265
  peptide (1)..(263): Ceres Seq. ID no. 12332735

SEQ ID NO: 31856 - DNA, 2203 bp, Arabidopsis thaliana; identical to SEQ ID NO: 28266
  misc_feature (1)..(2203): Ceres Seq. ID no. 12325555
  misc_feature (1)..(2203): Ortholog of  Ceres SEQ ID NO 15171762 as cited in SEQ ID NO 57846
  misc_feature (1)..(2203): Ortholog of  Ceres SEQ ID NO 12597287 as cited in SEQ ID NO 63982

SEQ ID NO: 31857 - protein, 532 aa, Arabidopsis thaliana; identical to SEQ ID NO: 28267
  peptide (1)..(532): Ceres Seq. ID no. 12325556

SEQ ID NO: 31858 - protein, 500 aa, Arabidopsis thaliana; identical to SEQ ID NO: 28268
  peptide (1)..(500): Ceres Seq. ID no. 12325557

SEQ ID NO: 31859 - protein, 487 aa, Arabidopsis thaliana; identical to SEQ ID NO: 28269
  peptide (1)..(487): Ceres Seq. ID no. 12325558

SEQ ID NO: 31860 - DNA, 914 bp, Arabidopsis thaliana; identical to SEQ ID NO: 28270
  misc_feature (1)..(914): Ceres Seq. ID no. 12321613
  misc_feature (1)..(914): Ortholog of  Ceres SEQ ID NO 12578688 as cited in SEQ ID NO 27

SEQ ID NO: 31861 - protein, 255 aa, Arabidopsis thaliana; identical to SEQ ID NO: 28271
  peptide (1)..(255): Ceres Seq. ID no. 12321614

SEQ ID NO: 31862 - protein, 221 aa, Arabidopsis thaliana; identical to SEQ ID NO: 28272
  peptide (1)..(221): Ceres Seq. ID no. 12321615

SEQ ID NO: 31863 - DNA, 616 bp, Arabidopsis thaliana; identical to SEQ ID NO: 28273
  misc_feature (1)..(616): Ceres Seq. ID no. 12322085
  misc_feature (1)..(616): Ortholog of  Ceres SEQ ID NO 13595826 as cited in SEQ ID NO 56092
  misc_feature (1)..(616): Ortholog of  Ceres SEQ ID NO 15176138 as cited in SEQ ID NO 0

SEQ ID NO: 31864 - protein, 121 aa, Arabidopsis thaliana; identical to SEQ ID NO: 28274
  peptide (1)..(121): Ceres Seq. ID no. 12322086

SEQ ID NO: 31865 - protein, 111 aa, Arabidopsis thaliana; identical to SEQ ID NO: 28275
  peptide (1)..(111): Ceres Seq. ID no. 12322087

SEQ ID NO: 31866 - protein, 87 aa, Arabidopsis thaliana; identical to SEQ ID NO: 28276
  peptide (1)..(87): Ceres Seq. ID no. 12322088

SEQ ID NO: 31867 - DNA, 629 bp, Arabidopsis thaliana; identical to SEQ ID NO: 28277
  misc_feature (1)..(629): Ceres Seq. ID no. 12348641
  misc_feature (1)..(629): Ortholog of  Ceres SEQ ID NO 12322366 as cited in SEQ ID NO 20549

SEQ ID NO: 31868 - protein, 98 aa, Arabidopsis thaliana; identical to SEQ ID NO: 28278
  peptide (1)..(98): Ceres Seq. ID no. 12348642

SEQ ID NO: 31869 - DNA, 677 bp, Arabidopsis thaliana; identical to SEQ ID NO: 28279
  misc_feature (1)..(677): Ceres Seq. ID no. 12577603
  misc_feature (1)..(677): Ortholog of  Ceres SEQ ID NO 13581889 as cited in SEQ ID NO 50900

SEQ ID NO: 31870 - protein, 164 aa, Arabidopsis thaliana; identical to SEQ ID NO: 28280
  peptide (1)..(164): Ceres Seq. ID no. 12577604

SEQ ID NO: 31871 - protein, 136 aa, Arabidopsis thaliana; identical to SEQ ID NO: 26403
  peptide (1)..(136): Ceres Seq. ID no. 12577605

SEQ ID NO: 31872 - DNA, 641 bp, Arabidopsis thaliana; identical to SEQ ID NO: 28282
  misc_feature (1)..(641): Ceres Seq. ID no. 12332727
  misc_feature (1)..(641): Ortholog of  Ceres SEQ ID NO 15226758 as cited in SEQ ID NO 58427

SEQ ID NO: 31873 - protein, 156 aa, Arabidopsis thaliana; identical to SEQ ID NO: 28283
  peptide (1)..(156): Ceres Seq. ID no. 12332728

SEQ ID NO: 31874 - DNA, 1130 bp, Arabidopsis thaliana; identical to SEQ ID NO: 28284
  misc_feature (1)..(1130): Ceres Seq. ID no. 13491560
  misc_feature (1)..(1130): Ortholog of  Ceres SEQ ID NO 12609045 as cited in SEQ ID NO 51314
  misc_feature (1)..(1130): Ortholog of  Ceres SEQ ID NO 14316312 as cited in SEQ ID NO 60042
  misc_feature (1)..(1130): Ortholog of  Ceres SEQ ID NO 13595877 as cited in SEQ ID NO 67702
  misc_feature (1)..(1130): Ortholog of  Ceres SEQ ID NO 13654367 as cited in SEQ ID NO 67993

SEQ ID NO: 31875 - protein, 335 aa, Arabidopsis thaliana; identical to SEQ ID NO: 28285
  peptide (1)..(335): Ceres Seq. ID no. 13491561

SEQ ID NO: 31876 - protein, 309 aa, Arabidopsis thaliana; identical to SEQ ID NO: 28286
  peptide (1)..(309): Ceres Seq. ID no. 13491562

SEQ ID NO: 31877 - DNA, 972 bp, Arabidopsis thaliana; identical to SEQ ID NO: 28287
  misc_feature (1)..(972): Ceres Seq. ID no. 13487354
  misc_feature (1)..(972): Ortholog of  Ceres SEQ ID NO 15171228 as cited in SEQ ID NO 56948
  misc_feature (1)..(972): Ortholog of  Ceres SEQ ID NO 13597134 as cited in SEQ ID NO 64501

SEQ ID NO: 31878 - protein, 244 aa, Arabidopsis thaliana; identical to SEQ ID NO: 28288
  peptide (1)..(244): Ceres Seq. ID no. 13487355

SEQ ID NO: 31879 - protein, 194 aa, Arabidopsis thaliana; identical to SEQ ID NO: 28289
  peptide (1)..(194): Ceres Seq. ID no. 13487356

SEQ ID NO: 31880 - DNA, 1504 bp, Arabidopsis thaliana; identical to SEQ ID NO: 24511
  misc_feature (1)..(1504): Ceres Seq. ID no. 13647866
  misc_feature (1)..(1504): Ortholog of  Ceres SEQ ID NO 13596780 as cited in SEQ ID NO 62360

SEQ ID NO: 31881 - protein, 361 aa, Arabidopsis thaliana; identical to SEQ ID NO: 24512
  peptide (1)..(361): Ceres Seq. ID no. 13647867

SEQ ID NO: 31882 - DNA, 970 bp, Arabidopsis thaliana; identical to SEQ ID NO: 28292
  misc_feature (1)..(970): Ceres Seq. ID no. 13592472
  misc_feature (1)..(970): Ortholog of  Ceres SEQ ID NO 14313662 as cited in SEQ ID NO 54162
  misc_feature (1)..(970): Ortholog of  Ceres SEQ ID NO 14302123 as cited in SEQ ID NO 0
  misc_feature (1)..(970): Ortholog of  Ceres SEQ ID NO 15179452 as cited in SEQ ID NO 0

SEQ ID NO: 31883 - protein, 249 aa, Arabidopsis thaliana; identical to SEQ ID NO: 28293
  peptide (1)..(249): Ceres Seq. ID no. 13592473

SEQ ID NO: 31884 - protein, 206 aa, Arabidopsis thaliana; identical to SEQ ID NO: 28294
  peptide (1)..(206): Ceres Seq. ID no. 13592474

SEQ ID NO: 31885 - DNA, 871 bp, Arabidopsis thaliana; identical to SEQ ID NO: 28295
  misc_feature (1)..(871): Ceres Seq. ID no. 12328183
  misc_feature (1)..(871): Ortholog of  Ceres SEQ ID NO 13596116 as cited in SEQ ID NO 62213

SEQ ID NO: 31886 - protein, 222 aa, Arabidopsis thaliana; identical to SEQ ID NO: 28296
  peptide (1)..(222): Ceres Seq. ID no. 12328184

SEQ ID NO: 31887 - protein, 136 aa, Arabidopsis thaliana; identical to SEQ ID NO: 28297
  peptide (1)..(136): Ceres Seq. ID no. 12328185

SEQ ID NO: 31888 - protein, 118 aa, Arabidopsis thaliana; identical to SEQ ID NO: 28298
  peptide (1)..(118): Ceres Seq. ID no. 12328186

SEQ ID NO: 31889 - DNA, 629 bp, Arabidopsis thaliana; identical to SEQ ID NO: 28299
  misc_feature (1)..(629): Ceres Seq. ID no. 12680276
  misc_feature (1)..(629): Ortholog of  Ceres SEQ ID NO 14301998 as cited in SEQ ID NO 52093
  misc_feature (1)..(629): Ortholog of  Ceres SEQ ID NO 12619783 as cited in SEQ ID NO 69210

SEQ ID NO: 31890 - protein, 145 aa, Arabidopsis thaliana; identical to SEQ ID NO: 28300
  peptide (1)..(145): Ceres Seq. ID no. 12680277

SEQ ID NO: 31891 - DNA, 1292 bp, Arabidopsis thaliana; identical to SEQ ID NO: 28301
  misc_feature (1)..(1292): Ceres Seq. ID no. 12715029
  misc_feature (1)..(1292): Ortholog of  Ceres SEQ ID NO 13596048 as cited in SEQ ID NO 68476
  misc_feature (1)..(1292): Ortholog of  Ceres SEQ ID NO 12589137 as cited in SEQ ID NO 0

SEQ ID NO: 31892 - protein, 357 aa, Arabidopsis thaliana; identical to SEQ ID NO: 23719
  peptide (1)..(357): Ceres Seq. ID no. 12715030

SEQ ID NO: 31893 - protein, 354 aa, Arabidopsis thaliana; identical to SEQ ID NO: 23720
  peptide (1)..(354): Ceres Seq. ID no. 12715031

SEQ ID NO: 31894 - protein, 298 aa, Arabidopsis thaliana; identical to SEQ ID NO: 23721
  peptide (1)..(298): Ceres Seq. ID no. 12715032

SEQ ID NO: 31895 - DNA, 2508 bp, Arabidopsis thaliana; identical to SEQ ID NO: 28305
  misc_feature (1)..(2508): Ceres Seq. ID no. 12482871
  misc_feature (1)..(2508): Ortholog of  Ceres SEQ ID NO 13532807 as cited in SEQ ID NO 53012
  misc_feature (1)..(2508): Ortholog of  Ceres SEQ ID NO 13663060 as cited in SEQ ID NO 60964
  misc_feature (1)..(2508): Ortholog of  Ceres SEQ ID NO 13598532 as cited in SEQ ID NO 65204
  misc_feature (1)..(2508): Ortholog of  Ceres SEQ ID NO 13656849 as cited in SEQ ID NO 65764
  misc_feature (1)..(2508): Ortholog of  Ceres SEQ ID NO 13656501 as cited in SEQ ID NO 69206

SEQ ID NO: 31896 - protein, 461 aa, Arabidopsis thaliana; identical to SEQ ID NO: 28306
  peptide (1)..(461): Ceres Seq. ID no. 12482872

SEQ ID NO: 31897 - protein, 427 aa, Arabidopsis thaliana; identical to SEQ ID NO: 28307
  peptide (1)..(427): Ceres Seq. ID no. 12482873

SEQ ID NO: 31898 - protein, 405 aa, Arabidopsis thaliana; identical to SEQ ID NO: 28308
  peptide (1)..(405): Ceres Seq. ID no. 12482874

SEQ ID NO: 31899 - DNA, 512 bp, Arabidopsis thaliana; identical to SEQ ID NO: 28309
  misc_feature (1)..(512): Ceres Seq. ID no. 12603514
  misc_feature (1)..(512): Ortholog of  Ceres SEQ ID NO 12635836 as cited in SEQ ID NO 0
  misc_feature (1)..(512): Ortholog of  Ceres SEQ ID NO 13599004 as cited in SEQ ID NO 0

SEQ ID NO: 31900 - protein, 110 aa, Arabidopsis thaliana; identical to SEQ ID NO: 28310
  peptide (1)..(110): Ceres Seq. ID no. 12603515

SEQ ID NO: 31901 - protein, 78 aa, Arabidopsis thaliana; identical to SEQ ID NO: 28311
  peptide (1)..(78): Ceres Seq. ID no. 12603516

SEQ ID NO: 31902 - DNA, 899 bp, Arabidopsis thaliana; identical to SEQ ID NO: 28312
  misc_feature (1)..(899): Ceres Seq. ID no. 12420741
  misc_feature (1)..(899): Ortholog of  Ceres SEQ ID NO 14307776 as cited in SEQ ID NO 59397

SEQ ID NO: 31903 - protein, 250 aa, Arabidopsis thaliana; identical to SEQ ID NO: 28313
  peptide (1)..(250): Ceres Seq. ID no. 12420742

SEQ ID NO: 31904 - protein, 135 aa, Arabidopsis thaliana; identical to SEQ ID NO: 28314
  peptide (1)..(135): Ceres Seq. ID no. 12420743

SEQ ID NO: 31905 - protein, 129 aa, Arabidopsis thaliana; identical to SEQ ID NO: 28315
  peptide (1)..(129): Ceres Seq. ID no. 12420744

SEQ ID NO: 31906 - DNA, 813 bp, Arabidopsis thaliana; identical to SEQ ID NO: 28316
  misc_feature (1)..(813): Ceres Seq. ID no. 12420563
  misc_feature (1)..(813): Ortholog of  Ceres SEQ ID NO 12593058 as cited in SEQ ID NO 63090

SEQ ID NO: 31907 - protein, 193 aa, Arabidopsis thaliana; identical to SEQ ID NO: 28317
  peptide (1)..(193): Ceres Seq. ID no. 12420564

SEQ ID NO: 31908 - protein, 164 aa, Arabidopsis thaliana; identical to SEQ ID NO: 28318
  peptide (1)..(164): Ceres Seq. ID no. 12420565

SEQ ID NO: 31909 - protein, 162 aa, Arabidopsis thaliana; identical to SEQ ID NO: 28319
  peptide (1)..(162): Ceres Seq. ID no. 12420566

SEQ ID NO: 31910 - DNA, 787 bp, Arabidopsis thaliana; identical to SEQ ID NO: 28320
  misc_feature (1)..(787): Ceres Seq. ID no. 12340441
  misc_feature (1)..(787): Ortholog of  Ceres SEQ ID NO 12474478 as cited in SEQ ID NO 96
  misc_feature (1)..(787): Ortholog of  Ceres SEQ ID NO 14309053 as cited in SEQ ID NO 0

SEQ ID NO: 31911 - protein, 207 aa, Arabidopsis thaliana; identical to SEQ ID NO: 28321
  peptide (1)..(207): Ceres Seq. ID no. 12340442

SEQ ID NO: 31912 - protein, 202 aa, Arabidopsis thaliana; identical to SEQ ID NO: 28322
  peptide (1)..(202): Ceres Seq. ID no. 12340443

SEQ ID NO: 31913 - protein, 108 aa, Arabidopsis thaliana; identical to SEQ ID NO: 28323
  peptide (1)..(108): Ceres Seq. ID no. 12340444

SEQ ID NO: 31914 - DNA, 737 bp, Arabidopsis thaliana; identical to SEQ ID NO: 28324
  misc_feature (1)..(737): Ceres Seq. ID no. 12393223
  misc_feature (1)..(737): Ortholog of  Ceres SEQ ID NO 12586195 as cited in SEQ ID NO 63768
  misc_feature (1)..(737): Ortholog of  Ceres SEQ ID NO 13599518 as cited in SEQ ID NO 0

SEQ ID NO: 31915 - protein, 168 aa, Arabidopsis thaliana; identical to SEQ ID NO: 28325
  peptide (1)..(168): Ceres Seq. ID no. 12393224

SEQ ID NO: 31916 - protein, 150 aa, Arabidopsis thaliana; identical to SEQ ID NO: 28326
  peptide (1)..(150): Ceres Seq. ID no. 12393225

SEQ ID NO: 31917 - DNA, 1002 bp, Arabidopsis thaliana; identical to SEQ ID NO: 28327
  misc_feature (1)..(1002): Ceres Seq. ID no. 12420559
  misc_feature (1)..(1002): Ortholog of  Ceres SEQ ID NO 13594163 as cited in SEQ ID NO 60426

SEQ ID NO: 31918 - protein, 276 aa, Arabidopsis thaliana; identical to SEQ ID NO: 28328
  peptide (1)..(276): Ceres Seq. ID no. 12420560

SEQ ID NO: 31919 - protein, 261 aa, Arabidopsis thaliana; identical to SEQ ID NO: 28329
  peptide (1)..(261): Ceres Seq. ID no. 12420561

SEQ ID NO: 31920 - protein, 149 aa, Arabidopsis thaliana; identical to SEQ ID NO: 28330
  peptide (1)..(149): Ceres Seq. ID no. 12420562

SEQ ID NO: 31921 - DNA, 689 bp, Arabidopsis thaliana; identical to SEQ ID NO: 28331
  misc_feature (1)..(689): Ceres Seq. ID no. 13494629
  misc_feature (1)..(689): Ortholog of  Ceres SEQ ID NO 13594766 as cited in SEQ ID NO 51913
  misc_feature (1)..(689): Ortholog of  Ceres SEQ ID NO 12609226 as cited in SEQ ID NO 59300
  misc_feature (1)..(689): Ortholog of  Ceres SEQ ID NO 13654942 as cited in SEQ ID NO 62533
  misc_feature (1)..(689): Ortholog of  Ceres SEQ ID NO 13599195 as cited in SEQ ID NO 0

SEQ ID NO: 31922 - protein, 166 aa, Arabidopsis thaliana; identical to SEQ ID NO: 26434
  peptide (1)..(166): Ceres Seq. ID no. 13494630

SEQ ID NO: 31923 - DNA, 678 bp, Arabidopsis thaliana; identical to SEQ ID NO: 28333
  misc_feature (1)..(678): Ceres Seq. ID no. 12330045
  misc_feature (1)..(678): Ortholog of  Ceres SEQ ID NO 12557654 as cited in SEQ ID NO 12
  misc_feature (1)..(678): Ortholog of  Ceres SEQ ID NO 15175150 as cited in SEQ ID NO 0

SEQ ID NO: 31924 - protein, 155 aa, Arabidopsis thaliana; identical to SEQ ID NO: 28334
  peptide (1)..(155): Ceres Seq. ID no. 12330046

SEQ ID NO: 31925 - DNA, 1463 bp, Arabidopsis thaliana; identical to SEQ ID NO: 28335
  misc_feature (1)..(1463): Ceres Seq. ID no. 13487748
  misc_feature (1)..(1463): Ortholog of  Ceres SEQ ID NO 14314925 as cited in SEQ ID NO 57985
  misc_feature (1)..(1463): Ortholog of  Ceres SEQ ID NO 13591365 as cited in SEQ ID NO 62720

SEQ ID NO: 31926 - protein, 440 aa, Arabidopsis thaliana; identical to SEQ ID NO: 28336
  peptide (1)..(440): Ceres Seq. ID no. 13487749

SEQ ID NO: 31927 - protein, 409 aa, Arabidopsis thaliana; identical to SEQ ID NO: 28337
  peptide (1)..(409): Ceres Seq. ID no. 13487750

SEQ ID NO: 31928 - protein, 337 aa, Arabidopsis thaliana; identical to SEQ ID NO: 28338
  peptide (1)..(337): Ceres Seq. ID no. 13487751

SEQ ID NO: 31929 - DNA, 791 bp, Arabidopsis thaliana; identical to SEQ ID NO: 28339
  misc_feature (1)..(791): Ceres Seq. ID no. 13500319
  misc_feature (1)..(791): Ortholog of  Ceres SEQ ID NO 14306286 as cited in SEQ ID NO 56909

SEQ ID NO: 31930 - protein, 162 aa, Arabidopsis thaliana; identical to SEQ ID NO: 28340
  peptide (1)..(162): Ceres Seq. ID no. 13500320

SEQ ID NO: 31931 - protein, 143 aa, Arabidopsis thaliana; identical to SEQ ID NO: 28341
  peptide (1)..(143): Ceres Seq. ID no. 13500321

SEQ ID NO: 31932 - protein, 82 aa, Arabidopsis thaliana; identical to SEQ ID NO: 28342
  peptide (1)..(82): Ceres Seq. ID no. 13500322

SEQ ID NO: 31933 - DNA, 1649 bp, Arabidopsis thaliana; identical to SEQ ID NO: 28343
  misc_feature (1)..(1649): Ceres Seq. ID no. 13645741
  misc_feature (1)..(1649): Ortholog of  Ceres SEQ ID NO 14301413 as cited in SEQ ID NO 53524

SEQ ID NO: 31934 - protein, 444 aa, Arabidopsis thaliana; identical to SEQ ID NO: 28344
  peptide (1)..(444): Ceres Seq. ID no. 13645742

SEQ ID NO: 31935 - protein, 400 aa, Arabidopsis thaliana; identical to SEQ ID NO: 28345
  peptide (1)..(400): Ceres Seq. ID no. 13645743

SEQ ID NO: 31936 - protein, 395 aa, Arabidopsis thaliana; identical to SEQ ID NO: 28346
  peptide (1)..(395): Ceres Seq. ID no. 13645744

SEQ ID NO: 31937 - DNA, 1041 bp, Arabidopsis thaliana; identical to SEQ ID NO: 28347
  misc_feature (1)..(1041): Ceres Seq. ID no. 13504928
  misc_feature (1)..(1041): Ortholog of  Ceres SEQ ID NO 15176379 as cited in SEQ ID NO 59735

SEQ ID NO: 31938 - protein, 206 aa, Arabidopsis thaliana; identical to SEQ ID NO: 28348
  peptide (1)..(206): Ceres Seq. ID no. 13504929

SEQ ID NO: 31939 - protein, 160 aa, Arabidopsis thaliana; identical to SEQ ID NO: 25659
  peptide (1)..(160): Ceres Seq. ID no. 13504930

SEQ ID NO: 31940 - protein, 146 aa, Arabidopsis thaliana; identical to SEQ ID NO: 25660
  peptide (1)..(146): Ceres Seq. ID no. 13504931

SEQ ID NO: 31941 - DNA, 1596 bp, Arabidopsis thaliana; identical to SEQ ID NO: 28351
  misc_feature (1)..(1596): Ceres Seq. ID no. 13496758
  misc_feature (1)..(1596): Ortholog of  Ceres SEQ ID NO 14311870 as cited in SEQ ID NO 51574
  misc_feature (1)..(1596): Ortholog of  Ceres SEQ ID NO 15174583 as cited in SEQ ID NO 53693
  misc_feature (1)..(1596): Ortholog of  Ceres SEQ ID NO 13581563 as cited in SEQ ID NO 58942
  misc_feature (1)..(1596): Ortholog of  Ceres SEQ ID NO 13658707 as cited in SEQ ID NO 66286
  misc_feature (1)..(1596): Ortholog of  Ceres SEQ ID NO 13654528 as cited in SEQ ID NO 68080

SEQ ID NO: 31942 - protein, 495 aa, Arabidopsis thaliana; identical to SEQ ID NO: 28352
  peptide (1)..(495): Ceres Seq. ID no. 13496759

SEQ ID NO: 31943 - protein, 286 aa, Arabidopsis thaliana; identical to SEQ ID NO: 28353
  peptide (1)..(286): Ceres Seq. ID no. 13496760

SEQ ID NO: 31944 - DNA, 591 bp, Arabidopsis thaliana; identical to SEQ ID NO: 28354
  misc_feature (1)..(591): Ceres Seq. ID no. 12393038
  misc_feature (1)..(591): Ortholog of  Ceres SEQ ID NO 15169443 as cited in SEQ ID NO 58785

SEQ ID NO: 31945 - protein, 127 aa, Arabidopsis thaliana; identical to SEQ ID NO: 28355
  peptide (1)..(127): Ceres Seq. ID no. 12393039

SEQ ID NO: 31946 - protein, 115 aa, Arabidopsis thaliana; identical to SEQ ID NO: 28356
  peptide (1)..(115): Ceres Seq. ID no. 12393040

SEQ ID NO: 31947 - DNA, 1046 bp, Arabidopsis thaliana; identical to SEQ ID NO: 28357
  misc_feature (1)..(1046): Ceres Seq. ID no. 12640901
  misc_feature (1)..(1046): Ortholog of  Ceres SEQ ID NO 12610267 as cited in SEQ ID NO 51993
  misc_feature (1)..(1046): Ortholog of  Ceres SEQ ID NO 13495070 as cited in SEQ ID NO 53216
  misc_feature (1)..(1046): Ortholog of  Ceres SEQ ID NO 13661333 as cited in SEQ ID NO 61620
  misc_feature (1)..(1046): Ortholog of  Ceres SEQ ID NO 13596812 as cited in SEQ ID NO 62283
  misc_feature (1)..(1046): Ortholog of  Ceres SEQ ID NO 13623021 as cited in SEQ ID NO 0
  misc_feature (1)..(1046): Ortholog of  Ceres SEQ ID NO 14309080 as cited in SEQ ID NO 0

SEQ ID NO: 31948 - protein, 146 aa, Arabidopsis thaliana; identical to SEQ ID NO: 28358
  peptide (1)..(146): Ceres Seq. ID no. 12640902

SEQ ID NO: 31949 - protein, 132 aa, Arabidopsis thaliana; identical to SEQ ID NO: 28359
  peptide (1)..(132): Ceres Seq. ID no. 12640903

SEQ ID NO: 31950 - DNA, 701 bp, Arabidopsis thaliana; identical to SEQ ID NO: 28360
  misc_feature (1)..(701): Ceres Seq. ID no. 12322232
  misc_feature (1)..(701): Ortholog of  Ceres SEQ ID NO 14305854 as cited in SEQ ID NO 52331

SEQ ID NO: 31951 - protein, 145 aa, Arabidopsis thaliana; identical to SEQ ID NO: 28361
  peptide (1)..(145): Ceres Seq. ID no. 12322233

SEQ ID NO: 31952 - protein, 141 aa, Arabidopsis thaliana; identical to SEQ ID NO: 28362
  peptide (1)..(141): Ceres Seq. ID no. 12322234

SEQ ID NO: 31953 - protein, 87 aa, Arabidopsis thaliana; identical to SEQ ID NO: 28363
  peptide (1)..(87): Ceres Seq. ID no. 12322235

SEQ ID NO: 31954 - DNA, 678 bp, Arabidopsis thaliana; identical to SEQ ID NO: 28364
  misc_feature (1)..(678): Ceres Seq. ID no. 12396573
  misc_feature (1)..(678): Ortholog of  Ceres SEQ ID NO 12614157 as cited in SEQ ID NO 67965

SEQ ID NO: 31955 - protein, 71 aa, Arabidopsis thaliana; identical to SEQ ID NO: 28365
  peptide (1)..(71): Ceres Seq. ID no. 12396574

SEQ ID NO: 31956 - protein, 50 aa, Arabidopsis thaliana; identical to SEQ ID NO: 28366
  peptide (1)..(50): Ceres Seq. ID no. 12396575

SEQ ID NO: 31957 - protein, 46 aa, Arabidopsis thaliana; identical to SEQ ID NO: 28367
  peptide (1)..(46): Ceres Seq. ID no. 12396576

SEQ ID NO: 31958 - DNA, 1746 bp, Arabidopsis thaliana; identical to SEQ ID NO: 28368
  misc_feature (1)..(1746): Ceres Seq. ID no. 12738795
  misc_feature (1)..(1746): Ortholog of  Ceres SEQ ID NO 15226950 as cited in SEQ ID NO 68649
  misc_feature (1)..(1746): Ortholog of  Ceres SEQ ID NO 13502947 as cited in SEQ ID NO 69257

SEQ ID NO: 31959 - protein, 480 aa, Arabidopsis thaliana; identical to SEQ ID NO: 28369
  peptide (1)..(480): Ceres Seq. ID no. 12738796

SEQ ID NO: 31960 - protein, 464 aa, Arabidopsis thaliana; identical to SEQ ID NO: 28370
  peptide (1)..(464): Ceres Seq. ID no. 12738797

SEQ ID NO: 31961 - protein, 369 aa, Arabidopsis thaliana; identical to SEQ ID NO: 28371
  peptide (1)..(369): Ceres Seq. ID no. 12738798

SEQ ID NO: 31962 - DNA, 1084 bp, Arabidopsis thaliana; identical to SEQ ID NO: 28372
  misc_feature (1)..(1084): Ceres Seq. ID no. 13488418
  misc_feature (1)..(1084): Ortholog of  Ceres SEQ ID NO 13593910 as cited in SEQ ID NO 53081

SEQ ID NO: 31963 - protein, 264 aa, Arabidopsis thaliana; identical to SEQ ID NO: 28373
  peptide (1)..(264): Ceres Seq. ID no. 13488419

SEQ ID NO: 31964 - protein, 246 aa, Arabidopsis thaliana; identical to SEQ ID NO: 28374
  peptide (1)..(246): Ceres Seq. ID no. 13488420

SEQ ID NO: 31965 - protein, 188 aa, Arabidopsis thaliana; identical to SEQ ID NO: 28375
  peptide (1)..(188): Ceres Seq. ID no. 13488421

SEQ ID NO: 31966 - DNA, 810 bp, Arabidopsis thaliana; identical to SEQ ID NO: 28376
  misc_feature (1)..(810): Ceres Seq. ID no. 12343497
  misc_feature (1)..(810): Ortholog of  Ceres SEQ ID NO 14304132 as cited in SEQ ID NO 56475
  misc_feature (1)..(810): Ortholog of  Ceres SEQ ID NO 13661994 as cited in SEQ ID NO 60568
  misc_feature (1)..(810): Ortholog of  Ceres SEQ ID NO 13664228 as cited in SEQ ID NO 61166
  misc_feature (1)..(810): Ortholog of  Ceres SEQ ID NO 15179439 as cited in SEQ ID NO 0

SEQ ID NO: 31967 - protein, 180 aa, Arabidopsis thaliana; identical to SEQ ID NO: 28377
  peptide (1)..(180): Ceres Seq. ID no. 12343498

SEQ ID NO: 31968 - protein, 136 aa, Arabidopsis thaliana; identical to SEQ ID NO: 28378
  peptide (1)..(136): Ceres Seq. ID no. 12343499

SEQ ID NO: 31969 - protein, 133 aa, Arabidopsis thaliana; identical to SEQ ID NO: 28379
  peptide (1)..(133): Ceres Seq. ID no. 12343500

SEQ ID NO: 31970 - DNA, 1008 bp, Arabidopsis thaliana; identical to SEQ ID NO: 28380
  misc_feature (1)..(1008): Ceres Seq. ID no. 13496808
  misc_feature (1)..(1008): Ortholog of  Ceres SEQ ID NO 14315553 as cited in SEQ ID NO 60445
  misc_feature (1)..(1008): Ortholog of  Ceres SEQ ID NO 13598045 as cited in SEQ ID NO 66822

SEQ ID NO: 31971 - protein, 246 aa, Arabidopsis thaliana; identical to SEQ ID NO: 28381
  peptide (1)..(246): Ceres Seq. ID no. 13496809

SEQ ID NO: 31972 - protein, 138 aa, Arabidopsis thaliana; identical to SEQ ID NO: 28382
  peptide (1)..(138): Ceres Seq. ID no. 13496810

SEQ ID NO: 31973 - DNA, 772 bp, Arabidopsis thaliana; identical to SEQ ID NO: 28383
  misc_feature (1)..(772): Ceres Seq. ID no. 12394403
  misc_feature (1)..(772): Ortholog of  Ceres SEQ ID NO 15174662 as cited in SEQ ID NO 54292

SEQ ID NO: 31974 - protein, 181 aa, Arabidopsis thaliana; identical to SEQ ID NO: 28384
  peptide (1)..(181): Ceres Seq. ID no. 12394404

SEQ ID NO: 31975 - DNA, 2336 bp, Arabidopsis thaliana; identical to SEQ ID NO: 28385
  misc_feature (1)..(2336): Ceres Seq. ID no. 13491856
  misc_feature (1)..(2336): Ortholog of  Ceres SEQ ID NO 14303348 as cited in SEQ ID NO 59561

SEQ ID NO: 31976 - protein, 602 aa, Arabidopsis thaliana; identical to SEQ ID NO: 28386
  peptide (1)..(602): Ceres Seq. ID no. 13491857

SEQ ID NO: 31977 - protein, 537 aa, Arabidopsis thaliana; identical to SEQ ID NO: 28387
  peptide (1)..(537): Ceres Seq. ID no. 13491858

SEQ ID NO: 31978 - protein, 336 aa, Arabidopsis thaliana; identical to SEQ ID NO: 28388
  peptide (1)..(336): Ceres Seq. ID no. 13491859

SEQ ID NO: 31979 - DNA, 750 bp, Arabidopsis thaliana; identical to SEQ ID NO: 28389
  misc_feature (1)..(750): Ceres Seq. ID no. 12394399
  misc_feature (1)..(750): Ortholog of  Ceres SEQ ID NO 12584790 as cited in SEQ ID NO 62648

SEQ ID NO: 31980 - protein, 148 aa, Arabidopsis thaliana; identical to SEQ ID NO: 28390
  peptide (1)..(148): Ceres Seq. ID no. 12394400

SEQ ID NO: 31981 - protein, 119 aa, Arabidopsis thaliana; identical to SEQ ID NO: 28391
  peptide (1)..(119): Ceres Seq. ID no. 12394401

SEQ ID NO: 31982 - protein, 116 aa, Arabidopsis thaliana; identical to SEQ ID NO: 28392
  peptide (1)..(116): Ceres Seq. ID no. 12394402

SEQ ID NO: 31983 - DNA, 964 bp, Arabidopsis thaliana; identical to SEQ ID NO: 22782
  misc_feature (1)..(964): Ceres Seq. ID no. 13509136
  misc_feature (1)..(964): Ortholog of  Ceres SEQ ID NO 15173873 as cited in SEQ ID NO 62620
  misc_feature (1)..(964): Ortholog of  Ceres SEQ ID NO 13655610 as cited in SEQ ID NO 64148
  misc_feature (1)..(964): Ortholog of  Ceres SEQ ID NO 14302675 as cited in SEQ ID NO 0

SEQ ID NO: 31984 - protein, 233 aa, Arabidopsis thaliana; identical to SEQ ID NO: 22783
  peptide (1)..(233): Ceres Seq. ID no. 13509137

SEQ ID NO: 31985 - protein, 206 aa, Arabidopsis thaliana; identical to SEQ ID NO: 22784
  peptide (1)..(206): Ceres Seq. ID no. 13509138

SEQ ID NO: 31986 - DNA, 971 bp, Arabidopsis thaliana; identical to SEQ ID NO: 28396
  misc_feature (1)..(971): Ceres Seq. ID no. 12332975
  misc_feature (1)..(971): Ortholog of  Ceres SEQ ID NO 15226909 as cited in SEQ ID NO 61336
  misc_feature (1)..(971): Ortholog of  Ceres SEQ ID NO 15179474 as cited in SEQ ID NO 0

SEQ ID NO: 31987 - protein, 291 aa, Arabidopsis thaliana; identical to SEQ ID NO: 28397
  peptide (1)..(291): Ceres Seq. ID no. 12332976

SEQ ID NO: 31988 - protein, 285 aa, Arabidopsis thaliana; identical to SEQ ID NO: 28398
  peptide (1)..(285): Ceres Seq. ID no. 12332977

SEQ ID NO: 31989 - protein, 240 aa, Arabidopsis thaliana; identical to SEQ ID NO: 28399
  peptide (1)..(240): Ceres Seq. ID no. 12332978

SEQ ID NO: 31990 - DNA, 908 bp, Arabidopsis thaliana; identical to SEQ ID NO: 28400
  misc_feature (1)..(908): Ceres Seq. ID no. 13491283
  misc_feature (1)..(908): Ortholog of  Ceres SEQ ID NO 13662677 as cited in SEQ ID NO 63824

SEQ ID NO: 31991 - protein, 173 aa, Arabidopsis thaliana; identical to SEQ ID NO: 22629
  peptide (1)..(173): Ceres Seq. ID no. 13491284

SEQ ID NO: 31992 - protein, 104 aa, Arabidopsis thaliana; identical to SEQ ID NO: 22630
  peptide (1)..(104): Ceres Seq. ID no. 13491285

SEQ ID NO: 31993 - DNA, 1701 bp, Arabidopsis thaliana; identical to SEQ ID NO: 28403
  misc_feature (1)..(1701): Ceres Seq. ID no. 13496299
  misc_feature (1)..(1701): Ortholog of  Ceres SEQ ID NO 15179641 as cited in SEQ ID NO 56414
  misc_feature (1)..(1701): Ortholog of  Ceres SEQ ID NO 15176851 as cited in SEQ ID NO 61348
  misc_feature (1)..(1701): Ortholog of  Ceres SEQ ID NO 14316049 as cited in SEQ ID NO 67036
  misc_feature (1)..(1701): Ortholog of  Ceres SEQ ID NO 14313252 as cited in SEQ ID NO 67134
  misc_feature (1)..(1701): Ortholog of  Ceres SEQ ID NO 14302220 as cited in SEQ ID NO 69121

SEQ ID NO: 31994 - protein, 422 aa, Arabidopsis thaliana; identical to SEQ ID NO: 28404
  peptide (1)..(422): Ceres Seq. ID no. 13496300

SEQ ID NO: 31995 - protein, 297 aa, Arabidopsis thaliana; identical to SEQ ID NO: 28405
  peptide (1)..(297): Ceres Seq. ID no. 13496301

SEQ ID NO: 31996 - protein, 294 aa, Arabidopsis thaliana; identical to SEQ ID NO: 28406
  peptide (1)..(294): Ceres Seq. ID no. 13496302

SEQ ID NO: 31997 - DNA, 1134 bp, Arabidopsis thaliana; identical to SEQ ID NO: 28407
  misc_feature (1)..(1134): Ceres Seq. ID no. 12370160
  misc_feature (1)..(1134): Ortholog of  Ceres SEQ ID NO 13594740 as cited in SEQ ID NO 51721
  misc_feature (1)..(1134): Ortholog of  Ceres SEQ ID NO 14316497 as cited in SEQ ID NO 58285
  misc_feature (1)..(1134): Ortholog of  Ceres SEQ ID NO 13595944 as cited in SEQ ID NO 68153

SEQ ID NO: 31998 - protein, 241 aa, Arabidopsis thaliana; identical to SEQ ID NO: 28408
  peptide (1)..(241): Ceres Seq. ID no. 12370161

SEQ ID NO: 31999 - protein, 221 aa, Arabidopsis thaliana; identical to SEQ ID NO: 28409
  peptide (1)..(221): Ceres Seq. ID no. 12370162

SEQ ID NO: 32000 - protein, 219 aa, Arabidopsis thaliana; identical to SEQ ID NO: 28410
  peptide (1)..(219): Ceres Seq. ID no. 12370163

SEQ ID NO: 32001 - DNA, 741 bp, Arabidopsis thaliana; identical to SEQ ID NO: 28411
  misc_feature (1)..(741): Ceres Seq. ID no. 13497018
  misc_feature (1)..(741): Ortholog of  Ceres SEQ ID NO 14307480 as cited in SEQ ID NO 54235

SEQ ID NO: 32002 - protein, 174 aa, Arabidopsis thaliana; identical to SEQ ID NO: 28412
  peptide (1)..(174): Ceres Seq. ID no. 13497019

SEQ ID NO: 32003 - protein, 146 aa, Arabidopsis thaliana; identical to SEQ ID NO: 28413
  peptide (1)..(146): Ceres Seq. ID no. 13497020

SEQ ID NO: 32004 - protein, 142 aa, Arabidopsis thaliana; identical to SEQ ID NO: 28414
  peptide (1)..(142): Ceres Seq. ID no. 13497021

SEQ ID NO: 32005 - DNA, 1195 bp, Arabidopsis thaliana; identical to SEQ ID NO: 28415
  misc_feature (1)..(1195): Ceres Seq. ID no. 13486843
  misc_feature (1)..(1195): Ortholog of  Ceres SEQ ID NO 12333459 as cited in SEQ ID NO 20477
  misc_feature (1)..(1195): Ortholog of  Ceres SEQ ID NO 15176155 as cited in SEQ ID NO 0

SEQ ID NO: 32006 - protein, 306 aa, Arabidopsis thaliana; identical to SEQ ID NO: 28416
  peptide (1)..(306): Ceres Seq. ID no. 13486844

SEQ ID NO: 32007 - DNA, 731 bp, Arabidopsis thaliana; identical to SEQ ID NO: 28417
  misc_feature (1)..(731): Ceres Seq. ID no. 13490081
  misc_feature (1)..(731): Ortholog of  Ceres SEQ ID NO 15173170 as cited in SEQ ID NO 64240

SEQ ID NO: 32008 - protein, 148 aa, Arabidopsis thaliana; identical to SEQ ID NO: 28418
  peptide (1)..(148): Ceres Seq. ID no. 13490082

SEQ ID NO: 32009 - protein, 128 aa, Arabidopsis thaliana; identical to SEQ ID NO: 28419
  peptide (1)..(128): Ceres Seq. ID no. 13490083

SEQ ID NO: 32010 - protein, 74 aa, Arabidopsis thaliana; identical to SEQ ID NO: 28420
  peptide (1)..(74): Ceres Seq. ID no. 13490084

SEQ ID NO: 32011 - DNA, 777 bp, Arabidopsis thaliana; identical to SEQ ID NO: 28421
  misc_feature (1)..(777): Ceres Seq. ID no. 12331800
  misc_feature (1)..(777): Ortholog of  Ceres SEQ ID NO 12598353 as cited in SEQ ID NO 62205

SEQ ID NO: 32012 - protein, 133 aa, Arabidopsis thaliana; identical to SEQ ID NO: 28422
  peptide (1)..(133): Ceres Seq. ID no. 12331801

SEQ ID NO: 32013 - DNA, 1201 bp, Arabidopsis thaliana; identical to SEQ ID NO: 28423
  misc_feature (1)..(1201): Ceres Seq. ID no. 12680985
  misc_feature (1)..(1201): Ortholog of  Ceres SEQ ID NO 14308077 as cited in SEQ ID NO 58566
  misc_feature (1)..(1201): Ortholog of  Ceres SEQ ID NO 15226608 as cited in SEQ ID NO 64190

SEQ ID NO: 32014 - protein, 340 aa, Arabidopsis thaliana; identical to SEQ ID NO: 28424
  peptide (1)..(340): Ceres Seq. ID no. 12680986

SEQ ID NO: 32015 - protein, 287 aa, Arabidopsis thaliana; identical to SEQ ID NO: 28425
  peptide (1)..(287): Ceres Seq. ID no. 12680987

SEQ ID NO: 32016 - DNA, 1531 bp, Arabidopsis thaliana; identical to SEQ ID NO: 28426
  misc_feature (1)..(1531): Ceres Seq. ID no. 12377341
  misc_feature (1)..(1531): Ortholog of  Ceres SEQ ID NO 14316522 as cited in SEQ ID NO 58267

SEQ ID NO: 32017 - protein, 419 aa, Arabidopsis thaliana; identical to SEQ ID NO: 28427
  peptide (1)..(419): Ceres Seq. ID no. 12377342

SEQ ID NO: 32018 - protein, 253 aa, Arabidopsis thaliana; identical to SEQ ID NO: 28428
  peptide (1)..(253): Ceres Seq. ID no. 12377343

SEQ ID NO: 32019 - protein, 245 aa, Arabidopsis thaliana; identical to SEQ ID NO: 28429
  peptide (1)..(245): Ceres Seq. ID no. 12377344

SEQ ID NO: 32020 - DNA, 799 bp, Arabidopsis thaliana; identical to SEQ ID NO: 28430
  misc_feature (1)..(799): Ceres Seq. ID no. 12393692
  misc_feature (1)..(799): Ortholog of  Ceres SEQ ID NO 15177004 as cited in SEQ ID NO 57554
  misc_feature (1)..(799): Ortholog of  Ceres SEQ ID NO 13662587 as cited in SEQ ID NO 63275
  misc_feature (1)..(799): Ortholog of  Ceres SEQ ID NO 13599500 as cited in SEQ ID NO 0

SEQ ID NO: 32021 - protein, 153 aa, Arabidopsis thaliana; identical to SEQ ID NO: 28431
  peptide (1)..(153): Ceres Seq. ID no. 12393693

SEQ ID NO: 32022 - protein, 144 aa, Arabidopsis thaliana; identical to SEQ ID NO: 28432
  peptide (1)..(144): Ceres Seq. ID no. 12393694

SEQ ID NO: 32023 - protein, 120 aa, Arabidopsis thaliana; identical to SEQ ID NO: 28433
  peptide (1)..(120): Ceres Seq. ID no. 12393695

SEQ ID NO: 32024 - DNA, 597 bp, Arabidopsis thaliana; identical to SEQ ID NO: 28434
  misc_feature (1)..(597): Ceres Seq. ID no. 12331802
  misc_feature (1)..(597): Ortholog of  Ceres SEQ ID NO 12612527 as cited in SEQ ID NO 52588

SEQ ID NO: 32025 - protein, 122 aa, Arabidopsis thaliana; identical to SEQ ID NO: 28435
  peptide (1)..(122): Ceres Seq. ID no. 12331803

SEQ ID NO: 32026 - protein, 118 aa, Arabidopsis thaliana; identical to SEQ ID NO: 28436
  peptide (1)..(118): Ceres Seq. ID no. 12331804

SEQ ID NO: 32027 - protein, 68 aa, Arabidopsis thaliana; identical to SEQ ID NO: 28437
  peptide (1)..(68): Ceres Seq. ID no. 12331805

SEQ ID NO: 32028 - DNA, 1068 bp, Arabidopsis thaliana; identical to SEQ ID NO: 28438
  misc_feature (1)..(1068): Ceres Seq. ID no. 12327625
  misc_feature (1)..(1068): Ortholog of  Ceres SEQ ID NO 13594430 as cited in SEQ ID NO 60181
  misc_feature (1)..(1068): Ortholog of  Ceres SEQ ID NO 13597809 as cited in SEQ ID NO 64598
  misc_feature (1)..(1068): Ortholog of  Ceres SEQ ID NO 12617960 as cited in SEQ ID NO 69051
  misc_feature (1)..(1068): Ortholog of  Ceres SEQ ID NO 13589401 as cited in SEQ ID NO 0
  misc_feature (1)..(1068): Ortholog of  Ceres SEQ ID NO 15179361 as cited in SEQ ID NO 0

SEQ ID NO: 32029 - protein, 257 aa, Arabidopsis thaliana; identical to SEQ ID NO: 28439
  peptide (1)..(257): Ceres Seq. ID no. 12327626

SEQ ID NO: 32030 - DNA, 1036 bp, Arabidopsis thaliana; identical to SEQ ID NO: 28440
  misc_feature (1)..(1036): Ceres Seq. ID no. 12488547
  misc_feature (1)..(1036): Ortholog of  Ceres SEQ ID NO 14311477 as cited in SEQ ID NO 51390
  misc_feature (1)..(1036): Ortholog of  Ceres SEQ ID NO 14302840 as cited in SEQ ID NO 62295
  misc_feature (1)..(1036): Ortholog of  Ceres SEQ ID NO 13596892 as cited in SEQ ID NO 62900

SEQ ID NO: 32031 - protein, 309 aa, Arabidopsis thaliana; identical to SEQ ID NO: 28441
  peptide (1)..(309): Ceres Seq. ID no. 12488548

SEQ ID NO: 32032 - protein, 307 aa, Arabidopsis thaliana; identical to SEQ ID NO: 28442
  peptide (1)..(307): Ceres Seq. ID no. 12488549

SEQ ID NO: 32033 - protein, 156 aa, Arabidopsis thaliana; identical to SEQ ID NO: 28443
  peptide (1)..(156): Ceres Seq. ID no. 12488550

SEQ ID NO: 32034 - DNA, 1299 bp, Arabidopsis thaliana; identical to SEQ ID NO: 28444
  misc_feature (1)..(1299): Ceres Seq. ID no. 12324245
  misc_feature (1)..(1299): Ortholog of  Ceres SEQ ID NO 14302514 as cited in SEQ ID NO 65814

SEQ ID NO: 32035 - protein, 347 aa, Arabidopsis thaliana; identical to SEQ ID NO: 28445
  peptide (1)..(347): Ceres Seq. ID no. 12324246

SEQ ID NO: 32036 - protein, 264 aa, Arabidopsis thaliana; identical to SEQ ID NO: 28446
  peptide (1)..(264): Ceres Seq. ID no. 12324247

SEQ ID NO: 32037 - protein, 216 aa, Arabidopsis thaliana; identical to SEQ ID NO: 28447
  peptide (1)..(216): Ceres Seq. ID no. 12324248

SEQ ID NO: 32038 - DNA, 1294 bp, Arabidopsis thaliana; identical to SEQ ID NO: 28448
  misc_feature (1)..(1294): Ceres Seq. ID no. 13487534
  misc_feature (1)..(1294): Ortholog of  Ceres SEQ ID NO 13659644 as cited in SEQ ID NO 67118
  misc_feature (1)..(1294): Ortholog of  Ceres SEQ ID NO 14302856 as cited in SEQ ID NO 68824

SEQ ID NO: 32039 - protein, 358 aa, Arabidopsis thaliana; identical to SEQ ID NO: 28449
  peptide (1)..(358): Ceres Seq. ID no. 13487535

SEQ ID NO: 32040 - protein, 347 aa, Arabidopsis thaliana; identical to SEQ ID NO: 28450
  peptide (1)..(347): Ceres Seq. ID no. 13487536

SEQ ID NO: 32041 - protein, 341 aa, Arabidopsis thaliana; identical to SEQ ID NO: 28451
  peptide (1)..(341): Ceres Seq. ID no. 13487537

SEQ ID NO: 32042 - DNA, 1520 bp, Arabidopsis thaliana; identical to SEQ ID NO: 28452
  misc_feature (1)..(1520): Ceres Seq. ID no. 13499768
  misc_feature (1)..(1520): Ortholog of  Ceres SEQ ID NO 13639663 as cited in SEQ ID NO 57850

SEQ ID NO: 32043 - protein, 442 aa, Arabidopsis thaliana; identical to SEQ ID NO: 28453
  peptide (1)..(442): Ceres Seq. ID no. 13499769

SEQ ID NO: 32044 - protein, 391 aa, Arabidopsis thaliana; identical to SEQ ID NO: 28454
  peptide (1)..(391): Ceres Seq. ID no. 13499770

SEQ ID NO: 32045 - protein, 380 aa, Arabidopsis thaliana; identical to SEQ ID NO: 28455
  peptide (1)..(380): Ceres Seq. ID no. 13499771

SEQ ID NO: 32046 - DNA, 1200 bp, Arabidopsis thaliana; identical to SEQ ID NO: 28456
  misc_feature (1)..(1200): Ceres Seq. ID no. 12327357
  misc_feature (1)..(1200): Ortholog of  Ceres SEQ ID NO 15176130 as cited in SEQ ID NO 1136
  misc_feature (1)..(1200): Ortholog of  Ceres SEQ ID NO 15171728 as cited in SEQ ID NO 57131
  misc_feature (1)..(1200): Ortholog of  Ceres SEQ ID NO 14308198 as cited in SEQ ID NO 59072
  misc_feature (1)..(1200): Ortholog of  Ceres SEQ ID NO 13654213 as cited in SEQ ID NO 60614
  misc_feature (1)..(1200): Ortholog of  Ceres SEQ ID NO 12617527 as cited in SEQ ID NO 64697

SEQ ID NO: 32047 - protein, 260 aa, Arabidopsis thaliana; identical to SEQ ID NO: 28457
  peptide (1)..(260): Ceres Seq. ID no. 12327358

SEQ ID NO: 32048 - DNA, 1432 bp, Arabidopsis thaliana; identical to SEQ ID NO: 28458
  misc_feature (1)..(1432): Ceres Seq. ID no. 12559942
  misc_feature (1)..(1432): Ortholog of  Ceres SEQ ID NO 14306797 as cited in SEQ ID NO 53354
  misc_feature (1)..(1432): Ortholog of  Ceres SEQ ID NO 15176525 as cited in SEQ ID NO 54495
  misc_feature (1)..(1432): Ortholog of  Ceres SEQ ID NO 15169519 as cited in SEQ ID NO 67237

SEQ ID NO: 32049 - protein, 429 aa, Arabidopsis thaliana; identical to SEQ ID NO: 28459
  peptide (1)..(429): Ceres Seq. ID no. 12559943

SEQ ID NO: 32050 - protein, 417 aa, Arabidopsis thaliana; identical to SEQ ID NO: 28460
  peptide (1)..(417): Ceres Seq. ID no. 12559944

SEQ ID NO: 32051 - protein, 359 aa, Arabidopsis thaliana; identical to SEQ ID NO: 28461
  peptide (1)..(359): Ceres Seq. ID no. 12559945

SEQ ID NO: 32052 - DNA, 569 bp, Arabidopsis thaliana; identical to SEQ ID NO: 28462
  misc_feature (1)..(569): Ceres Seq. ID no. 12482101
  misc_feature (1)..(569): Ortholog of  Ceres SEQ ID NO 12422485 as cited in SEQ ID NO 20557

SEQ ID NO: 32053 - protein, 106 aa, Arabidopsis thaliana; identical to SEQ ID NO: 28463
  peptide (1)..(106): Ceres Seq. ID no. 12482102

SEQ ID NO: 32054 - protein, 80 aa, Arabidopsis thaliana; identical to SEQ ID NO: 28464
  peptide (1)..(80): Ceres Seq. ID no. 12482103

SEQ ID NO: 32055 - protein, 77 aa, Arabidopsis thaliana; identical to SEQ ID NO: 28465
  peptide (1)..(77): Ceres Seq. ID no. 12482104

SEQ ID NO: 32056 - DNA, 588 bp, Arabidopsis thaliana; identical to SEQ ID NO: 28466
  misc_feature (1)..(588): Ceres Seq. ID no. 12336000
  misc_feature (1)..(588): Ortholog of  Ceres SEQ ID NO 13581902 as cited in SEQ ID NO 52223

SEQ ID NO: 32057 - protein, 158 aa, Arabidopsis thaliana; identical to SEQ ID NO: 28467
  peptide (1)..(158): Ceres Seq. ID no. 12336001

SEQ ID NO: 32058 - protein, 136 aa, Arabidopsis thaliana; identical to SEQ ID NO: 8709
  peptide (1)..(136): Ceres Seq. ID no. 12336002

SEQ ID NO: 32059 - DNA, 1005 bp, Arabidopsis thaliana; identical to SEQ ID NO: 28469
  misc_feature (1)..(1005): Ceres Seq. ID no. 15178652
  misc_feature (1)..(1005): Ortholog of  Ceres SEQ ID NO 14302123 as cited in SEQ ID NO 0
  misc_feature (1)..(1005): Ortholog of  Ceres SEQ ID NO 15179452 as cited in SEQ ID NO 0

SEQ ID NO: 32060 - protein, 148 aa, Arabidopsis thaliana; identical to SEQ ID NO: 28470
  peptide (1)..(148): Ceres Seq. ID no. 15178653

SEQ ID NO: 32061 - protein, 105 aa, Arabidopsis thaliana; identical to SEQ ID NO: 28471
  peptide (1)..(105): Ceres Seq. ID no. 15178654

SEQ ID NO: 32062 - protein, 99 aa, Arabidopsis thaliana; identical to SEQ ID NO: 28472
  peptide (1)..(99): Ceres Seq. ID no. 15178655

SEQ ID NO: 32063 - DNA, 1905 bp, Arabidopsis thaliana; identical to SEQ ID NO: 20321
  misc_feature (1)..(1905): Ceres Seq. ID no. 13486771
  misc_feature (1)..(1905): Ortholog of  Ceres SEQ ID NO 13595840 as cited in SEQ ID NO 56647
  misc_feature (1)..(1905): Ortholog of  Ceres SEQ ID NO 13582260 as cited in SEQ ID NO 59799
  misc_feature (1)..(1905): Ortholog of  Ceres SEQ ID NO 15180619 as cited in SEQ ID NO 0

SEQ ID NO: 32064 - protein, 297 aa, Arabidopsis thaliana; identical to SEQ ID NO: 20322
  peptide (1)..(297): Ceres Seq. ID no. 15218567

SEQ ID NO: 32065 - protein, 293 aa, Arabidopsis thaliana; identical to SEQ ID NO: 20323
  peptide (1)..(293): Ceres Seq. ID no. 15218568

SEQ ID NO: 32066 - protein, 226 aa, Arabidopsis thaliana; identical to SEQ ID NO: 20324
  peptide (1)..(226): Ceres Seq. ID no. 15218569

SEQ ID NO: 32067 - DNA, 909 bp, Arabidopsis thaliana; identical to SEQ ID NO: 28477
  misc_feature (1)..(909): Ceres Seq. ID no. 12332583
  misc_feature (1)..(909): Ortholog of  Ceres SEQ ID NO 12619999 as cited in SEQ ID NO 66123
  misc_feature (1)..(909): Ortholog of  Ceres SEQ ID NO 13656436 as cited in SEQ ID NO 69154

SEQ ID NO: 32068 - protein, 218 aa, Arabidopsis thaliana; identical to SEQ ID NO: 28478
  peptide (1)..(218): Ceres Seq. ID no. 12332584

SEQ ID NO: 32069 - protein, 130 aa, Arabidopsis thaliana; identical to SEQ ID NO: 28479
  peptide (1)..(130): Ceres Seq. ID no. 12332585

SEQ ID NO: 32070 - protein, 109 aa, Arabidopsis thaliana; identical to SEQ ID NO: 28480
  peptide (1)..(109): Ceres Seq. ID no. 12332586

SEQ ID NO: 32071 - DNA, 1047 bp, Arabidopsis thaliana; identical to SEQ ID NO: 28481
  misc_feature (1)..(1047): Ceres Seq. ID no. 12332587
  misc_feature (1)..(1047): Ortholog of  Ceres SEQ ID NO 13656050 as cited in SEQ ID NO 64724

SEQ ID NO: 32072 - protein, 273 aa, Arabidopsis thaliana; identical to SEQ ID NO: 28482
  peptide (1)..(273): Ceres Seq. ID no. 12332588

SEQ ID NO: 32073 - protein, 259 aa, Arabidopsis thaliana; identical to SEQ ID NO: 28483
  peptide (1)..(259): Ceres Seq. ID no. 12332589

SEQ ID NO: 32074 - protein, 169 aa, Arabidopsis thaliana; identical to SEQ ID NO: 28484
  peptide (1)..(169): Ceres Seq. ID no. 12332590

SEQ ID NO: 32075 - DNA, 773 bp, Arabidopsis thaliana; identical to SEQ ID NO: 28485
  misc_feature (1)..(773): Ceres Seq. ID no. 12420842
  misc_feature (1)..(773): Ortholog of  Ceres SEQ ID NO 12635789 as cited in SEQ ID NO 0

SEQ ID NO: 32076 - protein, 202 aa, Arabidopsis thaliana; identical to SEQ ID NO: 28486
  peptide (1)..(202): Ceres Seq. ID no. 12420843

SEQ ID NO: 32077 - protein, 177 aa, Arabidopsis thaliana; identical to SEQ ID NO: 28487
  peptide (1)..(177): Ceres Seq. ID no. 12420844

SEQ ID NO: 32078 - protein, 132 aa, Arabidopsis thaliana; identical to SEQ ID NO: 28488
  peptide (1)..(132): Ceres Seq. ID no. 12420845

SEQ ID NO: 32079 - DNA, 682 bp, Arabidopsis thaliana; identical to SEQ ID NO: 28489
  misc_feature (1)..(682): Ceres Seq. ID no. 12393018
  misc_feature (1)..(682): Ortholog of  Ceres SEQ ID NO 14314198 as cited in SEQ ID NO 57472
  misc_feature (1)..(682): Ortholog of  Ceres SEQ ID NO 12783998 as cited in SEQ ID NO 61535
  misc_feature (1)..(682): Ortholog of  Ceres SEQ ID NO 15174264 as cited in SEQ ID NO 61877

SEQ ID NO: 32080 - protein, 145 aa, Arabidopsis thaliana; identical to SEQ ID NO: 21275
  peptide (1)..(145): Ceres Seq. ID no. 12393019

SEQ ID NO: 32081 - protein, 96 aa, Arabidopsis thaliana; identical to SEQ ID NO: 21276
  peptide (1)..(96): Ceres Seq. ID no. 12393020

SEQ ID NO: 32082 - DNA, 932 bp, Arabidopsis thaliana; identical to SEQ ID NO: 28492
  misc_feature (1)..(932): Ceres Seq. ID no. 12574162
  misc_feature (1)..(932): Ortholog of  Ceres SEQ ID NO 14302000 as cited in SEQ ID NO 52175
  misc_feature (1)..(932): Ortholog of  Ceres SEQ ID NO 14316371 as cited in SEQ ID NO 60113

SEQ ID NO: 32083 - protein, 238 aa, Arabidopsis thaliana; identical to SEQ ID NO: 28493
  peptide (1)..(238): Ceres Seq. ID no. 12574163

SEQ ID NO: 32084 - protein, 212 aa, Arabidopsis thaliana; identical to SEQ ID NO: 28494
  peptide (1)..(212): Ceres Seq. ID no. 12574164

SEQ ID NO: 32085 - protein, 198 aa, Arabidopsis thaliana; identical to SEQ ID NO: 28495
  peptide (1)..(198): Ceres Seq. ID no. 12574165

SEQ ID NO: 32086 - DNA, 930 bp, Arabidopsis thaliana; identical to SEQ ID NO: 28496
  misc_feature (1)..(930): Ceres Seq. ID no. 12332556
  misc_feature (1)..(930): Ortholog of  Ceres SEQ ID NO 13638976 as cited in SEQ ID NO 55790
  misc_feature (1)..(930): Ortholog of  Ceres SEQ ID NO 13595442 as cited in SEQ ID NO 56456
  misc_feature (1)..(930): Ortholog of  Ceres SEQ ID NO 12616626 as cited in SEQ ID NO 64532
  misc_feature (1)..(930): Ortholog of  Ceres SEQ ID NO 12635864 as cited in SEQ ID NO 0

SEQ ID NO: 32087 - protein, 204 aa, Arabidopsis thaliana; identical to SEQ ID NO: 28497
  peptide (1)..(204): Ceres Seq. ID no. 12332557

SEQ ID NO: 32088 - protein, 176 aa, Arabidopsis thaliana; identical to SEQ ID NO: 28498
  peptide (1)..(176): Ceres Seq. ID no. 12332558

SEQ ID NO: 32089 - protein, 174 aa, Arabidopsis thaliana; identical to SEQ ID NO: 28499
  peptide (1)..(174): Ceres Seq. ID no. 12332559

SEQ ID NO: 32090 - DNA, 735 bp, Arabidopsis thaliana; identical to SEQ ID NO: 28500
  misc_feature (1)..(735): Ceres Seq. ID no. 12393721
  misc_feature (1)..(735): Ortholog of  Ceres SEQ ID NO 12617704 as cited in SEQ ID NO 65314

SEQ ID NO: 32091 - protein, 184 aa, Arabidopsis thaliana; identical to SEQ ID NO: 28501
  peptide (1)..(184): Ceres Seq. ID no. 12393722

SEQ ID NO: 32092 - DNA, 725 bp, Arabidopsis thaliana; identical to SEQ ID NO: 28502
  misc_feature (1)..(725): Ceres Seq. ID no. 13645709
  misc_feature (1)..(725): Ortholog of  Ceres SEQ ID NO 13594023 as cited in SEQ ID NO 55192
  misc_feature (1)..(725): Ortholog of  Ceres SEQ ID NO 15174297 as cited in SEQ ID NO 0

SEQ ID NO: 32093 - protein, 169 aa, Arabidopsis thaliana; identical to SEQ ID NO: 28503
  peptide (1)..(169): Ceres Seq. ID no. 13645710

SEQ ID NO: 32094 - protein, 118 aa, Arabidopsis thaliana; identical to SEQ ID NO: 28504
  peptide (1)..(118): Ceres Seq. ID no. 13645711

SEQ ID NO: 32095 - protein, 111 aa, Arabidopsis thaliana; identical to SEQ ID NO: 28505
  peptide (1)..(111): Ceres Seq. ID no. 13645712

SEQ ID NO: 32096 - DNA, 1107 bp, Arabidopsis thaliana; identical to SEQ ID NO: 28506
  misc_feature (1)..(1107): Ceres Seq. ID no. 12334388
  misc_feature (1)..(1107): Ortholog of  Ceres SEQ ID NO 13594855 as cited in SEQ ID NO 51970

SEQ ID NO: 32097 - protein, 282 aa, Arabidopsis thaliana; identical to SEQ ID NO: 28507
  peptide (1)..(282): Ceres Seq. ID no. 12334389

SEQ ID NO: 32098 - protein, 257 aa, Arabidopsis thaliana; identical to SEQ ID NO: 28508
  peptide (1)..(257): Ceres Seq. ID no. 12334390

SEQ ID NO: 32099 - protein, 177 aa, Arabidopsis thaliana; identical to SEQ ID NO: 28509
  peptide (1)..(177): Ceres Seq. ID no. 12334391

SEQ ID NO: 32100 - DNA, 857 bp, Arabidopsis thaliana; identical to SEQ ID NO: 28510
  misc_feature (1)..(857): Ceres Seq. ID no. 12323469
  misc_feature (1)..(857): Ortholog of  Ceres SEQ ID NO 13599311 as cited in SEQ ID NO 0

SEQ ID NO: 32101 - protein, 216 aa, Arabidopsis thaliana; identical to SEQ ID NO: 28511
  peptide (1)..(216): Ceres Seq. ID no. 12323470

SEQ ID NO: 32102 - protein, 202 aa, Arabidopsis thaliana; identical to SEQ ID NO: 28512
  peptide (1)..(202): Ceres Seq. ID no. 12323471

SEQ ID NO: 32103 - protein, 200 aa, Arabidopsis thaliana; identical to SEQ ID NO: 28513
  peptide (1)..(200): Ceres Seq. ID no. 12323472

SEQ ID NO: 32104 - DNA, 1261 bp, Arabidopsis thaliana; identical to SEQ ID NO: 28514
  misc_feature (1)..(1261): Ceres Seq. ID no. 13491264
  misc_feature (1)..(1261): Ortholog of  Ceres SEQ ID NO 13590307 as cited in SEQ ID NO 67154

SEQ ID NO: 32105 - protein, 332 aa, Arabidopsis thaliana; identical to SEQ ID NO: 28515
  peptide (1)..(332): Ceres Seq. ID no. 13491265

SEQ ID NO: 32106 - protein, 309 aa, Arabidopsis thaliana; identical to SEQ ID NO: 28516
  peptide (1)..(309): Ceres Seq. ID no. 13491266

SEQ ID NO: 32107 - protein, 303 aa, Arabidopsis thaliana; identical to SEQ ID NO: 28517
  peptide (1)..(303): Ceres Seq. ID no. 13491267

SEQ ID NO: 32108 - DNA, 871 bp, Arabidopsis thaliana; identical to SEQ ID NO: 28518
  misc_feature (1)..(871): Ceres Seq. ID no. 12348502
  misc_feature (1)..(871): Ortholog of  Ceres SEQ ID NO 15179026 as cited in SEQ ID NO 0

SEQ ID NO: 32109 - protein, 249 aa, Arabidopsis thaliana; identical to SEQ ID NO: 28519
  peptide (1)..(249): Ceres Seq. ID no. 12348503

SEQ ID NO: 32110 - protein, 219 aa, Arabidopsis thaliana; identical to SEQ ID NO: 28520
  peptide (1)..(219): Ceres Seq. ID no. 12348504

SEQ ID NO: 32111 - DNA, 673 bp, Arabidopsis thaliana; identical to SEQ ID NO: 28521
  misc_feature (1)..(673): Ceres Seq. ID no. 12331840
  misc_feature (1)..(673): Ortholog of  Ceres SEQ ID NO 15171100 as cited in SEQ ID NO 50966

SEQ ID NO: 32112 - protein, 145 aa, Arabidopsis thaliana; identical to SEQ ID NO: 28522
  peptide (1)..(145): Ceres Seq. ID no. 12331841

SEQ ID NO: 32113 - DNA, 950 bp, Arabidopsis thaliana; identical to SEQ ID NO: 28523
  misc_feature (1)..(950): Ceres Seq. ID no. 12579476
  misc_feature (1)..(950): Ortholog of  Ceres SEQ ID NO 13648511 as cited in SEQ ID NO 179

SEQ ID NO: 32114 - protein, 66 aa, Arabidopsis thaliana; identical to SEQ ID NO: 28524
  peptide (1)..(66): Ceres Seq. ID no. 12579477

SEQ ID NO: 32115 - protein, 57 aa, Arabidopsis thaliana; identical to SEQ ID NO: 28525
  peptide (1)..(57): Ceres Seq. ID no. 12579478

SEQ ID NO: 32116 - protein, 46 aa, Arabidopsis thaliana; identical to SEQ ID NO: 28526
  peptide (1)..(46): Ceres Seq. ID no. 12579479

SEQ ID NO: 32117 - DNA, 1076 bp, Arabidopsis thaliana; identical to SEQ ID NO: 28527
  misc_feature (1)..(1076): Ceres Seq. ID no. 12421106
  misc_feature (1)..(1076): Ortholog of  Ceres SEQ ID NO 14304791 as cited in SEQ ID NO 53562
  misc_feature (1)..(1076): Ortholog of  Ceres SEQ ID NO 13594298 as cited in SEQ ID NO 57803
  misc_feature (1)..(1076): Ortholog of  Ceres SEQ ID NO 14301894 as cited in SEQ ID NO 61677
  misc_feature (1)..(1076): Ortholog of  Ceres SEQ ID NO 13503476 as cited in SEQ ID NO 61978
  misc_feature (1)..(1076): Ortholog of  Ceres SEQ ID NO 12578438 as cited in SEQ ID NO 62201
  misc_feature (1)..(1076): Ortholog of  Ceres SEQ ID NO 12617675 as cited in SEQ ID NO 64656

SEQ ID NO: 32118 - protein, 291 aa, Arabidopsis thaliana; identical to SEQ ID NO: 28528
  peptide (1)..(291): Ceres Seq. ID no. 12421107

SEQ ID NO: 32119 - protein, 281 aa, Arabidopsis thaliana; identical to SEQ ID NO: 28529
  peptide (1)..(281): Ceres Seq. ID no. 12421108

SEQ ID NO: 32120 - protein, 274 aa, Arabidopsis thaliana; identical to SEQ ID NO: 28530
  peptide (1)..(274): Ceres Seq. ID no. 12421109

SEQ ID NO: 32121 - DNA, 743 bp, Arabidopsis thaliana; identical to SEQ ID NO: 28531
  misc_feature (1)..(743): Ceres Seq. ID no. 12338308
  misc_feature (1)..(743): Ortholog of  Ceres SEQ ID NO 15178928 as cited in SEQ ID NO 1118

SEQ ID NO: 32122 - protein, 137 aa, Arabidopsis thaliana; identical to SEQ ID NO: 28532
  peptide (1)..(137): Ceres Seq. ID no. 12338309

SEQ ID NO: 32123 - protein, 115 aa, Arabidopsis thaliana; identical to SEQ ID NO: 28533
  peptide (1)..(115): Ceres Seq. ID no. 12338310

SEQ ID NO: 32124 - DNA, 731 bp, Arabidopsis thaliana; identical to SEQ ID NO: 28534
  misc_feature (1)..(731): Ceres Seq. ID no. 12333813
  misc_feature (1)..(731): Ortholog of  Ceres SEQ ID NO 13647648 as cited in SEQ ID NO 20346

SEQ ID NO: 32125 - protein, 76 aa, Arabidopsis thaliana; identical to SEQ ID NO: 28535
  peptide (1)..(76): Ceres Seq. ID no. 12333814

SEQ ID NO: 32126 - protein, 63 aa, Arabidopsis thaliana; identical to SEQ ID NO: 28536
  peptide (1)..(63): Ceres Seq. ID no. 12333815

SEQ ID NO: 32127 - protein, 58 aa, Arabidopsis thaliana; identical to SEQ ID NO: 28537
  peptide (1)..(58): Ceres Seq. ID no. 12333816

SEQ ID NO: 32128 - DNA, 681 bp, Arabidopsis thaliana; identical to SEQ ID NO: 28538
  misc_feature (1)..(681): Ceres Seq. ID no. 12389159
  misc_feature (1)..(681): Ortholog of  Ceres SEQ ID NO 12610954 as cited in SEQ ID NO 55930
  misc_feature (1)..(681): Ortholog of  Ceres SEQ ID NO 12625335 as cited in SEQ ID NO 63326
  misc_feature (1)..(681): Ortholog of  Ceres SEQ ID NO 12566590 as cited in SEQ ID NO 0
  misc_feature (1)..(681): Ortholog of  Ceres SEQ ID NO 14305152 as cited in SEQ ID NO 0
  misc_feature (1)..(681): Ortholog of  Ceres SEQ ID NO 15179949 as cited in SEQ ID NO 0

SEQ ID NO: 32129 - protein, 182 aa, Arabidopsis thaliana; identical to SEQ ID NO: 28539
  peptide (1)..(182): Ceres Seq. ID no. 12389160

SEQ ID NO: 32130 - protein, 162 aa, Arabidopsis thaliana; identical to SEQ ID NO: 28540
  peptide (1)..(162): Ceres Seq. ID no. 12389161

SEQ ID NO: 32131 - protein, 110 aa, Arabidopsis thaliana; identical to SEQ ID NO: 28541
  peptide (1)..(110): Ceres Seq. ID no. 12389162

SEQ ID NO: 32132 - DNA, 1341 bp, Arabidopsis thaliana; identical to SEQ ID NO: 28542
  misc_feature (1)..(1341): Ceres Seq. ID no. 12370545
  misc_feature (1)..(1341): Ortholog of  Ceres SEQ ID NO 14307296 as cited in SEQ ID NO 53966
  misc_feature (1)..(1341): Ortholog of  Ceres SEQ ID NO 15175368 as cited in SEQ ID NO 60071
  misc_feature (1)..(1341): Ortholog of  Ceres SEQ ID NO 15225423 as cited in SEQ ID NO 64689
  misc_feature (1)..(1341): Ortholog of  Ceres SEQ ID NO 15179340 as cited in SEQ ID NO 0

SEQ ID NO: 32133 - protein, 309 aa, Arabidopsis thaliana; identical to SEQ ID NO: 28543
  peptide (1)..(309): Ceres Seq. ID no. 12370546

SEQ ID NO: 32134 - protein, 307 aa, Arabidopsis thaliana; identical to SEQ ID NO: 28544
  peptide (1)..(307): Ceres Seq. ID no. 12370547

SEQ ID NO: 32135 - protein, 302 aa, Arabidopsis thaliana; identical to SEQ ID NO: 28545
  peptide (1)..(302): Ceres Seq. ID no. 12370548

SEQ ID NO: 32136 - DNA, 1094 bp, Arabidopsis thaliana; identical to SEQ ID NO: 28546
  misc_feature (1)..(1094): Ceres Seq. ID no. 12333831
  misc_feature (1)..(1094): Ortholog of  Ceres SEQ ID NO 13597757 as cited in SEQ ID NO 65472

SEQ ID NO: 32137 - protein, 254 aa, Arabidopsis thaliana; identical to SEQ ID NO: 28547
  peptide (1)..(254): Ceres Seq. ID no. 12333832

SEQ ID NO: 32138 - protein, 252 aa, Arabidopsis thaliana; identical to SEQ ID NO: 28548
  peptide (1)..(252): Ceres Seq. ID no. 12333833

SEQ ID NO: 32139 - protein, 246 aa, Arabidopsis thaliana; identical to SEQ ID NO: 28549
  peptide (1)..(246): Ceres Seq. ID no. 12333834

SEQ ID NO: 32140 - DNA, 1415 bp, Arabidopsis thaliana; identical to SEQ ID NO: 28550
  misc_feature (1)..(1415): Ceres Seq. ID no. 12396906
  misc_feature (1)..(1415): Ortholog of  Ceres SEQ ID NO 14313159 as cited in SEQ ID NO 54676
  misc_feature (1)..(1415): Ortholog of  Ceres SEQ ID NO 13598547 as cited in SEQ ID NO 65200
  misc_feature (1)..(1415): Ortholog of  Ceres SEQ ID NO 12617920 as cited in SEQ ID NO 65480

SEQ ID NO: 32141 - protein, 394 aa, Arabidopsis thaliana; identical to SEQ ID NO: 28551
  peptide (1)..(394): Ceres Seq. ID no. 12396907

SEQ ID NO: 32142 - protein, 369 aa, Arabidopsis thaliana; identical to SEQ ID NO: 28552
  peptide (1)..(369): Ceres Seq. ID no. 12396908

SEQ ID NO: 32143 - protein, 362 aa, Arabidopsis thaliana; identical to SEQ ID NO: 28553
  peptide (1)..(362): Ceres Seq. ID no. 12396909

SEQ ID NO: 32144 - DNA, 800 bp, Arabidopsis thaliana; identical to SEQ ID NO: 28554
  misc_feature (1)..(800): Ceres Seq. ID no. 12331823
  misc_feature (1)..(800): Ortholog of  Ceres SEQ ID NO 12473409 as cited in SEQ ID NO 104
  misc_feature (1)..(800): Ortholog of  Ceres SEQ ID NO 15170477 as cited in SEQ ID NO 52825
  misc_feature (1)..(800): Ortholog of  Ceres SEQ ID NO 13595055 as cited in SEQ ID NO 55744
  misc_feature (1)..(800): Ortholog of  Ceres SEQ ID NO 13662009 as cited in SEQ ID NO 61951

SEQ ID NO: 32145 - protein, 186 aa, Arabidopsis thaliana; identical to SEQ ID NO: 28555
  peptide (1)..(186): Ceres Seq. ID no. 12331824

SEQ ID NO: 32146 - protein, 152 aa, Arabidopsis thaliana; identical to SEQ ID NO: 28556
  peptide (1)..(152): Ceres Seq. ID no. 12331825

SEQ ID NO: 32147 - protein, 98 aa, Arabidopsis thaliana; identical to SEQ ID NO: 28557
  peptide (1)..(98): Ceres Seq. ID no. 12331826

SEQ ID NO: 32148 - DNA, 960 bp, Arabidopsis thaliana; identical to SEQ ID NO: 28558
  misc_feature (1)..(960): Ceres Seq. ID no. 13488570
  misc_feature (1)..(960): Ortholog of  Ceres SEQ ID NO 14305858 as cited in SEQ ID NO 52329

SEQ ID NO: 32149 - protein, 285 aa, Arabidopsis thaliana; identical to SEQ ID NO: 28559
  peptide (1)..(285): Ceres Seq. ID no. 13488571

SEQ ID NO: 32150 - protein, 266 aa, Arabidopsis thaliana; identical to SEQ ID NO: 28560
  peptide (1)..(266): Ceres Seq. ID no. 13488572

SEQ ID NO: 32151 - protein, 180 aa, Arabidopsis thaliana; identical to SEQ ID NO: 28561
  peptide (1)..(180): Ceres Seq. ID no. 13488573

SEQ ID NO: 32152 - DNA, 966 bp, Arabidopsis thaliana; identical to SEQ ID NO: 28562
  misc_feature (1)..(966): Ceres Seq. ID no. 12322155
  misc_feature (1)..(966): Ortholog of  Ceres SEQ ID NO 12615268 as cited in SEQ ID NO 62391

SEQ ID NO: 32153 - protein, 141 aa, Arabidopsis thaliana; identical to SEQ ID NO: 28563
  peptide (1)..(141): Ceres Seq. ID no. 12322156

SEQ ID NO: 32154 - protein, 110 aa, Arabidopsis thaliana; identical to SEQ ID NO: 28564
  peptide (1)..(110): Ceres Seq. ID no. 12322157

SEQ ID NO: 32155 - protein, 92 aa, Arabidopsis thaliana; identical to SEQ ID NO: 28565
  peptide (1)..(92): Ceres Seq. ID no. 12322158

SEQ ID NO: 32156 - DNA, 822 bp, Arabidopsis thaliana; identical to SEQ ID NO: 28566
  misc_feature (1)..(822): Ceres Seq. ID no. 12396880
  misc_feature (1)..(822): Ortholog of  Ceres SEQ ID NO 12611019 as cited in SEQ ID NO 56243

SEQ ID NO: 32157 - protein, 202 aa, Arabidopsis thaliana; identical to SEQ ID NO: 28567
  peptide (1)..(202): Ceres Seq. ID no. 12396881

SEQ ID NO: 32158 - protein, 198 aa, Arabidopsis thaliana; identical to SEQ ID NO: 28568
  peptide (1)..(198): Ceres Seq. ID no. 12396882

SEQ ID NO: 32159 - DNA, 847 bp, Arabidopsis thaliana; identical to SEQ ID NO: 28569
  misc_feature (1)..(847): Ceres Seq. ID no. 13496902
  misc_feature (1)..(847): Ortholog of  Ceres SEQ ID NO 14316367 as cited in SEQ ID NO 57626
  misc_feature (1)..(847): Ortholog of  Ceres SEQ ID NO 14315039 as cited in SEQ ID NO 57668
  misc_feature (1)..(847): Ortholog of  Ceres SEQ ID NO 13664189 as cited in SEQ ID NO 66834
  misc_feature (1)..(847): Ortholog of  Ceres SEQ ID NO 13654321 as cited in SEQ ID NO 67850

SEQ ID NO: 32160 - protein, 183 aa, Arabidopsis thaliana; identical to SEQ ID NO: 28570
  peptide (1)..(183): Ceres Seq. ID no. 13496903

SEQ ID NO: 32161 - protein, 153 aa, Arabidopsis thaliana; identical to SEQ ID NO: 28571
  peptide (1)..(153): Ceres Seq. ID no. 13496904

SEQ ID NO: 32162 - DNA, 1072 bp, Arabidopsis thaliana; identical to SEQ ID NO: 28572
  misc_feature (1)..(1072): Ceres Seq. ID no. 13622027
  misc_feature (1)..(1072): Ortholog of  Ceres SEQ ID NO 15173907 as cited in SEQ ID NO 62356
  misc_feature (1)..(1072): Ortholog of  Ceres SEQ ID NO 13596519 as cited in SEQ ID NO 62572
  misc_feature (1)..(1072): Ortholog of  Ceres SEQ ID NO 12625108 as cited in SEQ ID NO 68102

SEQ ID NO: 32163 - protein, 210 aa, Arabidopsis thaliana; identical to SEQ ID NO: 28573
  peptide (1)..(210): Ceres Seq. ID no. 13622028

SEQ ID NO: 32164 - protein, 193 aa, Arabidopsis thaliana; identical to SEQ ID NO: 28574
  peptide (1)..(193): Ceres Seq. ID no. 13622029

SEQ ID NO: 32165 - protein, 124 aa, Arabidopsis thaliana; identical to SEQ ID NO: 28575
  peptide (1)..(124): Ceres Seq. ID no. 13622030

SEQ ID NO: 32166 - DNA, 1748 bp, Arabidopsis thaliana; identical to SEQ ID NO: 28576
  misc_feature (1)..(1748): Ceres Seq. ID no. 13580541
  misc_feature (1)..(1748): Ortholog of  Ceres SEQ ID NO 13582285 as cited in SEQ ID NO 59817

SEQ ID NO: 32167 - protein, 553 aa, Arabidopsis thaliana; identical to SEQ ID NO: 28577
  peptide (1)..(553): Ceres Seq. ID no. 13580542

SEQ ID NO: 32168 - protein, 537 aa, Arabidopsis thaliana; identical to SEQ ID NO: 28578
  peptide (1)..(537): Ceres Seq. ID no. 13580543

SEQ ID NO: 32169 - protein, 346 aa, Arabidopsis thaliana; identical to SEQ ID NO: 28579
  peptide (1)..(346): Ceres Seq. ID no. 13580544

SEQ ID NO: 32170 - DNA, 895 bp, Arabidopsis thaliana; identical to SEQ ID NO: 28580
  misc_feature (1)..(895): Ceres Seq. ID no. 12482479
  misc_feature (1)..(895): Ortholog of  Ceres SEQ ID NO 12619999 as cited in SEQ ID NO 66123
  misc_feature (1)..(895): Ortholog of  Ceres SEQ ID NO 13656436 as cited in SEQ ID NO 69154

SEQ ID NO: 32171 - protein, 217 aa, Arabidopsis thaliana; identical to SEQ ID NO: 28581
  peptide (1)..(217): Ceres Seq. ID no. 12482480

SEQ ID NO: 32172 - DNA, 597 bp, Arabidopsis thaliana; identical to SEQ ID NO: 28582
  misc_feature (1)..(597): Ceres Seq. ID no. 12579462
  misc_feature (1)..(597): Ortholog of  Ceres SEQ ID NO 15179080 as cited in SEQ ID NO 0

SEQ ID NO: 32173 - protein, 99 aa, Arabidopsis thaliana; identical to SEQ ID NO: 24405
  peptide (1)..(99): Ceres Seq. ID no. 12579463

SEQ ID NO: 32174 - protein, 71 aa, Arabidopsis thaliana; identical to SEQ ID NO: 24406
  peptide (1)..(71): Ceres Seq. ID no. 12579464

SEQ ID NO: 32175 - protein, 56 aa, Arabidopsis thaliana; identical to SEQ ID NO: 24407
  peptide (1)..(56): Ceres Seq. ID no. 12579465

SEQ ID NO: 32176 - DNA, 826 bp, Arabidopsis thaliana; identical to SEQ ID NO: 28586
  misc_feature (1)..(826): Ceres Seq. ID no. 12393708
  misc_feature (1)..(826): Ortholog of  Ceres SEQ ID NO 15169763 as cited in SEQ ID NO 1284
  misc_feature (1)..(826): Ortholog of  Ceres SEQ ID NO 12610243 as cited in SEQ ID NO 56206
  misc_feature (1)..(826): Ortholog of  Ceres SEQ ID NO 13661089 as cited in SEQ ID NO 61053
  misc_feature (1)..(826): Ortholog of  Ceres SEQ ID NO 12586495 as cited in SEQ ID NO 64946

SEQ ID NO: 32177 - protein, 197 aa, Arabidopsis thaliana; identical to SEQ ID NO: 28587
  peptide (1)..(197): Ceres Seq. ID no. 12393709

SEQ ID NO: 32178 - protein, 179 aa, Arabidopsis thaliana; identical to SEQ ID NO: 28588
  peptide (1)..(179): Ceres Seq. ID no. 12393710

SEQ ID NO: 32179 - protein, 166 aa, Arabidopsis thaliana; identical to SEQ ID NO: 28589
  peptide (1)..(166): Ceres Seq. ID no. 12393711

SEQ ID NO: 32180 - DNA, 1044 bp, Arabidopsis thaliana; identical to SEQ ID NO: 28590
  misc_feature (1)..(1044): Ceres Seq. ID no. 13491459
  misc_feature (1)..(1044): Ortholog of  Ceres SEQ ID NO 13638897 as cited in SEQ ID NO 55839
  misc_feature (1)..(1044): Ortholog of  Ceres SEQ ID NO 15177758 as cited in SEQ ID NO 57504
  misc_feature (1)..(1044): Ortholog of  Ceres SEQ ID NO 13596958 as cited in SEQ ID NO 63319
  misc_feature (1)..(1044): Ortholog of  Ceres SEQ ID NO 12614814 as cited in SEQ ID NO 68816
  misc_feature (1)..(1044): Ortholog of  Ceres SEQ ID NO 13624040 as cited in SEQ ID NO 0

SEQ ID NO: 32181 - protein, 186 aa, Arabidopsis thaliana; identical to SEQ ID NO: 28591
  peptide (1)..(186): Ceres Seq. ID no. 13491460

SEQ ID NO: 32182 - DNA, 1398 bp, Arabidopsis thaliana; identical to SEQ ID NO: 28592
  misc_feature (1)..(1398): Ceres Seq. ID no. 13576792
  misc_feature (1)..(1398): Ortholog of  Ceres SEQ ID NO 13623732 as cited in SEQ ID NO 0

SEQ ID NO: 32183 - protein, 345 aa, Arabidopsis thaliana; identical to SEQ ID NO: 28593
  peptide (1)..(345): Ceres Seq. ID no. 13576793

SEQ ID NO: 32184 - protein, 336 aa, Arabidopsis thaliana; identical to SEQ ID NO: 28594
  peptide (1)..(336): Ceres Seq. ID no. 13576794

SEQ ID NO: 32185 - protein, 319 aa, Arabidopsis thaliana; identical to SEQ ID NO: 28595
  peptide (1)..(319): Ceres Seq. ID no. 13576795

SEQ ID NO: 32186 - DNA, 2940 bp, Arabidopsis thaliana; identical to SEQ ID NO: 28596
  misc_feature (1)..(2940): Ceres Seq. ID no. 13490223
  misc_feature (1)..(2940): Ortholog of  Ceres SEQ ID NO 12609146 as cited in SEQ ID NO 52118
  misc_feature (1)..(2940): Ortholog of  Ceres SEQ ID NO 13638136 as cited in SEQ ID NO 58644
  misc_feature (1)..(2940): Ortholog of  Ceres SEQ ID NO 15177947 as cited in SEQ ID NO 60308
  misc_feature (1)..(2940): Ortholog of  Ceres SEQ ID NO 12585640 as cited in SEQ ID NO 63164
  misc_feature (1)..(2940): Ortholog of  Ceres SEQ ID NO 15225826 as cited in SEQ ID NO 64774
  misc_feature (1)..(2940): Ortholog of  Ceres SEQ ID NO 13599119 as cited in SEQ ID NO 0

SEQ ID NO: 32187 - protein, 392 aa, Arabidopsis thaliana; identical to SEQ ID NO: 28597
  peptide (1)..(392): Ceres Seq. ID no. 13490224

SEQ ID NO: 32188 - protein, 328 aa, Arabidopsis thaliana; identical to SEQ ID NO: 28598
  peptide (1)..(328): Ceres Seq. ID no. 13490225

SEQ ID NO: 32189 - protein, 291 aa, Arabidopsis thaliana; identical to SEQ ID NO: 28599
  peptide (1)..(291): Ceres Seq. ID no. 13490226

SEQ ID NO: 32190 - DNA, 703 bp, Arabidopsis thaliana; identical to SEQ ID NO: 28600
  misc_feature (1)..(703): Ceres Seq. ID no. 12330136
  misc_feature (1)..(703): Ortholog of  Ceres SEQ ID NO 13661143 as cited in SEQ ID NO 61139
  misc_feature (1)..(703): Ortholog of  Ceres SEQ ID NO 13597234 as cited in SEQ ID NO 64118

SEQ ID NO: 32191 - protein, 204 aa, Arabidopsis thaliana; identical to SEQ ID NO: 28601
  peptide (1)..(204): Ceres Seq. ID no. 12330137

SEQ ID NO: 32192 - protein, 186 aa, Arabidopsis thaliana; identical to SEQ ID NO: 28602
  peptide (1)..(186): Ceres Seq. ID no. 12330138

SEQ ID NO: 32193 - DNA, 983 bp, Arabidopsis thaliana; identical to SEQ ID NO: 28603
  misc_feature (1)..(983): Ceres Seq. ID no. 12335989
  misc_feature (1)..(983): Ortholog of  Ceres SEQ ID NO 12627129 as cited in SEQ ID NO 68657
  misc_feature (1)..(983): Ortholog of  Ceres SEQ ID NO 15179538 as cited in SEQ ID NO 0

SEQ ID NO: 32194 - protein, 209 aa, Arabidopsis thaliana; identical to SEQ ID NO: 28604
  peptide (1)..(209): Ceres Seq. ID no. 12335990

SEQ ID NO: 32195 - protein, 154 aa, Arabidopsis thaliana; identical to SEQ ID NO: 28605
  peptide (1)..(154): Ceres Seq. ID no. 12335991

SEQ ID NO: 32196 - DNA, 1601 bp, Arabidopsis thaliana; identical to SEQ ID NO: 28606
  misc_feature (1)..(1601): Ceres Seq. ID no. 13491911
  misc_feature (1)..(1601): Ortholog of  Ceres SEQ ID NO 15225627 as cited in SEQ ID NO 64323

SEQ ID NO: 32197 - protein, 386 aa, Arabidopsis thaliana; identical to SEQ ID NO: 28607
  peptide (1)..(386): Ceres Seq. ID no. 13491912

SEQ ID NO: 32198 - protein, 369 aa, Arabidopsis thaliana; identical to SEQ ID NO: 28608
  peptide (1)..(369): Ceres Seq. ID no. 13491913

SEQ ID NO: 32199 - protein, 311 aa, Arabidopsis thaliana; identical to SEQ ID NO: 28609
  peptide (1)..(311): Ceres Seq. ID no. 13491914

SEQ ID NO: 32200 - DNA, 1691 bp, Arabidopsis thaliana; identical to SEQ ID NO: 28610
  misc_feature (1)..(1691): Ceres Seq. ID no. 12325280
  misc_feature (1)..(1691): Ortholog of  Ceres SEQ ID NO 14314480 as cited in SEQ ID NO 52362
  misc_feature (1)..(1691): Ortholog of  Ceres SEQ ID NO 13593854 as cited in SEQ ID NO 53403
  misc_feature (1)..(1691): Ortholog of  Ceres SEQ ID NO 12581680 as cited in SEQ ID NO 55019
  misc_feature (1)..(1691): Ortholog of  Ceres SEQ ID NO 15172112 as cited in SEQ ID NO 59632

SEQ ID NO: 32201 - protein, 385 aa, Arabidopsis thaliana; identical to SEQ ID NO: 28611
  peptide (1)..(385): Ceres Seq. ID no. 12325281

SEQ ID NO: 32202 - protein, 336 aa, Arabidopsis thaliana; identical to SEQ ID NO: 28612
  peptide (1)..(336): Ceres Seq. ID no. 12325282

SEQ ID NO: 32203 - protein, 270 aa, Arabidopsis thaliana; identical to SEQ ID NO: 28613
  peptide (1)..(270): Ceres Seq. ID no. 12325283

SEQ ID NO: 32204 - DNA, 1416 bp, Arabidopsis thaliana; identical to SEQ ID NO: 28614
  misc_feature (1)..(1416): Ceres Seq. ID no. 13487514
  misc_feature (1)..(1416): Ortholog of  Ceres SEQ ID NO 12617323 as cited in SEQ ID NO 64129

SEQ ID NO: 32205 - protein, 373 aa, Arabidopsis thaliana; identical to SEQ ID NO: 28615
  peptide (1)..(373): Ceres Seq. ID no. 13487515

SEQ ID NO: 32206 - protein, 289 aa, Arabidopsis thaliana; identical to SEQ ID NO: 28616
  peptide (1)..(289): Ceres Seq. ID no. 13487516

SEQ ID NO: 32207 - protein, 209 aa, Arabidopsis thaliana; identical to SEQ ID NO: 28617
  peptide (1)..(209): Ceres Seq. ID no. 13487517

SEQ ID NO: 32208 - DNA, 1257 bp, Arabidopsis thaliana; identical to SEQ ID NO: 28618
  misc_feature (1)..(1257): Ceres Seq. ID no. 12334073
  misc_feature (1)..(1257): Ortholog of  Ceres SEQ ID NO 15177787 as cited in SEQ ID NO 59431
  misc_feature (1)..(1257): Ortholog of  Ceres SEQ ID NO 12617197 as cited in SEQ ID NO 63406
  misc_feature (1)..(1257): Ortholog of  Ceres SEQ ID NO 13597804 as cited in SEQ ID NO 64182
  misc_feature (1)..(1257): Ortholog of  Ceres SEQ ID NO 13598565 as cited in SEQ ID NO 65250
  misc_feature (1)..(1257): Ortholog of  Ceres SEQ ID NO 13598597 as cited in SEQ ID NO 65496
  misc_feature (1)..(1257): Ortholog of  Ceres SEQ ID NO 13596284 as cited in SEQ ID NO 68273
  misc_feature (1)..(1257): Ortholog of  Ceres SEQ ID NO 14308995 as cited in SEQ ID NO 0

SEQ ID NO: 32209 - protein, 321 aa, Arabidopsis thaliana; identical to SEQ ID NO: 28619
  peptide (1)..(321): Ceres Seq. ID no. 12334074

SEQ ID NO: 32210 - protein, 188 aa, Arabidopsis thaliana; identical to SEQ ID NO: 28620
  peptide (1)..(188): Ceres Seq. ID no. 12334075

SEQ ID NO: 32211 - protein, 185 aa, Arabidopsis thaliana; identical to SEQ ID NO: 28621
  peptide (1)..(185): Ceres Seq. ID no. 12334076

SEQ ID NO: 32212 - DNA, 1254 bp, Arabidopsis thaliana; identical to SEQ ID NO: 28622
  misc_feature (1)..(1254): Ceres Seq. ID no. 12338154
  misc_feature (1)..(1254): Ortholog of  Ceres SEQ ID NO 12779935 as cited in SEQ ID NO 66774
  misc_feature (1)..(1254): Ortholog of  Ceres SEQ ID NO 13598695 as cited in SEQ ID NO 67368
  misc_feature (1)..(1254): Ortholog of  Ceres SEQ ID NO 13591174 as cited in SEQ ID NO 68289

SEQ ID NO: 32213 - protein, 320 aa, Arabidopsis thaliana; identical to SEQ ID NO: 28623
  peptide (1)..(320): Ceres Seq. ID no. 12338155

SEQ ID NO: 32214 - protein, 317 aa, Arabidopsis thaliana; identical to SEQ ID NO: 28624
  peptide (1)..(317): Ceres Seq. ID no. 12338156

SEQ ID NO: 32215 - protein, 307 aa, Arabidopsis thaliana; identical to SEQ ID NO: 28625
  peptide (1)..(307): Ceres Seq. ID no. 12338157

SEQ ID NO: 32216 - DNA, 1332 bp, Arabidopsis thaliana; identical to SEQ ID NO: 28626
  misc_feature (1)..(1332): Ceres Seq. ID no. 12334081
  misc_feature (1)..(1332): Ortholog of  Ceres SEQ ID NO 14314331 as cited in SEQ ID NO 57390

SEQ ID NO: 32217 - protein, 331 aa, Arabidopsis thaliana; identical to SEQ ID NO: 28627
  peptide (1)..(331): Ceres Seq. ID no. 12334082

SEQ ID NO: 32218 - protein, 309 aa, Arabidopsis thaliana; identical to SEQ ID NO: 28628
  peptide (1)..(309): Ceres Seq. ID no. 12334083

SEQ ID NO: 32219 - protein, 284 aa, Arabidopsis thaliana; identical to SEQ ID NO: 28629
  peptide (1)..(284): Ceres Seq. ID no. 12334084

SEQ ID NO: 32220 - DNA, 1740 bp, Arabidopsis thaliana; identical to SEQ ID NO: 28630
  misc_feature (1)..(1740): Ceres Seq. ID no. 13487482
  misc_feature (1)..(1740): Ortholog of  Ceres SEQ ID NO 15176532 as cited in SEQ ID NO 58184
  misc_feature (1)..(1740): Ortholog of  Ceres SEQ ID NO 13597546 as cited in SEQ ID NO 65017
  misc_feature (1)..(1740): Ortholog of  Ceres SEQ ID NO 14308015 as cited in SEQ ID NO 65798
  misc_feature (1)..(1740): Ortholog of  Ceres SEQ ID NO 15176077 as cited in SEQ ID NO 66728
  misc_feature (1)..(1740): Ortholog of  Ceres SEQ ID NO 14307908 as cited in SEQ ID NO 67189
  misc_feature (1)..(1740): Ortholog of  Ceres SEQ ID NO 13654353 as cited in SEQ ID NO 68318

SEQ ID NO: 32221 - protein, 465 aa, Arabidopsis thaliana; identical to SEQ ID NO: 28631
  peptide (1)..(465): Ceres Seq. ID no. 13487483

SEQ ID NO: 32222 - protein, 462 aa, Arabidopsis thaliana; identical to SEQ ID NO: 28632
  peptide (1)..(462): Ceres Seq. ID no. 13487484

SEQ ID NO: 32223 - protein, 461 aa, Arabidopsis thaliana; identical to SEQ ID NO: 28633
  peptide (1)..(461): Ceres Seq. ID no. 13487485

SEQ ID NO: 32224 - DNA, 1450 bp, Arabidopsis thaliana; identical to SEQ ID NO: 24649
  misc_feature (1)..(1450): Ceres Seq. ID no. 12682693
  misc_feature (1)..(1450): Ortholog of  Ceres SEQ ID NO 13654728 as cited in SEQ ID NO 62302
  misc_feature (1)..(1450): Ortholog of  Ceres SEQ ID NO 13597134 as cited in SEQ ID NO 64501
  misc_feature (1)..(1450): Ortholog of  Ceres SEQ ID NO 15174333 as cited in SEQ ID NO 0
  misc_feature (1)..(1450): Ortholog of  Ceres SEQ ID NO 15179047 as cited in SEQ ID NO 0

SEQ ID NO: 32225 - protein, 278 aa, Arabidopsis thaliana; identical to SEQ ID NO: 23413
  peptide (1)..(278): Ceres Seq. ID no. 12682694

SEQ ID NO: 32226 - protein, 260 aa, Arabidopsis thaliana; identical to SEQ ID NO: 23414
  peptide (1)..(260): Ceres Seq. ID no. 12682695

SEQ ID NO: 32227 - protein, 219 aa, Arabidopsis thaliana; identical to SEQ ID NO: 23415
  peptide (1)..(219): Ceres Seq. ID no. 12682696

SEQ ID NO: 32228 - DNA, 1063 bp, Arabidopsis thaliana; identical to SEQ ID NO: 28638
  misc_feature (1)..(1063): Ceres Seq. ID no. 13486755
  misc_feature (1)..(1063): Ortholog of  Ceres SEQ ID NO 15180793 as cited in SEQ ID NO 0

SEQ ID NO: 32229 - protein, 300 aa, Arabidopsis thaliana; identical to SEQ ID NO: 28639
  peptide (1)..(300): Ceres Seq. ID no. 13486756

SEQ ID NO: 32230 - protein, 289 aa, Arabidopsis thaliana; identical to SEQ ID NO: 28640
  peptide (1)..(289): Ceres Seq. ID no. 13486757

SEQ ID NO: 32231 - protein, 286 aa, Arabidopsis thaliana; identical to SEQ ID NO: 28641
  peptide (1)..(286): Ceres Seq. ID no. 13486758

SEQ ID NO: 32232 - DNA, 1521 bp, Arabidopsis thaliana; identical to SEQ ID NO: 28642
  misc_feature (1)..(1521): Ceres Seq. ID no. 13580594
  misc_feature (1)..(1521): Ortholog of  Ceres SEQ ID NO 12625388 as cited in SEQ ID NO 63299
  misc_feature (1)..(1521): Ortholog of  Ceres SEQ ID NO 15179860 as cited in SEQ ID NO 66716

SEQ ID NO: 32233 - protein, 405 aa, Arabidopsis thaliana; identical to SEQ ID NO: 28643
  peptide (1)..(405): Ceres Seq. ID no. 15222734

SEQ ID NO: 32234 - DNA, 1803 bp, Arabidopsis thaliana; identical to SEQ ID NO: 28644
  misc_feature (1)..(1803): Ceres Seq. ID no. 13494313
  misc_feature (1)..(1803): Ortholog of  Ceres SEQ ID NO 13600098 as cited in SEQ ID NO 0

SEQ ID NO: 32235 - protein, 481 aa, Arabidopsis thaliana; identical to SEQ ID NO: 28645
  peptide (1)..(481): Ceres Seq. ID no. 13494314

SEQ ID NO: 32236 - protein, 403 aa, Arabidopsis thaliana; identical to SEQ ID NO: 28646
  peptide (1)..(403): Ceres Seq. ID no. 13494315

SEQ ID NO: 32237 - protein, 338 aa, Arabidopsis thaliana; identical to SEQ ID NO: 28647
  peptide (1)..(338): Ceres Seq. ID no. 13494316

SEQ ID NO: 32238 - DNA, 920 bp, Arabidopsis thaliana; identical to SEQ ID NO: 28648
  misc_feature (1)..(920): Ceres Seq. ID no. 13580545
  misc_feature (1)..(920): Ortholog of  Ceres SEQ ID NO 15174240 as cited in SEQ ID NO 61866

SEQ ID NO: 32239 - protein, 179 aa, Arabidopsis thaliana; identical to SEQ ID NO: 28649
  peptide (1)..(179): Ceres Seq. ID no. 15222729
  misc_feature (86)..(86): Xaa is any aa, unknown or other
  misc_feature (89)..(89): Xaa is any aa, unknown or other
  misc_feature (90)..(90): Xaa is any aa, unknown or other
  misc_feature (105)..(105): Xaa is any aa, unknown or other
  misc_feature (106)..(106): Xaa is any aa, unknown or other
  misc_feature (113)..(113): Xaa is any aa, unknown or other
  misc_feature (117)..(117): Xaa is any aa, unknown or other
  misc_feature (123)..(123): Xaa is any aa, unknown or other
  misc_feature (125)..(125): Xaa is any aa, unknown or other
  misc_feature (129)..(129): Xaa is any aa, unknown or other
  misc_feature (131)..(131): Xaa is any aa, unknown or other
  misc_feature (134)..(134): Xaa is any aa, unknown or other
  misc_feature (135)..(135): Xaa is any aa, unknown or other
  misc_feature (140)..(140): Xaa is any aa, unknown or other
  misc_feature (144)..(144): Xaa is any aa, unknown or other
  misc_feature (146)..(146): Xaa is any aa, unknown or other
  misc_feature (148)..(148): Xaa is any aa, unknown or other
  misc_feature (150)..(150): Xaa is any aa, unknown or other
  misc_feature (152)..(152): Xaa is any aa, unknown or other
  misc_feature (160)..(160): Xaa is any aa, unknown or other
  misc_feature (164)..(164): Xaa is any aa, unknown or other
  misc_feature (171)..(171): Xaa is any aa, unknown or other

SEQ ID NO: 32240 - protein, 157 aa, Arabidopsis thaliana; identical to SEQ ID NO: 28650
  peptide (1)..(157): Ceres Seq. ID no. 15222730
  misc_feature (64)..(64): Xaa is any aa, unknown or other
  misc_feature (67)..(67): Xaa is any aa, unknown or other
  misc_feature (68)..(68): Xaa is any aa, unknown or other
  misc_feature (83)..(83): Xaa is any aa, unknown or other
  misc_feature (84)..(84): Xaa is any aa, unknown or other
  misc_feature (91)..(91): Xaa is any aa, unknown or other
  misc_feature (95)..(95): Xaa is any aa, unknown or other
  misc_feature (101)..(101): Xaa is any aa, unknown or other
  misc_feature (103)..(103): Xaa is any aa, unknown or other
  misc_feature (107)..(107): Xaa is any aa, unknown or other
  misc_feature (109)..(109): Xaa is any aa, unknown or other
  misc_feature (112)..(112): Xaa is any aa, unknown or other
  misc_feature (113)..(113): Xaa is any aa, unknown or other
  misc_feature (118)..(118): Xaa is any aa, unknown or other
  misc_feature (122)..(122): Xaa is any aa, unknown or other
  misc_feature (124)..(124): Xaa is any aa, unknown or other
  misc_feature (126)..(126): Xaa is any aa, unknown or other
  misc_feature (128)..(128): Xaa is any aa, unknown or other
  misc_feature (130)..(130): Xaa is any aa, unknown or other
  misc_feature (138)..(138): Xaa is any aa, unknown or other
  misc_feature (142)..(142): Xaa is any aa, unknown or other
  misc_feature (149)..(149): Xaa is any aa, unknown or other

SEQ ID NO: 32241 - DNA, 1287 bp, Arabidopsis thaliana; identical to SEQ ID NO: 28651
  misc_feature (1)..(1287): Ceres Seq. ID no. 13497685
  misc_feature (1)..(1287): Ortholog of  Ceres SEQ ID NO 12582736 as cited in SEQ ID NO 51489
  misc_feature (1)..(1287): Ortholog of  Ceres SEQ ID NO 13658622 as cited in SEQ ID NO 60780

SEQ ID NO: 32242 - protein, 320 aa, Arabidopsis thaliana; identical to SEQ ID NO: 28652
  peptide (1)..(320): Ceres Seq. ID no. 13497686

SEQ ID NO: 32243 - protein, 247 aa, Arabidopsis thaliana; identical to SEQ ID NO: 28653
  peptide (1)..(247): Ceres Seq. ID no. 13497687

SEQ ID NO: 32244 - DNA, 2388 bp, Arabidopsis thaliana; identical to SEQ ID NO: 28654
  misc_feature (1)..(2388): Ceres Seq. ID no. 12326046
  misc_feature (1)..(2388): Ortholog of  Ceres SEQ ID NO 14313674 as cited in SEQ ID NO 59602

SEQ ID NO: 32245 - protein, 733 aa, Arabidopsis thaliana; identical to SEQ ID NO: 28655
  peptide (1)..(733): Ceres Seq. ID no. 12326047

SEQ ID NO: 32246 - protein, 707 aa, Arabidopsis thaliana; identical to SEQ ID NO: 28656
  peptide (1)..(707): Ceres Seq. ID no. 12326048

SEQ ID NO: 32247 - protein, 564 aa, Arabidopsis thaliana; identical to SEQ ID NO: 28657
  peptide (1)..(564): Ceres Seq. ID no. 12326049

SEQ ID NO: 32248 - DNA, 1401 bp, Arabidopsis thaliana; identical to SEQ ID NO: 28658
  misc_feature (1)..(1401): Ceres Seq. ID no. 13500186
  misc_feature (1)..(1401): Ortholog of  Ceres SEQ ID NO 14312844 as cited in SEQ ID NO 55601
  misc_feature (1)..(1401): Ortholog of  Ceres SEQ ID NO 14312866 as cited in SEQ ID NO 55630
  misc_feature (1)..(1401): Ortholog of  Ceres SEQ ID NO 13597376 as cited in SEQ ID NO 64002
  misc_feature (1)..(1401): Ortholog of  Ceres SEQ ID NO 13503573 as cited in SEQ ID NO 65402
  misc_feature (1)..(1401): Ortholog of  Ceres SEQ ID NO 13659615 as cited in SEQ ID NO 67248

SEQ ID NO: 32249 - protein, 350 aa, Arabidopsis thaliana; identical to SEQ ID NO: 28659
  peptide (1)..(350): Ceres Seq. ID no. 13500187

SEQ ID NO: 32250 - protein, 235 aa, Arabidopsis thaliana; identical to SEQ ID NO: 28660
  peptide (1)..(235): Ceres Seq. ID no. 13500188

SEQ ID NO: 32251 - DNA, 925 bp, Arabidopsis thaliana; identical to SEQ ID NO: 28661
  misc_feature (1)..(925): Ceres Seq. ID no. 12397142
  misc_feature (1)..(925): Ortholog of  Ceres SEQ ID NO 14314461 as cited in SEQ ID NO 52355
  misc_feature (1)..(925): Ortholog of  Ceres SEQ ID NO 14306812 as cited in SEQ ID NO 56361
  misc_feature (1)..(925): Ortholog of  Ceres SEQ ID NO 15168461 as cited in SEQ ID NO 57068

SEQ ID NO: 32252 - protein, 239 aa, Arabidopsis thaliana; identical to SEQ ID NO: 28662
  peptide (1)..(239): Ceres Seq. ID no. 12397143

SEQ ID NO: 32253 - DNA, 1392 bp, Arabidopsis thaliana; identical to SEQ ID NO: 28663
  misc_feature (1)..(1392): Ceres Seq. ID no. 13487454
  misc_feature (1)..(1392): Ortholog of  Ceres SEQ ID NO 14306059 as cited in SEQ ID NO 52249
  misc_feature (1)..(1392): Ortholog of  Ceres SEQ ID NO 15170479 as cited in SEQ ID NO 52835
  misc_feature (1)..(1392): Ortholog of  Ceres SEQ ID NO 13596087 as cited in SEQ ID NO 68336

SEQ ID NO: 32254 - protein, 320 aa, Arabidopsis thaliana; identical to SEQ ID NO: 28664
  peptide (1)..(320): Ceres Seq. ID no. 13487455

SEQ ID NO: 32255 - protein, 302 aa, Arabidopsis thaliana; identical to SEQ ID NO: 28665
  peptide (1)..(302): Ceres Seq. ID no. 13487456

SEQ ID NO: 32256 - protein, 268 aa, Arabidopsis thaliana; identical to SEQ ID NO: 28666
  peptide (1)..(268): Ceres Seq. ID no. 13487457

SEQ ID NO: 32257 - DNA, 1012 bp, Arabidopsis thaliana; identical to SEQ ID NO: 28667
  misc_feature (1)..(1012): Ceres Seq. ID no. 12423264
  misc_feature (1)..(1012): Ortholog of  Ceres SEQ ID NO 14304830 as cited in SEQ ID NO 54884
  misc_feature (1)..(1012): Ortholog of  Ceres SEQ ID NO 14316297 as cited in SEQ ID NO 57465
  misc_feature (1)..(1012): Ortholog of  Ceres SEQ ID NO 12784351 as cited in SEQ ID NO 60968
  misc_feature (1)..(1012): Ortholog of  Ceres SEQ ID NO 13584213 as cited in SEQ ID NO 63690

SEQ ID NO: 32258 - protein, 262 aa, Arabidopsis thaliana; identical to SEQ ID NO: 28668
  peptide (1)..(262): Ceres Seq. ID no. 12423265

SEQ ID NO: 32259 - protein, 241 aa, Arabidopsis thaliana; identical to SEQ ID NO: 28669
  peptide (1)..(241): Ceres Seq. ID no. 12423266

SEQ ID NO: 32260 - protein, 240 aa, Arabidopsis thaliana; identical to SEQ ID NO: 28670
  peptide (1)..(240): Ceres Seq. ID no. 12423267

SEQ ID NO: 32261 - DNA, 606 bp, Arabidopsis thaliana; identical to SEQ ID NO: 28671
  misc_feature (1)..(606): Ceres Seq. ID no. 12421141
  misc_feature (1)..(606): Ortholog of  Ceres SEQ ID NO 12610253 as cited in SEQ ID NO 56230

SEQ ID NO: 32262 - protein, 152 aa, Arabidopsis thaliana; identical to SEQ ID NO: 28672
  peptide (1)..(152): Ceres Seq. ID no. 12421142

SEQ ID NO: 32263 - DNA, 1061 bp, Arabidopsis thaliana; identical to SEQ ID NO: 28673
  misc_feature (1)..(1061): Ceres Seq. ID no. 13580294
  misc_feature (1)..(1061): Ortholog of  Ceres SEQ ID NO 15177991 as cited in SEQ ID NO 53915
  misc_feature (1)..(1061): Ortholog of  Ceres SEQ ID NO 15174347 as cited in SEQ ID NO 58577
  misc_feature (1)..(1061): Ortholog of  Ceres SEQ ID NO 13596609 as cited in SEQ ID NO 63070
  misc_feature (1)..(1061): Ortholog of  Ceres SEQ ID NO 12616895 as cited in SEQ ID NO 63909
  misc_feature (1)..(1061): Ortholog of  Ceres SEQ ID NO 14302096 as cited in SEQ ID NO 68356
  misc_feature (1)..(1061): Ortholog of  Ceres SEQ ID NO 13598574 as cited in SEQ ID NO 69083

SEQ ID NO: 32264 - protein, 185 aa, Arabidopsis thaliana; identical to SEQ ID NO: 28674
  peptide (1)..(185): Ceres Seq. ID no. 13580295

SEQ ID NO: 32265 - protein, 132 aa, Arabidopsis thaliana; identical to SEQ ID NO: 28675
  peptide (1)..(132): Ceres Seq. ID no. 13580296

SEQ ID NO: 32266 - protein, 125 aa, Arabidopsis thaliana; identical to SEQ ID NO: 28676
  peptide (1)..(125): Ceres Seq. ID no. 13580297

SEQ ID NO: 32267 - DNA, 1518 bp, Arabidopsis thaliana; identical to SEQ ID NO: 28677
  misc_feature (1)..(1518): Ceres Seq. ID no. 12579421
  misc_feature (1)..(1518): Ortholog of  Ceres SEQ ID NO 15177947 as cited in SEQ ID NO 60308

SEQ ID NO: 32268 - protein, 355 aa, Arabidopsis thaliana; identical to SEQ ID NO: 28678
  peptide (1)..(355): Ceres Seq. ID no. 12579422

SEQ ID NO: 32269 - protein, 327 aa, Arabidopsis thaliana; identical to SEQ ID NO: 28679
  peptide (1)..(327): Ceres Seq. ID no. 12579423

SEQ ID NO: 32270 - protein, 320 aa, Arabidopsis thaliana; identical to SEQ ID NO: 28680
  peptide (1)..(320): Ceres Seq. ID no. 12579424

SEQ ID NO: 32271 - DNA, 1331 bp, Arabidopsis thaliana; identical to SEQ ID NO: 28681
  misc_feature (1)..(1331): Ceres Seq. ID no. 12337850
  misc_feature (1)..(1331): Ortholog of  Ceres SEQ ID NO 13595222 as cited in SEQ ID NO 56312
  misc_feature (1)..(1331): Ortholog of  Ceres SEQ ID NO 13654209 as cited in SEQ ID NO 62121
  misc_feature (1)..(1331): Ortholog of  Ceres SEQ ID NO 13596965 as cited in SEQ ID NO 63363

SEQ ID NO: 32272 - protein, 321 aa, Arabidopsis thaliana; identical to SEQ ID NO: 28682
  peptide (1)..(321): Ceres Seq. ID no. 12337851

SEQ ID NO: 32273 - protein, 266 aa, Arabidopsis thaliana; identical to SEQ ID NO: 28683
  peptide (1)..(266): Ceres Seq. ID no. 12337852

SEQ ID NO: 32274 - protein, 183 aa, Arabidopsis thaliana; identical to SEQ ID NO: 28684
  peptide (1)..(183): Ceres Seq. ID no. 12337853

SEQ ID NO: 32275 - DNA, 737 bp, Arabidopsis thaliana; identical to SEQ ID NO: 28685
  misc_feature (1)..(737): Ceres Seq. ID no. 12580393
  misc_feature (1)..(737): Ortholog of  Ceres SEQ ID NO 13597604 as cited in SEQ ID NO 65175

SEQ ID NO: 32276 - protein, 234 aa, Arabidopsis thaliana; identical to SEQ ID NO: 28686
  peptide (1)..(234): Ceres Seq. ID no. 12580394

SEQ ID NO: 32277 - protein, 217 aa, Arabidopsis thaliana; identical to SEQ ID NO: 28687
  peptide (1)..(217): Ceres Seq. ID no. 12580395

SEQ ID NO: 32278 - DNA, 998 bp, Arabidopsis thaliana; identical to SEQ ID NO: 28688
  misc_feature (1)..(998): Ceres Seq. ID no. 12384543
  misc_feature (1)..(998): Ortholog of  Ceres SEQ ID NO 12610385 as cited in SEQ ID NO 55938
  misc_feature (1)..(998): Ortholog of  Ceres SEQ ID NO 13661939 as cited in SEQ ID NO 61170

SEQ ID NO: 32279 - protein, 173 aa, Arabidopsis thaliana; identical to SEQ ID NO: 28689
  peptide (1)..(173): Ceres Seq. ID no. 12384544

SEQ ID NO: 32280 - protein, 143 aa, Arabidopsis thaliana; identical to SEQ ID NO: 28690
  peptide (1)..(143): Ceres Seq. ID no. 12384545

SEQ ID NO: 32281 - protein, 141 aa, Arabidopsis thaliana; identical to SEQ ID NO: 28691
  peptide (1)..(141): Ceres Seq. ID no. 12384546

SEQ ID NO: 32282 - DNA, 905 bp, Arabidopsis thaliana; identical to SEQ ID NO: 28692
  misc_feature (1)..(905): Ceres Seq. ID no. 12711793
  misc_feature (1)..(905): Ortholog of  Ceres SEQ ID NO 13599287 as cited in SEQ ID NO 338
  misc_feature (1)..(905): Ortholog of  Ceres SEQ ID NO 15172934 as cited in SEQ ID NO 51783
  misc_feature (1)..(905): Ortholog of  Ceres SEQ ID NO 14314817 as cited in SEQ ID NO 52571
  misc_feature (1)..(905): Ortholog of  Ceres SEQ ID NO 15174056 as cited in SEQ ID NO 0

SEQ ID NO: 32283 - protein, 232 aa, Arabidopsis thaliana; identical to SEQ ID NO: 28693
  peptide (1)..(232): Ceres Seq. ID no. 12711794

SEQ ID NO: 32284 - protein, 169 aa, Arabidopsis thaliana; identical to SEQ ID NO: 28163
  peptide (1)..(169): Ceres Seq. ID no. 12711795

SEQ ID NO: 32285 - DNA, 1645 bp, Arabidopsis thaliana; identical to SEQ ID NO: 28695
  misc_feature (1)..(1645): Ceres Seq. ID no. 12343397
  misc_feature (1)..(1645): Ortholog of  Ceres SEQ ID NO 14303850 as cited in SEQ ID NO 53464
  misc_feature (1)..(1645): Ortholog of  Ceres SEQ ID NO 13656177 as cited in SEQ ID NO 64997

SEQ ID NO: 32286 - protein, 408 aa, Arabidopsis thaliana; identical to SEQ ID NO: 28696
  peptide (1)..(408): Ceres Seq. ID no. 12343398

SEQ ID NO: 32287 - protein, 391 aa, Arabidopsis thaliana; identical to SEQ ID NO: 28697
  peptide (1)..(391): Ceres Seq. ID no. 12343399

SEQ ID NO: 32288 - protein, 369 aa, Arabidopsis thaliana; identical to SEQ ID NO: 28698
  peptide (1)..(369): Ceres Seq. ID no. 12343400

SEQ ID NO: 32289 - DNA, 1047 bp, Arabidopsis thaliana; identical to SEQ ID NO: 28699
  misc_feature (1)..(1047): Ceres Seq. ID no. 12333793
  misc_feature (1)..(1047): Ortholog of  Ceres SEQ ID NO 13595627 as cited in SEQ ID NO 59826
  misc_feature (1)..(1047): Ortholog of  Ceres SEQ ID NO 15177889 as cited in SEQ ID NO 0

SEQ ID NO: 32290 - protein, 265 aa, Arabidopsis thaliana; identical to SEQ ID NO: 28700
  peptide (1)..(265): Ceres Seq. ID no. 12333794

SEQ ID NO: 32291 - protein, 216 aa, Arabidopsis thaliana; identical to SEQ ID NO: 28701
  peptide (1)..(216): Ceres Seq. ID no. 12333795

SEQ ID NO: 32292 - DNA, 1351 bp, Arabidopsis thaliana; identical to SEQ ID NO: 24717
  misc_feature (1)..(1351): Ceres Seq. ID no. 12334222
  misc_feature (1)..(1351): Ortholog of  Ceres SEQ ID NO 13502858 as cited in SEQ ID NO 65109

SEQ ID NO: 32293 - protein, 309 aa, Arabidopsis thaliana; identical to SEQ ID NO: 24718
  peptide (1)..(309): Ceres Seq. ID no. 12334223

SEQ ID NO: 32294 - protein, 267 aa, Arabidopsis thaliana; identical to SEQ ID NO: 24719
  peptide (1)..(267): Ceres Seq. ID no. 12334224

SEQ ID NO: 32295 - protein, 238 aa, Arabidopsis thaliana; identical to SEQ ID NO: 24720
  peptide (1)..(238): Ceres Seq. ID no. 12334225

SEQ ID NO: 32296 - DNA, 1511 bp, Arabidopsis thaliana; identical to SEQ ID NO: 28706
  misc_feature (1)..(1511): Ceres Seq. ID no. 12394381
  misc_feature (1)..(1511): Ortholog of  Ceres SEQ ID NO 13594814 as cited in SEQ ID NO 51876

SEQ ID NO: 32297 - protein, 174 aa, Arabidopsis thaliana; identical to SEQ ID NO: 28707
  peptide (1)..(174): Ceres Seq. ID no. 12394382

SEQ ID NO: 32298 - protein, 137 aa, Arabidopsis thaliana; identical to SEQ ID NO: 28708
  peptide (1)..(137): Ceres Seq. ID no. 12394383

SEQ ID NO: 32299 - DNA, 873 bp, Arabidopsis thaliana; identical to SEQ ID NO: 28709
  misc_feature (1)..(873): Ceres Seq. ID no. 12602545
  misc_feature (1)..(873): Ortholog of  Ceres SEQ ID NO 13660094 as cited in SEQ ID NO 60820
  misc_feature (1)..(873): Ortholog of  Ceres SEQ ID NO 13656436 as cited in SEQ ID NO 69154

SEQ ID NO: 32300 - protein, 206 aa, Arabidopsis thaliana; identical to SEQ ID NO: 28710
  peptide (1)..(206): Ceres Seq. ID no. 12602546

SEQ ID NO: 32301 - protein, 182 aa, Arabidopsis thaliana; identical to SEQ ID NO: 28711
  peptide (1)..(182): Ceres Seq. ID no. 12602547

SEQ ID NO: 32302 - protein, 114 aa, Arabidopsis thaliana; identical to SEQ ID NO: 28712
  peptide (1)..(114): Ceres Seq. ID no. 12602548

SEQ ID NO: 32303 - DNA, 908 bp, Arabidopsis thaliana; identical to SEQ ID NO: 28713
  misc_feature (1)..(908): Ceres Seq. ID no. 12332602
  misc_feature (1)..(908): Ortholog of  Ceres SEQ ID NO 12626108 as cited in SEQ ID NO 64252

SEQ ID NO: 32304 - protein, 278 aa, Arabidopsis thaliana; identical to SEQ ID NO: 28714
  peptide (1)..(278): Ceres Seq. ID no. 12332603

SEQ ID NO: 32305 - protein, 274 aa, Arabidopsis thaliana; identical to SEQ ID NO: 28715
  peptide (1)..(274): Ceres Seq. ID no. 12332604

SEQ ID NO: 32306 - DNA, 933 bp, Arabidopsis thaliana; identical to SEQ ID NO: 28716
  misc_feature (1)..(933): Ceres Seq. ID no. 13487208
  misc_feature (1)..(933): Ortholog of  Ceres SEQ ID NO 15172991 as cited in SEQ ID NO 51333
  misc_feature (1)..(933): Ortholog of  Ceres SEQ ID NO 13594870 as cited in SEQ ID NO 51929
  misc_feature (1)..(933): Ortholog of  Ceres SEQ ID NO 12610679 as cited in SEQ ID NO 56077
  misc_feature (1)..(933): Ortholog of  Ceres SEQ ID NO 12635481 as cited in SEQ ID NO 0

SEQ ID NO: 32307 - protein, 144 aa, Arabidopsis thaliana; identical to SEQ ID NO: 28717
  peptide (1)..(144): Ceres Seq. ID no. 13487209

SEQ ID NO: 32308 - protein, 96 aa, Arabidopsis thaliana; identical to SEQ ID NO: 28718
  peptide (1)..(96): Ceres Seq. ID no. 13487210

SEQ ID NO: 32309 - protein, 79 aa, Arabidopsis thaliana; identical to SEQ ID NO: 28719
  peptide (1)..(79): Ceres Seq. ID no. 13487211

SEQ ID NO: 32310 - DNA, 651 bp, Arabidopsis thaliana; identical to SEQ ID NO: 28720
  misc_feature (1)..(651): Ceres Seq. ID no. 12776716
  misc_feature (1)..(651): Ortholog of  Ceres SEQ ID NO 12556948 as cited in SEQ ID NO 54

SEQ ID NO: 32311 - protein, 67 aa, Arabidopsis thaliana; identical to SEQ ID NO: 28721
  peptide (1)..(67): Ceres Seq. ID no. 12776717

SEQ ID NO: 32312 - protein, 66 aa, Arabidopsis thaliana; identical to SEQ ID NO: 28722
  peptide (1)..(66): Ceres Seq. ID no. 12776718

SEQ ID NO: 32313 - protein, 57 aa, Arabidopsis thaliana; identical to SEQ ID NO: 28723
  peptide (1)..(57): Ceres Seq. ID no. 12776719

SEQ ID NO: 32314 - DNA, 515 bp, Arabidopsis thaliana; identical to SEQ ID NO: 28724
  misc_feature (1)..(515): Ceres Seq. ID no. 12331831
  misc_feature (1)..(515): Ortholog of  Ceres SEQ ID NO 13661547 as cited in SEQ ID NO 60586

SEQ ID NO: 32315 - protein, 154 aa, Arabidopsis thaliana; identical to SEQ ID NO: 28725
  peptide (1)..(154): Ceres Seq. ID no. 12331832

SEQ ID NO: 32316 - protein, 142 aa, Arabidopsis thaliana; identical to SEQ ID NO: 28726
  peptide (1)..(142): Ceres Seq. ID no. 12331833

SEQ ID NO: 32317 - DNA, 1164 bp, Arabidopsis thaliana; identical to SEQ ID NO: 28727
  misc_feature (1)..(1164): Ceres Seq. ID no. 12420728
  misc_feature (1)..(1164): Ortholog of  Ceres SEQ ID NO 15177746 as cited in SEQ ID NO 57935

SEQ ID NO: 32318 - protein, 282 aa, Arabidopsis thaliana; identical to SEQ ID NO: 28728
  peptide (1)..(282): Ceres Seq. ID no. 12420729

SEQ ID NO: 32319 - protein, 260 aa, Arabidopsis thaliana; identical to SEQ ID NO: 28729
  peptide (1)..(260): Ceres Seq. ID no. 12420730

SEQ ID NO: 32320 - protein, 255 aa, Arabidopsis thaliana; identical to SEQ ID NO: 28730
  peptide (1)..(255): Ceres Seq. ID no. 12420731

SEQ ID NO: 32321 - DNA, 695 bp, Arabidopsis thaliana; identical to SEQ ID NO: 28731
  misc_feature (1)..(695): Ceres Seq. ID no. 12370089
  misc_feature (1)..(695): Ortholog of  Ceres SEQ ID NO 12471935 as cited in SEQ ID NO 122
  misc_feature (1)..(695): Ortholog of  Ceres SEQ ID NO 13594582 as cited in SEQ ID NO 51986
  misc_feature (1)..(695): Ortholog of  Ceres SEQ ID NO 13661310 as cited in SEQ ID NO 61077

SEQ ID NO: 32322 - protein, 159 aa, Arabidopsis thaliana; identical to SEQ ID NO: 28732
  peptide (1)..(159): Ceres Seq. ID no. 12370090

SEQ ID NO: 32323 - protein, 149 aa, Arabidopsis thaliana; identical to SEQ ID NO: 28733
  peptide (1)..(149): Ceres Seq. ID no. 12370091

SEQ ID NO: 32324 - protein, 118 aa, Arabidopsis thaliana; identical to SEQ ID NO: 28734
  peptide (1)..(118): Ceres Seq. ID no. 12370092

SEQ ID NO: 32325 - DNA, 940 bp, Arabidopsis thaliana; identical to SEQ ID NO: 28735
  misc_feature (1)..(940): Ceres Seq. ID no. 12327087
  misc_feature (1)..(940): Ortholog of  Ceres SEQ ID NO 14308320 as cited in SEQ ID NO 59093
  misc_feature (1)..(940): Ortholog of  Ceres SEQ ID NO 12590628 as cited in SEQ ID NO 0

SEQ ID NO: 32326 - protein, 244 aa, Arabidopsis thaliana; identical to SEQ ID NO: 28736
  peptide (1)..(244): Ceres Seq. ID no. 12327088

SEQ ID NO: 32327 - protein, 141 aa, Arabidopsis thaliana; identical to SEQ ID NO: 28737
  peptide (1)..(141): Ceres Seq. ID no. 12327089

SEQ ID NO: 32328 - DNA, 840 bp, Arabidopsis thaliana; identical to SEQ ID NO: 28738
  misc_feature (1)..(840): Ceres Seq. ID no. 12332656
  misc_feature (1)..(840): Ortholog of  Ceres SEQ ID NO 13495070 as cited in SEQ ID NO 53216
  misc_feature (1)..(840): Ortholog of  Ceres SEQ ID NO 12598241 as cited in SEQ ID NO 61025
  misc_feature (1)..(840): Ortholog of  Ceres SEQ ID NO 13661333 as cited in SEQ ID NO 61620
  misc_feature (1)..(840): Ortholog of  Ceres SEQ ID NO 15173749 as cited in SEQ ID NO 61775
  misc_feature (1)..(840): Ortholog of  Ceres SEQ ID NO 13596812 as cited in SEQ ID NO 62283
  misc_feature (1)..(840): Ortholog of  Ceres SEQ ID NO 13623021 as cited in SEQ ID NO 0
  misc_feature (1)..(840): Ortholog of  Ceres SEQ ID NO 14309080 as cited in SEQ ID NO 0

SEQ ID NO: 32329 - protein, 139 aa, Arabidopsis thaliana; identical to SEQ ID NO: 28739
  peptide (1)..(139): Ceres Seq. ID no. 12332657

SEQ ID NO: 32330 - protein, 132 aa, Arabidopsis thaliana; identical to SEQ ID NO: 28740
  peptide (1)..(132): Ceres Seq. ID no. 12332658

SEQ ID NO: 32331 - DNA, 586 bp, Arabidopsis thaliana; identical to SEQ ID NO: 28741
  misc_feature (1)..(586): Ceres Seq. ID no. 12332652
  misc_feature (1)..(586): Ortholog of  Ceres SEQ ID NO 14306303 as cited in SEQ ID NO 56884

SEQ ID NO: 32332 - protein, 131 aa, Arabidopsis thaliana; identical to SEQ ID NO: 28742
  peptide (1)..(131): Ceres Seq. ID no. 12332653

SEQ ID NO: 32333 - protein, 120 aa, Arabidopsis thaliana; identical to SEQ ID NO: 28743
  peptide (1)..(120): Ceres Seq. ID no. 12332654

SEQ ID NO: 32334 - protein, 72 aa, Arabidopsis thaliana; identical to SEQ ID NO: 28744
  peptide (1)..(72): Ceres Seq. ID no. 12332655

SEQ ID NO: 32335 - DNA, 589 bp, Arabidopsis thaliana; identical to SEQ ID NO: 28745
  misc_feature (1)..(589): Ceres Seq. ID no. 12384610
  misc_feature (1)..(589): Ortholog of  Ceres SEQ ID NO 12624098 as cited in SEQ ID NO 61354

SEQ ID NO: 32336 - protein, 125 aa, Arabidopsis thaliana; identical to SEQ ID NO: 28746
  peptide (1)..(125): Ceres Seq. ID no. 12384611

SEQ ID NO: 32337 - protein, 93 aa, Arabidopsis thaliana; identical to SEQ ID NO: 28747
  peptide (1)..(93): Ceres Seq. ID no. 12384612

SEQ ID NO: 32338 - protein, 92 aa, Arabidopsis thaliana; identical to SEQ ID NO: 28748
  peptide (1)..(92): Ceres Seq. ID no. 12384613

SEQ ID NO: 32339 - DNA, 608 bp, Arabidopsis thaliana; identical to SEQ ID NO: 28749
  misc_feature (1)..(608): Ceres Seq. ID no. 12393664
  misc_feature (1)..(608): Ortholog of  Ceres SEQ ID NO 13661491 as cited in SEQ ID NO 61696

SEQ ID NO: 32340 - protein, 115 aa, Arabidopsis thaliana; identical to SEQ ID NO: 28750
  peptide (1)..(115): Ceres Seq. ID no. 12393665

SEQ ID NO: 32341 - protein, 107 aa, Arabidopsis thaliana; identical to SEQ ID NO: 28751
  peptide (1)..(107): Ceres Seq. ID no. 12393666

SEQ ID NO: 32342 - protein, 78 aa, Arabidopsis thaliana; identical to SEQ ID NO: 28752
  peptide (1)..(78): Ceres Seq. ID no. 12393667

SEQ ID NO: 32343 - DNA, 636 bp, Arabidopsis thaliana; identical to SEQ ID NO: 28753
  misc_feature (1)..(636): Ceres Seq. ID no. 13496892
  misc_feature (1)..(636): Ortholog of  Ceres SEQ ID NO 12627215 as cited in SEQ ID NO 60976
  misc_feature (1)..(636): Ortholog of  Ceres SEQ ID NO 12635879 as cited in SEQ ID NO 0
  misc_feature (1)..(636): Ortholog of  Ceres SEQ ID NO 13599649 as cited in SEQ ID NO 0

SEQ ID NO: 32344 - protein, 107 aa, Arabidopsis thaliana; identical to SEQ ID NO: 28754
  peptide (1)..(107): Ceres Seq. ID no. 13496893

SEQ ID NO: 32345 - protein, 89 aa, Arabidopsis thaliana; identical to SEQ ID NO: 28755
  peptide (1)..(89): Ceres Seq. ID no. 13496894

SEQ ID NO: 32346 - protein, 80 aa, Arabidopsis thaliana; identical to SEQ ID NO: 28756
  peptide (1)..(80): Ceres Seq. ID no. 13496895

SEQ ID NO: 32347 - DNA, 1000 bp, Arabidopsis thaliana; identical to SEQ ID NO: 28757
  misc_feature (1)..(1000): Ceres Seq. ID no. 13489993
  misc_feature (1)..(1000): Ortholog of  Ceres SEQ ID NO 12610607 as cited in SEQ ID NO 56214
  misc_feature (1)..(1000): Ortholog of  Ceres SEQ ID NO 13664294 as cited in SEQ ID NO 61328
  misc_feature (1)..(1000): Ortholog of  Ceres SEQ ID NO 13596425 as cited in SEQ ID NO 62039

SEQ ID NO: 32348 - protein, 238 aa, Arabidopsis thaliana; identical to SEQ ID NO: 28758
  peptide (1)..(238): Ceres Seq. ID no. 13489994

SEQ ID NO: 32349 - protein, 168 aa, Arabidopsis thaliana; identical to SEQ ID NO: 28759
  peptide (1)..(168): Ceres Seq. ID no. 13489995

SEQ ID NO: 32350 - protein, 155 aa, Arabidopsis thaliana; identical to SEQ ID NO: 28760
  peptide (1)..(155): Ceres Seq. ID no. 13489996

SEQ ID NO: 32351 - DNA, 1067 bp, Arabidopsis thaliana; identical to SEQ ID NO: 28761
  misc_feature (1)..(1067): Ceres Seq. ID no. 12327360
  misc_feature (1)..(1067): Ortholog of  Ceres SEQ ID NO 15224924 as cited in SEQ ID NO 64061

SEQ ID NO: 32352 - protein, 283 aa, Arabidopsis thaliana; identical to SEQ ID NO: 28762
  peptide (1)..(283): Ceres Seq. ID no. 12327361

SEQ ID NO: 32353 - protein, 276 aa, Arabidopsis thaliana; identical to SEQ ID NO: 28763
  peptide (1)..(276): Ceres Seq. ID no. 12327362

SEQ ID NO: 32354 - protein, 222 aa, Arabidopsis thaliana; identical to SEQ ID NO: 28764
  peptide (1)..(222): Ceres Seq. ID no. 12327363

SEQ ID NO: 32355 - DNA, 524 bp, Arabidopsis thaliana; identical to SEQ ID NO: 28765
  misc_feature (1)..(524): Ceres Seq. ID no. 12385784
  misc_feature (1)..(524): Ortholog of  Ceres SEQ ID NO 12615235 as cited in SEQ ID NO 62537

SEQ ID NO: 32356 - protein, 124 aa, Arabidopsis thaliana; identical to SEQ ID NO: 28766
  peptide (1)..(124): Ceres Seq. ID no. 12385785

SEQ ID NO: 32357 - protein, 117 aa, Arabidopsis thaliana; identical to SEQ ID NO: 28767
  peptide (1)..(117): Ceres Seq. ID no. 12385786

SEQ ID NO: 32358 - protein, 81 aa, Arabidopsis thaliana; identical to SEQ ID NO: 28768
  peptide (1)..(81): Ceres Seq. ID no. 12385787

SEQ ID NO: 32359 - DNA, 503 bp, Arabidopsis thaliana; identical to SEQ ID NO: 28769
  misc_feature (1)..(503): Ceres Seq. ID no. 12322297
  misc_feature (1)..(503): Ortholog of  Ceres SEQ ID NO 15177246 as cited in SEQ ID NO 57731

SEQ ID NO: 32360 - protein, 95 aa, Arabidopsis thaliana [sequence omitted]

SEQ ID NO: 32361 - protein, 65 aa, Arabidopsis thaliana; identical to SEQ ID NO: 28771
  peptide (1)..(65): Ceres Seq. ID no. 12322299

SEQ ID NO: 32362 - DNA, 1029 bp, Arabidopsis thaliana; identical to SEQ ID NO: 28772
  misc_feature (1)..(1029): Ceres Seq. ID no. 13486649
  misc_feature (1)..(1029): Ortholog of  Ceres SEQ ID NO 15169248 as cited in SEQ ID NO 55022
  misc_feature (1)..(1029): Ortholog of  Ceres SEQ ID NO 14315042 as cited in SEQ ID NO 56959
  misc_feature (1)..(1029): Ortholog of  Ceres SEQ ID NO 12608620 as cited in SEQ ID NO 60192
  misc_feature (1)..(1029): Ortholog of  Ceres SEQ ID NO 13662898 as cited in SEQ ID NO 66199
  misc_feature (1)..(1029): Ortholog of  Ceres SEQ ID NO 13654314 as cited in SEQ ID NO 67914

SEQ ID NO: 32363 - protein, 239 aa, Arabidopsis thaliana; identical to SEQ ID NO: 28773
  peptide (1)..(239): Ceres Seq. ID no. 13486650

SEQ ID NO: 32364 - protein, 188 aa, Arabidopsis thaliana; identical to SEQ ID NO: 28774
  peptide (1)..(188): Ceres Seq. ID no. 13486651

SEQ ID NO: 32365 - protein, 185 aa, Arabidopsis thaliana; identical to SEQ ID NO: 28775
  peptide (1)..(185): Ceres Seq. ID no. 13486652

SEQ ID NO: 32366 - DNA, 1221 bp, Arabidopsis thaliana; identical to SEQ ID NO: 28776
  misc_feature (1)..(1221): Ceres Seq. ID no. 12396606
  misc_feature (1)..(1221): Ortholog of  Ceres SEQ ID NO 15170760 as cited in SEQ ID NO 52747
  misc_feature (1)..(1221): Ortholog of  Ceres SEQ ID NO 15168549 as cited in SEQ ID NO 56976
  misc_feature (1)..(1221): Ortholog of  Ceres SEQ ID NO 14314335 as cited in SEQ ID NO 57305

SEQ ID NO: 32367 - protein, 286 aa, Arabidopsis thaliana; identical to SEQ ID NO: 28777
  peptide (1)..(286): Ceres Seq. ID no. 12396607

SEQ ID NO: 32368 - protein, 231 aa, Arabidopsis thaliana; identical to SEQ ID NO: 28778
  peptide (1)..(231): Ceres Seq. ID no. 12396608

SEQ ID NO: 32369 - protein, 198 aa, Arabidopsis thaliana; identical to SEQ ID NO: 28779
  peptide (1)..(198): Ceres Seq. ID no. 12396609

SEQ ID NO: 32370 - DNA, 821 bp, Arabidopsis thaliana; identical to SEQ ID NO: 28780
  misc_feature (1)..(821): Ceres Seq. ID no. 12322096
  misc_feature (1)..(821): Ortholog of  Ceres SEQ ID NO 15172991 as cited in SEQ ID NO 51333
  misc_feature (1)..(821): Ortholog of  Ceres SEQ ID NO 13594870 as cited in SEQ ID NO 51929
  misc_feature (1)..(821): Ortholog of  Ceres SEQ ID NO 12610679 as cited in SEQ ID NO 56077
  misc_feature (1)..(821): Ortholog of  Ceres SEQ ID NO 12635481 as cited in SEQ ID NO 0

SEQ ID NO: 32371 - protein, 141 aa, Arabidopsis thaliana; identical to SEQ ID NO: 28781
  peptide (1)..(141): Ceres Seq. ID no. 12322097

SEQ ID NO: 32372 - protein, 96 aa, Arabidopsis thaliana; identical to SEQ ID NO: 28782
  peptide (1)..(96): Ceres Seq. ID no. 12322098

SEQ ID NO: 32373 - DNA, 1186 bp, Arabidopsis thaliana; identical to SEQ ID NO: 28783
  misc_feature (1)..(1186): Ceres Seq. ID no. 12422578
  misc_feature (1)..(1186): Ortholog of  Ceres SEQ ID NO 14316324 as cited in SEQ ID NO 55612
  misc_feature (1)..(1186): Ortholog of  Ceres SEQ ID NO 14316378 as cited in SEQ ID NO 57746
  misc_feature (1)..(1186): Ortholog of  Ceres SEQ ID NO 13596097 as cited in SEQ ID NO 68421
  misc_feature (1)..(1186): Ortholog of  Ceres SEQ ID NO 13598439 as cited in SEQ ID NO 69016
  misc_feature (1)..(1186): Ortholog of  Ceres SEQ ID NO 13599524 as cited in SEQ ID NO 0

SEQ ID NO: 32374 - protein, 333 aa, Arabidopsis thaliana; identical to SEQ ID NO: 28784
  peptide (1)..(333): Ceres Seq. ID no. 12422579

SEQ ID NO: 32375 - protein, 310 aa, Arabidopsis thaliana; identical to SEQ ID NO: 28785
  peptide (1)..(310): Ceres Seq. ID no. 12422580

SEQ ID NO: 32376 - protein, 223 aa, Arabidopsis thaliana; identical to SEQ ID NO: 28786
  peptide (1)..(223): Ceres Seq. ID no. 12422581

SEQ ID NO: 32377 - DNA, 1078 bp, Arabidopsis thaliana; identical to SEQ ID NO: 28787
  misc_feature (1)..(1078): Ceres Seq. ID no. 12334300
  misc_feature (1)..(1078): Ortholog of  Ceres SEQ ID NO 14315973 as cited in SEQ ID NO 57637

SEQ ID NO: 32378 - protein, 294 aa, Arabidopsis thaliana; identical to SEQ ID NO: 28788
  peptide (1)..(294): Ceres Seq. ID no. 12334301

SEQ ID NO: 32379 - protein, 292 aa, Arabidopsis thaliana; identical to SEQ ID NO: 28789
  peptide (1)..(292): Ceres Seq. ID no. 12334302

SEQ ID NO: 32380 - protein, 256 aa, Arabidopsis thaliana; identical to SEQ ID NO: 28790
  peptide (1)..(256): Ceres Seq. ID no. 12334303

SEQ ID NO: 32381 - DNA, 1155 bp, Arabidopsis thaliana; identical to SEQ ID NO: 28791
  misc_feature (1)..(1155): Ceres Seq. ID no. 12371691
  misc_feature (1)..(1155): Ortholog of  Ceres SEQ ID NO 15171366 as cited in SEQ ID NO 51578
  misc_feature (1)..(1155): Ortholog of  Ceres SEQ ID NO 14306949 as cited in SEQ ID NO 54919
  misc_feature (1)..(1155): Ortholog of  Ceres SEQ ID NO 14308536 as cited in SEQ ID NO 55469
  misc_feature (1)..(1155): Ortholog of  Ceres SEQ ID NO 15175723 as cited in SEQ ID NO 57875
  misc_feature (1)..(1155): Ortholog of  Ceres SEQ ID NO 14314909 as cited in SEQ ID NO 58002

SEQ ID NO: 32382 - protein, 354 aa, Arabidopsis thaliana; identical to SEQ ID NO: 28792
  peptide (1)..(354): Ceres Seq. ID no. 12371692

SEQ ID NO: 32383 - protein, 325 aa, Arabidopsis thaliana; identical to SEQ ID NO: 28793
  peptide (1)..(325): Ceres Seq. ID no. 12371693

SEQ ID NO: 32384 - protein, 320 aa, Arabidopsis thaliana; identical to SEQ ID NO: 28794
  peptide (1)..(320): Ceres Seq. ID no. 12371694

SEQ ID NO: 32385 - DNA, 1043 bp, Arabidopsis thaliana; identical to SEQ ID NO: 28795
  misc_feature (1)..(1043): Ceres Seq. ID no. 12333847
  misc_feature (1)..(1043): Ortholog of  Ceres SEQ ID NO 13599581 as cited in SEQ ID NO 0

SEQ ID NO: 32386 - protein, 189 aa, Arabidopsis thaliana; identical to SEQ ID NO: 28796
  peptide (1)..(189): Ceres Seq. ID no. 12333848

SEQ ID NO: 32387 - protein, 161 aa, Arabidopsis thaliana; identical to SEQ ID NO: 28797
  peptide (1)..(161): Ceres Seq. ID no. 12333849

SEQ ID NO: 32388 - protein, 97 aa, Arabidopsis thaliana; identical to SEQ ID NO: 28798
  peptide (1)..(97): Ceres Seq. ID no. 12333850

SEQ ID NO: 32389 - DNA, 1017 bp, Arabidopsis thaliana; identical to SEQ ID NO: 28799
  misc_feature (1)..(1017): Ceres Seq. ID no. 12422208
  misc_feature (1)..(1017): Ortholog of  Ceres SEQ ID NO 13638835 as cited in SEQ ID NO 52005
  misc_feature (1)..(1017): Ortholog of  Ceres SEQ ID NO 12614289 as cited in SEQ ID NO 68735
  misc_feature (1)..(1017): Ortholog of  Ceres SEQ ID NO 14309007 as cited in SEQ ID NO 0

SEQ ID NO: 32390 - protein, 163 aa, Arabidopsis thaliana; identical to SEQ ID NO: 28800
  peptide (1)..(163): Ceres Seq. ID no. 12422209

SEQ ID NO: 32391 - protein, 92 aa, Arabidopsis thaliana; identical to SEQ ID NO: 28801
  peptide (1)..(92): Ceres Seq. ID no. 12422210

SEQ ID NO: 32392 - protein, 83 aa, Arabidopsis thaliana; identical to SEQ ID NO: 28802
  peptide (1)..(83): Ceres Seq. ID no. 12422211

SEQ ID NO: 32393 - DNA, 938 bp, Arabidopsis thaliana; identical to SEQ ID NO: 28803
  misc_feature (1)..(938): Ceres Seq. ID no. 13491243
  misc_feature (1)..(938): Ortholog of  Ceres SEQ ID NO 15177083 as cited in SEQ ID NO 51917
  misc_feature (1)..(938): Ortholog of  Ceres SEQ ID NO 12609093 as cited in SEQ ID NO 52008
  misc_feature (1)..(938): Ortholog of  Ceres SEQ ID NO 12609839 as cited in SEQ ID NO 52022
  misc_feature (1)..(938): Ortholog of  Ceres SEQ ID NO 13638931 as cited in SEQ ID NO 52200
  misc_feature (1)..(938): Ortholog of  Ceres SEQ ID NO 13638885 as cited in SEQ ID NO 55803
  misc_feature (1)..(938): Ortholog of  Ceres SEQ ID NO 14301452 as cited in SEQ ID NO 60984
  misc_feature (1)..(938): Ortholog of  Ceres SEQ ID NO 12587429 as cited in SEQ ID NO 63113
  misc_feature (1)..(938): Ortholog of  Ceres SEQ ID NO 12615635 as cited in SEQ ID NO 63133
  misc_feature (1)..(938): Ortholog of  Ceres SEQ ID NO 12586351 as cited in SEQ ID NO 64028
  misc_feature (1)..(938): Ortholog of  Ceres SEQ ID NO 15173174 as cited in SEQ ID NO 64046
  misc_feature (1)..(938): Ortholog of  Ceres SEQ ID NO 13654441 as cited in SEQ ID NO 67814
  misc_feature (1)..(938): Ortholog of  Ceres SEQ ID NO 12635608 as cited in SEQ ID NO 0
  misc_feature (1)..(938): Ortholog of  Ceres SEQ ID NO 14309027 as cited in SEQ ID NO 0

SEQ ID NO: 32394 - protein, 246 aa, Arabidopsis thaliana; identical to SEQ ID NO: 28804
  peptide (1)..(246): Ceres Seq. ID no. 13491244

SEQ ID NO: 32395 - protein, 234 aa, Arabidopsis thaliana; identical to SEQ ID NO: 28805
  peptide (1)..(234): Ceres Seq. ID no. 13491245

SEQ ID NO: 32396 - DNA, 2023 bp, Arabidopsis thaliana; identical to SEQ ID NO: 28806
  misc_feature (1)..(2023): Ceres Seq. ID no. 12370614
  misc_feature (1)..(2023): Ortholog of  Ceres SEQ ID NO 13582619 as cited in SEQ ID NO 56520
  misc_feature (1)..(2023): Ortholog of  Ceres SEQ ID NO 12611392 as cited in SEQ ID NO 56826
  misc_feature (1)..(2023): Ortholog of  Ceres SEQ ID NO 13660872 as cited in SEQ ID NO 60830

SEQ ID NO: 32397 - protein, 314 aa, Arabidopsis thaliana; identical to SEQ ID NO: 28807
  peptide (1)..(314): Ceres Seq. ID no. 12370615

SEQ ID NO: 32398 - protein, 283 aa, Arabidopsis thaliana; identical to SEQ ID NO: 28808
  peptide (1)..(283): Ceres Seq. ID no. 12370616

SEQ ID NO: 32399 - protein, 261 aa, Arabidopsis thaliana; identical to SEQ ID NO: 28809
  peptide (1)..(261): Ceres Seq. ID no. 12370617

SEQ ID NO: 32400 - DNA, 1739 bp, Arabidopsis thaliana; identical to SEQ ID NO: 28810
  misc_feature (1)..(1739): Ceres Seq. ID no. 12324446
  misc_feature (1)..(1739): Ortholog of  Ceres SEQ ID NO 13600220 as cited in SEQ ID NO 0

SEQ ID NO: 32401 - protein, 521 aa, Arabidopsis thaliana; identical to SEQ ID NO: 28811
  peptide (1)..(521): Ceres Seq. ID no. 12324447

SEQ ID NO: 32402 - protein, 512 aa, Arabidopsis thaliana; identical to SEQ ID NO: 28812
  peptide (1)..(512): Ceres Seq. ID no. 12324448

SEQ ID NO: 32403 - protein, 407 aa, Arabidopsis thaliana; identical to SEQ ID NO: 28813
  peptide (1)..(407): Ceres Seq. ID no. 12324449

SEQ ID NO: 32404 - DNA, 1589 bp, Arabidopsis thaliana; identical to SEQ ID NO: 28814
  misc_feature (1)..(1589): Ceres Seq. ID no. 13497178
  misc_feature (1)..(1589): Ortholog of  Ceres SEQ ID NO 13596816 as cited in SEQ ID NO 62287

SEQ ID NO: 32405 - protein, 434 aa, Arabidopsis thaliana; identical to SEQ ID NO: 28815
  peptide (1)..(434): Ceres Seq. ID no. 13497179

SEQ ID NO: 32406 - protein, 425 aa, Arabidopsis thaliana; identical to SEQ ID NO: 28816
  peptide (1)..(425): Ceres Seq. ID no. 13497180

SEQ ID NO: 32407 - protein, 338 aa, Arabidopsis thaliana; identical to SEQ ID NO: 28817
  peptide (1)..(338): Ceres Seq. ID no. 13497181

SEQ ID NO: 32408 - DNA, 1132 bp, Arabidopsis thaliana; identical to SEQ ID NO: 28818
  misc_feature (1)..(1132): Ceres Seq. ID no. 12371695
  misc_feature (1)..(1132): Ortholog of  Ceres SEQ ID NO 15170760 as cited in SEQ ID NO 52747
  misc_feature (1)..(1132): Ortholog of  Ceres SEQ ID NO 14314335 as cited in SEQ ID NO 57305
  misc_feature (1)..(1132): Ortholog of  Ceres SEQ ID NO 15177588 as cited in SEQ ID NO 60367

SEQ ID NO: 32409 - protein, 285 aa, Arabidopsis thaliana; identical to SEQ ID NO: 28819
  peptide (1)..(285): Ceres Seq. ID no. 12371696

SEQ ID NO: 32410 - protein, 198 aa, Arabidopsis thaliana; identical to SEQ ID NO: 28820
  peptide (1)..(198): Ceres Seq. ID no. 12371697

SEQ ID NO: 32411 - protein, 159 aa, Arabidopsis thaliana; identical to SEQ ID NO: 28821
  peptide (1)..(159): Ceres Seq. ID no. 12371698

SEQ ID NO: 32412 - DNA, 1154 bp, Arabidopsis thaliana; identical to SEQ ID NO: 26919
  misc_feature (1)..(1154): Ceres Seq. ID no. 12385275
  misc_feature (1)..(1154): Ortholog of  Ceres SEQ ID NO 14312711 as cited in SEQ ID NO 1401
  misc_feature (1)..(1154): Ortholog of  Ceres SEQ ID NO 13586635 as cited in SEQ ID NO 14217
  misc_feature (1)..(1154): Ortholog of  Ceres SEQ ID NO 15170220 as cited in SEQ ID NO 55383
  misc_feature (1)..(1154): Ortholog of  Ceres SEQ ID NO 14304198 as cited in SEQ ID NO 56479
  misc_feature (1)..(1154): Ortholog of  Ceres SEQ ID NO 14316543 as cited in SEQ ID NO 57118
  misc_feature (1)..(1154): Ortholog of  Ceres SEQ ID NO 12616285 as cited in SEQ ID NO 63483

SEQ ID NO: 32413 - protein, 350 aa, Arabidopsis thaliana; identical to SEQ ID NO: 26920
  peptide (1)..(350): Ceres Seq. ID no. 12385276

SEQ ID NO: 32414 - protein, 331 aa, Arabidopsis thaliana; identical to SEQ ID NO: 21476
  peptide (1)..(331): Ceres Seq. ID no. 12385277

SEQ ID NO: 32415 - protein, 324 aa, Arabidopsis thaliana; identical to SEQ ID NO: 21477
  peptide (1)..(324): Ceres Seq. ID no. 12385278

SEQ ID NO: 32416 - DNA, 1013 bp, Arabidopsis thaliana; identical to SEQ ID NO: 26249
  misc_feature (1)..(1013): Ceres Seq. ID no. 12580328
  misc_feature (1)..(1013): Ortholog of  Ceres SEQ ID NO 13589868 as cited in SEQ ID NO 55521
  misc_feature (1)..(1013): Ortholog of  Ceres SEQ ID NO 15226426 as cited in SEQ ID NO 55985
  misc_feature (1)..(1013): Ortholog of  Ceres SEQ ID NO 14312250 as cited in SEQ ID NO 59168
  misc_feature (1)..(1013): Ortholog of  Ceres SEQ ID NO 15173326 as cited in SEQ ID NO 63793
  misc_feature (1)..(1013): Ortholog of  Ceres SEQ ID NO 12617659 as cited in SEQ ID NO 65286
  misc_feature (1)..(1013): Ortholog of  Ceres SEQ ID NO 12780566 as cited in SEQ ID NO 65822
  misc_feature (1)..(1013): Ortholog of  Ceres SEQ ID NO 15179979 as cited in SEQ ID NO 0

SEQ ID NO: 32417 - protein, 182 aa, Arabidopsis thaliana; identical to SEQ ID NO: 26250
  peptide (1)..(182): Ceres Seq. ID no. 12580329

SEQ ID NO: 32418 - protein, 175 aa, Arabidopsis thaliana; identical to SEQ ID NO: 26251
  peptide (1)..(175): Ceres Seq. ID no. 12580330

SEQ ID NO: 32419 - protein, 144 aa, Arabidopsis thaliana; identical to SEQ ID NO: 26252
  peptide (1)..(144): Ceres Seq. ID no. 12580331

SEQ ID NO: 32420 - DNA, 1148 bp, Arabidopsis thaliana; identical to SEQ ID NO: 28830
  misc_feature (1)..(1148): Ceres Seq. ID no. 12334441
  misc_feature (1)..(1148): Ortholog of  Ceres SEQ ID NO 13639514 as cited in SEQ ID NO 55736
  misc_feature (1)..(1148): Ortholog of  Ceres SEQ ID NO 14312254 as cited in SEQ ID NO 59148
  misc_feature (1)..(1148): Ortholog of  Ceres SEQ ID NO 13662804 as cited in SEQ ID NO 65394
  misc_feature (1)..(1148): Ortholog of  Ceres SEQ ID NO 13656519 as cited in SEQ ID NO 69226

SEQ ID NO: 32421 - protein, 227 aa, Arabidopsis thaliana; identical to SEQ ID NO: 28831
  peptide (1)..(227): Ceres Seq. ID no. 12334442

SEQ ID NO: 32422 - protein, 207 aa, Arabidopsis thaliana; identical to SEQ ID NO: 28832
  peptide (1)..(207): Ceres Seq. ID no. 12334443

SEQ ID NO: 32423 - protein, 166 aa, Arabidopsis thaliana; identical to SEQ ID NO: 28833
  peptide (1)..(166): Ceres Seq. ID no. 12334444

SEQ ID NO: 32424 - DNA, 1854 bp, Arabidopsis thaliana; identical to SEQ ID NO: 28834
  misc_feature (1)..(1854): Ceres Seq. ID no. 13499750
  misc_feature (1)..(1854): Ortholog of  Ceres SEQ ID NO 13664013 as cited in SEQ ID NO 67686

SEQ ID NO: 32425 - protein, 531 aa, Arabidopsis thaliana; identical to SEQ ID NO: 28835
  peptide (1)..(531): Ceres Seq. ID no. 13499751

SEQ ID NO: 32426 - DNA, 1377 bp, Arabidopsis thaliana; identical to SEQ ID NO: 28836
  misc_feature (1)..(1377): Ceres Seq. ID no. 13487616
  misc_feature (1)..(1377): Ortholog of  Ceres SEQ ID NO 13595464 as cited in SEQ ID NO 59792
  misc_feature (1)..(1377): Ortholog of  Ceres SEQ ID NO 14316416 as cited in SEQ ID NO 60078

SEQ ID NO: 32427 - protein, 303 aa, Arabidopsis thaliana; identical to SEQ ID NO: 28837
  peptide (1)..(303): Ceres Seq. ID no. 13487617

SEQ ID NO: 32428 - protein, 302 aa, Arabidopsis thaliana; identical to SEQ ID NO: 28838
  peptide (1)..(302): Ceres Seq. ID no. 13487618

SEQ ID NO: 32429 - protein, 300 aa, Arabidopsis thaliana; identical to SEQ ID NO: 28839
  peptide (1)..(300): Ceres Seq. ID no. 13487619

SEQ ID NO: 32430 - DNA, 1159 bp, Arabidopsis thaliana; identical to SEQ ID NO: 28840
  misc_feature (1)..(1159): Ceres Seq. ID no. 12335058
  misc_feature (1)..(1159): Ortholog of  Ceres SEQ ID NO 12610958 as cited in SEQ ID NO 55963
  misc_feature (1)..(1159): Ortholog of  Ceres SEQ ID NO 14309410 as cited in SEQ ID NO 0

SEQ ID NO: 32431 - protein, 227 aa, Arabidopsis thaliana; identical to SEQ ID NO: 28841
  peptide (1)..(227): Ceres Seq. ID no. 12335059

SEQ ID NO: 32432 - protein, 211 aa, Arabidopsis thaliana; identical to SEQ ID NO: 28842
  peptide (1)..(211): Ceres Seq. ID no. 12335060

SEQ ID NO: 32433 - protein, 126 aa, Arabidopsis thaliana; identical to SEQ ID NO: 28843
  peptide (1)..(126): Ceres Seq. ID no. 12335061

SEQ ID NO: 32434 - DNA, 1387 bp, Arabidopsis thaliana; identical to SEQ ID NO: 28844
  misc_feature (1)..(1387): Ceres Seq. ID no. 12439771
  misc_feature (1)..(1387): Ortholog of  Ceres SEQ ID NO 14314567 as cited in SEQ ID NO 52335
  misc_feature (1)..(1387): Ortholog of  Ceres SEQ ID NO 13595437 as cited in SEQ ID NO 56562
  misc_feature (1)..(1387): Ortholog of  Ceres SEQ ID NO 14315985 as cited in SEQ ID NO 57720

SEQ ID NO: 32435 - protein, 334 aa, Arabidopsis thaliana; identical to SEQ ID NO: 28845
  peptide (1)..(334): Ceres Seq. ID no. 12439772

SEQ ID NO: 32436 - protein, 304 aa, Arabidopsis thaliana; identical to SEQ ID NO: 28846
  peptide (1)..(304): Ceres Seq. ID no. 12439773

SEQ ID NO: 32437 - protein, 272 aa, Arabidopsis thaliana; identical to SEQ ID NO: 28847
  peptide (1)..(272): Ceres Seq. ID no. 12439774

SEQ ID NO: 32438 - DNA, 1455 bp, Arabidopsis thaliana; identical to SEQ ID NO: 28848
  misc_feature (1)..(1455): Ceres Seq. ID no. 13490626
  misc_feature (1)..(1455): Ortholog of  Ceres SEQ ID NO 14302314 as cited in SEQ ID NO 62543
  misc_feature (1)..(1455): Ortholog of  Ceres SEQ ID NO 13598391 as cited in SEQ ID NO 62769

SEQ ID NO: 32439 - protein, 293 aa, Arabidopsis thaliana; identical to SEQ ID NO: 28849
  peptide (1)..(293): Ceres Seq. ID no. 13490627

SEQ ID NO: 32440 - protein, 286 aa, Arabidopsis thaliana; identical to SEQ ID NO: 28850
  peptide (1)..(286): Ceres Seq. ID no. 13490628

SEQ ID NO: 32441 - protein, 285 aa, Arabidopsis thaliana; identical to SEQ ID NO: 28851
  peptide (1)..(285): Ceres Seq. ID no. 13490629

SEQ ID NO: 32442 - DNA, 803 bp, Arabidopsis thaliana; identical to SEQ ID NO: 28852
  misc_feature (1)..(803): Ceres Seq. ID no. 13489786
  misc_feature (1)..(803): Ortholog of  Ceres SEQ ID NO 12624558 as cited in SEQ ID NO 61726
  misc_feature (1)..(803): Ortholog of  Ceres SEQ ID NO 12635763 as cited in SEQ ID NO 0

SEQ ID NO: 32443 - protein, 174 aa, Arabidopsis thaliana; identical to SEQ ID NO: 28853
  peptide (1)..(174): Ceres Seq. ID no. 13489787

SEQ ID NO: 32444 - protein, 163 aa, Arabidopsis thaliana; identical to SEQ ID NO: 28854
  peptide (1)..(163): Ceres Seq. ID no. 13489788

SEQ ID NO: 32445 - protein, 152 aa, Arabidopsis thaliana; identical to SEQ ID NO: 28855
  peptide (1)..(152): Ceres Seq. ID no. 13489789

SEQ ID NO: 32446 - DNA, 773 bp, Arabidopsis thaliana; identical to SEQ ID NO: 28856
  misc_feature (1)..(773): Ceres Seq. ID no. 13646075
  misc_feature (1)..(773): Ortholog of  Ceres SEQ ID NO 13598935 as cited in SEQ ID NO 1239
  misc_feature (1)..(773): Ortholog of  Ceres SEQ ID NO 14316515 as cited in SEQ ID NO 57228
  misc_feature (1)..(773): Ortholog of  Ceres SEQ ID NO 13598171 as cited in SEQ ID NO 61357
  misc_feature (1)..(773): Ortholog of  Ceres SEQ ID NO 13664149 as cited in SEQ ID NO 61490

SEQ ID NO: 32447 - protein, 186 aa, Arabidopsis thaliana; identical to SEQ ID NO: 28857
  peptide (1)..(186): Ceres Seq. ID no. 13646076

SEQ ID NO: 32448 - protein, 108 aa, Arabidopsis thaliana; identical to SEQ ID NO: 28858
  peptide (1)..(108): Ceres Seq. ID no. 13646077

SEQ ID NO: 32449 - DNA, 2068 bp, Arabidopsis thaliana; identical to SEQ ID NO: 28859
  misc_feature (1)..(2068): Ceres Seq. ID no. 12397174
  misc_feature (1)..(2068): Ortholog of  Ceres SEQ ID NO 15168366 as cited in SEQ ID NO 60199

SEQ ID NO: 32450 - protein, 603 aa, Arabidopsis thaliana; identical to SEQ ID NO: 28860
  peptide (1)..(603): Ceres Seq. ID no. 12397175

SEQ ID NO: 32451 - protein, 602 aa, Arabidopsis thaliana; identical to SEQ ID NO: 28861
  peptide (1)..(602): Ceres Seq. ID no. 12397176

SEQ ID NO: 32452 - protein, 552 aa, Arabidopsis thaliana; identical to SEQ ID NO: 28862
  peptide (1)..(552): Ceres Seq. ID no. 12397177

SEQ ID NO: 32453 - DNA, 845 bp, Arabidopsis thaliana; identical to SEQ ID NO: 28863
  misc_feature (1)..(845): Ceres Seq. ID no. 12332612
  misc_feature (1)..(845): Ortholog of  Ceres SEQ ID NO 15174142 as cited in SEQ ID NO 64367

SEQ ID NO: 32454 - protein, 206 aa, Arabidopsis thaliana [sequence omitted]

SEQ ID NO: 32455 - protein, 141 aa, Arabidopsis thaliana; identical to SEQ ID NO: 25776
  peptide (1)..(141): Ceres Seq. ID no. 12332614

SEQ ID NO: 32456 - DNA, 1480 bp, Arabidopsis thaliana; identical to SEQ ID NO: 28866
  misc_feature (1)..(1480): Ceres Seq. ID no. 12385338
  misc_feature (1)..(1480): Ortholog of  Ceres SEQ ID NO 14313264 as cited in SEQ ID NO 67300
  misc_feature (1)..(1480): Ortholog of  Ceres SEQ ID NO 14302824 as cited in SEQ ID NO 67794

SEQ ID NO: 32457 - protein, 397 aa, Arabidopsis thaliana; identical to SEQ ID NO: 28867
  peptide (1)..(397): Ceres Seq. ID no. 12385339

SEQ ID NO: 32458 - protein, 367 aa, Arabidopsis thaliana; identical to SEQ ID NO: 28868
  peptide (1)..(367): Ceres Seq. ID no. 12385340

SEQ ID NO: 32459 - protein, 339 aa, Arabidopsis thaliana; identical to SEQ ID NO: 28869
  peptide (1)..(339): Ceres Seq. ID no. 12385341

SEQ ID NO: 32460 - DNA, 1454 bp, Arabidopsis thaliana; identical to SEQ ID NO: 28870
  misc_feature (1)..(1454): Ceres Seq. ID no. 12393086
  misc_feature (1)..(1454): Ortholog of  Ceres SEQ ID NO 14315418 as cited in SEQ ID NO 57506

SEQ ID NO: 32461 - protein, 411 aa, Arabidopsis thaliana; identical to SEQ ID NO: 28871
  peptide (1)..(411): Ceres Seq. ID no. 12393087

SEQ ID NO: 32462 - protein, 392 aa, Arabidopsis thaliana; identical to SEQ ID NO: 28872
  peptide (1)..(392): Ceres Seq. ID no. 12393088

SEQ ID NO: 32463 - protein, 316 aa, Arabidopsis thaliana; identical to SEQ ID NO: 28873
  peptide (1)..(316): Ceres Seq. ID no. 12393089

SEQ ID NO: 32464 - DNA, 1411 bp, Arabidopsis thaliana; identical to SEQ ID NO: 28874
  misc_feature (1)..(1411): Ceres Seq. ID no. 12321215
  misc_feature (1)..(1411): Ortholog of  Ceres SEQ ID NO 15177298 as cited in SEQ ID NO 52711

SEQ ID NO: 32465 - protein, 383 aa, Arabidopsis thaliana; identical to SEQ ID NO: 28875
  peptide (1)..(383): Ceres Seq. ID no. 12321216

SEQ ID NO: 32466 - protein, 377 aa, Arabidopsis thaliana; identical to SEQ ID NO: 28876
  peptide (1)..(377): Ceres Seq. ID no. 12321217

SEQ ID NO: 32467 - protein, 204 aa, Arabidopsis thaliana; identical to SEQ ID NO: 28877
  peptide (1)..(204): Ceres Seq. ID no. 12321218

SEQ ID NO: 32468 - DNA, 2073 bp, Arabidopsis thaliana; identical to SEQ ID NO: 28878
  misc_feature (1)..(2073): Ceres Seq. ID no. 13487538
  misc_feature (1)..(2073): Ortholog of  Ceres SEQ ID NO 13596244 as cited in SEQ ID NO 69307

SEQ ID NO: 32469 - protein, 386 aa, Arabidopsis thaliana; identical to SEQ ID NO: 28879
  peptide (1)..(386): Ceres Seq. ID no. 13487539

SEQ ID NO: 32470 - protein, 297 aa, Arabidopsis thaliana; identical to SEQ ID NO: 28880
  peptide (1)..(297): Ceres Seq. ID no. 13487540

SEQ ID NO: 32471 - protein, 294 aa, Arabidopsis thaliana; identical to SEQ ID NO: 28881
  peptide (1)..(294): Ceres Seq. ID no. 13487541

SEQ ID NO: 32472 - DNA, 1140 bp, Arabidopsis thaliana; identical to SEQ ID NO: 28882
  misc_feature (1)..(1140): Ceres Seq. ID no. 12321188
  misc_feature (1)..(1140): Ortholog of  Ceres SEQ ID NO 14305357 as cited in SEQ ID NO 60046
  misc_feature (1)..(1140): Ortholog of  Ceres SEQ ID NO 14313511 as cited in SEQ ID NO 64459
  misc_feature (1)..(1140): Ortholog of  Ceres SEQ ID NO 14303006 as cited in SEQ ID NO 67498
  misc_feature (1)..(1140): Ortholog of  Ceres SEQ ID NO 13599627 as cited in SEQ ID NO 0
  misc_feature (1)..(1140): Ortholog of  Ceres SEQ ID NO 14305069 as cited in SEQ ID NO 0

SEQ ID NO: 32473 - protein, 236 aa, Arabidopsis thaliana; identical to SEQ ID NO: 28883
  peptide (1)..(236): Ceres Seq. ID no. 12321189

SEQ ID NO: 32474 - protein, 220 aa, Arabidopsis thaliana; identical to SEQ ID NO: 28884
  peptide (1)..(220): Ceres Seq. ID no. 12321190

SEQ ID NO: 32475 - DNA, 1136 bp, Arabidopsis thaliana; identical to SEQ ID NO: 28885
  misc_feature (1)..(1136): Ceres Seq. ID no. 12337739
  misc_feature (1)..(1136): Ortholog of  Ceres SEQ ID NO 14310687 as cited in SEQ ID NO 52933

SEQ ID NO: 32476 - protein, 288 aa, Arabidopsis thaliana; identical to SEQ ID NO: 28886
  peptide (1)..(288): Ceres Seq. ID no. 12337740

SEQ ID NO: 32477 - protein, 263 aa, Arabidopsis thaliana; identical to SEQ ID NO: 28887
  peptide (1)..(263): Ceres Seq. ID no. 12337741

SEQ ID NO: 32478 - DNA, 4277 bp, Arabidopsis thaliana; identical to SEQ ID NO: 28888
  misc_feature (1)..(4277): Ceres Seq. ID no. 13491805
  misc_feature (1)..(4277): Ortholog of  Ceres SEQ ID NO 15179695 as cited in SEQ ID NO 193

SEQ ID NO: 32479 - protein, 1286 aa, Arabidopsis thaliana; identical to SEQ ID NO: 28889
  peptide (1)..(1286): Ceres Seq. ID no. 13491806

SEQ ID NO: 32480 - protein, 1243 aa, Arabidopsis thaliana; identical to SEQ ID NO: 28890
  peptide (1)..(1243): Ceres Seq. ID no. 13491807

SEQ ID NO: 32481 - protein, 1205 aa, Arabidopsis thaliana; identical to SEQ ID NO: 28891
  peptide (1)..(1205): Ceres Seq. ID no. 13491808

SEQ ID NO: 32482 - DNA, 1657 bp, Arabidopsis thaliana; identical to SEQ ID NO: 28892
  misc_feature (1)..(1657): Ceres Seq. ID no. 12339523
  misc_feature (1)..(1657): Ortholog of  Ceres SEQ ID NO 14311857 as cited in SEQ ID NO 51473
  misc_feature (1)..(1657): Ortholog of  Ceres SEQ ID NO 14303094 as cited in SEQ ID NO 66388

SEQ ID NO: 32483 - protein, 318 aa, Arabidopsis thaliana; identical to SEQ ID NO: 28893
  peptide (1)..(318): Ceres Seq. ID no. 12339524

SEQ ID NO: 32484 - DNA, 883 bp, Arabidopsis thaliana; identical to SEQ ID NO: 28894
  misc_feature (1)..(883): Ceres Seq. ID no. 13490436
  misc_feature (1)..(883): Ortholog of  Ceres SEQ ID NO 14304110 as cited in SEQ ID NO 56394

SEQ ID NO: 32485 - protein, 141 aa, Arabidopsis thaliana; identical to SEQ ID NO: 28895
  peptide (1)..(141): Ceres Seq. ID no. 13490437

SEQ ID NO: 32486 - protein, 102 aa, Arabidopsis thaliana; identical to SEQ ID NO: 28896
  peptide (1)..(102): Ceres Seq. ID no. 13490438

SEQ ID NO: 32487 - protein, 87 aa, Arabidopsis thaliana; identical to SEQ ID NO: 28897
  peptide (1)..(87): Ceres Seq. ID no. 13490439

SEQ ID NO: 32488 - DNA, 1559 bp, Arabidopsis thaliana; identical to SEQ ID NO: 28898
  misc_feature (1)..(1559): Ceres Seq. ID no. 13487605
  misc_feature (1)..(1559): Ortholog of  Ceres SEQ ID NO 15176437 as cited in SEQ ID NO 54861
  misc_feature (1)..(1559): Ortholog of  Ceres SEQ ID NO 15176748 as cited in SEQ ID NO 55581

SEQ ID NO: 32489 - protein, 385 aa, Arabidopsis thaliana; identical to SEQ ID NO: 28899
  peptide (1)..(385): Ceres Seq. ID no. 13487606

SEQ ID NO: 32490 - protein, 288 aa, Arabidopsis thaliana; identical to SEQ ID NO: 28900
  peptide (1)..(288): Ceres Seq. ID no. 13487607

SEQ ID NO: 32491 - protein, 241 aa, Arabidopsis thaliana; identical to SEQ ID NO: 28901
  peptide (1)..(241): Ceres Seq. ID no. 13487608

SEQ ID NO: 32492 - DNA, 876 bp, Arabidopsis thaliana; identical to SEQ ID NO: 28902
  misc_feature (1)..(876): Ceres Seq. ID no. 12372150
  misc_feature (1)..(876): Ortholog of  Ceres SEQ ID NO 13599586 as cited in SEQ ID NO 0

SEQ ID NO: 32493 - protein, 193 aa, Arabidopsis thaliana; identical to SEQ ID NO: 28903
  peptide (1)..(193): Ceres Seq. ID no. 12372151

SEQ ID NO: 32494 - protein, 183 aa, Arabidopsis thaliana; identical to SEQ ID NO: 28904
  peptide (1)..(183): Ceres Seq. ID no. 12372152

SEQ ID NO: 32495 - protein, 102 aa, Arabidopsis thaliana; identical to SEQ ID NO: 28905
  peptide (1)..(102): Ceres Seq. ID no. 12372153

SEQ ID NO: 32496 - DNA, 1171 bp, Arabidopsis thaliana; identical to SEQ ID NO: 28906
  misc_feature (1)..(1171): Ceres Seq. ID no. 12397135
  misc_feature (1)..(1171): Ortholog of  Ceres SEQ ID NO 13654583 as cited in SEQ ID NO 68599

SEQ ID NO: 32497 - protein, 349 aa, Arabidopsis thaliana; identical to SEQ ID NO: 28907
  peptide (1)..(349): Ceres Seq. ID no. 12397136

SEQ ID NO: 32498 - protein, 339 aa, Arabidopsis thaliana; identical to SEQ ID NO: 28908
  peptide (1)..(339): Ceres Seq. ID no. 12397137

SEQ ID NO: 32499 - protein, 337 aa, Arabidopsis thaliana; identical to SEQ ID NO: 28909
  peptide (1)..(337): Ceres Seq. ID no. 12397138

SEQ ID NO: 32500 - DNA, 1982 bp, Arabidopsis thaliana; identical to SEQ ID NO: 28910
  misc_feature (1)..(1982): Ceres Seq. ID no. 13494341
  misc_feature (1)..(1982): Ortholog of  Ceres SEQ ID NO 14315146 as cited in SEQ ID NO 52929
  misc_feature (1)..(1982): Ortholog of  Ceres SEQ ID NO 13584538 as cited in SEQ ID NO 64739
  misc_feature (1)..(1982): Ortholog of  Ceres SEQ ID NO 15169643 as cited in SEQ ID NO 64826
  misc_feature (1)..(1982): Ortholog of  Ceres SEQ ID NO 15169647 as cited in SEQ ID NO 64930

SEQ ID NO: 32501 - protein, 527 aa, Arabidopsis thaliana; identical to SEQ ID NO: 28911
  peptide (1)..(527): Ceres Seq. ID no. 13494342

SEQ ID NO: 32502 - protein, 514 aa, Arabidopsis thaliana; identical to SEQ ID NO: 28912
  peptide (1)..(514): Ceres Seq. ID no. 13494343

SEQ ID NO: 32503 - protein, 474 aa, Arabidopsis thaliana; identical to SEQ ID NO: 28913
  peptide (1)..(474): Ceres Seq. ID no. 13494344

SEQ ID NO: 32504 - DNA, 1106 bp, Arabidopsis thaliana; identical to SEQ ID NO: 28914
  misc_feature (1)..(1106): Ceres Seq. ID no. 12396876
  misc_feature (1)..(1106): Ortholog of  Ceres SEQ ID NO 13581092 as cited in SEQ ID NO 54771
  misc_feature (1)..(1106): Ortholog of  Ceres SEQ ID NO 13594298 as cited in SEQ ID NO 57803
  misc_feature (1)..(1106): Ortholog of  Ceres SEQ ID NO 13503476 as cited in SEQ ID NO 61978
  misc_feature (1)..(1106): Ortholog of  Ceres SEQ ID NO 12578438 as cited in SEQ ID NO 62201
  misc_feature (1)..(1106): Ortholog of  Ceres SEQ ID NO 12617675 as cited in SEQ ID NO 64656

SEQ ID NO: 32505 - protein, 292 aa, Arabidopsis thaliana; identical to SEQ ID NO: 28915
  peptide (1)..(292): Ceres Seq. ID no. 12396877

SEQ ID NO: 32506 - protein, 269 aa, Arabidopsis thaliana; identical to SEQ ID NO: 28916
  peptide (1)..(269): Ceres Seq. ID no. 12396878

SEQ ID NO: 32507 - protein, 242 aa, Arabidopsis thaliana; identical to SEQ ID NO: 28917
  peptide (1)..(242): Ceres Seq. ID no. 12396879

SEQ ID NO: 32508 - DNA, 643 bp, Arabidopsis thaliana; identical to SEQ ID NO: 24196
  misc_feature (1)..(643): Ceres Seq. ID no. 13645876
  misc_feature (1)..(643): Ortholog of  Ceres SEQ ID NO 13584968 as cited in SEQ ID NO 64327

SEQ ID NO: 32509 - protein, 144 aa, Arabidopsis thaliana; identical to SEQ ID NO: 24197
  peptide (1)..(144): Ceres Seq. ID no. 13645877

SEQ ID NO: 32510 - protein, 119 aa, Arabidopsis thaliana; identical to SEQ ID NO: 24198
  peptide (1)..(119): Ceres Seq. ID no. 13645878

SEQ ID NO: 32511 - protein, 74 aa, Arabidopsis thaliana; identical to SEQ ID NO: 24199
  peptide (1)..(74): Ceres Seq. ID no. 13645879

SEQ ID NO: 32512 - DNA, 997 bp, Arabidopsis thaliana; identical to SEQ ID NO: 28922
  misc_feature (1)..(997): Ceres Seq. ID no. 13488106
  misc_feature (1)..(997): Ortholog of  Ceres SEQ ID NO 14307245 as cited in SEQ ID NO 54025

SEQ ID NO: 32513 - protein, 291 aa, Arabidopsis thaliana; identical to SEQ ID NO: 28923
  peptide (1)..(291): Ceres Seq. ID no. 13488107

SEQ ID NO: 32514 - protein, 286 aa, Arabidopsis thaliana; identical to SEQ ID NO: 28924
  peptide (1)..(286): Ceres Seq. ID no. 13488108

SEQ ID NO: 32515 - protein, 247 aa, Arabidopsis thaliana; identical to SEQ ID NO: 28925
  peptide (1)..(247): Ceres Seq. ID no. 13488109

SEQ ID NO: 32516 - DNA, 1486 bp, Arabidopsis thaliana; identical to SEQ ID NO: 28926
  misc_feature (1)..(1486): Ceres Seq. ID no. 13499724
  misc_feature (1)..(1486): Ortholog of  Ceres SEQ ID NO 15177676 as cited in SEQ ID NO 52631
  misc_feature (1)..(1486): Ortholog of  Ceres SEQ ID NO 14314212 as cited in SEQ ID NO 57401
  misc_feature (1)..(1486): Ortholog of  Ceres SEQ ID NO 13596376 as cited in SEQ ID NO 68056

SEQ ID NO: 32517 - protein, 433 aa, Arabidopsis thaliana; identical to SEQ ID NO: 28927
  peptide (1)..(433): Ceres Seq. ID no. 13499725

SEQ ID NO: 32518 - protein, 258 aa, Arabidopsis thaliana; identical to SEQ ID NO: 28928
  peptide (1)..(258): Ceres Seq. ID no. 13499726

SEQ ID NO: 32519 - protein, 255 aa, Arabidopsis thaliana; identical to SEQ ID NO: 28929
  peptide (1)..(255): Ceres Seq. ID no. 13499727

SEQ ID NO: 32520 - DNA, 1084 bp, Arabidopsis thaliana; identical to SEQ ID NO: 28930
  misc_feature (1)..(1084): Ceres Seq. ID no. 13490650
  misc_feature (1)..(1084): Ortholog of  Ceres SEQ ID NO 12557432 as cited in SEQ ID NO 92
  misc_feature (1)..(1084): Ortholog of  Ceres SEQ ID NO 14305097 as cited in SEQ ID NO 0

SEQ ID NO: 32521 - protein, 278 aa, Arabidopsis thaliana; identical to SEQ ID NO: 28931
  peptide (1)..(278): Ceres Seq. ID no. 15219202

SEQ ID NO: 32522 - protein, 253 aa, Arabidopsis thaliana; identical to SEQ ID NO: 28932
  peptide (1)..(253): Ceres Seq. ID no. 15219203

SEQ ID NO: 32523 - protein, 191 aa, Arabidopsis thaliana; identical to SEQ ID NO: 28933
  peptide (1)..(191): Ceres Seq. ID no. 15219204

SEQ ID NO: 32524 - DNA, 570 bp, Arabidopsis thaliana; identical to SEQ ID NO: 28934
  misc_feature (1)..(570): Ceres Seq. ID no. 12359958
  misc_feature (1)..(570): Ortholog of  Ceres SEQ ID NO 14304353 as cited in SEQ ID NO 20380

SEQ ID NO: 32525 - protein, 127 aa, Arabidopsis thaliana; identical to SEQ ID NO: 28935
  peptide (1)..(127): Ceres Seq. ID no. 12359959

SEQ ID NO: 32526 - protein, 99 aa, Arabidopsis thaliana; identical to SEQ ID NO: 28936
  peptide (1)..(99): Ceres Seq. ID no. 12359960

SEQ ID NO: 32527 - protein, 70 aa, Arabidopsis thaliana; identical to SEQ ID NO: 28937
  peptide (1)..(70): Ceres Seq. ID no. 12359961

SEQ ID NO: 32528 - DNA, 1160 bp, Arabidopsis thaliana; identical to SEQ ID NO: 28938
  misc_feature (1)..(1160): Ceres Seq. ID no. 13490472
  misc_feature (1)..(1160): Ortholog of  Ceres SEQ ID NO 15171450 as cited in SEQ ID NO 51602

SEQ ID NO: 32529 - protein, 264 aa, Arabidopsis thaliana; identical to SEQ ID NO: 28939
  peptide (1)..(264): Ceres Seq. ID no. 13490473

SEQ ID NO: 32530 - protein, 253 aa, Arabidopsis thaliana; identical to SEQ ID NO: 28940
  peptide (1)..(253): Ceres Seq. ID no. 13490474

SEQ ID NO: 32531 - DNA, 2064 bp, Arabidopsis thaliana; identical to SEQ ID NO: 28941
  misc_feature (1)..(2064): Ceres Seq. ID no. 13490559
  misc_feature (1)..(2064): Ortholog of  Ceres SEQ ID NO 13662301 as cited in SEQ ID NO 68114

SEQ ID NO: 32532 - protein, 364 aa, Arabidopsis thaliana; identical to SEQ ID NO: 28942
  peptide (1)..(364): Ceres Seq. ID no. 13490560

SEQ ID NO: 32533 - protein, 318 aa, Arabidopsis thaliana; identical to SEQ ID NO: 28943
  peptide (1)..(318): Ceres Seq. ID no. 13490561

SEQ ID NO: 32534 - protein, 263 aa, Arabidopsis thaliana; identical to SEQ ID NO: 28944
  peptide (1)..(263): Ceres Seq. ID no. 13490562

SEQ ID NO: 32535 - DNA, 1337 bp, Arabidopsis thaliana; identical to SEQ ID NO: 28945
  misc_feature (1)..(1337): Ceres Seq. ID no. 12325072
  misc_feature (1)..(1337): Ortholog of  Ceres SEQ ID NO 13590233 as cited in SEQ ID NO 64652

SEQ ID NO: 32536 - protein, 275 aa, Arabidopsis thaliana; identical to SEQ ID NO: 28946
  peptide (1)..(275): Ceres Seq. ID no. 12325073

SEQ ID NO: 32537 - protein, 230 aa, Arabidopsis thaliana; identical to SEQ ID NO: 28947
  peptide (1)..(230): Ceres Seq. ID no. 12325074

SEQ ID NO: 32538 - DNA, 1088 bp, Arabidopsis thaliana; identical to SEQ ID NO: 28948
  misc_feature (1)..(1088): Ceres Seq. ID no. 13490620
  misc_feature (1)..(1088): Ortholog of  Ceres SEQ ID NO 14314442 as cited in SEQ ID NO 52358
  misc_feature (1)..(1088): Ortholog of  Ceres SEQ ID NO 12610442 as cited in SEQ ID NO 56281
  misc_feature (1)..(1088): Ortholog of  Ceres SEQ ID NO 12610713 as cited in SEQ ID NO 56591
  misc_feature (1)..(1088): Ortholog of  Ceres SEQ ID NO 12587345 as cited in SEQ ID NO 62844
  misc_feature (1)..(1088): Ortholog of  Ceres SEQ ID NO 13597357 as cited in SEQ ID NO 68961
  misc_feature (1)..(1088): Ortholog of  Ceres SEQ ID NO 13587656 as cited in SEQ ID NO 0
  misc_feature (1)..(1088): Ortholog of  Ceres SEQ ID NO 14309353 as cited in SEQ ID NO 0
  misc_feature (1)..(1088): Ortholog of  Ceres SEQ ID NO 15177686 as cited in SEQ ID NO 0

SEQ ID NO: 32539 - protein, 277 aa, Arabidopsis thaliana; identical to SEQ ID NO: 28949
  peptide (1)..(277): Ceres Seq. ID no. 13490621

SEQ ID NO: 32540 - protein, 251 aa, Arabidopsis thaliana; identical to SEQ ID NO: 28950
  peptide (1)..(251): Ceres Seq. ID no. 13490622

SEQ ID NO: 32541 - DNA, 944 bp, Arabidopsis thaliana; identical to SEQ ID NO: 28951
  misc_feature (1)..(944): Ceres Seq. ID no. 12334417
  misc_feature (1)..(944): Ortholog of  Ceres SEQ ID NO 14305357 as cited in SEQ ID NO 60046
  misc_feature (1)..(944): Ortholog of  Ceres SEQ ID NO 14313511 as cited in SEQ ID NO 64459
  misc_feature (1)..(944): Ortholog of  Ceres SEQ ID NO 14303006 as cited in SEQ ID NO 67498
  misc_feature (1)..(944): Ortholog of  Ceres SEQ ID NO 13599627 as cited in SEQ ID NO 0
  misc_feature (1)..(944): Ortholog of  Ceres SEQ ID NO 14305069 as cited in SEQ ID NO 0

SEQ ID NO: 32542 - protein, 236 aa, Arabidopsis thaliana; identical to SEQ ID NO: 28883
  peptide (1)..(236): Ceres Seq. ID no. 12334418

SEQ ID NO: 32543 - protein, 220 aa, Arabidopsis thaliana; identical to SEQ ID NO: 28884
  peptide (1)..(220): Ceres Seq. ID no. 12334419

SEQ ID NO: 32544 - DNA, 1212 bp, Arabidopsis thaliana; identical to SEQ ID NO: 28954
  misc_feature (1)..(1212): Ceres Seq. ID no. 12422769
  misc_feature (1)..(1212): Ortholog of  Ceres SEQ ID NO 15178596 as cited in SEQ ID NO 53922
  misc_feature (1)..(1212): Ortholog of  Ceres SEQ ID NO 12780542 as cited in SEQ ID NO 65674

SEQ ID NO: 32545 - protein, 271 aa, Arabidopsis thaliana; identical to SEQ ID NO: 28955
  peptide (1)..(271): Ceres Seq. ID no. 12422770

SEQ ID NO: 32546 - protein, 239 aa, Arabidopsis thaliana; identical to SEQ ID NO: 28956
  peptide (1)..(239): Ceres Seq. ID no. 12422771

SEQ ID NO: 32547 - protein, 221 aa, Arabidopsis thaliana; identical to SEQ ID NO: 28957
  peptide (1)..(221): Ceres Seq. ID no. 12422772

SEQ ID NO: 32548 - DNA, 1363 bp, Arabidopsis thaliana; identical to SEQ ID NO: 28958
  misc_feature (1)..(1363): Ceres Seq. ID no. 13486775
  misc_feature (1)..(1363): Ortholog of  Ceres SEQ ID NO 12636774 as cited in SEQ ID NO 372
  misc_feature (1)..(1363): Ortholog of  Ceres SEQ ID NO 12578315 as cited in SEQ ID NO 62451
  misc_feature (1)..(1363): Ortholog of  Ceres SEQ ID NO 12615466 as cited in SEQ ID NO 62761
  misc_feature (1)..(1363): Ortholog of  Ceres SEQ ID NO 13597295 as cited in SEQ ID NO 63743
  misc_feature (1)..(1363): Ortholog of  Ceres SEQ ID NO 12617090 as cited in SEQ ID NO 64005
  misc_feature (1)..(1363): Ortholog of  Ceres SEQ ID NO 13597439 as cited in SEQ ID NO 64081
  misc_feature (1)..(1363): Ortholog of  Ceres SEQ ID NO 13597233 as cited in SEQ ID NO 64370
  misc_feature (1)..(1363): Ortholog of  Ceres SEQ ID NO 13584577 as cited in SEQ ID NO 65298
  misc_feature (1)..(1363): Ortholog of  Ceres SEQ ID NO 13598327 as cited in SEQ ID NO 68040

SEQ ID NO: 32549 - protein, 362 aa, Arabidopsis thaliana; identical to SEQ ID NO: 28959
  peptide (1)..(362): Ceres Seq. ID no. 13486776

SEQ ID NO: 32550 - protein, 325 aa, Arabidopsis thaliana; identical to SEQ ID NO: 28960
  peptide (1)..(325): Ceres Seq. ID no. 13486777

SEQ ID NO: 32551 - DNA, 747 bp, Arabidopsis thaliana; identical to SEQ ID NO: 28961
  misc_feature (1)..(747): Ceres Seq. ID no. 12738788
  misc_feature (1)..(747): Ortholog of  Ceres SEQ ID NO 12584790 as cited in SEQ ID NO 62648

SEQ ID NO: 32552 - protein, 148 aa, Arabidopsis thaliana; identical to SEQ ID NO: 28390
  peptide (1)..(148): Ceres Seq. ID no. 12738789

SEQ ID NO: 32553 - protein, 119 aa, Arabidopsis thaliana; identical to SEQ ID NO: 28391
  peptide (1)..(119): Ceres Seq. ID no. 12738790

SEQ ID NO: 32554 - protein, 114 aa, Arabidopsis thaliana; identical to SEQ ID NO: 28964
  peptide (1)..(114): Ceres Seq. ID no. 12738791

SEQ ID NO: 32555 - DNA, 1653 bp, Arabidopsis thaliana; identical to SEQ ID NO: 28965
  misc_feature (1)..(1653): Ceres Seq. ID no. 12422791
  misc_feature (1)..(1653): Ortholog of  Ceres SEQ ID NO 15227226 as cited in SEQ ID NO 54691
  misc_feature (1)..(1653): Ortholog of  Ceres SEQ ID NO 14303169 as cited in SEQ ID NO 65741

SEQ ID NO: 32556 - protein, 469 aa, Arabidopsis thaliana; identical to SEQ ID NO: 28966
  peptide (1)..(469): Ceres Seq. ID no. 12422792

SEQ ID NO: 32557 - protein, 444 aa, Arabidopsis thaliana; identical to SEQ ID NO: 28967
  peptide (1)..(444): Ceres Seq. ID no. 12422793

SEQ ID NO: 32558 - protein, 352 aa, Arabidopsis thaliana; identical to SEQ ID NO: 15479
  peptide (1)..(352): Ceres Seq. ID no. 12422794

SEQ ID NO: 32559 - DNA, 4277 bp, Arabidopsis thaliana; identical to SEQ ID NO: 28888
  misc_feature (1)..(4277): Ceres Seq. ID no. 13491805
  misc_feature (1)..(4277): Ortholog of  Ceres SEQ ID NO 15179695 as cited in SEQ ID NO 193

SEQ ID NO: 32560 - protein, 1286 aa, Arabidopsis thaliana; identical to SEQ ID NO: 28889
  peptide (1)..(1286): Ceres Seq. ID no. 13491806

SEQ ID NO: 32561 - protein, 1243 aa, Arabidopsis thaliana; identical to SEQ ID NO: 28890
  peptide (1)..(1243): Ceres Seq. ID no. 13491807

SEQ ID NO: 32562 - protein, 1205 aa, Arabidopsis thaliana; identical to SEQ ID NO: 28891
  peptide (1)..(1205): Ceres Seq. ID no. 13491808

SEQ ID NO: 32563 - DNA, 1416 bp, Arabidopsis thaliana; identical to SEQ ID NO: 28973
  misc_feature (1)..(1416): Ceres Seq. ID no. 12322287
  misc_feature (1)..(1416): Ortholog of  Ceres SEQ ID NO 13657915 as cited in SEQ ID NO 66051

SEQ ID NO: 32564 - protein, 431 aa, Arabidopsis thaliana; identical to SEQ ID NO: 28974
  peptide (1)..(431): Ceres Seq. ID no. 12322288

SEQ ID NO: 32565 - protein, 426 aa, Arabidopsis thaliana; identical to SEQ ID NO: 28975
  peptide (1)..(426): Ceres Seq. ID no. 12322289

SEQ ID NO: 32566 - protein, 386 aa, Arabidopsis thaliana; identical to SEQ ID NO: 28976
  peptide (1)..(386): Ceres Seq. ID no. 12322290

SEQ ID NO: 32567 - DNA, 1199 bp, Arabidopsis thaliana; identical to SEQ ID NO: 28977
  misc_feature (1)..(1199): Ceres Seq. ID no. 12396266
  misc_feature (1)..(1199): Ortholog of  Ceres SEQ ID NO 13598539 as cited in SEQ ID NO 65041

SEQ ID NO: 32568 - protein, 302 aa, Arabidopsis thaliana; identical to SEQ ID NO: 28978
  peptide (1)..(302): Ceres Seq. ID no. 12396267

SEQ ID NO: 32569 - protein, 288 aa, Arabidopsis thaliana; identical to SEQ ID NO: 28979
  peptide (1)..(288): Ceres Seq. ID no. 12396268

SEQ ID NO: 32570 - protein, 248 aa, Arabidopsis thaliana; identical to SEQ ID NO: 28980
  peptide (1)..(248): Ceres Seq. ID no. 12396269

SEQ ID NO: 32571 - DNA, 1322 bp, Arabidopsis thaliana; identical to SEQ ID NO: 28981
  misc_feature (1)..(1322): Ceres Seq. ID no. 12324249
  misc_feature (1)..(1322): Ortholog of  Ceres SEQ ID NO 14302314 as cited in SEQ ID NO 62543
  misc_feature (1)..(1322): Ortholog of  Ceres SEQ ID NO 13598391 as cited in SEQ ID NO 62769

SEQ ID NO: 32572 - protein, 303 aa, Arabidopsis thaliana; identical to SEQ ID NO: 28982
  peptide (1)..(303): Ceres Seq. ID no. 12324250

SEQ ID NO: 32573 - protein, 289 aa, Arabidopsis thaliana; identical to SEQ ID NO: 28983
  peptide (1)..(289): Ceres Seq. ID no. 12324251

SEQ ID NO: 32574 - protein, 288 aa, Arabidopsis thaliana; identical to SEQ ID NO: 28984
  peptide (1)..(288): Ceres Seq. ID no. 12324252

SEQ ID NO: 32575 - DNA, 665 bp, Arabidopsis thaliana; identical to SEQ ID NO: 28985
  misc_feature (1)..(665): Ceres Seq. ID no. 12329989
  misc_feature (1)..(665): Ortholog of  Ceres SEQ ID NO 13639278 as cited in SEQ ID NO 59801
  misc_feature (1)..(665): Ortholog of  Ceres SEQ ID NO 12598299 as cited in SEQ ID NO 68409

SEQ ID NO: 32576 - protein, 162 aa, Arabidopsis thaliana; identical to SEQ ID NO: 28986
  peptide (1)..(162): Ceres Seq. ID no. 12329990

SEQ ID NO: 32577 - protein, 122 aa, Arabidopsis thaliana; identical to SEQ ID NO: 28987
  peptide (1)..(122): Ceres Seq. ID no. 12329991

SEQ ID NO: 32578 - protein, 106 aa, Arabidopsis thaliana; identical to SEQ ID NO: 28988
  peptide (1)..(106): Ceres Seq. ID no. 12329992

SEQ ID NO: 32579 - DNA, 697 bp, Arabidopsis thaliana; identical to SEQ ID NO: 28989
  misc_feature (1)..(697): Ceres Seq. ID no. 13499469
  misc_feature (1)..(697): Ortholog of  Ceres SEQ ID NO 12556910 as cited in SEQ ID NO 39
  misc_feature (1)..(697): Ortholog of  Ceres SEQ ID NO 13594970 as cited in SEQ ID NO 56328
  misc_feature (1)..(697): Ortholog of  Ceres SEQ ID NO 12585079 as cited in SEQ ID NO 63137

SEQ ID NO: 32580 - protein, 71 aa, Arabidopsis thaliana; identical to SEQ ID NO: 28990
  peptide (1)..(71): Ceres Seq. ID no. 13499470

SEQ ID NO: 32581 - protein, 60 aa, Arabidopsis thaliana; identical to SEQ ID NO: 28991
  peptide (1)..(60): Ceres Seq. ID no. 13499471

SEQ ID NO: 32582 - protein, 58 aa, Arabidopsis thaliana; identical to SEQ ID NO: 28992
  peptide (1)..(58): Ceres Seq. ID no. 13499472

SEQ ID NO: 32583 - DNA, 2148 bp, Arabidopsis thaliana; identical to SEQ ID NO: 28993
  misc_feature (1)..(2148): Ceres Seq. ID no. 12325293
  misc_feature (1)..(2148): Ortholog of  Ceres SEQ ID NO 15171762 as cited in SEQ ID NO 57846
  misc_feature (1)..(2148): Ortholog of  Ceres SEQ ID NO 12597287 as cited in SEQ ID NO 63982

SEQ ID NO: 32584 - protein, 535 aa, Arabidopsis thaliana; identical to SEQ ID NO: 28994
  peptide (1)..(535): Ceres Seq. ID no. 12325294

SEQ ID NO: 32585 - protein, 503 aa, Arabidopsis thaliana; identical to SEQ ID NO: 28995
  peptide (1)..(503): Ceres Seq. ID no. 12325295

SEQ ID NO: 32586 - protein, 454 aa, Arabidopsis thaliana; identical to SEQ ID NO: 28996
  peptide (1)..(454): Ceres Seq. ID no. 12325296

SEQ ID NO: 32587 - DNA, 1292 bp, Arabidopsis thaliana; identical to SEQ ID NO: 28997
  misc_feature (1)..(1292): Ceres Seq. ID no. 12348332
  misc_feature (1)..(1292): Ortholog of  Ceres SEQ ID NO 14305750 as cited in SEQ ID NO 52458
  misc_feature (1)..(1292): Ortholog of  Ceres SEQ ID NO 12608276 as cited in SEQ ID NO 57871
  misc_feature (1)..(1292): Ortholog of  Ceres SEQ ID NO 13598492 as cited in SEQ ID NO 63882
  misc_feature (1)..(1292): Ortholog of  Ceres SEQ ID NO 13657914 as cited in SEQ ID NO 66230
  misc_feature (1)..(1292): Ortholog of  Ceres SEQ ID NO 13595877 as cited in SEQ ID NO 67702
  misc_feature (1)..(1292): Ortholog of  Ceres SEQ ID NO 13622667 as cited in SEQ ID NO 0

SEQ ID NO: 32588 - protein, 394 aa, Arabidopsis thaliana; identical to SEQ ID NO: 28998
  peptide (1)..(394): Ceres Seq. ID no. 12348333

SEQ ID NO: 32589 - protein, 374 aa, Arabidopsis thaliana; identical to SEQ ID NO: 28999
  peptide (1)..(374): Ceres Seq. ID no. 12348334

SEQ ID NO: 32590 - DNA, 1324 bp, Arabidopsis thaliana; identical to SEQ ID NO: 29000
  misc_feature (1)..(1324): Ceres Seq. ID no. 12324502
  misc_feature (1)..(1324): Ortholog of  Ceres SEQ ID NO 12612361 as cited in SEQ ID NO 51594

SEQ ID NO: 32591 - protein, 282 aa, Arabidopsis thaliana; identical to SEQ ID NO: 29001
  peptide (1)..(282): Ceres Seq. ID no. 12324503

SEQ ID NO: 32592 - protein, 240 aa, Arabidopsis thaliana; identical to SEQ ID NO: 29002
  peptide (1)..(240): Ceres Seq. ID no. 12324504

SEQ ID NO: 32593 - protein, 157 aa, Arabidopsis thaliana; identical to SEQ ID NO: 29003
  peptide (1)..(157): Ceres Seq. ID no. 12324505

SEQ ID NO: 32594 - DNA, 1127 bp, Arabidopsis thaliana; identical to SEQ ID NO: 29004
  misc_feature (1)..(1127): Ceres Seq. ID no. 13593807
  misc_feature (1)..(1127): Ortholog of  Ceres SEQ ID NO 13593831 as cited in SEQ ID NO 53828

SEQ ID NO: 32595 - protein, 287 aa, Arabidopsis thaliana; identical to SEQ ID NO: 29005
  peptide (1)..(287): Ceres Seq. ID no. 13593808

SEQ ID NO: 32596 - protein, 214 aa, Arabidopsis thaliana; identical to SEQ ID NO: 29006
  peptide (1)..(214): Ceres Seq. ID no. 13593809

SEQ ID NO: 32597 - protein, 206 aa, Arabidopsis thaliana; identical to SEQ ID NO: 29007
  peptide (1)..(206): Ceres Seq. ID no. 13593810

SEQ ID NO: 32598 - DNA, 1422 bp, Arabidopsis thaliana; identical to SEQ ID NO: 29008
  misc_feature (1)..(1422): Ceres Seq. ID no. 12395753
  misc_feature (1)..(1422): Ortholog of  Ceres SEQ ID NO 13663419 as cited in SEQ ID NO 66561

SEQ ID NO: 32599 - protein, 250 aa, Arabidopsis thaliana; identical to SEQ ID NO: 29009
  peptide (1)..(250): Ceres Seq. ID no. 12395754

SEQ ID NO: 32600 - protein, 206 aa, Arabidopsis thaliana; identical to SEQ ID NO: 29010
  peptide (1)..(206): Ceres Seq. ID no. 12395755

SEQ ID NO: 32601 - protein, 195 aa, Arabidopsis thaliana; identical to SEQ ID NO: 29011
  peptide (1)..(195): Ceres Seq. ID no. 12395756

SEQ ID NO: 32602 - DNA, 881 bp, Arabidopsis thaliana; identical to SEQ ID NO: 29012
  misc_feature (1)..(881): Ceres Seq. ID no. 12334398
  misc_feature (1)..(881): Ortholog of  Ceres SEQ ID NO 13582184 as cited in SEQ ID NO 56002
  misc_feature (1)..(881): Ortholog of  Ceres SEQ ID NO 15227042 as cited in SEQ ID NO 0

SEQ ID NO: 32603 - protein, 192 aa, Arabidopsis thaliana; identical to SEQ ID NO: 29013
  peptide (1)..(192): Ceres Seq. ID no. 12334399

SEQ ID NO: 32604 - protein, 187 aa, Arabidopsis thaliana [sequence omitted]

SEQ ID NO: 32605 - protein, 134 aa, Arabidopsis thaliana; identical to SEQ ID NO: 29015
  peptide (1)..(134): Ceres Seq. ID no. 12334401

SEQ ID NO: 32606 - DNA, 1561 bp, Arabidopsis thaliana; identical to SEQ ID NO: 29016
  misc_feature (1)..(1561): Ceres Seq. ID no. 12371421
  misc_feature (1)..(1561): Ortholog of  Ceres SEQ ID NO 14311934 as cited in SEQ ID NO 51605
  misc_feature (1)..(1561): Ortholog of  Ceres SEQ ID NO 13598313 as cited in SEQ ID NO 68293

SEQ ID NO: 32607 - protein, 384 aa, Arabidopsis thaliana; identical to SEQ ID NO: 29017
  peptide (1)..(384): Ceres Seq. ID no. 12371422

SEQ ID NO: 32608 - protein, 319 aa, Arabidopsis thaliana; identical to SEQ ID NO: 29018
  peptide (1)..(319): Ceres Seq. ID no. 12371423

SEQ ID NO: 32609 - DNA, 1219 bp, Arabidopsis thaliana; identical to SEQ ID NO: 29019
  misc_feature (1)..(1219): Ceres Seq. ID no. 12334410
  misc_feature (1)..(1219): Ortholog of  Ceres SEQ ID NO 13662054 as cited in SEQ ID NO 61539
  misc_feature (1)..(1219): Ortholog of  Ceres SEQ ID NO 13663665 as cited in SEQ ID NO 67230
  misc_feature (1)..(1219): Ortholog of  Ceres SEQ ID NO 15174315 as cited in SEQ ID NO 0

SEQ ID NO: 32610 - protein, 288 aa, Arabidopsis thaliana; identical to SEQ ID NO: 29020
  peptide (1)..(288): Ceres Seq. ID no. 12334411

SEQ ID NO: 32611 - protein, 222 aa, Arabidopsis thaliana; identical to SEQ ID NO: 29021
  peptide (1)..(222): Ceres Seq. ID no. 12334412

SEQ ID NO: 32612 - DNA, 1518 bp, Arabidopsis thaliana; identical to SEQ ID NO: 29022
  misc_feature (1)..(1518): Ceres Seq. ID no. 12371601
  misc_feature (1)..(1518): Ortholog of  Ceres SEQ ID NO 12625948 as cited in SEQ ID NO 64717

SEQ ID NO: 32613 - protein, 454 aa, Arabidopsis thaliana; identical to SEQ ID NO: 29023
  peptide (1)..(454): Ceres Seq. ID no. 12371602

SEQ ID NO: 32614 - protein, 440 aa, Arabidopsis thaliana; identical to SEQ ID NO: 29024
  peptide (1)..(440): Ceres Seq. ID no. 12371603

SEQ ID NO: 32615 - protein, 330 aa, Arabidopsis thaliana; identical to SEQ ID NO: 29025
  peptide (1)..(330): Ceres Seq. ID no. 12371604

SEQ ID NO: 32616 - DNA, 1429 bp, Arabidopsis thaliana; identical to SEQ ID NO: 26379
  misc_feature (1)..(1429): Ceres Seq. ID no. 13491286
  misc_feature (1)..(1429): Ortholog of  Ceres SEQ ID NO 13594308 as cited in SEQ ID NO 57706

SEQ ID NO: 32617 - protein, 379 aa, Arabidopsis thaliana; identical to SEQ ID NO: 26380
  peptide (1)..(379): Ceres Seq. ID no. 13491287

SEQ ID NO: 32618 - protein, 362 aa, Arabidopsis thaliana; identical to SEQ ID NO: 26381
  peptide (1)..(362): Ceres Seq. ID no. 13491288

SEQ ID NO: 32619 - protein, 309 aa, Arabidopsis thaliana; identical to SEQ ID NO: 26382
  peptide (1)..(309): Ceres Seq. ID no. 13491289

SEQ ID NO: 32620 - DNA, 1779 bp, Arabidopsis thaliana; identical to SEQ ID NO: 29030
  misc_feature (1)..(1779): Ceres Seq. ID no. 13600793
  misc_feature (1)..(1779): Ortholog of  Ceres SEQ ID NO 12780298 as cited in SEQ ID NO 65880
  misc_feature (1)..(1779): Ortholog of  Ceres SEQ ID NO 13654539 as cited in SEQ ID NO 68015

SEQ ID NO: 32621 - protein, 464 aa, Arabidopsis thaliana; identical to SEQ ID NO: 29031
  peptide (1)..(464): Ceres Seq. ID no. 15219006

SEQ ID NO: 32622 - protein, 403 aa, Arabidopsis thaliana; identical to SEQ ID NO: 29032
  peptide (1)..(403): Ceres Seq. ID no. 15219007

SEQ ID NO: 32623 - protein, 389 aa, Arabidopsis thaliana; identical to SEQ ID NO: 29033
  peptide (1)..(389): Ceres Seq. ID no. 15219008

SEQ ID NO: 32624 - DNA, 895 bp, Arabidopsis thaliana; identical to SEQ ID NO: 29034
  misc_feature (1)..(895): Ceres Seq. ID no. 13492417
  misc_feature (1)..(895): Ortholog of  Ceres SEQ ID NO 15171235 as cited in SEQ ID NO 52469
  misc_feature (1)..(895): Ortholog of  Ceres SEQ ID NO 15178542 as cited in SEQ ID NO 65410
  misc_feature (1)..(895): Ortholog of  Ceres SEQ ID NO 15174852 as cited in SEQ ID NO 67166
  misc_feature (1)..(895): Ortholog of  Ceres SEQ ID NO 12635657 as cited in SEQ ID NO 0
  misc_feature (1)..(895): Ortholog of  Ceres SEQ ID NO 12635879 as cited in SEQ ID NO 0
  misc_feature (1)..(895): Ortholog of  Ceres SEQ ID NO 13599649 as cited in SEQ ID NO 0

SEQ ID NO: 32625 - protein, 176 aa, Arabidopsis thaliana; identical to SEQ ID NO: 29035
  peptide (1)..(176): Ceres Seq. ID no. 13492418

SEQ ID NO: 32626 - protein, 162 aa, Arabidopsis thaliana; identical to SEQ ID NO: 29036
  peptide (1)..(162): Ceres Seq. ID no. 13492419

SEQ ID NO: 32627 - protein, 155 aa, Arabidopsis thaliana; identical to SEQ ID NO: 29037
  peptide (1)..(155): Ceres Seq. ID no. 13492420

SEQ ID NO: 32628 - DNA, 1721 bp, Arabidopsis thaliana; identical to SEQ ID NO: 29038
  misc_feature (1)..(1721): Ceres Seq. ID no. 12603478
  misc_feature (1)..(1721): Ortholog of  Ceres SEQ ID NO 13654142 as cited in SEQ ID NO 68310

SEQ ID NO: 32629 - protein, 475 aa, Arabidopsis thaliana; identical to SEQ ID NO: 29039
  peptide (1)..(475): Ceres Seq. ID no. 12603479

SEQ ID NO: 32630 - protein, 342 aa, Arabidopsis thaliana; identical to SEQ ID NO: 29040
  peptide (1)..(342): Ceres Seq. ID no. 12603480

SEQ ID NO: 32631 - protein, 336 aa, Arabidopsis thaliana; identical to SEQ ID NO: 29041
  peptide (1)..(336): Ceres Seq. ID no. 12603481

SEQ ID NO: 32632 - DNA, 3259 bp, Arabidopsis thaliana; identical to SEQ ID NO: 29042
  misc_feature (1)..(3259): Ceres Seq. ID no. 12323883
  misc_feature (1)..(3259): Ortholog of  Ceres SEQ ID NO 13656286 as cited in SEQ ID NO 69168
  misc_feature (1)..(3259): Ortholog of  Ceres SEQ ID NO 15174351 as cited in SEQ ID NO 0

SEQ ID NO: 32633 - protein, 403 aa, Arabidopsis thaliana; identical to SEQ ID NO: 29043
  peptide (1)..(403): Ceres Seq. ID no. 12323884

SEQ ID NO: 32634 - protein, 394 aa, Arabidopsis thaliana; identical to SEQ ID NO: 29044
  peptide (1)..(394): Ceres Seq. ID no. 12323885

SEQ ID NO: 32635 - protein, 265 aa, Arabidopsis thaliana; identical to SEQ ID NO: 29045
  peptide (1)..(265): Ceres Seq. ID no. 12323886

SEQ ID NO: 32636 - DNA, 1766 bp, Arabidopsis thaliana; identical to SEQ ID NO: 29046
  misc_feature (1)..(1766): Ceres Seq. ID no. 13647205
  misc_feature (1)..(1766): Ortholog of  Ceres SEQ ID NO 13595877 as cited in SEQ ID NO 67702
  misc_feature (1)..(1766): Ortholog of  Ceres SEQ ID NO 13654367 as cited in SEQ ID NO 67993
  misc_feature (1)..(1766): Ortholog of  Ceres SEQ ID NO 13622667 as cited in SEQ ID NO 0

SEQ ID NO: 32637 - protein, 345 aa, Arabidopsis thaliana; identical to SEQ ID NO: 29047
  peptide (1)..(345): Ceres Seq. ID no. 15218678

SEQ ID NO: 32638 - DNA, 2322 bp, Arabidopsis thaliana; identical to SEQ ID NO: 29048
  misc_feature (1)..(2322): Ceres Seq. ID no. 12385531
  misc_feature (1)..(2322): Ortholog of  Ceres SEQ ID NO 13590691 as cited in SEQ ID NO 66290

SEQ ID NO: 32639 - protein, 614 aa, Arabidopsis thaliana; identical to SEQ ID NO: 29049
  peptide (1)..(614): Ceres Seq. ID no. 12385532

SEQ ID NO: 32640 - protein, 611 aa, Arabidopsis thaliana; identical to SEQ ID NO: 29050
  peptide (1)..(611): Ceres Seq. ID no. 12385533

SEQ ID NO: 32641 - protein, 586 aa, Arabidopsis thaliana; identical to SEQ ID NO: 29051
  peptide (1)..(586): Ceres Seq. ID no. 12385534

SEQ ID NO: 32642 - DNA, 1400 bp, Arabidopsis thaliana; identical to SEQ ID NO: 29052
  misc_feature (1)..(1400): Ceres Seq. ID no. 12423119
  misc_feature (1)..(1400): Ortholog of  Ceres SEQ ID NO 13598368 as cited in SEQ ID NO 62140

SEQ ID NO: 32643 - protein, 438 aa, Arabidopsis thaliana; identical to SEQ ID NO: 29053
  peptide (1)..(438): Ceres Seq. ID no. 12423120

SEQ ID NO: 32644 - protein, 423 aa, Arabidopsis thaliana; identical to SEQ ID NO: 29054
  peptide (1)..(423): Ceres Seq. ID no. 12423121

SEQ ID NO: 32645 - protein, 385 aa, Arabidopsis thaliana; identical to SEQ ID NO: 29055
  peptide (1)..(385): Ceres Seq. ID no. 12423122

SEQ ID NO: 32646 - DNA, 1133 bp, Arabidopsis thaliana; identical to SEQ ID NO: 29056
  misc_feature (1)..(1133): Ceres Seq. ID no. 12336045
  misc_feature (1)..(1133): Ortholog of  Ceres SEQ ID NO 14315989 as cited in SEQ ID NO 57571

SEQ ID NO: 32647 - protein, 285 aa, Arabidopsis thaliana; identical to SEQ ID NO: 29057
  peptide (1)..(285): Ceres Seq. ID no. 12336046

SEQ ID NO: 32648 - protein, 251 aa, Arabidopsis thaliana; identical to SEQ ID NO: 29058
  peptide (1)..(251): Ceres Seq. ID no. 12336047

SEQ ID NO: 32649 - protein, 235 aa, Arabidopsis thaliana; identical to SEQ ID NO: 29059
  peptide (1)..(235): Ceres Seq. ID no. 12336048

SEQ ID NO: 32650 - DNA, 1106 bp, Arabidopsis thaliana; identical to SEQ ID NO: 29060
  misc_feature (1)..(1106): Ceres Seq. ID no. 12338629
  misc_feature (1)..(1106): Ortholog of  Ceres SEQ ID NO 12609869 as cited in SEQ ID NO 52065
  misc_feature (1)..(1106): Ortholog of  Ceres SEQ ID NO 14301506 as cited in SEQ ID NO 61159
  misc_feature (1)..(1106): Ortholog of  Ceres SEQ ID NO 13597124 as cited in SEQ ID NO 64173
  misc_feature (1)..(1106): Ortholog of  Ceres SEQ ID NO 12780602 as cited in SEQ ID NO 65695

SEQ ID NO: 32651 - protein, 276 aa, Arabidopsis thaliana; identical to SEQ ID NO: 29061
  peptide (1)..(276): Ceres Seq. ID no. 12338630

SEQ ID NO: 32652 - DNA, 1321 bp, Arabidopsis thaliana; identical to SEQ ID NO: 29062
  misc_feature (1)..(1321): Ceres Seq. ID no. 12338275
  misc_feature (1)..(1321): Ortholog of  Ceres SEQ ID NO 13582619 as cited in SEQ ID NO 56520
  misc_feature (1)..(1321): Ortholog of  Ceres SEQ ID NO 14314632 as cited in SEQ ID NO 59923
  misc_feature (1)..(1321): Ortholog of  Ceres SEQ ID NO 13660872 as cited in SEQ ID NO 60830
  misc_feature (1)..(1321): Ortholog of  Ceres SEQ ID NO 12616221 as cited in SEQ ID NO 63291

SEQ ID NO: 32653 - protein, 343 aa, Arabidopsis thaliana; identical to SEQ ID NO: 29063
  peptide (1)..(343): Ceres Seq. ID no. 12338276

SEQ ID NO: 32654 - protein, 336 aa, Arabidopsis thaliana; identical to SEQ ID NO: 29064
  peptide (1)..(336): Ceres Seq. ID no. 12338277

SEQ ID NO: 32655 - protein, 323 aa, Arabidopsis thaliana; identical to SEQ ID NO: 29065
  peptide (1)..(323): Ceres Seq. ID no. 12338278

SEQ ID NO: 32656 - DNA, 1227 bp, Arabidopsis thaliana; identical to SEQ ID NO: 29066
  misc_feature (1)..(1227): Ceres Seq. ID no. 12338983
  misc_feature (1)..(1227): Ortholog of  Ceres SEQ ID NO 12636774 as cited in SEQ ID NO 372
  misc_feature (1)..(1227): Ortholog of  Ceres SEQ ID NO 13582350 as cited in SEQ ID NO 56734
  misc_feature (1)..(1227): Ortholog of  Ceres SEQ ID NO 12476493 as cited in SEQ ID NO 58163
  misc_feature (1)..(1227): Ortholog of  Ceres SEQ ID NO 12582113 as cited in SEQ ID NO 58349
  misc_feature (1)..(1227): Ortholog of  Ceres SEQ ID NO 12615466 as cited in SEQ ID NO 62761
  misc_feature (1)..(1227): Ortholog of  Ceres SEQ ID NO 14314080 as cited in SEQ ID NO 63105
  misc_feature (1)..(1227): Ortholog of  Ceres SEQ ID NO 13597295 as cited in SEQ ID NO 63743
  misc_feature (1)..(1227): Ortholog of  Ceres SEQ ID NO 12617090 as cited in SEQ ID NO 64005
  misc_feature (1)..(1227): Ortholog of  Ceres SEQ ID NO 13597439 as cited in SEQ ID NO 64081
  misc_feature (1)..(1227): Ortholog of  Ceres SEQ ID NO 13597233 as cited in SEQ ID NO 64370
  misc_feature (1)..(1227): Ortholog of  Ceres SEQ ID NO 13598327 as cited in SEQ ID NO 68040
  misc_feature (1)..(1227): Ortholog of  Ceres SEQ ID NO 13599438 as cited in SEQ ID NO 0

SEQ ID NO: 32657 - protein, 357 aa, Arabidopsis thaliana; identical to SEQ ID NO: 29067
  peptide (1)..(357): Ceres Seq. ID no. 12338984

SEQ ID NO: 32658 - protein, 349 aa, Arabidopsis thaliana; identical to SEQ ID NO: 29068
  peptide (1)..(349): Ceres Seq. ID no. 12338985

SEQ ID NO: 32659 - protein, 307 aa, Arabidopsis thaliana; identical to SEQ ID NO: 29069
  peptide (1)..(307): Ceres Seq. ID no. 12338987

SEQ ID NO: 32660 - DNA, 1976 bp, Arabidopsis thaliana; identical to SEQ ID NO: 29070
  misc_feature (1)..(1976): Ceres Seq. ID no. 13497375
  misc_feature (1)..(1976): Ortholog of  Ceres SEQ ID NO 14310841 as cited in SEQ ID NO 53666
  misc_feature (1)..(1976): Ortholog of  Ceres SEQ ID NO 15178736 as cited in SEQ ID NO 56439
  misc_feature (1)..(1976): Ortholog of  Ceres SEQ ID NO 14308493 as cited in SEQ ID NO 60320

SEQ ID NO: 32661 - protein, 527 aa, Arabidopsis thaliana; identical to SEQ ID NO: 29071
  peptide (1)..(527): Ceres Seq. ID no. 13497376

SEQ ID NO: 32662 - protein, 507 aa, Arabidopsis thaliana; identical to SEQ ID NO: 29072
  peptide (1)..(507): Ceres Seq. ID no. 13497377

SEQ ID NO: 32663 - protein, 500 aa, Arabidopsis thaliana; identical to SEQ ID NO: 29073
  peptide (1)..(500): Ceres Seq. ID no. 13497378

SEQ ID NO: 32664 - DNA, 1221 bp, Arabidopsis thaliana; identical to SEQ ID NO: 29074
  misc_feature (1)..(1221): Ceres Seq. ID no. 13487581
  misc_feature (1)..(1221): Ortholog of  Ceres SEQ ID NO 14312266 as cited in SEQ ID NO 59225
  misc_feature (1)..(1221): Ortholog of  Ceres SEQ ID NO 13597620 as cited in SEQ ID NO 65383

SEQ ID NO: 32665 - protein, 293 aa, Arabidopsis thaliana; identical to SEQ ID NO: 25308
  peptide (1)..(293): Ceres Seq. ID no. 13487582

SEQ ID NO: 32666 - protein, 244 aa, Arabidopsis thaliana; identical to SEQ ID NO: 25309
  peptide (1)..(244): Ceres Seq. ID no. 13487583

SEQ ID NO: 32667 - protein, 203 aa, Arabidopsis thaliana; identical to SEQ ID NO: 25310
  peptide (1)..(203): Ceres Seq. ID no. 13487584

SEQ ID NO: 32668 - DNA, 1287 bp, Arabidopsis thaliana; identical to SEQ ID NO: 29078
  misc_feature (1)..(1287): Ceres Seq. ID no. 12371833
  misc_feature (1)..(1287): Ortholog of  Ceres SEQ ID NO 14313955 as cited in SEQ ID NO 54407

SEQ ID NO: 32669 - protein, 297 aa, Arabidopsis thaliana; identical to SEQ ID NO: 29079
  peptide (1)..(297): Ceres Seq. ID no. 12371834

SEQ ID NO: 32670 - protein, 287 aa, Arabidopsis thaliana; identical to SEQ ID NO: 29080
  peptide (1)..(287): Ceres Seq. ID no. 12371835

SEQ ID NO: 32671 - protein, 278 aa, Arabidopsis thaliana; identical to SEQ ID NO: 29081
  peptide (1)..(278): Ceres Seq. ID no. 12371836

SEQ ID NO: 32672 - DNA, 1529 bp, Arabidopsis thaliana; identical to SEQ ID NO: 29082
  misc_feature (1)..(1529): Ceres Seq. ID no. 13645700
  misc_feature (1)..(1529): Ortholog of  Ceres SEQ ID NO 13638402 as cited in SEQ ID NO 60300
  misc_feature (1)..(1529): Ortholog of  Ceres SEQ ID NO 12618349 as cited in SEQ ID NO 64838

SEQ ID NO: 32673 - protein, 336 aa, Arabidopsis thaliana; identical to SEQ ID NO: 29083
  peptide (1)..(336): Ceres Seq. ID no. 13645701

SEQ ID NO: 32674 - protein, 331 aa, Arabidopsis thaliana; identical to SEQ ID NO: 29084
  peptide (1)..(331): Ceres Seq. ID no. 13645702

SEQ ID NO: 32675 - protein, 311 aa, Arabidopsis thaliana; identical to SEQ ID NO: 29085
  peptide (1)..(311): Ceres Seq. ID no. 13645703

SEQ ID NO: 32676 - DNA, 1152 bp, Arabidopsis thaliana; identical to SEQ ID NO: 29086
  misc_feature (1)..(1152): Ceres Seq. ID no. 12324473
  misc_feature (1)..(1152): Ortholog of  Ceres SEQ ID NO 12610385 as cited in SEQ ID NO 55938
  misc_feature (1)..(1152): Ortholog of  Ceres SEQ ID NO 13661939 as cited in SEQ ID NO 61170
  misc_feature (1)..(1152): Ortholog of  Ceres SEQ ID NO 15178805 as cited in SEQ ID NO 0

SEQ ID NO: 32677 - protein, 169 aa, Arabidopsis thaliana; identical to SEQ ID NO: 29087
  peptide (1)..(169): Ceres Seq. ID no. 12324474

SEQ ID NO: 32678 - protein, 142 aa, Arabidopsis thaliana; identical to SEQ ID NO: 29088
  peptide (1)..(142): Ceres Seq. ID no. 12324475

SEQ ID NO: 32679 - protein, 103 aa, Arabidopsis thaliana; identical to SEQ ID NO: 29089
  peptide (1)..(103): Ceres Seq. ID no. 12324476

SEQ ID NO: 32680 - DNA, 1246 bp, Arabidopsis thaliana; identical to SEQ ID NO: 29090
  misc_feature (1)..(1246): Ceres Seq. ID no. 12396125
  misc_feature (1)..(1246): Ortholog of  Ceres SEQ ID NO 13590776 as cited in SEQ ID NO 64877
  misc_feature (1)..(1246): Ortholog of  Ceres SEQ ID NO 12780534 as cited in SEQ ID NO 65670
  misc_feature (1)..(1246): Ortholog of  Ceres SEQ ID NO 13598301 as cited in SEQ ID NO 68281

SEQ ID NO: 32681 - protein, 304 aa, Arabidopsis thaliana; identical to SEQ ID NO: 29091
  peptide (1)..(304): Ceres Seq. ID no. 12396126

SEQ ID NO: 32682 - protein, 302 aa, Arabidopsis thaliana; identical to SEQ ID NO: 29092
  peptide (1)..(302): Ceres Seq. ID no. 12396127

SEQ ID NO: 32683 - protein, 280 aa, Arabidopsis thaliana; identical to SEQ ID NO: 29093
  peptide (1)..(280): Ceres Seq. ID no. 12396128

SEQ ID NO: 32684 - DNA, 1385 bp, Arabidopsis thaliana; identical to SEQ ID NO: 29094
  misc_feature (1)..(1385): Ceres Seq. ID no. 12396466
  misc_feature (1)..(1385): Ortholog of  Ceres SEQ ID NO 12636774 as cited in SEQ ID NO 372
  misc_feature (1)..(1385): Ortholog of  Ceres SEQ ID NO 15174842 as cited in SEQ ID NO 53054
  misc_feature (1)..(1385): Ortholog of  Ceres SEQ ID NO 14310917 as cited in SEQ ID NO 53231
  misc_feature (1)..(1385): Ortholog of  Ceres SEQ ID NO 15175492 as cited in SEQ ID NO 56277
  misc_feature (1)..(1385): Ortholog of  Ceres SEQ ID NO 13582350 as cited in SEQ ID NO 56734
  misc_feature (1)..(1385): Ortholog of  Ceres SEQ ID NO 12476493 as cited in SEQ ID NO 58163
  misc_feature (1)..(1385): Ortholog of  Ceres SEQ ID NO 14310807 as cited in SEQ ID NO 58696
  misc_feature (1)..(1385): Ortholog of  Ceres SEQ ID NO 15175861 as cited in SEQ ID NO 59381
  misc_feature (1)..(1385): Ortholog of  Ceres SEQ ID NO 12578315 as cited in SEQ ID NO 62451
  misc_feature (1)..(1385): Ortholog of  Ceres SEQ ID NO 12615466 as cited in SEQ ID NO 62761
  misc_feature (1)..(1385): Ortholog of  Ceres SEQ ID NO 13597295 as cited in SEQ ID NO 63743
  misc_feature (1)..(1385): Ortholog of  Ceres SEQ ID NO 12617090 as cited in SEQ ID NO 64005
  misc_feature (1)..(1385): Ortholog of  Ceres SEQ ID NO 15226458 as cited in SEQ ID NO 64042
  misc_feature (1)..(1385): Ortholog of  Ceres SEQ ID NO 13597439 as cited in SEQ ID NO 64081
  misc_feature (1)..(1385): Ortholog of  Ceres SEQ ID NO 13597233 as cited in SEQ ID NO 64370
  misc_feature (1)..(1385): Ortholog of  Ceres SEQ ID NO 13598327 as cited in SEQ ID NO 68040

SEQ ID NO: 32685 - protein, 371 aa, Arabidopsis thaliana; identical to SEQ ID NO: 29095
  peptide (1)..(371): Ceres Seq. ID no. 12396467

SEQ ID NO: 32686 - protein, 355 aa, Arabidopsis thaliana; identical to SEQ ID NO: 29096
  peptide (1)..(355): Ceres Seq. ID no. 12396468

SEQ ID NO: 32687 - protein, 290 aa, Arabidopsis thaliana; identical to SEQ ID NO: 29097
  peptide (1)..(290): Ceres Seq. ID no. 12396469

SEQ ID NO: 32688 - DNA, 1272 bp, Arabidopsis thaliana; identical to SEQ ID NO: 29098
  misc_feature (1)..(1272): Ceres Seq. ID no. 13500081
  misc_feature (1)..(1272): Ortholog of  Ceres SEQ ID NO 14316550 as cited in SEQ ID NO 57662
  misc_feature (1)..(1272): Ortholog of  Ceres SEQ ID NO 14302333 as cited in SEQ ID NO 63121
  misc_feature (1)..(1272): Ortholog of  Ceres SEQ ID NO 13596976 as cited in SEQ ID NO 63125
  misc_feature (1)..(1272): Ortholog of  Ceres SEQ ID NO 15179988 as cited in SEQ ID NO 0

SEQ ID NO: 32689 - protein, 304 aa, Arabidopsis thaliana; identical to SEQ ID NO: 29099
  peptide (1)..(304): Ceres Seq. ID no. 13500082

SEQ ID NO: 32690 - protein, 297 aa, Arabidopsis thaliana; identical to SEQ ID NO: 29100
  peptide (1)..(297): Ceres Seq. ID no. 13500083

SEQ ID NO: 32691 - protein, 228 aa, Arabidopsis thaliana; identical to SEQ ID NO: 29101
  peptide (1)..(228): Ceres Seq. ID no. 13500084

SEQ ID NO: 32692 - DNA, 1362 bp, Arabidopsis thaliana; identical to SEQ ID NO: 29102
  misc_feature (1)..(1362): Ceres Seq. ID no. 13486641
  misc_feature (1)..(1362): Ortholog of  Ceres SEQ ID NO 14314037 as cited in SEQ ID NO 52244
  misc_feature (1)..(1362): Ortholog of  Ceres SEQ ID NO 13661419 as cited in SEQ ID NO 61673

SEQ ID NO: 32693 - protein, 359 aa, Arabidopsis thaliana; identical to SEQ ID NO: 29103
  peptide (1)..(359): Ceres Seq. ID no. 13486642

SEQ ID NO: 32694 - protein, 242 aa, Arabidopsis thaliana; identical to SEQ ID NO: 29104
  peptide (1)..(242): Ceres Seq. ID no. 13486643

SEQ ID NO: 32695 - protein, 223 aa, Arabidopsis thaliana; identical to SEQ ID NO: 29105
  peptide (1)..(223): Ceres Seq. ID no. 13486644

SEQ ID NO: 32696 - DNA, 1035 bp, Arabidopsis thaliana; identical to SEQ ID NO: 22638
  misc_feature (1)..(1035): Ceres Seq. ID no. 13509220
  misc_feature (1)..(1035): Ortholog of  Ceres SEQ ID NO 13595072 as cited in SEQ ID NO 55971

SEQ ID NO: 32697 - protein, 267 aa, Arabidopsis thaliana; identical to SEQ ID NO: 22639
  peptide (1)..(267): Ceres Seq. ID no. 13509221

SEQ ID NO: 32698 - protein, 262 aa, Arabidopsis thaliana; identical to SEQ ID NO: 22640
  peptide (1)..(262): Ceres Seq. ID no. 13509222

SEQ ID NO: 32699 - protein, 233 aa, Arabidopsis thaliana; identical to SEQ ID NO: 21214
  peptide (1)..(233): Ceres Seq. ID no. 13509223

SEQ ID NO: 32700 - DNA, 745 bp, Arabidopsis thaliana; identical to SEQ ID NO: 29110
  misc_feature (1)..(745): Ceres Seq. ID no. 13496771
  misc_feature (1)..(745): Ortholog of  Ceres SEQ ID NO 13599287 as cited in SEQ ID NO 338

SEQ ID NO: 32701 - protein, 191 aa, Arabidopsis thaliana; identical to SEQ ID NO: 29111
  peptide (1)..(191): Ceres Seq. ID no. 13496772

SEQ ID NO: 32702 - protein, 173 aa, Arabidopsis thaliana; identical to SEQ ID NO: 29112
  peptide (1)..(173): Ceres Seq. ID no. 13496773

SEQ ID NO: 32703 - protein, 118 aa, Arabidopsis thaliana; identical to SEQ ID NO: 29113
  peptide (1)..(118): Ceres Seq. ID no. 13496774

SEQ ID NO: 32704 - DNA, 648 bp, Arabidopsis thaliana; identical to SEQ ID NO: 29114
  misc_feature (1)..(648): Ceres Seq. ID no. 12738718
  misc_feature (1)..(648): Ortholog of  Ceres SEQ ID NO 15172828 as cited in SEQ ID NO 60174

SEQ ID NO: 32705 - protein, 118 aa, Arabidopsis thaliana; identical to SEQ ID NO: 29115
  peptide (1)..(118): Ceres Seq. ID no. 12738719

SEQ ID NO: 32706 - DNA, 888 bp, Arabidopsis thaliana; identical to SEQ ID NO: 29116
  misc_feature (1)..(888): Ceres Seq. ID no. 13646051
  misc_feature (1)..(888): Ortholog of  Ceres SEQ ID NO 12610334 as cited in SEQ ID NO 56235
  misc_feature (1)..(888): Ortholog of  Ceres SEQ ID NO 13654825 as cited in SEQ ID NO 62409

SEQ ID NO: 32707 - protein, 214 aa, Arabidopsis thaliana; identical to SEQ ID NO: 29117
  peptide (1)..(214): Ceres Seq. ID no. 13646052

SEQ ID NO: 32708 - protein, 191 aa, Arabidopsis thaliana; identical to SEQ ID NO: 21067
  peptide (1)..(191): Ceres Seq. ID no. 13646053

SEQ ID NO: 32709 - DNA, 1420 bp, Arabidopsis thaliana; identical to SEQ ID NO: 29119
  misc_feature (1)..(1420): Ceres Seq. ID no. 12602555
  misc_feature (1)..(1420): Ortholog of  Ceres SEQ ID NO 15175857 as cited in SEQ ID NO 59046

SEQ ID NO: 32710 - protein, 341 aa, Arabidopsis thaliana; identical to SEQ ID NO: 29120
  peptide (1)..(341): Ceres Seq. ID no. 12602556

SEQ ID NO: 32711 - protein, 330 aa, Arabidopsis thaliana; identical to SEQ ID NO: 29121
  peptide (1)..(330): Ceres Seq. ID no. 12602557

SEQ ID NO: 32712 - protein, 319 aa, Arabidopsis thaliana; identical to SEQ ID NO: 29122
  peptide (1)..(319): Ceres Seq. ID no. 12602558

SEQ ID NO: 32713 - DNA, 748 bp, Arabidopsis thaliana; identical to SEQ ID NO: 29123
  misc_feature (1)..(748): Ceres Seq. ID no. 12580430
  misc_feature (1)..(748): Ortholog of  Ceres SEQ ID NO 15174048 as cited in SEQ ID NO 61892

SEQ ID NO: 32714 - protein, 134 aa, Arabidopsis thaliana; identical to SEQ ID NO: 29124
  peptide (1)..(134): Ceres Seq. ID no. 12580431

SEQ ID NO: 32715 - protein, 86 aa, Arabidopsis thaliana; identical to SEQ ID NO: 29125
  peptide (1)..(86): Ceres Seq. ID no. 12580432

SEQ ID NO: 32716 - protein, 76 aa, Arabidopsis thaliana; identical to SEQ ID NO: 29126
  peptide (1)..(76): Ceres Seq. ID no. 12580433

SEQ ID NO: 32717 - DNA, 1016 bp, Arabidopsis thaliana; identical to SEQ ID NO: 29127
  misc_feature (1)..(1016): Ceres Seq. ID no. 12337966
  misc_feature (1)..(1016): Ortholog of  Ceres SEQ ID NO 13582893 as cited in SEQ ID NO 62081

SEQ ID NO: 32718 - protein, 218 aa, Arabidopsis thaliana; identical to SEQ ID NO: 29128
  peptide (1)..(218): Ceres Seq. ID no. 12337967

SEQ ID NO: 32719 - protein, 216 aa, Arabidopsis thaliana; identical to SEQ ID NO: 29129
  peptide (1)..(216): Ceres Seq. ID no. 12337968

SEQ ID NO: 32720 - protein, 143 aa, Arabidopsis thaliana; identical to SEQ ID NO: 29130
  peptide (1)..(143): Ceres Seq. ID no. 12337969

SEQ ID NO: 32721 - DNA, 1273 bp, Arabidopsis thaliana; identical to SEQ ID NO: 29131
  misc_feature (1)..(1273): Ceres Seq. ID no. 12334392
  misc_feature (1)..(1273): Ortholog of  Ceres SEQ ID NO 15177055 as cited in SEQ ID NO 57450
  misc_feature (1)..(1273): Ortholog of  Ceres SEQ ID NO 12615854 as cited in SEQ ID NO 62880

SEQ ID NO: 32722 - protein, 268 aa, Arabidopsis thaliana; identical to SEQ ID NO: 29132
  peptide (1)..(268): Ceres Seq. ID no. 12334393

SEQ ID NO: 32723 - DNA, 1381 bp, Arabidopsis thaliana; identical to SEQ ID NO: 29133
  misc_feature (1)..(1381): Ceres Seq. ID no. 12333866
  misc_feature (1)..(1381): Ortholog of  Ceres SEQ ID NO 15178260 as cited in SEQ ID NO 59907
  misc_feature (1)..(1381): Ortholog of  Ceres SEQ ID NO 14313548 as cited in SEQ ID NO 68496

SEQ ID NO: 32724 - protein, 199 aa, Arabidopsis thaliana; identical to SEQ ID NO: 29134
  peptide (1)..(199): Ceres Seq. ID no. 12333867

SEQ ID NO: 32725 - protein, 125 aa, Arabidopsis thaliana; identical to SEQ ID NO: 29135
  peptide (1)..(125): Ceres Seq. ID no. 12333868

SEQ ID NO: 32726 - DNA, 1026 bp, Arabidopsis thaliana; identical to SEQ ID NO: 26128
  misc_feature (1)..(1026): Ceres Seq. ID no. 13488738
  misc_feature (1)..(1026): Ortholog of  Ceres SEQ ID NO 14308727 as cited in SEQ ID NO 58726
  misc_feature (1)..(1026): Ortholog of  Ceres SEQ ID NO 13663517 as cited in SEQ ID NO 66850

SEQ ID NO: 32727 - protein, 231 aa, Arabidopsis thaliana; identical to SEQ ID NO: 26129
  peptide (1)..(231): Ceres Seq. ID no. 13488739

SEQ ID NO: 32728 - protein, 220 aa, Arabidopsis thaliana; identical to SEQ ID NO: 26130
  peptide (1)..(220): Ceres Seq. ID no. 13488740

SEQ ID NO: 32729 - protein, 208 aa, Arabidopsis thaliana; identical to SEQ ID NO: 26131
  peptide (1)..(208): Ceres Seq. ID no. 13488741

SEQ ID NO: 32730 - DNA, 992 bp, Arabidopsis thaliana; identical to SEQ ID NO: 29140
  misc_feature (1)..(992): Ceres Seq. ID no. 12394136
  misc_feature (1)..(992): Ortholog of  Ceres SEQ ID NO 13594655 as cited in SEQ ID NO 51843
  misc_feature (1)..(992): Ortholog of  Ceres SEQ ID NO 13637562 as cited in SEQ ID NO 53674
  misc_feature (1)..(992): Ortholog of  Ceres SEQ ID NO 13595851 as cited in SEQ ID NO 56559
  misc_feature (1)..(992): Ortholog of  Ceres SEQ ID NO 15173454 as cited in SEQ ID NO 57898
  misc_feature (1)..(992): Ortholog of  Ceres SEQ ID NO 13598755 as cited in SEQ ID NO 69032

SEQ ID NO: 32731 - protein, 235 aa, Arabidopsis thaliana; identical to SEQ ID NO: 29141
  peptide (1)..(235): Ceres Seq. ID no. 12394137

SEQ ID NO: 32732 - DNA, 1247 bp, Arabidopsis thaliana; identical to SEQ ID NO: 29142
  misc_feature (1)..(1247): Ceres Seq. ID no. 13489989
  misc_feature (1)..(1247): Ortholog of  Ceres SEQ ID NO 12557420 as cited in SEQ ID NO 15
  misc_feature (1)..(1247): Ortholog of  Ceres SEQ ID NO 12781963 as cited in SEQ ID NO 56339
  misc_feature (1)..(1247): Ortholog of  Ceres SEQ ID NO 15179365 as cited in SEQ ID NO 0
  misc_feature (1)..(1247): Ortholog of  Ceres SEQ ID NO 15224673 as cited in SEQ ID NO 0
  misc_feature (1)..(1247): Ortholog of  Ceres SEQ ID NO 15227157 as cited in SEQ ID NO 0

SEQ ID NO: 32733 - protein, 379 aa, Arabidopsis thaliana; identical to SEQ ID NO: 29143
  peptide (1)..(379): Ceres Seq. ID no. 13489990

SEQ ID NO: 32734 - protein, 371 aa, Arabidopsis thaliana; identical to SEQ ID NO: 29144
  peptide (1)..(371): Ceres Seq. ID no. 13489991

SEQ ID NO: 32735 - protein, 369 aa, Arabidopsis thaliana; identical to SEQ ID NO: 29145
  peptide (1)..(369): Ceres Seq. ID no. 13489992

SEQ ID NO: 32736 - DNA, 709 bp, Arabidopsis thaliana; identical to SEQ ID NO: 29146
  misc_feature (1)..(709): Ceres Seq. ID no. 12331898
  misc_feature (1)..(709): Ortholog of  Ceres SEQ ID NO 13582188 as cited in SEQ ID NO 55950
  misc_feature (1)..(709): Ortholog of  Ceres SEQ ID NO 12611286 as cited in SEQ ID NO 56182
  misc_feature (1)..(709): Ortholog of  Ceres SEQ ID NO 15173288 as cited in SEQ ID NO 58150
  misc_feature (1)..(709): Ortholog of  Ceres SEQ ID NO 13663461 as cited in SEQ ID NO 66601

SEQ ID NO: 32737 - protein, 93 aa, Arabidopsis thaliana; identical to SEQ ID NO: 29147
  peptide (1)..(93): Ceres Seq. ID no. 12331899

SEQ ID NO: 32738 - protein, 71 aa, Arabidopsis thaliana; identical to SEQ ID NO: 29148
  peptide (1)..(71): Ceres Seq. ID no. 12331900

SEQ ID NO: 32739 - protein, 100 aa, Arabidopsis thaliana; identical to SEQ ID NO: 29149
  peptide (1)..(100): Ceres Seq. ID no. 12331901

SEQ ID NO: 32740 - DNA, 1087 bp, Arabidopsis thaliana; identical to SEQ ID NO: 29150
  misc_feature (1)..(1087): Ceres Seq. ID no. 12334939
  misc_feature (1)..(1087): Ortholog of  Ceres SEQ ID NO 14311467 as cited in SEQ ID NO 51230

SEQ ID NO: 32741 - protein, 236 aa, Arabidopsis thaliana; identical to SEQ ID NO: 29151
  peptide (1)..(236): Ceres Seq. ID no. 12334940

SEQ ID NO: 32742 - protein, 170 aa, Arabidopsis thaliana; identical to SEQ ID NO: 29152
  peptide (1)..(170): Ceres Seq. ID no. 12334941

SEQ ID NO: 32743 - protein, 152 aa, Arabidopsis thaliana; identical to SEQ ID NO: 29153
  peptide (1)..(152): Ceres Seq. ID no. 12334942

SEQ ID NO: 32744 - DNA, 1856 bp, Arabidopsis thaliana; identical to SEQ ID NO: 29154
  misc_feature (1)..(1856): Ceres Seq. ID no. 13490623
  misc_feature (1)..(1856): Ortholog of  Ceres SEQ ID NO 15172476 as cited in SEQ ID NO 54945
  misc_feature (1)..(1856): Ortholog of  Ceres SEQ ID NO 13654989 as cited in SEQ ID NO 63117
  misc_feature (1)..(1856): Ortholog of  Ceres SEQ ID NO 13584744 as cited in SEQ ID NO 69137

SEQ ID NO: 32745 - protein, 414 aa, Arabidopsis thaliana; identical to SEQ ID NO: 29155
  peptide (1)..(414): Ceres Seq. ID no. 13490624

SEQ ID NO: 32746 - protein, 244 aa, Arabidopsis thaliana; identical to SEQ ID NO: 29156
  peptide (1)..(244): Ceres Seq. ID no. 13490625

SEQ ID NO: 32747 - DNA, 2034 bp, Arabidopsis thaliana; identical to SEQ ID NO: 29157
  misc_feature (1)..(2034): Ceres Seq. ID no. 12324566
  misc_feature (1)..(2034): Ortholog of  Ceres SEQ ID NO 13594037 as cited in SEQ ID NO 55666
  misc_feature (1)..(2034): Ortholog of  Ceres SEQ ID NO 13657707 as cited in SEQ ID NO 66407

SEQ ID NO: 32748 - protein, 592 aa, Arabidopsis thaliana; identical to SEQ ID NO: 29158
  peptide (1)..(592): Ceres Seq. ID no. 12324567

SEQ ID NO: 32749 - protein, 588 aa, Arabidopsis thaliana; identical to SEQ ID NO: 29159
  peptide (1)..(588): Ceres Seq. ID no. 12324568

SEQ ID NO: 32750 - protein, 388 aa, Arabidopsis thaliana; identical to SEQ ID NO: 29160
  peptide (1)..(388): Ceres Seq. ID no. 12324569

SEQ ID NO: 32751 - DNA, 1203 bp, Arabidopsis thaliana; identical to SEQ ID NO: 29161
  misc_feature (1)..(1203): Ceres Seq. ID no. 12334431
  misc_feature (1)..(1203): Ortholog of  Ceres SEQ ID NO 14314823 as cited in SEQ ID NO 52565
  misc_feature (1)..(1203): Ortholog of  Ceres SEQ ID NO 14307324 as cited in SEQ ID NO 54131
  misc_feature (1)..(1203): Ortholog of  Ceres SEQ ID NO 13594940 as cited in SEQ ID NO 55819

SEQ ID NO: 32752 - protein, 240 aa, Arabidopsis thaliana; identical to SEQ ID NO: 29162
  peptide (1)..(240): Ceres Seq. ID no. 12334432

SEQ ID NO: 32753 - protein, 237 aa, Arabidopsis thaliana; identical to SEQ ID NO: 29163
  peptide (1)..(237): Ceres Seq. ID no. 12334433

SEQ ID NO: 32754 - protein, 235 aa, Arabidopsis thaliana; identical to SEQ ID NO: 29164
  peptide (1)..(235): Ceres Seq. ID no. 12334434

SEQ ID NO: 32755 - DNA, 1384 bp, Arabidopsis thaliana; identical to SEQ ID NO: 29165
  misc_feature (1)..(1384): Ceres Seq. ID no. 13487636
  misc_feature (1)..(1384): Ortholog of  Ceres SEQ ID NO 14312981 as cited in SEQ ID NO 59119
  misc_feature (1)..(1384): Ortholog of  Ceres SEQ ID NO 13596962 as cited in SEQ ID NO 63323

SEQ ID NO: 32756 - protein, 408 aa, Arabidopsis thaliana; identical to SEQ ID NO: 29166
  peptide (1)..(408): Ceres Seq. ID no. 13487637

SEQ ID NO: 32757 - protein, 321 aa, Arabidopsis thaliana; identical to SEQ ID NO: 29167
  peptide (1)..(321): Ceres Seq. ID no. 13487638

SEQ ID NO: 32758 - DNA, 1301 bp, Arabidopsis thaliana; identical to SEQ ID NO: 29168
  misc_feature (1)..(1301): Ceres Seq. ID no. 12334435
  misc_feature (1)..(1301): Ortholog of  Ceres SEQ ID NO 15169045 as cited in SEQ ID NO 58372
  misc_feature (1)..(1301): Ortholog of  Ceres SEQ ID NO 13597361 as cited in SEQ ID NO 63638
  misc_feature (1)..(1301): Ortholog of  Ceres SEQ ID NO 13595945 as cited in SEQ ID NO 68157

SEQ ID NO: 32759 - protein, 197 aa, Arabidopsis thaliana; identical to SEQ ID NO: 29169
  peptide (1)..(197): Ceres Seq. ID no. 12334436

SEQ ID NO: 32760 - protein, 172 aa, Arabidopsis thaliana; identical to SEQ ID NO: 29170
  peptide (1)..(172): Ceres Seq. ID no. 12334437

SEQ ID NO: 32761 - protein, 166 aa, Arabidopsis thaliana; identical to SEQ ID NO: 29171
  peptide (1)..(166): Ceres Seq. ID no. 12334438

SEQ ID NO: 32762 - DNA, 1049 bp, Arabidopsis thaliana; identical to SEQ ID NO: 29172
  misc_feature (1)..(1049): Ceres Seq. ID no. 12334427
  misc_feature (1)..(1049): Ortholog of  Ceres SEQ ID NO 14303051 as cited in SEQ ID NO 66608

SEQ ID NO: 32763 - protein, 316 aa, Arabidopsis thaliana; identical to SEQ ID NO: 29173
  peptide (1)..(316): Ceres Seq. ID no. 12334428

SEQ ID NO: 32764 - protein, 306 aa, Arabidopsis thaliana; identical to SEQ ID NO: 29174
  peptide (1)..(306): Ceres Seq. ID no. 12334429

SEQ ID NO: 32765 - protein, 296 aa, Arabidopsis thaliana; identical to SEQ ID NO: 29175
  peptide (1)..(296): Ceres Seq. ID no. 12334430

SEQ ID NO: 32766 - DNA, 1168 bp, Arabidopsis thaliana; identical to SEQ ID NO: 29176
  misc_feature (1)..(1168): Ceres Seq. ID no. 12334928
  misc_feature (1)..(1168): Ortholog of  Ceres SEQ ID NO 12611829 as cited in SEQ ID NO 56771
  misc_feature (1)..(1168): Ortholog of  Ceres SEQ ID NO 15171735 as cited in SEQ ID NO 57234
  misc_feature (1)..(1168): Ortholog of  Ceres SEQ ID NO 13597018 as cited in SEQ ID NO 64288
  misc_feature (1)..(1168): Ortholog of  Ceres SEQ ID NO 14305124 as cited in SEQ ID NO 0

SEQ ID NO: 32767 - protein, 321 aa, Arabidopsis thaliana; identical to SEQ ID NO: 29177
  peptide (1)..(321): Ceres Seq. ID no. 12334929

SEQ ID NO: 32768 - protein, 276 aa, Arabidopsis thaliana; identical to SEQ ID NO: 29178
  peptide (1)..(276): Ceres Seq. ID no. 12334930

SEQ ID NO: 32769 - protein, 240 aa, Arabidopsis thaliana; identical to SEQ ID NO: 29179
  peptide (1)..(240): Ceres Seq. ID no. 12334931

SEQ ID NO: 32770 - DNA, 1255 bp, Arabidopsis thaliana; identical to SEQ ID NO: 29180
  misc_feature (1)..(1255): Ceres Seq. ID no. 12329816
  misc_feature (1)..(1255): Ortholog of  Ceres SEQ ID NO 14313391 as cited in SEQ ID NO 58556
  misc_feature (1)..(1255): Ortholog of  Ceres SEQ ID NO 14307540 as cited in SEQ ID NO 59670
  misc_feature (1)..(1255): Ortholog of  Ceres SEQ ID NO 15179235 as cited in SEQ ID NO 0

SEQ ID NO: 32771 - protein, 246 aa, Arabidopsis thaliana; identical to SEQ ID NO: 29181
  peptide (1)..(246): Ceres Seq. ID no. 12329817

SEQ ID NO: 32772 - protein, 161 aa, Arabidopsis thaliana; identical to SEQ ID NO: 29182
  peptide (1)..(161): Ceres Seq. ID no. 12329818

SEQ ID NO: 32773 - DNA, 999 bp, Arabidopsis thaliana; identical to SEQ ID NO: 29183
  misc_feature (1)..(999): Ceres Seq. ID no. 12330335
  misc_feature (1)..(999): Ortholog of  Ceres SEQ ID NO 13583408 as cited in SEQ ID NO 62616
  misc_feature (1)..(999): Ortholog of  Ceres SEQ ID NO 15179752 as cited in SEQ ID NO 63074

SEQ ID NO: 32774 - protein, 242 aa, Arabidopsis thaliana; identical to SEQ ID NO: 29184
  peptide (1)..(242): Ceres Seq. ID no. 12330336

SEQ ID NO: 32775 - DNA, 1060 bp, Arabidopsis thaliana; identical to SEQ ID NO: 29185
  misc_feature (1)..(1060): Ceres Seq. ID no. 13497491
  misc_feature (1)..(1060): Ortholog of  Ceres SEQ ID NO 12616439 as cited in SEQ ID NO 63634

SEQ ID NO: 32776 - protein, 246 aa, Arabidopsis thaliana; identical to SEQ ID NO: 29186
  peptide (1)..(246): Ceres Seq. ID no. 13497492

SEQ ID NO: 32777 - protein, 233 aa, Arabidopsis thaliana; identical to SEQ ID NO: 29187
  peptide (1)..(233): Ceres Seq. ID no. 13497493

SEQ ID NO: 32778 - protein, 161 aa, Arabidopsis thaliana; identical to SEQ ID NO: 29188
  peptide (1)..(161): Ceres Seq. ID no. 13497494

SEQ ID NO: 32779 - DNA, 1143 bp, Arabidopsis thaliana; identical to SEQ ID NO: 29189
  misc_feature (1)..(1143): Ceres Seq. ID no. 12738570
  misc_feature (1)..(1143): Ortholog of  Ceres SEQ ID NO 14314585 as cited in SEQ ID NO 59345

SEQ ID NO: 32780 - protein, 280 aa, Arabidopsis thaliana; identical to SEQ ID NO: 29190
  peptide (1)..(280): Ceres Seq. ID no. 12738571

SEQ ID NO: 32781 - protein, 253 aa, Arabidopsis thaliana; identical to SEQ ID NO: 29191
  peptide (1)..(253): Ceres Seq. ID no. 12738572

SEQ ID NO: 32782 - protein, 204 aa, Arabidopsis thaliana; identical to SEQ ID NO: 29192
  peptide (1)..(204): Ceres Seq. ID no. 12738573

SEQ ID NO: 32783 - DNA, 1636 bp, Arabidopsis thaliana; identical to SEQ ID NO: 29193
  misc_feature (1)..(1636): Ceres Seq. ID no. 12357517
  misc_feature (1)..(1636): Ortholog of  Ceres SEQ ID NO 15171669 as cited in SEQ ID NO 51370

SEQ ID NO: 32784 - protein, 484 aa, Arabidopsis thaliana; identical to SEQ ID NO: 29194
  peptide (1)..(484): Ceres Seq. ID no. 12357518

SEQ ID NO: 32785 - protein, 413 aa, Arabidopsis thaliana; identical to SEQ ID NO: 29195
  peptide (1)..(413): Ceres Seq. ID no. 12357519

SEQ ID NO: 32786 - protein, 411 aa, Arabidopsis thaliana; identical to SEQ ID NO: 29196
  peptide (1)..(411): Ceres Seq. ID no. 12357520

SEQ ID NO: 32787 - DNA, 1317 bp, Arabidopsis thaliana; identical to SEQ ID NO: 29197
  misc_feature (1)..(1317): Ceres Seq. ID no. 13490406
  misc_feature (1)..(1317): Ortholog of  Ceres SEQ ID NO 15177842 as cited in SEQ ID NO 51547
  misc_feature (1)..(1317): Ortholog of  Ceres SEQ ID NO 13594859 as cited in SEQ ID NO 51974
  misc_feature (1)..(1317): Ortholog of  Ceres SEQ ID NO 13597887 as cited in SEQ ID NO 64295

SEQ ID NO: 32788 - protein, 258 aa, Arabidopsis thaliana; identical to SEQ ID NO: 29198
  peptide (1)..(258): Ceres Seq. ID no. 13490407

SEQ ID NO: 32789 - protein, 189 aa, Arabidopsis thaliana; identical to SEQ ID NO: 29199
  peptide (1)..(189): Ceres Seq. ID no. 13490408

SEQ ID NO: 32790 - protein, 161 aa, Arabidopsis thaliana; identical to SEQ ID NO: 29200
  peptide (1)..(161): Ceres Seq. ID no. 13490409

SEQ ID NO: 32791 - DNA, 1224 bp, Arabidopsis thaliana; identical to SEQ ID NO: 29201
  misc_feature (1)..(1224): Ceres Seq. ID no. 13490655
  misc_feature (1)..(1224): Ortholog of  Ceres SEQ ID NO 13596891 as cited in SEQ ID NO 62868
  misc_feature (1)..(1224): Ortholog of  Ceres SEQ ID NO 12617235 as cited in SEQ ID NO 63990
  misc_feature (1)..(1224): Ortholog of  Ceres SEQ ID NO 13655371 as cited in SEQ ID NO 68945

SEQ ID NO: 32792 - protein, 358 aa, Arabidopsis thaliana; identical to SEQ ID NO: 29202
  peptide (1)..(358): Ceres Seq. ID no. 13490656

SEQ ID NO: 32793 - protein, 353 aa, Arabidopsis thaliana; identical to SEQ ID NO: 29203
  peptide (1)..(353): Ceres Seq. ID no. 13490657

SEQ ID NO: 32794 - protein, 308 aa, Arabidopsis thaliana; identical to SEQ ID NO: 29204
  peptide (1)..(308): Ceres Seq. ID no. 13490658

SEQ ID NO: 32795 - DNA, 1273 bp, Arabidopsis thaliana; identical to SEQ ID NO: 29205
  misc_feature (1)..(1273): Ceres Seq. ID no. 13490651
  misc_feature (1)..(1273): Ortholog of  Ceres SEQ ID NO 15178027 as cited in SEQ ID NO 55634
  misc_feature (1)..(1273): Ortholog of  Ceres SEQ ID NO 14314739 as cited in SEQ ID NO 59911

SEQ ID NO: 32796 - protein, 298 aa, Arabidopsis thaliana; identical to SEQ ID NO: 29206
  peptide (1)..(298): Ceres Seq. ID no. 13490652

SEQ ID NO: 32797 - protein, 291 aa, Arabidopsis thaliana; identical to SEQ ID NO: 29207
  peptide (1)..(291): Ceres Seq. ID no. 13490653

SEQ ID NO: 32798 - protein, 286 aa, Arabidopsis thaliana; identical to SEQ ID NO: 29208
  peptide (1)..(286): Ceres Seq. ID no. 13490654

SEQ ID NO: 32799 - DNA, 1665 bp, Arabidopsis thaliana; identical to SEQ ID NO: 29209
  misc_feature (1)..(1665): Ceres Seq. ID no. 13575417
  misc_feature (1)..(1665): Ortholog of  Ceres SEQ ID NO 14314559 as cited in SEQ ID NO 52317
  misc_feature (1)..(1665): Ortholog of  Ceres SEQ ID NO 15174571 as cited in SEQ ID NO 53570
  misc_feature (1)..(1665): Ortholog of  Ceres SEQ ID NO 14314367 as cited in SEQ ID NO 57446

SEQ ID NO: 32800 - protein, 441 aa, Arabidopsis thaliana; identical to SEQ ID NO: 29210
  peptide (1)..(441): Ceres Seq. ID no. 13575418

SEQ ID NO: 32801 - protein, 390 aa, Arabidopsis thaliana; identical to SEQ ID NO: 29211
  peptide (1)..(390): Ceres Seq. ID no. 13575419

SEQ ID NO: 32802 - protein, 341 aa, Arabidopsis thaliana; identical to SEQ ID NO: 29212
  peptide (1)..(341): Ceres Seq. ID no. 13575420

SEQ ID NO: 32803 - DNA, 1192 bp, Arabidopsis thaliana; identical to SEQ ID NO: 29213
  misc_feature (1)..(1192): Ceres Seq. ID no. 12324345
  misc_feature (1)..(1192): Ortholog of  Ceres SEQ ID NO 14313796 as cited in SEQ ID NO 54544

SEQ ID NO: 32804 - protein, 166 aa, Arabidopsis thaliana; identical to SEQ ID NO: 29214
  peptide (1)..(166): Ceres Seq. ID no. 12324346

SEQ ID NO: 32805 - protein, 163 aa, Arabidopsis thaliana; identical to SEQ ID NO: 29215
  peptide (1)..(163): Ceres Seq. ID no. 12324347

SEQ ID NO: 32806 - protein, 162 aa, Arabidopsis thaliana; identical to SEQ ID NO: 29216
  peptide (1)..(162): Ceres Seq. ID no. 12324348

SEQ ID NO: 32807 - DNA, 1360 bp, Arabidopsis thaliana; identical to SEQ ID NO: 29217
  misc_feature (1)..(1360): Ceres Seq. ID no. 12339401
  misc_feature (1)..(1360): Ortholog of  Ceres SEQ ID NO 12578315 as cited in SEQ ID NO 62451
  misc_feature (1)..(1360): Ortholog of  Ceres SEQ ID NO 12617090 as cited in SEQ ID NO 64005
  misc_feature (1)..(1360): Ortholog of  Ceres SEQ ID NO 13597233 as cited in SEQ ID NO 64370
  misc_feature (1)..(1360): Ortholog of  Ceres SEQ ID NO 13584577 as cited in SEQ ID NO 65298

SEQ ID NO: 32808 - protein, 309 aa, Arabidopsis thaliana; identical to SEQ ID NO: 29218
  peptide (1)..(309): Ceres Seq. ID no. 12339402

SEQ ID NO: 32809 - protein, 290 aa, Arabidopsis thaliana; identical to SEQ ID NO: 29219
  peptide (1)..(290): Ceres Seq. ID no. 12339403

SEQ ID NO: 32810 - DNA, 1422 bp, Arabidopsis thaliana; identical to SEQ ID NO: 29220
  misc_feature (1)..(1422): Ceres Seq. ID no. 12324257
  misc_feature (1)..(1422): Ortholog of  Ceres SEQ ID NO 15177104 as cited in SEQ ID NO 56048

SEQ ID NO: 32811 - protein, 350 aa, Arabidopsis thaliana; identical to SEQ ID NO: 29221
  peptide (1)..(350): Ceres Seq. ID no. 12324258

SEQ ID NO: 32812 - protein, 344 aa, Arabidopsis thaliana; identical to SEQ ID NO: 29222
  peptide (1)..(344): Ceres Seq. ID no. 12324259

SEQ ID NO: 32813 - protein, 262 aa, Arabidopsis thaliana; identical to SEQ ID NO: 29223
  peptide (1)..(262): Ceres Seq. ID no. 12324260

SEQ ID NO: 32814 - DNA, 2118 bp, Arabidopsis thaliana; identical to SEQ ID NO: 29224
  misc_feature (1)..(2118): Ceres Seq. ID no. 13488391
  misc_feature (1)..(2118): Ortholog of  Ceres SEQ ID NO 12556893 as cited in SEQ ID NO 30
  misc_feature (1)..(2118): Ortholog of  Ceres SEQ ID NO 13584538 as cited in SEQ ID NO 64739

SEQ ID NO: 32815 - protein, 596 aa, Arabidopsis thaliana; identical to SEQ ID NO: 29225
  peptide (1)..(596): Ceres Seq. ID no. 13488392

SEQ ID NO: 32816 - protein, 454 aa, Arabidopsis thaliana; identical to SEQ ID NO: 29226
  peptide (1)..(454): Ceres Seq. ID no. 13488393

SEQ ID NO: 32817 - protein, 447 aa, Arabidopsis thaliana; identical to SEQ ID NO: 29227
  peptide (1)..(447): Ceres Seq. ID no. 13488394

SEQ ID NO: 32818 - DNA, 1406 bp, Arabidopsis thaliana; identical to SEQ ID NO: 29228
  misc_feature (1)..(1406): Ceres Seq. ID no. 13490460
  misc_feature (1)..(1406): Ortholog of  Ceres SEQ ID NO 15176375 as cited in SEQ ID NO 53238
  misc_feature (1)..(1406): Ortholog of  Ceres SEQ ID NO 15170532 as cited in SEQ ID NO 55671
  misc_feature (1)..(1406): Ortholog of  Ceres SEQ ID NO 14316507 as cited in SEQ ID NO 57397
  misc_feature (1)..(1406): Ortholog of  Ceres SEQ ID NO 13663060 as cited in SEQ ID NO 60964
  misc_feature (1)..(1406): Ortholog of  Ceres SEQ ID NO 13598532 as cited in SEQ ID NO 65204
  misc_feature (1)..(1406): Ortholog of  Ceres SEQ ID NO 13656849 as cited in SEQ ID NO 65764
  misc_feature (1)..(1406): Ortholog of  Ceres SEQ ID NO 13656501 as cited in SEQ ID NO 69206

SEQ ID NO: 32819 - protein, 294 aa, Arabidopsis thaliana [sequence omitted]

SEQ ID NO: 32820 - protein, 237 aa, Arabidopsis thaliana; identical to SEQ ID NO: 29230
  peptide (1)..(237): Ceres Seq. ID no. 13490462

SEQ ID NO: 32821 - protein, 204 aa, Arabidopsis thaliana; identical to SEQ ID NO: 29231
  peptide (1)..(204): Ceres Seq. ID no. 13490463

SEQ ID NO: 32822 - DNA, 1444 bp, Arabidopsis thaliana; identical to SEQ ID NO: 29232
  misc_feature (1)..(1444): Ceres Seq. ID no. 13486778
  misc_feature (1)..(1444): Ortholog of  Ceres SEQ ID NO 14311553 as cited in SEQ ID NO 51462
  misc_feature (1)..(1444): Ortholog of  Ceres SEQ ID NO 13599003 as cited in SEQ ID NO 0

SEQ ID NO: 32823 - protein, 413 aa, Arabidopsis thaliana; identical to SEQ ID NO: 29233
  peptide (1)..(413): Ceres Seq. ID no. 13486779

SEQ ID NO: 32824 - protein, 401 aa, Arabidopsis thaliana; identical to SEQ ID NO: 29234
  peptide (1)..(401): Ceres Seq. ID no. 13486780

SEQ ID NO: 32825 - protein, 370 aa, Arabidopsis thaliana; identical to SEQ ID NO: 29235
  peptide (1)..(370): Ceres Seq. ID no. 13486781

SEQ ID NO: 32826 - DNA, 1338 bp, Arabidopsis thaliana; identical to SEQ ID NO: 29236
  misc_feature (1)..(1338): Ceres Seq. ID no. 12324858
  misc_feature (1)..(1338): Ortholog of  Ceres SEQ ID NO 15169300 as cited in SEQ ID NO 59572
  misc_feature (1)..(1338): Ortholog of  Ceres SEQ ID NO 15176407 as cited in SEQ ID NO 59620
  misc_feature (1)..(1338): Ortholog of  Ceres SEQ ID NO 13596876 as cited in SEQ ID NO 62696
  misc_feature (1)..(1338): Ortholog of  Ceres SEQ ID NO 13655442 as cited in SEQ ID NO 64359
  misc_feature (1)..(1338): Ortholog of  Ceres SEQ ID NO 14303652 as cited in SEQ ID NO 67569

SEQ ID NO: 32827 - protein, 241 aa, Arabidopsis thaliana; identical to SEQ ID NO: 29237
  peptide (1)..(241): Ceres Seq. ID no. 12324859

SEQ ID NO: 32828 - protein, 180 aa, Arabidopsis thaliana; identical to SEQ ID NO: 29238
  peptide (1)..(180): Ceres Seq. ID no. 12324860

SEQ ID NO: 32829 - DNA, 1386 bp, Arabidopsis thaliana; identical to SEQ ID NO: 29239
  misc_feature (1)..(1386): Ceres Seq. ID no. 12321239
  misc_feature (1)..(1386): Ortholog of  Ceres SEQ ID NO 15179593 as cited in SEQ ID NO 1057
  misc_feature (1)..(1386): Ortholog of  Ceres SEQ ID NO 14306904 as cited in SEQ ID NO 53566
  misc_feature (1)..(1386): Ortholog of  Ceres SEQ ID NO 13658640 as cited in SEQ ID NO 66419

SEQ ID NO: 32830 - protein, 296 aa, Arabidopsis thaliana; identical to SEQ ID NO: 29240
  peptide (1)..(296): Ceres Seq. ID no. 12321240

SEQ ID NO: 32831 - protein, 285 aa, Arabidopsis thaliana; identical to SEQ ID NO: 29241
  peptide (1)..(285): Ceres Seq. ID no. 12321241

SEQ ID NO: 32832 - protein, 239 aa, Arabidopsis thaliana; identical to SEQ ID NO: 29242
  peptide (1)..(239): Ceres Seq. ID no. 12321242

SEQ ID NO: 32833 - DNA, 468 bp, Arabidopsis thaliana; identical to SEQ ID NO: 29243
  misc_feature (1)..(468): Ceres Seq. ID no. 12397076
  misc_feature (1)..(468): Ortholog of  Ceres SEQ ID NO 13597380 as cited in SEQ ID NO 64054

SEQ ID NO: 32834 - protein, 113 aa, Arabidopsis thaliana; identical to SEQ ID NO: 29244
  peptide (1)..(113): Ceres Seq. ID no. 12397077

SEQ ID NO: 32835 - protein, 103 aa, Arabidopsis thaliana; identical to SEQ ID NO: 29245
  peptide (1)..(103): Ceres Seq. ID no. 12397078

SEQ ID NO: 32836 - protein, 99 aa, Arabidopsis thaliana; identical to SEQ ID NO: 29246
  peptide (1)..(99): Ceres Seq. ID no. 12397079

SEQ ID NO: 32837 - DNA, 726 bp, Arabidopsis thaliana; identical to SEQ ID NO: 29247
  misc_feature (1)..(726): Ceres Seq. ID no. 12372146
  misc_feature (1)..(726): Ortholog of  Ceres SEQ ID NO 12563124 as cited in SEQ ID NO 57104
  misc_feature (1)..(726): Ortholog of  Ceres SEQ ID NO 13598373 as cited in SEQ ID NO 62185
  misc_feature (1)..(726): Ortholog of  Ceres SEQ ID NO 12584664 as cited in SEQ ID NO 62232
  misc_feature (1)..(726): Ortholog of  Ceres SEQ ID NO 12617639 as cited in SEQ ID NO 65219
  misc_feature (1)..(726): Ortholog of  Ceres SEQ ID NO 15179982 as cited in SEQ ID NO 0

SEQ ID NO: 32838 - protein, 169 aa, Arabidopsis thaliana; identical to SEQ ID NO: 22059
  peptide (1)..(169): Ceres Seq. ID no. 12372147

SEQ ID NO: 32839 - protein, 110 aa, Arabidopsis thaliana; identical to SEQ ID NO: 22060
  peptide (1)..(110): Ceres Seq. ID no. 12372148

SEQ ID NO: 32840 - protein, 103 aa, Arabidopsis thaliana; identical to SEQ ID NO: 22061
  peptide (1)..(103): Ceres Seq. ID no. 12372149

SEQ ID NO: 32841 - DNA, 671 bp, Arabidopsis thaliana; identical to SEQ ID NO: 29251
  misc_feature (1)..(671): Ceres Seq. ID no. 12561505
  misc_feature (1)..(671): Ortholog of  Ceres SEQ ID NO 15177478 as cited in SEQ ID NO 1121

SEQ ID NO: 32842 - protein, 166 aa, Arabidopsis thaliana; identical to SEQ ID NO: 29252
  peptide (1)..(166): Ceres Seq. ID no. 12561506

SEQ ID NO: 32843 - protein, 154 aa, Arabidopsis thaliana; identical to SEQ ID NO: 29253
  peptide (1)..(154): Ceres Seq. ID no. 12561507

SEQ ID NO: 32844 - protein, 152 aa, Arabidopsis thaliana; identical to SEQ ID NO: 29254
  peptide (1)..(152): Ceres Seq. ID no. 12561508

SEQ ID NO: 32845 - DNA, 2743 bp, Arabidopsis thaliana; identical to SEQ ID NO: 29255
  misc_feature (1)..(2743): Ceres Seq. ID no. 13494317
  misc_feature (1)..(2743): Ortholog of  Ceres SEQ ID NO 13582534 as cited in SEQ ID NO 57409
  misc_feature (1)..(2743): Ortholog of  Ceres SEQ ID NO 14302384 as cited in SEQ ID NO 67177

SEQ ID NO: 32846 - protein, 805 aa, Arabidopsis thaliana; identical to SEQ ID NO: 29256
  peptide (1)..(805): Ceres Seq. ID no. 13494318

SEQ ID NO: 32847 - protein, 803 aa, Arabidopsis thaliana; identical to SEQ ID NO: 29257
  peptide (1)..(803): Ceres Seq. ID no. 13494319

SEQ ID NO: 32848 - protein, 658 aa, Arabidopsis thaliana; identical to SEQ ID NO: 29258
  peptide (1)..(658): Ceres Seq. ID no. 13494320

SEQ ID NO: 32849 - DNA, 1187 bp, Arabidopsis thaliana; identical to SEQ ID NO: 29259
  misc_feature (1)..(1187): Ceres Seq. ID no. 13500226
  misc_feature (1)..(1187): Ortholog of  Ceres SEQ ID NO 13655656 as cited in SEQ ID NO 63731

SEQ ID NO: 32850 - protein, 266 aa, Arabidopsis thaliana; identical to SEQ ID NO: 29260
  peptide (1)..(266): Ceres Seq. ID no. 13500227

SEQ ID NO: 32851 - protein, 236 aa, Arabidopsis thaliana; identical to SEQ ID NO: 29261
  peptide (1)..(236): Ceres Seq. ID no. 13500228

SEQ ID NO: 32852 - protein, 173 aa, Arabidopsis thaliana; identical to SEQ ID NO: 29262
  peptide (1)..(173): Ceres Seq. ID no. 13500229

SEQ ID NO: 32853 - DNA, 870 bp, Arabidopsis thaliana; identical to SEQ ID NO: 29263
  misc_feature (1)..(870): Ceres Seq. ID no. 12776994
  misc_feature (1)..(870): Ortholog of  Ceres SEQ ID NO 15179163 as cited in SEQ ID NO 0

SEQ ID NO: 32854 - protein, 171 aa, Arabidopsis thaliana; identical to SEQ ID NO: 29264
  peptide (1)..(171): Ceres Seq. ID no. 12776995

SEQ ID NO: 32855 - DNA, 493 bp, Arabidopsis thaliana; identical to SEQ ID NO: 29265
  misc_feature (1)..(493): Ceres Seq. ID no. 13489281
  misc_feature (1)..(493): Ortholog of  Ceres SEQ ID NO 14302474 as cited in SEQ ID NO 60589

SEQ ID NO: 32856 - protein, 103 aa, Arabidopsis thaliana; identical to SEQ ID NO: 7737
  peptide (1)..(103): Ceres Seq. ID no. 13489282

SEQ ID NO: 32857 - protein, 73 aa, Arabidopsis thaliana; identical to SEQ ID NO: 29267
  peptide (1)..(73): Ceres Seq. ID no. 13489283

SEQ ID NO: 32858 - DNA, 805 bp, Arabidopsis thaliana; identical to SEQ ID NO: 29268
  misc_feature (1)..(805): Ceres Seq. ID no. 12466452
  misc_feature (1)..(805): Ortholog of  Ceres SEQ ID NO 12583682 as cited in SEQ ID NO 56297
  misc_feature (1)..(805): Ortholog of  Ceres SEQ ID NO 15179225 as cited in SEQ ID NO 0

SEQ ID NO: 32859 - protein, 197 aa, Arabidopsis thaliana; identical to SEQ ID NO: 29269
  peptide (1)..(197): Ceres Seq. ID no. 12466453

SEQ ID NO: 32860 - protein, 184 aa, Arabidopsis thaliana; identical to SEQ ID NO: 29270
  peptide (1)..(184): Ceres Seq. ID no. 12466454

SEQ ID NO: 32861 - protein, 168 aa, Arabidopsis thaliana; identical to SEQ ID NO: 29271
  peptide (1)..(168): Ceres Seq. ID no. 12466455

SEQ ID NO: 32862 - DNA, 703 bp, Arabidopsis thaliana; identical to SEQ ID NO: 29272
  misc_feature (1)..(703): Ceres Seq. ID no. 12393111
  misc_feature (1)..(703): Ortholog of  Ceres SEQ ID NO 15176693 as cited in SEQ ID NO 1078
  misc_feature (1)..(703): Ortholog of  Ceres SEQ ID NO 12615074 as cited in SEQ ID NO 62676
  misc_feature (1)..(703): Ortholog of  Ceres SEQ ID NO 13598819 as cited in SEQ ID NO 0
  misc_feature (1)..(703): Ortholog of  Ceres SEQ ID NO 13600371 as cited in SEQ ID NO 0

SEQ ID NO: 32863 - protein, 134 aa, Arabidopsis thaliana; identical to SEQ ID NO: 29273
  peptide (1)..(134): Ceres Seq. ID no. 12393112

SEQ ID NO: 32864 - protein, 123 aa, Arabidopsis thaliana; identical to SEQ ID NO: 29274
  peptide (1)..(123): Ceres Seq. ID no. 12393113

SEQ ID NO: 32865 - protein, 81 aa, Arabidopsis thaliana; identical to SEQ ID NO: 29275
  peptide (1)..(81): Ceres Seq. ID no. 12393114

SEQ ID NO: 32866 - DNA, 684 bp, Arabidopsis thaliana; identical to SEQ ID NO: 29276
  misc_feature (1)..(684): Ceres Seq. ID no. 13593010
  misc_feature (1)..(684): Ortholog of  Ceres SEQ ID NO 15227029 as cited in SEQ ID NO 60571
  misc_feature (1)..(684): Ortholog of  Ceres SEQ ID NO 15175269 as cited in SEQ ID NO 63840
  misc_feature (1)..(684): Ortholog of  Ceres SEQ ID NO 15176141 as cited in SEQ ID NO 0

SEQ ID NO: 32867 - protein, 141 aa, Arabidopsis thaliana; identical to SEQ ID NO: 29277
  peptide (1)..(141): Ceres Seq. ID no. 13593011

SEQ ID NO: 32868 - protein, 98 aa, Arabidopsis thaliana; identical to SEQ ID NO: 29278
  peptide (1)..(98): Ceres Seq. ID no. 13593012

SEQ ID NO: 32869 - DNA, 841 bp, Arabidopsis thaliana; identical to SEQ ID NO: 29279
  misc_feature (1)..(841): Ceres Seq. ID no. 12379214
  misc_feature (1)..(841): Ortholog of  Ceres SEQ ID NO 14306117 as cited in SEQ ID NO 0
  misc_feature (1)..(841): Ortholog of  Ceres SEQ ID NO 14309181 as cited in SEQ ID NO 0

SEQ ID NO: 32870 - protein, 234 aa, Arabidopsis thaliana; identical to SEQ ID NO: 29280
  peptide (1)..(234): Ceres Seq. ID no. 12379215

SEQ ID NO: 32871 - protein, 220 aa, Arabidopsis thaliana; identical to SEQ ID NO: 29281
  peptide (1)..(220): Ceres Seq. ID no. 12379216

SEQ ID NO: 32872 - protein, 169 aa, Arabidopsis thaliana; identical to SEQ ID NO: 29282
  peptide (1)..(169): Ceres Seq. ID no. 12379217

SEQ ID NO: 32873 - DNA, 708 bp, Arabidopsis thaliana; identical to SEQ ID NO: 29283
  misc_feature (1)..(708): Ceres Seq. ID no. 12331871
  misc_feature (1)..(708): Ortholog of  Ceres SEQ ID NO 14306303 as cited in SEQ ID NO 56884

SEQ ID NO: 32874 - protein, 182 aa, Arabidopsis thaliana; identical to SEQ ID NO: 29284
  peptide (1)..(182): Ceres Seq. ID no. 12331872

SEQ ID NO: 32875 - DNA, 819 bp, Arabidopsis thaliana; identical to SEQ ID NO: 29285
  misc_feature (1)..(819): Ceres Seq. ID no. 12393395
  misc_feature (1)..(819): Ortholog of  Ceres SEQ ID NO 13598160 as cited in SEQ ID NO 61317
  misc_feature (1)..(819): Ortholog of  Ceres SEQ ID NO 13579986 as cited in SEQ ID NO 64562
  misc_feature (1)..(819): Ortholog of  Ceres SEQ ID NO 12614253 as cited in SEQ ID NO 68518

SEQ ID NO: 32876 - protein, 243 aa, Arabidopsis thaliana; identical to SEQ ID NO: 29286
  peptide (1)..(243): Ceres Seq. ID no. 12393396

SEQ ID NO: 32877 - protein, 205 aa, Arabidopsis thaliana; identical to SEQ ID NO: 29287
  peptide (1)..(205): Ceres Seq. ID no. 12393397

SEQ ID NO: 32878 - protein, 188 aa, Arabidopsis thaliana; identical to SEQ ID NO: 29288
  peptide (1)..(188): Ceres Seq. ID no. 12393398

SEQ ID NO: 32879 - DNA, 1146 bp, Arabidopsis thaliana; identical to SEQ ID NO: 29289
  misc_feature (1)..(1146): Ceres Seq. ID no. 12337382
  misc_feature (1)..(1146): Ortholog of  Ceres SEQ ID NO 15174890 as cited in SEQ ID NO 53624

SEQ ID NO: 32880 - protein, 144 aa, Arabidopsis thaliana; identical to SEQ ID NO: 29290
  peptide (1)..(144): Ceres Seq. ID no. 12337383

SEQ ID NO: 32881 - protein, 126 aa, Arabidopsis thaliana; identical to SEQ ID NO: 29291
  peptide (1)..(126): Ceres Seq. ID no. 12337384

SEQ ID NO: 32882 - protein, 110 aa, Arabidopsis thaliana; identical to SEQ ID NO: 29292
  peptide (1)..(110): Ceres Seq. ID no. 12337385

SEQ ID NO: 32883 - DNA, 1263 bp, Arabidopsis thaliana; identical to SEQ ID NO: 29293
  misc_feature (1)..(1263): Ceres Seq. ID no. 12324797
  misc_feature (1)..(1263): Ortholog of  Ceres SEQ ID NO 14306617 as cited in SEQ ID NO 53026

SEQ ID NO: 32884 - protein, 246 aa, Arabidopsis thaliana; identical to SEQ ID NO: 29294
  peptide (1)..(246): Ceres Seq. ID no. 12324798

SEQ ID NO: 32885 - protein, 240 aa, Arabidopsis thaliana; identical to SEQ ID NO: 29295
  peptide (1)..(240): Ceres Seq. ID no. 12324799

SEQ ID NO: 32886 - protein, 160 aa, Arabidopsis thaliana; identical to SEQ ID NO: 29296
  peptide (1)..(160): Ceres Seq. ID no. 12324800

SEQ ID NO: 32887 - DNA, 1687 bp, Arabidopsis thaliana; identical to SEQ ID NO: 29297
  misc_feature (1)..(1687): Ceres Seq. ID no. 12321246
  misc_feature (1)..(1687): Ortholog of  Ceres SEQ ID NO 15170151 as cited in SEQ ID NO 53069
  misc_feature (1)..(1687): Ortholog of  Ceres SEQ ID NO 13594209 as cited in SEQ ID NO 59089
  misc_feature (1)..(1687): Ortholog of  Ceres SEQ ID NO 14316039 as cited in SEQ ID NO 62062
  misc_feature (1)..(1687): Ortholog of  Ceres SEQ ID NO 15176783 as cited in SEQ ID NO 65590
  misc_feature (1)..(1687): Ortholog of  Ceres SEQ ID NO 14308007 as cited in SEQ ID NO 65760
  misc_feature (1)..(1687): Ortholog of  Ceres SEQ ID NO 14308019 as cited in SEQ ID NO 65849
  misc_feature (1)..(1687): Ortholog of  Ceres SEQ ID NO 13502874 as cited in SEQ ID NO 66298
  misc_feature (1)..(1687): Ortholog of  Ceres SEQ ID NO 12614124 as cited in SEQ ID NO 68392

SEQ ID NO: 32888 - protein, 499 aa, Arabidopsis thaliana; identical to SEQ ID NO: 29298
  peptide (1)..(499): Ceres Seq. ID no. 12321247

SEQ ID NO: 32889 - protein, 455 aa, Arabidopsis thaliana; identical to SEQ ID NO: 29299
  peptide (1)..(455): Ceres Seq. ID no. 12321248

SEQ ID NO: 32890 - protein, 433 aa, Arabidopsis thaliana; identical to SEQ ID NO: 29300
  peptide (1)..(433): Ceres Seq. ID no. 12321249

SEQ ID NO: 32891 - DNA, 1422 bp, Arabidopsis thaliana; identical to SEQ ID NO: 29301
  misc_feature (1)..(1422): Ceres Seq. ID no. 12395190
  misc_feature (1)..(1422): Ortholog of  Ceres SEQ ID NO 13593854 as cited in SEQ ID NO 53403
  misc_feature (1)..(1422): Ortholog of  Ceres SEQ ID NO 12581680 as cited in SEQ ID NO 55019
  misc_feature (1)..(1422): Ortholog of  Ceres SEQ ID NO 15172112 as cited in SEQ ID NO 59632

SEQ ID NO: 32892 - protein, 384 aa, Arabidopsis thaliana; identical to SEQ ID NO: 29302
  peptide (1)..(384): Ceres Seq. ID no. 12395191

SEQ ID NO: 32893 - protein, 379 aa, Arabidopsis thaliana; identical to SEQ ID NO: 29303
  peptide (1)..(379): Ceres Seq. ID no. 12395192

SEQ ID NO: 32894 - protein, 324 aa, Arabidopsis thaliana; identical to SEQ ID NO: 29304
  peptide (1)..(324): Ceres Seq. ID no. 12395193

SEQ ID NO: 32895 - DNA, 2300 bp, Arabidopsis thaliana; identical to SEQ ID NO: 29305
  misc_feature (1)..(2300): Ceres Seq. ID no. 13580663
  misc_feature (1)..(2300): Ortholog of  Ceres SEQ ID NO 13594740 as cited in SEQ ID NO 51721
  misc_feature (1)..(2300): Ortholog of  Ceres SEQ ID NO 14316497 as cited in SEQ ID NO 58285
  misc_feature (1)..(2300): Ortholog of  Ceres SEQ ID NO 13595944 as cited in SEQ ID NO 68153

SEQ ID NO: 32896 - protein, 366 aa, Arabidopsis thaliana; identical to SEQ ID NO: 29306
  peptide (1)..(366): Ceres Seq. ID no. 13580664

SEQ ID NO: 32897 - protein, 336 aa, Arabidopsis thaliana; identical to SEQ ID NO: 29307
  peptide (1)..(336): Ceres Seq. ID no. 13580665

SEQ ID NO: 32898 - protein, 270 aa, Arabidopsis thaliana; identical to SEQ ID NO: 29308
  peptide (1)..(270): Ceres Seq. ID no. 13580666

SEQ ID NO: 32899 - DNA, 1389 bp, Arabidopsis thaliana; identical to SEQ ID NO: 29309
  misc_feature (1)..(1389): Ceres Seq. ID no. 13486876
  misc_feature (1)..(1389): Ortholog of  Ceres SEQ ID NO 15176803 as cited in SEQ ID NO 52778
  misc_feature (1)..(1389): Ortholog of  Ceres SEQ ID NO 14302283 as cited in SEQ ID NO 68688

SEQ ID NO: 32900 - protein, 299 aa, Arabidopsis thaliana; identical to SEQ ID NO: 29310
  peptide (1)..(299): Ceres Seq. ID no. 13486877

SEQ ID NO: 32901 - protein, 283 aa, Arabidopsis thaliana; identical to SEQ ID NO: 29311
  peptide (1)..(283): Ceres Seq. ID no. 13486878

SEQ ID NO: 32902 - protein, 278 aa, Arabidopsis thaliana; identical to SEQ ID NO: 29312
  peptide (1)..(278): Ceres Seq. ID no. 13486879

SEQ ID NO: 32903 - DNA, 1558 bp, Arabidopsis thaliana; identical to SEQ ID NO: 29313
  misc_feature (1)..(1558): Ceres Seq. ID no. 12321966
  misc_feature (1)..(1558): Ortholog of  Ceres SEQ ID NO 13594345 as cited in SEQ ID NO 58043
  misc_feature (1)..(1558): Ortholog of  Ceres SEQ ID NO 12614112 as cited in SEQ ID NO 60891
  misc_feature (1)..(1558): Ortholog of  Ceres SEQ ID NO 13597574 as cited in SEQ ID NO 64677
  misc_feature (1)..(1558): Ortholog of  Ceres SEQ ID NO 13597678 as cited in SEQ ID NO 65375
  misc_feature (1)..(1558): Ortholog of  Ceres SEQ ID NO 13662880 as cited in SEQ ID NO 65422
  misc_feature (1)..(1558): Ortholog of  Ceres SEQ ID NO 12779098 as cited in SEQ ID NO 67698
  misc_feature (1)..(1558): Ortholog of  Ceres SEQ ID NO 13596180 as cited in SEQ ID NO 67941
  misc_feature (1)..(1558): Ortholog of  Ceres SEQ ID NO 13591190 as cited in SEQ ID NO 68044
  misc_feature (1)..(1558): Ortholog of  Ceres SEQ ID NO 13596089 as cited in SEQ ID NO 68373

SEQ ID NO: 32904 - protein, 487 aa, Arabidopsis thaliana; identical to SEQ ID NO: 29314
  peptide (1)..(487): Ceres Seq. ID no. 12321967

SEQ ID NO: 32905 - protein, 482 aa, Arabidopsis thaliana; identical to SEQ ID NO: 29315
  peptide (1)..(482): Ceres Seq. ID no. 12321968

SEQ ID NO: 32906 - protein, 353 aa, Arabidopsis thaliana; identical to SEQ ID NO: 29316
  peptide (1)..(353): Ceres Seq. ID no. 12321969

SEQ ID NO: 32907 - DNA, 1190 bp, Arabidopsis thaliana; identical to SEQ ID NO: 29317
  misc_feature (1)..(1190): Ceres Seq. ID no. 12562676
  misc_feature (1)..(1190): Ortholog of  Ceres SEQ ID NO 15177091 as cited in SEQ ID NO 52140
  misc_feature (1)..(1190): Ortholog of  Ceres SEQ ID NO 15172539 as cited in SEQ ID NO 57333
  misc_feature (1)..(1190): Ortholog of  Ceres SEQ ID NO 14315951 as cited in SEQ ID NO 57634
  misc_feature (1)..(1190): Ortholog of  Ceres SEQ ID NO 13597324 as cited in SEQ ID NO 64842
  misc_feature (1)..(1190): Ortholog of  Ceres SEQ ID NO 13658672 as cited in SEQ ID NO 66627

SEQ ID NO: 32908 - protein, 307 aa, Arabidopsis thaliana; identical to SEQ ID NO: 29318
  peptide (1)..(307): Ceres Seq. ID no. 12562677

SEQ ID NO: 32909 - protein, 165 aa, Arabidopsis thaliana; identical to SEQ ID NO: 29319
  peptide (1)..(165): Ceres Seq. ID no. 12562678

SEQ ID NO: 32910 - DNA, 1302 bp, Arabidopsis thaliana; identical to SEQ ID NO: 29320
  misc_feature (1)..(1302): Ceres Seq. ID no. 13622021
  misc_feature (1)..(1302): Ortholog of  Ceres SEQ ID NO 13596780 as cited in SEQ ID NO 62360

SEQ ID NO: 32911 - protein, 361 aa, Arabidopsis thaliana; identical to SEQ ID NO: 29321
  peptide (1)..(361): Ceres Seq. ID no. 13622022

SEQ ID NO: 32912 - DNA, 1522 bp, Arabidopsis thaliana; identical to SEQ ID NO: 29322
  misc_feature (1)..(1522): Ceres Seq. ID no. 13621932
  misc_feature (1)..(1522): Ortholog of  Ceres SEQ ID NO 13599602 as cited in SEQ ID NO 0

SEQ ID NO: 32913 - protein, 414 aa, Arabidopsis thaliana; identical to SEQ ID NO: 29323
  peptide (1)..(414): Ceres Seq. ID no. 13621933

SEQ ID NO: 32914 - protein, 345 aa, Arabidopsis thaliana; identical to SEQ ID NO: 29324
  peptide (1)..(345): Ceres Seq. ID no. 13621934

SEQ ID NO: 32915 - protein, 291 aa, Arabidopsis thaliana; identical to SEQ ID NO: 29325
  peptide (1)..(291): Ceres Seq. ID no. 13621935

SEQ ID NO: 32916 - DNA, 903 bp, Arabidopsis thaliana; identical to SEQ ID NO: 29326
  misc_feature (1)..(903): Ceres Seq. ID no. 12348734
  misc_feature (1)..(903): Ortholog of  Ceres SEQ ID NO 13595658 as cited in SEQ ID NO 59888
  misc_feature (1)..(903): Ortholog of  Ceres SEQ ID NO 13662324 as cited in SEQ ID NO 62162

SEQ ID NO: 32917 - protein, 244 aa, Arabidopsis thaliana; identical to SEQ ID NO: 29327
  peptide (1)..(244): Ceres Seq. ID no. 12348735

SEQ ID NO: 32918 - protein, 182 aa, Arabidopsis thaliana; identical to SEQ ID NO: 29328
  peptide (1)..(182): Ceres Seq. ID no. 12348736

SEQ ID NO: 32919 - DNA, 1206 bp, Arabidopsis thaliana; identical to SEQ ID NO: 29329
  misc_feature (1)..(1206): Ceres Seq. ID no. 12601145
  misc_feature (1)..(1206): Ortholog of  Ceres SEQ ID NO 15179153 as cited in SEQ ID NO 1066
  misc_feature (1)..(1206): Ortholog of  Ceres SEQ ID NO 15176047 as cited in SEQ ID NO 55988
  misc_feature (1)..(1206): Ortholog of  Ceres SEQ ID NO 13582167 as cited in SEQ ID NO 56203
  misc_feature (1)..(1206): Ortholog of  Ceres SEQ ID NO 13658295 as cited in SEQ ID NO 66515

SEQ ID NO: 32920 - protein, 325 aa, Arabidopsis thaliana; identical to SEQ ID NO: 29330
  peptide (1)..(325): Ceres Seq. ID no. 12601146

SEQ ID NO: 32921 - protein, 323 aa, Arabidopsis thaliana; identical to SEQ ID NO: 29331
  peptide (1)..(323): Ceres Seq. ID no. 12601147

SEQ ID NO: 32922 - protein, 322 aa, Arabidopsis thaliana; identical to SEQ ID NO: 29332
  peptide (1)..(322): Ceres Seq. ID no. 12601148

SEQ ID NO: 32923 - DNA, 1400 bp, Arabidopsis thaliana; identical to SEQ ID NO: 29333
  misc_feature (1)..(1400): Ceres Seq. ID no. 12396512
  misc_feature (1)..(1400): Ortholog of  Ceres SEQ ID NO 15176611 as cited in SEQ ID NO 52869
  misc_feature (1)..(1400): Ortholog of  Ceres SEQ ID NO 14307408 as cited in SEQ ID NO 59419
  misc_feature (1)..(1400): Ortholog of  Ceres SEQ ID NO 12617729 as cited in SEQ ID NO 65352

SEQ ID NO: 32924 - protein, 344 aa, Arabidopsis thaliana [sequence omitted]

SEQ ID NO: 32925 - protein, 333 aa, Arabidopsis thaliana; identical to SEQ ID NO: 29335
  peptide (1)..(333): Ceres Seq. ID no. 12396514

SEQ ID NO: 32926 - protein, 323 aa, Arabidopsis thaliana; identical to SEQ ID NO: 29336
  peptide (1)..(323): Ceres Seq. ID no. 12396515

SEQ ID NO: 32927 - DNA, 1489 bp, Arabidopsis thaliana; identical to SEQ ID NO: 29337
  misc_feature (1)..(1489): Ceres Seq. ID no. 12371848
  misc_feature (1)..(1489): Ortholog of  Ceres SEQ ID NO 14310740 as cited in SEQ ID NO 53755
  misc_feature (1)..(1489): Ortholog of  Ceres SEQ ID NO 13596202 as cited in SEQ ID NO 68492

SEQ ID NO: 32928 - protein, 438 aa, Arabidopsis thaliana; identical to SEQ ID NO: 29338
  peptide (1)..(438): Ceres Seq. ID no. 12371849

SEQ ID NO: 32929 - protein, 403 aa, Arabidopsis thaliana; identical to SEQ ID NO: 29339
  peptide (1)..(403): Ceres Seq. ID no. 12371850

SEQ ID NO: 32930 - protein, 326 aa, Arabidopsis thaliana; identical to SEQ ID NO: 29340
  peptide (1)..(326): Ceres Seq. ID no. 12371851

SEQ ID NO: 32931 - DNA, 1086 bp, Arabidopsis thaliana; identical to SEQ ID NO: 29341
  misc_feature (1)..(1086): Ceres Seq. ID no. 13493751
  misc_feature (1)..(1086): Ortholog of  Ceres SEQ ID NO 12609394 as cited in SEQ ID NO 52095

SEQ ID NO: 32932 - protein, 252 aa, Arabidopsis thaliana; identical to SEQ ID NO: 29342
  peptide (1)..(252): Ceres Seq. ID no. 13493752

SEQ ID NO: 32933 - protein, 247 aa, Arabidopsis thaliana; identical to SEQ ID NO: 29343
  peptide (1)..(247): Ceres Seq. ID no. 13493753

SEQ ID NO: 32934 - protein, 234 aa, Arabidopsis thaliana; identical to SEQ ID NO: 29344
  peptide (1)..(234): Ceres Seq. ID no. 13493754

SEQ ID NO: 32935 - DNA, 897 bp, Arabidopsis thaliana; identical to SEQ ID NO: 26501
  misc_feature (1)..(897): Ceres Seq. ID no. 12603175
  misc_feature (1)..(897): Ortholog of  Ceres SEQ ID NO 15177927 as cited in SEQ ID NO 1170
  misc_feature (1)..(897): Ortholog of  Ceres SEQ ID NO 13596295 as cited in SEQ ID NO 68019

SEQ ID NO: 32936 - protein, 228 aa, Arabidopsis thaliana; identical to SEQ ID NO: 26502
  peptide (1)..(228): Ceres Seq. ID no. 12603176

SEQ ID NO: 32937 - protein, 214 aa, Arabidopsis thaliana [sequence omitted]

SEQ ID NO: 32938 - protein, 200 aa, Arabidopsis thaliana; identical to SEQ ID NO: 26504
  peptide (1)..(200): Ceres Seq. ID no. 12603178

SEQ ID NO: 32939 - DNA, 648 bp, Arabidopsis thaliana; identical to SEQ ID NO: 29349
  misc_feature (1)..(648): Ceres Seq. ID no. 13491518
  misc_feature (1)..(648): Ortholog of  Ceres SEQ ID NO 13581866 as cited in SEQ ID NO 52179
  misc_feature (1)..(648): Ortholog of  Ceres SEQ ID NO 14315451 as cited in SEQ ID NO 59289

SEQ ID NO: 32940 - protein, 166 aa, Arabidopsis thaliana; identical to SEQ ID NO: 29350
  peptide (1)..(166): Ceres Seq. ID no. 13491519

SEQ ID NO: 32941 - DNA, 857 bp, Arabidopsis thaliana; identical to SEQ ID NO: 29351
  misc_feature (1)..(857): Ceres Seq. ID no. 12323707
  misc_feature (1)..(857): Ortholog of  Ceres SEQ ID NO 13661939 as cited in SEQ ID NO 61170
  misc_feature (1)..(857): Ortholog of  Ceres SEQ ID NO 14309041 as cited in SEQ ID NO 0
  misc_feature (1)..(857): Ortholog of  Ceres SEQ ID NO 14309611 as cited in SEQ ID NO 0

SEQ ID NO: 32942 - protein, 176 aa, Arabidopsis thaliana; identical to SEQ ID NO: 29352
  peptide (1)..(176): Ceres Seq. ID no. 12323708

SEQ ID NO: 32943 - protein, 142 aa, Arabidopsis thaliana; identical to SEQ ID NO: 29353
  peptide (1)..(142): Ceres Seq. ID no. 12323709

SEQ ID NO: 32944 - DNA, 1154 bp, Arabidopsis thaliana; identical to SEQ ID NO: 26919
  misc_feature (1)..(1154): Ceres Seq. ID no. 12385275
  misc_feature (1)..(1154): Ortholog of  Ceres SEQ ID NO 14312711 as cited in SEQ ID NO 1401
  misc_feature (1)..(1154): Ortholog of  Ceres SEQ ID NO 13586635 as cited in SEQ ID NO 14217
  misc_feature (1)..(1154): Ortholog of  Ceres SEQ ID NO 15170220 as cited in SEQ ID NO 55383
  misc_feature (1)..(1154): Ortholog of  Ceres SEQ ID NO 14304198 as cited in SEQ ID NO 56479
  misc_feature (1)..(1154): Ortholog of  Ceres SEQ ID NO 14316543 as cited in SEQ ID NO 57118
  misc_feature (1)..(1154): Ortholog of  Ceres SEQ ID NO 12616285 as cited in SEQ ID NO 63483

SEQ ID NO: 32945 - protein, 350 aa, Arabidopsis thaliana; identical to SEQ ID NO: 26920
  peptide (1)..(350): Ceres Seq. ID no. 12385276

SEQ ID NO: 32946 - protein, 331 aa, Arabidopsis thaliana; identical to SEQ ID NO: 21476
  peptide (1)..(331): Ceres Seq. ID no. 12385277

SEQ ID NO: 32947 - protein, 324 aa, Arabidopsis thaliana; identical to SEQ ID NO: 21477
  peptide (1)..(324): Ceres Seq. ID no. 12385278

SEQ ID NO: 32948 - DNA, 1200 bp, Arabidopsis thaliana; identical to SEQ ID NO: 29358
  misc_feature (1)..(1200): Ceres Seq. ID no. 12334308
  misc_feature (1)..(1200): Ortholog of  Ceres SEQ ID NO 12583469 as cited in SEQ ID NO 51031
  misc_feature (1)..(1200): Ortholog of  Ceres SEQ ID NO 13597389 as cited in SEQ ID NO 63426
  misc_feature (1)..(1200): Ortholog of  Ceres SEQ ID NO 13595998 as cited in SEQ ID NO 68161

SEQ ID NO: 32949 - protein, 390 aa, Arabidopsis thaliana; identical to SEQ ID NO: 29359
  peptide (1)..(390): Ceres Seq. ID no. 12334309

SEQ ID NO: 32950 - protein, 381 aa, Arabidopsis thaliana; identical to SEQ ID NO: 29360
  peptide (1)..(381): Ceres Seq. ID no. 12334310

SEQ ID NO: 32951 - protein, 311 aa, Arabidopsis thaliana; identical to SEQ ID NO: 29361
  peptide (1)..(311): Ceres Seq. ID no. 12334311

SEQ ID NO: 32952 - DNA, 813 bp, Arabidopsis thaliana; identical to SEQ ID NO: 29362
  misc_feature (1)..(813): Ceres Seq. ID no. 12580234
  misc_feature (1)..(813): Ortholog of  Ceres SEQ ID NO 15173146 as cited in SEQ ID NO 61836
  misc_feature (1)..(813): Ortholog of  Ceres SEQ ID NO 14309121 as cited in SEQ ID NO 0

SEQ ID NO: 32953 - protein, 157 aa, Arabidopsis thaliana; identical to SEQ ID NO: 29363
  peptide (1)..(157): Ceres Seq. ID no. 12580235

SEQ ID NO: 32954 - protein, 144 aa, Arabidopsis thaliana; identical to SEQ ID NO: 29364
  peptide (1)..(144): Ceres Seq. ID no. 12580236

SEQ ID NO: 32955 - protein, 136 aa, Arabidopsis thaliana; identical to SEQ ID NO: 29365
  peptide (1)..(136): Ceres Seq. ID no. 12580237

SEQ ID NO: 32956 - DNA, 1288 bp, Arabidopsis thaliana; identical to SEQ ID NO: 29366
  misc_feature (1)..(1288): Ceres Seq. ID no. 12334788
  misc_feature (1)..(1288): Ortholog of  Ceres SEQ ID NO 13597380 as cited in SEQ ID NO 64054
  misc_feature (1)..(1288): Ortholog of  Ceres SEQ ID NO 12625474 as cited in SEQ ID NO 64169

SEQ ID NO: 32957 - protein, 343 aa, Arabidopsis thaliana; identical to SEQ ID NO: 29367
  peptide (1)..(343): Ceres Seq. ID no. 12334789

SEQ ID NO: 32958 - protein, 295 aa, Arabidopsis thaliana; identical to SEQ ID NO: 29368
  peptide (1)..(295): Ceres Seq. ID no. 12334790

SEQ ID NO: 32959 - protein, 282 aa, Arabidopsis thaliana; identical to SEQ ID NO: 29369
  peptide (1)..(282): Ceres Seq. ID no. 12334791

SEQ ID NO: 32960 - DNA, 1304 bp, Arabidopsis thaliana; identical to SEQ ID NO: 29370
  misc_feature (1)..(1304): Ceres Seq. ID no. 13487643
  misc_feature (1)..(1304): Ortholog of  Ceres SEQ ID NO 13597582 as cited in SEQ ID NO 65348

SEQ ID NO: 32961 - protein, 361 aa, Arabidopsis thaliana; identical to SEQ ID NO: 29371
  peptide (1)..(361): Ceres Seq. ID no. 13487644

SEQ ID NO: 32962 - protein, 303 aa, Arabidopsis thaliana; identical to SEQ ID NO: 29372
  peptide (1)..(303): Ceres Seq. ID no. 13487645

SEQ ID NO: 32963 - protein, 223 aa, Arabidopsis thaliana; identical to SEQ ID NO: 29373
  peptide (1)..(223): Ceres Seq. ID no. 13487646

SEQ ID NO: 32964 - DNA, 810 bp, Arabidopsis thaliana; identical to SEQ ID NO: 29374
  misc_feature (1)..(810): Ceres Seq. ID no. 13653785
  misc_feature (1)..(810): Ortholog of  Ceres SEQ ID NO 15176321 as cited in SEQ ID NO 52814
  misc_feature (1)..(810): Ortholog of  Ceres SEQ ID NO 12563124 as cited in SEQ ID NO 57104
  misc_feature (1)..(810): Ortholog of  Ceres SEQ ID NO 13598373 as cited in SEQ ID NO 62185
  misc_feature (1)..(810): Ortholog of  Ceres SEQ ID NO 12584664 as cited in SEQ ID NO 62232
  misc_feature (1)..(810): Ortholog of  Ceres SEQ ID NO 15226273 as cited in SEQ ID NO 64934
  misc_feature (1)..(810): Ortholog of  Ceres SEQ ID NO 12617639 as cited in SEQ ID NO 65219

SEQ ID NO: 32965 - protein, 175 aa, Arabidopsis thaliana; identical to SEQ ID NO: 27778
  peptide (1)..(175): Ceres Seq. ID no. 13653786

SEQ ID NO: 32966 - protein, 114 aa, Arabidopsis thaliana; identical to SEQ ID NO: 27779
  peptide (1)..(114): Ceres Seq. ID no. 13653787

SEQ ID NO: 32967 - protein, 107 aa, Arabidopsis thaliana; identical to SEQ ID NO: 27780
  peptide (1)..(107): Ceres Seq. ID no. 13653788

SEQ ID NO: 32968 - DNA, 1231 bp, Arabidopsis thaliana; identical to SEQ ID NO: 29378
  misc_feature (1)..(1231): Ceres Seq. ID no. 12391651
  misc_feature (1)..(1231): Ortholog of  Ceres SEQ ID NO 15174780 as cited in SEQ ID NO 53528

SEQ ID NO: 32969 - protein, 370 aa, Arabidopsis thaliana; identical to SEQ ID NO: 29379
  peptide (1)..(370): Ceres Seq. ID no. 12391652

SEQ ID NO: 32970 - protein, 351 aa, Arabidopsis thaliana; identical to SEQ ID NO: 29380
  peptide (1)..(351): Ceres Seq. ID no. 12391653

SEQ ID NO: 32971 - protein, 210 aa, Arabidopsis thaliana; identical to SEQ ID NO: 29381
  peptide (1)..(210): Ceres Seq. ID no. 12391654

SEQ ID NO: 32972 - DNA, 1350 bp, Arabidopsis thaliana; identical to SEQ ID NO: 29382
  misc_feature (1)..(1350): Ceres Seq. ID no. 13490555
  misc_feature (1)..(1350): Ortholog of  Ceres SEQ ID NO 13594037 as cited in SEQ ID NO 55666
  misc_feature (1)..(1350): Ortholog of  Ceres SEQ ID NO 13657707 as cited in SEQ ID NO 66407

SEQ ID NO: 32973 - protein, 344 aa, Arabidopsis thaliana; identical to SEQ ID NO: 29383
  peptide (1)..(344): Ceres Seq. ID no. 13490556

SEQ ID NO: 32974 - protein, 338 aa, Arabidopsis thaliana; identical to SEQ ID NO: 29384
  peptide (1)..(338): Ceres Seq. ID no. 13490557

SEQ ID NO: 32975 - protein, 329 aa, Arabidopsis thaliana; identical to SEQ ID NO: 29385
  peptide (1)..(329): Ceres Seq. ID no. 13490558

SEQ ID NO: 32976 - DNA, 1135 bp, Arabidopsis thaliana; identical to SEQ ID NO: 29386
  misc_feature (1)..(1135): Ceres Seq. ID no. 12422074
  misc_feature (1)..(1135): Ortholog of  Ceres SEQ ID NO 13593855 as cited in SEQ ID NO 53838
  misc_feature (1)..(1135): Ortholog of  Ceres SEQ ID NO 14302247 as cited in SEQ ID NO 62154
  misc_feature (1)..(1135): Ortholog of  Ceres SEQ ID NO 13539874 as cited in SEQ ID NO 64069

SEQ ID NO: 32977 - protein, 327 aa, Arabidopsis thaliana; identical to SEQ ID NO: 29387
  peptide (1)..(327): Ceres Seq. ID no. 12422075

SEQ ID NO: 32978 - protein, 303 aa, Arabidopsis thaliana; identical to SEQ ID NO: 29388
  peptide (1)..(303): Ceres Seq. ID no. 12422076

SEQ ID NO: 32979 - protein, 302 aa, Arabidopsis thaliana; identical to SEQ ID NO: 29389
  peptide (1)..(302): Ceres Seq. ID no. 12422077

SEQ ID NO: 32980 - DNA, 942 bp, Arabidopsis thaliana; identical to SEQ ID NO: 29390
  misc_feature (1)..(942): Ceres Seq. ID no. 12384618
  misc_feature (1)..(942): Ortholog of  Ceres SEQ ID NO 13585342 as cited in SEQ ID NO 63601
  misc_feature (1)..(942): Ortholog of  Ceres SEQ ID NO 15177459 as cited in SEQ ID NO 0

SEQ ID NO: 32981 - protein, 117 aa, Arabidopsis thaliana; identical to SEQ ID NO: 29391
  peptide (1)..(117): Ceres Seq. ID no. 12384619

SEQ ID NO: 32982 - protein, 99 aa, Arabidopsis thaliana; identical to SEQ ID NO: 29392
  peptide (1)..(99): Ceres Seq. ID no. 12384620

SEQ ID NO: 32983 - protein, 81 aa, Arabidopsis thaliana; identical to SEQ ID NO: 29393
  peptide (1)..(81): Ceres Seq. ID no. 12384621

SEQ ID NO: 32984 - DNA, 1416 bp, Arabidopsis thaliana; identical to SEQ ID NO: 28614
  misc_feature (1)..(1416): Ceres Seq. ID no. 13487514
  misc_feature (1)..(1416): Ortholog of  Ceres SEQ ID NO 12617323 as cited in SEQ ID NO 64129

SEQ ID NO: 32985 - protein, 373 aa, Arabidopsis thaliana; identical to SEQ ID NO: 28615
  peptide (1)..(373): Ceres Seq. ID no. 13487515

SEQ ID NO: 32986 - protein, 289 aa, Arabidopsis thaliana; identical to SEQ ID NO: 28616
  peptide (1)..(289): Ceres Seq. ID no. 13487516

SEQ ID NO: 32987 - protein, 209 aa, Arabidopsis thaliana; identical to SEQ ID NO: 28617
  peptide (1)..(209): Ceres Seq. ID no. 13487517

SEQ ID NO: 32988 - DNA, 965 bp, Arabidopsis thaliana; identical to SEQ ID NO: 29398
  misc_feature (1)..(965): Ceres Seq. ID no. 12782031
  misc_feature (1)..(965): Ortholog of  Ceres SEQ ID NO 13599287 as cited in SEQ ID NO 338
  misc_feature (1)..(965): Ortholog of  Ceres SEQ ID NO 15172934 as cited in SEQ ID NO 51783
  misc_feature (1)..(965): Ortholog of  Ceres SEQ ID NO 15174056 as cited in SEQ ID NO 0

SEQ ID NO: 32989 - protein, 236 aa, Arabidopsis thaliana; identical to SEQ ID NO: 29399
  peptide (1)..(236): Ceres Seq. ID no. 12782032

SEQ ID NO: 32990 - protein, 233 aa, Arabidopsis thaliana; identical to SEQ ID NO: 29400
  peptide (1)..(233): Ceres Seq. ID no. 12782033

SEQ ID NO: 32991 - protein, 135 aa, Arabidopsis thaliana; identical to SEQ ID NO: 29401
  peptide (1)..(135): Ceres Seq. ID no. 12782034

SEQ ID NO: 32992 - DNA, 976 bp, Arabidopsis thaliana; identical to SEQ ID NO: 29402
  misc_feature (1)..(976): Ceres Seq. ID no. 12369947
  misc_feature (1)..(976): Ortholog of  Ceres SEQ ID NO 13594180 as cited in SEQ ID NO 60353

SEQ ID NO: 32993 - protein, 224 aa, Arabidopsis thaliana; identical to SEQ ID NO: 29403
  peptide (1)..(224): Ceres Seq. ID no. 12369948

SEQ ID NO: 32994 - protein, 188 aa, Arabidopsis thaliana; identical to SEQ ID NO: 29404
  peptide (1)..(188): Ceres Seq. ID no. 12369949

SEQ ID NO: 32995 - DNA, 1740 bp, Arabidopsis thaliana; identical to SEQ ID NO: 29405
  misc_feature (1)..(1740): Ceres Seq. ID no. 13488118
  misc_feature (1)..(1740): Ortholog of  Ceres SEQ ID NO 13639663 as cited in SEQ ID NO 57850

SEQ ID NO: 32996 - protein, 456 aa, Arabidopsis thaliana; identical to SEQ ID NO: 29406
  peptide (1)..(456): Ceres Seq. ID no. 13488119

SEQ ID NO: 32997 - protein, 367 aa, Arabidopsis thaliana; identical to SEQ ID NO: 29407
  peptide (1)..(367): Ceres Seq. ID no. 13488120

SEQ ID NO: 32998 - protein, 332 aa, Arabidopsis thaliana; identical to SEQ ID NO: 29408
  peptide (1)..(332): Ceres Seq. ID no. 13488121

SEQ ID NO: 32999 - DNA, 1189 bp, Arabidopsis thaliana; identical to SEQ ID NO: 29409
  misc_feature (1)..(1189): Ceres Seq. ID no. 12325946
  misc_feature (1)..(1189): Ortholog of  Ceres SEQ ID NO 14316451 as cited in SEQ ID NO 57956
  misc_feature (1)..(1189): Ortholog of  Ceres SEQ ID NO 15224799 as cited in SEQ ID NO 0

SEQ ID NO: 33000 - protein, 351 aa, Arabidopsis thaliana; identical to SEQ ID NO: 29410
  peptide (1)..(351): Ceres Seq. ID no. 12325947

SEQ ID NO: 33001 - protein, 348 aa, Arabidopsis thaliana; identical to SEQ ID NO: 29411
  peptide (1)..(348): Ceres Seq. ID no. 12325948

SEQ ID NO: 33002 - protein, 273 aa, Arabidopsis thaliana; identical to SEQ ID NO: 29412
  peptide (1)..(273): Ceres Seq. ID no. 12325949

SEQ ID NO: 33003 - DNA, 1221 bp, Arabidopsis thaliana; identical to SEQ ID NO: 29413
  misc_feature (1)..(1221): Ceres Seq. ID no. 12336049
  misc_feature (1)..(1221): Ortholog of  Ceres SEQ ID NO 12607536 as cited in SEQ ID NO 55306
  misc_feature (1)..(1221): Ortholog of  Ceres SEQ ID NO 15168443 as cited in SEQ ID NO 57116

SEQ ID NO: 33004 - protein, 281 aa, Arabidopsis thaliana; identical to SEQ ID NO: 29414
  peptide (1)..(281): Ceres Seq. ID no. 12336050

SEQ ID NO: 33005 - protein, 176 aa, Arabidopsis thaliana; identical to SEQ ID NO: 29415
  peptide (1)..(176): Ceres Seq. ID no. 12336051

SEQ ID NO: 33006 - DNA, 641 bp, Arabidopsis thaliana; identical to SEQ ID NO: 29416
  misc_feature (1)..(641): Ceres Seq. ID no. 13496822
  misc_feature (1)..(641): Ortholog of  Ceres SEQ ID NO 14305967 as cited in SEQ ID NO 1343

SEQ ID NO: 33007 - protein, 149 aa, Arabidopsis thaliana; identical to SEQ ID NO: 29417
  peptide (1)..(149): Ceres Seq. ID no. 13496823

SEQ ID NO: 33008 - protein, 113 aa, Arabidopsis thaliana; identical to SEQ ID NO: 29418
  peptide (1)..(113): Ceres Seq. ID no. 13496824

SEQ ID NO: 33009 - protein, 98 aa, Arabidopsis thaliana; identical to SEQ ID NO: 29419
  peptide (1)..(98): Ceres Seq. ID no. 13496825

SEQ ID NO: 33010 - DNA, 812 bp, Arabidopsis thaliana; identical to SEQ ID NO: 29420
  misc_feature (1)..(812): Ceres Seq. ID no. 12332082
  misc_feature (1)..(812): Ortholog of  Ceres SEQ ID NO 12582856 as cited in SEQ ID NO 51905
  misc_feature (1)..(812): Ortholog of  Ceres SEQ ID NO 14316155 as cited in SEQ ID NO 52377

SEQ ID NO: 33011 - protein, 156 aa, Arabidopsis thaliana; identical to SEQ ID NO: 29421
  peptide (1)..(156): Ceres Seq. ID no. 12332083

SEQ ID NO: 33012 - protein, 154 aa, Arabidopsis thaliana; identical to SEQ ID NO: 29422
  peptide (1)..(154): Ceres Seq. ID no. 12332084

SEQ ID NO: 33013 - protein, 152 aa, Arabidopsis thaliana; identical to SEQ ID NO: 29423
  peptide (1)..(152): Ceres Seq. ID no. 12332085

SEQ ID NO: 33014 - DNA, 998 bp, Arabidopsis thaliana; identical to SEQ ID NO: 29424
  misc_feature (1)..(998): Ceres Seq. ID no. 12321343
  misc_feature (1)..(998): Ortholog of  Ceres SEQ ID NO 15176208 as cited in SEQ ID NO 55594
  misc_feature (1)..(998): Ortholog of  Ceres SEQ ID NO 14312330 as cited in SEQ ID NO 58581

SEQ ID NO: 33015 - protein, 260 aa, Arabidopsis thaliana; identical to SEQ ID NO: 29425
  peptide (1)..(260): Ceres Seq. ID no. 12321344

SEQ ID NO: 33016 - protein, 173 aa, Arabidopsis thaliana; identical to SEQ ID NO: 29426
  peptide (1)..(173): Ceres Seq. ID no. 12321345

SEQ ID NO: 33017 - DNA, 1133 bp, Arabidopsis thaliana; identical to SEQ ID NO: 29056
  misc_feature (1)..(1133): Ceres Seq. ID no. 12336045
  misc_feature (1)..(1133): Ortholog of  Ceres SEQ ID NO 14315989 as cited in SEQ ID NO 57571

SEQ ID NO: 33018 - protein, 285 aa, Arabidopsis thaliana; identical to SEQ ID NO: 29057
  peptide (1)..(285): Ceres Seq. ID no. 12336046

SEQ ID NO: 33019 - protein, 251 aa, Arabidopsis thaliana; identical to SEQ ID NO: 29058
  peptide (1)..(251): Ceres Seq. ID no. 12336047

SEQ ID NO: 33020 - protein, 235 aa, Arabidopsis thaliana; identical to SEQ ID NO: 29059
  peptide (1)..(235): Ceres Seq. ID no. 12336048

SEQ ID NO: 33021 - DNA, 1311 bp, Arabidopsis thaliana; identical to SEQ ID NO: 29431
  misc_feature (1)..(1311): Ceres Seq. ID no. 12580230
  misc_feature (1)..(1311): Ortholog of  Ceres SEQ ID NO 15179926 as cited in SEQ ID NO 57010

SEQ ID NO: 33022 - protein, 366 aa, Arabidopsis thaliana; identical to SEQ ID NO: 29432
  peptide (1)..(366): Ceres Seq. ID no. 12580231

SEQ ID NO: 33023 - protein, 304 aa, Arabidopsis thaliana; identical to SEQ ID NO: 29433
  peptide (1)..(304): Ceres Seq. ID no. 12580232

SEQ ID NO: 33024 - protein, 231 aa, Arabidopsis thaliana; identical to SEQ ID NO: 29434
  peptide (1)..(231): Ceres Seq. ID no. 12580233

SEQ ID NO: 33025 - DNA, 1189 bp, Arabidopsis thaliana; identical to SEQ ID NO: 29435
  misc_feature (1)..(1189): Ceres Seq. ID no. 12371708
  misc_feature (1)..(1189): Ortholog of  Ceres SEQ ID NO 13582388 as cited in SEQ ID NO 56812
  misc_feature (1)..(1189): Ortholog of  Ceres SEQ ID NO 14305353 as cited in SEQ ID NO 57710

SEQ ID NO: 33026 - protein, 240 aa, Arabidopsis thaliana; identical to SEQ ID NO: 29436
  peptide (1)..(240): Ceres Seq. ID no. 12371709

SEQ ID NO: 33027 - protein, 212 aa, Arabidopsis thaliana; identical to SEQ ID NO: 29437
  peptide (1)..(212): Ceres Seq. ID no. 12371710

SEQ ID NO: 33028 - protein, 144 aa, Arabidopsis thaliana; identical to SEQ ID NO: 29438
  peptide (1)..(144): Ceres Seq. ID no. 12371711

SEQ ID NO: 33029 - DNA, 1608 bp, Arabidopsis thaliana; identical to SEQ ID NO: 29439
  misc_feature (1)..(1608): Ceres Seq. ID no. 13499783
  misc_feature (1)..(1608): Ortholog of  Ceres SEQ ID NO 15174240 as cited in SEQ ID NO 61866

SEQ ID NO: 33030 - protein, 479 aa, Arabidopsis thaliana; identical to SEQ ID NO: 29440
  peptide (1)..(479): Ceres Seq. ID no. 13499784

SEQ ID NO: 33031 - protein, 457 aa, Arabidopsis thaliana; identical to SEQ ID NO: 29441
  peptide (1)..(457): Ceres Seq. ID no. 13499785

SEQ ID NO: 33032 - protein, 381 aa, Arabidopsis thaliana; identical to SEQ ID NO: 29442
  peptide (1)..(381): Ceres Seq. ID no. 13499786

SEQ ID NO: 33033 - DNA, 1096 bp, Arabidopsis thaliana; identical to SEQ ID NO: 29443
  misc_feature (1)..(1096): Ceres Seq. ID no. 12333636
  misc_feature (1)..(1096): Ortholog of  Ceres SEQ ID NO 15168856 as cited in SEQ ID NO 56354
  misc_feature (1)..(1096): Ortholog of  Ceres SEQ ID NO 13583591 as cited in SEQ ID NO 63084

SEQ ID NO: 33034 - protein, 179 aa, Arabidopsis thaliana; identical to SEQ ID NO: 29444
  peptide (1)..(179): Ceres Seq. ID no. 12333637

SEQ ID NO: 33035 - protein, 151 aa, Arabidopsis thaliana; identical to SEQ ID NO: 29445
  peptide (1)..(151): Ceres Seq. ID no. 12333638

SEQ ID NO: 33036 - protein, 148 aa, Arabidopsis thaliana; identical to SEQ ID NO: 29446
  peptide (1)..(148): Ceres Seq. ID no. 12333639

SEQ ID NO: 33037 - DNA, 1555 bp, Arabidopsis thaliana; identical to SEQ ID NO: 29447
  misc_feature (1)..(1555): Ceres Seq. ID no. 13497190
  misc_feature (1)..(1555): Ortholog of  Ceres SEQ ID NO 15171279 as cited in SEQ ID NO 51378
  misc_feature (1)..(1555): Ortholog of  Ceres SEQ ID NO 13596816 as cited in SEQ ID NO 62287

SEQ ID NO: 33038 - protein, 365 aa, Arabidopsis thaliana; identical to SEQ ID NO: 29448
  peptide (1)..(365): Ceres Seq. ID no. 13497191

SEQ ID NO: 33039 - protein, 345 aa, Arabidopsis thaliana; identical to SEQ ID NO: 29449
  peptide (1)..(345): Ceres Seq. ID no. 13497192

SEQ ID NO: 33040 - protein, 204 aa, Arabidopsis thaliana; identical to SEQ ID NO: 29450
  peptide (1)..(204): Ceres Seq. ID no. 13497193

SEQ ID NO: 33041 - DNA, 1162 bp, Arabidopsis thaliana; identical to SEQ ID NO: 29451
  misc_feature (1)..(1162): Ceres Seq. ID no. 13495779
  misc_feature (1)..(1162): Ortholog of  Ceres SEQ ID NO 14305682 as cited in SEQ ID NO 59267
  misc_feature (1)..(1162): Ortholog of  Ceres SEQ ID NO 13597809 as cited in SEQ ID NO 64598
  misc_feature (1)..(1162): Ortholog of  Ceres SEQ ID NO 14313544 as cited in SEQ ID NO 68424
  misc_feature (1)..(1162): Ortholog of  Ceres SEQ ID NO 12617960 as cited in SEQ ID NO 69051
  misc_feature (1)..(1162): Ortholog of  Ceres SEQ ID NO 13589401 as cited in SEQ ID NO 0

SEQ ID NO: 33042 - protein, 182 aa, Arabidopsis thaliana; identical to SEQ ID NO: 29452
  peptide (1)..(182): Ceres Seq. ID no. 13495780

SEQ ID NO: 33043 - protein, 156 aa, Arabidopsis thaliana; identical to SEQ ID NO: 29453
  peptide (1)..(156): Ceres Seq. ID no. 13495781

SEQ ID NO: 33044 - protein, 133 aa, Arabidopsis thaliana; identical to SEQ ID NO: 29454
  peptide (1)..(133): Ceres Seq. ID no. 13495782

SEQ ID NO: 33045 - DNA, 1244 bp, Arabidopsis thaliana; identical to SEQ ID NO: 29455
  misc_feature (1)..(1244): Ceres Seq. ID no. 12385291
  misc_feature (1)..(1244): Ortholog of  Ceres SEQ ID NO 15173907 as cited in SEQ ID NO 62356
  misc_feature (1)..(1244): Ortholog of  Ceres SEQ ID NO 13596519 as cited in SEQ ID NO 62572
  misc_feature (1)..(1244): Ortholog of  Ceres SEQ ID NO 12625108 as cited in SEQ ID NO 68102

SEQ ID NO: 33046 - protein, 280 aa, Arabidopsis thaliana; identical to SEQ ID NO: 29456
  peptide (1)..(280): Ceres Seq. ID no. 12385292

SEQ ID NO: 33047 - protein, 249 aa, Arabidopsis thaliana; identical to SEQ ID NO: 24224
  peptide (1)..(249): Ceres Seq. ID no. 12385293

SEQ ID NO: 33048 - protein, 241 aa, Arabidopsis thaliana; identical to SEQ ID NO: 24225
  peptide (1)..(241): Ceres Seq. ID no. 12385294

SEQ ID NO: 33049 - DNA, 1151 bp, Arabidopsis thaliana; identical to SEQ ID NO: 29459
  misc_feature (1)..(1151): Ceres Seq. ID no. 12327382
  misc_feature (1)..(1151): Ortholog of  Ceres SEQ ID NO 13661504 as cited in SEQ ID NO 61294
  misc_feature (1)..(1151): Ortholog of  Ceres SEQ ID NO 12615311 as cited in SEQ ID NO 62517
  misc_feature (1)..(1151): Ortholog of  Ceres SEQ ID NO 12617197 as cited in SEQ ID NO 63406
  misc_feature (1)..(1151): Ortholog of  Ceres SEQ ID NO 13598597 as cited in SEQ ID NO 65496
  misc_feature (1)..(1151): Ortholog of  Ceres SEQ ID NO 13596227 as cited in SEQ ID NO 68750
  misc_feature (1)..(1151): Ortholog of  Ceres SEQ ID NO 15179068 as cited in SEQ ID NO 0

SEQ ID NO: 33050 - protein, 304 aa, Arabidopsis thaliana; identical to SEQ ID NO: 29460
  peptide (1)..(304): Ceres Seq. ID no. 12327383

SEQ ID NO: 33051 - protein, 252 aa, Arabidopsis thaliana; identical to SEQ ID NO: 29461
  peptide (1)..(252): Ceres Seq. ID no. 12327384

SEQ ID NO: 33052 - DNA, 1062 bp, Arabidopsis thaliana; identical to SEQ ID NO: 29462
  misc_feature (1)..(1062): Ceres Seq. ID no. 12421958
  misc_feature (1)..(1062): Ortholog of  Ceres SEQ ID NO 14316161 as cited in SEQ ID NO 52384
  misc_feature (1)..(1062): Ortholog of  Ceres SEQ ID NO 14315249 as cited in SEQ ID NO 52512
  misc_feature (1)..(1062): Ortholog of  Ceres SEQ ID NO 15174595 as cited in SEQ ID NO 53460
  misc_feature (1)..(1062): Ortholog of  Ceres SEQ ID NO 13503553 as cited in SEQ ID NO 64822
  misc_feature (1)..(1062): Ortholog of  Ceres SEQ ID NO 13660155 as cited in SEQ ID NO 67635

SEQ ID NO: 33053 - protein, 305 aa, Arabidopsis thaliana; identical to SEQ ID NO: 29463
  peptide (1)..(305): Ceres Seq. ID no. 12421959

SEQ ID NO: 33054 - protein, 280 aa, Arabidopsis thaliana; identical to SEQ ID NO: 29464
  peptide (1)..(280): Ceres Seq. ID no. 12421960

SEQ ID NO: 33055 - protein, 236 aa, Arabidopsis thaliana; identical to SEQ ID NO: 23607
  peptide (1)..(236): Ceres Seq. ID no. 12421961

SEQ ID NO: 33056 - DNA, 1252 bp, Arabidopsis thaliana; identical to SEQ ID NO: 29466
  misc_feature (1)..(1252): Ceres Seq. ID no. 13500119
  misc_feature (1)..(1252): Ortholog of  Ceres SEQ ID NO 14310880 as cited in SEQ ID NO 55342
  misc_feature (1)..(1252): Ortholog of  Ceres SEQ ID NO 14313451 as cited in SEQ ID NO 62474

SEQ ID NO: 33057 - protein, 367 aa, Arabidopsis thaliana; identical to SEQ ID NO: 29467
  peptide (1)..(367): Ceres Seq. ID no. 13500120

SEQ ID NO: 33058 - protein, 364 aa, Arabidopsis thaliana; identical to SEQ ID NO: 29468
  peptide (1)..(364): Ceres Seq. ID no. 13500121

SEQ ID NO: 33059 - protein, 240 aa, Arabidopsis thaliana; identical to SEQ ID NO: 29469
  peptide (1)..(240): Ceres Seq. ID no. 13500122

SEQ ID NO: 33060 - DNA, 990 bp, Arabidopsis thaliana; identical to SEQ ID NO: 29470
  misc_feature (1)..(990): Ceres Seq. ID no. 12420633
  misc_feature (1)..(990): Ortholog of  Ceres SEQ ID NO 12608127 as cited in SEQ ID NO 57579
  misc_feature (1)..(990): Ortholog of  Ceres SEQ ID NO 12634558 as cited in SEQ ID NO 0
  misc_feature (1)..(990): Ortholog of  Ceres SEQ ID NO 15180294 as cited in SEQ ID NO 0

SEQ ID NO: 33061 - protein, 253 aa, Arabidopsis thaliana; identical to SEQ ID NO: 29471
  peptide (1)..(253): Ceres Seq. ID no. 12420634

SEQ ID NO: 33062 - DNA, 694 bp, Arabidopsis thaliana; identical to SEQ ID NO: 29472
  misc_feature (1)..(694): Ceres Seq. ID no. 13592873
  misc_feature (1)..(694): Ortholog of  Ceres SEQ ID NO 12563124 as cited in SEQ ID NO 57104
  misc_feature (1)..(694): Ortholog of  Ceres SEQ ID NO 13598373 as cited in SEQ ID NO 62185
  misc_feature (1)..(694): Ortholog of  Ceres SEQ ID NO 12584664 as cited in SEQ ID NO 62232
  misc_feature (1)..(694): Ortholog of  Ceres SEQ ID NO 12617639 as cited in SEQ ID NO 65219
  misc_feature (1)..(694): Ortholog of  Ceres SEQ ID NO 15179982 as cited in SEQ ID NO 0

SEQ ID NO: 33063 - protein, 169 aa, Arabidopsis thaliana; identical to SEQ ID NO: 22059
  peptide (1)..(169): Ceres Seq. ID no. 13592874

SEQ ID NO: 33064 - protein, 110 aa, Arabidopsis thaliana; identical to SEQ ID NO: 22060
  peptide (1)..(110): Ceres Seq. ID no. 13592875

SEQ ID NO: 33065 - protein, 103 aa, Arabidopsis thaliana; identical to SEQ ID NO: 22061
  peptide (1)..(103): Ceres Seq. ID no. 13592876

SEQ ID NO: 33066 - DNA, 935 bp, Arabidopsis thaliana; identical to SEQ ID NO: 29476
  misc_feature (1)..(935): Ceres Seq. ID no. 13495661
  misc_feature (1)..(935): Ortholog of  Ceres SEQ ID NO 12610385 as cited in SEQ ID NO 55938
  misc_feature (1)..(935): Ortholog of  Ceres SEQ ID NO 13661939 as cited in SEQ ID NO 61170

SEQ ID NO: 33067 - protein, 163 aa, Arabidopsis thaliana; identical to SEQ ID NO: 29477
  peptide (1)..(163): Ceres Seq. ID no. 13495662

SEQ ID NO: 33068 - DNA, 1236 bp, Arabidopsis thaliana; identical to SEQ ID NO: 29478
  misc_feature (1)..(1236): Ceres Seq. ID no. 12321712
  misc_feature (1)..(1236): Ortholog of  Ceres SEQ ID NO 13594341 as cited in SEQ ID NO 57917
  misc_feature (1)..(1236): Ortholog of  Ceres SEQ ID NO 13656441 as cited in SEQ ID NO 65703

SEQ ID NO: 33069 - protein, 276 aa, Arabidopsis thaliana; identical to SEQ ID NO: 29479
  peptide (1)..(276): Ceres Seq. ID no. 12321713

SEQ ID NO: 33070 - protein, 263 aa, Arabidopsis thaliana; identical to SEQ ID NO: 29480
  peptide (1)..(263): Ceres Seq. ID no. 12321714

SEQ ID NO: 33071 - protein, 251 aa, Arabidopsis thaliana; identical to SEQ ID NO: 29481
  peptide (1)..(251): Ceres Seq. ID no. 12321715

SEQ ID NO: 33072 - DNA, 630 bp, Arabidopsis thaliana; identical to SEQ ID NO: 29482
  misc_feature (1)..(630): Ceres Seq. ID no. 12396845
  misc_feature (1)..(630): Ortholog of  Ceres SEQ ID NO 12611212 as cited in SEQ ID NO 56066
  misc_feature (1)..(630): Ortholog of  Ceres SEQ ID NO 15178576 as cited in SEQ ID NO 64133

SEQ ID NO: 33073 - protein, 179 aa, Arabidopsis thaliana; identical to SEQ ID NO: 29483
  peptide (1)..(179): Ceres Seq. ID no. 12396846

SEQ ID NO: 33074 - protein, 178 aa, Arabidopsis thaliana; identical to SEQ ID NO: 29484
  peptide (1)..(178): Ceres Seq. ID no. 12396847

SEQ ID NO: 33075 - protein, 136 aa, Arabidopsis thaliana; identical to SEQ ID NO: 29485
  peptide (1)..(136): Ceres Seq. ID no. 12396848

SEQ ID NO: 33076 - DNA, 2369 bp, Arabidopsis thaliana; identical to SEQ ID NO: 29486
  misc_feature (1)..(2369): Ceres Seq. ID no. 13495969
  misc_feature (1)..(2369): Ortholog of  Ceres SEQ ID NO 12586556 as cited in SEQ ID NO 64667
  misc_feature (1)..(2369): Ortholog of  Ceres SEQ ID NO 13660894 as cited in SEQ ID NO 67475

SEQ ID NO: 33077 - protein, 575 aa, Arabidopsis thaliana; identical to SEQ ID NO: 29487
  peptide (1)..(575): Ceres Seq. ID no. 15222970

SEQ ID NO: 33078 - protein, 553 aa, Arabidopsis thaliana; identical to SEQ ID NO: 29488
  peptide (1)..(553): Ceres Seq. ID no. 15222971

SEQ ID NO: 33079 - protein, 552 aa, Arabidopsis thaliana; identical to SEQ ID NO: 29489
  peptide (1)..(552): Ceres Seq. ID no. 15222972

SEQ ID NO: 33080 - DNA, 909 bp, Arabidopsis thaliana; identical to SEQ ID NO: 29490
  misc_feature (1)..(909): Ceres Seq. ID no. 12333026
  misc_feature (1)..(909): Ortholog of  Ceres SEQ ID NO 14306439 as cited in SEQ ID NO 53628
  misc_feature (1)..(909): Ortholog of  Ceres SEQ ID NO 12611235 as cited in SEQ ID NO 56101

SEQ ID NO: 33081 - protein, 220 aa, Arabidopsis thaliana; identical to SEQ ID NO: 21397
  peptide (1)..(220): Ceres Seq. ID no. 12333027

SEQ ID NO: 33082 - protein, 137 aa, Arabidopsis thaliana; identical to SEQ ID NO: 21398
  peptide (1)..(137): Ceres Seq. ID no. 12333028

SEQ ID NO: 33083 - DNA, 818 bp, Arabidopsis thaliana; identical to SEQ ID NO: 29493
  misc_feature (1)..(818): Ceres Seq. ID no. 12338666
  misc_feature (1)..(818): Ortholog of  Ceres SEQ ID NO 13599545 as cited in SEQ ID NO 0

SEQ ID NO: 33084 - protein, 169 aa, Arabidopsis thaliana; identical to SEQ ID NO: 29494
  peptide (1)..(169): Ceres Seq. ID no. 12338668

SEQ ID NO: 33085 - protein, 147 aa, Arabidopsis thaliana; identical to SEQ ID NO: 29495
  peptide (1)..(147): Ceres Seq. ID no. 12338669

SEQ ID NO: 33086 - protein, 118 aa, Arabidopsis thaliana; identical to SEQ ID NO: 29496
  peptide (1)..(118): Ceres Seq. ID no. 12338670

SEQ ID NO: 33087 - DNA, 1449 bp, Arabidopsis thaliana; identical to SEQ ID NO: 29497
  misc_feature (1)..(1449): Ceres Seq. ID no. 12325319
  misc_feature (1)..(1449): Ortholog of  Ceres SEQ ID NO 15178873 as cited in SEQ ID NO 1103
  misc_feature (1)..(1449): Ortholog of  Ceres SEQ ID NO 15173557 as cited in SEQ ID NO 60031
  misc_feature (1)..(1449): Ortholog of  Ceres SEQ ID NO 13661430 as cited in SEQ ID NO 61258
  misc_feature (1)..(1449): Ortholog of  Ceres SEQ ID NO 13590940 as cited in SEQ ID NO 68653
  misc_feature (1)..(1449): Ortholog of  Ceres SEQ ID NO 15180040 as cited in SEQ ID NO 0

SEQ ID NO: 33088 - protein, 329 aa, Arabidopsis thaliana; identical to SEQ ID NO: 29498
  peptide (1)..(329): Ceres Seq. ID no. 12325320

SEQ ID NO: 33089 - protein, 166 aa, Arabidopsis thaliana; identical to SEQ ID NO: 29499
  peptide (1)..(166): Ceres Seq. ID no. 12325321

SEQ ID NO: 33090 - DNA, 836 bp, Arabidopsis thaliana; identical to SEQ ID NO: 29500
  misc_feature (1)..(836): Ceres Seq. ID no. 12738757
  misc_feature (1)..(836): Ortholog of  Ceres SEQ ID NO 15172913 as cited in SEQ ID NO 51824
  misc_feature (1)..(836): Ortholog of  Ceres SEQ ID NO 13654659 as cited in SEQ ID NO 61998

SEQ ID NO: 33091 - protein, 201 aa, Arabidopsis thaliana; identical to SEQ ID NO: 29501
  peptide (1)..(201): Ceres Seq. ID no. 12738758

SEQ ID NO: 33092 - protein, 181 aa, Arabidopsis thaliana; identical to SEQ ID NO: 29502
  peptide (1)..(181): Ceres Seq. ID no. 12738759

SEQ ID NO: 33093 - DNA, 607 bp, Arabidopsis thaliana; identical to SEQ ID NO: 29503
  misc_feature (1)..(607): Ceres Seq. ID no. 12333324
  misc_feature (1)..(607): Ortholog of  Ceres SEQ ID NO 14305493 as cited in SEQ ID NO 0

SEQ ID NO: 33094 - protein, 153 aa, Arabidopsis thaliana; identical to SEQ ID NO: 29504
  peptide (1)..(153): Ceres Seq. ID no. 12333325

SEQ ID NO: 33095 - protein, 151 aa, Arabidopsis thaliana; identical to SEQ ID NO: 29505
  peptide (1)..(151): Ceres Seq. ID no. 12333326

SEQ ID NO: 33096 - DNA, 628 bp, Arabidopsis thaliana; identical to SEQ ID NO: 29506
  misc_feature (1)..(628): Ceres Seq. ID no. 12420685
  misc_feature (1)..(628): Ortholog of  Ceres SEQ ID NO 13594457 as cited in SEQ ID NO 50888

SEQ ID NO: 33097 - protein, 131 aa, Arabidopsis thaliana; identical to SEQ ID NO: 29507
  peptide (1)..(131): Ceres Seq. ID no. 12420686

SEQ ID NO: 33098 - protein, 105 aa, Arabidopsis thaliana; identical to SEQ ID NO: 29508
  peptide (1)..(105): Ceres Seq. ID no. 12420687

SEQ ID NO: 33099 - DNA, 1110 bp, Arabidopsis thaliana; identical to SEQ ID NO: 29509
  misc_feature (1)..(1110): Ceres Seq. ID no. 13491279
  misc_feature (1)..(1110): Ortholog of  Ceres SEQ ID NO 13638643 as cited in SEQ ID NO 52149

SEQ ID NO: 33100 - protein, 285 aa, Arabidopsis thaliana; identical to SEQ ID NO: 29510
  peptide (1)..(285): Ceres Seq. ID no. 13491280

SEQ ID NO: 33101 - protein, 279 aa, Arabidopsis thaliana; identical to SEQ ID NO: 29511
  peptide (1)..(279): Ceres Seq. ID no. 13491281

SEQ ID NO: 33102 - protein, 200 aa, Arabidopsis thaliana; identical to SEQ ID NO: 29512
  peptide (1)..(200): Ceres Seq. ID no. 13491282

SEQ ID NO: 33103 - DNA, 998 bp, Arabidopsis thaliana; identical to SEQ ID NO: 29513
  misc_feature (1)..(998): Ceres Seq. ID no. 12389197
  misc_feature (1)..(998): Ortholog of  Ceres SEQ ID NO 12615296 as cited in SEQ ID NO 62724
  misc_feature (1)..(998): Ortholog of  Ceres SEQ ID NO 15225093 as cited in SEQ ID NO 65177
  misc_feature (1)..(998): Ortholog of  Ceres SEQ ID NO 15179532 as cited in SEQ ID NO 0

SEQ ID NO: 33104 - protein, 267 aa, Arabidopsis thaliana; identical to SEQ ID NO: 29514
  peptide (1)..(267): Ceres Seq. ID no. 12389198

SEQ ID NO: 33105 - protein, 258 aa, Arabidopsis thaliana; identical to SEQ ID NO: 29515
  peptide (1)..(258): Ceres Seq. ID no. 12389199

SEQ ID NO: 33106 - DNA, 843 bp, Arabidopsis thaliana; identical to SEQ ID NO: 29516
  misc_feature (1)..(843): Ceres Seq. ID no. 13496878
  misc_feature (1)..(843): Ortholog of  Ceres SEQ ID NO 13599568 as cited in SEQ ID NO 509
  misc_feature (1)..(843): Ortholog of  Ceres SEQ ID NO 13638595 as cited in SEQ ID NO 52050
  misc_feature (1)..(843): Ortholog of  Ceres SEQ ID NO 13594748 as cited in SEQ ID NO 52114
  misc_feature (1)..(843): Ortholog of  Ceres SEQ ID NO 12623490 as cited in SEQ ID NO 61136
  misc_feature (1)..(843): Ortholog of  Ceres SEQ ID NO 12583993 as cited in SEQ ID NO 68098
  misc_feature (1)..(843): Ortholog of  Ceres SEQ ID NO 13654535 as cited in SEQ ID NO 68227

SEQ ID NO: 33107 - protein, 213 aa, Arabidopsis thaliana; identical to SEQ ID NO: 29517
  peptide (1)..(213): Ceres Seq. ID no. 13496879

SEQ ID NO: 33108 - protein, 200 aa, Arabidopsis thaliana; identical to SEQ ID NO: 29518
  peptide (1)..(200): Ceres Seq. ID no. 13496880

SEQ ID NO: 33109 - protein, 195 aa, Arabidopsis thaliana; identical to SEQ ID NO: 29519
  peptide (1)..(195): Ceres Seq. ID no. 13496881

SEQ ID NO: 33110 - DNA, 980 bp, Arabidopsis thaliana; identical to SEQ ID NO: 29520
  misc_feature (1)..(980): Ceres Seq. ID no. 13499491
  misc_feature (1)..(980): Ortholog of  Ceres SEQ ID NO 13594418 as cited in SEQ ID NO 60153

SEQ ID NO: 33111 - protein, 269 aa, Arabidopsis thaliana; identical to SEQ ID NO: 29521
  peptide (1)..(269): Ceres Seq. ID no. 13499492

SEQ ID NO: 33112 - protein, 262 aa, Arabidopsis thaliana; identical to SEQ ID NO: 29522
  peptide (1)..(262): Ceres Seq. ID no. 13499493

SEQ ID NO: 33113 - protein, 249 aa, Arabidopsis thaliana; identical to SEQ ID NO: 29523
  peptide (1)..(249): Ceres Seq. ID no. 13499494

SEQ ID NO: 33114 - DNA, 787 bp, Arabidopsis thaliana; identical to SEQ ID NO: 29524
  misc_feature (1)..(787): Ceres Seq. ID no. 13580358
  misc_feature (1)..(787): Ortholog of  Ceres SEQ ID NO 13580204 as cited in SEQ ID NO 0

SEQ ID NO: 33115 - protein, 151 aa, Arabidopsis thaliana; identical to SEQ ID NO: 29525
  peptide (1)..(151): Ceres Seq. ID no. 13580359

SEQ ID NO: 33116 - protein, 148 aa, Arabidopsis thaliana; identical to SEQ ID NO: 29526
  peptide (1)..(148): Ceres Seq. ID no. 13580360

SEQ ID NO: 33117 - DNA, 674 bp, Arabidopsis thaliana; identical to SEQ ID NO: 29527
  misc_feature (1)..(674): Ceres Seq. ID no. 12393615
  misc_feature (1)..(674): Ortholog of  Ceres SEQ ID NO 12582657 as cited in SEQ ID NO 51070

SEQ ID NO: 33118 - protein, 113 aa, Arabidopsis thaliana; identical to SEQ ID NO: 29528
  peptide (1)..(113): Ceres Seq. ID no. 12393616

SEQ ID NO: 33119 - protein, 100 aa, Arabidopsis thaliana; identical to SEQ ID NO: 29529
  peptide (1)..(100): Ceres Seq. ID no. 12393617

SEQ ID NO: 33120 - protein, 69 aa, Arabidopsis thaliana; identical to SEQ ID NO: 29530
  peptide (1)..(69): Ceres Seq. ID no. 12393618

SEQ ID NO: 33121 - DNA, 1087 bp, Arabidopsis thaliana; identical to SEQ ID NO: 29531
  misc_feature (1)..(1087): Ceres Seq. ID no. 12384539
  misc_feature (1)..(1087): Ortholog of  Ceres SEQ ID NO 13595464 as cited in SEQ ID NO 59792

SEQ ID NO: 33122 - protein, 323 aa, Arabidopsis thaliana; identical to SEQ ID NO: 29532
  peptide (1)..(323): Ceres Seq. ID no. 12384540

SEQ ID NO: 33123 - protein, 296 aa, Arabidopsis thaliana; identical to SEQ ID NO: 29533
  peptide (1)..(296): Ceres Seq. ID no. 12384541

SEQ ID NO: 33124 - protein, 295 aa, Arabidopsis thaliana; identical to SEQ ID NO: 29534
  peptide (1)..(295): Ceres Seq. ID no. 12384542

SEQ ID NO: 33125 - DNA, 854 bp, Arabidopsis thaliana; identical to SEQ ID NO: 29535
  misc_feature (1)..(854): Ceres Seq. ID no. 12333023
  misc_feature (1)..(854): Ortholog of  Ceres SEQ ID NO 14305944 as cited in SEQ ID NO 52294
  misc_feature (1)..(854): Ortholog of  Ceres SEQ ID NO 13596338 as cited in SEQ ID NO 68005

SEQ ID NO: 33126 - protein, 166 aa, Arabidopsis thaliana; identical to SEQ ID NO: 26630
  peptide (1)..(166): Ceres Seq. ID no. 12333024

SEQ ID NO: 33127 - protein, 84 aa, Arabidopsis thaliana; identical to SEQ ID NO: 26631
  peptide (1)..(84): Ceres Seq. ID no. 12333025

SEQ ID NO: 33128 - DNA, 1871 bp, Arabidopsis thaliana; identical to SEQ ID NO: 29538
  misc_feature (1)..(1871): Ceres Seq. ID no. 13496804
  misc_feature (1)..(1871): Ortholog of  Ceres SEQ ID NO 14314096 as cited in SEQ ID NO 63279

SEQ ID NO: 33129 - protein, 570 aa, Arabidopsis thaliana; identical to SEQ ID NO: 29539
  peptide (1)..(570): Ceres Seq. ID no. 13496805

SEQ ID NO: 33130 - protein, 430 aa, Arabidopsis thaliana; identical to SEQ ID NO: 29540
  peptide (1)..(430): Ceres Seq. ID no. 13496806

SEQ ID NO: 33131 - protein, 310 aa, Arabidopsis thaliana; identical to SEQ ID NO: 29541
  peptide (1)..(310): Ceres Seq. ID no. 13496807

SEQ ID NO: 33132 - DNA, 2338 bp, Arabidopsis thaliana; identical to SEQ ID NO: 29542
  misc_feature (1)..(2338): Ceres Seq. ID no. 13497306
  misc_feature (1)..(2338): Ortholog of  Ceres SEQ ID NO 13623192 as cited in SEQ ID NO 1286
  misc_feature (1)..(2338): Ortholog of  Ceres SEQ ID NO 13594171 as cited in SEQ ID NO 60359
  misc_feature (1)..(2338): Ortholog of  Ceres SEQ ID NO 14301866 as cited in SEQ ID NO 60955
  misc_feature (1)..(2338): Ortholog of  Ceres SEQ ID NO 13590645 as cited in SEQ ID NO 62109

SEQ ID NO: 33133 - protein, 627 aa, Arabidopsis thaliana; identical to SEQ ID NO: 29543
  peptide (1)..(627): Ceres Seq. ID no. 13497307

SEQ ID NO: 33134 - protein, 595 aa, Arabidopsis thaliana; identical to SEQ ID NO: 29544
  peptide (1)..(595): Ceres Seq. ID no. 13497308

SEQ ID NO: 33135 - protein, 508 aa, Arabidopsis thaliana; identical to SEQ ID NO: 29545
  peptide (1)..(508): Ceres Seq. ID no. 13497309

SEQ ID NO: 33136 - DNA, 1129 bp, Arabidopsis thaliana; identical to SEQ ID NO: 29546
  misc_feature (1)..(1129): Ceres Seq. ID no. 12332178
  misc_feature (1)..(1129): Ortholog of  Ceres SEQ ID NO 13655598 as cited in SEQ ID NO 64077
  misc_feature (1)..(1129): Ortholog of  Ceres SEQ ID NO 15179351 as cited in SEQ ID NO 0
  misc_feature (1)..(1129): Ortholog of  Ceres SEQ ID NO 15180408 as cited in SEQ ID NO 0

SEQ ID NO: 33137 - protein, 253 aa, Arabidopsis thaliana; identical to SEQ ID NO: 29547
  peptide (1)..(253): Ceres Seq. ID no. 12332179

SEQ ID NO: 33138 - DNA, 2121 bp, Arabidopsis thaliana; identical to SEQ ID NO: 24365
  misc_feature (1)..(2121): Ceres Seq. ID no. 12601883
  misc_feature (1)..(2121): Ortholog of  Ceres SEQ ID NO 15179194 as cited in SEQ ID NO 0

SEQ ID NO: 33139 - protein, 181 aa, Arabidopsis thaliana; identical to SEQ ID NO: 24366
  peptide (1)..(181): Ceres Seq. ID no. 12601884

SEQ ID NO: 33140 - protein, 177 aa, Arabidopsis thaliana; identical to SEQ ID NO: 24367
  peptide (1)..(177): Ceres Seq. ID no. 12601885

SEQ ID NO: 33141 - protein, 162 aa, Arabidopsis thaliana; identical to SEQ ID NO: 24368
  peptide (1)..(162): Ceres Seq. ID no. 12601886

SEQ ID NO: 33142 - DNA, 607 bp, Arabidopsis thaliana; identical to SEQ ID NO: 29552
  misc_feature (1)..(607): Ceres Seq. ID no. 12332180
  misc_feature (1)..(607): Ortholog of  Ceres SEQ ID NO 12608953 as cited in SEQ ID NO 51227

SEQ ID NO: 33143 - protein, 132 aa, Arabidopsis thaliana; identical to SEQ ID NO: 29553
  peptide (1)..(132): Ceres Seq. ID no. 12332181

SEQ ID NO: 33144 - DNA, 854 bp, Arabidopsis thaliana; identical to SEQ ID NO: 29554
  misc_feature (1)..(854): Ceres Seq. ID no. 12333072
  misc_feature (1)..(854): Ortholog of  Ceres SEQ ID NO 13594465 as cited in SEQ ID NO 51233
  misc_feature (1)..(854): Ortholog of  Ceres SEQ ID NO 13585110 as cited in SEQ ID NO 60647

SEQ ID NO: 33145 - protein, 188 aa, Arabidopsis thaliana; identical to SEQ ID NO: 29555
  peptide (1)..(188): Ceres Seq. ID no. 12333073

SEQ ID NO: 33146 - protein, 130 aa, Arabidopsis thaliana; identical to SEQ ID NO: 29556
  peptide (1)..(130): Ceres Seq. ID no. 12333074

SEQ ID NO: 33147 - protein, 110 aa, Arabidopsis thaliana; identical to SEQ ID NO: 29557
  peptide (1)..(110): Ceres Seq. ID no. 12333075

SEQ ID NO: 33148 - DNA, 943 bp, Arabidopsis thaliana; identical to SEQ ID NO: 29558
  misc_feature (1)..(943): Ceres Seq. ID no. 12332131
  misc_feature (1)..(943): Ortholog of  Ceres SEQ ID NO 14301727 as cited in SEQ ID NO 61209

SEQ ID NO: 33149 - protein, 257 aa, Arabidopsis thaliana; identical to SEQ ID NO: 29559
  peptide (1)..(257): Ceres Seq. ID no. 12332132

SEQ ID NO: 33150 - protein, 226 aa, Arabidopsis thaliana; identical to SEQ ID NO: 29560
  peptide (1)..(226): Ceres Seq. ID no. 12332133

SEQ ID NO: 33151 - protein, 198 aa, Arabidopsis thaliana; identical to SEQ ID NO: 29561
  peptide (1)..(198): Ceres Seq. ID no. 12332134

SEQ ID NO: 33152 - DNA, 864 bp, Arabidopsis thaliana; identical to SEQ ID NO: 29562
  misc_feature (1)..(864): Ceres Seq. ID no. 12332127
  misc_feature (1)..(864): Ortholog of  Ceres SEQ ID NO 13594647 as cited in SEQ ID NO 52208
  misc_feature (1)..(864): Ortholog of  Ceres SEQ ID NO 13637658 as cited in SEQ ID NO 53077
  misc_feature (1)..(864): Ortholog of  Ceres SEQ ID NO 13664275 as cited in SEQ ID NO 61120
  misc_feature (1)..(864): Ortholog of  Ceres SEQ ID NO 15174168 as cited in SEQ ID NO 61888
  misc_feature (1)..(864): Ortholog of  Ceres SEQ ID NO 12635311 as cited in SEQ ID NO 0
  misc_feature (1)..(864): Ortholog of  Ceres SEQ ID NO 13599510 as cited in SEQ ID NO 0
  misc_feature (1)..(864): Ortholog of  Ceres SEQ ID NO 13599622 as cited in SEQ ID NO 0
  misc_feature (1)..(864): Ortholog of  Ceres SEQ ID NO 13600020 as cited in SEQ ID NO 0

SEQ ID NO: 33153 - protein, 195 aa, Arabidopsis thaliana; identical to SEQ ID NO: 29563
  peptide (1)..(195): Ceres Seq. ID no. 12332128

SEQ ID NO: 33154 - protein, 188 aa, Arabidopsis thaliana; identical to SEQ ID NO: 29564
  peptide (1)..(188): Ceres Seq. ID no. 12332129

SEQ ID NO: 33155 - protein, 150 aa, Arabidopsis thaliana; identical to SEQ ID NO: 29565
  peptide (1)..(150): Ceres Seq. ID no. 12332130

SEQ ID NO: 33156 - DNA, 854 bp, Arabidopsis thaliana; identical to SEQ ID NO: 29566
  misc_feature (1)..(854): Ceres Seq. ID no. 12369952
  misc_feature (1)..(854): Ortholog of  Ceres SEQ ID NO 15224629 as cited in SEQ ID NO 56014
  misc_feature (1)..(854): Ortholog of  Ceres SEQ ID NO 13595484 as cited in SEQ ID NO 56583
  misc_feature (1)..(854): Ortholog of  Ceres SEQ ID NO 15173971 as cited in SEQ ID NO 63609
  misc_feature (1)..(854): Ortholog of  Ceres SEQ ID NO 15173400 as cited in SEQ ID NO 63712

SEQ ID NO: 33157 - protein, 227 aa, Arabidopsis thaliana; identical to SEQ ID NO: 29567
  peptide (1)..(227): Ceres Seq. ID no. 12369953

SEQ ID NO: 33158 - protein, 204 aa, Arabidopsis thaliana; identical to SEQ ID NO: 29568
  peptide (1)..(204): Ceres Seq. ID no. 12369954

SEQ ID NO: 33159 - protein, 169 aa, Arabidopsis thaliana; identical to SEQ ID NO: 29569
  peptide (1)..(169): Ceres Seq. ID no. 12369955

SEQ ID NO: 33160 - DNA, 979 bp, Arabidopsis thaliana; identical to SEQ ID NO: 29570
  misc_feature (1)..(979): Ceres Seq. ID no. 12333275
  misc_feature (1)..(979): Ortholog of  Ceres SEQ ID NO 14306264 as cited in SEQ ID NO 1386
  misc_feature (1)..(979): Ortholog of  Ceres SEQ ID NO 15179159 as cited in SEQ ID NO 0

SEQ ID NO: 33161 - protein, 152 aa, Arabidopsis thaliana; identical to SEQ ID NO: 29571
  peptide (1)..(152): Ceres Seq. ID no. 12333276

SEQ ID NO: 33162 - protein, 143 aa, Arabidopsis thaliana; identical to SEQ ID NO: 29572
  peptide (1)..(143): Ceres Seq. ID no. 12333277

SEQ ID NO: 33163 - protein, 122 aa, Arabidopsis thaliana; identical to SEQ ID NO: 29573
  peptide (1)..(122): Ceres Seq. ID no. 12333278

SEQ ID NO: 33164 - DNA, 930 bp, Arabidopsis thaliana; identical to SEQ ID NO: 29574
  misc_feature (1)..(930): Ceres Seq. ID no. 12370141
  misc_feature (1)..(930): Ortholog of  Ceres SEQ ID NO 13504265 as cited in SEQ ID NO 85

SEQ ID NO: 33165 - protein, 231 aa, Arabidopsis thaliana; identical to SEQ ID NO: 29575
  peptide (1)..(231): Ceres Seq. ID no. 12370142

SEQ ID NO: 33166 - protein, 180 aa, Arabidopsis thaliana; identical to SEQ ID NO: 29576
  peptide (1)..(180): Ceres Seq. ID no. 12370143

SEQ ID NO: 33167 - DNA, 1440 bp, Arabidopsis thaliana; identical to SEQ ID NO: 29577
  misc_feature (1)..(1440): Ceres Seq. ID no. 12370638
  misc_feature (1)..(1440): Ortholog of  Ceres SEQ ID NO 13645078 as cited in SEQ ID NO 51158

SEQ ID NO: 33168 - protein, 410 aa, Arabidopsis thaliana; identical to SEQ ID NO: 29578
  peptide (1)..(410): Ceres Seq. ID no. 12370639

SEQ ID NO: 33169 - protein, 389 aa, Arabidopsis thaliana; identical to SEQ ID NO: 29579
  peptide (1)..(389): Ceres Seq. ID no. 12370640

SEQ ID NO: 33170 - protein, 343 aa, Arabidopsis thaliana; identical to SEQ ID NO: 29580
  peptide (1)..(343): Ceres Seq. ID no. 12370641

SEQ ID NO: 33171 - DNA, 1188 bp, Arabidopsis thaliana; identical to SEQ ID NO: 25989
  misc_feature (1)..(1188): Ceres Seq. ID no. 12396278
  misc_feature (1)..(1188): Ortholog of  Ceres SEQ ID NO 12636774 as cited in SEQ ID NO 372
  misc_feature (1)..(1188): Ortholog of  Ceres SEQ ID NO 12562215 as cited in SEQ ID NO 20489
  misc_feature (1)..(1188): Ortholog of  Ceres SEQ ID NO 13595548 as cited in SEQ ID NO 51024
  misc_feature (1)..(1188): Ortholog of  Ceres SEQ ID NO 13582350 as cited in SEQ ID NO 56734
  misc_feature (1)..(1188): Ortholog of  Ceres SEQ ID NO 12476493 as cited in SEQ ID NO 58163
  misc_feature (1)..(1188): Ortholog of  Ceres SEQ ID NO 14313459 as cited in SEQ ID NO 62395
  misc_feature (1)..(1188): Ortholog of  Ceres SEQ ID NO 13597295 as cited in SEQ ID NO 63743
  misc_feature (1)..(1188): Ortholog of  Ceres SEQ ID NO 12617090 as cited in SEQ ID NO 64005
  misc_feature (1)..(1188): Ortholog of  Ceres SEQ ID NO 13597439 as cited in SEQ ID NO 64081
  misc_feature (1)..(1188): Ortholog of  Ceres SEQ ID NO 13597233 as cited in SEQ ID NO 64370
  misc_feature (1)..(1188): Ortholog of  Ceres SEQ ID NO 13623850 as cited in SEQ ID NO 0
  misc_feature (1)..(1188): Ortholog of  Ceres SEQ ID NO 14309162 as cited in SEQ ID NO 0

SEQ ID NO: 33172 - protein, 345 aa, Arabidopsis thaliana; identical to SEQ ID NO: 25990
  peptide (1)..(345): Ceres Seq. ID no. 12396279

SEQ ID NO: 33173 - protein, 323 aa, Arabidopsis thaliana; identical to SEQ ID NO: 25991
  peptide (1)..(323): Ceres Seq. ID no. 12396280

SEQ ID NO: 33174 - protein, 303 aa, Arabidopsis thaliana; identical to SEQ ID NO: 25992
  peptide (1)..(303): Ceres Seq. ID no. 12396281

SEQ ID NO: 33175 - DNA, 946 bp, Arabidopsis thaliana; identical to SEQ ID NO: 29585
  misc_feature (1)..(946): Ceres Seq. ID no. 12441500
  misc_feature (1)..(946): Ortholog of  Ceres SEQ ID NO 13595072 as cited in SEQ ID NO 55971

SEQ ID NO: 33176 - protein, 283 aa, Arabidopsis thaliana; identical to SEQ ID NO: 29586
  peptide (1)..(283): Ceres Seq. ID no. 12441501

SEQ ID NO: 33177 - protein, 265 aa, Arabidopsis thaliana; identical to SEQ ID NO: 29587
  peptide (1)..(265): Ceres Seq. ID no. 12441502

SEQ ID NO: 33178 - protein, 260 aa, Arabidopsis thaliana; identical to SEQ ID NO: 29588
  peptide (1)..(260): Ceres Seq. ID no. 12441503

SEQ ID NO: 33179 - DNA, 1462 bp, Arabidopsis thaliana; identical to SEQ ID NO: 29589
  misc_feature (1)..(1462): Ceres Seq. ID no. 12421962
  misc_feature (1)..(1462): Ortholog of  Ceres SEQ ID NO 13594168 as cited in SEQ ID NO 59043

SEQ ID NO: 33180 - protein, 287 aa, Arabidopsis thaliana; identical to SEQ ID NO: 29590
  peptide (1)..(287): Ceres Seq. ID no. 12421963

SEQ ID NO: 33181 - protein, 257 aa, Arabidopsis thaliana; identical to SEQ ID NO: 29591
  peptide (1)..(257): Ceres Seq. ID no. 12421964

SEQ ID NO: 33182 - protein, 248 aa, Arabidopsis thaliana; identical to SEQ ID NO: 29592
  peptide (1)..(248): Ceres Seq. ID no. 12421965

SEQ ID NO: 33183 - DNA, 1150 bp, Arabidopsis thaliana; identical to SEQ ID NO: 29593
  misc_feature (1)..(1150): Ceres Seq. ID no. 12439663
  misc_feature (1)..(1150): Ortholog of  Ceres SEQ ID NO 15170458 as cited in SEQ ID NO 52842
  misc_feature (1)..(1150): Ortholog of  Ceres SEQ ID NO 13597679 as cited in SEQ ID NO 65073

SEQ ID NO: 33184 - protein, 269 aa, Arabidopsis thaliana; identical to SEQ ID NO: 29594
  peptide (1)..(269): Ceres Seq. ID no. 12439664

SEQ ID NO: 33185 - protein, 252 aa, Arabidopsis thaliana; identical to SEQ ID NO: 29595
  peptide (1)..(252): Ceres Seq. ID no. 12439665

SEQ ID NO: 33186 - protein, 231 aa, Arabidopsis thaliana; identical to SEQ ID NO: 29596
  peptide (1)..(231): Ceres Seq. ID no. 12439666

SEQ ID NO: 33187 - DNA, 1528 bp, Arabidopsis thaliana; identical to SEQ ID NO: 29597
  misc_feature (1)..(1528): Ceres Seq. ID no. 13490257
  misc_feature (1)..(1528): Ortholog of  Ceres SEQ ID NO 15171275 as cited in SEQ ID NO 51428
  misc_feature (1)..(1528): Ortholog of  Ceres SEQ ID NO 14307678 as cited in SEQ ID NO 59456
  misc_feature (1)..(1528): Ortholog of  Ceres SEQ ID NO 13586716 as cited in SEQ ID NO 0

SEQ ID NO: 33188 - protein, 423 aa, Arabidopsis thaliana; identical to SEQ ID NO: 29598
  peptide (1)..(423): Ceres Seq. ID no. 13490258

SEQ ID NO: 33189 - protein, 391 aa, Arabidopsis thaliana; identical to SEQ ID NO: 29599
  peptide (1)..(391): Ceres Seq. ID no. 13490259

SEQ ID NO: 33190 - protein, 254 aa, Arabidopsis thaliana; identical to SEQ ID NO: 29600
  peptide (1)..(254): Ceres Seq. ID no. 13490260

SEQ ID NO: 33191 - DNA, 1355 bp, Arabidopsis thaliana; identical to SEQ ID NO: 29601
  misc_feature (1)..(1355): Ceres Seq. ID no. 13489420
  misc_feature (1)..(1355): Ortholog of  Ceres SEQ ID NO 14312328 as cited in SEQ ID NO 59022

SEQ ID NO: 33192 - protein, 300 aa, Arabidopsis thaliana; identical to SEQ ID NO: 29602
  peptide (1)..(300): Ceres Seq. ID no. 13489421

SEQ ID NO: 33193 - protein, 247 aa, Arabidopsis thaliana; identical to SEQ ID NO: 29603
  peptide (1)..(247): Ceres Seq. ID no. 13489422

SEQ ID NO: 33194 - protein, 165 aa, Arabidopsis thaliana; identical to SEQ ID NO: 29604
  peptide (1)..(165): Ceres Seq. ID no. 13489423

SEQ ID NO: 33195 - DNA, 675 bp, Arabidopsis thaliana; identical to SEQ ID NO: 29605
  misc_feature (1)..(675): Ceres Seq. ID no. 12738445
  misc_feature (1)..(675): Ortholog of  Ceres SEQ ID NO 13587131 as cited in SEQ ID NO 331
  misc_feature (1)..(675): Ortholog of  Ceres SEQ ID NO 13661176 as cited in SEQ ID NO 61114

SEQ ID NO: 33196 - protein, 164 aa, Arabidopsis thaliana; identical to SEQ ID NO: 29606
  peptide (1)..(164): Ceres Seq. ID no. 12738446

SEQ ID NO: 33197 - protein, 109 aa, Arabidopsis thaliana; identical to SEQ ID NO: 29607
  peptide (1)..(109): Ceres Seq. ID no. 12738447

SEQ ID NO: 33198 - DNA, 1217 bp, Arabidopsis thaliana; identical to SEQ ID NO: 29608
  misc_feature (1)..(1217): Ceres Seq. ID no. 13489591
  misc_feature (1)..(1217): Ortholog of  Ceres SEQ ID NO 15180047 as cited in SEQ ID NO 0

SEQ ID NO: 33199 - protein, 316 aa, Arabidopsis thaliana; identical to SEQ ID NO: 29609
  peptide (1)..(316): Ceres Seq. ID no. 13489592

SEQ ID NO: 33200 - protein, 303 aa, Arabidopsis thaliana; identical to SEQ ID NO: 29610
  peptide (1)..(303): Ceres Seq. ID no. 13489593

SEQ ID NO: 33201 - protein, 229 aa, Arabidopsis thaliana; identical to SEQ ID NO: 29611
  peptide (1)..(229): Ceres Seq. ID no. 13489594

SEQ ID NO: 33202 - DNA, 1535 bp, Arabidopsis thaliana; identical to SEQ ID NO: 29612
  misc_feature (1)..(1535): Ceres Seq. ID no. 13490268
  misc_feature (1)..(1535): Ortholog of  Ceres SEQ ID NO 14306538 as cited in SEQ ID NO 53117

SEQ ID NO: 33203 - protein, 466 aa, Arabidopsis thaliana; identical to SEQ ID NO: 29613
  peptide (1)..(466): Ceres Seq. ID no. 13490269

SEQ ID NO: 33204 - protein, 445 aa, Arabidopsis thaliana; identical to SEQ ID NO: 29614
  peptide (1)..(445): Ceres Seq. ID no. 13490270

SEQ ID NO: 33205 - protein, 407 aa, Arabidopsis thaliana; identical to SEQ ID NO: 29615
  peptide (1)..(407): Ceres Seq. ID no. 13490271

SEQ ID NO: 33206 - DNA, 1032 bp, Arabidopsis thaliana; identical to SEQ ID NO: 29616
  misc_feature (1)..(1032): Ceres Seq. ID no. 13490453
  misc_feature (1)..(1032): Ortholog of  Ceres SEQ ID NO 13594700 as cited in SEQ ID NO 51982
  misc_feature (1)..(1032): Ortholog of  Ceres SEQ ID NO 14309538 as cited in SEQ ID NO 52606

SEQ ID NO: 33207 - protein, 198 aa, Arabidopsis thaliana; identical to SEQ ID NO: 29617
  peptide (1)..(198): Ceres Seq. ID no. 13490454

SEQ ID NO: 33208 - protein, 167 aa, Arabidopsis thaliana; identical to SEQ ID NO: 29618
  peptide (1)..(167): Ceres Seq. ID no. 13490455

SEQ ID NO: 33209 - DNA, 1281 bp, Arabidopsis thaliana; identical to SEQ ID NO: 29619
  misc_feature (1)..(1281): Ceres Seq. ID no. 13487403
  misc_feature (1)..(1281): Ortholog of  Ceres SEQ ID NO 15177289 as cited in SEQ ID NO 59364

SEQ ID NO: 33210 - protein, 225 aa, Arabidopsis thaliana; identical to SEQ ID NO: 29620
  peptide (1)..(225): Ceres Seq. ID no. 13487404

SEQ ID NO: 33211 - protein, 114 aa, Arabidopsis thaliana; identical to SEQ ID NO: 29621
  peptide (1)..(114): Ceres Seq. ID no. 13487405

SEQ ID NO: 33212 - DNA, 1635 bp, Arabidopsis thaliana; identical to SEQ ID NO: 29622
  misc_feature (1)..(1635): Ceres Seq. ID no. 13497565
  misc_feature (1)..(1635): Ortholog of  Ceres SEQ ID NO 14311136 as cited in SEQ ID NO 56694

SEQ ID NO: 33213 - protein, 369 aa, Arabidopsis thaliana; identical to SEQ ID NO: 29623
  peptide (1)..(369): Ceres Seq. ID no. 13497566

SEQ ID NO: 33214 - protein, 365 aa, Arabidopsis thaliana; identical to SEQ ID NO: 29624
  peptide (1)..(365): Ceres Seq. ID no. 13497567

SEQ ID NO: 33215 - protein, 355 aa, Arabidopsis thaliana; identical to SEQ ID NO: 29625
  peptide (1)..(355): Ceres Seq. ID no. 13497568

SEQ ID NO: 33216 - DNA, 1518 bp, Arabidopsis thaliana; identical to SEQ ID NO: 29022
  misc_feature (1)..(1518): Ceres Seq. ID no. 12371601
  misc_feature (1)..(1518): Ortholog of  Ceres SEQ ID NO 12625948 as cited in SEQ ID NO 64717

SEQ ID NO: 33217 - protein, 454 aa, Arabidopsis thaliana; identical to SEQ ID NO: 29023
  peptide (1)..(454): Ceres Seq. ID no. 12371602

SEQ ID NO: 33218 - protein, 440 aa, Arabidopsis thaliana; identical to SEQ ID NO: 29024
  peptide (1)..(440): Ceres Seq. ID no. 12371603

SEQ ID NO: 33219 - protein, 330 aa, Arabidopsis thaliana; identical to SEQ ID NO: 29025
  peptide (1)..(330): Ceres Seq. ID no. 12371604

SEQ ID NO: 33220 - DNA, 557 bp, Arabidopsis thaliana; identical to SEQ ID NO: 29630
  misc_feature (1)..(557): Ceres Seq. ID no. 12332139
  misc_feature (1)..(557): Ortholog of  Ceres SEQ ID NO 12583650 as cited in SEQ ID NO 57575

SEQ ID NO: 33221 - protein, 103 aa, Arabidopsis thaliana; identical to SEQ ID NO: 29631
  peptide (1)..(103): Ceres Seq. ID no. 12332140

SEQ ID NO: 33222 - protein, 75 aa, Arabidopsis thaliana; identical to SEQ ID NO: 29632
  peptide (1)..(75): Ceres Seq. ID no. 12332141

SEQ ID NO: 33223 - DNA, 2689 bp, Arabidopsis thaliana; identical to SEQ ID NO: 29633
  misc_feature (1)..(2689): Ceres Seq. ID no. 13490032
  misc_feature (1)..(2689): Ortholog of  Ceres SEQ ID NO 12609770 as cited in SEQ ID NO 51477
  misc_feature (1)..(2689): Ortholog of  Ceres SEQ ID NO 15177764 as cited in SEQ ID NO 57561

SEQ ID NO: 33224 - protein, 133 aa, Arabidopsis thaliana; identical to SEQ ID NO: 29634
  peptide (1)..(133): Ceres Seq. ID no. 13490033

SEQ ID NO: 33225 - protein, 94 aa, Arabidopsis thaliana; identical to SEQ ID NO: 29635
  peptide (1)..(94): Ceres Seq. ID no. 13490034

SEQ ID NO: 33226 - protein, 76 aa, Arabidopsis thaliana; identical to SEQ ID NO: 29636
  peptide (1)..(76): Ceres Seq. ID no. 13490035

SEQ ID NO: 33227 - DNA, 344 bp, Arabidopsis thaliana; identical to SEQ ID NO: 29637
  misc_feature (1)..(344): Ceres Seq. ID no. 12422844
  misc_feature (1)..(344): Ortholog of  Ceres SEQ ID NO 13639704 as cited in SEQ ID NO 51325
  misc_feature (1)..(344): Ortholog of  Ceres SEQ ID NO 13599646 as cited in SEQ ID NO 0

SEQ ID NO: 33228 - protein, 67 aa, Arabidopsis thaliana; identical to SEQ ID NO: 29638
  peptide (1)..(67): Ceres Seq. ID no. 12422845

SEQ ID NO: 33229 - protein, 58 aa, Arabidopsis thaliana; identical to SEQ ID NO: 29639
  peptide (1)..(58): Ceres Seq. ID no. 12422846

SEQ ID NO: 33230 - DNA, 539 bp, Arabidopsis thaliana; identical to SEQ ID NO: 29640
  misc_feature (1)..(539): Ceres Seq. ID no. 12561397
  misc_feature (1)..(539): Ortholog of  Ceres SEQ ID NO 15177246 as cited in SEQ ID NO 57731

SEQ ID NO: 33231 - protein, 95 aa, Arabidopsis thaliana; identical to SEQ ID NO: 29641
  peptide (1)..(95): Ceres Seq. ID no. 12561398

SEQ ID NO: 33232 - protein, 72 aa, Arabidopsis thaliana; identical to SEQ ID NO: 29642
  peptide (1)..(72): Ceres Seq. ID no. 12561399

SEQ ID NO: 33233 - DNA, 1058 bp, Arabidopsis thaliana; identical to SEQ ID NO: 29643
  misc_feature (1)..(1058): Ceres Seq. ID no. 12333067
  misc_feature (1)..(1058): Ortholog of  Ceres SEQ ID NO 15169809 as cited in SEQ ID NO 52839
  misc_feature (1)..(1058): Ortholog of  Ceres SEQ ID NO 15224302 as cited in SEQ ID NO 53942

SEQ ID NO: 33234 - protein, 230 aa, Arabidopsis thaliana; identical to SEQ ID NO: 29644
  peptide (1)..(230): Ceres Seq. ID no. 12333068

SEQ ID NO: 33235 - DNA, 638 bp, Arabidopsis thaliana; identical to SEQ ID NO: 29645
  misc_feature (1)..(638): Ceres Seq. ID no. 13489850
  misc_feature (1)..(638): Ortholog of  Ceres SEQ ID NO 13504026 as cited in SEQ ID NO 58279
  misc_feature (1)..(638): Ortholog of  Ceres SEQ ID NO 15226827 as cited in SEQ ID NO 69141

SEQ ID NO: 33236 - protein, 122 aa, Arabidopsis thaliana; identical to SEQ ID NO: 29646
  peptide (1)..(122): Ceres Seq. ID no. 13489851

SEQ ID NO: 33237 - protein, 65 aa, Arabidopsis thaliana; identical to SEQ ID NO: 29647
  peptide (1)..(65): Ceres Seq. ID no. 13489852

SEQ ID NO: 33238 - DNA, 732 bp, Arabidopsis thaliana; identical to SEQ ID NO: 29648
  misc_feature (1)..(732): Ceres Seq. ID no. 12476429
  misc_feature (1)..(732): Ortholog of  Ceres SEQ ID NO 13600689 as cited in SEQ ID NO 0
  misc_feature (1)..(732): Ortholog of  Ceres SEQ ID NO 15178120 as cited in SEQ ID NO 0

SEQ ID NO: 33239 - protein, 122 aa, Arabidopsis thaliana; identical to SEQ ID NO: 29649
  peptide (1)..(122): Ceres Seq. ID no. 12476430

SEQ ID NO: 33240 - protein, 107 aa, Arabidopsis thaliana; identical to SEQ ID NO: 29650
  peptide (1)..(107): Ceres Seq. ID no. 12476431

SEQ ID NO: 33241 - DNA, 537 bp, Arabidopsis thaliana; identical to SEQ ID NO: 29651
  misc_feature (1)..(537): Ceres Seq. ID no. 13491058
  misc_feature (1)..(537): Ortholog of  Ceres SEQ ID NO 15179080 as cited in SEQ ID NO 0

SEQ ID NO: 33242 - protein, 124 aa, Arabidopsis thaliana; identical to SEQ ID NO: 29652
  peptide (1)..(124): Ceres Seq. ID no. 13491059

SEQ ID NO: 33243 - protein, 102 aa, Arabidopsis thaliana; identical to SEQ ID NO: 29653
  peptide (1)..(102): Ceres Seq. ID no. 13491060

SEQ ID NO: 33244 - DNA, 857 bp, Arabidopsis thaliana; identical to SEQ ID NO: 29654
  misc_feature (1)..(857): Ceres Seq. ID no. 12332793
  misc_feature (1)..(857): Ortholog of  Ceres SEQ ID NO 13661928 as cited in SEQ ID NO 61155

SEQ ID NO: 33245 - protein, 113 aa, Arabidopsis thaliana; identical to SEQ ID NO: 29655
  peptide (1)..(113): Ceres Seq. ID no. 12332794

SEQ ID NO: 33246 - protein, 76 aa, Arabidopsis thaliana; identical to SEQ ID NO: 29656
  peptide (1)..(76): Ceres Seq. ID no. 12332795

SEQ ID NO: 33247 - protein, 74 aa, Arabidopsis thaliana; identical to SEQ ID NO: 29657
  peptide (1)..(74): Ceres Seq. ID no. 12332796

SEQ ID NO: 33248 - DNA, 1558 bp, Arabidopsis thaliana; identical to SEQ ID NO: 22226
  misc_feature (1)..(1558): Ceres Seq. ID no. 13487458
  misc_feature (1)..(1558): Ortholog of  Ceres SEQ ID NO 14302734 as cited in SEQ ID NO 66748

SEQ ID NO: 33249 - protein, 415 aa, Arabidopsis thaliana; identical to SEQ ID NO: 22227
  peptide (1)..(415): Ceres Seq. ID no. 13487459

SEQ ID NO: 33250 - protein, 379 aa, Arabidopsis thaliana; identical to SEQ ID NO: 22228
  peptide (1)..(379): Ceres Seq. ID no. 13487460

SEQ ID NO: 33251 - protein, 372 aa, Arabidopsis thaliana; identical to SEQ ID NO: 22229
  peptide (1)..(372): Ceres Seq. ID no. 13487461

SEQ ID NO: 33252 - DNA, 1004 bp, Arabidopsis thaliana; identical to SEQ ID NO: 29662
  misc_feature (1)..(1004): Ceres Seq. ID no. 12332763
  misc_feature (1)..(1004): Ortholog of  Ceres SEQ ID NO 12626061 as cited in SEQ ID NO 64594
  misc_feature (1)..(1004): Ortholog of  Ceres SEQ ID NO 15174020 as cited in SEQ ID NO 0
  misc_feature (1)..(1004): Ortholog of  Ceres SEQ ID NO 15179151 as cited in SEQ ID NO 0

SEQ ID NO: 33253 - protein, 237 aa, Arabidopsis thaliana; identical to SEQ ID NO: 29663
  peptide (1)..(237): Ceres Seq. ID no. 12332764

SEQ ID NO: 33254 - protein, 162 aa, Arabidopsis thaliana; identical to SEQ ID NO: 29664
  peptide (1)..(162): Ceres Seq. ID no. 12332765

SEQ ID NO: 33255 - protein, 149 aa, Arabidopsis thaliana; identical to SEQ ID NO: 29665
  peptide (1)..(149): Ceres Seq. ID no. 12332766

SEQ ID NO: 33256 - DNA, 636 bp, Arabidopsis thaliana; identical to SEQ ID NO: 22820
  misc_feature (1)..(636): Ceres Seq. ID no. 12562389
  misc_feature (1)..(636): Ortholog of  Ceres SEQ ID NO 12556889 as cited in SEQ ID NO 125
  misc_feature (1)..(636): Ortholog of  Ceres SEQ ID NO 15172982 as cited in SEQ ID NO 51725
  misc_feature (1)..(636): Ortholog of  Ceres SEQ ID NO 13598188 as cited in SEQ ID NO 61498

SEQ ID NO: 33257 - protein, 140 aa, Arabidopsis thaliana; identical to SEQ ID NO: 22821
  peptide (1)..(140): Ceres Seq. ID no. 12562390

SEQ ID NO: 33258 - DNA, 851 bp, Arabidopsis thaliana; identical to SEQ ID NO: 29668
  misc_feature (1)..(851): Ceres Seq. ID no. 13496922
  misc_feature (1)..(851): Ortholog of  Ceres SEQ ID NO 13589868 as cited in SEQ ID NO 55521
  misc_feature (1)..(851): Ortholog of  Ceres SEQ ID NO 14312250 as cited in SEQ ID NO 59168
  misc_feature (1)..(851): Ortholog of  Ceres SEQ ID NO 12617659 as cited in SEQ ID NO 65286
  misc_feature (1)..(851): Ortholog of  Ceres SEQ ID NO 12780566 as cited in SEQ ID NO 65822
  misc_feature (1)..(851): Ortholog of  Ceres SEQ ID NO 15179979 as cited in SEQ ID NO 0

SEQ ID NO: 33259 - protein, 181 aa, Arabidopsis thaliana; identical to SEQ ID NO: 29669
  peptide (1)..(181): Ceres Seq. ID no. 13496923

SEQ ID NO: 33260 - protein, 164 aa, Arabidopsis thaliana; identical to SEQ ID NO: 29670
  peptide (1)..(164): Ceres Seq. ID no. 13496924

SEQ ID NO: 33261 - protein, 160 aa, Arabidopsis thaliana; identical to SEQ ID NO: 29671
  peptide (1)..(160): Ceres Seq. ID no. 13496925

SEQ ID NO: 33262 - DNA, 2121 bp, Arabidopsis thaliana; identical to SEQ ID NO: 29672
  misc_feature (1)..(2121): Ceres Seq. ID no. 13493768
  misc_feature (1)..(2121): Ortholog of  Ceres SEQ ID NO 13582297 as cited in SEQ ID NO 56486
  misc_feature (1)..(2121): Ortholog of  Ceres SEQ ID NO 13586936 as cited in SEQ ID NO 0

SEQ ID NO: 33263 - protein, 631 aa, Arabidopsis thaliana; identical to SEQ ID NO: 29673
  peptide (1)..(631): Ceres Seq. ID no. 13493769

SEQ ID NO: 33264 - protein, 597 aa, Arabidopsis thaliana; identical to SEQ ID NO: 29674
  peptide (1)..(597): Ceres Seq. ID no. 13493770

SEQ ID NO: 33265 - protein, 578 aa, Arabidopsis thaliana; identical to SEQ ID NO: 29675
  peptide (1)..(578): Ceres Seq. ID no. 13493771

SEQ ID NO: 33266 - DNA, 853 bp, Arabidopsis thaliana; identical to SEQ ID NO: 29676
  misc_feature (1)..(853): Ceres Seq. ID no. 13490099
  misc_feature (1)..(853): Ortholog of  Ceres SEQ ID NO 14309686 as cited in SEQ ID NO 58523

SEQ ID NO: 33267 - protein, 146 aa, Arabidopsis thaliana; identical to SEQ ID NO: 29677
  peptide (1)..(146): Ceres Seq. ID no. 13490100

SEQ ID NO: 33268 - protein, 136 aa, Arabidopsis thaliana; identical to SEQ ID NO: 29678
  peptide (1)..(136): Ceres Seq. ID no. 13490101

SEQ ID NO: 33269 - protein, 75 aa, Arabidopsis thaliana; identical to SEQ ID NO: 29679
  peptide (1)..(75): Ceres Seq. ID no. 13490102
